United States Patent Application Publication US 2025/0084491 A1 - sequence listing, part 36

SEQ ID NO: 686825 - DNA, 75 bp, synthetic construct
  source 1..75: mol_type = other DNA
gtgataagaaagacgctgacagccgctttgattgcgctggggctgtgcgccggaaatgtgctggcagaagacaag

SEQ ID NO: 686826 - DNA, 75 bp, synthetic construct
  source 1..75: mol_type = other DNA
cggacttaacgtcgtggtactgggcggcggcgacaccgcgatggactgtgtgcgtaccgcactgcgccacggcgc

SEQ ID NO: 686827 - DNA, 75 bp, synthetic construct
  source 1..75: mol_type = other DNA
accggtgttcgccatatcaaggaagtgtttatccttatccccaagaaaacagtaagtccacgctggccgcgggga

SEQ ID NO: 686828 - DNA, 75 bp, synthetic construct
  source 1..75: mol_type = other DNA
gcggccctgtttggctcctacgatgcgcagaccggtgtacgccatatcaaggaagtttttatccttatccccaag

SEQ ID NO: 686829 - DNA, 75 bp, synthetic construct
  source 1..75: mol_type = other DNA
cccatagccgaagggtttatggcaaacataaatagttccttagatactattggttgcaccgatgtatggcctact

SEQ ID NO: 686830 - DNA, 75 bp, synthetic construct
  source 1..75: mol_type = other DNA
attaaaaaaacgaaggaagcagcaataagtaaagcctgttcgattgcgagagaaaaagtcagtcaactgaccgga

SEQ ID NO: 686831 - DNA, 75 bp, synthetic construct
  source 1..75: mol_type = other DNA
acggaagtcgttactgatatgaaagatgccgccaacgcgctgcgctggtgtgttaacgagatggagcgtcgttat

SEQ ID NO: 686832 - DNA, 75 bp, synthetic construct
  source 1..75: mol_type = other DNA
cggaaatgtgctggcagaagacaaggataaaatgtgtgacgggaattttgttaacccgatcagcgatatctgctg

SEQ ID NO: 686833 - DNA, 75 bp, synthetic construct
  source 1..75: mol_type = other DNA
cagggcatgatcatgaacagcatcggtgaaaacagggctgtctgctttgaatatccatccccgatcatccccaaa

SEQ ID NO: 686834 - DNA, 75 bp, synthetic construct
  source 1..75: mol_type = other DNA
tgctaaagcacaggttattgcagtaaaccatgcaggaatagaaaaaaccattgattttatgaactgccctgtttt

SEQ ID NO: 686835 - DNA, 75 bp, synthetic construct
  source 1..75: mol_type = other DNA
taataacatccgtgatattgatgtcgttattagctgtggggttatttgataaaatttccccaataaatcttgttg

SEQ ID NO: 686836 - DNA, 75 bp, synthetic construct
  source 1..75: mol_type = other DNA
cagcttaagccctgtattgccctactgccgatgaatccagcctaccccaccctctatccggaagatctgcagatt

SEQ ID NO: 686837 - DNA, 75 bp, synthetic construct
  source 1..75: mol_type = other DNA
gtgattcgatgcaggatatggggttgcactccggtgatctgatggtggtagataaagctgaaaaaccactgcagg

SEQ ID NO: 686838 - DNA, 75 bp, synthetic construct
  source 1..75: mol_type = other DNA
cagcttaagccccgaatcgccctgctgccgatgaatcccgcctaccccaccctctacccggaggaactacagata

SEQ ID NO: 686839 - DNA, 75 bp, synthetic construct
  source 1..75: mol_type = other DNA
aaccagtaggtgaatatcgcagtgatgcgctggcggctgaagagatactgacgctggcgaactggtgcctgttga

SEQ ID NO: 686840 - DNA, 75 bp, synthetic construct
  source 1..75: mol_type = other DNA
ctgaaccagaactatctaccgcaccacttttcaccgaacgttgcccagcaggttttccgtcaccggccgcggact

SEQ ID NO: 686841 - DNA, 75 bp, synthetic construct
  source 1..75: mol_type = other DNA
tgccgatgaatccagcctaccccaccctctatccggaagatctgcagatattcggcgtggtgatggcattcatac

SEQ ID NO: 686842 - DNA, 75 bp, synthetic construct
  source 1..75: mol_type = other DNA
cccgtgaggtgtttatcggcgaagtcagagggctgtggcagtacgccctcgactttgccacagaaagcgtcttta

SEQ ID NO: 686843 - DNA, 75 bp, synthetic construct
  source 1..75: mol_type = other DNA
ctcctaccagaatggtgagattaatgtgtcagttggtgatgtaaataaaaaaaggagcgtaaaaagatggcacct

SEQ ID NO: 686844 - DNA, 75 bp, synthetic construct
  source 1..75: mol_type = other DNA
gttttaagtctggatggagaatgcaggtatccacagaagagctttttgtgtcaataatgaagtggttgccattca

SEQ ID NO: 686845 - DNA, 75 bp, synthetic construct
  source 1..75: mol_type = other DNA
cggtgctggcccggttgcgcgagaagctgcctcagctgcaggttgagtacttcccggaaaagccgtccgaatacc

SEQ ID NO: 686846 - DNA, 75 bp, synthetic construct
  source 1..75: mol_type = other DNA
cccgtgaggtgtttatcggtgaggccaaggggctgtggcagtacgctctcgacttcgcaaccgaaagcgtcttta

SEQ ID NO: 686847 - DNA, 75 bp, synthetic construct
  source 1..75: mol_type = other DNA
ttcccggagaaaccggctgagtatcgcctgaatcatccggttggggcgctgctggtgagctatgccgggtcgcgc

SEQ ID NO: 686848 - DNA, 75 bp, synthetic construct
  source 1..75: mol_type = other DNA
cctggcaagccgaagagcagcaatccacttttgctccacagtctacataccagactgagcaaacttatcagcagc

SEQ ID NO: 686849 - DNA, 75 bp, synthetic construct
  source 1..75: mol_type = other DNA
atactgaaaatgccgttaccgggaagcgtagtggcatccgtaagtccggatgatctgctgaaaacattgccgaag

SEQ ID NO: 686850 - DNA, 75 bp, synthetic construct
  source 1..75: mol_type = other DNA
ctggcgtacgctccttcaagattgaagggcgttacaaagatatgagctacgtgaagaatatcaccgcccattatc

SEQ ID NO: 686851 - DNA, 75 bp, synthetic construct
  source 1..75: mol_type = other DNA
tcgaagctggggcagactatctattacgctcgtgatgtacaaattaacttgccgggggcgctgtttgtgccaaac

SEQ ID NO: 686852 - DNA, 75 bp, synthetic construct
  source 1..75: mol_type = other DNA
cggcctgccggtgggtgaagtattgaaagtggcgaaagatcatcttgatgttgccgtcaccgagccactggcaaa

SEQ ID NO: 686853 - DNA, 75 bp, synthetic construct
  source 1..75: mol_type = other DNA
aagagaagggcgaagtcccggtgatgatcaccaagcattgtctgcgctttgccttcaatctgtgcccgaaacagg

SEQ ID NO: 686854 - DNA, 75 bp, synthetic construct
  source 1..75: mol_type = other DNA
atggggattctggaacttgatattccgccgattgaactgcacgccagtacgcagtgcgatattcgcacagtagaa

SEQ ID NO: 686855 - DNA, 75 bp, synthetic construct
  source 1..75: mol_type = other DNA
ctcggtttgtttatgcagtttgaccgtctggaactgctggtgtttgttattccagtatggctggcgaatattctc

SEQ ID NO: 686856 - DNA, 75 bp, synthetic construct
  source 1..75: mol_type = other DNA
ccatcggtaaaaagcctgtttaacaccggcgtcatgctttatctgatagggcttggtgttttgctgttgttgggg

SEQ ID NO: 686857 - DNA, 75 bp, synthetic construct
  source 1..75: mol_type = other DNA
cccgtttccgtgacgcaaaaagactgggaaaaccgcggattcacgctgaaaacactgtcgctgaaaaatgctgat

SEQ ID NO: 686858 - DNA, 75 bp, synthetic construct
  source 1..75: mol_type = other DNA
gcgtttgttattccggtatggctggcgaatatcctcttctctgttatctggctgcgttacttccgccaggggccg

SEQ ID NO: 686859 - DNA, 75 bp, synthetic construct
  source 1..75: mol_type = other DNA
ttgcaatggcggctggactgggcgtatcgctggtgtgctttcttactccagatgccgcgtgaactgagtgcgccg

SEQ ID NO: 686860 - DNA, 75 bp, synthetic construct
  source 1..75: mol_type = other DNA
cattctgtatgaaaaatactggaaactgcacggtggcgttgaggcgatcagtaaccgcgctgatggcgtagggga

SEQ ID NO: 686861 - DNA, 75 bp, synthetic construct
  source 1..75: mol_type = other DNA
ttggacgccattattgaagaacgcggcgatctggcgcgagcttcatccggtcgaactgaacacttctttgtacct

SEQ ID NO: 686862 - DNA, 75 bp, synthetic construct
  source 1..75: mol_type = other DNA
acgagctggacggactggatttgtttaccggtttcactgtcacacacactgacagcagtgcctccgccgatgttt

SEQ ID NO: 686863 - DNA, 75 bp, synthetic construct
  source 1..75: mol_type = other DNA
ttttccagtctttctcgtgatggtcataccacattgattcatcctggttatgttgtatcggctaaacatagtggt

SEQ ID NO: 686864 - DNA, 75 bp, synthetic construct
  source 1..75: mol_type = other DNA
gttatgtggtacagattatgtcacagtaatccagaatcaggaaaaatcggttaatcaaaaacaaaatacagacta

SEQ ID NO: 686865 - DNA, 75 bp, synthetic construct
  source 1..75: mol_type = other DNA
agccggttgcaccacagccgcaatatcagcagccgcaacagccagttgcgccgcagccgcagtatcagcagccac

SEQ ID NO: 686866 - DNA, 75 bp, synthetic construct
  source 1..75: mol_type = other DNA
tttgattccggtgcctatatcgacctgattggcaagtatgttcatcatgataatgagtacaccgcaacctttgcc

SEQ ID NO: 686867 - DNA, 75 bp, synthetic construct
  source 1..75: mol_type = other DNA
taatcagacagataaatccatagtcacactttcgttatctcctctgaaagcagaagaaataaatgtggttgttaa

SEQ ID NO: 686868 - DNA, 75 bp, synthetic construct
  source 1..75: mol_type = other DNA
aagatctttctgcctttggtcggggctaccgtattcgtgaagatcgctttagctactctttcaacccaacacttt

SEQ ID NO: 686869 - DNA, 75 bp, synthetic construct
  source 1..75: mol_type = other DNA
ggcaggaacaactcattctgacgttaaccagcgaagagggcgtcagcatcactcataccctggatgggcaattcg

SEQ ID NO: 686870 - DNA, 75 bp, synthetic construct
  source 1..75: mol_type = other DNA
caaaacctccagcgaacgtcgggtggcggtagacattgaactgggcggctggcaggaacaactgattctgactct

SEQ ID NO: 686871 - DNA, 75 bp, synthetic construct
  source 1..75: mol_type = other DNA
agatagccactttatctataaataatacagattcctatatttaccatggcaatatcacgggcaatacaaaaatta

SEQ ID NO: 686872 - DNA, 75 bp, synthetic construct
  source 1..75: mol_type = other DNA
tgggcgctgggtgtggacgttaactacgtgaagcagcgtgactgggacaacatgatgcgcttcaccgattattcc

SEQ ID NO: 686873 - DNA, 75 bp, synthetic construct
  source 1..75: mol_type = other DNA
gctttatcgcccgctagatgccagctgggcgctgggtgtggacgttaactacgtgaagcagcgtgactgggacaa

SEQ ID NO: 686874 - DNA, 75 bp, synthetic construct
  source 1..75: mol_type = other DNA
aacgcggtcaacccagcaaccgtcggttgaccgaatctctcaaactacgcgtactcacgctaatacgtgaaaact

SEQ ID NO: 686875 - DNA, 75 bp, synthetic construct
  source 1..75: mol_type = other DNA
ttctcggcgtagatgctatcgatctggagcgcggcgtcagcacgcacaatgaagatgaagcacgtttaaatcggc

SEQ ID NO: 686876 - DNA, 75 bp, synthetic construct
  source 1..75: mol_type = other DNA
tttattgtggggtagcgactggccacatactcgatacgaaaatgtcgtcaattatcaaaaaacgttcgagttact

SEQ ID NO: 686877 - DNA, 75 bp, synthetic construct
  source 1..75: mol_type = other DNA
taccggacgacggcggtctggtgcttggcggtctaccaaaagtgcctcgttccattaactgggttcgcgtcgccc

SEQ ID NO: 686878 - DNA, 75 bp, synthetic construct
  source 1..75: mol_type = other DNA
tgttgcaggccagtaacgtgcgctggcgcggaatgaattttacagatgttgccacgcaaatgaccaacaagtcgg

SEQ ID NO: 686879 - DNA, 75 bp, synthetic construct
  source 1..75: mol_type = other DNA
agaagcgaatgacaggcaccagcgagcgacgagaacagatcattcagcgtctgcgacagcaagggagtgtgcagg

SEQ ID NO: 686880 - DNA, 75 bp, synthetic construct
  source 1..75: mol_type = other DNA
tatggcgtatctactgtgacgatccgcaacgatctggcgtttctggaaaagcaggggatcgctgtgcgtgcctat

SEQ ID NO: 686881 - DNA, 75 bp, synthetic construct
  source 1..75: mol_type = other DNA
aacatatctttttcgtaatcagattagaactggtaaaccagacctacagcaacgatgtcatcagtgcttacaccg

SEQ ID NO: 686882 - DNA, 75 bp, synthetic construct
  source 1..75: mol_type = other DNA
gttggagaagcgatttcgggattttctactgtacattgctgaatcaggattaaaagaagttatcaccttccctga

SEQ ID NO: 686883 - DNA, 75 bp, synthetic construct
  source 1..75: mol_type = other DNA
aatattttgaccataacgtgctgcgcctccctggagagaaacgcaaggaatatcacgcgcaggtcgacaacctcg

SEQ ID NO: 686884 - DNA, 75 bp, synthetic construct
  source 1..75: mol_type = other DNA
acgcattggggatcattgcggtgatgacgcttttcaactccttaagcaaccatgcggtagggcggctggaagtga

SEQ ID NO: 686885 - DNA, 75 bp, synthetic construct
  source 1..75: mol_type = other DNA
cgtaaaaatagtgcgaccgtaaccactgaaatccacgcaacaccagacggtcacccggtaaaacaaaccggcaaa

SEQ ID NO: 686886 - DNA, 75 bp, synthetic construct
  source 1..75: mol_type = other DNA
agcttgttacgtgatatttgtgcatattctgtaatcgctgcaattatggtgttcagttgttttatatttgcgtac

SEQ ID NO: 686887 - DNA, 75 bp, synthetic construct
  source 1..75: mol_type = other DNA
cgcgcatggaagggatgaacttccagcagatgattcaacaagcggtagaacgtaatggtggtgatgtgaaggccg

SEQ ID NO: 686888 - DNA, 75 bp, synthetic construct
  source 1..75: mol_type = other DNA
gggggcgctggtaagtgaccacccgcttaatctgggcggggtgggcgtgacgggcggaatggctgccaaccagct

SEQ ID NO: 686889 - DNA, 75 bp, synthetic construct
  source 1..75: mol_type = other DNA
atgcaaaccgaacgtatgactatggcccaggcgctggtcagatttcttaaccaacaatatgttagcgttgatggt

SEQ ID NO: 686890 - DNA, 75 bp, synthetic construct
  source 1..75: mol_type = other DNA
ggatgtgcgaagttgcggaacggatcatcgtggtcaccgattccagtaaattcaatcgttccagtttacataaga

SEQ ID NO: 686891 - DNA, 75 bp, synthetic construct
  source 1..75: mol_type = other DNA
ttcgggtcataccgatgatttcccctacgccagcggtgagaaaggatatagcaactgggagctttctgccgatcg

SEQ ID NO: 686892 - DNA, 75 bp, synthetic construct
  source 1..75: mol_type = other DNA
gctaggcaagttggtattatcagagctattgttggccacagaacatataccattcatcatatcaattcatctgat

SEQ ID NO: 686893 - DNA, 75 bp, synthetic construct
  source 1..75: mol_type = other DNA
ttttcaacgaagcatttggtctgatttttcgtcgttcggaagagttcctgcaccttattcctaccagtgaaggtc

SEQ ID NO: 686894 - DNA, 75 bp, synthetic construct
  source 1..75: mol_type = other DNA
tcgcctgaacgactgggctgagcgcaataaagactcccgcaatggtaaagatgtgaagaagttgctggagaagat

SEQ ID NO: 686895 - DNA, 75 bp, synthetic construct
  source 1..75: mol_type = other DNA
tcactggctggtgatttctccggtgctgacatagatgccgacgcattccgccacaactggcaaggacaggcacat

SEQ ID NO: 686896 - DNA, 75 bp, synthetic construct
  source 1..75: mol_type = other DNA
cgctggcgtgggatgaattttgccaatgtcgccacgcaaatgaccaacaaatcgggcttgctggaaattacccaa

SEQ ID NO: 686897 - DNA, 75 bp, synthetic construct
  source 1..75: mol_type = other DNA
atgagtaactacctagaatttaagaaaaaaattggtgaatatgcaaatgttactcggtggggtttcccctgtacc

SEQ ID NO: 686898 - DNA, 75 bp, synthetic construct
  source 1..75: mol_type = other DNA
tactcggtggggtttcccctgtgccgagcgtgaaatcactttgatacaaaatgacattaactccgcgattcaaag

SEQ ID NO: 686899 - DNA, 75 bp, synthetic construct
  source 1..75: mol_type = other DNA
ccgtcttaacgactgggccgagcggaataaagattcccgcaatggcaaagatgtgaagaagttgctggagaagat

SEQ ID NO: 686900 - DNA, 75 bp, synthetic construct
  source 1..75: mol_type = other DNA
acccggtttgcgtaacaaacaatgttgccagtcgtctgagcgaggacgaacgacttgagattgtagatgctgctg

SEQ ID NO: 686901 - DNA, 75 bp, synthetic construct
  source 1..75: mol_type = other DNA
tcgatcttctggttttctttgctcaacatagtggtgaagtacttagtagagatgaacttatcgataatgtgtgga

SEQ ID NO: 686902 - DNA, 75 bp, synthetic construct
  source 1..75: mol_type = other DNA
agcagttccggtaaaacattatctattgcgtttgttaatcagggtaatgactccaacttactgatagtgttttat

SEQ ID NO: 686903 - DNA, 75 bp, synthetic construct
  source 1..75: mol_type = other DNA
aatacagaaattgataacattggtacaatgccgggtgtgaataacctgtccattttttatcaaataaaaacagtc

SEQ ID NO: 686904 - DNA, 75 bp, synthetic construct
  source 1..75: mol_type = other DNA
cggaaaaacgtgcggcagaagaactgaacaaacgtgatgcttatgacgtattaatcgtcggttccggcccggcag

SEQ ID NO: 686905 - DNA, 75 bp, synthetic construct
  source 1..75: mol_type = other DNA
ctgattgataagagcgatttcacgaaagcatctggcgttgctaccgatgatatcgttgctgtaggtatggtttac

SEQ ID NO: 686906 - DNA, 75 bp, synthetic construct
  source 1..75: mol_type = other DNA
gataatgtcattttgccagcagatagttcacctgaagagatcggcgctggtctcaggctggcgctgagtcgatgt

SEQ ID NO: 686907 - DNA, 75 bp, synthetic construct
  source 1..75: mol_type = other DNA
gcgtcagcaatttccggtgcgtaaggcaaaaagtgacaggcaaaggggtgaggtagttggtgttgaagaacaggg

SEQ ID NO: 686908 - DNA, 75 bp, synthetic construct
  source 1..75: mol_type = other DNA
aggccattcaggccgcattgcccggtgttcttaatatggcgctggcaggtggcgtcgaactcggcgagacggctg

SEQ ID NO: 686909 - DNA, 75 bp, synthetic construct
  source 1..75: mol_type = other DNA
atggagtccagcaaggaaacgctggataaatgtaccagtgctggcgaggtattcggtaacgttcttggtggtgcg

SEQ ID NO: 686910 - DNA, 75 bp, synthetic construct
  source 1..75: mol_type = other DNA
gaaaaaataccgggtgctgctgatgcgtgttgaaacagcagacccggaatggcctacgcctccggcgactcaggc

SEQ ID NO: 686911 - DNA, 75 bp, synthetic construct
  source 1..75: mol_type = other DNA
ggagaacgcggtgctgaacgagcgcgtgtcggacttgagcacgcaggtgctgagtttaagcgagcagctgcgccg

SEQ ID NO: 686912 - DNA, 75 bp, synthetic construct
  source 1..75: mol_type = other DNA
ctgatcaccaacccaggttccaaccaggggccacgttttgcaggctccccgctgggccacgagttcacctcgctg

SEQ ID NO: 686913 - DNA, 75 bp, synthetic construct
  source 1..75: mol_type = other DNA
aggggccgcgctttgcaggttccccgctgggtcacgagtttacctcgctggtcctggcgctgttgtggaccggcg

SEQ ID NO: 686914 - DNA, 75 bp, synthetic construct
  source 1..75: mol_type = other DNA
gacggtgattttgaatttgaaacttattattcgctctcctgccataactgcccggacgtggtgcaggcgctgaac

SEQ ID NO: 686915 - DNA, 75 bp, synthetic construct
  source 1..75: mol_type = other DNA
gctggaaggcgcagtcgaacgtaaccgcatgggtgagataatcatcgatgcgaaatgcgaaactaacgtcaaagg

SEQ ID NO: 686916 - DNA, 75 bp, synthetic construct
  source 1..75: mol_type = other DNA
aaagttgttaaggctggttcctttgcaaaatttacaattttgcgtaaaacatatgaagatcctgtcgatgtagat

SEQ ID NO: 686917 - DNA, 75 bp, synthetic construct
  source 1..75: mol_type = other DNA
gtgactgacgttttactttgtgttggcaatagcatgatgggcgatgatggcgcgggcccgttgctggcagaaaag

SEQ ID NO: 686918 - DNA, 75 bp, synthetic construct
  source 1..75: mol_type = other DNA
gggtggtgattgacggcggtagtgcaccggaaaacgacatcgtcgccatccgtgaactgcgccctacgcggttac

SEQ ID NO: 686919 - DNA, 75 bp, synthetic construct
  source 1..75: mol_type = other DNA
gctggaaggcgcagtagaacgtaaccgcatgggtgaaatcatcatcgatgcgaaatgcgaaaccaacgttaaagg

SEQ ID NO: 686920 - DNA, 75 bp, synthetic construct
  source 1..75: mol_type = other DNA
ggccagaaactggctggtgcgctgaaagttcacgttgatgaatacgatgttgatgtaatcgacagccagagcgcg

SEQ ID NO: 686921 - DNA, 75 bp, synthetic construct
  source 1..75: mol_type = other DNA
gtgcagcggcggccatttattccgcacgtaaaggcattcgtaccggtctgatgggcgaacgttttggcggtcaga

SEQ ID NO: 686922 - DNA, 75 bp, synthetic construct
  source 1..75: mol_type = other DNA
aggcgcactgaaagttcacgttgatgaatacgacgttgatgtgatcgacagccagagcgccagcaaactgatccc

SEQ ID NO: 686923 - DNA, 75 bp, synthetic construct
  source 1..75: mol_type = other DNA
cgaaatggcgtaacatgaacgttccgggtgaagaacagtatcgcactaaaggtgtaacttactgcccgcactgtg

SEQ ID NO: 686924 - DNA, 75 bp, synthetic construct
  source 1..75: mol_type = other DNA
ctacatttctgtaccgaagaccgaagggcagaaactggcaggtgcgctgaaagttcacgttgatgaatacgacgt

SEQ ID NO: 686925 - DNA, 75 bp, synthetic construct
  source 1..75: mol_type = other DNA
aggtagcgacgagctgcgtgacaaagtcaacggcgcgttgaaaaccctgcgcgagaacggaacttacaacgaaat

SEQ ID NO: 686926 - DNA, 75 bp, synthetic construct
  source 1..75: mol_type = other DNA
gcatgagggacatttagaggctctttttgttgatgcgtcagctcgcggacttggcgtcgggaaacatctgatctc

SEQ ID NO: 686927 - DNA, 75 bp, synthetic construct
  source 1..75: mol_type = other DNA
tttagcagagactttccatggtatgataaagaaaaatccataaaatttagtaatgctttatgcttgctcaatact

SEQ ID NO: 686928 - DNA, 75 bp, synthetic construct
  source 1..75: mol_type = other DNA
gcagcgcaaacttcgcagcagaaggaatggagtacaatgctgttaagtatgctgcatgatattcatcaggaaaac

SEQ ID NO: 686929 - DNA, 75 bp, synthetic construct
  source 1..75: mol_type = other DNA
tcgacattaaccatgtgccgatgctggccaacgcattcgataaagcccgggcagcgcaaacttcgcagcagaagg

SEQ ID NO: 686930 - DNA, 75 bp, synthetic construct
  source 1..75: mol_type = other DNA
gtgccgaaatatggtgagatcgtcatcgacattaaccatgtgccgatgctggccaacgcattcgataaagcccgg

SEQ ID NO: 686931 - DNA, 75 bp, synthetic construct
  source 1..75: mol_type = other DNA
ttgttcttgttggatgtgtgggcatcgacgctatcataatggtccccgcgtatcggaaattcgtgcaaaagcacg

SEQ ID NO: 686932 - DNA, 75 bp, synthetic construct
  source 1..75: mol_type = other DNA
tgcgccgtcagtcgcaatctttttacggcgatcaggctgaacaatcgctacaaaattaccacttcgatatgcttt

SEQ ID NO: 686933 - DNA, 75 bp, synthetic construct
  source 1..75: mol_type = other DNA
tgtataacggagccacaccaattagcttcactgcaacggttactgctgatgctgattcagacagcagtggcgatg

SEQ ID NO: 686934 - DNA, 75 bp, synthetic construct
  source 1..75: mol_type = other DNA
gtattaatgctaatcagaacagagtttataaccatgtgtcagaagaagatatgttagataaaatcaaagctatta

SEQ ID NO: 686935 - DNA, 75 bp, synthetic construct
  source 1..75: mol_type = other DNA
tttagcagagactttccatggtacgataaagagaaatctataagatttagtaatgctttatgcttgctcaatgct

SEQ ID NO: 686936 - DNA, 75 bp, synthetic construct
  source 1..75: mol_type = other DNA
gtgaccactctcgtatttgaaatggcggatattaataaactgatcgaagaaattcgcaccgcaaaaacgttttcg

SEQ ID NO: 686937 - DNA, 75 bp, synthetic construct
  source 1..75: mol_type = other DNA
acgccgtgatgcgggagctggatgcgccggataactggacgatgaacggcgagtacggcagcgagtttggcggct

SEQ ID NO: 686938 - DNA, 75 bp, synthetic construct
  source 1..75: mol_type = other DNA
agtactcacaagccgggcgcgtcctgccacagtccgtctggatttcagccagtcagggcagaaggccgtgatgtg

SEQ ID NO: 686939 - DNA, 75 bp, synthetic construct
  source 1..75: mol_type = other DNA
tgcctgggatgcggtgaagaagcagtgggtatttgttgctgtacttcatggttatgccggtgagaacgggaagac

SEQ ID NO: 686940 - DNA, 75 bp, synthetic construct
  source 1..75: mol_type = other DNA
tgcaggtaatgtgaatctgcagaatgcggcctggatgatgacgggaaactcatccgtgaagcatcttgagtcatc

SEQ ID NO: 686941 - DNA, 75 bp, synthetic construct
  source 1..75: mol_type = other DNA
tcagagaatgtgcgtctggaagggaattcccgcctgacctcttctgcacttactgtcagtgacggcgggcgttta

SEQ ID NO: 686942 - DNA, 75 bp, synthetic construct
  source 1..75: mol_type = other DNA
ccgtgggcggtgcatccggtagcagtacatttcgcgggaatgtgaatatgcgtcattctgccctgacggtccgcg

SEQ ID NO: 686943 - DNA, 75 bp, synthetic construct
  source 1..75: mol_type = other DNA
ggtagcggaaacggcgggcggcaggaaaaagtcgtccggcattcccggtgcggggatgctttcccgtcttcttct

SEQ ID NO: 686944 - DNA, 75 bp, synthetic construct
  source 1..75: mol_type = other DNA
ggtaagggaacactggtggtggccggcagtggtgaaaatcctggcaccctgaatacgggggacggaacagttatt

SEQ ID NO: 686945 - DNA, 75 bp, synthetic construct
  source 1..75: mol_type = other DNA
agcgtcacggatgccggaaccggcaagggggtataccagaaccgcagtcgttatccggtgttttatcgtatgggg

SEQ ID NO: 686946 - DNA, 75 bp, synthetic construct
  source 1..75: mol_type = other DNA
agcctgtccatgaaggacaaggactacaatccgctgattggccgtaccggtgtggatgtgggtaaatcgttctcc

SEQ ID NO: 686947 - DNA, 75 bp, synthetic construct
  source 1..75: mol_type = other DNA
attcccgcctgacgtcttctgcacttactgtcagtgacggcgggcgtttacatgtgaaggggggactggagacag

SEQ ID NO: 686948 - DNA, 75 bp, synthetic construct
  source 1..75: mol_type = other DNA
ggggcctatatcgacctgattggtaagtatgttcaccatgataatgagtatacggcgacctttgccggactcggc

SEQ ID NO: 686949 - DNA, 75 bp, synthetic construct
  source 1..75: mol_type = other DNA
ccatcattttgccgccgcttggcgtgttgctgggcaagggatttggttgggcgttcatcattaatattctgctga

SEQ ID NO: 686950 - DNA, 75 bp, synthetic construct
  source 1..75: mol_type = other DNA
caagcgcgaaaaatccgtggggcggctccgtcaaaataacagtatcaacggataagtattcctttaatgttgtag

SEQ ID NO: 686951 - DNA, 75 bp, synthetic construct
  source 1..75: mol_type = other DNA
aggatgggcaaatatccaaaacgctcaactagacagggctcagcgggcacaaatgcataatgataacgtagccct

SEQ ID NO: 686952 - DNA, 75 bp, synthetic construct
  source 1..75: mol_type = other DNA
cggcggagaccacgaccacagaacaaaccgcggctacgactacggtcgcgccggttgagtccaacgcggagcaga

SEQ ID NO: 686953 - DNA, 75 bp, synthetic construct
  source 1..75: mol_type = other DNA
cgggaacccgtattcccagctgcccgacgacgttcgcgacgaattccagctgagtattaacagcacgcgcgagca

SEQ ID NO: 686954 - DNA, 75 bp, synthetic construct
  source 1..75: mol_type = other DNA
gccaatccatttggcctgacggtggatgctgtgatggaggagtaccgccgctggcgtgatgagtcctggcgatat

SEQ ID NO: 686955 - DNA, 75 bp, synthetic construct
  source 1..75: mol_type = other DNA
taatcgttttattatgacgtggcaggaagagaagtctgactcaccgcacttgcagcaatttcgtgaatggttgct

SEQ ID NO: 686956 - DNA, 75 bp, synthetic construct
  source 1..75: mol_type = other DNA
tgtgccgtcagtgcatggaccgctgccgggcgggtgaaacgtggcccccggacctggctgagtttgttgcgctga

SEQ ID NO: 686957 - DNA, 75 bp, synthetic construct
  source 1..75: mol_type = other DNA
tgctgaatcactattgcttgctgtagagaaattagactatgataaatgtgtggaagcaaatacgcagataaaaac

SEQ ID NO: 686958 - DNA, 75 bp, synthetic construct
  source 1..75: mol_type = other DNA
ctttgcccgtggcacatggatgaaacctacgtgaaggtcaatggccgctgggcgtatctgtaccgggccgtcgac

SEQ ID NO: 686959 - DNA, 75 bp, synthetic construct
  source 1..75: mol_type = other DNA
gaatcagcctgttggttctgaataaacaagccgaacagaccattttgcatgaaaacgctgaaagccagaatgtgc

SEQ ID NO: 686960 - DNA, 75 bp, synthetic construct
  source 1..75: mol_type = other DNA
gggttatatcaatccggttagcggtatgagcggttacgacggaatcgtaaaacgcctgcagcaggcgatttctga

SEQ ID NO: 686961 - DNA, 75 bp, synthetic construct
  source 1..75: mol_type = other DNA
cgggtatttttttcggcgctgagcgaccggttcggtaccgggcgactgattgatacagcgtctggagaggtaatg

SEQ ID NO: 686962 - DNA, 75 bp, synthetic construct
  source 1..75: mol_type = other DNA
gctggagagggtggtattgatatacacgattatattcatatagcggtatattcttcaattattggcaaaggaaaa

SEQ ID NO: 686963 - DNA, 75 bp, synthetic construct
  source 1..75: mol_type = other DNA
tatctggcgttagcagtccgctggtcaataacggaccacgtttcgatttgctttcaatgctgattgccgccgtgc

SEQ ID NO: 686964 - DNA, 75 bp, synthetic construct
  source 1..75: mol_type = other DNA
aaattggatgtaatcataatggtgattttaatcttgcaaaaaaaatggttgaagaagccaaaaaagctggtgttg

SEQ ID NO: 686965 - DNA, 75 bp, synthetic construct
  source 1..75: mol_type = other DNA
ctttgtggtctgcatcgcttgttcgcgttttggttcggtgaagctcgggccagaacaatccaaaccggaattcag

SEQ ID NO: 686966 - DNA, 75 bp, synthetic construct
  source 1..75: mol_type = other DNA
tgatgttcttttccgtagccgaaccggtaacgcagtatatgcagccgccggaaggcgcgggtcagacgattgagg

SEQ ID NO: 686967 - DNA, 75 bp, synthetic construct
  source 1..75: mol_type = other DNA
tgtaatacagagtatccaacgccatttgaagatgtaaatctaaatacaatttctggattcaaaaaaatatttagt

SEQ ID NO: 686968 - DNA, 75 bp, synthetic construct
  source 1..75: mol_type = other DNA
aaatagtaaagtggttacagcttcagaaaggaagaataaaatcgtagcaagaaagtctattatagctaaaacaga

SEQ ID NO: 686969 - DNA, 75 bp, synthetic construct
  source 1..75: mol_type = other DNA
ttggtatgatatattggggaaaaaggcagaaaaagattttgaggaagatcaattgattaagtatagtggttttaa

SEQ ID NO: 686970 - DNA, 75 bp, synthetic construct
  source 1..75: mol_type = other DNA
tattgtttactaccctgctggcaggaattgcccttcctgcacaggctgaaaccggacacggtgcattttctgtgg

SEQ ID NO: 686971 - DNA, 75 bp, synthetic construct
  source 1..75: mol_type = other DNA
acggcgattttcttaatcgggagtacgatgctgtcattatgcgcgaaaatttttgcgcgccctgggcggaagtag

SEQ ID NO: 686972 - DNA, 75 bp, synthetic construct
  source 1..75: mol_type = other DNA
tcgggttatctgacacatcgcttaaccggcgaatttaaagataatatcgccaactattttggtcagtggccggtg

SEQ ID NO: 686973 - DNA, 75 bp, synthetic construct
  source 1..75: mol_type = other DNA
taatatccccgtcatatgctgtttgatgtgcaaatgcctggcaccgtcctcggacatatcacaccacaagccgca

SEQ ID NO: 686974 - DNA, 75 bp, synthetic construct
  source 1..75: mol_type = other DNA
gattgtcgataacgatattcgctacaaagcagacagtttcatctttaacgtcgcgggtgcgccggaagaggtgaa

SEQ ID NO: 686975 - DNA, 75 bp, synthetic construct
  source 1..75: mol_type = other DNA
cggatctcacgcctgaattgggcgcgctgaaaaatgaaagtctggatttcagccacacgcagcagttgccgggaa

SEQ ID NO: 686976 - DNA, 75 bp, synthetic construct
  source 1..75: mol_type = other DNA
aactctgggctccggaaactggcactctccaccgactggtgtgtctcgcaagggcagcttggcggtcagcaaatt

SEQ ID NO: 686977 - DNA, 75 bp, synthetic construct
  source 1..75: mol_type = other DNA
ggcggactctgaccgtgtccaggagataaccctgttctccggcccggtcatcgccggagaaacaccggtttttga

SEQ ID NO: 686978 - DNA, 75 bp, synthetic construct
  source 1..75: mol_type = other DNA
gaagaacaaaccatcgtgctgggtaatgaagtgaccaccaatacgctgcatttcgataacccaaccgatgccgat

SEQ ID NO: 686979 - DNA, 75 bp, synthetic construct
  source 1..75: mol_type = other DNA
ccgattacacaattgctggcatggtagcctcccagtgtggcattccgctgtttgccccgtttgaaggcaacgcct

SEQ ID NO: 686980 - DNA, 75 bp, synthetic construct
  source 1..75: mol_type = other DNA
gcatattgaatcgacgcaaaaaatgttgactgaaataaccaatgcactggatgaaagaatatcaggaatagataa

SEQ ID NO: 686981 - DNA, 75 bp, synthetic construct
  source 1..75: mol_type = other DNA
cacacacctgcccacaggaaacctgcgcagccattgagcgactgattgcaatactcaccaacccggacgaactga

SEQ ID NO: 686982 - DNA, 75 bp, synthetic construct
  source 1..75: mol_type = other DNA
gagctgattgagacagcgaaagagacacacacctgcccacaggaaacctgcgcagccattgagcgactgattgca

SEQ ID NO: 686983 - DNA, 75 bp, synthetic construct
  source 1..75: mol_type = other DNA
ccggtgcgccagaagaggtgaaacagtttagtgggatttcccgtccggagtcgtggggccgctggtccaacgcgc

SEQ ID NO: 686984 - DNA, 75 bp, synthetic construct
  source 1..75: mol_type = other DNA
tgcgctgggctggatcctgcgccgtcgtcgtcatcatccgcaccattttggttacagcctgctggcgctcttact

SEQ ID NO: 686985 - DNA, 75 bp, synthetic construct
  source 1..75: mol_type = other DNA
ttatggaacaagcaaaaaaataaatgggccgttcaagtgcgcacagattttggccggttgcattttgggttctat

SEQ ID NO: 686986 - DNA, 75 bp, synthetic construct
  source 1..75: mol_type = other DNA
gcgtaaagaagccgacggcacttacaccgttggtataaccgaacatgcccaggagctgttaggcgatatggtgtt

SEQ ID NO: 686987 - DNA, 75 bp, synthetic construct
  source 1..75: mol_type = other DNA
acgtgcgtccggaatggctcagttcgggcataggctcaatgcaggacgaaggacgcaaggactccgctatcccac

SEQ ID NO: 686988 - DNA, 75 bp, synthetic construct
  source 1..75: mol_type = other DNA
cctacccagacgaagaggctgatattgatgatgtcgagataattggccgtctcttctggtactcggtgctgctgt

SEQ ID NO: 686989 - DNA, 75 bp, synthetic construct
  source 1..75: mol_type = other DNA
atcctgaacctgaactgcacagggtatcatccatcccgcctgaatctgagtggggaactgtcgacgcttgggaca

SEQ ID NO: 686990 - DNA, 75 bp, synthetic construct
  source 1..75: mol_type = other DNA
gctgctggaatttgcgccagaaatgaaagccgaccaggttctgcaggacaaactgcgcagcctgaaaaacgtcga

SEQ ID NO: 686991 - DNA, 75 bp, synthetic construct
  source 1..75: mol_type = other DNA
aagatcagtatcgcaccaaaggcgtgacctactgcccgcactgcgacggcccgctgtttaaaggcaaacgcgtag

SEQ ID NO: 686992 - DNA, 75 bp, synthetic construct
  source 1..75: mol_type = other DNA
aagtgttacgtgtcgtcggcatggcggcaacgatgcgcttaagcgatcgcggacctgatgatgccgtcaaccgtc

SEQ ID NO: 686993 - DNA, 75 bp, synthetic construct
  source 1..75: mol_type = other DNA
ctggcagaaaagaaacagctgactcgccgtattgaacaagcgtcggctcgtgaaattgaatggcaggaaaaagcg

SEQ ID NO: 686994 - DNA, 75 bp, synthetic construct
  source 1..75: mol_type = other DNA
aatacagcaaagaacacgaatggcttcgtaaagaagccgacggcacttataccgttggcatcaccgaacacgctc

SEQ ID NO: 686995 - DNA, 75 bp, synthetic construct
  source 1..75: mol_type = other DNA
ggtgaaatcgtggcggtaaacgacgcactgagcgattccccggaactggtgaacagcgaaccgtatgcaggtggc

SEQ ID NO: 686996 - DNA, 75 bp, synthetic construct
  source 1..75: mol_type = other DNA
cactgacgagcagaaagatcactatctgccgcgtctggcgcgtggtcaggaaatcccttgctttgcgctaaccag

SEQ ID NO: 686997 - DNA, 75 bp, synthetic construct
  source 1..75: mol_type = other DNA
ccgaacgccacccgttcacgtattggtcgcggtcagtacctgacgccaagcgagcataacccggttggtttactg

SEQ ID NO: 686998 - DNA, 75 bp, synthetic construct
  source 1..75: mol_type = other DNA
cactgacgagcagaaaaatcactatctgccgcgtctggcgcgtggtcaggagatcccttgctttgcactgaccag

SEQ ID NO: 686999 - DNA, 75 bp, synthetic construct
  source 1..75: mol_type = other DNA
tggtgacagcaaaacagaccatcagtgaactctatatgaaaaacctgcgcctcgagcgcgaactggcagaactcc

SEQ ID NO: 687000 - DNA, 75 bp, synthetic construct
  source 1..75: mol_type = other DNA
gcaggagtgctggaactggatgccgatctacaaaacccgccagacaaaaaagactttgccgatgttaatcgctac

SEQ ID NO: 687001 - DNA, 75 bp, synthetic construct
  source 1..75: mol_type = other DNA
cgcgtcagccgtgaagcgaatcttacaccgtgctcaacactgctgatgagtgcgactatcaccgaagccagccgt

SEQ ID NO: 687002 - DNA, 75 bp, synthetic construct
  source 1..75: mol_type = other DNA
cagctcctggggcttcgtgatttcgccagagcagatcctgcaaaccgcgaaagacattggtgagccttctgtcct

SEQ ID NO: 687003 - DNA, 75 bp, synthetic construct
  source 1..75: mol_type = other DNA
ggtgctgggaatgcgtctgacctggaacaaacgctacattacgctggcaccaattgcgaccgtgcttgggctggc

SEQ ID NO: 687004 - DNA, 75 bp, synthetic construct
  source 1..75: mol_type = other DNA
gcggcgtgaagtcggtggctctggcaaccggtgcgtatgctcacattcgtcgtcagttcaaaatctctatcggta

SEQ ID NO: 687005 - DNA, 75 bp, synthetic construct
  source 1..75: mol_type = other DNA
tatcagcacctgaaccgcctgagcgccaacctcgccttactttccgatgtgtcgatggcggtgctgggtggtagc

SEQ ID NO: 687006 - DNA, 75 bp, synthetic construct
  source 1..75: mol_type = other DNA
gaaaaactggctgaacgccatcatattcatctctctgttgaaaccgtccgtaactggatgacagccgacggtctc

SEQ ID NO: 687007 - DNA, 75 bp, synthetic construct
  source 1..75: mol_type = other DNA
tgatgccaccggccgcctgatgcatttgcggttcagcgagtcagaaacagcctttgactacatgctggcaacccg

SEQ ID NO: 687008 - DNA, 75 bp, synthetic construct
  source 1..75: mol_type = other DNA
aagtcacgggtttatcaacctcgacatcggcgtgattgcctgggtgaacttatccagatcgacggctcccaccat

SEQ ID NO: 687009 - DNA, 75 bp, synthetic construct
  source 1..75: mol_type = other DNA
ctgtatcagggcgtggtcgatccgctgggcggcgttaaaagcctgtggccgctgttcggtatctccaaccagatg

SEQ ID NO: 687010 - DNA, 75 bp, synthetic construct
  source 1..75: mol_type = other DNA
gtggcgattatggcgctggttgctgcgtccatcatcgaaccgggtctttacttcgcgatgaacaccccgccagcg

SEQ ID NO: 687011 - DNA, 75 bp, synthetic construct
  source 1..75: mol_type = other DNA
tcagcgccctgtggatcgtggtcgcctctgtgtcggtgtatctggtggcttatcgctactacagtctgtacatcg

SEQ ID NO: 687012 - DNA, 75 bp, synthetic construct
  source 1..75: mol_type = other DNA
tgccatcaccgttgaaggggcgaatattctgacccgtagtatgatgatcttcggtcagggggcgattcgttgcca

SEQ ID NO: 687013 - DNA, 75 bp, synthetic construct
  source 1..75: mol_type = other DNA
gacttgttccagggcaagccggactggaaaaagctgcataactatccgcagccgcgcctgaccgcagaagagcaa

SEQ ID NO: 687014 - DNA, 75 bp, synthetic construct
  source 1..75: mol_type = other DNA
aactggatgcataacgatgatgatggtgatgttgccggagttggtctgggcctcaatctaccgcttggtccgtta

SEQ ID NO: 687015 - DNA, 75 bp, synthetic construct
  source 1..75: mol_type = other DNA
gggcaactggcgcaggcgtttaatcagctacaacatcgcccgtttcgcgccaatatcggtggcattaacaaagtg

SEQ ID NO: 687016 - DNA, 75 bp, synthetic construct
  source 1..75: mol_type = other DNA
tttatcagcacaaagccaagagcatccgctgatgtgcatacaatgtctattcctatcacaaagaatataaagcgg

SEQ ID NO: 687017 - DNA, 75 bp, synthetic construct
  source 1..75: mol_type = other DNA
cgattgcgactgtgcttggcctggcgtttaaactctccgacccggaaaaactgctgggtggcgcagaagatttag

SEQ ID NO: 687018 - DNA, 75 bp, synthetic construct
  source 1..75: mol_type = other DNA
atgcgcacattcgccgtcagttcaaaatttctattggtaagatggaagggattgaagagccgctggcgcgtattg

SEQ ID NO: 687019 - DNA, 75 bp, synthetic construct
  source 1..75: mol_type = other DNA
ttaccttcacgctgttatggctctcggtattcggcaatagcgcgctgtatgaaatcatccacggcggcgcggcat

SEQ ID NO: 687020 - DNA, 75 bp, synthetic construct
  source 1..75: mol_type = other DNA
gcgtaaaagcacaatcctgccgcgtgtagcgcaactcgcagaaaaattgcatcagaaagcgcaggccggtgaacg

SEQ ID NO: 687021 - DNA, 75 bp, synthetic construct
  source 1..75: mol_type = other DNA
tattgagaacatatcacaagcagagcaggctaaagtgggcgtcgtatatgctgaatatggtttaaccgaatcggg

SEQ ID NO: 687022 - DNA, 75 bp, synthetic construct
  source 1..75: mol_type = other DNA
tgggctattttttactggtggcggtggcagcctggttcgtactggcaatttttgtcaaagaagttaaaccgggcg

SEQ ID NO: 687023 - DNA, 75 bp, synthetic construct
  source 1..75: mol_type = other DNA
aagcgccgaagtggatcaggaacacgtcacgcttaaggtgctggataccggtagtggtattcctgactacgcgct

SEQ ID NO: 687024 - DNA, 75 bp, synthetic construct
  source 1..75: mol_type = other DNA
aaacgttactacgccaggcaagactggagaatcgtcaggaagtcgttttgactgctgttgatgtggcggcattat

SEQ ID NO: 687025 - DNA, 75 bp, synthetic construct
  source 1..75: mol_type = other DNA
accagcatgcagcaccggctgaagtaagagaaaaatacccctggctggtccctgttcatgccgatggtgtggttg

SEQ ID NO: 687026 - DNA, 75 bp, synthetic construct
  source 1..75: mol_type = other DNA
tacttcactccttgacatcattggcggccattaggccgccttttttttgccatatgaaaacaatcgaacaaaaaa

SEQ ID NO: 687027 - DNA, 75 bp, synthetic construct
  source 1..75: mol_type = other DNA
gatcatcaaaaaagagtacggcgggctggagttctcagcttatgcccagtctcgcgtgctgcaaaaactctccgg

SEQ ID NO: 687028 - DNA, 75 bp, synthetic construct
  source 1..75: mol_type = other DNA
cggaggtcgccataaagacgatcgcgggctttatgtcagtaccggtggttttacaaaagatgctcgatatgaagc

SEQ ID NO: 687029 - DNA, 75 bp, synthetic construct
  source 1..75: mol_type = other DNA
gtggtgacggcggcaagctctatgacgattttcgcgataagcaaattgtaggcatcggttggtctcagctggctc

SEQ ID NO: 687030 - DNA, 75 bp, synthetic construct
  source 1..75: mol_type = other DNA
ttgaacagcaccgtaagtggcagaaggcagccagagaacgagcgatcgctcggcaacgggagaagttggctgatc

SEQ ID NO: 687031 - DNA, 75 bp, synthetic construct
  source 1..75: mol_type = other DNA
gaagcgtgctggacgccatgcaccgatggttatcaccgtattttttatcgtctggaaggggagagtgcggaagac

SEQ ID NO: 687032 - DNA, 75 bp, synthetic construct
  source 1..75: mol_type = other DNA
ttacgcttattggcgcagttctcctgcctctgacaagcagttttcaaaatgtgatgactatatcagctccagatg

SEQ ID NO: 687033 - DNA, 75 bp, synthetic construct
  source 1..75: mol_type = other DNA
ggaaaaaaattaagaaactcagggttcttagcccgtttattactaattgatctggatcaaatacctgaactatgc

SEQ ID NO: 687034 - DNA, 75 bp, synthetic construct
  source 1..75: mol_type = other DNA
cactgacgagcagaaagatcactatctgccgcgtctggcgcgtggtcaggaaatcccttgctttgcactgaccag

SEQ ID NO: 687035 - DNA, 75 bp, synthetic construct
  source 1..75: mol_type = other DNA
aactttgcgcctatgcgtaagtcgatgatttccgcgccggtatttcgcggtttccgtaaggtgatgccgccgatg

SEQ ID NO: 687036 - DNA, 75 bp, synthetic construct
  source 1..75: mol_type = other DNA
caggctgaacaggcgatggacgatttactgcaaaacttcccgaaccgcgtggttgccgggctgctgaatgtggtg

SEQ ID NO: 687037 - DNA, 75 bp, synthetic construct
  source 1..75: mol_type = other DNA
tgaaaatccgcgcattattgttgaggtgaagcaccggcgggaacagatgagcagccagcaaatccgtagctttat

SEQ ID NO: 687038 - DNA, 75 bp, synthetic construct
  source 1..75: mol_type = other DNA
gatgtgataaatacgatcaaccaccgtcgtcccttccgcaatacagccagccagcaccaggcttgctgatgcacg

SEQ ID NO: 687039 - DNA, 75 bp, synthetic construct
  source 1..75: mol_type = other DNA
agaaagccctgggaactgacccctgggttatctggccatcacgctaccatgatccgcagacccatgagtttatcg

SEQ ID NO: 687040 - DNA, 75 bp, synthetic construct
  source 1..75: mol_type = other DNA
atcccgctgacatcattgcgggtttgcgcaagaaaggaacgtcaatggcggcggaatctcgcagaaatggtttga

SEQ ID NO: 687041 - DNA, 75 bp, synthetic construct
  source 1..75: mol_type = other DNA
gcggcagcaatttccggtacgtaaggcaaagggaggcaggcaaaagggggaggcgccaggtgttgaagaatccgt

SEQ ID NO: 687042 - DNA, 75 bp, synthetic construct
  source 1..75: mol_type = other DNA
ggcggcaatggatgcgtaccttgaacgcgaccacgaccgcgccttgttcggtctgccgccacgccagaaggatga

SEQ ID NO: 687043 - DNA, 75 bp, synthetic construct
  source 1..75: mol_type = other DNA
agcaggataacattgctaatatgttaaaacttgcaaagccttttgttaattccccatttattataagaaatattt

SEQ ID NO: 687044 - DNA, 75 bp, synthetic construct
  source 1..75: mol_type = other DNA
caaatcaaggtgaggatacatcaggtctgcgaattattacgctgttaattgatggcgaccggaatgagttatcga

SEQ ID NO: 687045 - DNA, 75 bp, synthetic construct
  source 1..75: mol_type = other DNA
atgaaggatgaaaagaaaatatccctgacacgtattctgattatcggtgcgtttatttttgccttcttgcaagta

SEQ ID NO: 687046 - DNA, 75 bp, synthetic construct
  source 1..75: mol_type = other DNA
acgctaccatgatccgcagacccatgagtttatcgacagaacgcagttgatgcgtagctacactaaaccgaaaaa

SEQ ID NO: 687047 - DNA, 75 bp, synthetic construct
  source 1..75: mol_type = other DNA
gttcctcaacgctggcaaacgcattatcgcgcccatggccgaaaggagagatgattattgcgaaagccctgggaa

SEQ ID NO: 687048 - DNA, 75 bp, synthetic construct
  source 1..75: mol_type = other DNA
atgatgatgtaaaactactcgccagaagactaatatcacttggtgacgaggataaagatcctgaagggatgcttg

SEQ ID NO: 687049 - DNA, 75 bp, synthetic construct
  source 1..75: mol_type = other DNA
acagcgtcaccggaattaatcgcgaccgtcagccgggctctcaatggtgaaactgtgcgccccctggccgacaga

SEQ ID NO: 687050 - DNA, 75 bp, synthetic construct
  source 1..75: mol_type = other DNA
tgtttatcagcaatgaagcgttgattgtcagcgatggctacttggcacgagtggggtccctgaccgccacggaag

SEQ ID NO: 687051 - DNA, 75 bp, synthetic construct
  source 1..75: mol_type = other DNA
gcctgcctgcaaaaaatcaacccgcacctgcccactgacgtcttcgaacaggtcatctcccgtattactcgcgct

SEQ ID NO: 687052 - DNA, 75 bp, synthetic construct
  source 1..75: mol_type = other DNA
ctcacccgtgattaccggaagacgccgcgaaacacgcccttcgttctgccagagcctgagccatttgaaaataac

SEQ ID NO: 687053 - DNA, 75 bp, synthetic construct
  source 1..75: mol_type = other DNA
aagctaatgaggtcattgagagcacagaaaaaaacgaagtgcgtgacgccgcgctcattgctgctgcacagaaag

SEQ ID NO: 687054 - DNA, 75 bp, synthetic construct
  source 1..75: mol_type = other DNA
agctttgcctgggctggtttgccgaacaaggttgggaaattcatcacgggccggatattgcccccgatggcagta

SEQ ID NO: 687055 - DNA, 75 bp, synthetic construct
  source 1..75: mol_type = other DNA
ttgctatgtcggcaaactgttgcaacagccggagatgggcaacccgacgattgttgttgtgaccgatcgtaacga

SEQ ID NO: 687056 - DNA, 75 bp, synthetic construct
  source 1..75: mol_type = other DNA
ccccgggaactgagggccgtgttgtaccggaagaccgcgcacagcgcagactctgggaaaacgcactccgccagg

SEQ ID NO: 687057 - DNA, 75 bp, synthetic construct
  source 1..75: mol_type = other DNA
tcggatatccgctatcagttgctgaacgagacaggaaaaacactgggattccggggaggacgtgcagagcgcgcc

SEQ ID NO: 687058 - DNA, 75 bp, synthetic construct
  source 1..75: mol_type = other DNA
aaacgtgcggcagaagagctgaacaagcgtgatgcttatgacgtattaatcgttggttccggcccggcgggtgca

SEQ ID NO: 687059 - DNA, 75 bp, synthetic construct
  source 1..75: mol_type = other DNA
gctcgactacattcgttacttcatcctgtttgaaagcgacggcaaacgactgattaaaaagattgccgcttacca

SEQ ID NO: 687060 - DNA, 75 bp, synthetic construct
  source 1..75: mol_type = other DNA
caggagaaaaccaaaggcgactggagccgtctggaaaagctggtcggttcagagccgcgtatcaaacaggtagcg

SEQ ID NO: 687061 - DNA, 75 bp, synthetic construct
  source 1..75: mol_type = other DNA
tgcttcgcacagcgtggcggcgcgaattgatgacgctaaaccggtgctgattgtctcggctgatgccggggcgcg

SEQ ID NO: 687062 - DNA, 75 bp, synthetic construct
  source 1..75: mol_type = other DNA
gtgcgtgatgccgcactgattgccgcagcacagaaagtcgagcattatgagattgccagttacgggacattagcg

SEQ ID NO: 687063 - DNA, 75 bp, synthetic construct
  source 1..75: mol_type = other DNA
cctccttccgatatggtaaacgcgctagcgattggtgctgctgatcgtagcggtgaaaaatgggggcgggcacca

SEQ ID NO: 687064 - DNA, 75 bp, synthetic construct
  source 1..75: mol_type = other DNA
tgagctgggattgcgtgggcagcttagcgcctcacgcagccaggggttgaatgcgttaagcgaggcgattatcgc

SEQ ID NO: 687065 - DNA, 75 bp, synthetic construct
  source 1..75: mol_type = other DNA
tgccgggtgatgccaataaaggcgatactgtggatgtcacctttgaagatgaaaaaggtggtaagcacaccgtga

SEQ ID NO: 687066 - DNA, 75 bp, synthetic construct
  source 1..75: mol_type = other DNA
gcaacattgcggtcgccggaatcgtgtttatcgccagtattctggtgccatttaccaaagtgatcgtcatgttca

SEQ ID NO: 687067 - DNA, 75 bp, synthetic construct
  source 1..75: mol_type = other DNA
cggctctatcaggaactccattgaacaccattgcattgaaagcgttgcttgttcatcatgctgaaacatcaagaa

SEQ ID NO: 687068 - DNA, 75 bp, synthetic construct
  source 1..75: mol_type = other DNA
tgttatttttggtggaagcgacgacgagcctttttacacttacaaccctctgcttggttctatagttggagttca

SEQ ID NO: 687069 - DNA, 75 bp, synthetic construct
  source 1..75: mol_type = other DNA
aaataccctgcatgaatgggacgaaggtgaatttcagcttgaaccaccgctggataccgaagaaggacgcgcagc

SEQ ID NO: 687070 - DNA, 75 bp, synthetic construct
  source 1..75: mol_type = other DNA
aagccattgatgccgcacgcgaagaatttcttgctgacaaccccggcatcgacgccgaagaagcgaatgtgcaac

SEQ ID NO: 687071 - DNA, 75 bp, synthetic construct
  source 1..75: mol_type = other DNA
gatcttgatatggcaactttagcaaatgcttgtatcagtaatgatgatgggtatggtggaagaccgataacagta

SEQ ID NO: 687072 - DNA, 75 bp, synthetic construct
  source 1..75: mol_type = other DNA
gaaacgtacaatgaagaatataatgttagtgctggtgattgggccaacttaggttttagaaaagaaggtgtaggg

SEQ ID NO: 687073 - DNA, 75 bp, synthetic construct
  source 1..75: mol_type = other DNA
tattggctccagttccggctgcgacatgctgtatggcatggccgatggttgtgcgctgagccaaacctacggagg

SEQ ID NO: 687074 - DNA, 75 bp, synthetic construct
  source 1..75: mol_type = other DNA
gatttgggatagttggggggctaacattcaaatagaaccctactacgatggaagcttttatataggatttgagaa

SEQ ID NO: 687075 - DNA, 75 bp, synthetic construct
  source 1..75: mol_type = other DNA
cgaagatggcccgacccatcagccggtcgagcagattgcctcactacgcatgacgccgaacctcagcacctggcg

SEQ ID NO: 687076 - DNA, 75 bp, synthetic construct
  source 1..75: mol_type = other DNA
gctgcattcgaaaacgccggggcacccggaagtgggttacaccgcgggcatcgaaaccaccaccgggccgctggg

SEQ ID NO: 687077 - DNA, 75 bp, synthetic construct
  source 1..75: mol_type = other DNA
tggcgctaacacaaaccagagcaaccctactcctgttccctataatttgtgttgctgcattaatagcttattata

SEQ ID NO: 687078 - DNA, 75 bp, synthetic construct
  source 1..75: mol_type = other DNA
cgcgcagtagaagaagcgcgtgcagtgactgacaaaccgtccctgctgatgtgtaaaaccatcatcggtttcggt

SEQ ID NO: 687079 - DNA, 75 bp, synthetic construct
  source 1..75: mol_type = other DNA
tacgtaaacgtctggttgaataccatcagatgactgcaccgctgatcggctactactccaaagaagcggaagcgg

SEQ ID NO: 687080 - DNA, 75 bp, synthetic construct
  source 1..75: mol_type = other DNA
gacaggacggtccgactgcgctcattttttcccggcaaaacctgacccagcaggaacggacctggcagcaggtgc

SEQ ID NO: 687081 - DNA, 75 bp, synthetic construct
  source 1..75: mol_type = other DNA
aatagcctaaccgaactccgcgacacccttctccccaaacttctctcgggtgaaattaccctgccggaagcagaa

SEQ ID NO: 687082 - DNA, 75 bp, synthetic construct
  source 1..75: mol_type = other DNA
caccatcaactaaagaacctgctttctggtccaatggaagcatattctgggcaacaccgaaagatttatccaata

SEQ ID NO: 687083 - DNA, 75 bp, synthetic construct
  source 1..75: mol_type = other DNA
atgtggttgttccctcaagtgaattacttatgttgtacggaaaatatacacgtaaaatttatgatcaaatcaact

SEQ ID NO: 687084 - DNA, 75 bp, synthetic construct
  source 1..75: mol_type = other DNA
ttaggctttctccgcgaaaaaggatgcgactattgccacacgccttcggcagaattacccgcctattattatatt

SEQ ID NO: 687085 - DNA, 75 bp, synthetic construct
  source 1..75: mol_type = other DNA
aagcaggtgcaaatgcaaaagttttagggagttaccctttatctctgccttcacttactaggcaagtaggtattt

SEQ ID NO: 687086 - DNA, 75 bp, synthetic construct
  source 1..75: mol_type = other DNA
gccttactgatatatgtgatgatgtcagctacggttatactgccagcgcaaatgagcaatgcattgggccgaaat

SEQ ID NO: 687087 - DNA, 75 bp, synthetic construct
  source 1..75: mol_type = other DNA
agagtttatcgcgaagttgcaggctaatccggcgaaaatcgccagccgtaaagcgtctcagaatgccatcgaagc

SEQ ID NO: 687088 - DNA, 75 bp, synthetic construct
  source 1..75: mol_type = other DNA
aggttttcaacatatcgattacgcacttggttgcacgggccatgtcgattgtgaagtgcggatgctgcgtaaact

SEQ ID NO: 687089 - DNA, 75 bp, synthetic construct
  source 1..75: mol_type = other DNA
tcgagccgcagcatcaagtccgatccacaattcatcgccatgcgcgaatatgttttaagccgcgtatttgagcag

SEQ ID NO: 687090 - DNA, 75 bp, synthetic construct
  source 1..75: mol_type = other DNA
gttcggcctgcaactggcaggtgtagagaaaatgcagcgactggaaatcgcacaccagatggtgaaaaaagtcgg

SEQ ID NO: 687091 - DNA, 75 bp, synthetic construct
  source 1..75: mol_type = other DNA
cggtcagcggcagcgcctatcgcgtaacgattccagccgtactgcaaatcgcctgcctgcgccggatggttagcg

SEQ ID NO: 687092 - DNA, 75 bp, synthetic construct
  source 1..75: mol_type = other DNA
attttgcgtacccacgcggcaatgagtgtgcttggacatggtctgctgcgtggcgcgggccttggcggcccggtc

SEQ ID NO: 687093 - DNA, 75 bp, synthetic construct
  source 1..75: mol_type = other DNA
cgataatgcagccatcgccagcgtcatccgccaggtttctgcagagtatggccttaccgctgataaaggctacac

SEQ ID NO: 687094 - DNA, 75 bp, synthetic construct
  source 1..75: mol_type = other DNA
ccaccattttagttatgacacctgtgcttgtacctttgattaaacaggctggaatagatccagtatatttcggtg

SEQ ID NO: 687095 - DNA, 75 bp, synthetic construct
  source 1..75: mol_type = other DNA
gatagcagctgcttattcattatttgtcggtgtatttatttatcgcggcattaacttaggatcgctttatggatt

SEQ ID NO: 687096 - DNA, 75 bp, synthetic construct
  source 1..75: mol_type = other DNA
cttggcggcgattctcttaccgatgatgcgtgaagctggctataaattaaaccggaccggtggtttgatcggcgc

SEQ ID NO: 687097 - DNA, 75 bp, synthetic construct
  source 1..75: mol_type = other DNA
ctccgagctgggtaaacaagcaaaagacattatggacgctggcaaactggtcaccgacgaactggtgatcgcgct

SEQ ID NO: 687098 - DNA, 75 bp, synthetic construct
  source 1..75: mol_type = other DNA
gcgctgtacggtattccgctgccgtggattgctgtagaagcgggctggttcgtggctgaatatggccgccaaccg

SEQ ID NO: 687099 - DNA, 75 bp, synthetic construct
  source 1..75: mol_type = other DNA
aatgttcaaatttgcacgcctcggcccaagcagcctgaaaactggtcgctatcactttgagcagtcttccacgac

SEQ ID NO: 687100 - DNA, 75 bp, synthetic construct
  source 1..75: mol_type = other DNA
ccatccatcatcatatatccggggggaagtggaccctcttatagtatgagtagtgatcctacccacgtaatatgg

SEQ ID NO: 687101 - DNA, 75 bp, synthetic construct
  source 1..75: mol_type = other DNA
tgatgccagtcaaggccgtgcctgcctgagcaaagctgagcttactgctgacttaatgtggttgtcagctaatcg

SEQ ID NO: 687102 - DNA, 75 bp, synthetic construct
  source 1..75: mol_type = other DNA
ttaaattactctggatgtgacttgtcaggtctaagtcttgcagggctgaattttgcatcagtaaatttttctgat

SEQ ID NO: 687103 - DNA, 75 bp, synthetic construct
  source 1..75: mol_type = other DNA
atcaataaactgtttaccccccaacttatcttcattaagtatagttggatgttcatcattagaggttataaattg

SEQ ID NO: 687104 - DNA, 75 bp, synthetic construct
  source 1..75: mol_type = other DNA
gccggcagaggaggagtatgaacatccccgctggtatattaccgtgacggatacggctgatatgctctatctggt

SEQ ID NO: 687105 - DNA, 75 bp, synthetic construct
  source 1..75: mol_type = other DNA
ccgccatccatgagcacagtggcggcgcgcttttcaccctgtcgcctcagggggagcccggtgtgcttccggcga

SEQ ID NO: 687106 - DNA, 75 bp, synthetic construct
  source 1..75: mol_type = other DNA
attatatctgatgtctcacttaagcaaatgtttatagatgctctggaatctgataaatcagaagtaaaaatggtt

SEQ ID NO: 687107 - DNA, 75 bp, synthetic construct
  source 1..75: mol_type = other DNA
aaaaaacaatgaattgtcaccacacttaaaatcagtgatatcaagtttagatagaaattatttcaatccatggct

SEQ ID NO: 687108 - DNA, 75 bp, synthetic construct
  source 1..75: mol_type = other DNA
cgtataccacagctcctctatcaaaaattaaagaagtcagaacatgggacacaaacaaatacttaatgaaactat

SEQ ID NO: 687109 - DNA, 75 bp, synthetic construct
  source 1..75: mol_type = other DNA
caaacaagatactatataataccaaagaagtagagttaacaaaagaatcgaattcagaaatttattctggaacat

SEQ ID NO: 687110 - DNA, 75 bp, synthetic construct
  source 1..75: mol_type = other DNA
tgctatcttaggtgatgtaaaggagttctttggtgaaaaaaataacagtattcatttaggagggtgttatataga

SEQ ID NO: 687111 - DNA, 75 bp, synthetic construct
  source 1..75: mol_type = other DNA
atcgataaactatcttccacccggcttatcttcattaagtatggttggatgctcatcattagaggctataaattg

SEQ ID NO: 687112 - DNA, 75 bp, synthetic construct
  source 1..75: mol_type = other DNA
attagtccagacatgcttagttataatgatattaatatgtataccaacatcatttttaaagaattaaacccactg

SEQ ID NO: 687113 - DNA, 75 bp, synthetic construct
  source 1..75: mol_type = other DNA
acaggtggttcggtaaccggtctggatgggcaggttcagaaaggccagagagaagttagtatttctgtgaagaat

SEQ ID NO: 687114 - DNA, 75 bp, synthetic construct
  source 1..75: mol_type = other DNA
agggtcaccgttatctgattcaacaggctgcggcacagtgcgactggttgcatctgtttttagtcaaagaagatt

SEQ ID NO: 687115 - DNA, 75 bp, synthetic construct
  source 1..75: mol_type = other DNA
ggaacaagattggctgcattgtgatgaacgccaatccctttacgaatggtcaccgttatctgattcaacaagctg

SEQ ID NO: 687116 - DNA, 75 bp, synthetic construct
  source 1..75: mol_type = other DNA
cattagtcgtttctggttgggtgtatgagtatcgaatgcactctctaacaaaaaaaataggaattctagaaaacg

SEQ ID NO: 687117 - DNA, 75 bp, synthetic construct
  source 1..75: mol_type = other DNA
acagttcatgcttttacaccttttttcgaaccggtactaaataaggttatttctaatcggttagaaactcggaaa

SEQ ID NO: 687118 - DNA, 75 bp, synthetic construct
  source 1..75: mol_type = other DNA
actataaatatacagcccatcatctcattgaatttcagcgtatagctgaagcaaaagcagtaacaatgggacata

SEQ ID NO: 687119 - DNA, 75 bp, synthetic construct
  source 1..75: mol_type = other DNA
atgagagaaatatcagataacatgcttgattctgtgaaaggagggatgaatattaatggattacccggttctact

SEQ ID NO: 687120 - DNA, 75 bp, synthetic construct
  source 1..75: mol_type = other DNA
tggcagatattcccgttcttcacgcttatcccacagggcaaaaagaaacaccgttaccatgcgtgattttttatc

SEQ ID NO: 687121 - DNA, 75 bp, synthetic construct
  source 1..75: mol_type = other DNA
cattgtcgcgccgctggcagagtgggaagcgacaaaccacctggaacaacttggtgacagacctctactgctgtg

SEQ ID NO: 687122 - DNA, 75 bp, synthetic construct
  source 1..75: mol_type = other DNA
tggcagatattcccgttcttcatgcttatcctgtcgggcaaaaagataccccgttaccgtgcgtgattttttatc

SEQ ID NO: 687123 - DNA, 75 bp, synthetic construct
  source 1..75: mol_type = other DNA
gccaaagatgactgtgtgcgactgaaaaatgcgctggtcaatctcggcaacagtaaagactgggacgcgctggta

SEQ ID NO: 687124 - DNA, 75 bp, synthetic construct
  source 1..75: mol_type = other DNA
ggataatcctgctatcgcccgcgtcattcgtcaggtatccgccgaatacggtcttaccgctgataaaggctacac

SEQ ID NO: 687125 - DNA, 75 bp, synthetic construct
  source 1..75: mol_type = other DNA
aagcgattggtttgtatgaacatttaggttttcaacatatcgactatgcacttggctgcacaggccatgttgatt

SEQ ID NO: 687126 - DNA, 75 bp, synthetic construct
  source 1..75: mol_type = other DNA
gtggctaaaatagccgccatttttcagctactggataagaaagtgaccgtatcttctcatcgtcttgaactgtta

SEQ ID NO: 687127 - DNA, 75 bp, synthetic construct
  source 1..75: mol_type = other DNA
caggtggtctggctgcgtggtcgttaggcattccggttgtacttcatgaacaaaacggtattgcgggcttaacca

SEQ ID NO: 687128 - DNA, 75 bp, synthetic construct
  source 1..75: mol_type = other DNA
ttagcgcggtggatcaagcgggaaacggacatcagcgctctgcgctggctcagtactgaacaggcaagcagtgtt

SEQ ID NO: 687129 - DNA, 75 bp, synthetic construct
  source 1..75: mol_type = other DNA
tcacggtgatgccagcgtatgggtgattaatagcgacagccgggcgatggatcctaagcaggccgcgatgaaaat

SEQ ID NO: 687130 - DNA, 75 bp, synthetic construct
  source 1..75: mol_type = other DNA
gaaatctaatcagatgacggggctgttctcgactattgatgagaaaacgtcgcaagagaaactcacttggttgaa

SEQ ID NO: 687131 - DNA, 75 bp, synthetic construct
  source 1..75: mol_type = other DNA
ggcgaagtcccggtgatgatcaccaagcattgtctgcgctttgccttcaatctgtgcccgaaacaggcgaaaggc

SEQ ID NO: 687132 - DNA, 75 bp, synthetic construct
  source 1..75: mol_type = other DNA
gtttaatgcctcctatgtaaaagcaccgaacagccaggatgtgacttctggacacgttaccactaacgcactgta

SEQ ID NO: 687133 - DNA, 75 bp, synthetic construct
  source 1..75: mol_type = other DNA
gtttcttactgacgttagtggcaactctgttgctccccgggcggctgattgccgccgccttaccgcaggatgaaa

SEQ ID NO: 687134 - DNA, 75 bp, synthetic construct
  source 1..75: mol_type = other DNA
agcacgattaacgacaatatttgggcatcgctacaaaatgctcaaattcaggcgttgaaaacgctcgaccagcgt

SEQ ID NO: 687135 - DNA, 75 bp, synthetic construct
  source 1..75: mol_type = other DNA
ttggacgctcacaacgtatcagttaccctactcaacatatacatcctgaaagcttggagttattcaataaatttt

SEQ ID NO: 687136 - DNA, 75 bp, synthetic construct
  source 1..75: mol_type = other DNA
aacatggaagaatctattttttgggaagacgaaaaagaacactataaaaattggacgctcacaacgtatcagtta

SEQ ID NO: 687137 - DNA, 75 bp, synthetic construct
  source 1..75: mol_type = other DNA
ccctgattttgtcttccggttcagccctggctgttgatggcggtcatatcgattttaacggtatggtacagtccg

SEQ ID NO: 687138 - DNA, 75 bp, synthetic construct
  source 1..75: mol_type = other DNA
acacggcgtgccgcgcgaaatcaccaaagaagtcttgccaggaaaatactatccaaaccatgaagccgttgattt

SEQ ID NO: 687139 - DNA, 75 bp, synthetic construct
  source 1..75: mol_type = other DNA
ctcacggtgctgttcggtcaggcagaaatcttaacgctcgatctggcaagcgaaggatcgcctcacgcccgccag

SEQ ID NO: 687140 - DNA, 75 bp, synthetic construct
  source 1..75: mol_type = other DNA
aatgtcgaaagctctggctgtgggccgcagtccgcaggacatcgccgccaccagcgaacaatttattgcctccac

SEQ ID NO: 687141 - DNA, 75 bp, synthetic construct
  source 1..75: mol_type = other DNA
cggctccggtattccacaaggtcaggaacggacgatttttgataaatttgcccgtgggaataaagagtcagcagt

SEQ ID NO: 687142 - DNA, 75 bp, synthetic construct
  source 1..75: mol_type = other DNA
tcatttctcaggcgctgcaggcattgattcatcattacgctcagtctggtgaacttagacgcttcgtgatcaaat

SEQ ID NO: 687143 - DNA, 75 bp, synthetic construct
  source 1..75: mol_type = other DNA
tactttcagaactgaatgctctgttgcgacaggaactgataaggcttggggttaacccggtccattcccttgagt

SEQ ID NO: 687144 - DNA, 75 bp, synthetic construct
  source 1..75: mol_type = other DNA
agtttcgctgatgctggcgctgcacgttgtgccgtggaaagacattacccgctataacagcgcatggaacacgct

SEQ ID NO: 687145 - DNA, 75 bp, synthetic construct
  source 1..75: mol_type = other DNA
cgggcattgatgttttcactaccgtcaacgttcagcatctggaaagcctgaatgatgtggtcagtggcgtcaccg

SEQ ID NO: 687146 - DNA, 75 bp, synthetic construct
  source 1..75: mol_type = other DNA
gctggtaaaagcgcaggtttctgaagcggacgtcattcacctgaagccggggcaaaaagcctggtttacggtgct

SEQ ID NO: 687147 - DNA, 75 bp, synthetic construct
  source 1..75: mol_type = other DNA
cggtttctcagcaagatcttgataccgccgccacagaaatggccgttaaacaggcgcaaataggcactatagacg

SEQ ID NO: 687148 - DNA, 75 bp, synthetic construct
  source 1..75: mol_type = other DNA
tatttgataagtttgctcgcgggaataaagagtcggcagtaccgggggtagggcttggactggcaatttgtcggg

SEQ ID NO: 687149 - DNA, 75 bp, synthetic construct
  source 1..75: mol_type = other DNA
ggcgcgggtagcccgttaccgcgagcaacgcacacggcacttatatgaaatgtcgaaagctctggcggtgggccg

SEQ ID NO: 687150 - DNA, 75 bp, synthetic construct
  source 1..75: mol_type = other DNA
atgctggaaccgggtttatcgtcgcccatcaatctttctctgccagaaccgctgaccttaatccacgttgacggg

SEQ ID NO: 687151 - DNA, 75 bp, synthetic construct
  source 1..75: mol_type = other DNA
gaccgtgaacctatcggcctgatggatactgtcgccacggtcacaccggcacaattgcgccaattttatcaacgc

SEQ ID NO: 687152 - DNA, 75 bp, synthetic construct
  source 1..75: mol_type = other DNA
taacgccgtacgtatggctgcgctgatgaaacagcgccaggtgatggtttacacccacgactccatcggtctggg

SEQ ID NO: 687153 - DNA, 75 bp, synthetic construct
  source 1..75: mol_type = other DNA
cgcagggcatgtgttcgttggccggttttacgcaaatcgtgaatgaagcacgcataccggcgtgcgctctccatc

SEQ ID NO: 687154 - DNA, 75 bp, synthetic construct
  source 1..75: mol_type = other DNA
cctctcccgtcagaacctggcgcagcaggaacgaactgaagagcaactggcaaacatcgcgcgcggtggttatgt

SEQ ID NO: 687155 - DNA, 75 bp, synthetic construct
  source 1..75: mol_type = other DNA
gtagagcaagtggcttctctgcgcgtgaccccgaacatgtcgacatggcgtccgtgtgaccaggttgaatccgca

SEQ ID NO: 687156 - DNA, 75 bp, synthetic construct
  source 1..75: mol_type = other DNA
tggaaaccaccaccggtccgctggggcagggtattgccaacgcagtcggtatggcgattgcagaaaaaacgctgg

SEQ ID NO: 687157 - DNA, 75 bp, synthetic construct
  source 1..75: mol_type = other DNA
acccgtcgtatgaaaggtgaaatgccgtctgacttcgacgcgaaagcgaatgaattcattgcgaagctgcaggct

SEQ ID NO: 687158 - DNA, 75 bp, synthetic construct
  source 1..75: mol_type = other DNA
gggtttgatattggcattacctggcactcagatgaagaaggggcaaaagataccgcgcgtgaggtagttagccac

SEQ ID NO: 687159 - DNA, 75 bp, synthetic construct
  source 1..75: mol_type = other DNA
cgtttacctggccatgaatttacaaccttactggctgagaaccgccgtaacggcatcaccgtagatgatagcgtg

SEQ ID NO: 687160 - DNA, 75 bp, synthetic construct
  source 1..75: mol_type = other DNA
cgtttacccggtcacgaattcactaccctgctggcagaaaaccgtcgtaacggaattaccattgacgacagcgta

SEQ ID NO: 687161 - DNA, 75 bp, synthetic construct
  source 1..75: mol_type = other DNA
ccggaagtgggttacaccgctggtgtggaaaccaccaccggtccgctgggtcagggtattgccaacgcagtcggt

SEQ ID NO: 687162 - DNA, 75 bp, synthetic construct
  source 1..75: mol_type = other DNA
aaagccaggaatgttagatgcgggtaattatgaggggcgtctggatattgttttgactcaaagcactaatactta

SEQ ID NO: 687163 - DNA, 75 bp, synthetic construct
  source 1..75: mol_type = other DNA
aaaccatatatgaataaccaaactgcttattcctacaatcgttttgtgaatcagacagtgagtttcatttttaaa

SEQ ID NO: 687164 - DNA, 75 bp, synthetic construct
  source 1..75: mol_type = other DNA
atttttatctcttctgattccgttaaccccgcaatctgcattcgctcagagtgagccggagctgaagctggaaag

SEQ ID NO: 687165 - DNA, 75 bp, synthetic construct
  source 1..75: mol_type = other DNA
ccgggtggtgaactggtgtttgaacgctggcgtcggctaagtgataacagccagtggattcaggtttctttcgtc

SEQ ID NO: 687166 - DNA, 75 bp, synthetic construct
  source 1..75: mol_type = other DNA
ggtggctgacggattgctggcgaaaaagggttgcccgcaacctggtcaggtcgcgattattgccgatgttgatga

SEQ ID NO: 687167 - DNA, 75 bp, synthetic construct
  source 1..75: mol_type = other DNA
tttgctggcaaaaaagggatgcccgaaaccggggcagatcgcgattattgccgatattgacgaacgcacccgtaa

SEQ ID NO: 687168 - DNA, 75 bp, synthetic construct
  source 1..75: mol_type = other DNA
atgggcctgcgttttggtcgcgatgttaatgcctataccagctatgacgaaacggtgtatcaggtgagtttgccg

SEQ ID NO: 687169 - DNA, 75 bp, synthetic construct
  source 1..75: mol_type = other DNA
tatctcttctgattccgttaaccccgcaatctgcattcgctcagagtgagccagagccggagctgaagctggaaa

SEQ ID NO: 687170 - DNA, 75 bp, synthetic construct
  source 1..75: mol_type = other DNA
tcccgatccgctatttaacccgctgaaaaccggtgtctgccaactggataaagcgaacgtgactgaagctattct

SEQ ID NO: 687171 - DNA, 75 bp, synthetic construct
  source 1..75: mol_type = other DNA
atcacagaataaaattaatttataggccaaataaactgaatgataaagatgagattagtcttgcgcacgctaata

SEQ ID NO: 687172 - DNA, 75 bp, synthetic construct
  source 1..75: mol_type = other DNA
atgccggagccggggtggggaaggatcactgattcacaccagtggaacaccttgctaagtttgcataacgcgcaa

SEQ ID NO: 687173 - DNA, 75 bp, synthetic construct
  source 1..75: mol_type = other DNA
cagcgttgacgccccatccaccgcaaaaacaggcgtatggtgtgacattacccacttcagtgctgtttattgccg

SEQ ID NO: 687174 - DNA, 75 bp, synthetic construct
  source 1..75: mol_type = other DNA
gtgaaagcgcgcgtggtttccatgccgtctactgacgcattcgacaagcaggatgcggcttaccgtgagtctgta

SEQ ID NO: 687175 - DNA, 75 bp, synthetic construct
  source 1..75: mol_type = other DNA
cacctcaccggttacgatctgccgatggaagaactgaaaaacttccgtcagctgcactctaaaactccgggccac

SEQ ID NO: 687176 - DNA, 75 bp, synthetic construct
  source 1..75: mol_type = other DNA
cgaagatggcccgactcaccagccggttgagcaggtcgcttctctgcgcgtgaccccgaacatgtctacatggcg

SEQ ID NO: 687177 - DNA, 75 bp, synthetic construct
  source 1..75: mol_type = other DNA
gtgccgggttttcttttgcctcccctcatcacacaccgttcaaaaaaccaccataccccccgcttcagttatcgc

SEQ ID NO: 687178 - DNA, 75 bp, synthetic construct
  source 1..75: mol_type = other DNA
tggttactttttgttcaagttagcattgggctatattacaccgggtgttgtcctaacagctccgtgggctgtggt

SEQ ID NO: 687179 - DNA, 75 bp, synthetic construct
  source 1..75: mol_type = other DNA
ttgaaagttgtgacgatgatcagtgttggcgcacaaatcatgtctgattacgaccgtttaaatgtgattttgata

SEQ ID NO: 687180 - DNA, 75 bp, synthetic construct
  source 1..75: mol_type = other DNA
tcttttgatgaaaggacagattctaaatttataaagagtggtaatatttattccattgatgttcaactcagatag

SEQ ID NO: 687181 - DNA, 75 bp, synthetic construct
  source 1..75: mol_type = other DNA
ggatttcttgacattattccactaaaccagccgctggaatttcgtcgggaagggttgcaacatggggtgattgat

SEQ ID NO: 687182 - DNA, 75 bp, synthetic construct
  source 1..75: mol_type = other DNA
gcggcagcggggcgtgttacgtcgcactacgtaaaacggcacaggcaaagcaagaaaactgggagcgccacgcta

SEQ ID NO: 687183 - DNA, 75 bp, synthetic construct
  source 1..75: mol_type = other DNA
acccacattcgagccgattacaccttaggtcatggcttcagcgtcaatgcgtcggtcaataacctgtttgatacc

SEQ ID NO: 687184 - DNA, 75 bp, synthetic construct
  source 1..75: mol_type = other DNA
aaaccatgggaaccgttaagcgtaacactttccgaagaagcgcgttcttccagctacagcaacagcgacggttca

SEQ ID NO: 687185 - DNA, 75 bp, synthetic construct
  source 1..75: mol_type = other DNA
gtttgccgttaactggaaagatgacgtacaccgggaaaaaggtgcgccgcacgccgcttacgatcgctatgaaga

SEQ ID NO: 687186 - DNA, 75 bp, synthetic construct
  source 1..75: mol_type = other DNA
gcgctggacaaacaaaatgtcgcccaggcgttaagcgtaatccccggagttgtgctgcaaaaatcgggaggacgc

SEQ ID NO: 687187 - DNA, 75 bp, synthetic construct
  source 1..75: mol_type = other DNA
acgatgaatacacactgacttacattaagcaggatggtgaaaaagataacccgccatacagcggaaatagtggtc

SEQ ID NO: 687188 - DNA, 75 bp, synthetic construct
  source 1..75: mol_type = other DNA
atgagactcaaaaaacgttatctctgcacagtattatcacttgcctttacccagcaggccgtagcggctcaggag

SEQ ID NO: 687189 - DNA, 75 bp, synthetic construct
  source 1..75: mol_type = other DNA
cacagcaagtcgcgcctgttagccgggccgctgacgcgccaaaaccgacggcggagaaaaaagacgagcggcgct

SEQ ID NO: 687190 - DNA, 75 bp, synthetic construct
  source 1..75: mol_type = other DNA
gacgctgcaccaatccataacggcggcaatttactaaaacaaagcacgatgtcgacgggtaatgtccaacaaaca

SEQ ID NO: 687191 - DNA, 75 bp, synthetic construct
  source 1..75: mol_type = other DNA
ggtgccgctctatccttactcctgtaacccggacgatgtgatgtttgcccaggagtcgatgcgcgaacgttacgt

SEQ ID NO: 687192 - DNA, 75 bp, synthetic construct
  source 1..75: mol_type = other DNA
tgttttagctacacctctaatacctggcctgtcggcgtagaaatagcaggcgcgcgccttctgatgaatcaggat

SEQ ID NO: 687193 - DNA, 75 bp, synthetic construct
  source 1..75: mol_type = other DNA
cggtgttgtgtttttcactgatattcagggaacggttatgtgaactgaatattcacaggggaaatacagtggtgc

SEQ ID NO: 687194 - DNA, 75 bp, synthetic construct
  source 1..75: mol_type = other DNA
tgaacgttaaaattgagcatgagatcatcatcaaggcagataaagatgttgaagacttgctcaaaacccgtagcg

SEQ ID NO: 687195 - DNA, 75 bp, synthetic construct
  source 1..75: mol_type = other DNA
aaagcggcgcaattggtcagcattgagtggcaagaattacctgttatcaccacaccagaagcggcgttggcagaa

SEQ ID NO: 687196 - DNA, 75 bp, synthetic construct
  source 1..75: mol_type = other DNA
caggcgctgatggcgctggtcaatcaaatcaacaataagcaaacgctgaatttcctcacggatgaaggtctgctg

SEQ ID NO: 687197 - DNA, 75 bp, synthetic construct
  source 1..75: mol_type = other DNA
ctggttgaagttccgtggaatgaacagacgccggaacagcgtcagcaaacgctacagcgccagcgtcaggcgcag

SEQ ID NO: 687198 - DNA, 75 bp, synthetic construct
  source 1..75: mol_type = other DNA
aagctggcagcagcagacgcgtacgtcgcaagccgcgccggtacaggcgcaaccgcgccagtctaaaccggcttc

SEQ ID NO: 687199 - DNA, 75 bp, synthetic construct
  source 1..75: mol_type = other DNA
atcttctggttaacactttttattgggtatctgatagccattgcgaagcaggaaaaaatcaagctcatcgagaag

SEQ ID NO: 687200 - DNA, 75 bp, synthetic construct
  source 1..75: mol_type = other DNA
tcccatcaccacggtaggttctcttgtaagtgtattaaacgcacaaccgatgacccaagagcgacgtagcctgtt

SEQ ID NO: 687201 - DNA, 75 bp, synthetic construct
  source 1..75: mol_type = other DNA
aacatgttcaggatgtcctgggacttgggcataacccggatatgaaacagcctaagttttataacctgtttcatg

SEQ ID NO: 687202 - DNA, 75 bp, synthetic construct
  source 1..75: mol_type = other DNA
gttccctatgacggcaacctcgatctggcgcggattctgaccaacaatttgggggcagttgaagtttccaaaggg

SEQ ID NO: 687203 - DNA, 75 bp, synthetic construct
  source 1..75: mol_type = other DNA
acgctaaaacggtaaaagcaccaagatcttttggtcagctgtttggcttttctgttattgccatgatgacattta

SEQ ID NO: 687204 - DNA, 75 bp, synthetic construct
  source 1..75: mol_type = other DNA
cactggaagatgacacccgccaggcgctgctggttaccccgctgtggtttatcgcgctggggctgggctggttgt

SEQ ID NO: 687205 - DNA, 75 bp, synthetic construct
  source 1..75: mol_type = other DNA
gtttttatgtgtgcacggagccgggctgtggtctggtgtttaaaacgcttcagaccatcaaccgcttcattgtcc

SEQ ID NO: 687206 - DNA, 75 bp, synthetic construct
  source 1..75: mol_type = other DNA
tgaacaaagtggaaaacgtccggtactcatcgtatcgaaggcatcgtttaacacgttcacccggttgcctgttgt

SEQ ID NO: 687207 - DNA, 75 bp, synthetic construct
  source 1..75: mol_type = other DNA
cgagcaaagcggaaaacgtccggtgcttatcgtatcgaaggcatcgtttaacaagctgacccggctacccgttgt

SEQ ID NO: 687208 - DNA, 75 bp, synthetic construct
  source 1..75: mol_type = other DNA
cgaaggagcttataagcttcttaaagcttccccagatgtaccactttttaaaagcttaactgaactggataaata

SEQ ID NO: 687209 - DNA, 75 bp, synthetic construct
  source 1..75: mol_type = other DNA
agaaaaatattaatttacaagtcttaaaacctttgctgatactgacacctccctacgcggaacaaaagaaaatag

SEQ ID NO: 687210 - DNA, 75 bp, synthetic construct
  source 1..75: mol_type = other DNA
ttgcacgctcattccttcaatggcttcctccacgccgaccggcattctgcgtcggtagatcgcttcgatttgatt

SEQ ID NO: 687211 - DNA, 75 bp, synthetic construct
  source 1..75: mol_type = other DNA
gcggcgggtagcgtaatcgcttggtattttgactttggttttgcgggctttgttattgcctggtacgcctcgaat

SEQ ID NO: 687212 - DNA, 75 bp, synthetic construct
  source 1..75: mol_type = other DNA
acagtttccattaaaggttatggccgaggtgattgtaagccctgttgataaaaaaactgaggccaatgaaattcc

SEQ ID NO: 687213 - DNA, 75 bp, synthetic construct
  source 1..75: mol_type = other DNA
ctgatgctgaaatctccacacttgagaataaactcgcctgcctgaaagacgagaagaaagccttgatgcagcaac

SEQ ID NO: 687214 - DNA, 75 bp, synthetic construct
  source 1..75: mol_type = other DNA
agcccaatgtacgtcgtttttagtattaaccatgaacggctaaatagcgattatttcctgaactggatgagctct

SEQ ID NO: 687215 - DNA, 75 bp, synthetic construct
  source 1..75: mol_type = other DNA
gccgctgaaacgtgctacagatgtccactggcatccaacgcgtaaccaacgtgcgccgcagcgtatcgacacgct

SEQ ID NO: 687216 - DNA, 75 bp, synthetic construct
  source 1..75: mol_type = other DNA
actcatgttctgttatttatcgtaaaaattccggagaagatatcaatatcacttccctgacgtttaaaaatagtc

SEQ ID NO: 687217 - DNA, 75 bp, synthetic construct
  source 1..75: mol_type = other DNA
gatgggacagagaaatacttgcaggctcaaacagatggtacaagtgttctcccgataatttcgaaatactgggta

SEQ ID NO: 687218 - DNA, 75 bp, synthetic construct
  source 1..75: mol_type = other DNA
ggataccggcgttgattgaaagcggcgcactggaaaatgccgttggcctgccgatgaacaaagagaccagccatg

SEQ ID NO: 687219 - DNA, 75 bp, synthetic construct
  source 1..75: mol_type = other DNA
gctttgatagtcgtcaggtgccggtctatttcgacggtgtgcccatttatgttccctatgacggcaacctcgatc

SEQ ID NO: 687220 - DNA, 75 bp, synthetic construct
  source 1..75: mol_type = other DNA
gtccggtatcatcgacgacgaccaccgttctcgatcaacccaccatgaaggccctggataaacagaatgtcgctc

SEQ ID NO: 687221 - DNA, 75 bp, synthetic construct
  source 1..75: mol_type = other DNA
ccgatgatcaggctccggctgaacagtcgctacggcgcaatctcacaaaccgacatatccagcttattgccattg

SEQ ID NO: 687222 - DNA, 75 bp, synthetic construct
  source 1..75: mol_type = other DNA
ttcgcccgtgcagccggttttaccgtctcactggacggtgcgggaacaaaaacaacgggcgttattcgctgcgac

SEQ ID NO: 687223 - DNA, 75 bp, synthetic construct
  source 1..75: mol_type = other DNA
ctgattgtcacaccggcggcctttaatcgtgtgacccgcctgcctgttgttgttcccgtaaccagcggaggcaat

SEQ ID NO: 687224 - DNA, 75 bp, synthetic construct
  source 1..75: mol_type = other DNA
cgtcctcttttatgttgcttggttgcacgccgcgcattgaagtggctgcgccgaaagagccaatcaccattaata

SEQ ID NO: 687225 - DNA, 75 bp, synthetic construct
  source 1..75: mol_type = other DNA
ctgaaagagacccggcagatgacgaaacatttacgtcgccgaccgggccatatgacagcggagcattactggtaa

SEQ ID NO: 687226 - DNA, 75 bp, synthetic construct
  source 1..75: mol_type = other DNA
tcactaaagtgcagaactggaccgacgccctgtttagtctcaccgttcacgcccccgtgcttccgtttaccgccg

SEQ ID NO: 687227 - DNA, 75 bp, synthetic construct
  source 1..75: mol_type = other DNA
ctataattgcattatgccccgtacttttgtacggggtttgtactctgtattcgtaaccaaggggtcagctcgtga

SEQ ID NO: 687228 - DNA, 75 bp, synthetic construct
  source 1..75: mol_type = other DNA
atgaaaaagcggaaaaccgtgaagaagcgttacgttattgcgctggtgatagtcatcgccggactgattacgttg

SEQ ID NO: 687229 - DNA, 75 bp, synthetic construct
  source 1..75: mol_type = other DNA
aaattggcaccattgacgcgcaaatcaagcgcaatcaggcttctctcgatacggctaaaaccaatctcgattaca

SEQ ID NO: 687230 - DNA, 75 bp, synthetic construct
  source 1..75: mol_type = other DNA
atggttgattcatcactgaatgatcctgttgtggttcaggctacgcgccttgatgcttcaattttgccacgcaat

SEQ ID NO: 687231 - DNA, 75 bp, synthetic construct
  source 1..75: mol_type = other DNA
tggagctgcgcgcacaacgtcagcaggcggaagcagaactgaaactggctcgggtgacatactctcgccagcaac

SEQ ID NO: 687232 - DNA, 75 bp, synthetic construct
  source 1..75: mol_type = other DNA
gcgaacgtgaagtgacgattggtgcacgtaacgacaccgacgttgagattgtcaaagggctggaagctggcgatg

SEQ ID NO: 687233 - DNA, 75 bp, synthetic construct
  source 1..75: mol_type = other DNA
atgaaaaagcggaaaaccgtgaagaagcgttacgttattgcgctggtgatagtcatcgccgggctgattacgtta

SEQ ID NO: 687234 - DNA, 75 bp, synthetic construct
  source 1..75: mol_type = other DNA
aaaatgccactggaagatttcgttggtatgtttgcgatgccagctcttaacgttccggctgtaccggcaattccg

SEQ ID NO: 687235 - DNA, 75 bp, synthetic construct
  source 1..75: mol_type = other DNA
tgacggtaaaacgatcaatagccaactggattactcgctaaacagcctgaaggtacagaatcaggatctgggcag

SEQ ID NO: 687236 - DNA, 75 bp, synthetic construct
  source 1..75: mol_type = other DNA
aaaatgtcgttagaagattttgttggcatgtttgcgatgccagctcttaacgttccggctgtaccggcaattccg

SEQ ID NO: 687237 - DNA, 75 bp, synthetic construct
  source 1..75: mol_type = other DNA
atggctgattcgaatctcaatgagccggtaatcattcagactacacgactcgacacatcagtccttccacgcaat

SEQ ID NO: 687238 - DNA, 75 bp, synthetic construct
  source 1..75: mol_type = other DNA
ctcggttacggtctgctgctgaaacgctatacgccaaacgtggctgatgcgactgaagctcagattcaacaggca

SEQ ID NO: 687239 - DNA, 75 bp, synthetic construct
  source 1..75: mol_type = other DNA
cggtaatcattcaggctacacggctcgacacatcagtccttccacgcaatatcttctcgcagtcgtatctgcttt

SEQ ID NO: 687240 - DNA, 75 bp, synthetic construct
  source 1..75: mol_type = other DNA
ctgcattgcaggacgattacgtatcgaaaacagcaacagcaacacaatcgctggcatcccccctcaacgtaacaa

SEQ ID NO: 687241 - DNA, 75 bp, synthetic construct
  source 1..75: mol_type = other DNA
gtagtcgttacaacccatggctaatggcagtggctacagaaaaacaactatcctgggcagaaacacactatcaag

SEQ ID NO: 687242 - DNA, 75 bp, synthetic construct
  source 1..75: mol_type = other DNA
ttactggtcagtttggtgacatgttagcccgtattgaggctggggagtttccagcaggtacaattttgctagttg

SEQ ID NO: 687243 - DNA, 75 bp, synthetic construct
  source 1..75: mol_type = other DNA
ttgagtggttacaaaggtaagcaccttactggtcagtttggtgacatgttagcccgtattgaggctggggagttt

SEQ ID NO: 687244 - DNA, 75 bp, synthetic construct
  source 1..75: mol_type = other DNA
atgccaacagtctctaatatccattcatataacccaatatcctcatcgaaaactaaagctccccaaacatgggat

SEQ ID NO: 687245 - DNA, 75 bp, synthetic construct
  source 1..75: mol_type = other DNA
tgtaaaattttataaaagttcagacggtagtttttatcaggcagaaggattaaaaggaggcggggtcatccgaca

SEQ ID NO: 687246 - DNA, 75 bp, synthetic construct
  source 1..75: mol_type = other DNA
tgaattacttgcattccatcaaacaggctcatggattcgtaatggcagaaatgcagcaagagattacatagttga

SEQ ID NO: 687247 - DNA, 75 bp, synthetic construct
  source 1..75: mol_type = other DNA
ttttggcgagcctggccgccgtggctaccacaacaaagagtgggctgcacggatggaacgagtagggttgatgcc

SEQ ID NO: 687248 - DNA, 75 bp, synthetic construct
  source 1..75: mol_type = other DNA
cgttgcagcgtgagaagcgaacgtatggctattgttcctttaagcgtttcgtcggccgtgagagtgggtacacgg

SEQ ID NO: 687249 - DNA, 75 bp, synthetic construct
  source 1..75: mol_type = other DNA
aatgtgaaacagcgcctgctggaattttccaatgttgatgatatctattttgacggctatctcttcgactcctgg

SEQ ID NO: 687250 - DNA, 75 bp, synthetic construct
  source 1..75: mol_type = other DNA
caggtgaagggacttaaccagaagcgtacagaaatacaaactactatcgacactctgaagcgtaaaacttcactc

SEQ ID NO: 687251 - DNA, 75 bp, synthetic construct
  source 1..75: mol_type = other DNA
atgatcgattcgaatgccaaactgcgatcgattcagatgccattttgcaatttaggaatctcaatcattcagcgg

SEQ ID NO: 687252 - DNA, 75 bp, synthetic construct
  source 1..75: mol_type = other DNA
taccgctaaatgatggaacatcaatatttgaaattgctgaaaaagagctactagaaatagacgcttatcaactgt

SEQ ID NO: 687253 - DNA, 75 bp, synthetic construct
  source 1..75: mol_type = other DNA
atgaataaatcgctggtagcggtaggcgtcattgttgcgctaggcgtagtctggacaggcggcgcatggtataca

SEQ ID NO: 687254 - DNA, 75 bp, synthetic construct
  source 1..75: mol_type = other DNA
gttttcgcgtttcgggattattgccagagtgcggcgaccgaaaaagtttgccctaagtgcggcggtaacgggctt

SEQ ID NO: 687255 - DNA, 75 bp, synthetic construct
  source 1..75: mol_type = other DNA
ggtggaagaaataccgggttttctatgaagacgccatagcggagctattcaaagaagaggcccgcgcggaaagcg

SEQ ID NO: 687256 - DNA, 75 bp, synthetic construct
  source 1..75: mol_type = other DNA
ttaccaaatccatattgcaaatacacatcgacaatttgttcgcggtgcaacggcaaaggctacgttaaaaaccat

SEQ ID NO: 687257 - DNA, 75 bp, synthetic construct
  source 1..75: mol_type = other DNA
ttgtgcctacgcttacagttcaaagacctgctataccaacctcccctcggctggtgcgatgcgtggttatggcgc

SEQ ID NO: 687258 - DNA, 75 bp, synthetic construct
  source 1..75: mol_type = other DNA
atcagacgaaagccggggcacatccccggatgcgcttaatacgactgatgcgctaaccgctgcgggtatggcgca

SEQ ID NO: 687259 - DNA, 75 bp, synthetic construct
  source 1..75: mol_type = other DNA
acgtttgacgactacggagaaaaacacctttgcaaaaaatgcaaggggcatggaaaagttctcaatcattgtaaa

SEQ ID NO: 687260 - DNA, 75 bp, synthetic construct
  source 1..75: mol_type = other DNA
gtgtttttcactgatattcagggaacggttatgtgagctgaatattcacagaggaaatacagtggtgcaggtaac

SEQ ID NO: 687261 - DNA, 75 bp, synthetic construct
  source 1..75: mol_type = other DNA
tatgttctacgtcttcgcgctgattgtgattatgtccgtgacgccgtggagttcggtagtcccggagaaaagccc

SEQ ID NO: 687262 - DNA, 75 bp, synthetic construct
  source 1..75: mol_type = other DNA
tggtgatgctgtatgtgaatcccagcgtgattggcgcgttcacgatgatcacgacggtttccgcgattctgttta

SEQ ID NO: 687263 - DNA, 75 bp, synthetic construct
  source 1..75: mol_type = other DNA
cgcctggcggtcaggcaaatgcagagtaaaccgctactgacttccttgtataagctgatgcaggagaaagaacac

SEQ ID NO: 687264 - DNA, 75 bp, synthetic construct
  source 1..75: mol_type = other DNA
ccttcattcgcgctaccacctgcgacagtgaaggctacgccacttttgaagatgaggtgatgtatctcgacgcag

SEQ ID NO: 687265 - DNA, 75 bp, synthetic construct
  source 1..75: mol_type = other DNA
gtaacgcggtgaagatggctaccggtgttgcaatcaatacactgccgctaacgccaaaacgattatatgaagaat

SEQ ID NO: 687266 - DNA, 75 bp, synthetic construct
  source 1..75: mol_type = other DNA
cgcatctgttcgttgccgctgttcccggatatgaccaccgccgatgccgaccgcgtcatcacagcccttcagcaa

SEQ ID NO: 687267 - DNA, 75 bp, synthetic construct
  source 1..75: mol_type = other DNA
gcgccggaacaggctggctttggtggtgccgcactggtgaaagctcgttaccagggtgaagcctggacccgtgcg

SEQ ID NO: 687268 - DNA, 75 bp, synthetic construct
  source 1..75: mol_type = other DNA
atggccggtgtggcggtcgccgtcgccaccacgaccccgccggatgcgacagccacgttacaggccatgcagtcc

SEQ ID NO: 687269 - DNA, 75 bp, synthetic construct
  source 1..75: mol_type = other DNA
ccgcagtggcgaactcgtcgctgactgcaggcgatctcatcttctctatggttctgatttgcggcctgtataccc

SEQ ID NO: 687270 - DNA, 75 bp, synthetic construct
  source 1..75: mol_type = other DNA
aaaggcgctgggccagcttaaagagatcggttttctggaatactccatagacaaagaaaacggcgattacgtact

SEQ ID NO: 687271 - DNA, 75 bp, synthetic construct
  source 1..75: mol_type = other DNA
gtgtttgtgccgacactgaaatccacggataagggtggtcggaagaatcaccgcatagatgccactgaacccctt

SEQ ID NO: 687272 - DNA, 75 bp, synthetic construct
  source 1..75: mol_type = other DNA
ccgaaagagccaatcaccattaatatgaacgttaaaattgagcatgaaatcatcattaaagcggataaggacgtt

SEQ ID NO: 687273 - DNA, 75 bp, synthetic construct
  source 1..75: mol_type = other DNA
caggctgatgctgctgagcagagtctgagccgacaggcgctggcggcacaaaaagccgggatatcagtcggacag

SEQ ID NO: 687274 - DNA, 75 bp, synthetic construct
  source 1..75: mol_type = other DNA
cgttgtggcatcagccgcgacgcattaatggaagcattaaaagaaaaaggcattggcaccggattgcatttccgc

SEQ ID NO: 687275 - DNA, 75 bp, synthetic construct
  source 1..75: mol_type = other DNA
ccggcaaacctgggggcgcgctccgcaggcagaagtattaactccgggctataagtacaatcttactgatattaa

SEQ ID NO: 687276 - DNA, 75 bp, synthetic construct
  source 1..75: mol_type = other DNA
tgagaaaaaatggctgctgcgcgccgcgctgtacggtattccgctgccgtggattgctgtagaagcgggctggtt

SEQ ID NO: 687277 - DNA, 75 bp, synthetic construct
  source 1..75: mol_type = other DNA
tcaatttcgaaactatgcgtatggagatggtgagcttctccgagctggtgcttaacccggttgctcaggtgaaat

SEQ ID NO: 687278 - DNA, 75 bp, synthetic construct
  source 1..75: mol_type = other DNA
gcggatgtaatccacctgaagccggggcaaaaagcctggtttacggtgcttggcgatccactgacgcgctacgag

SEQ ID NO: 687279 - DNA, 75 bp, synthetic construct
  source 1..75: mol_type = other DNA
agcaaggcgtggagaaagtgaactatctttctcgtgaagacgcactgggcgagttccgtaactggtctggttttg

SEQ ID NO: 687280 - DNA, 75 bp, synthetic construct
  source 1..75: mol_type = other DNA
tggtgaatctcttggtagtctcatgacttctatgtcacatggtgtcgattcattgaccgatattagttacagggt

SEQ ID NO: 687281 - DNA, 75 bp, synthetic construct
  source 1..75: mol_type = other DNA
agaccggatgaaccagctttctttactttcaatcaatcggctaatgaccagttcacgcaggatatgctcttaagt

SEQ ID NO: 687282 - DNA, 75 bp, synthetic construct
  source 1..75: mol_type = other DNA
agaggttctgaaaatggtcttcaagatttcacaagaagcctaacaacgcttttaaacgctcttggtggaagcggt

SEQ ID NO: 687283 - DNA, 75 bp, synthetic construct
  source 1..75: mol_type = other DNA
tggtttacagcgtgcaagtgctgaacgttcaattgatttcgtatttgataaagatgcaggtcaggtaaaagagtt

SEQ ID NO: 687284 - DNA, 75 bp, synthetic construct
  source 1..75: mol_type = other DNA
accagcattaatagtgacagagcagctagcagccttgataacctgtctttagcggcggttaaaacagcaggtgca

SEQ ID NO: 687285 - DNA, 75 bp, synthetic construct
  source 1..75: mol_type = other DNA
ttttgattgagctaagttttagctctcagaaggttttaaaaggtctggaaaaagccgagaaacaaacgatgcagg

SEQ ID NO: 687286 - DNA, 75 bp, synthetic construct
  source 1..75: mol_type = other DNA
tcgtttatgacctttagcggtaatatctacgaccaatatgcagaagctacgctattaagttcaagctatccagaa

SEQ ID NO: 687287 - DNA, 75 bp, synthetic construct
  source 1..75: mol_type = other DNA
aaacggaaattgaggatactttaaagccacttagacaatcaaggcaaccacgaattagcggaagcagagcaatca

SEQ ID NO: 687288 - DNA, 75 bp, synthetic construct
  source 1..75: mol_type = other DNA
taatgctcaacttgcaatgactattagtgaactatcacgcaaggtagacgctttaacagtagaagctaagagacc

SEQ ID NO: 687289 - DNA, 75 bp, synthetic construct
  source 1..75: mol_type = other DNA
ctaaaccaaaccaaattaatgatggatgggctaagattggtggttctatcgctgactggtttaatggtgcagcta

SEQ ID NO: 687290 - DNA, 75 bp, synthetic construct
  source 1..75: mol_type = other DNA
taaacgcttcagtcagagaagcaattgctaaagccagaggtcatacatccaccagcattaatggtgacagagcag

SEQ ID NO: 687291 - DNA, 75 bp, synthetic construct
  source 1..75: mol_type = other DNA
atgagcaaatttacagttgatagttttattgttgagctaggcttcaatgaaaacgttattaagggactgcaaaga

SEQ ID NO: 687292 - DNA, 75 bp, synthetic construct
  source 1..75: mol_type = other DNA
ttgataatttaagttcagtagcagtgaaaacagcaggtgcatttatctcaatgcaggctgtattagccagttatc

SEQ ID NO: 687293 - DNA, 75 bp, synthetic construct
  source 1..75: mol_type = other DNA
actctactcagacgcagttaggccgcttaagtaattcatggaacaataatttagctcttatgttcgatggttcac

SEQ ID NO: 687294 - DNA, 75 bp, synthetic construct
  source 1..75: mol_type = other DNA
agaagaaatacaggtgaccgagcagtaagagcagcttatcaggctaacatgtctaagcttaaaaactttgaccct

SEQ ID NO: 687295 - DNA, 75 bp, synthetic construct
  source 1..75: mol_type = other DNA
tattgctgcaaataaagtcattggtgttaccagaagtatttacgggcttatgactgctatcacaagattaggtca

SEQ ID NO: 687296 - DNA, 75 bp, synthetic construct
  source 1..75: mol_type = other DNA
ggaacgtgctgactatctggcgaaggagcataccaaagctcactgcaccggtgagcgcaactttggctgcagtcg

SEQ ID NO: 687297 - DNA, 75 bp, synthetic construct
  source 1..75: mol_type = other DNA
ggacggtgttgaaaacctgcaagccggacaacaggaaaaacgcgttgtcaaacttcaggatggtacccttctcaa

SEQ ID NO: 687298 - DNA, 75 bp, synthetic construct
  source 1..75: mol_type = other DNA
cgaaagagcaaccgtgtgacaatgttccggcgacgcgtccgaccgttaagtcagcaacgacgcaaccctcaacca

SEQ ID NO: 687299 - DNA, 75 bp, synthetic construct
  source 1..75: mol_type = other DNA
ttgtcgttgaactgggctttaacgaaaacgttattaaaggattgcaaagagttgaaaagatggctatgcagtctg

SEQ ID NO: 687300 - DNA, 75 bp, synthetic construct
  source 1..75: mol_type = other DNA
agaagagattaagcgagcactgacagcattatcacagatggctggtaagggtcagattatggctgaagagcttaa

SEQ ID NO: 687301 - DNA, 75 bp, synthetic construct
  source 1..75: mol_type = other DNA
taatatcaaaggtgaagcaattgttaggccggatgaaccagctttctttactttcaatcaatcagctaatgacca

SEQ ID NO: 687302 - DNA, 75 bp, synthetic construct
  source 1..75: mol_type = other DNA
aagctgaaggatagtactcaggttcaagttgataaccttagtaatgcttggaaaaacacgcttaataatatcttc

SEQ ID NO: 687303 - DNA, 75 bp, synthetic construct
  source 1..75: mol_type = other DNA
taaaacagcaggtgcatttatttctatgcaggctgtattagcaagctatcagaagattatggaagttggtcttca

SEQ ID NO: 687304 - DNA, 75 bp, synthetic construct
  source 1..75: mol_type = other DNA
ttcagtttaccagtcaggttaatggcgctcttaaacaaccaagacaaccgagaagaaatacaggtgaccgagcag

SEQ ID NO: 687305 - DNA, 75 bp, synthetic construct
  source 1..75: mol_type = other DNA
agcaatgctcaattagctattgctgtatcagagttggggagaaaggtagatgctctaacagcagaaaccaagaag

SEQ ID NO: 687306 - DNA, 75 bp, synthetic construct
  source 1..75: mol_type = other DNA
cgataatcagcctacgaataacgcatctgcgcagggcaatactgacacaagtgggccagaagagtccccggcgag

SEQ ID NO: 687307 - DNA, 75 bp, synthetic construct
  source 1..75: mol_type = other DNA
catcggaaaaaccaaccggcagaacaaacaatcactacacgtacggtagtcgataatcagcctacgaataacgca

SEQ ID NO: 687308 - DNA, 75 bp, synthetic construct
  source 1..75: mol_type = other DNA
ggggagtcaaaaggcgttggggagttgagggagtcaaatagcggtgcggaaaacaccacagaaactcagacctca

SEQ ID NO: 687309 - DNA, 75 bp, synthetic construct
  source 1..75: mol_type = other DNA
ggttctgtttttttattaaatgaatatttgaatataaatgttccacaagaaattatagacttatcaaaacaagcc

SEQ ID NO: 687310 - DNA, 75 bp, synthetic construct
  source 1..75: mol_type = other DNA
ccattttaaaaacaggtgctctattctctcctgtattatcgataattgggattatatctttggttcttagggaag

SEQ ID NO: 687311 - DNA, 75 bp, synthetic construct
  source 1..75: mol_type = other DNA
ttcagtaccgattatttaatcgatcttgtcacacgctttattaactggcagatgattggggtaatgccgatcagt

SEQ ID NO: 687312 - DNA, 75 bp, synthetic construct
  source 1..75: mol_type = other DNA
ggattaacggggagtggcgagagcgcagtaaatactgcaaatgcaaatgccgcaccaacgccgggaccagtacgt

SEQ ID NO: 687313 - DNA, 75 bp, synthetic construct
  source 1..75: mol_type = other DNA
ctcaacttcaacttccagcctccgttcagatcctaaattgtggttggcgctggggactattactgctggtctggt

SEQ ID NO: 687314 - DNA, 75 bp, synthetic construct
  source 1..75: mol_type = other DNA
tcagtgaacaagagtttgccagcttgcaggctattgatcctgagggtaatggtcgatttgtatttactggcgctc

SEQ ID NO: 687315 - DNA, 75 bp, synthetic construct
  source 1..75: mol_type = other DNA
taaccaagttaccggaaggttaatgggaactccagggcaaggtatccaaagtacttatgcgattctgacaaacaa

SEQ ID NO: 687316 - DNA, 75 bp, synthetic construct
  source 1..75: mol_type = other DNA
gacgtggtggtagtgggcattccatggtcactgctgcatcagatatcgcagacgctcgtgtgagaataatggcca

SEQ ID NO: 687317 - DNA, 75 bp, synthetic construct
  source 1..75: mol_type = other DNA
tattaaattctcaagaattgcaaagcttgcaagctatcgatattgaggataaaggccgatttgtttttaccgggg

SEQ ID NO: 687318 - DNA, 75 bp, synthetic construct
  source 1..75: mol_type = other DNA
aaataaaatacggaacgaggatgatccgagaaaagatctgcttactgagtttgcacggtttgtctcttattatac

SEQ ID NO: 687319 - DNA, 75 bp, synthetic construct
  source 1..75: mol_type = other DNA
agcagcagttaaaacagcaggtgcatttatcagctttcaggctgtactatccgcttatcagcgagtaatggaagt

SEQ ID NO: 687320 - DNA, 75 bp, synthetic construct
  source 1..75: mol_type = other DNA
cgctattaatcctccaaaacaaccaagacggccacgaattagcggcaacagagcaatcacagcagcttattcagc

SEQ ID NO: 687321 - DNA, 75 bp, synthetic construct
  source 1..75: mol_type = other DNA
gaaagctaacaccgatggcattgacggcaaactatcctcagttccgggctcatggatggtgtgtaatgaaattac

SEQ ID NO: 687322 - DNA, 75 bp, synthetic construct
  source 1..75: mol_type = other DNA
tctattagctggtagtgcagtttatgcaggttatgaaagactatcttcaacacctgaacgaatggaagcacaagc

SEQ ID NO: 687323 - DNA, 75 bp, synthetic construct
  source 1..75: mol_type = other DNA
ctagcagccttgataacctgtcttcagcagcagttagagcagcaggtgcatttatcagctttcaggctgtattag

SEQ ID NO: 687324 - DNA, 75 bp, synthetic construct
  source 1..75: mol_type = other DNA
caatgctcaacttgcaatgactattagtgaactatcacgcaaggtagacgctttaacagcagaaactaagaagcc

SEQ ID NO: 687325 - DNA, 75 bp, synthetic construct
  source 1..75: mol_type = other DNA
aacaacctggatgaagaagaaaaagcagcattgtccagacgtgccggcaagctggctattatgctgaaatctccc

SEQ ID NO: 687326 - DNA, 75 bp, synthetic construct
  source 1..75: mol_type = other DNA
agagttcgagcaactggctaccgaaaacaacctggatgaagaagaaaaagcagcattgtccagacgtgccggcaa

SEQ ID NO: 687327 - DNA, 75 bp, synthetic construct
  source 1..75: mol_type = other DNA
cggcgccgccgacttcatgggcggaaaaaagtactactggaaaaacgttgaatctttctttgtccctaacttgct

SEQ ID NO: 687328 - DNA, 75 bp, synthetic construct
  source 1..75: mol_type = other DNA
gcgctgaccgttgatctcaatacactgggaaaaccagaacaccacggggattactatcagtcggccaataaagat

SEQ ID NO: 687329 - DNA, 75 bp, synthetic construct
  source 1..75: mol_type = other DNA
tttgatttatatgtggaacatcctgatgtatgccattccgtatacgttatatgcgcttgcagcagggtttcttgt

SEQ ID NO: 687330 - DNA, 75 bp, synthetic construct
  source 1..75: mol_type = other DNA
gactatgaagctggtgttatcaaggccatcgactggttgaaaggcctgttggatgctgcgaaagataccgtacaa

SEQ ID NO: 687331 - DNA, 75 bp, synthetic construct
  source 1..75: mol_type = other DNA
ccggcgattaccgcgctccgggatcactggccgggatgattaaacaggcgtggtgcagtgccctgggagtagatg

SEQ ID NO: 687332 - DNA, 75 bp, synthetic construct
  source 1..75: mol_type = other DNA
attaaacaggcgtggtgcagtgccctgggagtggatgtcgggtgccatgccacgctggtgcattttccggcctgg

SEQ ID NO: 687333 - DNA, 75 bp, synthetic construct
  source 1..75: mol_type = other DNA
aattactgtcttatatcattggcgctgacagcagcaacggacgcagctgtgatatcccgcttcatcaatgccctg

SEQ ID NO: 687334 - DNA, 75 bp, synthetic construct
  source 1..75: mol_type = other DNA
cccattgctctgcacgccagagaagcctatgctgctgggtttcagtgaatccagttatcagcaatttttccatga

SEQ ID NO: 687335 - DNA, 75 bp, synthetic construct
  source 1..75: mol_type = other DNA
attgtgacaccattaaaaaggctcgccgttggctggaagccaataacatcgactatcgttttcatgattaccgcg

SEQ ID NO: 687336 - DNA, 75 bp, synthetic construct
  source 1..75: mol_type = other DNA
tcactggccgggatgattaaacaggcgtggtgcagtgccctgggagtggataccggagatcataccacgctggcg

SEQ ID NO: 687337 - DNA, 75 bp, synthetic construct
  source 1..75: mol_type = other DNA
aacggacgcagctgtgatatcccgcttcatcaatgccctgaaagcccgaatctacgcttaccagaaacgtaagcg

SEQ ID NO: 687338 - DNA, 75 bp, synthetic construct
  source 1..75: mol_type = other DNA
cagcaacgtattcgtgagacggtgcggcacgcactgaatgttcatccccgcctgacggcattgcgggttgacctg

SEQ ID NO: 687339 - DNA, 75 bp, synthetic construct
  source 1..75: mol_type = other DNA
tccggggtcactggccggtatgattgaacaggcctggtgcagtgccctgggggtggatgccgggccttatgccac

SEQ ID NO: 687340 - DNA, 75 bp, synthetic construct
  source 1..75: mol_type = other DNA
caacggacgcagctgtgatatcccgcttcatcaatgccctgaaagcccgaatcaacgcttaccagaatcgtaagc

SEQ ID NO: 687341 - DNA, 75 bp, synthetic construct
  source 1..75: mol_type = other DNA
aacggacgcagctgtgatatcccgcttcatcaatgccctgaaagcccgaatctacgcttaccagaagcgtaagca

SEQ ID NO: 687342 - DNA, 75 bp, synthetic construct
  source 1..75: mol_type = other DNA
aacggacgcagctgtgatatcccgcttcatcaatgccctgaaagcccgaatctacgcttaccagaatcgtaagct

SEQ ID NO: 687343 - DNA, 75 bp, synthetic construct
  source 1..75: mol_type = other DNA
ttttccggtcaggccggcggtgtggctggaacgcgatgatgacaccggctttcagcaggagctggagcgtgctga

SEQ ID NO: 687344 - DNA, 75 bp, synthetic construct
  source 1..75: mol_type = other DNA
cggttcttggtttgcctggcgtcatcagtccagcgacgaatacattgattattttgccgtttcgctacgcatcat

SEQ ID NO: 687345 - DNA, 75 bp, synthetic construct
  source 1..75: mol_type = other DNA
cggactgggtcgccaggtggtgagaccattgccacgccggagcaagaaacgaaacctgtaagcaaaaaaccagca

SEQ ID NO: 687346 - DNA, 75 bp, synthetic construct
  source 1..75: mol_type = other DNA
cccgttctggccgctttatgctgcaagacctgctgggtaacttcatcccgttcctgaaaaaaaccgactctctgg

SEQ ID NO: 687347 - DNA, 75 bp, synthetic construct
  source 1..75: mol_type = other DNA
acgctgttcaccggttggtcatgggtgaccattgctgaaaaactcggcggctggattttaaatattcttaccttc

SEQ ID NO: 687348 - DNA, 75 bp, synthetic construct
  source 1..75: mol_type = other DNA
ccgcaatatcagcagccacaacaaccggttgcacagcagccgcagtatcagcagccgcaacagccggttgcaccg

SEQ ID NO: 687349 - DNA, 75 bp, synthetic construct
  source 1..75: mol_type = other DNA
ggccttggcatcaccatgcctaatctgcatgaaatgggtggcgagaacgcgccgatcatcatggcacagctgaaa

SEQ ID NO: 687350 - DNA, 75 bp, synthetic construct
  source 1..75: mol_type = other DNA
attacgtctgggcccgggagtttggggagtgcaaaggtaaaaaacactatcacctgatgctgctggtcaaccggg

SEQ ID NO: 687351 - DNA, 75 bp, synthetic construct
  source 1..75: mol_type = other DNA
gctgactatctggcgaaggagcataccaaagctcactgcaccggtgagcgcaattttggctgtagccggagttga

SEQ ID NO: 687352 - DNA, 75 bp, synthetic construct
  source 1..75: mol_type = other DNA
cgtccatcatcgaaccgggtctttacttcgcgatgaacaccccgcctgctggcctcggcatcaccatgcctaacc

SEQ ID NO: 687353 - DNA, 75 bp, synthetic construct
  source 1..75: mol_type = other DNA
gcgaaagacattggtgagccttctgtcctgaaccgtgcaggtggtgcgccgacgctggcggtaggtatcgctcac

SEQ ID NO: 687354 - DNA, 75 bp, synthetic construct
  source 1..75: mol_type = other DNA
ccgacgatatctggtattttgcctctggtggcgtaatcggtagtttattaagcaccacgttgcagcctctgctac

SEQ ID NO: 687355 - DNA, 75 bp, synthetic construct
  source 1..75: mol_type = other DNA
tccgggctcactggccggcatgatttaacaggcctggtgcagtgccctgggggtggatgccgggccttatgccac

SEQ ID NO: 687356 - DNA, 75 bp, synthetic construct
  source 1..75: mol_type = other DNA
gcaggcttctggttttacccgtatgcaggtggcgctgtcggtgatgaaaaccgccattccgctggtcttgttgac

SEQ ID NO: 687357 - DNA, 75 bp, synthetic construct
  source 1..75: mol_type = other DNA
gctgtcgttcatcttcggtccactgcgcagcgtgccgatgggggtacgggtggtcaccggtatcagcttcggctt

SEQ ID NO: 687358 - DNA, 75 bp, synthetic construct
  source 1..75: mol_type = other DNA
agcccttttcaggcggcgtggtggacgaaggttttatcagcggggatattgtcattgactgtcagtcatacccgg

SEQ ID NO: 687359 - DNA, 75 bp, synthetic construct
  source 1..75: mol_type = other DNA
gcggtgtggctggcgcgtaatgatgacaccggctttcagcaagtgctggaacgtgctgactatctggcgaaagag

SEQ ID NO: 687360 - DNA, 75 bp, synthetic construct
  source 1..75: mol_type = other DNA
aggcgaatgccctgatgtgtttgaactgatcaacgtgccggttaagtcgcataccaatcacgggcgtaacgcgga

SEQ ID NO: 687361 - DNA, 75 bp, synthetic construct
  source 1..75: mol_type = other DNA
aaaaggtttttttaaagcaaaatgtgaagctgttttaaggtgggattatatgaaaaaaatgaaaatcatttcacc

SEQ ID NO: 687362 - DNA, 75 bp, synthetic construct
  source 1..75: mol_type = other DNA
aatccccgtggacgcgtgacgcgcgctttagcgctgacgtcgttgcgatcgcgccggacgtttctggactcatta

SEQ ID NO: 687363 - DNA, 75 bp, synthetic construct
  source 1..75: mol_type = other DNA
gcacaggagaaacgccaggaggccggacgtcgtaaccgtctcggtgtgcaggcgatgtctcgcgaagagatcgac

SEQ ID NO: 687364 - DNA, 75 bp, synthetic construct
  source 1..75: mol_type = other DNA
ttttacaacccgggagggaacgaactcagctggacgttccgcgcaccgtctggttgtaccctgtccggtattctg

SEQ ID NO: 687365 - DNA, 75 bp, synthetic construct
  source 1..75: mol_type = other DNA
acgaccctgcattacgccagggcccgggagttcggggagctaaaaggcaaaaaacactatcacctgctgctggtc

SEQ ID NO: 687366 - DNA, 75 bp, synthetic construct
  source 1..75: mol_type = other DNA
ctgcattacgtctgggcccgggagtttggggagtgcaaaggtaaaaaacactatcatctgatgctgctggtcaac

SEQ ID NO: 687367 - DNA, 75 bp, synthetic construct
  source 1..75: mol_type = other DNA
atgacctacaaatacaaccccttctggcagcaacgtattcgtgagacggtgttgcacgcactggatgttcatccc

SEQ ID NO: 687368 - DNA, 75 bp, synthetic construct
  source 1..75: mol_type = other DNA
gtctgggcccgggagtttggggagttcaaaggtaaaaaacactatcacctgatgctgctggtcaaccgggatacc

SEQ ID NO: 687369 - DNA, 75 bp, synthetic construct
  source 1..75: mol_type = other DNA
aaccccttctggcagcaacgtattcgtgagacggtgcggcacgcactgaatgttcatccccgcctgacggcattg

SEQ ID NO: 687370 - DNA, 75 bp, synthetic construct
  source 1..75: mol_type = other DNA
tggataccggagatcataccacgctggcgcattttccggtcaggccggctgtgtggctggaacgcgatgatgaca

SEQ ID NO: 687371 - DNA, 75 bp, synthetic construct
  source 1..75: mol_type = other DNA
tccgggttcactggccgggatgattgaacaggcctggtgcagtgccctgggggtggatgccgggccttatgccac

SEQ ID NO: 687372 - DNA, 75 bp, synthetic construct
  source 1..75: mol_type = other DNA
gtgcaaaggtaaaaaacactatcatctgatgctgctggtcaaccgggatacctggtgtcgtgccggtgattaccg

SEQ ID NO: 687373 - DNA, 75 bp, synthetic construct
  source 1..75: mol_type = other DNA
cctgaaagcccgaatcgacgcttaccagaaacgtaagcatcgggaaggtaaacgcgtgcatcccacaaccctgca

SEQ ID NO: 687374 - DNA, 75 bp, synthetic construct
  source 1..75: mol_type = other DNA
ttttccggtcaggccggcggtgtggctggaacgcgatgatgacactggctttcagcaggtgctggaacgtgctga

SEQ ID NO: 687375 - DNA, 75 bp, synthetic construct
  source 1..75: mol_type = other DNA
tctggctatctggcgaaggagcataccaaagctcgcggcaccggtgagcgcaattttggctgtagccggagttga

SEQ ID NO: 687376 - DNA, 75 bp, synthetic construct
  source 1..75: mol_type = other DNA
gctattaggtattcgtatcgacgccaatgtaatgcaaggtatctggcaaatgaccagacagggcgatgcgataac

SEQ ID NO: 687377 - DNA, 75 bp, synthetic construct
  source 1..75: mol_type = other DNA
atgtcgttgaagtggcgaaaaacaatgctaaagcctccggcggtagcttccgtcaggtcaccagcatggaagaag

SEQ ID NO: 687378 - DNA, 75 bp, synthetic construct
  source 1..75: mol_type = other DNA
ggcgcggggatgtataccctgctgagcgtgccgaaagatgtgcaaatcttcttcccgatggcggccctgctgggc

SEQ ID NO: 687379 - DNA, 75 bp, synthetic construct
  source 1..75: mol_type = other DNA
tcgggaaggtaaacgcgtgcatcccaccaccctgcattacgtctgggcccgggagtttggggagtgcaaaggtaa

SEQ ID NO: 687380 - DNA, 75 bp, synthetic construct
  source 1..75: mol_type = other DNA
cggctttctgatccgcattattgagtggtggcagatcggagaggcaccgggcacgtttcgtctggatatcggcgt

SEQ ID NO: 687381 - DNA, 75 bp, synthetic construct
  source 1..75: mol_type = other DNA
atgatggaactctacatggcgtatgcggattaccacgatttgattgaactgacagagtccctgttccgcaccctg

SEQ ID NO: 687382 - DNA, 75 bp, synthetic construct
  source 1..75: mol_type = other DNA
agtgaaccggacggtgcgggtccgggccgggtcacgcgtaaaaagaccgtggtggtgaacacgacgcctgcctgg

SEQ ID NO: 687383 - DNA, 75 bp, synthetic construct
  source 1..75: mol_type = other DNA
taagcgatgccaaaccatgtagccggcacatgatcggcatgtccatcaaactgcagaccagcggcccgcattggg

SEQ ID NO: 687384 - DNA, 75 bp, synthetic construct
  source 1..75: mol_type = other DNA
taagcgatgccaaaccatgtagccgtcacatgatcggcatgtccatcaatctgcagaccagcggcccgcattggg

SEQ ID NO: 687385 - DNA, 75 bp, synthetic construct
  source 1..75: mol_type = other DNA
taagcgatgccaaaccatgtagccgacacatgatcggcatgtccatcaagctgcagaccagcggcccgcattggg

SEQ ID NO: 687386 - DNA, 75 bp, synthetic construct
  source 1..75: mol_type = other DNA
cgcctgttctgttgatgaaattgctgcggttaacaagcaaatcagtgatggtgcctttgctttgactggtgcatt

SEQ ID NO: 687387 - DNA, 75 bp, synthetic construct
  source 1..75: mol_type = other DNA
aatcgccatcggataaaagacttaatagtgaaagtctcaggaaactgatgtcgaacattaaagatgttgctgaag

SEQ ID NO: 687388 - DNA, 75 bp, synthetic construct
  source 1..75: mol_type = other DNA
gctctgcgaaacctgaggagaaagagtattcacttgttgacggcgacggcatgtgtagtggtcaacaaaaactgg

SEQ ID NO: 687389 - DNA, 75 bp, synthetic construct
  source 1..75: mol_type = other DNA
caatgacattcgccggcgcgggctggagatttccgtgaagacgctgaaacgctgccttgccgccgtcacccgctc

SEQ ID NO: 687390 - DNA, 75 bp, synthetic construct
  source 1..75: mol_type = other DNA
gcagaagcacatctgatccagccgaccttcattactgaatatccggcagaagtttctcctctggcgcgtcgtaac

SEQ ID NO: 687391 - DNA, 75 bp, synthetic construct
  source 1..75: mol_type = other DNA
agcagcctggcaaagggcgaagccaccaaagctgcgtttaatcagatggtgcaagggcataagctaccagtctgg

SEQ ID NO: 687392 - DNA, 75 bp, synthetic construct
  source 1..75: mol_type = other DNA
agtaccagtctgagttcgtccatgtttgtcaccggtgcggcaccaaacgtgctgggtctggagttcgtcagcaaa

SEQ ID NO: 687393 - DNA, 75 bp, synthetic construct
  source 1..75: mol_type = other DNA
gtcggcgagcgggcgcgcgagtttgcgctgcaaaaagcgcttggttccagcaacggcgatatcgtgcggcaaatt

SEQ ID NO: 687394 - DNA, 75 bp, synthetic construct
  source 1..75: mol_type = other DNA
accctgtaattttcggtcttgttatcgtaccattattggtatggccgacggttattgccttagccgtacttatat

SEQ ID NO: 687395 - DNA, 75 bp, synthetic construct
  source 1..75: mol_type = other DNA
taagcgatgccaaaccatgcagccgtcacatgactggcatgtccatcaatctgcagaccagcggtccgcattggg

SEQ ID NO: 687396 - DNA, 60 bp, synthetic construct
  source 1..60: mol_type = other DNA
atgcaggatattcacgaagaaagtctgagcgagtcggttaaatcagagcagtcaccgcgg

SEQ ID NO: 687397 - DNA, 75 bp, synthetic construct
  source 1..75: mol_type = other DNA
atgagtacgtccacaaacagtgtgcaacagggtgagcaggggcttgccctgattgccatgatcatcatttcgatc

SEQ ID NO: 687398 - DNA, 75 bp, synthetic construct
  source 1..75: mol_type = other DNA
ctggtcgccattctggcggcgattgttccggtgcgacgcgcggtaagcgtcgagcctgctaaagtgctgaaagga

SEQ ID NO: 687399 - DNA, 75 bp, synthetic construct
  source 1..75: mol_type = other DNA
ggaacacgcgctgccgctgattgctgaacagttgcagggtcgccgttctgcggtatttattcctttcgctggcgt

SEQ ID NO: 687400 - DNA, 75 bp, synthetic construct
  source 1..75: mol_type = other DNA
tcgctaagttcaggggagaagcaacgtgcaataatggatattgcatatgggtttcttaccaatcatagagaaaat

SEQ ID NO: 687401 - DNA, 75 bp, synthetic construct
  source 1..75: mol_type = other DNA
gttcggcttcttcatccgggttaacgagtggtggaacatcgacaccgcaccgggcaccttcacgctggatattgg

SEQ ID NO: 687402 - DNA, 75 bp, synthetic construct
  source 1..75: mol_type = other DNA
caacgccactggagcgccgactggcgcaagcgtgtagcgggatttctgatctgcaggtgccgctgcgtgacttgt

SEQ ID NO: 687403 - DNA, 75 bp, synthetic construct
  source 1..75: mol_type = other DNA
cgtcgccgcttgagcgccgactggcgcagacctgcagcgggatttccgatctgcaggtatcgctgcgtgatttgt

SEQ ID NO: 687404 - DNA, 75 bp, synthetic construct
  source 1..75: mol_type = other DNA
acaaaccggaagtcactcatagtgaagaagtggcaacctgggcgggtgacgaactgaaaacaatgggtcgcctga

SEQ ID NO: 687405 - DNA, 75 bp, synthetic construct
  source 1..75: mol_type = other DNA
tgacctggcaggtcagagctgacctccgccgcaaactcaaagccaaccgggatcataaaaatctcagctggaatc

SEQ ID NO: 687406 - DNA, 75 bp, synthetic construct
  source 1..75: mol_type = other DNA
gtcagcgggtagggattgcccgcgcgctggcggctaatccccggatgttattactcgacgaaccgtttggcgcgc

SEQ ID NO: 687407 - DNA, 75 bp, synthetic construct
  source 1..75: mol_type = other DNA
ggtgtttatggcgactgaactggttctgctttcacccggcccaggccgtgtgctggagcggctgccgctcaactt

SEQ ID NO: 687408 - DNA, 75 bp, synthetic construct
  source 1..75: mol_type = other DNA
ggtgttgacccacgaatctctctggagctggtctatgcgattagctgtcagattggtggaatgcagatttatttt

SEQ ID NO: 687409 - DNA, 75 bp, synthetic construct
  source 1..75: mol_type = other DNA
cgcaccagatgctgaaaaaagtggggctggaaggcgcagaaaaacgctacatctggcagctttccggtggtcaac

SEQ ID NO: 687410 - DNA, 75 bp, synthetic construct
  source 1..75: mol_type = other DNA
agtggcgaactgttggtggtgctgggaccgtctggctgcggcaaaaccaccttgctgaatctgattgctggtttt

SEQ ID NO: 687411 - DNA, 75 bp, synthetic construct
  source 1..75: mol_type = other DNA
tgattacccacgatatagaagaagcggtgtttatggcgactgaactggttctgctttcatccggtcctggccgtg

SEQ ID NO: 687412 - DNA, 75 bp, synthetic construct
  source 1..75: mol_type = other DNA
cgcaggctcttgcatccaccctgctcctgtatcatttgccgtcctttgcacaacccgttaaattctgggcctcac

SEQ ID NO: 687413 - DNA, 75 bp, synthetic construct
  source 1..75: mol_type = other DNA
gtgatcccgaaactcgattttcagggtacggagtcactgaatacgctacgtgaccgtattacccagattaacggc

SEQ ID NO: 687414 - DNA, 75 bp, synthetic construct
  source 1..75: mol_type = other DNA
gcgatgatcggcgtgttgatggtggcagcagtgttcctcgtcatcggcaacagtgtgcgtctgagcatctttgct

SEQ ID NO: 687415 - DNA, 75 bp, synthetic construct
  source 1..75: mol_type = other DNA
ggcaatgattgtcggaatgatcctcgaaccaatcccggcaacggcgatcagttttattgcagtcactatttgcgt

SEQ ID NO: 687416 - DNA, 75 bp, synthetic construct
  source 1..75: mol_type = other DNA
cacaaatcccctggttattgcttaacgggaaactggaacaatccgcagaacagttaacaacgctgggcaaaacgt

SEQ ID NO: 687417 - DNA, 75 bp, synthetic construct
  source 1..75: mol_type = other DNA
acaggtttccatggaaaatctcctgcgctggcagccggatattattctggttcaggaggccgttactgcagattt

SEQ ID NO: 687418 - DNA, 75 bp, synthetic construct
  source 1..75: mol_type = other DNA
taccgtggcgcaatgtacaggacaacgtggcgttcggcctgcaattggcaggtatagagaaaatgcagcgactgg

SEQ ID NO: 687419 - DNA, 75 bp, synthetic construct
  source 1..75: mol_type = other DNA
cgccgctggtggtacgtgcatcgaatcttcagctacggaacacaacacgtcggctccctttattactgcatcccg

SEQ ID NO: 687420 - DNA, 75 bp, synthetic construct
  source 1..75: mol_type = other DNA
gagctgataaaaggccttagggcagacctgcgtgaggcgggtgagagcaatattggtataatttttcagcaataa

SEQ ID NO: 687421 - DNA, 75 bp, synthetic construct
  source 1..75: mol_type = other DNA
tgaaatcgtttatgtgctggataacccggacgggcgtgactctttccatgcgattgacgcagacggtgagcagga

SEQ ID NO: 687422 - DNA, 75 bp, synthetic construct
  source 1..75: mol_type = other DNA
aaatattcaagcagtttgggcttgttttagagtgtcccgattggtctggcgacggtgaactctacatacatgtaa

SEQ ID NO: 687423 - DNA, 75 bp, synthetic construct
  source 1..75: mol_type = other DNA
cgggagataacaataatcattgatgaaatattcaagcagtttgggcttgttttagagtgtcccgattggtctggc

SEQ ID NO: 687424 - DNA, 75 bp, synthetic construct
  source 1..75: mol_type = other DNA
agtcagcgacgaaacaggagaagagtcattcactgaactggataacaaccaacgcgaactgacttaccaggaacc

SEQ ID NO: 687425 - DNA, 75 bp, synthetic construct
  source 1..75: mol_type = other DNA
catcaaaaatatggtactgccgaatactcttttattctagaaagcatacctcttttacaagaaaaatatggtgat

SEQ ID NO: 687426 - DNA, 75 bp, synthetic construct
  source 1..75: mol_type = other DNA
gtttgggctacagcttgcgggcgtcaatcgcgaacagcggctggaaacggcacggacgatgctgaaaaaagtggg

SEQ ID NO: 687427 - DNA, 75 bp, synthetic construct
  source 1..75: mol_type = other DNA
agcggcgaactgttggtggtgctggggccgtccggctgtggcaaaaccactttgctgaatctgattgctggtttt

SEQ ID NO: 687428 - DNA, 75 bp, synthetic construct
  source 1..75: mol_type = other DNA
gacgcgtttcaggctctcttatatcgaccagatgttggcacatatggggtagtcagcgacgaaacaggagaagag

SEQ ID NO: 687429 - DNA, 75 bp, synthetic construct
  source 1..75: mol_type = other DNA
gccacataaatcaaataatagatttttatattcagacgtaatgaggtttatagaatcactaaaagacaaagagaa

SEQ ID NO: 687430 - DNA, 75 bp, synthetic construct
  source 1..75: mol_type = other DNA
acaaaagcaaatcaatcttgttattgaaaaaaacaccactgattcatattactcacatctgaaaagcttcgctga

SEQ ID NO: 687431 - DNA, 75 bp, synthetic construct
  source 1..75: mol_type = other DNA
aagaaaagggatttttctatcgtttaacatcgcgctatcgccattatgctgcattcgagcgagcgactttcgaac

SEQ ID NO: 687432 - DNA, 75 bp, synthetic construct
  source 1..75: mol_type = other DNA
atgatcgtggcgttttgtttatataaatattttccatttggtggtctacagcgtgactttatgcgtattgcgtca

SEQ ID NO: 687433 - DNA, 75 bp, synthetic construct
  source 1..75: mol_type = other DNA
gtattgttctccttgaggcaattgccgcgggattacctgtgttgacgactgcggtatgcggatacgcacactata

SEQ ID NO: 687434 - DNA, 75 bp, synthetic construct
  source 1..75: mol_type = other DNA
cgttccgtaatccaaactttggtggtaacccaaataatggcgcttttttattaaatagcgctcaggcccaaaact

SEQ ID NO: 687435 - DNA, 75 bp, synthetic construct
  source 1..75: mol_type = other DNA
ttgggctggaaccatgactttccagttccgtaatccaaactttggtggtaacccaaataatggcgcttttttatt

SEQ ID NO: 687436 - DNA, 75 bp, synthetic construct
  source 1..75: mol_type = other DNA
tgtccaatattaataccggcaaaccggggcgcatggtgaccaatgattatattgtcgacattgccaaccgggatg

SEQ ID NO: 687437 - DNA, 75 bp, synthetic construct
  source 1..75: mol_type = other DNA
gtatcgttcttcttgaagcgatcgctgcaggattacctgttttggtcacatcggtatgtggatacgcgcattata

SEQ ID NO: 687438 - DNA, 75 bp, synthetic construct
  source 1..75: mol_type = other DNA
atatcccggatgacagaagaagagcgaagtaatcttatcgaagcactcaaaacgtcttcaggtgtaaaacatggt

SEQ ID NO: 687439 - DNA, 75 bp, synthetic construct
  source 1..75: mol_type = other DNA
atggcgttagagttaaacgtgccgttaaactactttttttgtgatgatcagaccacagcagaacttgcgttactc

SEQ ID NO: 687440 - DNA, 75 bp, synthetic construct
  source 1..75: mol_type = other DNA
ggcctgggcggagaatgctcgccactatgccgatactcaggatttgtatagcctgccagagaaagctgcggatat

SEQ ID NO: 687441 - DNA, 75 bp, synthetic construct
  source 1..75: mol_type = other DNA
caattaaatgaggttttacgtaaagcgttaacacagtctcccctgcgagcggcctgggcggagaatgctcgccac

SEQ ID NO: 687442 - DNA, 75 bp, synthetic construct
  source 1..75: mol_type = other DNA
atggtaaatcgacgaaacttatgatgttgaccgataagcaaatcgccgattttcagaagcattaccaaactgaac

SEQ ID NO: 687443 - DNA, 75 bp, synthetic construct
  source 1..75: mol_type = other DNA
gattatgtcgcaggctaacccggagctggagcagcaaatcgcaaactatgaatatcgtatcggcattggggatgt

SEQ ID NO: 687444 - DNA, 75 bp, synthetic construct
  source 1..75: mol_type = other DNA
atgacacccgcagttaaattactcgaaaaaaacaagatttcattccagattcatacctacgatcacgatccggct

SEQ ID NO: 687445 - DNA, 75 bp, synthetic construct
  source 1..75: mol_type = other DNA
agtgaatccagattaaacatctcattgctgatgcttgaagttgagcatctggcgcgcggtaaggggctgcgttga

SEQ ID NO: 687446 - DNA, 75 bp, synthetic construct
  source 1..75: mol_type = other DNA
agccattggtacacaagcagtgatgcacttgaaccgacgggtgcgtttcttctccaccgtggatttggtcaatgc

SEQ ID NO: 687447 - DNA, 75 bp, synthetic construct
  source 1..75: mol_type = other DNA
cattgctgatgcttgatattgagcatctggcgcgcggtaagggctgtgttgagataagtgccagttcattacaaa

SEQ ID NO: 687448 - DNA, 75 bp, synthetic construct
  source 1..75: mol_type = other DNA
ccacacctacgagcacgatccggctgaaaccaattttggcgatgaagtcgtcaaaaaattaggtttgaatccgga

SEQ ID NO: 687449 - DNA, 75 bp, synthetic construct
  source 1..75: mol_type = other DNA
tggctgtggccgttacgcctgtcgccggccaactggatcttaaaaaggtggcaaaggcgctgggtgccaaaaaag

SEQ ID NO: 687450 - DNA, 75 bp, synthetic construct
  source 1..75: mol_type = other DNA
tggtattctgctcagtaaccgggagtttactgaagatgccatcaggatgagaaaatatgagccttatcttctcaa

SEQ ID NO: 687451 - DNA, 75 bp, synthetic construct
  source 1..75: mol_type = other DNA
tttactgaagatgccattaatatgaggaaatatgagccttatctgctcaatgataattccatactttcccgaatt

SEQ ID NO: 687452 - DNA, 75 bp, synthetic construct
  source 1..75: mol_type = other DNA
ggaaatatgaaccttatcttctcaatgataattccatactttccagaattgcccttattgaacttggcattttcg

SEQ ID NO: 687453 - DNA, 75 bp, synthetic construct
  source 1..75: mol_type = other DNA
acagggaaatgagataaataagcagctatcaagtgcaatgtctcagattcagagtttaagtaaccgaattgagtc

SEQ ID NO: 687454 - DNA, 75 bp, synthetic construct
  source 1..75: mol_type = other DNA
tcctggacatttcgctcacctgcaggctacgggttatccggtattaatgtgcaggaaaccggaagtaattcggca

SEQ ID NO: 687455 - DNA, 75 bp, synthetic construct
  source 1..75: mol_type = other DNA
ttttcgtcgttcggaagagtgcctgcatcttatccctaccagtgaaggtcagggcgagaatggcgatattggtcc

SEQ ID NO: 687456 - DNA, 75 bp, synthetic construct
  source 1..75: mol_type = other DNA
tgcactgcgtgcaatggaagctccgctgcgtcagatcgtactgaactgcggtgaagagccgtcagttgttgctaa

SEQ ID NO: 687457 - DNA, 75 bp, synthetic construct
  source 1..75: mol_type = other DNA
ctgctcccggaaatttggtatgggagcgcagactgtgctgaatatcgcgcagtccctgtatgagacgcacaaagc

SEQ ID NO: 687458 - DNA, 75 bp, synthetic construct
  source 1..75: mol_type = other DNA
gcggtatcctgagtgtaagggcgtggtgaacacgcagaaaaaggccgggcggcgaaaaaaaacgggaaaaactaa

SEQ ID NO: 687459 - DNA, 75 bp, synthetic construct
  source 1..75: mol_type = other DNA
cctgttttccggggaggctgcagacgctgctgaaggtgaagatgaacaggcgacggaaatggcgttgccggcgct

SEQ ID NO: 687460 - DNA, 75 bp, synthetic construct
  source 1..75: mol_type = other DNA
tcggtcaaggcccgggagaacggctacggtagcgttttatccgtggggcgggtgcagacgccgacgcttaacctg

SEQ ID NO: 687461 - DNA, 75 bp, synthetic construct
  source 1..75: mol_type = other DNA
ccagtcagggacgcgatattgccgctgtgctgggtgcgacaaagaaaatgccggggcatcaaaccggaaacggcg

SEQ ID NO: 687462 - DNA, 75 bp, synthetic construct
  source 1..75: mol_type = other DNA
atgaataagctggtttctgatggcagcgtacaaaaaaataattatccggtgctgtatgaatccggaataacacct

SEQ ID NO: 687463 - DNA, 75 bp, synthetic construct
  source 1..75: mol_type = other DNA
tcacgatgaagatggtggtttgctacacgttgccaaccaccatattgcgccaggtaaaaagcagtggagctgggg

SEQ ID NO: 687464 - DNA, 75 bp, synthetic construct
  source 1..75: mol_type = other DNA
cgcgtctataacggcaacgccacgccgcgtcatttcttgtggtgggccaacccggcagtgaaaggggggaagggc

SEQ ID NO: 687465 - DNA, 75 bp, synthetic construct
  source 1..75: mol_type = other DNA
aaccgggtagtttctcaactggtcccgacgatttccggggtacatgatctgacagaaacgtcacggtggctccgg

SEQ ID NO: 687466 - DNA, 75 bp, synthetic construct
  source 1..75: mol_type = other DNA
gcccgtctgtatgatgccggcctggcccgtggtcaggctgactggctaatcgggatgaacctgacgcgtctgtat

SEQ ID NO: 687467 - DNA, 75 bp, synthetic construct
  source 1..75: mol_type = other DNA
gctggaaaaaaccgatccggatattgccccggagctggcaaaactcagtcctgatattgtgtcggggatctggaa

SEQ ID NO: 687468 - DNA, 75 bp, synthetic construct
  source 1..75: mol_type = other DNA
agagcagtatcagggaggcgctgggcaggatactgcccggagaggagaccgagaagttatatgaagccggtaagg

SEQ ID NO: 687469 - DNA, 75 bp, synthetic construct
  source 1..75: mol_type = other DNA
gctgataaagtgcttgaaatcgcgcaaagtctgtatgaaaaacataaagccaccacgtatccccggacggactgc

SEQ ID NO: 687470 - DNA, 75 bp, synthetic construct
  source 1..75: mol_type = other DNA
atgtggcatacattacttaactggccttggggaactgtgtggtcagctgtatcggctttaggttcaattgtaact

SEQ ID NO: 687471 - DNA, 75 bp, synthetic construct
  source 1..75: mol_type = other DNA
gcaacaactgttaagtaaacaatctcagtgtaatttgggagttcttgtttttgcttttgttgaagcccatgcaat

SEQ ID NO: 687472 - DNA, 75 bp, synthetic construct
  source 1..75: mol_type = other DNA
gggcgaaatatggggataggcgatattggttatagccaggatggcgtgattggcaatgcttacaatgaaatctta

SEQ ID NO: 687473 - DNA, 75 bp, synthetic construct
  source 1..75: mol_type = other DNA
cgctggatggtgatttgattcgttatgacagtaaagaaccgggcaaaacggagctggcgacacgcaaactggcgg

SEQ ID NO: 687474 - DNA, 75 bp, synthetic construct
  source 1..75: mol_type = other DNA
cactggacggtgatttaattcgttacgacagtaaagagcccgggaaaaccgaactggcaacgcgcaaactggcgg

SEQ ID NO: 687475 - DNA, 75 bp, synthetic construct
  source 1..75: mol_type = other DNA
tccaactggaaagcccgaaaatcactcgtaaccttacaacagcatggtttgcgaagcgcgttgatgagcgacggg

SEQ ID NO: 687476 - DNA, 75 bp, synthetic construct
  source 1..75: mol_type = other DNA
tccctcagatcatcctcgcacttgccactttcattacggctatcgcccgactcgttaaagagattaaaaagaaat

SEQ ID NO: 687477 - DNA, 75 bp, synthetic construct
  source 1..75: mol_type = other DNA
gctggtgagcagggaaacagcaggggcaggaaaagaaaaattaatttttctcataaacaaaaatctggtgatgtc

SEQ ID NO: 687478 - DNA, 75 bp, synthetic construct
  source 1..75: mol_type = other DNA
tgaactgaatgtctataaacttatccgtgcccattatctggcgcagtttttgccggatcaggaatgggatgcaac

SEQ ID NO: 687479 - DNA, 75 bp, synthetic construct
  source 1..75: mol_type = other DNA
accttgctcactaacgagggtatggctgatcatctatgggatatgttttttgagccaataaaacagcaggctcgt

SEQ ID NO: 687480 - DNA, 75 bp, synthetic construct
  source 1..75: mol_type = other DNA
tttcagccctggctactcaagggataccttgctcactaacgagggtatggctgaacatctctgggatatgttttt

SEQ ID NO: 687481 - DNA, 75 bp, synthetic construct
  source 1..75: mol_type = other DNA
aatcaggtattagaaaaatgatgctttgggatgatgatttaatgaagagtgaaaactcctctcgtcatctattag

SEQ ID NO: 687482 - DNA, 75 bp, synthetic construct
  source 1..75: mol_type = other DNA
ggatctgaaacggatggaaatctgcgcgaacgcattcaatcgctatgaatctgtcgcaaggaatatggtgccgag

SEQ ID NO: 687483 - DNA, 75 bp, synthetic construct
  source 1..75: mol_type = other DNA
ataatatgatggctgccgtttcggttgcgctgcaaccactggtcagggtattgccgatgacggcagttgaatggg

SEQ ID NO: 687484 - DNA, 75 bp, synthetic construct
  source 1..75: mol_type = other DNA
gtggatctgtgaaaacacgggcatgtggacccgtgacggcctgatgtttttcagcgcccggggtgatgaaattcc

SEQ ID NO: 687485 - DNA, 75 bp, synthetic construct
  source 1..75: mol_type = other DNA
caatcccctcacgctgaaacgcttttcctccggtgtggggttctggtgtctgggtggtgctgccgccaaaaacta

SEQ ID NO: 687486 - DNA, 75 bp, synthetic construct
  source 1..75: mol_type = other DNA
accattctgatgtttttcttcttatatctaactgggaaggcttccctatttctatactagaagcaatgagaagta

SEQ ID NO: 687487 - DNA, 75 bp, synthetic construct
  source 1..75: mol_type = other DNA
accgaaatgaccatttcccgtgtctgctgggacaccggggggatcgatggcgaaattgtctatcagaggtcaaaa

SEQ ID NO: 687488 - DNA, 75 bp, synthetic construct
  source 1..75: mol_type = other DNA
aaccggatgttgaaaaagagggttcgccaaccctgctgggggataaacgtattgagggctctgtatggccaaaat

SEQ ID NO: 687489 - DNA, 75 bp, synthetic construct
  source 1..75: mol_type = other DNA
ggacaccggggggatcgatggtgaaattgtttatcagagatcaaaaaaacacggtgttttccgggtgctgccggt

SEQ ID NO: 687490 - DNA, 75 bp, synthetic construct
  source 1..75: mol_type = other DNA
caccttccgttttccggataaccccgacattttttcggaagaagaggcgcgtcagatcgtggcggaagagctggt

SEQ ID NO: 687491 - DNA, 75 bp, synthetic construct
  source 1..75: mol_type = other DNA
tttcccgtgtctgctgggataccggtggtatcgaccaggacattgtgtatcagcgttccaggaaacacggcactt

SEQ ID NO: 687492 - DNA, 75 bp, synthetic construct
  source 1..75: mol_type = other DNA
atgaaaagattaattcctgtggcattgctcaccgcattgctggcgggctgtgctcacgattcgccctgcgttccg

SEQ ID NO: 687493 - DNA, 75 bp, synthetic construct
  source 1..75: mol_type = other DNA
atgcgtctgctgtgggataacaaaaagcggcgtaacgaagcgctggactgcctggtgtatgcctacgcggcatta

SEQ ID NO: 687494 - DNA, 75 bp, synthetic construct
  source 1..75: mol_type = other DNA
gtgctgccggtaaaaggcgcgtctgtctatggcaagccggtgatcaccatgccgaaaacccgcaatcagcggggc

SEQ ID NO: 687495 - DNA, 75 bp, synthetic construct
  source 1..75: mol_type = other DNA
gatgaaatatttggtttgaatgaaagaggacaaataacgcccacgcaaattactgagcatttaagcatagatgag

SEQ ID NO: 687496 - DNA, 75 bp, synthetic construct
  source 1..75: mol_type = other DNA
ttgagaaatgggttgctgaatgcgccgccagtaatttaccggcgcgacctgactccattgtttttgcactgatgg

SEQ ID NO: 687497 - DNA, 75 bp, synthetic construct
  source 1..75: mol_type = other DNA
tggtgaagggcgttttgttgataaggaccgtttttctgtggccccgtggcgctttggggtgctggaaacacagga

SEQ ID NO: 687498 - DNA, 75 bp, synthetic construct
  source 1..75: mol_type = other DNA
tgccgctaacgttaattgtcttttttgccgcccgcaaactggcggcgcggtataagtttcccttgcttaacccat

SEQ ID NO: 687499 - DNA, 75 bp, synthetic construct
  source 1..75: mol_type = other DNA
aattcaaagtctaaaaaaaatgatattaaaggtttccttgttgggtatcttccgaggattttattagacaaagat

SEQ ID NO: 687500 - DNA, 75 bp, synthetic construct
  source 1..75: mol_type = other DNA
gacaccaagtctaacgtacctggtggcgtatccactaaagaccacgacaccggcgtttctccggtcttcgctggc

SEQ ID NO: 687501 - DNA, 75 bp, synthetic construct
  source 1..75: mol_type = other DNA
gtttcagcatggggatcagtcccctgcatgagtacacgcgactttatacgaattaatggtcgctccgttgttgga

SEQ ID NO: 687502 - DNA, 75 bp, synthetic construct
  source 1..75: mol_type = other DNA
gacgtttttcagcgcccggggtgatgaaattccgccgccgcgctccatcatgttccatatctggacggcgtacag

SEQ ID NO: 687503 - DNA, 75 bp, synthetic construct
  source 1..75: mol_type = other DNA
cagataatgctttgatttacgtcgataatattcgtgatgcgttgataaaatacgatccggcaaatgcaaaaacat

SEQ ID NO: 687504 - DNA, 75 bp, synthetic construct
  source 1..75: mol_type = other DNA
atgtattcaataaaaaaagtaaccatgctcttggggtgcctcgccctcacctgctcgatcgcatttcaggcgagt

SEQ ID NO: 687505 - DNA, 75 bp, synthetic construct
  source 1..75: mol_type = other DNA
gtggtcattaccgctgacgttgattgtctttttgccgcccgcaaactggcggcacggtataagtttcccctgctt

SEQ ID NO: 687506 - DNA, 75 bp, synthetic construct
  source 1..75: mol_type = other DNA
cctcgcacgccctcggtacggcgcgctgcgccgagctggattatcaggaaggtgcatttagttcgctggcgctgg

SEQ ID NO: 687507 - DNA, 75 bp, synthetic construct
  source 1..75: mol_type = other DNA
gtgcgcgggcaggggataaattaccggatttactcgatgaatatatcagagcaacaactgaataatatgatgagt

SEQ ID NO: 687508 - DNA, 75 bp, synthetic construct
  source 1..75: mol_type = other DNA
gttgcctgcccgcactgcggggaggagcagtaccttaaatttggcgataaagagacgccatttggcctcaaatgg

SEQ ID NO: 687509 - DNA, 75 bp, synthetic construct
  source 1..75: mol_type = other DNA
gttgaatgggctgatcaaaattattatctgcctaaagaatcttcatatggtgagggagaatggaaaacgctgcca

SEQ ID NO: 687510 - DNA, 75 bp, synthetic construct
  source 1..75: mol_type = other DNA
tcccgggaagaagagacgacccggccaacccttaaagaactggcagcgaagctgtccggaggagtgaatggttac

SEQ ID NO: 687511 - DNA, 75 bp, synthetic construct
  source 1..75: mol_type = other DNA
aacggcgcaccggatgctatcgcatcggatgttgcccgcctgcacgcacactatttgcagcttgcgtcgcagttt

SEQ ID NO: 687512 - DNA, 75 bp, synthetic construct
  source 1..75: mol_type = other DNA
tacaacacaggataactgggaaactgccggagctattgctggcggggcggcggctgtcgccggccttacgatggg

SEQ ID NO: 687513 - DNA, 75 bp, synthetic construct
  source 1..75: mol_type = other DNA
tgcggcgatcaacaaaaaataccgccatgcagacggaaccgaaatgactatttcccgtgtctgctgggacatcgg

SEQ ID NO: 687514 - DNA, 75 bp, synthetic construct
  source 1..75: mol_type = other DNA
actggtcgcggaagagcttgtggagaagtgggaaaaaggaaagatgcgtctgctgtgggataacaaaaagcggcg

SEQ ID NO: 687515 - DNA, 75 bp, synthetic construct
  source 1..75: mol_type = other DNA
ccgtcataatagcgttaggtgcttttgtctggaatatcattagagataaatcagcagacttaaaatcagttgaat

SEQ ID NO: 687516 - DNA, 75 bp, synthetic construct
  source 1..75: mol_type = other DNA
actaaaaaaccaggacccgaccaatccaatggaaaacaacgagctgacgtcgcaactggcgcaaatcagcacggt

SEQ ID NO: 687517 - DNA, 75 bp, synthetic construct
  source 1..75: mol_type = other DNA
gttaactgacggcacaaccgctccaaatggttcttataacgtggcgattagcgccagtaacggtggtacgcagtt

SEQ ID NO: 687518 - DNA, 75 bp, synthetic construct
  source 1..75: mol_type = other DNA
ccgggtcttgcgcgagcggatcttcgccaacccggaagagaaaaactggcttaacgccctgctgcatccgctgat

SEQ ID NO: 687519 - DNA, 75 bp, synthetic construct
  source 1..75: mol_type = other DNA
gtgcgcgggcaggggataaattaccggatttacttgatgaatatatcagagcaacaactgaataatatgatgagc

SEQ ID NO: 687520 - DNA, 75 bp, synthetic construct
  source 1..75: mol_type = other DNA
gaaaggttagaaaagggtcaggatgatttagaatcagcactcaatgatttacgttctcagattcattcaatggat

SEQ ID NO: 687521 - DNA, 75 bp, synthetic construct
  source 1..75: mol_type = other DNA
aatgaaattccgccgccgcgctccatcacgttccatatctggacggcgtacagtccgttcaccacctgggtacag

SEQ ID NO: 687522 - DNA, 75 bp, synthetic construct
  source 1..75: mol_type = other DNA
ccccgtggctgggtcgtaaacatcgtgacaatactctcacgctgaaacgcttttcatcgggggtgggcttctggt

SEQ ID NO: 687523 - DNA, 75 bp, synthetic construct
  source 1..75: mol_type = other DNA
cgtgcaacgctggcagcttgatctggctgtactggcaaaatcccgggaagaagagacgacccggccaacccttaa

SEQ ID NO: 687524 - DNA, 75 bp, synthetic construct
  source 1..75: mol_type = other DNA
gagacgctgttacgtgtggatgcggcgatcaacaaaaaatactgccatgcagacggaaccgaaatgaccatttcc

SEQ ID NO: 687525 - DNA, 75 bp, synthetic construct
  source 1..75: mol_type = other DNA
tggcggtgccagcgtcgggctgctggcggagctcagcggcctgcatcgcaccactgtgcggcgactgctggaaac

SEQ ID NO: 687526 - DNA, 75 bp, synthetic construct
  source 1..75: mol_type = other DNA
gcgcaaagagggttacggacagaactaccgcggctgggatcaggaggagaagatcgcctctattgccgtaccgct

SEQ ID NO: 687527 - DNA, 75 bp, synthetic construct
  source 1..75: mol_type = other DNA
tttcctgatgatccggagattttttcgcagacagaggcgcagcaactggtagcggaagagcttgtggagaagtgg

SEQ ID NO: 687528 - DNA, 75 bp, synthetic construct
  source 1..75: mol_type = other DNA
gacattttttcggaagaagaggcgcgtcagatcgtggcggaagagctggtggagaaggtggttaatggcagggtg

SEQ ID NO: 687529 - DNA, 75 bp, synthetic construct
  source 1..75: mol_type = other DNA
ataatatgatgactgctgtttcggttgcgctgcagcctctggtcagagcggtaccgatgacggcagttgaatggg

SEQ ID NO: 687530 - DNA, 75 bp, synthetic construct
  source 1..75: mol_type = other DNA
ccgtgaaaaatccgtggatgtggtctgctatgacgaactttcctcgttcgaaccggatgttgaaaaagagggttc

SEQ ID NO: 687531 - DNA, 75 bp, synthetic construct
  source 1..75: mol_type = other DNA
agtctgaactggaccagagtaacgggcggtggatctgtgaaaacacgggcatgtggacccgtgacggtctgacgt

SEQ ID NO: 687532 - DNA, 75 bp, synthetic construct
  source 1..75: mol_type = other DNA
cacgactcaggataactgggaaacggctggggctattgccggcggggcagcagctgttgctggcctgacgatggg

SEQ ID NO: 687533 - DNA, 75 bp, synthetic construct
  source 1..75: mol_type = other DNA
gatgcggagatgttgaatacccggcctgaagatgaggaagaacagaagaatttcacgccgctttatggctgcctg

SEQ ID NO: 687534 - DNA, 75 bp, synthetic construct
  source 1..75: mol_type = other DNA
tatcatggcgaccgccagcatcctgcaacaatgggatttggttcgtgctattgctgctgaactggaaatcgaact

SEQ ID NO: 687535 - DNA, 75 bp, synthetic construct
  source 1..75: mol_type = other DNA
atccaggaagataatggtctttgcttcgatctgttggatttattgctccaccgtgacgatctgcaaaccattgag

SEQ ID NO: 687536 - DNA, 75 bp, synthetic construct
  source 1..75: mol_type = other DNA
tgcccgcaatctatctgcgttacccaggatttatccgcctgctacgaaaatattgatgcacctggctgggcgaat

SEQ ID NO: 687537 - DNA, 75 bp, synthetic construct
  source 1..75: mol_type = other DNA
aaaaccattatcccgaccgagtacggcgagtcctggttctgcgaaggtgtcatgcctggtgaagaacagtttaat

SEQ ID NO: 687538 - DNA, 75 bp, synthetic construct
  source 1..75: mol_type = other DNA
tacgccgcgttttgaagatgcgtttattgatttgctgggcggtgccggaacctcggaatcgccgctgggcgcaat

SEQ ID NO: 687539 - DNA, 75 bp, synthetic construct
  source 1..75: mol_type = other DNA
cggggctgttacatatggcgctgtggttccgcgcgcgagtgatcaaccaacaggaagactggagtgaactggaga

SEQ ID NO: 687540 - DNA, 75 bp, synthetic construct
  source 1..75: mol_type = other DNA
tttgcaatgttacgttgaaagtcatattgaggaagataacggtctctgtttcgacctgctggatttgttgcttaa

SEQ ID NO: 687541 - DNA, 75 bp, synthetic construct
  source 1..75: mol_type = other DNA
aaaccggggaagtgattgatcagggtacgctggaccacctgaccgggcaattgaccgcatttggtgagtttattc

SEQ ID NO: 687542 - DNA, 75 bp, synthetic construct
  source 1..75: mol_type = other DNA
ggctgcgccgtatttttgtctggcacggctcagtattatccaagatatcctcgcgcttactactcaattttctct

SEQ ID NO: 687543 - DNA, 75 bp, synthetic construct
  source 1..75: mol_type = other DNA
tcaacggattaccgttcgttgactgatcctgcggttattcaggccatgcattacatccgtaatcatgcctgcaaa

SEQ ID NO: 687544 - DNA, 75 bp, synthetic construct
  source 1..75: mol_type = other DNA
tcccgtaccggaaaaattatgcgtgattggcatcgataacgaagaactgacccgctatctgtcgcgtgtcgccct

SEQ ID NO: 687545 - DNA, 75 bp, synthetic construct
  source 1..75: mol_type = other DNA
gggctatcaggcggcaaaactgttgcatcgattattagataaagaagaaatgccgctacagcgaattttggtccc

SEQ ID NO: 687546 - DNA, 75 bp, synthetic construct
  source 1..75: mol_type = other DNA
atttcatccggatggggctattcagaagagaaaacgctgacgggtaaagtgggcaatccaccgaagccggttggc

SEQ ID NO: 687547 - DNA, 75 bp, synthetic construct
  source 1..75: mol_type = other DNA
cgggcgggccgtcactgtgacaacggcatacagcgaaacacctgcagtggaatcggtgtggattgtcgagtctga

SEQ ID NO: 687548 - DNA, 75 bp, synthetic construct
  source 1..75: mol_type = other DNA
acgatgaacttgagctccaggcgcaggaaatcgcaaaaaacgcgcaggacattgggcaggttcagaccagtgtta

SEQ ID NO: 687549 - DNA, 75 bp, synthetic construct
  source 1..75: mol_type = other DNA
cattcagaaagcgaataagttaacgcccagtactactgagcccaaatcaacacgcattaagcagattaaaactaa

SEQ ID NO: 687550 - DNA, 75 bp, synthetic construct
  source 1..75: mol_type = other DNA
tagcggaccgtggcgaattaatgagtcatcaggtcgaagccttagtttctagttttaatgtgcgagtggaaagtg

SEQ ID NO: 687551 - DNA, 75 bp, synthetic construct
  source 1..75: mol_type = other DNA
gtcccatgaaaagaaatacacgctgaatgtgattgtgtgtgactttgttggcgatcccgacctgatttttgtgcc

SEQ ID NO: 687552 - DNA, 75 bp, synthetic construct
  source 1..75: mol_type = other DNA
gcgtagccgttgcccgtacggttgtgttgctgtgttcgccgcccgtattcgtcagggggcgcaccatgcacaatt

SEQ ID NO: 687553 - DNA, 75 bp, synthetic construct
  source 1..75: mol_type = other DNA
tcaaagagagctaacaacagttctgttgcggacagcgacgcggtagatagttattttgaaatgaatccttactcc

SEQ ID NO: 687554 - DNA, 75 bp, synthetic construct
  source 1..75: mol_type = other DNA
ttattttgaaatgaatccttactcccgcgaaaaccaggcgaatggttgggctatgctggccagagacgatgacca

SEQ ID NO: 687555 - DNA, 75 bp, synthetic construct
  source 1..75: mol_type = other DNA
gtgggcgacagcgtatgcggctacggcccgctctccgagacggtcatcattaacgcagtgaataactacaagctg

SEQ ID NO: 687556 - DNA, 75 bp, synthetic construct
  source 1..75: mol_type = other DNA
agagatggatttaaatctctctttcgatctgcgtgtcgagccactgagtaaataccatcttgatgatatttccat

SEQ ID NO: 687557 - DNA, 75 bp, synthetic construct
  source 1..75: mol_type = other DNA
acatggacaaaatattagattatgaagagtacggacacctgataagacgaacgctattacacaacctttctctca

SEQ ID NO: 687558 - DNA, 75 bp, synthetic construct
  source 1..75: mol_type = other DNA
gagcctacgcggtatttgaatgtgccatggaccccaaacttgcccaatcaccgctcatcatcgcgagcaacaacg

SEQ ID NO: 687559 - DNA, 75 bp, synthetic construct
  source 1..75: mol_type = other DNA
caggcaacagattatcgtttccagaagttttggtcagcgccttaatgagataggcaagctacatgaggcagtttc

SEQ ID NO: 687560 - DNA, 75 bp, synthetic construct
  source 1..75: mol_type = other DNA
tcaacaggattttcgtatgaagcaggccatgctatcaccgagatatacgacccgctgggatgaattactcgttgt

SEQ ID NO: 687561 - DNA, 75 bp, synthetic construct
  source 1..75: mol_type = other DNA
ttttgcagcgtatcccgcgcagccactacgtgctggcagttggtcctgttccttatctttattatctccatcaga

SEQ ID NO: 687562 - DNA, 75 bp, synthetic construct
  source 1..75: mol_type = other DNA
cactgttgccctgtatcgaacaggccagagaggatgtccgtaccctgcgtcatctgcagcttctgcaccagaacc

SEQ ID NO: 687563 - DNA, 75 bp, synthetic construct
  source 1..75: mol_type = other DNA
acagaaaacggcccggtaccgacgtatatcgaccttcttaaggttactaccagtacgctggtacagggaattaaa

SEQ ID NO: 687564 - DNA, 75 bp, synthetic construct
  source 1..75: mol_type = other DNA
catgattgttcgcccacaacaacactggctgcgccgtatttttgtctggcacggttcagtattatccaaaatatc

SEQ ID NO: 687565 - DNA, 75 bp, synthetic construct
  source 1..75: mol_type = other DNA
cagcttcgaaacgatggctcctggactcgccaaatcaccgtgtttatccagagcagcccgtttgccagagctgaa

SEQ ID NO: 687566 - DNA, 75 bp, synthetic construct
  source 1..75: mol_type = other DNA
agcactgctgccctgtattgaacaggccagggaggatatccgtaccctgcaccaactgcaacttatgcaccagaa

SEQ ID NO: 687567 - DNA, 75 bp, synthetic construct
  source 1..75: mol_type = other DNA
atgaatatgatgatctcatatcaggaacttgttcgcaccttccttaacgtacaggcactgaatatggggcgaatt

SEQ ID NO: 687568 - DNA, 75 bp, synthetic construct
  source 1..75: mol_type = other DNA
acgcacctgggatctgatcccgctgtgtcacccactgatgctcagcaaagttgaagtcaatttacaggccgagcc

SEQ ID NO: 687569 - DNA, 75 bp, synthetic construct
  source 1..75: mol_type = other DNA
ctatcgctgtgatattgcccgtcgccacggtgctgatttctgccttaaccccattggcactgacgtaggaaaaga

SEQ ID NO: 687570 - DNA, 75 bp, synthetic construct
  source 1..75: mol_type = other DNA
aacagcccggaaagctacatgcagtatgtcgaccagcatccggaacagagcatcaaaatgggcgttacgttttaa

SEQ ID NO: 687571 - DNA, 75 bp, synthetic construct
  source 1..75: mol_type = other DNA
taacgcagtgaataactacaagttgcgcaaaatgccggaaggcagctcctggaaaaacgccgtctgctacgaccc

SEQ ID NO: 687572 - DNA, 75 bp, synthetic construct
  source 1..75: mol_type = other DNA
tttatcgatgaagactttaacggcgaatggcagatgttcaccccgcgtccggcagatgcgccgcgcggcattgag

SEQ ID NO: 687573 - DNA, 75 bp, synthetic construct
  source 1..75: mol_type = other DNA
cgcgcgttgctgcgctggttgagtatgaagatcgggcgattttagccaatgaagtgaagatccgcgtgcgtttcg

SEQ ID NO: 687574 - DNA, 75 bp, synthetic construct
  source 1..75: mol_type = other DNA
gcggttacgccgacgcgctgcaatcggcgctgcgtggccttgcttatggcggcaccatctcttatgtcgcgtttg

SEQ ID NO: 687575 - DNA, 75 bp, synthetic construct
  source 1..75: mol_type = other DNA
taccatcgcttctataggtactattgcaatattcctgctcagtactttaggggtcgcctttattattcctacaga

SEQ ID NO: 687576 - DNA, 75 bp, synthetic construct
  source 1..75: mol_type = other DNA
tgttgatatgggggtggcagaatcaattgccagtaataaatggtatattttatttttcgtactatttgtttactg

SEQ ID NO: 687577 - DNA, 75 bp, synthetic construct
  source 1..75: mol_type = other DNA
aaaaagatatggtgattggtccggttcgtttgttggcaaaaagtggcggcaaatcgggtgactttaaggtggaag

SEQ ID NO: 687578 - DNA, 75 bp, synthetic construct
  source 1..75: mol_type = other DNA
gacggtcatcattaacgcggtgaataactacaagctgcgcaaaatgccgcaaggcagctcctggaaaaacgccgt

SEQ ID NO: 687579 - DNA, 75 bp, synthetic construct
  source 1..75: mol_type = other DNA
ggcgctacgaggtctggcatatggcggcaccatctcgtatgtcgcgtttgccaaaccgtttgccgaaggttttaa

SEQ ID NO: 687580 - DNA, 75 bp, synthetic construct
  source 1..75: mol_type = other DNA
gaagtgaaaatccgcgtgcgtttcggcgcaccgaaacacggaacggaagtggtcgacttccgcgccgccagcccg

SEQ ID NO: 687581 - DNA, 75 bp, synthetic construct
  source 1..75: mol_type = other DNA
gtagtaagaatgcattattaattaccggtaccattatgacgattcggatcgttggttcatcctttgccaccggac

SEQ ID NO: 687582 - DNA, 75 bp, synthetic construct
  source 1..75: mol_type = other DNA
cttgcgtttaatgcggcgtacccagtagacgacatcaataaaaaaatcgtccagcccgctgatgaacatgatgac

SEQ ID NO: 687583 - DNA, 75 bp, synthetic construct
  source 1..75: mol_type = other DNA
gggttgtatgggtgggaaagatatatacccaaaacgatccaattaaaaagtgttacaaaactattaaaaataatt

SEQ ID NO: 687584 - DNA, 75 bp, synthetic construct
  source 1..75: mol_type = other DNA
cctctttaaacagaaatgttaaattctggtttgagaaatgtgggttaacaaaagaaagagtcatccgttgcgtag

SEQ ID NO: 687585 - DNA, 75 bp, synthetic construct
  source 1..75: mol_type = other DNA
tcattcacgaagcaggtaaggaggccggagttcgtgccattgaagtcatgaatcatgttcaacgtaagcttcccc

SEQ ID NO: 687586 - DNA, 75 bp, synthetic construct
  source 1..75: mol_type = other DNA
tttactccgataagcttgtgaataaactttccagatatgtgcttgagaactttctggaatatgacgatgagaaac

SEQ ID NO: 687587 - DNA, 75 bp, synthetic construct
  source 1..75: mol_type = other DNA
tcagagaattttctgaacttaatcctcttgattttctcaatgactcacaatggtgtgcgctttggctatgtttga

SEQ ID NO: 687588 - DNA, 75 bp, synthetic construct
  source 1..75: mol_type = other DNA
cctggacgcccttgaatccgagctttaccgcaatctgcgccccctgtatcccaaaacggtaatccgtatccgtaa

SEQ ID NO: 687589 - DNA, 75 bp, synthetic construct
  source 1..75: mol_type = other DNA
ttccagagcgcggtaactttccaggtgggcgcggaatcttccgacaccatgaccgtgaacatttcaagccaactg

SEQ ID NO: 687590 - DNA, 75 bp, synthetic construct
  source 1..75: mol_type = other DNA
tgggcgcggaatcttccgacaccatgaccgtgaacatttcaagccaactgaataccctggtgacggatctttctg

SEQ ID NO: 687591 - DNA, 75 bp, synthetic construct
  source 1..75: mol_type = other DNA
gatcaccagcatttctaccgcgatggatgatgtttcgcagatccagtccaagctgggtgcgtctatcaaccgtct

SEQ ID NO: 687592 - DNA, 75 bp, synthetic construct
  source 1..75: mol_type = other DNA
ttctccgtttggtcagagttatatcaccggtatccgccgtaaccagaccaccgggcgtctggaagccctgacctg

SEQ ID NO: 687593 - DNA, 75 bp, synthetic construct
  source 1..75: mol_type = other DNA
acggcaggcacaaagtgtgcaccggacggacttgtaggccgcaccagtacaggggccatactttcgtgccaatcc

SEQ ID NO: 687594 - DNA, 75 bp, synthetic construct
  source 1..75: mol_type = other DNA
aaagggcatcacagcggtatgccttactgggcccagggaagcacaacggaaatgcgccccaaaaacattgccttt

SEQ ID NO: 687595 - DNA, 75 bp, synthetic construct
  source 1..75: mol_type = other DNA
tacatccaaatggtggcggcttcaccatgacggacagccaatggatacgtgctgttaacaacaaagggatcacaa

SEQ ID NO: 687596 - DNA, 75 bp, synthetic construct
  source 1..75: mol_type = other DNA
taccgcaatctgcgcccactgtatccaaaaacggtaattcgtatccgcaaaggtagctctaacggtgtggaactg

SEQ ID NO: 687597 - DNA, 75 bp, synthetic construct
  source 1..75: mol_type = other DNA
tctttgcgctgaaagggggatttgaagagctggattatggtcatgacttttatgctccacagtccatgctggctg

SEQ ID NO: 687598 - DNA, 75 bp, synthetic construct
  source 1..75: mol_type = other DNA
caccggaggggagaatatcaaagacgatgccctgcgcagtatcgccagcctgctccccggtctgggcggatttat

SEQ ID NO: 687599 - DNA, 75 bp, synthetic construct
  source 1..75: mol_type = other DNA
tacaatactgcagccaggacctacatcgccgataacaatgcccgcctgcatagcggaacgcttcctgccaccttc

SEQ ID NO: 687600 - DNA, 75 bp, synthetic construct
  source 1..75: mol_type = other DNA
gtggttttcagcagatatacgccgaccaaaacaaggtttggtatgtgaataattatgcgtggggaaattatgagt

SEQ ID NO: 687601 - DNA, 75 bp, synthetic construct
  source 1..75: mol_type = other DNA
ctaacattggatttatgtccaagttgagtaacaaggcagaccataagtattgccatagcctggctaaagaagtgt

SEQ ID NO: 687602 - DNA, 75 bp, synthetic construct
  source 1..75: mol_type = other DNA
tctgccgagactggatggtttcgaacgctgtggggagacttttgacacagttatttcagcaaatccagcaaccta

SEQ ID NO: 687603 - DNA, 75 bp, synthetic construct
  source 1..75: mol_type = other DNA
gtggcgcgtggtctgtttgttggtattttggtgacggcaatttcactgttttttgtgccgtttcaggtgcattcg

SEQ ID NO: 687604 - DNA, 75 bp, synthetic construct
  source 1..75: mol_type = other DNA
tatttacgcccaccgcaagatcccgaagtatcgtgaaatccatcaatcgccttacgttattttcgtcgttaactt

SEQ ID NO: 687605 - DNA, 75 bp, synthetic construct
  source 1..75: mol_type = other DNA
ctactgactcgtgcgaacgttgactatgccgtaagtgaaatggaagaaaagggttatgttttcgataaacgccct

SEQ ID NO: 687606 - DNA, 75 bp, synthetic construct
  source 1..75: mol_type = other DNA
agcctgacgcttggctcgcatattctgaagaagattaagccggtgcataaactgcacagccgcaataccgaacaa

SEQ ID NO: 687607 - DNA, 75 bp, synthetic construct
  source 1..75: mol_type = other DNA
ctggtcaatcatgagcatgattttcgtgctgctggtgaccggggtgattatctggcgtccgtactttgcgcagta

SEQ ID NO: 687608 - DNA, 75 bp, synthetic construct
  source 1..75: mol_type = other DNA
gctgacgcaaaccttcggtacgccgcagatgggacgcattttgcacccgttcttcggcattgcgattttcgtcgc

SEQ ID NO: 687609 - DNA, 75 bp, synthetic construct
  source 1..75: mol_type = other DNA
tgctggcgattgctaaaaacgtccgttccattttgcgtaatcatggcattgatgcgcgtttaacgcgttctggcg

SEQ ID NO: 687610 - DNA, 75 bp, synthetic construct
  source 1..75: mol_type = other DNA
gtggtgttgaaatcgccgtcggttccttcggtgctggtggaaacctcgtttatcaccaacccggaagaagagcgg

SEQ ID NO: 687611 - DNA, 75 bp, synthetic construct
  source 1..75: mol_type = other DNA
ggtgcaaacagataccattaaaaacagcctgacgcttggctcgcatattctgaagaagattaagccggtgcataa

SEQ ID NO: 687612 - DNA, 75 bp, synthetic construct
  source 1..75: mol_type = other DNA
gcactatagctctcagagccagcgctttacttcaggccatgagccgggatattgaagcccagagaaaagaattta

SEQ ID NO: 687613 - DNA, 75 bp, synthetic construct
  source 1..75: mol_type = other DNA
gggttacaacggcaatctgctggggccagcggtgaaattacagcgcggcaaagctgtaacggttgatatctataa

SEQ ID NO: 687614 - DNA, 75 bp, synthetic construct
  source 1..75: mol_type = other DNA
agaacatgcttatatggcgcactgccatctgctggagcatgaagatacggggatgatgttagggtttacggtata

SEQ ID NO: 687615 - DNA, 75 bp, synthetic construct
  source 1..75: mol_type = other DNA
ggtactgtttatcgcgacactgatcgttggcgctatcgtgaacttcgtgataggtcagttggttgagaaaaccca

SEQ ID NO: 687616 - DNA, 75 bp, synthetic construct
  source 1..75: mol_type = other DNA
gcgcagagggaggctgatatcgaaaatgaaaaactccgtaaagaggttgaggattacagggctgccagtgaggca

SEQ ID NO: 687617 - DNA, 75 bp, synthetic construct
  source 1..75: mol_type = other DNA
ttggcgggaaaacggcaactacctggggctataacggcaatctgctggggccggcggtgaaattacagcgcggca

SEQ ID NO: 687618 - DNA, 75 bp, synthetic construct
  source 1..75: mol_type = other DNA
tacaaccattacaacttatggtgttgtgttatcaattcctctatttttagttttatattattacttatttaaagg

SEQ ID NO: 687619 - DNA, 75 bp, synthetic construct
  source 1..75: mol_type = other DNA
atggaaaatattgagcagttacggaaagtcgccacacgtgcaggtaaacttctgacatccttgagcgaaagcatc

SEQ ID NO: 687620 - DNA, 75 bp, synthetic construct
  source 1..75: mol_type = other DNA
tctttacagcaaagcggtcagattatggcactggtcgaatgcgttactctttgtattgttgctggcaagtgggct

SEQ ID NO: 687621 - DNA, 75 bp, synthetic construct
  source 1..75: mol_type = other DNA
tatccgtgtgttaagcatgtatgcgtttaatgcctttgagcagcagcgatttggcgaagccgttgccgcgtggga

SEQ ID NO: 687622 - DNA, 75 bp, synthetic construct
  source 1..75: mol_type = other DNA
gaaaatctggcagcaggccacggcacaggctccggcgttgctggacagggcgctggatccgaaagccgatccgct

SEQ ID NO: 687623 - DNA, 75 bp, synthetic construct
  source 1..75: mol_type = other DNA
tttgtcaatctgatttactaagagtaaagacattaatagccacacctacatccgtgataatcagatcaataaatc

SEQ ID NO: 687624 - DNA, 75 bp, synthetic construct
  source 1..75: mol_type = other DNA
attgggcaacttgttactgtaccaaagagtttttattaattgaaactcaatcaggactaggaagaactagtgatc

SEQ ID NO: 687625 - DNA, 75 bp, synthetic construct
  source 1..75: mol_type = other DNA
attcacgaacatatggcacgaaaaaccaaacaagaagcgcaagaaacgcgccaacacatcctcgatgtggctcta

SEQ ID NO: 687626 - DNA, 75 bp, synthetic construct
  source 1..75: mol_type = other DNA
aatctggtgattattggattataaaaacatccaaaagcattgatcaacttaacaaaaatcagttcaaaacacaaa

SEQ ID NO: 687627 - DNA, 75 bp, synthetic construct
  source 1..75: mol_type = other DNA
accgcaaaagaaattctctatgcccgtatgaaagccgatcccacgcctgcggatgaagccacgtcgtatgccatc

SEQ ID NO: 687628 - DNA, 75 bp, synthetic construct
  source 1..75: mol_type = other DNA
aaatgctgttaggggtggaggcctattttattgagcataaatcccgtaacagtctgctttttcagccaacagatt

SEQ ID NO: 687629 - DNA, 75 bp, synthetic construct
  source 1..75: mol_type = other DNA
gttcctgcattgctggagctggcgccatggttcggaagaaagcaccgcgataatacactcaccctgaagcgtttt

SEQ ID NO: 687630 - DNA, 75 bp, synthetic construct
  source 1..75: mol_type = other DNA
atggctgtacatgctaatacaagagtgagctcattccaggctgacaatatcattgtgcaccgtaatgaacctgac

SEQ ID NO: 687631 - DNA, 75 bp, synthetic construct
  source 1..75: mol_type = other DNA
aaactggatgaagacaaaaagcgagtgatagaaatcatgcagcaggtctgggaggacgatagttggttacattag

SEQ ID NO: 687632 - DNA, 75 bp, synthetic construct
  source 1..75: mol_type = other DNA
ccaggggaaaaacgccaccggcatgaaggttgggaacatatcgaaattgttctgccaggagagccggaaacgctg

SEQ ID NO: 687633 - DNA, 75 bp, synthetic construct
  source 1..75: mol_type = other DNA
catggctggggcgtaaacatcgtgacaatactctcacgctgaaacgcttttcatcgggcgtcggtttctggtgcc

SEQ ID NO: 687634 - DNA, 75 bp, synthetic construct
  source 1..75: mol_type = other DNA
tttggcgatgatgcgacgccgtttggcctgaaatgggagaagggtaaaccggaaacggtgtattacctgtgtgaa

SEQ ID NO: 687635 - DNA, 75 bp, synthetic construct
  source 1..75: mol_type = other DNA
tcagcgcccggggtgatgaaattccgccgccgcgctccatcacgttccatatctggacggcgtacagtccgttca

SEQ ID NO: 687636 - DNA, 75 bp, synthetic construct
  source 1..75: mol_type = other DNA
gactcgcagcgaaaccgttttgagatgtatgtctggggatgggcaccgggagaggaagcttttctggtggataaa

SEQ ID NO: 687637 - DNA, 75 bp, synthetic construct
  source 1..75: mol_type = other DNA
attgagggctctgtatggcccaaatccattcgcggctcgacgcctaaaatcaaaggcacctgccagatcgaaaaa

SEQ ID NO: 687638 - DNA, 75 bp, synthetic construct
  source 1..75: mol_type = other DNA
tccgggtgcgccgcaaggtcagcaggataatccgcttattaatattctggagaagttcacccgctggtatgacac

SEQ ID NO: 687639 - DNA, 75 bp, synthetic construct
  source 1..75: mol_type = other DNA
cagttatttcagtttgaacccagggaggtcagacggatttttgctggcgagtacgaaatccgttacgaacttact

SEQ ID NO: 687640 - DNA, 75 bp, synthetic construct
  source 1..75: mol_type = other DNA
gaaaaatccgtggatgtggtctgttatgacgagctttcctcgttcgaaccggatgttgaaaaagagggttcgcca

SEQ ID NO: 687641 - DNA, 75 bp, synthetic construct
  source 1..75: mol_type = other DNA
ctttattgagcataaaaatcgtaacagtcttctgtttcagcctacggattctgccgctgaagattttatgaagtc

SEQ ID NO: 687642 - DNA, 75 bp, synthetic construct
  source 1..75: mol_type = other DNA
tcttcgtatctggctggtcgatgggaaacgttgccgtttcaaatcgccatcatgaacagtatggggaatgaccgg

SEQ ID NO: 687643 - DNA, 75 bp, synthetic construct
  source 1..75: mol_type = other DNA
gttccctgcctgaaaaaactttctccctggctgggacgtaaacatcgtgataataccctcacgctgaaacgcttt

SEQ ID NO: 687644 - DNA, 75 bp, synthetic construct
  source 1..75: mol_type = other DNA
tctatggcaagccggtgatcaccatgccgaaaacccgcaatcagcggggcgtgtatctgtgtgaagtggggacgg

SEQ ID NO: 687645 - DNA, 75 bp, synthetic construct
  source 1..75: mol_type = other DNA
tcagggatgtgccggttttactcgatcttgcaccgtggtttgggcgtaaacatcgtgataataccctcacgctga

SEQ ID NO: 687646 - DNA, 75 bp, synthetic construct
  source 1..75: mol_type = other DNA
atgacgaactctcctcgtttgaaccggatgtggaaaaagaaggttcgccaacactgcttggtgataaacgtatcg

SEQ ID NO: 687647 - DNA, 75 bp, synthetic construct
  source 1..75: mol_type = other DNA
atgaaccgtatgctatagcaaaaatcgctggtattaaactctgcgagtcctataatcgacaacataatcgagatt

SEQ ID NO: 687648 - DNA, 75 bp, synthetic construct
  source 1..75: mol_type = other DNA
aggtttaggctggaagcatcagattaatcttgaagcaggcttggcacggacttatgaatggtttttaaaaaatca

SEQ ID NO: 687649 - DNA, 75 bp, synthetic construct
  source 1..75: mol_type = other DNA
cttgggctggcaatatcaatataacttacatgaaggcttatcattaacatataaatggtttattgagaatattaa

SEQ ID NO: 687650 - DNA, 75 bp, synthetic construct
  source 1..75: mol_type = other DNA
aagagcagaagattagccagtctaccctggatgcccttgaatccgagctttaccgcaatctgcgccccctgtatc

SEQ ID NO: 687651 - DNA, 75 bp, synthetic construct
  source 1..75: mol_type = other DNA
tttgagcaagagagaatagatcaggtttaccttgcagcagcaaaagtaggaggaattcatgctaataacactttt

SEQ ID NO: 687652 - DNA, 75 bp, synthetic construct
  source 1..75: mol_type = other DNA
tatggctgctgcatctatttatgtcatggagcttgataaagcactttggcaggagcaaacacaaccaatgctttc

SEQ ID NO: 687653 - DNA, 75 bp, synthetic construct
  source 1..75: mol_type = other DNA
ggcgatatgcatggcttcagctatatgcagttcatcgtaccggggctgatcatgatgtcggtgatcaccaatgcc

SEQ ID NO: 687654 - DNA, 75 bp, synthetic construct
  source 1..75: mol_type = other DNA
tttgtactgacgccgctgacctatcttggcggggtattttactctctgaccttattgccgccgttttggcaaggg

SEQ ID NO: 687655 - DNA, 75 bp, synthetic construct
  source 1..75: mol_type = other DNA
gcaaaattgatgatgcagcggcagagaaagttaaatccgcatcatcatccacgatgcagtcagttaaccagcccc

SEQ ID NO: 687656 - DNA, 75 bp, synthetic construct
  source 1..75: mol_type = other DNA
cttgggctggcaatatcgctataatttgcatgaaggcttatcactaacatataaatggtttattgagaatattga

SEQ ID NO: 687657 - DNA, 75 bp, synthetic construct
  source 1..75: mol_type = other DNA
tattaatgttggtacgggtgtggattgttcgattcgtgaaatggctgaaacaatggcctctgtggtggggtaccg

SEQ ID NO: 687658 - DNA, 75 bp, synthetic construct
  source 1..75: mol_type = other DNA
aaccgtcaatatggccgtgattatcgcagtgtaatgcctactaatctttatggcataaatgataatttccaccct

SEQ ID NO: 687659 - DNA, 75 bp, synthetic construct
  source 1..75: mol_type = other DNA
ccctattcttcgattattggtatcccattggtggaacccgttatacgtcgaacattgggaataattcgccgtaaa

SEQ ID NO: 687660 - DNA, 75 bp, synthetic construct
  source 1..75: mol_type = other DNA
atgaaagcgaacttttcgctgtttgacgataccgatcagcttgctttgctcaaagagttgaccgaaggactgatt

SEQ ID NO: 687661 - DNA, 75 bp, synthetic construct
  source 1..75: mol_type = other DNA
catcgaaagggctggagtttccctatgttttcatggtcggtatggaagaaggatttttaccgcaccagagcagca

SEQ ID NO: 687662 - DNA, 75 bp, synthetic construct
  source 1..75: mol_type = other DNA
caataacccgcacgtctttgaaaagcgactcttttctgagctgggttacggcgctgaacttaaagtattgagcgc

SEQ ID NO: 687663 - DNA, 75 bp, synthetic construct
  source 1..75: mol_type = other DNA
tggacgcgtgacggcctgacattttacagtgccggtgatgaggaaatcccgccaccgcgctcaatttcgtaccac

SEQ ID NO: 687664 - DNA, 75 bp, synthetic construct
  source 1..75: mol_type = other DNA
tggccgcgtaatccgccaattcgtgaacgcaaaagtattcccaccagctggctgaagatcaccttatatgaagga

SEQ ID NO: 687665 - DNA, 75 bp, synthetic construct
  source 1..75: mol_type = other DNA
gaataacgaagaacatgaagccgagcgcgtcactggtgaactgattgcgcatcacttcgtcaataaaacgcagta

SEQ ID NO: 687666 - DNA, 75 bp, synthetic construct
  source 1..75: mol_type = other DNA
cagccgggcagaccttgaatgcctcgaacatcttcgcaatgtcggccagctcgtcggcgacctgatgcaggtgca

SEQ ID NO: 687667 - DNA, 75 bp, synthetic construct
  source 1..75: mol_type = other DNA
ggactgcacctctttgcgccacaatccggcgcagccgctacagctcacctcggtgatttacctcatgactgcccg

SEQ ID NO: 687668 - DNA, 75 bp, synthetic construct
  source 1..75: mol_type = other DNA
taccttatgaccgcccagctcgacggcatggtcgaacgctgcaatcagcactggctgaccggggaggacaacgta

SEQ ID NO: 687669 - DNA, 75 bp, synthetic construct
  source 1..75: mol_type = other DNA
atgaaggcgaacttttcgctgtttgacgataccgatcagctggcgttgctcaaagagttgaccgaagggctgatt

SEQ ID NO: 687670 - DNA, 75 bp, synthetic construct
  source 1..75: mol_type = other DNA
ctgcctggtgctggcgggcgcgggttccggtaaaactcgtgtgatcaccaataaaatcgcccatctgatccgcgg

SEQ ID NO: 687671 - DNA, 75 bp, synthetic construct
  source 1..75: mol_type = other DNA
gcgctggagccgtaagcgtattgaagaaacctgctgggaactgttgatgaacggttatctcaattgcgaagattt

SEQ ID NO: 687672 - DNA, 75 bp, synthetic construct
  source 1..75: mol_type = other DNA
cataaacagcctgaatcagacgttctccgactatcagcaggctacggccacgcagataaacggcattacggcgac

SEQ ID NO: 687673 - DNA, 75 bp, synthetic construct
  source 1..75: mol_type = other DNA
gaaaggcgataaagaagcgtctggttctctgctgcctgcctcggaagtgaaagtccttaaacgtgacggcgactg

SEQ ID NO: 687674 - DNA, 75 bp, synthetic construct
  source 1..75: mol_type = other DNA
aagaatataaacagtcggtgcatttccagaacgcctccggcgtgcgagctgaatgccatgactgtcatatcccgc

SEQ ID NO: 687675 - DNA, 75 bp, synthetic construct
  source 1..75: mol_type = other DNA
gataatatgtccgatcaacctaaaccgctgggcggtggcggtgaacgctatgcctgtggtgtaattaagtcatta

SEQ ID NO: 687676 - DNA, 75 bp, synthetic construct
  source 1..75: mol_type = other DNA
ttgtcgctgttctgttagcctctaatatctgtagtgcggctgtcttaccaactggaagtagatttgaccctagaa

SEQ ID NO: 687677 - DNA, 75 bp, synthetic construct
  source 1..75: mol_type = other DNA
aacggaactgctggaaacgcagaccgtggacttcagcgtgggtgccgaagggcttcgccatgtaccaggtgatgt

SEQ ID NO: 687678 - DNA, 75 bp, synthetic construct
  source 1..75: mol_type = other DNA
ctgggcttatgcggattcgctgtacaacggcacctgtaatcaatgccacggcgcaccggaaatcgcccactttga

SEQ ID NO: 687679 - DNA, 75 bp, synthetic construct
  source 1..75: mol_type = other DNA
atgtgaacgttgaaaactgcattctggtcgatgactccagcgcaggtgcgcaatcagggatagatgccggaatgg

SEQ ID NO: 687680 - DNA, 75 bp, synthetic construct
  source 1..75: mol_type = other DNA
cagtacccctctatcagtatgcgcccatgcaaactgacattccccctgtattatgttgacagggagagacctgcc

SEQ ID NO: 687681 - DNA, 75 bp, synthetic construct
  source 1..75: mol_type = other DNA
ccgggtaaaattgcacatgtgagtagtacgttacaacgagtaattattccttttaaaagtgaattaacactaggg

SEQ ID NO: 687682 - DNA, 75 bp, synthetic construct
  source 1..75: mol_type = other DNA
acttaggcgatctgcctgcgctggttgtcaataatgacgggaaagctaccgatgccgtcatcgcgcctcgtctga

SEQ ID NO: 687683 - DNA, 75 bp, synthetic construct
  source 1..75: mol_type = other DNA
agaagagtggctttgggcgtgagctttcccattttggcttacacgaattctgtaatatccagacggtgtggaaag

SEQ ID NO: 687684 - DNA, 75 bp, synthetic construct
  source 1..75: mol_type = other DNA
tccagtatctggctcacgacgataaatatcagcaaaatttccaggtgccttttatggtcatttcaagcgacgata

SEQ ID NO: 687685 - DNA, 75 bp, synthetic construct
  source 1..75: mol_type = other DNA
agaataaggggttcggtaaagtccggcttcaggccgctgacacagtatctcctaaagttgaaaaagaggtgatcc

SEQ ID NO: 687686 - DNA, 75 bp, synthetic construct
  source 1..75: mol_type = other DNA
tcggtatcgccatgattgcgaataccagtttcgctgccccccaggtagtcgataaagtcgcagccgtcgtcaata

SEQ ID NO: 687687 - DNA, 75 bp, synthetic construct
  source 1..75: mol_type = other DNA
gctgcgggtcggtttcaacggtgtgtcgattgcaaatactacaaacccggaaatcaataaaaaaggcgaggatgt

SEQ ID NO: 687688 - DNA, 75 bp, synthetic construct
  source 1..75: mol_type = other DNA
cggacgcagcacgtcgttatcataataaattcgttactggcactaactatcaggaggaatcaaacagacgctttg

SEQ ID NO: 687689 - DNA, 75 bp, synthetic construct
  source 1..75: mol_type = other DNA
atacgatgccagcactgagctgaacctgagccacatcctgattccgctgccagaaaacccgacctctgatcaggt

SEQ ID NO: 687690 - DNA, 75 bp, synthetic construct
  source 1..75: mol_type = other DNA
gataaagtcgcagcagtcgtcaataacggcgtcgtgctggaaagcgacgttgatggattaatgcagtcggtaaaa

SEQ ID NO: 687691 - DNA, 75 bp, synthetic construct
  source 1..75: mol_type = other DNA
aaacgatgccagcactgaactgaatttaagccacatcctgatcccgctgccggaaaacccgacttcagatcaagt

SEQ ID NO: 687692 - DNA, 75 bp, synthetic construct
  source 1..75: mol_type = other DNA
ctctcgatcgtcagagctattgtcagcggtgagcccgatccttcagtattgatccagtaccgtgatgtgagatgt

SEQ ID NO: 687693 - DNA, 75 bp, synthetic construct
  source 1..75: mol_type = other DNA
gtcacaacagcacaactggcggtatcactaccctgccatggcgcagaacagccaaccacaatgtggctttacctt

SEQ ID NO: 687694 - DNA, 75 bp, synthetic construct
  source 1..75: mol_type = other DNA
tgtagaccagcgttttgtattgcgtatgggaaatcaggttgttggggttgaaaaccggggctttggcaaagtccg

SEQ ID NO: 687695 - DNA, 75 bp, synthetic construct
  source 1..75: mol_type = other DNA
atgggggaggttaagaaggatgtaaaaataacagtaattgcttttgttatcaattatctgttcttttatatcccg

SEQ ID NO: 687696 - DNA, 75 bp, synthetic construct
  source 1..75: mol_type = other DNA
ggtcagcgatttgataaggctcccgttgaccgcttctcttataacagcccatccctgctgttgtctgccgactaa

SEQ ID NO: 687697 - DNA, 75 bp, synthetic construct
  source 1..75: mol_type = other DNA
aacgtctggatgcacgctgatcatgatggctgggaagagcatttcaacggagagaccgatgccctgactccagag

SEQ ID NO: 687698 - DNA, 75 bp, synthetic construct
  source 1..75: mol_type = other DNA
tagcatactcaacctttaacctgaaaaaggtcgatacaattcattttcttggagttgagaaaggatggataaatg

SEQ ID NO: 687699 - DNA, 75 bp, synthetic construct
  source 1..75: mol_type = other DNA
gcgctttgggtaccagcagcacttcgctactggcattactgcataatccggtcggttctgtaggcgctaacctaa

SEQ ID NO: 687700 - DNA, 75 bp, synthetic construct
  source 1..75: mol_type = other DNA
ataaatcaacaaattgccatcctccagcagagtatcgactatgcaaaagagacgttgcgtctggccgaggttcga

SEQ ID NO: 687701 - DNA, 75 bp, synthetic construct
  source 1..75: mol_type = other DNA
atagctgcactgcgagtgcatcgggtgcggctggatgcggaaagaacaggtatcaccaattctcctgcattaaaa

SEQ ID NO: 687702 - DNA, 75 bp, synthetic construct
  source 1..75: mol_type = other DNA
tggccttctggcatgatttagcggctccggtcattgctggtattcttgccagtatgatcgtgaactggctgaaca

SEQ ID NO: 687703 - DNA, 75 bp, synthetic construct
  source 1..75: mol_type = other DNA
ctttctggcacgacctggcagcaccgatccttgcgggaattattaccgcagcgattgtcggctggtggcgtaacc

SEQ ID NO: 687704 - DNA, 75 bp, synthetic construct
  source 1..75: mol_type = other DNA
atgacgctcgcgcagtttgccatgactttctggcacgacctggcagcaccgatccttgcgggaattattaccgca

SEQ ID NO: 687705 - DNA, 75 bp, synthetic construct
  source 1..75: mol_type = other DNA
caattatttatattgaagacagcgacgatgttcgttttgcctgtgaacaaacgcttacgttagcgggttatcgcg

SEQ ID NO: 687706 - DNA, 75 bp, synthetic construct
  source 1..75: mol_type = other DNA
gccgagcagtgccgtgacgtgctgctgatgaacgaaggcgagttgctgtatcagggagaaccaaaagccctgaca

SEQ ID NO: 687707 - DNA, 75 bp, synthetic construct
  source 1..75: mol_type = other DNA
acagcatggtagagaaaggcgtcacggtgatggtcaccacccactttatggatgaagcggaatattgcgaccgca

SEQ ID NO: 687708 - DNA, 75 bp, synthetic construct
  source 1..75: mol_type = other DNA
ccgctaacggtgaaatgaccgttatggcctccggtagtgatcttgcctttgaacgcctgacccccgtgctggaag

SEQ ID NO: 687709 - DNA, 75 bp, synthetic construct
  source 1..75: mol_type = other DNA
tgcggggtttccgataacgccgcgacgtttgccgaaaaactggatgctctgctggtgctggtggtaaatgcggcc

SEQ ID NO: 687710 - DNA, 75 bp, synthetic construct
  source 1..75: mol_type = other DNA
ttttctgggacgacctggcagcaccgatcctggcgggaattattaccgcagcgattgtcggctggtggcgtaacc

SEQ ID NO: 687711 - DNA, 75 bp, synthetic construct
  source 1..75: mol_type = other DNA
aaggtctgattaccgagcgcggcgacatggtggtttacgtagcagggttcccggccatctatggaaaacagccct

SEQ ID NO: 687712 - DNA, 75 bp, synthetic construct
  source 1..75: mol_type = other DNA
ataaaaacaggaagggagaacgatatattattctgggtgtggattcttctttttgatgtcgcggttgtattttcg

SEQ ID NO: 687713 - DNA, 75 bp, synthetic construct
  source 1..75: mol_type = other DNA
tgtttatctggatgtgcgccgctgtatgctatgagcttcggatgtataaaataaaaacaggaagggagaacgata

SEQ ID NO: 687714 - DNA, 75 bp, synthetic construct
  source 1..75: mol_type = other DNA
acctacccgttctggtaaaggtgtcggcctggttgttcccaccttgctttcctggaaacattcaacggtagtagc

SEQ ID NO: 687715 - DNA, 75 bp, synthetic construct
  source 1..75: mol_type = other DNA
tgagtttgttcgagaatttaaaattgagcatgatgatgctttggtcctgttaaaaaccttgattgcgaccaagat

SEQ ID NO: 687716 - DNA, 75 bp, synthetic construct
  source 1..75: mol_type = other DNA
atgcgcctgcgctgggataaaaccgtgctgcgtctgcccgtgacagggcgtgttgcgcgcgggctgaatacggcg

SEQ ID NO: 687717 - DNA, 75 bp, synthetic construct
  source 1..75: mol_type = other DNA
atcaatggcaggcagaaatgtttttcaactgggcagtaggcaccctgaatttttggcgaagactggcaagtttca

SEQ ID NO: 687718 - DNA, 75 bp, synthetic construct
  source 1..75: mol_type = other DNA
tccgtgtgggtactgaaaacgaagttggcgacgttcagaaccttgccacgctgatagttgacccggacggtaaag

SEQ ID NO: 687719 - DNA, 75 bp, synthetic construct
  source 1..75: mol_type = other DNA
tgatggatcgcccggaagaagaagccggttcggttctgtcaacggcaaaatcttatcttgcgctttaccgtgatc

SEQ ID NO: 687720 - DNA, 75 bp, synthetic construct
  source 1..75: mol_type = other DNA
tccttatgttgatgcaatcatggccgacccggaaaaaggcgcgggcgaactgtggatggagatgacacagtacag

SEQ ID NO: 687721 - DNA, 75 bp, synthetic construct
  source 1..75: mol_type = other DNA
ttttgcttacagctttaattatcaggaactgttggggccgaactttaatcacatctatgcgccgtggtcctattt

SEQ ID NO: 687722 - DNA, 75 bp, synthetic construct
  source 1..75: mol_type = other DNA
cacgaccagcggtaaacgcgccagcgctgtgctgggcggtgtatcaaaaaccatgcaggaagtacagcgaccgct

SEQ ID NO: 687723 - DNA, 75 bp, synthetic construct
  source 1..75: mol_type = other DNA
atcctccatgtactttacaagcacaaaaatgatggtacgccagcaacgcttccgtatgttgattccatcatggcc

SEQ ID NO: 687724 - DNA, 75 bp, synthetic construct
  source 1..75: mol_type = other DNA
atcatcgtccaccggcgcggacagcaaagggaggccgaaacgccaccgtctgccgatcgaagtggtgaagattcc

SEQ ID NO: 687725 - DNA, 75 bp, synthetic construct
  source 1..75: mol_type = other DNA
atcgtttttggttttatagcaggaacagcaataacattagctacaatagtatttaatttaatagataagtttaac

SEQ ID NO: 687726 - DNA, 75 bp, synthetic construct
  source 1..75: mol_type = other DNA
ataccgaacattacaaggtaaagtcgtatggctatggatattgtcatttgttattaaatggttaattttgcgtgc

SEQ ID NO: 687727 - DNA, 75 bp, synthetic construct
  source 1..75: mol_type = other DNA
caactcaccgttgcaccgggtcatgtggtggttaacgatctccagaccctgaaagaaacaaaattcccggaatta

SEQ ID NO: 687728 - DNA, 75 bp, synthetic construct
  source 1..75: mol_type = other DNA
ttcagttgccagggatctggccgttccccgtcgtcttatccgtgcccgcatccggttaagtccggcacgaccgga

SEQ ID NO: 687729 - DNA, 75 bp, synthetic construct
  source 1..75: mol_type = other DNA
atggcaataaaaggtctggcgcaggccatgaaaaatctggatgcaattgaccgccgtgccgttccccgggctgcc

SEQ ID NO: 687730 - DNA, 75 bp, synthetic construct
  source 1..75: mol_type = other DNA
tgcgctggaaaaagcgcacccggacgttgagctttataccgcatcgattgaccaggggctgaatgagcacggata

SEQ ID NO: 687731 - DNA, 75 bp, synthetic construct
  source 1..75: mol_type = other DNA
atggatcgtataattgaaaaattagatcacggttggtggatagtcagccatgagcaaaaattatggttgccgaag

SEQ ID NO: 687732 - DNA, 75 bp, synthetic construct
  source 1..75: mol_type = other DNA
gattcgtcgaagtgggcgaaaccctcgagcaggcagtcgcgcgggaagtgatggaagagagcggaattaaagtta

SEQ ID NO: 687733 - DNA, 75 bp, synthetic construct
  source 1..75: mol_type = other DNA
aaaagtaaataccctgattattatttgttaagagatgagatacctgtgcgtctggtgtctattatattcccaaca

SEQ ID NO: 687734 - DNA, 75 bp, synthetic construct
  source 1..75: mol_type = other DNA
agttaacggtgtcagcaaaatcctctccctgacggcagataccctcaccgttgagcgcgaactggaagatgaaac

SEQ ID NO: 687735 - DNA, 75 bp, synthetic construct
  source 1..75: mol_type = other DNA
agttaacggcgtcagcaaaatcctctccctgacagcagatactctgaccgttgaacgcgaactggaagatgaaac

SEQ ID NO: 687736 - DNA, 75 bp, synthetic construct
  source 1..75: mol_type = other DNA
acaatatgggctatgcgcatatgctggatgcccgcgccctgacggcaaaaaccaaaggtaatcctgacagttggg

SEQ ID NO: 687737 - DNA, 75 bp, synthetic construct
  source 1..75: mol_type = other DNA
tgcaaatgcaggtggaatacctggtgttttcacattaaacctggaaatccaggggaaagttattcgtgttctcga

SEQ ID NO: 687738 - DNA, 75 bp, synthetic construct
  source 1..75: mol_type = other DNA
tctaactctccggccaaccgtattttgttgataatgggggaatggttagccattcaacgccgaaacggagtactt

SEQ ID NO: 687739 - DNA, 75 bp, synthetic construct
  source 1..75: mol_type = other DNA
catctctgaactggaaatttctgaaggcgaagagtcagtacgcatcagccgtgcagcacctgccgcaagtttccc

SEQ ID NO: 687740 - DNA, 75 bp, synthetic construct
  source 1..75: mol_type = other DNA
caggaacaaaaacgcggtttgtgggtcgatgcaaatccggttccaccgtgggagtggcgatacaaacataactaa

SEQ ID NO: 687741 - DNA, 75 bp, synthetic construct
  source 1..75: mol_type = other DNA
aagaaagcgaactctttacgctgacgctgaaagaaaaacaaactgatgggtccattgaggtactggaaagccacc

SEQ ID NO: 687742 - DNA, 75 bp, synthetic construct
  source 1..75: mol_type = other DNA
taccggatgttggtggttggcattacgcaccggcaggtatatcacgcgcgattattgatcgacagaacattgccc

SEQ ID NO: 687743 - DNA, 75 bp, synthetic construct
  source 1..75: mol_type = other DNA
aaatattcgtaagtaccagattagcctggtgggttacttgcaagaaaaagaaaagcaggcaacagaagcggcgat

SEQ ID NO: 687744 - DNA, 75 bp, synthetic construct
  source 1..75: mol_type = other DNA
cgcgtattgaagagaaatatctcggacatggcgatgattttgattacgttgatacgcgcacatttttacgcgccg

SEQ ID NO: 687745 - DNA, 75 bp, synthetic construct
  source 1..75: mol_type = other DNA
aattagataacgataatacgctttctgcggctctgctcgacttcttcaatgaaatgaatgaggacggcacactgg

SEQ ID NO: 687746 - DNA, 75 bp, synthetic construct
  source 1..75: mol_type = other DNA
catctccgaactggaaatctccgaaggcgaagagtcagtacgcatcagccgtgcagctcctgccgcaagtttccc

SEQ ID NO: 687747 - DNA, 75 bp, synthetic construct
  source 1..75: mol_type = other DNA
atgcaagcgctttatctggaaattaaaaacctcatcatcagcaccctcaatctggacgacttgactcctgatgat

SEQ ID NO: 687748 - DNA, 75 bp, synthetic construct
  source 1..75: mol_type = other DNA
tgatcgagctggttgaagaatcaggcatctccgaactggaaatttctgaaggtgaagagtcagtacgcattagcc

SEQ ID NO: 687749 - DNA, 75 bp, synthetic construct
  source 1..75: mol_type = other DNA
tacaaattaaccgatagcgagcgcgatattgctgccggaatatggaacgcctgccgcaccgccatgcttcaggga

SEQ ID NO: 687750 - DNA, 75 bp, synthetic construct
  source 1..75: mol_type = other DNA
gtagtcatgtttggtgcggtcgttgccgagcgggataatacccatttgtcgattccatttttagctgatgcactg

SEQ ID NO: 687751 - DNA, 75 bp, synthetic construct
  source 1..75: mol_type = other DNA
aaaaaggtggcaaaagagaaatatggcctcgatgttgaactggtaggatttagcggttcgttgctaccgaacgat

SEQ ID NO: 687752 - DNA, 75 bp, synthetic construct
  source 1..75: mol_type = other DNA
ccagcgctattctccggtgagattgatgtgttcccaggggataggagaagtcgcttgatatctagtatgacgtct

SEQ ID NO: 687753 - DNA, 75 bp, synthetic construct
  source 1..75: mol_type = other DNA
tccatgtatcacggttatgtacctgatttacatatacatgccgaggatactttactgccattttacttgggcgaa

SEQ ID NO: 687754 - DNA, 75 bp, synthetic construct
  source 1..75: mol_type = other DNA
attatttgattacgcttctgttctgcagtttttcacaatgcttctcgatctattggaaagcgttgacctaggtgg

SEQ ID NO: 687755 - DNA, 75 bp, synthetic construct
  source 1..75: mol_type = other DNA
ccgagcgggataatacccatttgtcgattccatttttagctgatgcactgacaccacgcgtgcaacgtgttttaa

SEQ ID NO: 687756 - DNA, 75 bp, synthetic construct
  source 1..75: mol_type = other DNA
ggcaaattggtgagacggttgacctcgatgaagcggtacaacgtgcgcttgagtttgccaaaaaagatggcaata

SEQ ID NO: 687757 - DNA, 75 bp, synthetic construct
  source 1..75: mol_type = other DNA
cacgtaattatgccgaaggtgcgggcggcttttttaaaggtatcgatgccttaccgcttaccgggcaatacactc

SEQ ID NO: 687758 - DNA, 75 bp, synthetic construct
  source 1..75: mol_type = other DNA
cgctcactctgccgatcagcaggcgctgaacggtggccagatgggctggggccgcattcaggaactgccagggat

SEQ ID NO: 687759 - DNA, 75 bp, synthetic construct
  source 1..75: mol_type = other DNA
gacaaagccattgaattgttgagtaaaaatgagaaaggctttttcctgcaagttgaaggtgcgtcaatcgataaa

SEQ ID NO: 687760 - DNA, 75 bp, synthetic construct
  source 1..75: mol_type = other DNA
ggtgacggaagcgaaccagcaaaaacccctgctaggactgtttgctgacggcaatatgccagtgcgctggcaagg

SEQ ID NO: 687761 - DNA, 75 bp, synthetic construct
  source 1..75: mol_type = other DNA
atgtgtatccaccttaacttaatgatttttaccaaaatcattaggggattcatcagcgctctgcgtgattctctt

SEQ ID NO: 687762 - DNA, 75 bp, synthetic construct
  source 1..75: mol_type = other DNA
ttaccgatgaagtaggtaaaggccagataaaaatgagaacagtatttgaacaagcagcaaaccaacgttcaacat

SEQ ID NO: 687763 - DNA, 75 bp, synthetic construct
  source 1..75: mol_type = other DNA
aaccgcgtggaacagcactttagccgcgaggcgctggcggtggatcgtaccgatggcatcagcatgacctttgcc

SEQ ID NO: 687764 - DNA, 75 bp, synthetic construct
  source 1..75: mol_type = other DNA
cgaaccggtggtgcggttgaatgtggaatctcgcggtgatgtgccgctgatggaagaaaagacaaaacttattct

SEQ ID NO: 687765 - DNA, 75 bp, synthetic construct
  source 1..75: mol_type = other DNA
aaaaagcagttaagccgggatgatatcgtctggacctactccggcgtgcgcccgctgtgtgatgatgagtccgac

SEQ ID NO: 687766 - DNA, 75 bp, synthetic construct
  source 1..75: mol_type = other DNA
tggatgagcttaaccgggcgatcaatgatgcggagtcggtactggggacaacccgccgtcgccgtcgtccgctgg

SEQ ID NO: 687767 - DNA, 75 bp, synthetic construct
  source 1..75: mol_type = other DNA
aatctgaagaacgctggaatgcggttgccagcactgacgtttgccaacgttggtggaaatatatgaccgacgtta

SEQ ID NO: 687768 - DNA, 75 bp, synthetic construct
  source 1..75: mol_type = other DNA
aggttaaccccgacgcccacgaagagtatcagcgtcggcataaccccatctggccggaactggaagcagtgttga

SEQ ID NO: 687769 - DNA, 75 bp, synthetic construct
  source 1..75: mol_type = other DNA
tcccgtggatggacgagttttccatcatcggcaccaccgatgtggaatacaaaggcgatccgaaagcagtgaaga

SEQ ID NO: 687770 - DNA, 75 bp, synthetic construct
  source 1..75: mol_type = other DNA
attaacgttgtttgtgccgctgacgttattgttgttgctacacctgcagaattatttgattacgcttctgttcta

SEQ ID NO: 687771 - DNA, 75 bp, synthetic construct
  source 1..75: mol_type = other DNA
ttattgttgttgctacacctgcagaattatttgattacgcttctgttctacagttttttcacaatgcttctcgat

SEQ ID NO: 687772 - DNA, 75 bp, synthetic construct
  source 1..75: mol_type = other DNA
cgactgttgggtagacgacgcccgtctggtactcgccaacgcccagatggtggtgcgtaaaggcggcgaagtgct

SEQ ID NO: 687773 - DNA, 75 bp, synthetic construct
  source 1..75: mol_type = other DNA
tgaccgaatcgctggcacgtcattacgcgcgtacttatggcagcaacagcgagctgctgctcggcaatgcgggag

SEQ ID NO: 687774 - DNA, 75 bp, synthetic construct
  source 1..75: mol_type = other DNA
ggcccgtgggtgaaacagttcttcgacgacgggatgcatctgccttcgccttatggcattcgcctgatcaaaggc

SEQ ID NO: 687775 - DNA, 75 bp, synthetic construct
  source 1..75: mol_type = other DNA
aagtcattagcgaagctgaaaaggcacgtcagattaatagcgatgaaccatacatcgaaattatctgcatggatt

SEQ ID NO: 687776 - DNA, 75 bp, synthetic construct
  source 1..75: mol_type = other DNA
aaaaaaacgcagctacttacgtttatctgaacggtacgcgcctgactgtggagcttccgtaccagaccgtgcgag

SEQ ID NO: 687777 - DNA, 75 bp, synthetic construct
  source 1..75: mol_type = other DNA
ccgctcatgacgatgattattctgggaaccgccggaattgcctcgttcgaaccgcatgtttttgtcggtgcggta

SEQ ID NO: 687778 - DNA, 75 bp, synthetic construct
  source 1..75: mol_type = other DNA
gcgttaatgttctttccaaagatggttcaatgaaaattcaggttggtgcgaatgatggtcaaactatctccatcg

SEQ ID NO: 687779 - DNA, 75 bp, synthetic construct
  source 1..75: mol_type = other DNA
caaaagatgtggctacttacctttatctgaacggcacgcgattgtttgtggaacttccgtaccagaccgtacgcg

SEQ ID NO: 687780 - DNA, 75 bp, synthetic construct
  source 1..75: mol_type = other DNA
tctgaacggcacgcgcctgaccgtagaacttccgtaccagactgtacacgaaatcattagcgaagcggaaaaagc

SEQ ID NO: 687781 - DNA, 75 bp, synthetic construct
  source 1..75: mol_type = other DNA
gaagaattcttaaaaccgctgaacatgtctcatgatgaactggcggaagctatgggtatctgcaagcagtatatt

SEQ ID NO: 687782 - DNA, 75 bp, synthetic construct
  source 1..75: mol_type = other DNA
tcttgctgagatatttgggactgatgaggacttctggagcaatcttgagacgttacaagattttcaggaacgacg

SEQ ID NO: 687783 - DNA, 75 bp, synthetic construct
  source 1..75: mol_type = other DNA
tcttgctgccatatttgatactgatgaagacttctggagtaatctgcagaagttgcaagatcggaagaaacgacg

SEQ ID NO: 687784 - DNA, 75 bp, synthetic construct
  source 1..75: mol_type = other DNA
gggaacggtgttgcgtaaatccggcacgttggtggtaaccaaaattgctgttgcatgggtggttgcggcaattgc

SEQ ID NO: 687785 - DNA, 75 bp, synthetic construct
  source 1..75: mol_type = other DNA
gtccagaagaagcacagaagcgtgcaaaacgttatctgacggcaatgcctgcctgggctcataaagcggacgagt

SEQ ID NO: 687786 - DNA, 75 bp, synthetic construct
  source 1..75: mol_type = other DNA
gaagatattatctacggtatgcgtcgtcttagggatgatgaggacttctggagtaaccttcaaaagttgcaaggt

SEQ ID NO: 687787 - DNA, 75 bp, synthetic construct
  source 1..75: mol_type = other DNA
acagaagtgtccaacatgtcgaaagcgcagatcatccagcaggcaggtaactcggtgctgtccaaagctaaccag

SEQ ID NO: 687788 - DNA, 75 bp, synthetic construct
  source 1..75: mol_type = other DNA
atgaattttttttcaaatcacatcgggaaaatttggttggcgattctaatcctcatgtcttctggttgggtatcg

SEQ ID NO: 687789 - DNA, 75 bp, synthetic construct
  source 1..75: mol_type = other DNA
aacgctattgaaattgacctcttacagatgaacgatgaagccgaaattccagcaaaaattcttcccgatcgtcat

SEQ ID NO: 687790 - DNA, 75 bp, synthetic construct
  source 1..75: mol_type = other DNA
atgaccgacaccaccatgcaattgctcagtcagggcacagaccacgtgaaagtgccggattttgatattctcgcg

SEQ ID NO: 687791 - DNA, 75 bp, synthetic construct
  source 1..75: mol_type = other DNA
atgaaggcgtttctggctcatgctaggtccatcagtctgtcccgtaatgcatttatgaatgggaatatcagggcc

SEQ ID NO: 687792 - DNA, 75 bp, synthetic construct
  source 1..75: mol_type = other DNA
caaagattcagacaacgatgatttatgcccatcttgcgccggattacttgcaggatgcggtgagatttaatccaa

SEQ ID NO: 687793 - DNA, 75 bp, synthetic construct
  source 1..75: mol_type = other DNA
caaagattcagacaacgatgatttatgcccatcttgcgccggattacctgcaggatgcggtgaggtttaatccct

SEQ ID NO: 687794 - DNA, 75 bp, synthetic construct
  source 1..75: mol_type = other DNA
ttttgactgcaaatattgatggtcaagatgtaaaatttactattaacagtacagccgccacgggtgccgacgcaa

SEQ ID NO: 687795 - DNA, 75 bp, synthetic construct
  source 1..75: mol_type = other DNA
gcgacagggaaggacgcaacattaaaaacgtctgatcctgtttacaaaaatagtgcaggtcagttcactacaact

SEQ ID NO: 687796 - DNA, 75 bp, synthetic construct
  source 1..75: mol_type = other DNA
ctacatcacagttcgtcgttcaatccggcaatgatttctactccgcgtcgattaatcatacagacggcaaagtca

SEQ ID NO: 687797 - DNA, 75 bp, synthetic construct
  source 1..75: mol_type = other DNA
atgtggattggcgataaaaaacaactgctgacgccgctgcgcgatcagttcacccgtgcaccgctggataacgac

SEQ ID NO: 687798 - DNA, 75 bp, synthetic construct
  source 1..75: mol_type = other DNA
agcgtgacactcccctccgcgccccacgccatcccgcaactgaccaccagcgaaacggatttttgcatcgagctg

SEQ ID NO: 687799 - DNA, 75 bp, synthetic construct
  source 1..75: mol_type = other DNA
gctttctttcacagatgtggattggcgatgaaaaacaactgctgaccccgctgcgcgatcagttcacccgtgcgc

SEQ ID NO: 687800 - DNA, 75 bp, synthetic construct
  source 1..75: mol_type = other DNA
tgtctaatgatgaactggcggaagctatgggtagctgcaagcagtatattgacgatattctctgcggcttgcgtc

SEQ ID NO: 687801 - DNA, 75 bp, synthetic construct
  source 1..75: mol_type = other DNA
gctatagccaacgttaatggcgaactcagcgcgatgtacaacatcaaggttggtgtctccagcaacgggcagtat

SEQ ID NO: 687802 - DNA, 75 bp, synthetic construct
  source 1..75: mol_type = other DNA
tatgagcgcagtcaccgcgttaaccttccaaaatcctcgactggctggcagttacgggttcgcagaatcacgccg

SEQ ID NO: 687803 - DNA, 75 bp, synthetic construct
  source 1..75: mol_type = other DNA
atttcatctggatggggctactcagaagagaaaacgctgacgggtaaagtgggcaatccaccgaagccggttggc

SEQ ID NO: 687804 - DNA, 75 bp, synthetic construct
  source 1..75: mol_type = other DNA
atgcccaggacgtcgggaaggttcagaccagcgttaatgagctttccagcacggtcgggaatgtttcgtcttcac

SEQ ID NO: 687805 - DNA, 75 bp, synthetic construct
  source 1..75: mol_type = other DNA
tattgccgggatgccccaggtcgacaacgagctggccgtgggcacaactgtcaccaccaccgcgccctggacgcg

SEQ ID NO: 687806 - DNA, 75 bp, synthetic construct
  source 1..75: mol_type = other DNA
cgatgtataacatcaaggtgggggtgtccagtaacgggcagtattacgctgccgggatgggtattggggttcaaa

SEQ ID NO: 687807 - DNA, 75 bp, synthetic construct
  source 1..75: mol_type = other DNA
cgcaaatatcagcagatgggcctcaaggctgggcagattttctggtaccgcgctcagctggtggaccgcagcggc

SEQ ID NO: 687808 - DNA, 75 bp, synthetic construct
  source 1..75: mol_type = other DNA
ttgaccgtatcgataccaccattgcagataccagccaggccgttgctcgcgcgctggtgacgcttgatgcgtctg

SEQ ID NO: 687809 - DNA, 75 bp, synthetic construct
  source 1..75: mol_type = other DNA
ttctgatatcaccgatgtgatcctggaggacatcaaagggtctgagacgttcaaggacctgatcgagaatgccgt

SEQ ID NO: 687810 - DNA, 75 bp, synthetic construct
  source 1..75: mol_type = other DNA
accaacggccggtgagcgtgatcccgcctggtaaccagtcgccgcctgcgaatatcgtgatcagctcgttttccg

SEQ ID NO: 687811 - DNA, 75 bp, synthetic construct
  source 1..75: mol_type = other DNA
gcgcagaacgctatcgcctatgaagcgcaatggcgccgcaacgacgggaactgggttaacgtgccgcgcagctcc

SEQ ID NO: 687812 - DNA, 75 bp, synthetic construct
  source 1..75: mol_type = other DNA
agagcaggaccattcaggccgtaaacggggaatcagtcacagtcaccacggcatacagtgagacgccacaggccg

SEQ ID NO: 687813 - DNA, 75 bp, synthetic construct
  source 1..75: mol_type = other DNA
aacgaatcaggttacacagaatgggtgcgcggtcaggccagtatcgatgtgtccgacatcaccgatgtgatcctg

SEQ ID NO: 687814 - DNA, 75 bp, synthetic construct
  source 1..75: mol_type = other DNA
tcgtgggattgagcggacttacacaaccgacttgctggttgaagtttatctgaacgggttggggcatggactcag

SEQ ID NO: 687815 - DNA, 75 bp, synthetic construct
  source 1..75: mol_type = other DNA
tctgcaacgctattgaaattgacctgttacagatgaacgatgaagcagaaattccagcaaaaattcttcccgatc

SEQ ID NO: 687816 - DNA, 75 bp, synthetic construct
  source 1..75: mol_type = other DNA
gcttcgaactctccagctaaccgtatcttgttaataatgggtgtggttggcggttcagcgccgcaatgggcagct

SEQ ID NO: 687817 - DNA, 75 bp, synthetic construct
  source 1..75: mol_type = other DNA
catactcccctgacttataacgaaatcaacgggaaaccttttggcctggattacgaactggcgaaacagtttgcc

SEQ ID NO: 687818 - DNA, 75 bp, synthetic construct
  source 1..75: mol_type = other DNA
ttccagcaacggttgaagctctggcggaacagatccgtcaggctgacggtgtggtgatcgtcacgccggaatata

SEQ ID NO: 687819 - DNA, 75 bp, synthetic construct
  source 1..75: mol_type = other DNA
gattcaacctggacggcatcagccaatgctcgtggtcgtttgtatctgcatcgcggcgttgagatgacttacacc

SEQ ID NO: 687820 - DNA, 75 bp, synthetic construct
  source 1..75: mol_type = other DNA
atgggggaagccggacctgaagctattatgcccctgacccgggcggcggatggctcgctgggcgtacgcgcggtg

SEQ ID NO: 687821 - DNA, 75 bp, synthetic construct
  source 1..75: mol_type = other DNA
caaacaaaacagcctggactggatttatttgctgaactggtcaatatctgtattacagaacctggtttaaccact

SEQ ID NO: 687822 - DNA, 75 bp, synthetic construct
  source 1..75: mol_type = other DNA
caagtgccgggcgaaacgctgcgaatatatcttcgtcaggaattaggcaacaaattaggcatacttgatgacagc

SEQ ID NO: 687823 - DNA, 75 bp, synthetic construct
  source 1..75: mol_type = other DNA
gcgggccggttacgcccgtaacgccaccgtcacggccagcatcatcgtccctgaccgtattgcctttcaggtggt

SEQ ID NO: 687824 - DNA, 75 bp, synthetic construct
  source 1..75: mol_type = other DNA
gtgattgatgcgattggtgagggaccgatagaaggcccggtgaagggactgcagagtatcctggtgaacaaaacc

SEQ ID NO: 687825 - DNA, 75 bp, synthetic construct
  source 1..75: mol_type = other DNA
ggaggcggcaggcagtcttgtgcagctgattgaccagcgggtgcaggcggtgatgctgtccatgcgacgtgacgg

SEQ ID NO: 687826 - DNA, 75 bp, synthetic construct
  source 1..75: mol_type = other DNA
tttgaaggaactgaacaactttaaaattgatattgcccgactattgagtatcaaaattcacaaattagcgatgga

SEQ ID NO: 687827 - DNA, 75 bp, synthetic construct
  source 1..75: mol_type = other DNA
atgaataaacacactttgacccgtatttcagaagaagcttttcacgagcttacccgaattaaacagacaactaac

SEQ ID NO: 687828 - DNA, 75 bp, synthetic construct
  source 1..75: mol_type = other DNA
cgcgcagtttgccatgactttctggcacgacctggcagcaccgatcctggcggggattattaccgcagcgattgt

SEQ ID NO: 687829 - DNA, 75 bp, synthetic construct
  source 1..75: mol_type = other DNA
aatgcggatcaacaatctcgtgtgagtcagtggctggtggaatatacgcagcagaggttgtcgctggcgtcgtaa

SEQ ID NO: 687830 - DNA, 75 bp, synthetic construct
  source 1..75: mol_type = other DNA
tgactgaatcgctggcacgtcactacgcacgcacttacggcagcaacagcgaactgctgctcggcaatgcggggg

SEQ ID NO: 687831 - DNA, 75 bp, synthetic construct
  source 1..75: mol_type = other DNA
attcgcctgatcaaaggcagccatattgtggtgccgcgtgtgcatacccagaagcaagcctacattctgcaaaac

SEQ ID NO: 687832 - DNA, 75 bp, synthetic construct
  source 1..75: mol_type = other DNA
ttgtcaatttggtttgcagcaggtttagctggactactcgctttactttatctgtatggctctattatcaaagag

SEQ ID NO: 687833 - DNA, 75 bp, synthetic construct
  source 1..75: mol_type = other DNA
agtatttataataaacgcgttgtagattttccatcctggacattcaaacaatccattggaccgcataatattatt

SEQ ID NO: 687834 - DNA, 75 bp, synthetic construct
  source 1..75: mol_type = other DNA
ctggaataaagcgttggtattcctctttattgcaacctttttccttgatggtataacccgttataaacacatcat

SEQ ID NO: 687835 - DNA, 75 bp, synthetic construct
  source 1..75: mol_type = other DNA
aagaaatgcctgacacagcagatgactacgttacttttgatggcggcctgtatgagttcgatacgtctgccgggt

SEQ ID NO: 687836 - DNA, 75 bp, synthetic construct
  source 1..75: mol_type = other DNA
ataacggcagatgttttcagagaaaccaggaaaacattgatgatagcgatgtgtttatcgagttcggcggcggaa

SEQ ID NO: 687837 - DNA, 75 bp, synthetic construct
  source 1..75: mol_type = other DNA
ttatggaaaatccgcttaagggatatggctacggcgatgatatttaccatgcaatatataataagcgtgtcgtag

SEQ ID NO: 687838 - DNA, 75 bp, synthetic construct
  source 1..75: mol_type = other DNA
tctgaaatctttaaatgcttttggactggatttagcaaggttgctaagcatcaaaattcacaagctaaagttaga

SEQ ID NO: 687839 - DNA, 75 bp, synthetic construct
  source 1..75: mol_type = other DNA
gaagcagggattgatggtgacagcaccttcagttgggtggtgattgaaaacgccagccagcgtggcgaagcgcgt

SEQ ID NO: 687840 - DNA, 75 bp, synthetic construct
  source 1..75: mol_type = other DNA
ccttcagttgggtggtgattgaaaacgccagccagcgcggcgaggcgcgttcggcaactttgccgttacctgcgg

SEQ ID NO: 687841 - DNA, 75 bp, synthetic construct
  source 1..75: mol_type = other DNA
ttaactattgctgcattgctgtcacttcttcaatccccagatgcaggtgctagcatgaaggaaattttcaaagct

SEQ ID NO: 687842 - DNA, 75 bp, synthetic construct
  source 1..75: mol_type = other DNA
cctcggaatcgccgctgggcgcaatattgcatacggtggaaggtacacctggcgagacggtgatcgaagcgaaag

SEQ ID NO: 687843 - DNA, 75 bp, synthetic construct
  source 1..75: mol_type = other DNA
ggagatttttggtttgctggggccaaacggcgcgggtaaatcgaccacctttaagatgatgtgcggtttgctggt

SEQ ID NO: 687844 - DNA, 75 bp, synthetic construct
  source 1..75: mol_type = other DNA
acggcctggaaaaacgctttccgggcatggacaagcccgccgtcgcgccgctcgattgtaccattcacgccggtt

SEQ ID NO: 687845 - DNA, 75 bp, synthetic construct
  source 1..75: mol_type = other DNA
agagagcgccgccgacatcaccgttcagggtgatgcaaccctgctgcggatgttattgcgaaacctggtagaaaa

SEQ ID NO: 687846 - DNA, 75 bp, synthetic construct
  source 1..75: mol_type = other DNA
tatatatgctggagagaaatggataagccagattttgataagctatatatatctgcctacaagatcgataaaaat

SEQ ID NO: 687847 - DNA, 75 bp, synthetic construct
  source 1..75: mol_type = other DNA
cgcatatgctgagacatgcctgtggttttgctctggctgaccgtggtgtggatacccgcttgattcaggattatc

SEQ ID NO: 687848 - DNA, 75 bp, synthetic construct
  source 1..75: mol_type = other DNA
agcgcactcgatctaatattagaaaatcctgttattggttatggttacggtaacgttgcatataaagatgtctat

SEQ ID NO: 687849 - DNA, 75 bp, synthetic construct
  source 1..75: mol_type = other DNA
atgaaggaaattttcaaagctattattgagaatactttactatgcacaatagcaataccgatcatattgagagac

SEQ ID NO: 687850 - DNA, 75 bp, synthetic construct
  source 1..75: mol_type = other DNA
aaccggcaagagacttccggcacgcgggcctgggtacggctgaagaaagatcagtacgtggcaaaccagatataa

SEQ ID NO: 687851 - DNA, 75 bp, synthetic construct
  source 1..75: mol_type = other DNA
atgttaacagcctcgctggcgctacgtaataaagaaaagtggaaaccgtactggaataaagcgttggtattcctc

SEQ ID NO: 687852 - DNA, 75 bp, synthetic construct
  source 1..75: mol_type = other DNA
agttacgggtcgatcgttatgaactgcgcaatgccaatacgtggggagtggctctgcgtgagcaggacttctgga

SEQ ID NO: 687853 - DNA, 75 bp, synthetic construct
  source 1..75: mol_type = other DNA
aaaatgcctgatggctatggcgaggtgaaaccgcttgcagacggtatcaacgtaccaggtggtttttccgctacg

SEQ ID NO: 687854 - DNA, 75 bp, synthetic construct
  source 1..75: mol_type = other DNA
atgaattaaatcagggtaaaacactgcttcacgccgggccgccgatgcgctggcaggagatgaccggccccatga

SEQ ID NO: 687855 - DNA, 75 bp, synthetic construct
  source 1..75: mol_type = other DNA
cggggagctggagcgactcgaccagacgttgaacctgccgctggtgggttacacctggacccgcgatattcagct

SEQ ID NO: 687856 - DNA, 75 bp, synthetic construct
  source 1..75: mol_type = other DNA
tgcggggtttctgataacgccgcgacgtttgccgaaaaactggacgctctgctggtgctggtggtcaatgcgacc

SEQ ID NO: 687857 - DNA, 75 bp, synthetic construct
  source 1..75: mol_type = other DNA
attgcgtttgcggttggcaaaatggcgcagcagcaaggcgtggcggtgaaaacgtctgccgaagctctgcaacag

SEQ ID NO: 687858 - DNA, 75 bp, synthetic construct
  source 1..75: mol_type = other DNA
ggatcaggcgaacccggatatgggcgatagcgcgattaccgaaacctttggtatcggaggtgcggcaatgatcgc

SEQ ID NO: 687859 - DNA, 75 bp, synthetic construct
  source 1..75: mol_type = other DNA
ttgcagatcccaggctgggattttcagggcgcgtgcctgggactggacattcgtcgcgtggtagaaaccggcatt

SEQ ID NO: 687860 - DNA, 75 bp, synthetic construct
  source 1..75: mol_type = other DNA
ggtccatcagtctgtcccgtaatgcatttatgaatgggaatatcagggccgttaaccagagcactgttattatcg

SEQ ID NO: 687861 - DNA, 75 bp, synthetic construct
  source 1..75: mol_type = other DNA
gattggcgcaggcactgtgcgggcaccgttggcctgctttgaacaggcgctggaagcactggctgaaagcatggg

SEQ ID NO: 687862 - DNA, 75 bp, synthetic construct
  source 1..75: mol_type = other DNA
acgccgctcatcaatactggtatcgcccataaagaagcggggatcgggcagattggggcaggcactgtacgggca

SEQ ID NO: 687863 - DNA, 75 bp, synthetic construct
  source 1..75: mol_type = other DNA
ggtgcgggtggcatggaagcggccagggcggtatctgaagagatggcggaaatttaccttgagcgcaatatgcag

SEQ ID NO: 687864 - DNA, 75 bp, synthetic construct
  source 1..75: mol_type = other DNA
acaaatggtcacgcgacatgccgctgcgcagcgacatttctatcgctgatgaagtgtcatccttcactaataccg

SEQ ID NO: 687865 - DNA, 75 bp, synthetic construct
  source 1..75: mol_type = other DNA
actacactatctgcttagccaggaactggataccgaaactattcgtaaggccatgagccaaaacctgcgcggcga

SEQ ID NO: 687866 - DNA, 75 bp, synthetic construct
  source 1..75: mol_type = other DNA
tgccaccggtaacgccctcgcccatgccggcgttattggcggtgcagatatgactgtagaagccacgctaaccaa

SEQ ID NO: 687867 - DNA, 75 bp, synthetic construct
  source 1..75: mol_type = other DNA
tcgcccggagatgccagatttcactattcatgaatatacgccgctgatggattcttctgatatgacgccggaaga

SEQ ID NO: 687868 - DNA, 75 bp, synthetic construct
  source 1..75: mol_type = other DNA
cggcagttctggcgcgtgatgccgggttacaggtcgtaatggatcgttgcccggccattgagatccctcggctgg

SEQ ID NO: 687869 - DNA, 75 bp, synthetic construct
  source 1..75: mol_type = other DNA
caagcggcagtactggcacgggatgccgggttaaatgtggtgatggatcgctgcccggctattgagatccctcgc

SEQ ID NO: 687870 - DNA, 75 bp, synthetic construct
  source 1..75: mol_type = other DNA
atgcagcgttccgagcagggttatattccagtgtcaggtcatctgcaacgccagttggcgttgatgccggaattc

SEQ ID NO: 687871 - DNA, 75 bp, synthetic construct
  source 1..75: mol_type = other DNA
tggtaacccgctgaacctgtgggggatggaacttggctggacggtcatagaattgcaggctgctcagcaggtcgg

SEQ ID NO: 687872 - DNA, 75 bp, synthetic construct
  source 1..75: mol_type = other DNA
cggcgattccggtctggcggtaaaaggcctgctgaacctgacgcaggtaacaccgaccaacgccgcgaagacctg

SEQ ID NO: 687873 - DNA, 75 bp, synthetic construct
  source 1..75: mol_type = other DNA
gcctgtatcagctcgtaacctattacgggaagctgggtgcagtagagccggtttatccggaaactctggcctacg

SEQ ID NO: 687874 - DNA, 75 bp, synthetic construct
  source 1..75: mol_type = other DNA
aaagctgatggttctatcgactatagcaatatcaccctcggtggcggcaacggcggtacgactcgtatcagcaac

SEQ ID NO: 687875 - DNA, 75 bp, synthetic construct
  source 1..75: mol_type = other DNA
gtaaatatcacctcactttctacttttaccaaaggaaatttagtcgtcgatgcccatatgggggcttttttgcag

SEQ ID NO: 687876 - DNA, 75 bp, synthetic construct
  source 1..75: mol_type = other DNA
atgaaaataaaaaccattttaacgccagtagcctgtgctctgctgatgagcttttccgcccatgccgctaacgct

SEQ ID NO: 687877 - DNA, 75 bp, synthetic construct
  source 1..75: mol_type = other DNA
atgacagtcagcagcacgatttccgttttttgccgcgacggggtgttccgtaccgtttactgccacctgcacggg

SEQ ID NO: 687878 - DNA, 75 bp, synthetic construct
  source 1..75: mol_type = other DNA
aatgtatgaccaagggcaacccattaagagtatagccgaagcactaagaatgcctctaagcaccacttacaggat

SEQ ID NO: 687879 - DNA, 75 bp, synthetic construct
  source 1..75: mol_type = other DNA
gtcgttatcatggtggttctgatgactggcgtacaccgtatcgtttatttcataacctgcatcgtgagtttaact

SEQ ID NO: 687880 - DNA, 75 bp, synthetic construct
  source 1..75: mol_type = other DNA
attgcttggtgcgattagtgggctggtcttcatggtgttgcaggtatggtgtggtgtaccactggcggcactatt

SEQ ID NO: 687881 - DNA, 75 bp, synthetic construct
  source 1..75: mol_type = other DNA
ggttgagagagcaacagaggcattaaacggaagttatgatgtccacttcgatgctaacgatcctgtcagcattga

SEQ ID NO: 687882 - DNA, 75 bp, synthetic construct
  source 1..75: mol_type = other DNA
tgcatacccactatgccaccggtcagcaggccgaagccctggttgaacacggagatatccgttgcctcggtcccc

SEQ ID NO: 687883 - DNA, 75 bp, synthetic construct
  source 1..75: mol_type = other DNA
gaatacgctaaccactctgcgcccttcaccactggcgaagggaaacccgcagcacactaatctggtcgagatcga

SEQ ID NO: 687884 - DNA, 75 bp, synthetic construct
  source 1..75: mol_type = other DNA
tggcacgaggccaatatgtctggcgataaaatcgaccatggcggctgtgtgaatacgctaaccactctgcgccct

SEQ ID NO: 687885 - DNA, 75 bp, synthetic construct
  source 1..75: mol_type = other DNA
ttaaaaagggcgatcttgctgtcggcttgcaacaaggtattggtgatattgaaacccgattatcagaaaatgatt

SEQ ID NO: 687886 - DNA, 75 bp, synthetic construct
  source 1..75: mol_type = other DNA
ggtgatatccgttgcctcggtccccgttgtgacaaacccgccgggcatacgcttcagaacccggtggacggtgtg

SEQ ID NO: 687887 - DNA, 75 bp, synthetic construct
  source 1..75: mol_type = other DNA
tggttgtctggaaattcagggggccagtctaatcgtctataagggcaacgctatcatagtcttgtcctggcgggt

SEQ ID NO: 687888 - DNA, 75 bp, synthetic construct
  source 1..75: mol_type = other DNA
ctttcttctgttcatctgcgtttgccacgcaaactccagtacctgaattacccaggtatgtgaatgacttaaccg

SEQ ID NO: 687889 - DNA, 75 bp, synthetic construct
  source 1..75: mol_type = other DNA
ctaatgaatggcggccaatggttcttcatgctggacgctgatcgggaaatattagccagggcgctggtggagctg

SEQ ID NO: 687890 - DNA, 75 bp, synthetic construct
  source 1..75: mol_type = other DNA
tgtgggtacgagatcggaatagcgacaaagttgctggctcctttgagttcactttccgcagctcggtggagcact

SEQ ID NO: 687891 - DNA, 75 bp, synthetic construct
  source 1..75: mol_type = other DNA
actcaaaccatttcgctgacgctcaatgagatattggcaaagccacctcagtcctcttctagcgctgatataatg

SEQ ID NO: 687892 - DNA, 75 bp, synthetic construct
  source 1..75: mol_type = other DNA
ggtggtggtgagcaacaagcgggaaaaaccgattaacgatcgccgttcgcgccagcaggaagtgactccggcagg

SEQ ID NO: 687893 - DNA, 75 bp, synthetic construct
  source 1..75: mol_type = other DNA
tcgcctcaatgatcaaagactcaatgagctatgccgagcaggacgtaaaagcccgtatgctggcagaacaaaaag

SEQ ID NO: 687894 - DNA, 75 bp, synthetic construct
  source 1..75: mol_type = other DNA
agcctgcatagccctctccctcaaacttactacatcggtacgttggtcgtgttcactcgccctgatgggcagtca

SEQ ID NO: 687895 - DNA, 75 bp, synthetic construct
  source 1..75: mol_type = other DNA
ttggctcaaacatcacgcgatagattcggtggatatgagctggtatcagaccatcaacctcgcttttgagagtcg

SEQ ID NO: 687896 - DNA, 75 bp, synthetic construct
  source 1..75: mol_type = other DNA
gtctgggcgcgcgagcgtatcagtgattcgatggatgatattggtggcgaaatttcgggcgcagatcgttttatc

SEQ ID NO: 687897 - DNA, 75 bp, synthetic construct
  source 1..75: mol_type = other DNA
atcgcggcaccgaaaatgttgaatgcctggagctattgcagatgccctggtttcggtcggttatgggaaaccacg

SEQ ID NO: 687898 - DNA, 75 bp, synthetic construct
  source 1..75: mol_type = other DNA
tctttctggaaccagcactacatagacactggcgcggttttttgcggaaatctgacgctaaagcaggtgaaggga

SEQ ID NO: 687899 - DNA, 75 bp, synthetic construct
  source 1..75: mol_type = other DNA
gagctgcggagcaagatccgcaccctgctggacacatcgagcatgagccagaatcagatcgcccagctgatcggc

SEQ ID NO: 687900 - DNA, 75 bp, synthetic construct
  source 1..75: mol_type = other DNA
tacacgattgcttatgatttatcccgtcagtctgaaggaaaatacaacgttgaggtcaacatcagggacttcttc

SEQ ID NO: 687901 - DNA, 75 bp, synthetic construct
  source 1..75: mol_type = other DNA
gactgatgtccgaactccatcgtgtggattttgacccggcgcaggatttactgatatcggttggcgaccttatcg

SEQ ID NO: 687902 - DNA, 75 bp, synthetic construct
  source 1..75: mol_type = other DNA
cagcgaactggagaaagtccacaaactcactcaaactacacctgcaaacagtggtcatcgtcaggagaaaagaaa

SEQ ID NO: 687903 - DNA, 75 bp, synthetic construct
  source 1..75: mol_type = other DNA
cggggcttgccgaatacggcccctttttacctcacgggttgcaggtggagctgccggacataccgacaaccacca

SEQ ID NO: 687904 - DNA, 75 bp, synthetic construct
  source 1..75: mol_type = other DNA
tatgaggcaagcttcaaaccgcaaagcggaggaatggagcagacgtttcgcctcgaggcccagcagtaccacgcc

SEQ ID NO: 687905 - DNA, 75 bp, synthetic construct
  source 1..75: mol_type = other DNA
attcagcagttacggcagcggccttcgtctgtggggtaaccggacagcagcatggccaacggtcacccatatgcg

SEQ ID NO: 687906 - DNA, 75 bp, synthetic construct
  source 1..75: mol_type = other DNA
ctgcggtggtggtgattcttcaggtggcaaaacgtcttgccccacagctgatgaaccatccaccgcaatattcac

SEQ ID NO: 687907 - DNA, 75 bp, synthetic construct
  source 1..75: mol_type = other DNA
agaagtgcagattctgatgatttttctcggtgttttgctcatgcttcccgctgcggtggtggttattcttcaggt

SEQ ID NO: 687908 - DNA, 75 bp, synthetic construct
  source 1..75: mol_type = other DNA
tttacctcacggactgcaggtggagctgccggacattccgactaccaccaccgtgcagaccgtccagctatggga

SEQ ID NO: 687909 - DNA, 75 bp, synthetic construct
  source 1..75: mol_type = other DNA
gatgctgcgcagtttggctcgactcaggctaactttacgatcccacaggcactgaaggcgatttatgaccacggt

SEQ ID NO: 687910 - DNA, 75 bp, synthetic construct
  source 1..75: mol_type = other DNA
atgaaactgctacaggacacctataatctgtatggtttctacgccaaaatcctgcttgctccggttttctgtacg

SEQ ID NO: 687911 - DNA, 75 bp, synthetic construct
  source 1..75: mol_type = other DNA
ttcgctttccgcaatgattgatgatccacaaagcgaagtgaatcagctaaacgaaaacggcattaccactatttt

SEQ ID NO: 687912 - DNA, 75 bp, synthetic construct
  source 1..75: mol_type = other DNA
gcaggcaccgttctggtcattaacgtactcgatccgtctgtgcataaaaccgctgtggtcagtgagaatgtgtcg

SEQ ID NO: 687913 - DNA, 75 bp, synthetic construct
  source 1..75: mol_type = other DNA
tggtttgatccggcccgcaatccggagacggagctggccgccgggcacctgttgctgagctacaaatatacgcca

SEQ ID NO: 687914 - DNA, 75 bp, synthetic construct
  source 1..75: mol_type = other DNA
cattgaaggattcagagatactgcggaaaaactgggtggagatgcaataaaaggctatgatcaaatactaaatga

SEQ ID NO: 687915 - DNA, 75 bp, synthetic construct
  source 1..75: mol_type = other DNA
gtaccatgccatatttgctgaacggatgattcagcatccggcggtacagcgtatttgtaatacggattactctgc

SEQ ID NO: 687916 - DNA, 75 bp, synthetic construct
  source 1..75: mol_type = other DNA
ttcgcttcgcctgccaaagggagaaacactgtcagtcagacaatgggcggcattcgctgacgattatatgacccg

SEQ ID NO: 687917 - DNA, 75 bp, synthetic construct
  source 1..75: mol_type = other DNA
aacgcgctgggcggaaactcaattgctttcggggataacgataccggcctgaaacagaatggtgatggcctgctg

SEQ ID NO: 687918 - DNA, 75 bp, synthetic construct
  source 1..75: mol_type = other DNA
ggggtaaacaattcgctggtgtgattctctacagcctgaaatcaggttctcaccacaaaatctcgccttatgtta

SEQ ID NO: 687919 - DNA, 75 bp, synthetic construct
  source 1..75: mol_type = other DNA
ctgcacctgcatcttctgacaccctgtcattccatgacaacaaatcccattaaagaacaattagttaaaaacaac

SEQ ID NO: 687920 - DNA, 75 bp, synthetic construct
  source 1..75: mol_type = other DNA
gcacctgttgacacctgttcctatcgcagcaccttattctcttcaggaacaatcagttagcaatagccagcacct

SEQ ID NO: 687921 - DNA, 75 bp, synthetic construct
  source 1..75: mol_type = other DNA
gcttggaaaaaagtatggctggtcttctctgcaaacacagattgattttacggcggagcatctgactttactaaa

SEQ ID NO: 687922 - DNA, 75 bp, synthetic construct
  source 1..75: mol_type = other DNA
ttacttacttgcctcctctcctgaatctgtcgacaaaatacattcagaacaattggttagtaaaggaaccagcta

SEQ ID NO: 687923 - DNA, 75 bp, synthetic construct
  source 1..75: mol_type = other DNA
ctcacagaaacagcgactacttcaaaccgacgatctcagagcataaagaagctttcgcgcaacgaaaagatgctc

SEQ ID NO: 687924 - DNA, 75 bp, synthetic construct
  source 1..75: mol_type = other DNA
actacgaacctgaacgggacaacccaatactactaaatgccaggccagttgctcctgctcctgctcctgctcctg

SEQ ID NO: 687925 - DNA, 75 bp, synthetic construct
  source 1..75: mol_type = other DNA
accttataagtacccgcataatcagtgagcttgaaatcactcataatctaacagtgaccaaaacagcctcagcca

SEQ ID NO: 687926 - DNA, 75 bp, synthetic construct
  source 1..75: mol_type = other DNA
gctcaacattgcttcgacgggcaaaatgagtggtttttcatttcaatttcaggggattgccttcaaggcttcaca

SEQ ID NO: 687927 - DNA, 75 bp, synthetic construct
  source 1..75: mol_type = other DNA
tcatcttcacttacttgcctcctctcctgaacctggcgatgaaatacattcagaacaattggttagcaaaggatc

SEQ ID NO: 687928 - DNA, 75 bp, synthetic construct
  source 1..75: mol_type = other DNA
gaacctggacggatgaaagtagacaccctgatacacaactcaattatgccaacgaatttgatctgaatatcaaag

SEQ ID NO: 687929 - DNA, 75 bp, synthetic construct
  source 1..75: mol_type = other DNA
tatctggtggcgtttccatctctattcgataccaatgctgttgtgggcggcgctggtaggatacgttttgttagt

SEQ ID NO: 687930 - DNA, 75 bp, synthetic construct
  source 1..75: mol_type = other DNA
cacgtcgcgtggtgctcagtgtggactggacgctgctgctggtgtttatggcgatgtttatcgacgtccatttac

SEQ ID NO: 687931 - DNA, 75 bp, synthetic construct
  source 1..75: mol_type = other DNA
ggtgatcagtaacgtgccgagtaccattttgctgctcaattatgtgccaccgtctttattactggcatgggcggt

SEQ ID NO: 687932 - DNA, 75 bp, synthetic construct
  source 1..75: mol_type = other DNA
tgcatttactgacgcagcttcctgctttacagggcgtgctgggaaatgtgggacgtttatccgaacccggattat

SEQ ID NO: 687933 - DNA, 75 bp, synthetic construct
  source 1..75: mol_type = other DNA
ttgatgctgctgacgaaaggtgtcgagttaagtggttattttgatgtgctggggcgcaaaatggtgcgccgcttt

SEQ ID NO: 687934 - DNA, 75 bp, synthetic construct
  source 1..75: mol_type = other DNA
agagatgatatcggcaccatcccgaatggagaaagagtaataggttacaaacaacgttttaaaatgccctatatt

SEQ ID NO: 687935 - DNA, 75 bp, synthetic construct
  source 1..75: mol_type = other DNA
atccaatagaaaaaggcctttctggaaaagagaatggaacttttacgtttactgccattccctataggaatggta

SEQ ID NO: 687936 - DNA, 75 bp, synthetic construct
  source 1..75: mol_type = other DNA
ctagccgaagaaggaggccaaaaagtcagtcaactcgactggaaattcaataacgctgcaattattaaaggtgca

SEQ ID NO: 687937 - DNA, 75 bp, synthetic construct
  source 1..75: mol_type = other DNA
attaattcttgttggtatcggattaagctttttcgtgccctttgcaccgaaatcctggcctgctgctatcgactg

SEQ ID NO: 687938 - DNA, 75 bp, synthetic construct
  source 1..75: mol_type = other DNA
atgaagattttgaactcggtggcacatttaaatacagcggctgggtggaatcatctgataacgatgaacactatg

SEQ ID NO: 687939 - DNA, 75 bp, synthetic construct
  source 1..75: mol_type = other DNA
atttaaatacagcggctgggtggaagcatctgataacgatgaacactatgacccaggaaaaagaatcacttatcg

SEQ ID NO: 687940 - DNA, 75 bp, synthetic construct
  source 1..75: mol_type = other DNA
gcatcctgacgatactgacgccctgttagcgcgtgttcgtgctcagttagccgtgcagttgccgtattacctgct

SEQ ID NO: 687941 - DNA, 75 bp, synthetic construct
  source 1..75: mol_type = other DNA
gcttgatgttcaccgccgtcagttccgcgctggcaacaacctaccccctgacgattgaaaactgcggctatcagg

SEQ ID NO: 687942 - DNA, 75 bp, synthetic construct
  source 1..75: mol_type = other DNA
gtggcaggcggcgtactgaagcaaaccattatcgataccggcatcggcgataccatcggcatgctgatgtcacac

SEQ ID NO: 687943 - DNA, 75 bp, synthetic construct
  source 1..75: mol_type = other DNA
ggcgtgaatccggcgctgctggtgctggcgacggctgcgggttctaacaccctcacccacattaatgatgcctca

SEQ ID NO: 687944 - DNA, 75 bp, synthetic construct
  source 1..75: mol_type = other DNA
tggcgacgttagctatatttctgaccattttttcattatagacaaatataccgcagatgataaagtggtattcga

SEQ ID NO: 687945 - DNA, 75 bp, synthetic construct
  source 1..75: mol_type = other DNA
gccaccgtcggcgtgaacagctacgtctcaccggggatgtgcgccaccaaaaaggccaccggcgatatgtacggc

SEQ ID NO: 687946 - DNA, 75 bp, synthetic construct
  source 1..75: mol_type = other DNA
cggatgtgatcgtggtcgccagcctggatcgtaaccgctgggcgctggataaggccgaggagaagatcaaattcc

SEQ ID NO: 687947 - DNA, 75 bp, synthetic construct
  source 1..75: mol_type = other DNA
gcgtgctacgtgccgttcgatattcatcagcctgccgcgcgtttgcaacgccttatgcaacgcgcgcgtttggtc

SEQ ID NO: 687948 - DNA, 75 bp, synthetic construct
  source 1..75: mol_type = other DNA
tcaaacacagcagcgtgatgcttcccgatcccgcgcccagcaacgacttgtacgtcgtcaccagcgtcagcgtta

SEQ ID NO: 687949 - DNA, 75 bp, synthetic construct
  source 1..75: mol_type = other DNA
ttcccatcatcaaagcggatccggcgcaggcaatcccgctgtcgtttaatcaggagcggttgtggtttttgcaaa

SEQ ID NO: 687950 - DNA, 75 bp, synthetic construct
  source 1..75: mol_type = other DNA
ttgccgaggtgcttggtaaaaaagctattgtcgataaacaaggcgccattagcgaagcaaaggcaataaatgctg

SEQ ID NO: 687951 - DNA, 75 bp, synthetic construct
  source 1..75: mol_type = other DNA
ccgcactggcgatctggtcaggagtgatgcgcaggggcagttgttttttgttgggcgcaaagatagccagatcaa

SEQ ID NO: 687952 - DNA, 75 bp, synthetic construct
  source 1..75: mol_type = other DNA
ggtttacgatgcctttgcgccttttatggtgggtgcagcgctggtactgccggaagcaggacgggaaaaagatcc

SEQ ID NO: 687953 - DNA, 75 bp, synthetic construct
  source 1..75: mol_type = other DNA
ttccgggatgaaacgggatcatttccagatggtgaaagagctataggctacaaacaacactttaaaatgccctat

SEQ ID NO: 687954 - DNA, 75 bp, synthetic construct
  source 1..75: mol_type = other DNA
tcatggcggttgttttccgattgaggattttatagatggtttctggcgaccagcacaggagtatggtgattttta

SEQ ID NO: 687955 - DNA, 75 bp, synthetic construct
  source 1..75: mol_type = other DNA
gtggaggcccatgcaaccacgcctttctggcgcaccatggcaccgctaacccgcgatgccattagtgcaatgtgg

SEQ ID NO: 687956 - DNA, 75 bp, synthetic construct
  source 1..75: mol_type = other DNA
agctggtttcggcaaaacccaatggttacatgacgccgcaggaattctgggaactggtcattgtctgcctgtgtc

SEQ ID NO: 687957 - DNA, 75 bp, synthetic construct
  source 1..75: mol_type = other DNA
gtgttcttttcgggattatttcaacgaaaaagtgacgcgccggtgacccccccagcagagctggcggatgctata

SEQ ID NO: 687958 - DNA, 75 bp, synthetic construct
  source 1..75: mol_type = other DNA
gtcggtctgaatcccattgcatatgcgcgcgaggccatttcactggcagcggcaaccgaggagcatggtgccaga

SEQ ID NO: 687959 - DNA, 75 bp, synthetic construct
  source 1..75: mol_type = other DNA
gggcatctggcgcattttcctgcacccgtcgcggcggcagtggttaaaacgctcgcggaatctgcctcagtaccg

SEQ ID NO: 687960 - DNA, 75 bp, synthetic construct
  source 1..75: mol_type = other DNA
ccccgaccgggcggtgatgtgtatctgacaccgatgaacatgaccaccagtccctctgctggcgatgacaacggt

SEQ ID NO: 687961 - DNA, 75 bp, synthetic construct
  source 1..75: mol_type = other DNA
ccgcgctcggcggtgatgactttgaccatctgttagcagattacattcgcgaacaggcgggcattcctgaccgta

SEQ ID NO: 687962 - DNA, 75 bp, synthetic construct
  source 1..75: mol_type = other DNA
ttcaaagatggccagacagcgatgtctatccatgttatgcagggtgagcgtgaactggtgcaggactgccgttcg

SEQ ID NO: 687963 - DNA, 75 bp, synthetic construct
  source 1..75: mol_type = other DNA
ttgtgccgtatctgacccgtattgaacagcggatcaatacagggctggtgagggagagtaaaaagggaaaatttt

SEQ ID NO: 687964 - DNA, 75 bp, synthetic construct
  source 1..75: mol_type = other DNA
agctggtttcggcaaaacccaatggctacatgacgccgcaggaattctgggagctggttatcgtctgcctgtgcc

SEQ ID NO: 687965 - DNA, 75 bp, synthetic construct
  source 1..75: mol_type = other DNA
atgtttttccaggggctttttcaacgtaaaaataatacccccgtcacaacgcccgggatacttgcggaagaactt

SEQ ID NO: 687966 - DNA, 75 bp, synthetic construct
  source 1..75: mol_type = other DNA
actgccattccctataggaatggtaatagtgagctaagcacaggaactttttccgcaacagcaaatatgagtatc

SEQ ID NO: 687967 - DNA, 75 bp, synthetic construct
  source 1..75: mol_type = other DNA
tcctgacaacccctattgcgatcagctcttttgcttctaccgagactatatcgtttactcctgacaacataaatg

SEQ ID NO: 687968 - DNA, 75 bp, synthetic construct
  source 1..75: mol_type = other DNA
tcgctggcagcggcgaccgaagagcacggggccaggctgttcagcaatggtgcggtgacgtccggtgtgttgcgt

SEQ ID NO: 687969 - DNA, 75 bp, synthetic construct
  source 1..75: mol_type = other DNA
cccgcgaggcaatatcgctggcggcagcgaccgaagagcacggggccagactgttcagcaatggtgcggtgacgt

SEQ ID NO: 687970 - DNA, 75 bp, synthetic construct
  source 1..75: mol_type = other DNA
gtttatcggcgatgaatgtgctgtgccgccatatcgtagcgcatgggttgaggacgcaacggaagcggaagtgcg

SEQ ID NO: 687971 - DNA, 75 bp, synthetic construct
  source 1..75: mol_type = other DNA
aagtatctgccgattacaatgcactatttgtcggagatgaatgcgcagtttcgccttatcgcagcgcctgggttg

SEQ ID NO: 687972 - DNA, 75 bp, synthetic construct
  source 1..75: mol_type = other DNA
tactttcctttccgaacgcggtatgccgttagcggatacgccagccgatcacatcggtactttgctgctggccgc

SEQ ID NO: 687973 - DNA, 75 bp, synthetic construct
  source 1..75: mol_type = other DNA
ccgcgtcccggtggtgatgtctatctcacaccgatgaacatgaccacgaaaccctccgatggcagtaaagccggt

SEQ ID NO: 687974 - DNA, 75 bp, synthetic construct
  source 1..75: mol_type = other DNA
cgaggacagtcagttcctggaaacccgcaagtttcagctggaagaaatctgtcgtctgttccgggtgccgttgca

SEQ ID NO: 687975 - DNA, 75 bp, synthetic construct
  source 1..75: mol_type = other DNA
ttggtatgctgccctgcagcctctacaaaatcaccggtacccttaaaacacgggcggtggatgaacgactgcata

SEQ ID NO: 687976 - DNA, 75 bp, synthetic construct
  source 1..75: mol_type = other DNA
atgtttttccaggggctttttcaacgcaaaaataacactcccgttacaacacccgggatgcttgcggaagagttg

SEQ ID NO: 687977 - DNA, 75 bp, synthetic construct
  source 1..75: mol_type = other DNA
tgagccaggaggatatctggcatgtgcgcacgctgacgctggacggtctggtgggactgaatcccgtcgcctatg

SEQ ID NO: 687978 - DNA, 75 bp, synthetic construct
  source 1..75: mol_type = other DNA
ctgactattccgaactgtatctcttacgacccggcttacgcttacgaagttgctgtcattatgcatgacggtctg

SEQ ID NO: 687979 - DNA, 75 bp, synthetic construct
  source 1..75: mol_type = other DNA
cgaaagattacggcgtaggttctgacgtttatagcgtgacttccttcaccgaattggcgcgtgatggtcaggatt

SEQ ID NO: 687980 - DNA, 75 bp, synthetic construct
  source 1..75: mol_type = other DNA
atcaacgaactggaaggcatcttcgaaggtgctggctggaacgtgatcaaagtgatgtggggtagccgttgggac

SEQ ID NO: 687981 - DNA, 75 bp, synthetic construct
  source 1..75: mol_type = other DNA
ggtcaaaatcatggtcgataaacctgacccggaaatgttccgtattggcgcgtcggcagtcgctaatcttgagcc

SEQ ID NO: 687982 - DNA, 75 bp, synthetic construct
  source 1..75: mol_type = other DNA
aggcgaaaaagtgtcgcttatcggccagcttatcgacattgtttccggtattttcaccccgtttatcggcgtcct

SEQ ID NO: 687983 - DNA, 75 bp, synthetic construct
  source 1..75: mol_type = other DNA
ttgaaatacgcttatccgggtctgattaatgaagtttcagatacgctgtcagctcgccagcaggccattccgttg

SEQ ID NO: 687984 - DNA, 75 bp, synthetic construct
  source 1..75: mol_type = other DNA
gggggttaccctgggatattaccgcctacggagggatgcaatactcaaataattatcgggcaatagcactcgggc

SEQ ID NO: 687985 - DNA, 75 bp, synthetic construct
  source 1..75: mol_type = other DNA
cacttaaacaagcaaccaccaataacgagtcatttggttataccgatgaagaaatagtctctgaggtgtactggc

SEQ ID NO: 687986 - DNA, 75 bp, synthetic construct
  source 1..75: mol_type = other DNA
gcttaatccgacgccgtattatctgacagtgactgacttaaaggccggaaataaaagtcttgaaaacaccatggt

SEQ ID NO: 687987 - DNA, 75 bp, synthetic construct
  source 1..75: mol_type = other DNA
cattgtcgaatgtactggcttttatacctccgccgagaaatcgcaggcgcatcttgatgctggtgcgaagaaggt

SEQ ID NO: 687988 - DNA, 75 bp, synthetic construct
  source 1..75: mol_type = other DNA
gcagaaaatatcattccccacactacgggggcggcaaaagccattggtctggtgatcccggaactgagcggcaaa

SEQ ID NO: 687989 - DNA, 75 bp, synthetic construct
  source 1..75: mol_type = other DNA
cgcttaaaaaggcgacaaacaataacgagtcatttggttataccgatgaagaaatagtctcttccgatatcattg

SEQ ID NO: 687990 - DNA, 75 bp, synthetic construct
  source 1..75: mol_type = other DNA
gccgaaaaagaggctaaaaatattccgtggaaagcgaaaggtgcagaaatcattgtcgaatgtactggcttttat

SEQ ID NO: 687991 - DNA, 75 bp, synthetic construct
  source 1..75: mol_type = other DNA
atacgatgcctgttgctgttcagccaggagcttttctgccatccgcgagccagtgtgacagttgatgaagtatgt

SEQ ID NO: 687992 - DNA, 75 bp, synthetic construct
  source 1..75: mol_type = other DNA
ccgcgcttctctccaataaccccgaatgggcgcccgatatcccactgaacgctggcggttttgaggcgtaccact

SEQ ID NO: 687993 - DNA, 75 bp, synthetic construct
  source 1..75: mol_type = other DNA
gtgtttaccgtcgcaggtactaatggcaaaggtacaacctgccgtacgctggaatcgatactgatggcggcaggg

SEQ ID NO: 687994 - DNA, 75 bp, synthetic construct
  source 1..75: mol_type = other DNA
ttctaccattgctgatgtggcgcaggaaaaaggtgcactgttacaacgtcggggcgttgagtggaactattccgt

SEQ ID NO: 687995 - DNA, 75 bp, synthetic construct
  source 1..75: mol_type = other DNA
gggcaatcgacgaagaccccgtcagcgtacacgatttaaccacagactataacttgccgacacgactactgacag

SEQ ID NO: 687996 - DNA, 75 bp, synthetic construct
  source 1..75: mol_type = other DNA
caccagtaaatacaaggcactgatgaaaggcgtaagccacgacgggcgcttacgcggtacgctacagttctgcgg

SEQ ID NO: 687997 - DNA, 75 bp, synthetic construct
  source 1..75: mol_type = other DNA
cactcgctggcgcgacactatggtgcaggcgctggcgcacggcctccccggtgcgctgggcgcgctctgcgaggt

SEQ ID NO: 687998 - DNA, 75 bp, synthetic construct
  source 1..75: mol_type = other DNA
aaaactatcgatctcggccttgagcgcgtgagccaggtcgcggcgcgtcttggcgtcctgaaaccagcgccattt

SEQ ID NO: 687999 - DNA, 75 bp, synthetic construct
  source 1..75: mol_type = other DNA
cagcattgcgctggatcataccgactggctggggccagatcgcgaaagcattggtcgcgagaaagcaggcatctt

SEQ ID NO: 688000 - DNA, 75 bp, synthetic construct
  source 1..75: mol_type = other DNA
agttgcattgtctctggggttaccggttgtgatcgccattacccatcgtccggtacagcgctgtacattgattac

SEQ ID NO: 688001 - DNA, 75 bp, synthetic construct
  source 1..75: mol_type = other DNA
atgactggacgtttagcgatgctcacggcacgctggaaaatctgccgttgccgcttgtcccgcaaccgaatgccg

SEQ ID NO: 688002 - DNA, 75 bp, synthetic construct
  source 1..75: mol_type = other DNA
ggcctggttgaaaagcgtggttgatgactggtattgtgcgccactggaagggccgcgcggtgccacggcagaaca

SEQ ID NO: 688003 - DNA, 75 bp, synthetic construct
  source 1..75: mol_type = other DNA
gtgattctggaagtagggctgggcggtcgtctggacgcaaccaatattgtcgatgccgatgtcgcggtagtaacc

SEQ ID NO: 688004 - DNA, 75 bp, synthetic construct
  source 1..75: mol_type = other DNA
cgagtcatttggttataccgatgaagaaatagtctcttccgatatcattggcagccatttcggttcggtgtttga

SEQ ID NO: 688005 - DNA, 75 bp, synthetic construct
  source 1..75: mol_type = other DNA
tggatgagcttaacctgatcacccagaaaaacgccgagttggtggaagagagtgcgcaggtgtcggcgatggtga

SEQ ID NO: 688006 - DNA, 75 bp, synthetic construct
  source 1..75: mol_type = other DNA
gaccggaagcggttgctgccgcgttaatcgctcagggtttgcagccggtatggaaagactgggacagctatctgg

SEQ ID NO: 688007 - DNA, 75 bp, synthetic construct
  source 1..75: mol_type = other DNA
gcagtgaccaaagaggaattgctgtatatcaggaaagatttgctgaccggataccaaaatccaacaaaaggtaaa

SEQ ID NO: 688008 - DNA, 75 bp, synthetic construct
  source 1..75: mol_type = other DNA
tgaagcctggccaaaaccagcgtctgacagagctcacctggctacaatggccacgctggcgaaatgtgacatgga

SEQ ID NO: 688009 - DNA, 75 bp, synthetic construct
  source 1..75: mol_type = other DNA
gaaacgctcccggcaatggttgcactgtaccggttcaccggaaacagccggaactggcaacggctggcccgcagg

SEQ ID NO: 688010 - DNA, 75 bp, synthetic construct
  source 1..75: mol_type = other DNA
ccgttgctgtaaccggttctctgggagatacgctgtcctctgtctggcagaccgtaaaagatggcactgcggcgg

SEQ ID NO: 688011 - DNA, 75 bp, synthetic construct
  source 1..75: mol_type = other DNA
gtgaatcctacgtttagtacccactggttaatcccaaatttacatgaattcacaaagttacatcccgatattatt

SEQ ID NO: 688012 - DNA, 75 bp, synthetic construct
  source 1..75: mol_type = other DNA
gcagctgacaacggatacacagaatcaaacccgtttaacggtcttacaccattaaaaagatcaagaacagaacca

SEQ ID NO: 688013 - DNA, 75 bp, synthetic construct
  source 1..75: mol_type = other DNA
tgaaagaacttgaaaaaaagtggctggatctgaaacgcatggaaatctctgcaaatgcattcaatcgctatgagt

SEQ ID NO: 688014 - DNA, 75 bp, synthetic construct
  source 1..75: mol_type = other DNA
aattggaggcagtagactggtgtcatcggtaaccaaagaggaattgctgtatatcaggaaagatttgctgaccgg

SEQ ID NO: 688015 - DNA, 75 bp, synthetic construct
  source 1..75: mol_type = other DNA
cattaacgaaagagttcactcttccaaaaaccgaagcgggaacaaaccgtgttatcaaccttattcaacctgcaa

SEQ ID NO: 688016 - DNA, 75 bp, synthetic construct
  source 1..75: mol_type = other DNA
tgtggattctcgctgtatacacgggtattcgtcacggggagttggtatcgctggcatgggaagatatagacctta

SEQ ID NO: 688017 - DNA, 75 bp, synthetic construct
  source 1..75: mol_type = other DNA
atatgcagccagagagcaaacccgctgggagcatctggctgaactttatcgctacctgaaattatctccgttcag

SEQ ID NO: 688018 - DNA, 75 bp, synthetic construct
  source 1..75: mol_type = other DNA
atgaataagtttatcgctgctgaagctgcggaatgtataggctgtcatgcctgtgaaattgcctgtgcggtggca

SEQ ID NO: 688019 - DNA, 75 bp, synthetic construct
  source 1..75: mol_type = other DNA
gtgggtttgattcgtaccgcaatgggtgagccgggacctgatggtcgccgtcgtccacgtccggtggcgggatct

SEQ ID NO: 688020 - DNA, 75 bp, synthetic construct
  source 1..75: mol_type = other DNA
gcgaatccggtggcctgtcatcattgcaataatgccccctgcgttacggtttgcccggtaaatgctctgactttc

SEQ ID NO: 688021 - DNA, 75 bp, synthetic construct
  source 1..75: mol_type = other DNA
aacaaaaatgtattggttgtaaaagatgcgcaatcgcttgcccctttggggtcattgagatggccgatactattg

SEQ ID NO: 688022 - DNA, 75 bp, synthetic construct
  source 1..75: mol_type = other DNA
agtctttgctggtggtgatgcagttcatggcgcggatctggttgtcactgcaatggccgcaggaaggcaggcggc

SEQ ID NO: 688023 - DNA, 75 bp, synthetic construct
  source 1..75: mol_type = other DNA
atggcctttggtttccaggcgcatgccatgccgtggttgcagggcagcggaattaaactcgataaatggggcctg

SEQ ID NO: 688024 - DNA, 75 bp, synthetic construct
  source 1..75: mol_type = other DNA
accactaactgccttgcgccgatggccaaagccttgcatgacagtttcgggatagaagtcggcacgatgacaacc

SEQ ID NO: 688025 - DNA, 75 bp, synthetic construct
  source 1..75: mol_type = other DNA
ggatttcccatttgatgaaagtaagatgcatcttttcactataaaaaaagggcttactgtcacatcggctttgtt

SEQ ID NO: 688026 - DNA, 75 bp, synthetic construct
  source 1..75: mol_type = other DNA
ctggtcaccagagtatgttttggtatgtaaccttaaggcctattttgtaaataaagctatcaacatgggcttagt

SEQ ID NO: 688027 - DNA, 75 bp, synthetic construct
  source 1..75: mol_type = other DNA
gcagggtgtgcccgcaggaccggctttgtgaaggcgcatgtacactaaaagatcactctggcgcagtctctatcg

SEQ ID NO: 688028 - DNA, 75 bp, synthetic construct
  source 1..75: mol_type = other DNA
tacggctgatggatggcaaagggttacaacagataaaaataacgcgtcagcgcagaacggtggaaggaaaaacag

SEQ ID NO: 688029 - DNA, 75 bp, synthetic construct
  source 1..75: mol_type = other DNA
cgatattttgtcgcaacgtattcaaagtagccaaagggcgctgggactggaagtcaatctggcggaagaaactcc

SEQ ID NO: 688030 - DNA, 75 bp, synthetic construct
  source 1..75: mol_type = other DNA
aacccactaccagaaaagccgtttcctgcctgtcttgaagagcgtcgtttacttattccggggcgtcgctcaatg

SEQ ID NO: 688031 - DNA, 75 bp, synthetic construct
  source 1..75: mol_type = other DNA
ctgctgaaatacccctcgcttgagctggtggagtataaagttgcacgtatcgccaccaccatgccttacattcct

SEQ ID NO: 688032 - DNA, 75 bp, synthetic construct
  source 1..75: mol_type = other DNA
catgaaaggctatcgtctgccagagccaacgcgctgggcggatgccgtggcctcggaacgtccggcatttgtgcg

SEQ ID NO: 688033 - DNA, 75 bp, synthetic construct
  source 1..75: mol_type = other DNA
cccgacgaagaacaaagcaatgcgctggcagaacatgaaaaatcccgcagacatccggatgccacactgaacgaa

SEQ ID NO: 688034 - DNA, 75 bp, synthetic construct
  source 1..75: mol_type = other DNA
tgatgaagaacggtctgggcgtcaccgttcccggtacgggaatggtggggctgccgattgcggcggcgctgggag

SEQ ID NO: 688035 - DNA, 75 bp, synthetic construct
  source 1..75: mol_type = other DNA
atgattcagcacccggcggtacagcgaatctgcaatacggattattcttcgttgttttctcccgcctcacgatag

SEQ ID NO: 688036 - DNA, 75 bp, synthetic construct
  source 1..75: mol_type = other DNA
ccattaccggacagattcgggcgctggaagagcgcctgcaaggcaaattatttaagcgcaagggacgtggtctcg

SEQ ID NO: 688037 - DNA, 75 bp, synthetic construct
  source 1..75: mol_type = other DNA
attatcgaaacatttatttgcccggtaagttgtatcagtaatccagatgaatttaataccttcttattaagaaat

SEQ ID NO: 688038 - DNA, 75 bp, synthetic construct
  source 1..75: mol_type = other DNA
gcgcgctggcgtgggtacaacgctgcatgaaaggctatcgtctgccagagccaacgcgctgggcggatgccgtgg

SEQ ID NO: 688039 - DNA, 75 bp, synthetic construct
  source 1..75: mol_type = other DNA
atcatcgaaacctttatttgtccggtaagtagtatcagcaatccagatgaatttaataccttcttattaagaaat

SEQ ID NO: 688040 - DNA, 75 bp, synthetic construct
  source 1..75: mol_type = other DNA
gaaagcgcattaattattaaaatgaatgattatggcgatttgcaaatcaatattctttttacttcccgccaaatg

SEQ ID NO: 688041 - DNA, 75 bp, synthetic construct
  source 1..75: mol_type = other DNA
acctgaccaaaagcgtgctggccttccactttttacgccacttcccggcgctggttggctggcttccggcacaca

SEQ ID NO: 688042 - DNA, 75 bp, synthetic construct
  source 1..75: mol_type = other DNA
caccacgtctggcgcaggttgacccgcccgcccaaccgacaatggaaacgcaggatcgggtagaaactgaaaaca

SEQ ID NO: 688043 - DNA, 75 bp, synthetic construct
  source 1..75: mol_type = other DNA
ccagctacggtccagaggctaaacaggattacgcggtacgccttgaagggccgattgtcgaagatattctccagt

SEQ ID NO: 688044 - DNA, 75 bp, synthetic construct
  source 1..75: mol_type = other DNA
ctggtgggctggcttccggcgcacacgccacgtctggcgcaagttgatccgcccgcgcagccggcaatggaaact

SEQ ID NO: 688045 - DNA, 75 bp, synthetic construct
  source 1..75: mol_type = other DNA
gcagaatcaaaacactgaatacccaacgggtgaatattctgaagagtgaacagcgtcgtgtcagtggcagtgccc

SEQ ID NO: 688046 - DNA, 75 bp, synthetic construct
  source 1..75: mol_type = other DNA
cagcgtcgtgtcagtggcagtgcccgggtttccctcaagcgtcgtatctggctgagggatgccgggcagtgctgt

SEQ ID NO: 688047 - DNA, 75 bp, synthetic construct
  source 1..75: mol_type = other DNA
taacatcggcggcgtgtattaccgaccgcttcagaaactgattaacggcacctggtataacgtgacgagtgttta

SEQ ID NO: 688048 - DNA, 75 bp, synthetic construct
  source 1..75: mol_type = other DNA
tggtggcgacgtcatcataaagcagaagagaaccgccagccgggagaagcgcaggtattgctggtctggcgcgat

SEQ ID NO: 688049 - DNA, 75 bp, synthetic construct
  source 1..75: mol_type = other DNA
ctggttggctggcttccggcacacacaccacgtctggcgcaggttgatccgcccgcacaaccgacaatggaaacg

SEQ ID NO: 688050 - DNA, 75 bp, synthetic construct
  source 1..75: mol_type = other DNA
aacgaagaacatcgcgatgatatagaacgccactatctgaaaatgctcactcaggcgcggcgggaagtgattatc

SEQ ID NO: 688051 - DNA, 75 bp, synthetic construct
  source 1..75: mol_type = other DNA
atgcgcaccaatgtgtttcgccggatgcatcgcaaaattgtggtgatcgacgcgcgtatcgcctttattggcggg

SEQ ID NO: 688052 - DNA, 75 bp, synthetic construct
  source 1..75: mol_type = other DNA
tcaggcgcggcgagaagtgattatcgccaacgcctacttcttccccggctatcgatttttacacgccttgcgtaa

SEQ ID NO: 688053 - DNA, 75 bp, synthetic construct
  source 1..75: mol_type = other DNA
ttctccagtttgaactggaaaacctgccaggacacagcgcagcacgacgctggtggcgacgtcatcacaaagcgg

SEQ ID NO: 688054 - DNA, 75 bp, synthetic construct
  source 1..75: mol_type = other DNA
ctgcctgtcttgaagagcgtcgtttacttattccggggcgtcgctcaatgttggggcgtaagctattaaactggt

SEQ ID NO: 688055 - DNA, 75 bp, synthetic construct
  source 1..75: mol_type = other DNA
atgaaaacattacctgtattacccgggcaggcggccggttcacgcccgtctccggttgaaatctggcagacactg

SEQ ID NO: 688056 - DNA, 75 bp, synthetic construct
  source 1..75: mol_type = other DNA
ccgcagcaatgcatatcgatgtcagcgctgatgtctggcagattgatttcactgcacgccttgcaggaatggatg

SEQ ID NO: 688057 - DNA, 75 bp, synthetic construct
  source 1..75: mol_type = other DNA
atggtctgaccctcaacgacacaccgttcagtgaggaacgagttatacaggaacatatcgatgctggtatcacgc

SEQ ID NO: 688058 - DNA, 75 bp, synthetic construct
  source 1..75: mol_type = other DNA
aactttaccaacctttatgtcgaaccaggcgcttatctgagccagaatccgcatttttgtaagtctgcactcgcg

SEQ ID NO: 688059 - DNA, 75 bp, synthetic construct
  source 1..75: mol_type = other DNA
gagcatatcgacgccggtatctcactgtgcgacgcggtgaattttatcgtggagaaatgcgatctggtacgaacc

SEQ ID NO: 688060 - DNA, 75 bp, synthetic construct
  source 1..75: mol_type = other DNA
acaccgataataacggattcagacattatgttgcaccactggcagtattatctgccggtcatgttgaggatgtcc

SEQ ID NO: 688061 - DNA, 75 bp, synthetic construct
  source 1..75: mol_type = other DNA
ctgccgagcctgcaagacttcggcgcgctgctggaagagcagagcaaagagatctctaccactatcgctttcgtt

SEQ ID NO: 688062 - DNA, 75 bp, synthetic construct
  source 1..75: mol_type = other DNA
gcgatggcgcgtggctgcgcatacagctaccatccgggcgcgcactctgctacccatccccgtccatcgagaagg

SEQ ID NO: 688063 - DNA, 75 bp, synthetic construct
  source 1..75: mol_type = other DNA
tgcacactccccaatgtgttgttgcaggtagtgccaaacgctggcgagacacaatggtacaggcgctggcgcacg

SEQ ID NO: 688064 - DNA, 75 bp, synthetic construct
  source 1..75: mol_type = other DNA
ttcggagttatgggtacctttagttctttttactctcatcatatagctacaatggaagggggctgcgtagttact

SEQ ID NO: 688065 - DNA, 75 bp, synthetic construct
  source 1..75: mol_type = other DNA
gtagcggcgctgggcgaactggctaaacgtggcgaaatcgataagaaagtggttgctgacgcaatcgccaaattc

SEQ ID NO: 688066 - DNA, 75 bp, synthetic construct
  source 1..75: mol_type = other DNA
ggtatcaatgggactgggtccgattggtgcaatttaccaggctaagttcctgaaatatctggagcaccgtggcct

SEQ ID NO: 688067 - DNA, 75 bp, synthetic construct
  source 1..75: mol_type = other DNA
atctggtcaataaacacggcatcgcctggcacgagaaaacgttaggacaactcttctgtgatgactctgcacagc

SEQ ID NO: 688068 - DNA, 75 bp, synthetic construct
  source 1..75: mol_type = other DNA
ggtacatgccggagcgcgccaggtggaaggtgcaatgaatgggatcggcgagcgagccggtaactgttcgctgga

SEQ ID NO: 688069 - DNA, 75 bp, synthetic construct
  source 1..75: mol_type = other DNA
tctggattacttcagcgtgcagtctggttctaacgatatcgccaccgctgccgtcaaactggtctgtggcgagga

SEQ ID NO: 688070 - DNA, 75 bp, synthetic construct
  source 1..75: mol_type = other DNA
attgaacagaatggcggaagagctgtttacggttgggctatctggcaggtaccgggagtttatattgaagctgag

SEQ ID NO: 688071 - DNA, 75 bp, synthetic construct
  source 1..75: mol_type = other DNA
ggatattgtcgccaactacaacggtcgccgcttccacggcgtcggcctggccaccgatattgtcgagtcctccgc

SEQ ID NO: 688072 - DNA, 75 bp, synthetic construct
  source 1..75: mol_type = other DNA
ccttcctgaagctggcggacaaaaaaggtcaggtgtttgattacgatctggaggcgctggccttcatcggtaagc

SEQ ID NO: 688073 - DNA, 75 bp, synthetic construct
  source 1..75: mol_type = other DNA
ttaatgccggtgccaccaccatcaacattccggacaccgtgggctacaccatgccatttgagttcgccggaatca

SEQ ID NO: 688074 - DNA, 75 bp, synthetic construct
  source 1..75: mol_type = other DNA
cgttttacccagtgggatttcattgatctggtcaataaacacggcatcgcctggcacgagaaaacgttagggcaa

SEQ ID NO: 688075 - DNA, 75 bp, synthetic construct
  source 1..75: mol_type = other DNA
gtgcagcccaacggcaccgaaggctatcgcaccgccgaagtgacgctcggcggtgtggacaccaacgaactctct

SEQ ID NO: 688076 - DNA, 75 bp, synthetic construct
  source 1..75: mol_type = other DNA
ccggtgggctgtcaatgccggggctgggcgcgtcgccgtttggttataagattgccgaacaatttggcctcaacg

SEQ ID NO: 688077 - DNA, 75 bp, synthetic construct
  source 1..75: mol_type = other DNA
cagagactacttcccttatccccgcgaagatatccaaagatttcttcaccataaccccccgcgccctttttgcta

SEQ ID NO: 688078 - DNA, 75 bp, synthetic construct
  source 1..75: mol_type = other DNA
gttgcatttgatggtacgaaggatatcaccatttcagcgggaatgacgcaggctgcagctgatgcccgctatgta

SEQ ID NO: 688079 - DNA, 75 bp, synthetic construct
  source 1..75: mol_type = other DNA
aacgggtggcgcagtcctgcccgtcgcctgtaaccgtctggcagaccctgctcacatacctgctggacaaacact

SEQ ID NO: 688080 - DNA, 75 bp, synthetic construct
  source 1..75: mol_type = other DNA
gcaggttgtgcatttcgaaactaccgcgcagcgcaaagacgctgcgtggacgttgggcgtaaatgcgaatttacc

SEQ ID NO: 688081 - DNA, 75 bp, synthetic construct
  source 1..75: mol_type = other DNA
cggacccgccgtactttaaagtaaaacccaatggctgggataaccagtggaatggcgatgatgattacctgaagt

SEQ ID NO: 688082 - DNA, 75 bp, synthetic construct
  source 1..75: mol_type = other DNA
ccattaatccggataccaacggcgatctctccacactcgcccagcttctttctggatttagcggtacggcggttg

SEQ ID NO: 688083 - DNA, 75 bp, synthetic construct
  source 1..75: mol_type = other DNA
atcaacttaattcaagttcgccaaatattcctcggtgggcttatgagaaaactcaaagagatgttaaccaaggct

SEQ ID NO: 688084 - DNA, 75 bp, synthetic construct
  source 1..75: mol_type = other DNA
ccgagaaggtggtgggcctggtggatgagtgctggcggatggggctgaaaatcctgccgccggatataaactccg

SEQ ID NO: 688085 - DNA, 75 bp, synthetic construct
  source 1..75: mol_type = other DNA
gcaatcgtatcggtatctgcacgctggatgaccgttccgggcggctggaagtgatgttgtttactgacgccctgg

SEQ ID NO: 688086 - DNA, 75 bp, synthetic construct
  source 1..75: mol_type = other DNA
acccgacagaacgtggtaaagtcatcacggctgcggggctcgttgttgccgcgcgggttatggtcaccaagcgcg

SEQ ID NO: 688087 - DNA, 75 bp, synthetic construct
  source 1..75: mol_type = other DNA
ctgaaaggctcgtcgctcgatgtgctgctgccgttttacaacaccccgaagaacgtgctgttcacccagctcggg

SEQ ID NO: 688088 - DNA, 75 bp, synthetic construct
  source 1..75: mol_type = other DNA
gccatgaccgggcatctgatgctgaccaccatccatgcgaacgacccgattaacatcctcgaacgccttgagatg

SEQ ID NO: 688089 - DNA, 75 bp, synthetic construct
  source 1..75: mol_type = other DNA
aaggctggaccaacctgaaaaataactggctgtactccagtacaaccgttatcagtggtaatggcgtgaaaagca

SEQ ID NO: 688090 - DNA, 75 bp, synthetic construct
  source 1..75: mol_type = other DNA
aaatccgggagatatagaaggctggattatgttgggccgcgttggcatggcgctgggtaacgccagtatcgccac

SEQ ID NO: 688091 - DNA, 75 bp, synthetic construct
  source 1..75: mol_type = other DNA
aacgatactcgccgtgcggtgatcgaacgtagtatcgcgcaggcgatgcaacatttgtcgccgcaggagagtaaa

SEQ ID NO: 688092 - DNA, 75 bp, synthetic construct
  source 1..75: mol_type = other DNA
gattgcagatcctcttctgtttatcggtctgctgagtcaacggctggtacaaaaactctgtccttactgtaagcg

SEQ ID NO: 688093 - DNA, 75 bp, synthetic construct
  source 1..75: mol_type = other DNA
aatacaatgtccgtttttccgatgaggaaagtggcctggtagcggtgattttcggcgcatggctgatgcaagcaa

SEQ ID NO: 688094 - DNA, 75 bp, synthetic construct
  source 1..75: mol_type = other DNA
ccgcacccggaccgacgcccggacaaaaaagagcgccgcgacctgttacgatttacacacggcgacagtgaataa

SEQ ID NO: 688095 - DNA, 75 bp, synthetic construct
  source 1..75: mol_type = other DNA
tgtatttctgctcggtaaggtgctggctctgcctgctgagccatttatgacgaaactttttgccgataagtccat

SEQ ID NO: 688096 - DNA, 75 bp, synthetic construct
  source 1..75: mol_type = other DNA
tattctgaaagacccaacgctcagttcagaactgcgtgatgaactggcgaaattgcgccgcaggagaacgtttaa

SEQ ID NO: 688097 - DNA, 75 bp, synthetic construct
  source 1..75: mol_type = other DNA
agccaaatcgcgaaaccatcgccgcaatgtgccgcgcgcgacacattgcgctcgccagccacgatgacgccacgc

SEQ ID NO: 688098 - DNA, 75 bp, synthetic construct
  source 1..75: mol_type = other DNA
gacctggtgctggcgcatcgcaagggcaatcacattcatatcgaccacgtctggcgtcagggtaaaagggtgttc

SEQ ID NO: 688099 - DNA, 75 bp, synthetic construct
  source 1..75: mol_type = other DNA
ctcgccagccacgatgacgccacgcacgcccacgttgccgaatcccaccaacttggcagcgtgatcgccgaattt

SEQ ID NO: 688100 - DNA, 75 bp, synthetic construct
  source 1..75: mol_type = other DNA
cgtggagcgtagcgaccaggacccacgttttcagaagaactacaccaaccgcattccaattggccgcatggcgca

SEQ ID NO: 688101 - DNA, 75 bp, synthetic construct
  source 1..75: mol_type = other DNA
atgctttgaagcacgtgatgttcattttctgtgcctgtatctgcaatattgcctgctacaacatcatgccgggat

SEQ ID NO: 688102 - DNA, 75 bp, synthetic construct
  source 1..75: mol_type = other DNA
aatacggcgtccatctttctgatgaggaaagcggtctggtcgcggtgattttcggtgcctggctaatgcaggaaa

SEQ ID NO: 688103 - DNA, 75 bp, synthetic construct
  source 1..75: mol_type = other DNA
tgactttccgtaaagagctggaaaaaattctgcgtgacccggtactgagccagacgctgcgtgatgaattgcgtg

SEQ ID NO: 688104 - DNA, 75 bp, synthetic construct
  source 1..75: mol_type = other DNA
cggtgcatgaagtttgcggatttttgttactggcatgctggctcggctttgttctgatcaatgccgttgggggta

SEQ ID NO: 688105 - DNA, 75 bp, synthetic construct
  source 1..75: mol_type = other DNA
tcttcggtcatctttatctttgcaccacggggcgtacgccacacgaaacctttaaaagcatggtcgatggctatc

SEQ ID NO: 688106 - DNA, 75 bp, synthetic construct
  source 1..75: mol_type = other DNA
tggccgctaaccgcctggaactggtgaaccgtaacaatgatgtggtgctggaataccgcaaacagacgctgatta

SEQ ID NO: 688107 - DNA, 75 bp, synthetic construct
  source 1..75: mol_type = other DNA
caatgctcaaaagaatttgcagagcgcaattttgcgctttgctatgaaaacaatgagttacagaacggtaaaccc

SEQ ID NO: 688108 - DNA, 75 bp, synthetic construct
  source 1..75: mol_type = other DNA
caacattacccgcccgacgcaaccactctggccggttgaaccgccccgggaatcctggagactaaacttcctgag

SEQ ID NO: 688109 - DNA, 75 bp, synthetic construct
  source 1..75: mol_type = other DNA
aaaccccatctggcccgctttttggccgaaaaagatgcagaccctgacattgaacgtctgctggaaggcgtggct

SEQ ID NO: 688110 - DNA, 75 bp, synthetic construct
  source 1..75: mol_type = other DNA
cattcaccaccacggccgggcaactgagccggacacagggcaccaccgaccagaacggccagctgtctgtgcaac

SEQ ID NO: 688111 - DNA, 75 bp, synthetic construct
  source 1..75: mol_type = other DNA
ttttttgaaaagaatgggaccgagtctacaaaacgattgtatatggttttttcatgataaaagtgattatgcaaa

SEQ ID NO: 688112 - DNA, 75 bp, synthetic construct
  source 1..75: mol_type = other DNA
tatcatttttagttttattctttatatttttctatgcttatatctcattgatgtcaaaggaacatcactatacac

SEQ ID NO: 688113 - DNA, 75 bp, synthetic construct
  source 1..75: mol_type = other DNA
agaaatcgccgctcagaacaaacgtcagttaaaagccagacaaacctctggcgtgcagcaatttctcgccaaatt

SEQ ID NO: 688114 - DNA, 75 bp, synthetic construct
  source 1..75: mol_type = other DNA
cgggttactacgccggatttcacgatttctttggtctgcctatcgatccacgcggcaatattatcggcgtgttga

SEQ ID NO: 688115 - DNA, 75 bp, synthetic construct
  source 1..75: mol_type = other DNA
cgcggcaatattatcggcgtgttgattgccgcgtgggcctgcgcccgcatcgaaggcatggtgcgccgctttatg

SEQ ID NO: 688116 - DNA, 75 bp, synthetic construct
  source 1..75: mol_type = other DNA
cttggttataacccaactgcaaccacgggttactacgccggatttcacgatttctttggtctgcccatcgatccg

SEQ ID NO: 688117 - DNA, 75 bp, synthetic construct
  source 1..75: mol_type = other DNA
gtcttatcgcatggtggggtctgccgatggggctaaacagtgcctttgggccgtctggcctggtggcgttgccgc

SEQ ID NO: 688118 - DNA, 75 bp, synthetic construct
  source 1..75: mol_type = other DNA
accgtttgttaccgcttgtttaggcggcgcagcaggtggattgtttattggtcttatcgcatggtggggtctgcc

SEQ ID NO: 688119 - DNA, 75 bp, synthetic construct
  source 1..75: mol_type = other DNA
tgacaaatgctgccggtgccgcttctgccaccctgaccagtacacaggctggtaatgcacaggtatcgctttccc

SEQ ID NO: 688120 - DNA, 75 bp, synthetic construct
  source 1..75: mol_type = other DNA
ggtctgctgagtcaacggctggtacaaaaactctgtccttactgtaagcgcacttatgctgaaatggcagacaaa

SEQ ID NO: 688121 - DNA, 75 bp, synthetic construct
  source 1..75: mol_type = other DNA
ctgataacagtaaaggacagcgtgctgttcaggcttatattggcactctgaatgttaaatatcccggacaggtaa

SEQ ID NO: 688122 - DNA, 75 bp, synthetic construct
  source 1..75: mol_type = other DNA
ggaaactgagatccgtttcatcagaaggaaatgtggcgcgatttacccagcgttttggtcgttttgttagcacga

SEQ ID NO: 688123 - DNA, 75 bp, synthetic construct
  source 1..75: mol_type = other DNA
gggcaggctgtcacctggcacacagacaacggacagttcacacagcaggatgcagtgacaaatgctgccggggcc

SEQ ID NO: 688124 - DNA, 75 bp, synthetic construct
  source 1..75: mol_type = other DNA
ccgggcgcgaaattccgcatcgatacggagaatgccgccggcacggtcacctggactgcatcctcaccggccgta

SEQ ID NO: 688125 - DNA, 75 bp, synthetic construct
  source 1..75: mol_type = other DNA
ggccacctattccggaatgaccgacgtcataaagggaacacagtttgatcctggcgttccccaggatgcccgtct

SEQ ID NO: 688126 - DNA, 75 bp, synthetic construct
  source 1..75: mol_type = other DNA
ggtttccgcatggaaatgtgtcaaagtgcgcgaccgtctaaatcagatccacactctgaagccaaaccgccttga

SEQ ID NO: 688127 - DNA, 75 bp, synthetic construct
  source 1..75: mol_type = other DNA
gagctatttatcattactcgataataccggtgaaatgctggttgctataaatgacatgaatattagcaacgctat

SEQ ID NO: 688128 - DNA, 75 bp, synthetic construct
  source 1..75: mol_type = other DNA
accgtactgtggtgttccacgataccagtatcgatgagtactataaaattggttcgaccatcaagactgaacgtg

SEQ ID NO: 688129 - DNA, 75 bp, synthetic construct
  source 1..75: mol_type = other DNA
aaaactggccgaagagataatcagggcgcaggagcaggaaatcaaacagatgcagtcctggctggagaagaaaga

SEQ ID NO: 688130 - DNA, 75 bp, synthetic construct
  source 1..75: mol_type = other DNA
gctggcgaatctccgggaaccgaactggcgaaaccattaattgataccgggcaatatcgcagagcgattacccat

SEQ ID NO: 688131 - DNA, 75 bp, synthetic construct
  source 1..75: mol_type = other DNA
cgagggtggataacgctaaggccattctggatgcgctcaggtcgttaaccaaaaaagatgtgctggtcggcatcc

SEQ ID NO: 688132 - DNA, 75 bp, synthetic construct
  source 1..75: mol_type = other DNA
gcgcgctgatactgcctattcaggccgattatttgctggccgttggcacggaaggccaggacgcgcgcccggaca

SEQ ID NO: 688133 - DNA, 75 bp, synthetic construct
  source 1..75: mol_type = other DNA
gccaagatcctgccgtggccgtgggatgaatcaagctaccggagtgctttagccgatataggcagcgctaagggc

SEQ ID NO: 688134 - DNA, 75 bp, synthetic construct
  source 1..75: mol_type = other DNA
agggtaaagtgttgggagcccgccaacgtaataaagttaatggtcagggctattataatgaaattggtattggcc

SEQ ID NO: 688135 - DNA, 75 bp, synthetic construct
  source 1..75: mol_type = other DNA
tgaaggtgcagccgattgcccgcgtctggtacaaaggagatcaaaaacaagtacaacacgcttgccctacaccgc

SEQ ID NO: 688136 - DNA, 75 bp, synthetic construct
  source 1..75: mol_type = other DNA
atgaagtcctggcacagctggaaaaaagcctgaaatcaccacgcagtgtcgcaccgtggacgcgcgaggagtggc

SEQ ID NO: 688137 - DNA, 75 bp, synthetic construct
  source 1..75: mol_type = other DNA
ctggatgtgctccgtcaggaacaggcgacactgaaacaggacgcggcatcacagcgtgagaccctcagaacggtg

SEQ ID NO: 688138 - DNA, 75 bp, synthetic construct
  source 1..75: mol_type = other DNA
agcctgctgatccacgcggctgcgggtatcatcctgatccacgccatcctgatccatatgtatatggcattctgg

SEQ ID NO: 688139 - DNA, 75 bp, synthetic construct
  source 1..75: mol_type = other DNA
acaacgccgggcaaaagatgatgttctggtcaatcatgagcatgattttcgtgctgctggtgaccggggtgatta

SEQ ID NO: 688140 - DNA, 75 bp, synthetic construct
  source 1..75: mol_type = other DNA
gtgcatcacaacatcccggataagaaagatattccgtggctgttgaacattgtcgaagtattaaaaggcaatgag

SEQ ID NO: 688141 - DNA, 75 bp, synthetic construct
  source 1..75: mol_type = other DNA
agaacatgaccgtttttggtaaaaatcacatcgcgaataatgcaagaaactttgaagcggttgctcagtatcagt

SEQ ID NO: 688142 - DNA, 75 bp, synthetic construct
  source 1..75: mol_type = other DNA
agcgactgatgacgatcacactcgtcttgcattcgctggtcttcgttttggtgattatggtgcaatcgattatgg

SEQ ID NO: 688143 - DNA, 75 bp, synthetic construct
  source 1..75: mol_type = other DNA
tttaatcccttacagcaggtcgcctatgttggtgtcatgtatggattgctgccgttgttactattgacggggctg

SEQ ID NO: 688144 - DNA, 75 bp, synthetic construct
  source 1..75: mol_type = other DNA
gcgaagttaaaaatcaaacgtccggtgaaggtgcagccgattgcccgcgtctggtacaaaggagatcaaaaacaa

SEQ ID NO: 688145 - DNA, 75 bp, synthetic construct
  source 1..75: mol_type = other DNA
accgaaacgccgaagtcttacgaaatggatgccgacgtaagaaaacgcattctcaatgcgctgggtatcccgtgc

SEQ ID NO: 688146 - DNA, 75 bp, synthetic construct
  source 1..75: mol_type = other DNA
agcactgaaacaccgaaatcttacgcgatggatgaagatgtgcgccgccgtattttcaacgcgatcggtatcccg

SEQ ID NO: 688147 - DNA, 75 bp, synthetic construct
  source 1..75: mol_type = other DNA
agcactgaaacgcctaagagctatgaaatggatgctgatgtgagaaaacgcattttaaacgcgatcggtatcccg

SEQ ID NO: 688148 - DNA, 75 bp, synthetic construct
  source 1..75: mol_type = other DNA
ggtgcagcattgctggcaaaggtcagaaagccggaggaggtgcagttgcgtgcctggttactccagttcctgaag

SEQ ID NO: 688149 - DNA, 75 bp, synthetic construct
  source 1..75: mol_type = other DNA
acggcgaccaggacatgattgagtatatcgacgttggtgcgacgtatttcttcaacaaaaatatgtcgacctatg

SEQ ID NO: 688150 - DNA, 75 bp, synthetic construct
  source 1..75: mol_type = other DNA
tgtccatgcagagacagttttcggcactgacgcccgctatgcttgatttcctgaaaaccgatatagcaaaggcgg

SEQ ID NO: 688151 - DNA, 75 bp, synthetic construct
  source 1..75: mol_type = other DNA
catttgtttattcagcaacagtccgaaaatcgcagcagcaaggctgctgttcgactgcctggcgtgttgtgttac

SEQ ID NO: 688152 - DNA, 75 bp, synthetic construct
  source 1..75: mol_type = other DNA
aatgggtgcatcgtcatttgccggggctgatcacccttaatgcttaccgcacgctcaccgttctgcacgaccccg

SEQ ID NO: 688153 - DNA, 75 bp, synthetic construct
  source 1..75: mol_type = other DNA
atgaagtcctggcactgctggaaaaaagcctgaaatcaccgcgcagtgttgcaccgtggacgcgcgaggagtggc

SEQ ID NO: 688154 - DNA, 75 bp, synthetic construct
  source 1..75: mol_type = other DNA
tggactacttcgacaataagctggacgacgccttcggtgattatttcagcggtgattatctgactgacgatatgc

SEQ ID NO: 688155 - DNA, 75 bp, synthetic construct
  source 1..75: mol_type = other DNA
tccagcaattccagatcctcgaatcagccgcagccgagaaaactggagccgaacgggcagcactacagaaacgcg

SEQ ID NO: 688156 - DNA, 75 bp, synthetic construct
  source 1..75: mol_type = other DNA
ggcgtgcggatggtctgatgagaccctggccggcatgtctgcttagtcgtttaccggatatcggtcagcggattg

SEQ ID NO: 688157 - DNA, 75 bp, synthetic construct
  source 1..75: mol_type = other DNA
gatgaacctgggcctgggcgcgaacgtctgcgacgtatggcgttgccaatggaagatgaagcgctagtactgttg

SEQ ID NO: 688158 - DNA, 75 bp, synthetic construct
  source 1..75: mol_type = other DNA
actgaactgggcgatgtcaaagtggtgatcctcggtcaggatccttaccacggccccggacaagcgcacggtctg

SEQ ID NO: 688159 - DNA, 75 bp, synthetic construct
  source 1..75: mol_type = other DNA
ctgcaaccattttgtgctggcaaatcagtggctggaacaacgtggcgagacgccgattgactggatgccagtatt

SEQ ID NO: 688160 - DNA, 75 bp, synthetic construct
  source 1..75: mol_type = other DNA
actgagttgggcgatgtcaaagttgtgattctcggccaggatccttaccacggacctggacaggcacatggtctg

SEQ ID NO: 688161 - DNA, 75 bp, synthetic construct
  source 1..75: mol_type = other DNA
cgcagtaccgccggtattctggtgcaattccccttctacgccgggatccaactgatgatggagcactccggtctg

SEQ ID NO: 688162 - DNA, 75 bp, synthetic construct
  source 1..75: mol_type = other DNA
acaacgcagggcagaaaatgatgttttggagcatcatgagcctgattctggtattactggttaccggcgttatta

SEQ ID NO: 688163 - DNA, 75 bp, synthetic construct
  source 1..75: mol_type = other DNA
gtacaaagagctggaaaatacccttccaggctttactcgcccgacacatggctatcttgaaagctgggcacgtca

SEQ ID NO: 688164 - DNA, 75 bp, synthetic construct
  source 1..75: mol_type = other DNA
atgattatcaataacgtcaaattggtgctggaaaacgaggtggtaagcggttcactggaggtgcaggacggcgaa

SEQ ID NO: 688165 - DNA, 75 bp, synthetic construct
  source 1..75: mol_type = other DNA
cggcgttccgcgtcgccgatgacgagagcaaccgctttacgctaccgcaggcggtgaggctggtgaccaaaaatc

SEQ ID NO: 688166 - DNA, 75 bp, synthetic construct
  source 1..75: mol_type = other DNA
tcgataaattcttcaccccgcgcccgaaagtcgactggcccgcccattctgcgatgagcagccacgacgcattaa

SEQ ID NO: 688167 - DNA, 75 bp, synthetic construct
  source 1..75: mol_type = other DNA
atggctaacgaattaacctggcatgatgtgctggctgaagagaagcagcaaccctattttcttaatacccttcag

SEQ ID NO: 688168 - DNA, 75 bp, synthetic construct
  source 1..75: mol_type = other DNA
caccacgctgccgctgtttgaaaaactggtgcagcgcgagccggtgacgctggtatcgctgatggaccactcgcc

SEQ ID NO: 688169 - DNA, 75 bp, synthetic construct
  source 1..75: mol_type = other DNA
gtcacctgtcagaagcaatggacggagaaggcggctggctgctaccggggctgattgagctgcataccgataatc

SEQ ID NO: 688170 - DNA, 75 bp, synthetic construct
  source 1..75: mol_type = other DNA
tatgcgtgctatcagcgcggcagcacgcagtaccgccggtattctggtgcaattccccttctacgctgggatcca

SEQ ID NO: 688171 - DNA, 75 bp, synthetic construct
  source 1..75: mol_type = other DNA
gaagcggcttatcgtaaagagttggtttatggtgaagacgatgcatcgcgcgcgacgccgccaacggtacgcgag

SEQ ID NO: 688172 - DNA, 75 bp, synthetic construct
  source 1..75: mol_type = other DNA
gaacgaatattacatggcgaactggcaacaactgcgtcatatcgaaggtgccgcacagcgtgtgcaggaagacac

SEQ ID NO: 688173 - DNA, 75 bp, synthetic construct
  source 1..75: mol_type = other DNA
cgggtacgtttttcctctcggcctttgtttgggcattgattgccgtgatcttctggcaagccggtggtggtgatt

SEQ ID NO: 688174 - DNA, 75 bp, synthetic construct
  source 1..75: mol_type = other DNA
cgccttcgtggaattgcagaaaatgttttcgcttacgcaacgggacaacgcgatgctgaacgagcgggtcatgca

SEQ ID NO: 688175 - DNA, 75 bp, synthetic construct
  source 1..75: mol_type = other DNA
agcacttgagcgagcagacagaacgcttgagcgagcagacagaacgcttgagccagttatacagcgagaactgga

SEQ ID NO: 688176 - DNA, 75 bp, synthetic construct
  source 1..75: mol_type = other DNA
gaagcggcttatcgtaaagagctggtctatggtgaagacgatgtcacccgtgcgacgccgccaacagtgcgtgag

SEQ ID NO: 688177 - DNA, 75 bp, synthetic construct
  source 1..75: mol_type = other DNA
tcgaaggggccgcgcagcgtgtgcaggaagacaccatgcgttttgcttcaacgctggagaatatggcgtcagctt

SEQ ID NO: 688178 - DNA, 75 bp, synthetic construct
  source 1..75: mol_type = other DNA
atgtttaagtcttttttcccaaagccgggagcgttttttctctcggcctttgtttgggcattgattgccgttatc

SEQ ID NO: 688179 - DNA, 75 bp, synthetic construct
  source 1..75: mol_type = other DNA
atgattggtcgcatctcgcgttttatgacgcgttttgtcagccggtggcttcccgatccactgatctttgccatg

SEQ ID NO: 688180 - DNA, 75 bp, synthetic construct
  source 1..75: mol_type = other DNA
tcgttgatggggaccggattgctggcagtggtagggatcaaactgccgggactggagtttaaaaatcagcgtgta

SEQ ID NO: 688181 - DNA, 75 bp, synthetic construct
  source 1..75: mol_type = other DNA
tgtttgggcattgattgccgttatcttctggcaagcaggtgggggtgactgggtggcgcgtatcaccggagcttc

SEQ ID NO: 688182 - DNA, 75 bp, synthetic construct
  source 1..75: mol_type = other DNA
tgggcagatcccgattagcgccgcacgtttctggtcgttagacttcctggttttttacgcttactacattgtttg

SEQ ID NO: 688183 - DNA, 75 bp, synthetic construct
  source 1..75: mol_type = other DNA
ccgtacgtttcatcgcgtttctcggcgtgtcgatgcccaacttctggctggcgtttttgctggtgatggcgtttt

SEQ ID NO: 688184 - DNA, 75 bp, synthetic construct
  source 1..75: mol_type = other DNA
cgtctcaatgcctaacttctggctagcgtttttgctggtaatggcgttttcagtgtatctgcaatggctgcccgc

SEQ ID NO: 688185 - DNA, 75 bp, synthetic construct
  source 1..75: mol_type = other DNA
ctggcctctacccgcaccatgctggggctggatcagccgctgtacgtgcaatacggcacctggctatggaaggcg

SEQ ID NO: 688186 - DNA, 75 bp, synthetic construct
  source 1..75: mol_type = other DNA
cctgggcgcgtctgcgcggcctgaacgacaaacagaccgaacgccgccatatcctgcgcaatgcctcgctgccga

SEQ ID NO: 688187 - DNA, 75 bp, synthetic construct
  source 1..75: mol_type = other DNA
cgatatgctgaacttcctgcccgccacgctggaactggcgggtgcggcgctggtattaattctgctcacttccgt

SEQ ID NO: 688188 - DNA, 75 bp, synthetic construct
  source 1..75: mol_type = other DNA
tcgccagccaacgcccggtgctggacgatatgctgaatttcctgcccgccacgctggaacttgcaggtgcggcgc

SEQ ID NO: 688189 - DNA, 75 bp, synthetic construct
  source 1..75: mol_type = other DNA
cgagcagggccactggcaggcgaaaaagctgacgactgatgcttctcaatgggaagtcttgctggacggcgaaaa

SEQ ID NO: 688190 - DNA, 75 bp, synthetic construct
  source 1..75: mol_type = other DNA
gtatcgttccgggtcagggccgtattatttggccggaaaacgacatcaacctgaagcagaccatggcaatgggct

SEQ ID NO: 688191 - DNA, 75 bp, synthetic construct
  source 1..75: mol_type = other DNA
gtattgttcctgggcagggtcgtattatctggccggaaaacgacatcaacctgaaacagaccatggcgatgggtt

SEQ ID NO: 688192 - DNA, 75 bp, synthetic construct
  source 1..75: mol_type = other DNA
atgtcccgagtctgccaagttactggcaagcgtccggtgaccggtaacaaccgttcccacgcactgaacgcgact

SEQ ID NO: 688193 - DNA, 75 bp, synthetic construct
  source 1..75: mol_type = other DNA
attccgtcgcgctgggtgtggcttcggctttgccgctgtggagccgcgcagtatttgcggcagaaagcccaacgt

SEQ ID NO: 688194 - DNA, 75 bp, synthetic construct
  source 1..75: mol_type = other DNA
ctgggttcgtttattaacgctcgtcgccgtctggagttgcgtggtgaagcgaatggcgtgacggtatatgacgat

SEQ ID NO: 688195 - DNA, 75 bp, synthetic construct
  source 1..75: mol_type = other DNA
cgacaaacagaccgaacgccgccatattctgcgcaatgcctcgctgccgatgatcaccgccgtggggatgcacat

SEQ ID NO: 688196 - DNA, 75 bp, synthetic construct
  source 1..75: mol_type = other DNA
cagccaggcgttgacgcaggtgcgtcgctgggacagtgccagtcagaaattacccgatgccaatctggcgctgat

SEQ ID NO: 688197 - DNA, 75 bp, synthetic construct
  source 1..75: mol_type = other DNA
ggagggaattactcacgcgattggtcttggcgggcgcgacctcagccgtgaagtgggcggcatcagtgcgctaac

SEQ ID NO: 688198 - DNA, 75 bp, synthetic construct
  source 1..75: mol_type = other DNA
aaagcaaccggcaaaccgacggtggcgctgtttttaggttataccccggcggtggcccgcgacgagaatgtctgg

SEQ ID NO: 688199 - DNA, 75 bp, synthetic construct
  source 1..75: mol_type = other DNA
actggaaaacgtcgccgtgattaacatcggattacgcagctttgcgctggagctacaaagcgccagcaaaccggt

SEQ ID NO: 688200 - DNA, 75 bp, synthetic construct
  source 1..75: mol_type = other DNA
ccgtcgggcgtccccatccgatgatcgacccaaccttacgcaaccagttaattgccgatctcggcgctaaaccgc

SEQ ID NO: 688201 - DNA, 75 bp, synthetic construct
  source 1..75: mol_type = other DNA
aagccaccttgctggcggcggcactgattcgtccgctttcgcctgccactcagcaacacacaccgtcattactgg

SEQ ID NO: 688202 - DNA, 75 bp, synthetic construct
  source 1..75: mol_type = other DNA
ctgaaaatcatcaacacggaaagtcaggaggcctgggaatggcaggagaaaatgggtcagcacgcccttatatag

SEQ ID NO: 688203 - DNA, 75 bp, synthetic construct
  source 1..75: mol_type = other DNA
cagctttatctgtggttttgcgaatgcctgatggatgcggaactgattgccggagagtaccgcctgccgctgccg

SEQ ID NO: 688204 - DNA, 75 bp, synthetic construct
  source 1..75: mol_type = other DNA
gacggacgaatggcggaatatccgctgcgcgccagccacaagcatcccgacgcttatgacatttttcagataagc

SEQ ID NO: 688205 - DNA, 75 bp, synthetic construct
  source 1..75: mol_type = other DNA
agccgccgaagcggcgggattacttgccgcgcatcttggcgtggtagccgacgatacccatcatcacggcatgat

SEQ ID NO: 688206 - DNA, 75 bp, synthetic construct
  source 1..75: mol_type = other DNA
cagcataccggaccgttcactgtttaacgatgatgtgatcaccacgtcattactctgtaccaaccggatgcttcc

SEQ ID NO: 688207 - DNA, 75 bp, synthetic construct
  source 1..75: mol_type = other DNA
gtacgccagccattaacctgtttacgcattatgcggaacccgtcaggccggatgggcggatggcggaatacccgc

SEQ ID NO: 688208 - DNA, 75 bp, synthetic construct
  source 1..75: mol_type = other DNA
cggatgagtacgactgcgccttcttcgacaaacgctctaaatttgtccattactgcccgcgtacgctgatcctca

SEQ ID NO: 688209 - DNA, 75 bp, synthetic construct
  source 1..75: mol_type = other DNA
atggcgatgaaagagatcctcactgaagaccgtcgtctggtgttgctgcgttccctgctggactgtggcgacagc

SEQ ID NO: 688210 - DNA, 75 bp, synthetic construct
  source 1..75: mol_type = other DNA
gaagattaagcaccgcgatcgccatcgcgctgtgctgctttccgccattttccagcggacaggaaaacccgggaa

SEQ ID NO: 688211 - DNA, 75 bp, synthetic construct
  source 1..75: mol_type = other DNA
cgcgtctatacgccagacagctccggtcatcgtcgcgacgatcgtatttcactcaacttcagctacccgctgtgg

SEQ ID NO: 688212 - DNA, 75 bp, synthetic construct
  source 1..75: mol_type = other DNA
gcgagtaatacccccagtctggtgagtattgacagcggcgcattccgtttttgcaaaaacgctacggcattcgac

SEQ ID NO: 688213 - DNA, 75 bp, synthetic construct
  source 1..75: mol_type = other DNA
aagagtacccgcaaataaccagtgtgtaccgttgtttttacaactgccggtcattgcagggaagcggatgtgcgc

SEQ ID NO: 688214 - DNA, 75 bp, synthetic construct
  source 1..75: mol_type = other DNA
cgtcgccggcatcacaggacgcggtgaagatgtggccttcgggctggcgacggtccccggcgtcaaaaaaccacg

SEQ ID NO: 688215 - DNA, 75 bp, synthetic construct
  source 1..75: mol_type = other DNA
accactggtaatttaactaatacggcttcttctggtgcatctaatgttcagattcagctactgaatgcagatggg

SEQ ID NO: 688216 - DNA, 75 bp, synthetic construct
  source 1..75: mol_type = other DNA
cgtccgaccatttgtttgatcggtggtggtcgcggttattattcttgcccgtggtcttcaaccattacaacaaat

SEQ ID NO: 688217 - DNA, 75 bp, synthetic construct
  source 1..75: mol_type = other DNA
tggtgatatcgccgtgcgttgggttaaagctgtaccagatgattttcatgcccgatttagcgctacggctcgccg

SEQ ID NO: 688218 - DNA, 75 bp, synthetic construct
  source 1..75: mol_type = other DNA
aggttattacaacctcaacgacgcgctgtacgccgtcgatcaggaaaaaaatagtcgcagcaactacaccctgtg

SEQ ID NO: 688219 - DNA, 75 bp, synthetic construct
  source 1..75: mol_type = other DNA
cgataacagcagcgcgtatcttggcgttaacgcgggcctgtcgtgggacggctggctgctcaagcatatcggtaa

SEQ ID NO: 688220 - DNA, 75 bp, synthetic construct
  source 1..75: mol_type = other DNA
cctggcagcacgggatcaacaatctgttgaccggctacaccggggtcaccggttttgacgactatcaggccttcc

SEQ ID NO: 688221 - DNA, 75 bp, synthetic construct
  source 1..75: mol_type = other DNA
gtaccggggtgacgacattcaaccggacgttttatggctgcgcggccctgacagcgataccggcaaaattgttcg

SEQ ID NO: 688222 - DNA, 75 bp, synthetic construct
  source 1..75: mol_type = other DNA
tggacgtgcgagacaattttgagcgccgggcttatgaaattgctctggcatcgctggaagcagtatcggatgaac

SEQ ID NO: 688223 - DNA, 75 bp, synthetic construct
  source 1..75: mol_type = other DNA
tgcccgctgattgcgtcactgcaagacggaacgaagctcgctgcatcggcgcgggggagtcacggggtgactacg

SEQ ID NO: 688224 - DNA, 75 bp, synthetic construct
  source 1..75: mol_type = other DNA
cagctgccaccggatgtgtacggcgcagaactgacgaccgtcaccctgacaccacaggtaaacgcaaaatacggg

SEQ ID NO: 688225 - DNA, 75 bp, synthetic construct
  source 1..75: mol_type = other DNA
gaagttattttttgcaaaagttgttaatcatttgcatggtgctgattttaaatattttagaaatgagcaatgtta

SEQ ID NO: 688226 - DNA, 75 bp, synthetic construct
  source 1..75: mol_type = other DNA
caactggaaaagttacaggtcaatcaatagccttcaatataatatatgataactattcaggtaaaaaatatctta

SEQ ID NO: 688227 - DNA, 75 bp, synthetic construct
  source 1..75: mol_type = other DNA
tcaagcctaaccgccttgaagcggaaacactcagtggtatttcgctttcaggtcgggatgatgctgaaaaggtgg

SEQ ID NO: 688228 - DNA, 75 bp, synthetic construct
  source 1..75: mol_type = other DNA
tacgactgcacgaagctgacaacgctgggagacagtgtatttgacggatgtacaggtgtgacgtcgttctatcag

SEQ ID NO: 688229 - DNA, 75 bp, synthetic construct
  source 1..75: mol_type = other DNA
gacaatgatgagtgtgctgcggttgcggtgagtgtctggccggagaatgctgaagaccggagctggactgtgacg

SEQ ID NO: 688230 - DNA, 75 bp, synthetic construct
  source 1..75: mol_type = other DNA
ttacgcggatgcgttttataactgcgtatccctgagcgatttcagcaccctgtctgagcgttatccagtctgggt

SEQ ID NO: 688231 - DNA, 75 bp, synthetic construct
  source 1..75: mol_type = other DNA
catccgccgctatggcgaggcggatgtgacgcgggtgcgcttcgtgaaatcagcccagcggctcggattcagcct

SEQ ID NO: 688232 - DNA, 75 bp, synthetic construct
  source 1..75: mol_type = other DNA
atcgccgccgcattgctattgcgacattaaaccgaatgaagcgcaagacaggaggttattgtctctccgtaaata

SEQ ID NO: 688233 - DNA, 75 bp, synthetic construct
  source 1..75: mol_type = other DNA
cagcagccacggcgtgacaaccttctaccggacattttaccggtgtgccgccctgacgacggtgcctgaggcggt

SEQ ID NO: 688234 - DNA, 75 bp, synthetic construct
  source 1..75: mol_type = other DNA
acaggcgcgaatggtcgggcatgacatcagggaatggctgaatacaccggttaagcaacatgaactggtcagaag

SEQ ID NO: 688235 - DNA, 75 bp, synthetic construct
  source 1..75: mol_type = other DNA
ccggaagcctgactctcactcagcaaaaagagcagttgcgggaattgcgaaaacgctgggaggtgaagcacaacg

SEQ ID NO: 688236 - DNA, 75 bp, synthetic construct
  source 1..75: mol_type = other DNA
cgtacaccggaacagtatttccggcgctataacgccaggtatcccgagcggggaggtgcgaaaaaggattccgga

SEQ ID NO: 688237 - DNA, 75 bp, synthetic construct
  source 1..75: mol_type = other DNA
cttctgcggttgcaataagattgttactcgccagcagcacaaggccgatcagtatctggacgcgctggagcaaga

SEQ ID NO: 688238 - DNA, 75 bp, synthetic construct
  source 1..75: mol_type = other DNA
actgatagttgaacgcaccagggcagggctggctgcagctcgtgccaaaggcagagtaggtggacgccgtactaa

SEQ ID NO: 688239 - DNA, 75 bp, synthetic construct
  source 1..75: mol_type = other DNA
ttgcgcgggagcatggccttgacatgagagacagagtgagcagacaggaccgaactgaacctgaacgggttaaat

SEQ ID NO: 688240 - DNA, 75 bp, synthetic construct
  source 1..75: mol_type = other DNA
tggcgcaaaacattccagtaactggtgcagtcgtggtcaccaccccgcaggacatcgcgttgatcgatgcgaaaa

SEQ ID NO: 688241 - DNA, 75 bp, synthetic construct
  source 1..75: mol_type = other DNA
caaactaccgcaagacactaatcaaagagtttgacaaggcgacggagaaaactaaagcggcactaaatctaccaa

SEQ ID NO: 688242 - DNA, 75 bp, synthetic construct
  source 1..75: mol_type = other DNA
atgtaaacttgatagatttcttaattgtataatatgtagcgcagcatttataaatattatttgtgttttatattt

SEQ ID NO: 688243 - DNA, 75 bp, synthetic construct
  source 1..75: mol_type = other DNA
ccccgtgaactgacaccggaacagcgccttgaactggtgcaggattttgtacgtcaggaagctggcgaacggcat

SEQ ID NO: 688244 - DNA, 75 bp, synthetic construct
  source 1..75: mol_type = other DNA
cagaaggctgcaacatgatgttgcgcaggagtatggctttgacatgagagacggagtgagcagacaggagcgaac

SEQ ID NO: 688245 - DNA, 75 bp, synthetic construct
  source 1..75: mol_type = other DNA
catggtctggcaaccaactcgattggttatctggtcactgacgacaacgcgatggtgtggcgcggcccgatggcc

SEQ ID NO: 688246 - DNA, 75 bp, synthetic construct
  source 1..75: mol_type = other DNA
attacgcccccgttgaacagcagtgggatttaaacttcgctgattattttgcggaagacctcaagctgctcgccc

SEQ ID NO: 688247 - DNA, 75 bp, synthetic construct
  source 1..75: mol_type = other DNA
gggtttggtggttggtttgattgctggaggcgaatatgccattcagcatgcggtggaaggcgctgaagatagccg

SEQ ID NO: 688248 - DNA, 75 bp, synthetic construct
  source 1..75: mol_type = other DNA
ataaagaggcgcgctgggcgctggggctgacccttttgtatctggcagtttggttagtagccgcttacttacctg

SEQ ID NO: 688249 - DNA, 75 bp, synthetic construct
  source 1..75: mol_type = other DNA
ttaatctccgttgaaccgcttatcgacatgggccgtacggcgctaaacgttagtggctcgatgacagctggcacg

SEQ ID NO: 688250 - DNA, 75 bp, synthetic construct
  source 1..75: mol_type = other DNA
ccggttactacgccggttttcacgatttctttggtctgcccatcgatccgcgcggcaatattatcggcgtgttga

SEQ ID NO: 688251 - DNA, 75 bp, synthetic construct
  source 1..75: mol_type = other DNA
ctggcgctttactggcgagcgcagccgcatagtgcattacgcagtcaggtacgtggagcgattattcccggtctg

SEQ ID NO: 688252 - DNA, 75 bp, synthetic construct
  source 1..75: mol_type = other DNA
ttaatggacagccagggattcaacagcttatttcccatcctttcaatggcaggcgcgggccaggtgggcgcggcg

SEQ ID NO: 688253 - DNA, 75 bp, synthetic construct
  source 1..75: mol_type = other DNA
gaaggaacctcgttgctgcgcggcggcaatgattcgccgcgccatcatcgttgccgccgtctgtctttccgtcgc

SEQ ID NO: 688254 - DNA, 75 bp, synthetic construct
  source 1..75: mol_type = other DNA
atgtctgtacagcaaatcgactgggatctggctctgatccagaaatataactattccgggccacgatacacctcg

SEQ ID NO: 688255 - DNA, 75 bp, synthetic construct
  source 1..75: mol_type = other DNA
cgatatcctgcaggaaaccatcgccttcctgacacaatcgggctatcagtttatcggtatggatcactttgcccg

SEQ ID NO: 688256 - DNA, 75 bp, synthetic construct
  source 1..75: mol_type = other DNA
ctttatcccgaaaaacccgtttgccgatttgaccggagccaatccgacgtcaattatcagcgtggtaatttttgc

SEQ ID NO: 688257 - DNA, 75 bp, synthetic construct
  source 1..75: mol_type = other DNA
cgcccaagcttttattttattgataatacaattaatcatgagaaaaacattctctcaggagagatagggtacaaa

SEQ ID NO: 688258 - DNA, 75 bp, synthetic construct
  source 1..75: mol_type = other DNA
tgataattgctacgttaccagtacttcgccgttttctgctgctgcgcgggttattcagtgcttacctcctgaaga

SEQ ID NO: 688259 - DNA, 75 bp, synthetic construct
  source 1..75: mol_type = other DNA
aaaaactgcgtatgaaattcggtggccgttgtgcgtactgcggctgtgaactgccggagaaaggatggcatgccg

SEQ ID NO: 688260 - DNA, 75 bp, synthetic construct
  source 1..75: mol_type = other DNA
cagaaatggctgaccggcttcacccggcacgccgtatcctggggcgtgtgtcatccgaatatctactacttccat

SEQ ID NO: 688261 - DNA, 75 bp, synthetic construct
  source 1..75: mol_type = other DNA
tgcctggttgtgcagcattctggaacgccgacttaatgcgtggttaccttcggcaatcaaaaatttcttcacacc

SEQ ID NO: 688262 - DNA, 75 bp, synthetic construct
  source 1..75: mol_type = other DNA
atgaaagcaaagcgcaagctgaggtactgaaaaagacccccggtattattatggtggtggaaagcggtggccagt

SEQ ID NO: 688263 - DNA, 75 bp, synthetic construct
  source 1..75: mol_type = other DNA
gtggatcgcgtgctggattttgaagaaggtcgtttcctgcgcgcagtaaaaaatgtctctgtcaatgagccattc

SEQ ID NO: 688264 - DNA, 75 bp, synthetic construct
  source 1..75: mol_type = other DNA
tactggttatgacggcagctaccgggttgaaggtacagtgcttaaccaacgtttgtgtttatttcactggctacg

SEQ ID NO: 688265 - DNA, 75 bp, synthetic construct
  source 1..75: mol_type = other DNA
aatggtgaaaaaccggagattgccatcgtaccccagagtctgcaccggctgatttatggtccggacaaacggaca

SEQ ID NO: 688266 - DNA, 75 bp, synthetic construct
  source 1..75: mol_type = other DNA
atggtaccgcattattaccatgtacgaagaccaacagcctgataactggcgtgtacaggcgatactgtatgcgtg

SEQ ID NO: 688267 - DNA, 75 bp, synthetic construct
  source 1..75: mol_type = other DNA
atacaacgtgttttatgacgtggactggcgcaacaccaaccgccgctacgggattggcgtggaagcctggcgtga

SEQ ID NO: 688268 - DNA, 75 bp, synthetic construct
  source 1..75: mol_type = other DNA
cgggcgcgacctcagccgtgaagtgggcggcatcagtgcgctgacggcgctggaaatgctcagtgcagacgagaa

SEQ ID NO: 688269 - DNA, 75 bp, synthetic construct
  source 1..75: mol_type = other DNA
tctgatgcattgtgcaacgcgattacgttttaagttaaaggatgaaagcaaagcgcaagctgaggtactgaaaaa

SEQ ID NO: 688270 - DNA, 75 bp, synthetic construct
  source 1..75: mol_type = other DNA
gcggtgtcgttgccatcggttgcgcatttgtcggtacggtgatgctttatttcatcactgctaaacgtcagccag

SEQ ID NO: 688271 - DNA, 75 bp, synthetic construct
  source 1..75: mol_type = other DNA
ttagcgatcatattgttattaactatcagggaaaaaatgcatcactgccgctgcgatatgataatccagcaaaaa

SEQ ID NO: 688272 - DNA, 75 bp, synthetic construct
  source 1..75: mol_type = other DNA
agcgcatgaaatatctactggtaagctgaatgagtttgtaaacagatttaatcgggtaacagctccatacgaact

SEQ ID NO: 688273 - DNA, 75 bp, synthetic construct
  source 1..75: mol_type = other DNA
tggaaccgttctggaatggggaaacggggtggcattcggataatttattacaacgtaacacgcaatggccgaatt

SEQ ID NO: 688274 - DNA, 75 bp, synthetic construct
  source 1..75: mol_type = other DNA
cacaggcagttttagaaaaattcgctggaaccgttctggaatggggaaacggggtggcattcggataatttatta

SEQ ID NO: 688275 - DNA, 75 bp, synthetic construct
  source 1..75: mol_type = other DNA
aaaaacctgataccgaacaacttaacttgcttaaaaaatcacaacgagcctggctggattttagggacaaagaat

SEQ ID NO: 688276 - DNA, 75 bp, synthetic construct
  source 1..75: mol_type = other DNA
gtttacgagcagtattacgggaatgaagtggcgctgttcggtgagtctgaacgccagaagaatcctcacgccatc

SEQ ID NO: 688277 - DNA, 75 bp, synthetic construct
  source 1..75: mol_type = other DNA
taaattactgatgaaaatattccgctactctgacgtgggcttagtgacgccactgcgtgacgggatgaacctggt

SEQ ID NO: 688278 - DNA, 75 bp, synthetic construct
  source 1..75: mol_type = other DNA
caaaggtttgccagagcgttttctcgcctatgaagcgttgctggaaaaatatccgcagcatcatggtaaaattcg

SEQ ID NO: 688279 - DNA, 75 bp, synthetic construct
  source 1..75: mol_type = other DNA
ggcatttgagtcagggtttagtgggcagcgagcggtgactacttggctaggaagaatgaaaaagctacgagagct

SEQ ID NO: 688280 - DNA, 75 bp, synthetic construct
  source 1..75: mol_type = other DNA
cattgcggggctgaatgtatcagggctgaagaaaaacgcgcgggatatcagtctgctgaggtatatgccggcctg

SEQ ID NO: 688281 - DNA, 75 bp, synthetic construct
  source 1..75: mol_type = other DNA
caaaaagccatacagcctgcggcgaagtttacccgatcggcattgagccgaaagaaatagcgaaacaggctgccg

SEQ ID NO: 688282 - DNA, 75 bp, synthetic construct
  source 1..75: mol_type = other DNA
attggtattgaaccggatgagattgctaaacaggctgccgggccgctaccggcaaaactggcgcaattaaaagcg

SEQ ID NO: 688283 - DNA, 75 bp, synthetic construct
  source 1..75: mol_type = other DNA
gcaccaaactgcctgctactggctgacctgccgtttatggcgtatgccacgccagaacaagcctttgaaaacgct

SEQ ID NO: 688284 - DNA, 75 bp, synthetic construct
  source 1..75: mol_type = other DNA
atgaaaccaaccaccatctccttactgcagaagtacaaacaggaaaaaaaacgtttcgccaccatcacagcctac

SEQ ID NO: 688285 - DNA, 75 bp, synthetic construct
  source 1..75: mol_type = other DNA
acgcttcgccaccatcactgcttacgactatagctttgcaaaattgtttgccgatgaaggaattaacgtcatgct

SEQ ID NO: 688286 - DNA, 75 bp, synthetic construct
  source 1..75: mol_type = other DNA
tgtcttcacagcttgccctgccacgtaacacgcaggttgaccgtgtgatttacggaattaactgcacggatttat

SEQ ID NO: 688287 - DNA, 75 bp, synthetic construct
  source 1..75: mol_type = other DNA
tcacaccgccgcggtgcgccgcggtgcgccaaactgcctgctgctggctgacctgccgtttatggcctattccac

SEQ ID NO: 688288 - DNA, 75 bp, synthetic construct
  source 1..75: mol_type = other DNA
tgcagaaatgtaagcaggaaaaaaaacgcttcgccaccatcaccgcctacgactacagcttcgccaaactgtttg

SEQ ID NO: 688289 - DNA, 75 bp, synthetic construct
  source 1..75: mol_type = other DNA
gactacagcttcgccaaactgtttgctgacgaagggctgaatgtgatgctggtgggcgattcgctgggcatgacc

SEQ ID NO: 688290 - DNA, 75 bp, synthetic construct
  source 1..75: mol_type = other DNA
gactacagcttcgcgaaactatttgctgatgaaggacttaacgtcatgctggtaggcgactcgctgggcatgacg

SEQ ID NO: 688291 - DNA, 75 bp, synthetic construct
  source 1..75: mol_type = other DNA
ctgtcactgtggaagatatcgcctaccacactgccgccgttcgtcgcggtgcgccaaactgtctgctgctggctg

SEQ ID NO: 688292 - DNA, 75 bp, synthetic construct
  source 1..75: mol_type = other DNA
caattgctggtactggagtgtgtacccgttgagctggcaaaacgcattaccgaggcactggcgatccccgtcatt

SEQ ID NO: 688293 - DNA, 75 bp, synthetic construct
  source 1..75: mol_type = other DNA
cgaagcactggcgatcccggttatcggtattggcgcaggcaacgtcactgacgggcaaatcctcgtgatgcacga

SEQ ID NO: 688294 - DNA, 75 bp, synthetic construct
  source 1..75: mol_type = other DNA
atgaaacctaccactattgcttcattgcagaaatataagcaggaaaaaaaacgtttcgctaccattaccgcctac

SEQ ID NO: 688295 - DNA, 75 bp, synthetic construct
  source 1..75: mol_type = other DNA
aaggccggtgactctccagccaagttcatcactgaagttaataagctgaaatctcagtcaggcggtgaaatttac

SEQ ID NO: 688296 - DNA, 75 bp, synthetic construct
  source 1..75: mol_type = other DNA
tgaacagtacgatacacggaaaaccatcaagcaaactcaggctggagtgcgttatgagcgtagtcttagcgccag

SEQ ID NO: 688297 - DNA, 75 bp, synthetic construct
  source 1..75: mol_type = other DNA
atgaagattttttccgtccgacagaccgttttgcccgcgctgcttgtcctttcccccaccgtttttgccgctgat

SEQ ID NO: 688298 - DNA, 75 bp, synthetic construct
  source 1..75: mol_type = other DNA
atgaagattttttccgtccgacagaccgttttgcccgcactgcttgtcctttcccccgttgtttttgccgctgat

SEQ ID NO: 688299 - DNA, 75 bp, synthetic construct
  source 1..75: mol_type = other DNA
gccggagagcgagaaacgacccagtaccagtcaatacccatggcaccacaacttaacccgtcacatgcgggcggc

SEQ ID NO: 688300 - DNA, 75 bp, synthetic construct
  source 1..75: mol_type = other DNA
gctatgagcgtagcctgagctcgcgggatgatattagtgtgatgatgtatgcaggcgagcgagaaacgacccagt

SEQ ID NO: 688301 - DNA, 75 bp, synthetic construct
  source 1..75: mol_type = other DNA
ggatcgttaaaatatgcaatgaccgatgcctggaatatctatctggcagccgggcgtggttttgaaacgccgacg

SEQ ID NO: 688302 - DNA, 75 bp, synthetic construct
  source 1..75: mol_type = other DNA
agtgcacggttttctgtttgaggccgtgcctgtgattactcgtgttactggttgtgttgtccgcagatttacgcg

SEQ ID NO: 688303 - DNA, 75 bp, synthetic construct
  source 1..75: mol_type = other DNA
ctgcctgtagccacaacgcttcacttcctccctttaccgccagtggatttgctgaagatcagggcgcggtccgca

SEQ ID NO: 688304 - DNA, 75 bp, synthetic construct
  source 1..75: mol_type = other DNA
cgatctgagctttatgcaacgtgaatccgatggggaaaagcagcagctttctaacgaccaaatcgatttataccg

SEQ ID NO: 688305 - DNA, 75 bp, synthetic construct
  source 1..75: mol_type = other DNA
gtgagcttgctgaagattttggtcttcagggtttttttgttgtgcttaccacgccgtcacggtttcatccgacaa

SEQ ID NO: 688306 - DNA, 75 bp, synthetic construct
  source 1..75: mol_type = other DNA
gataaagccggtattcagatacccggtctgcgcacggtcgagcctcatgctgacggtacaacgcactggaatttc

SEQ ID NO: 688307 - DNA, 75 bp, synthetic construct
  source 1..75: mol_type = other DNA
tgaaaagggtgatggtttccgttacatcgtgaagtacatcaccaaaatggcgggtgatgtcagtgcggatggtat

SEQ ID NO: 688308 - DNA, 75 bp, synthetic construct
  source 1..75: mol_type = other DNA
ttgcggaggcattgccttacctggctactgttggcgttggcggcgcttcaactcaggcgccaacacttgctggtc

SEQ ID NO: 688309 - DNA, 75 bp, synthetic construct
  source 1..75: mol_type = other DNA
gagcagcatcggggcacagtatggtgaatttcttgggaacggtgacaatgtcggtgagctgtttgagggagaata

SEQ ID NO: 688310 - DNA, 75 bp, synthetic construct
  source 1..75: mol_type = other DNA
tatgatatggggggagtatcttcaaaaaaaagaattttaagagataaagagcttgccaaaattatgtttgaaaaa

SEQ ID NO: 688311 - DNA, 75 bp, synthetic construct
  source 1..75: mol_type = other DNA
agaaataccgtgtgctgctgatgcgtgttgatacgtcaacagcacccgatattgaatggcctacgcctccggcag

SEQ ID NO: 688312 - DNA, 75 bp, synthetic construct
  source 1..75: mol_type = other DNA
tctgggcgccgacgattatctgtgtaaaccttttgccttaatagaagtcgctgccaggctggaagcactgatgcg

SEQ ID NO: 688313 - DNA, 75 bp, synthetic construct
  source 1..75: mol_type = other DNA
acgggcatgtacaccttcatgagttcatgccagcgtgatgagtggaacagccagctgatgagcgacacctgtcct

SEQ ID NO: 688314 - DNA, 75 bp, synthetic construct
  source 1..75: mol_type = other DNA
atctgctggaggggcgcaacgttcctgacttcaggaacagcatcggggcgcagtatggtgaatttctcgggaacg

SEQ ID NO: 688315 - DNA, 75 bp, synthetic construct
  source 1..75: mol_type = other DNA
cgcctcctgctggacgcatcgggcgagaattttctttatggttttgaagatacggtcacggcagcagttcgtcgt

SEQ ID NO: 688316 - DNA, 75 bp, synthetic construct
  source 1..75: mol_type = other DNA
ttcctccaaagacaaaacccgtcttgcatttgcaggcctgaaattcggtgactacggctcaatcgattacggccg

SEQ ID NO: 688317 - DNA, 75 bp, synthetic construct
  source 1..75: mol_type = other DNA
cgccgagatcgaaccaccgaagtcgatctccactgccaccgcagtaactgcgcagattatcgcccaagttgccag

SEQ ID NO: 688318 - DNA, 75 bp, synthetic construct
  source 1..75: mol_type = other DNA
tgacctggggattaggcatcgtcgggccaaaacactccggaaaagtgatgtcgtggaatgggatggcgatttacg

SEQ ID NO: 688319 - DNA, 75 bp, synthetic construct
  source 1..75: mol_type = other DNA
cccttcggtgttccttgccggggcgatatcggcggtgctgggaattattgtcacgatactgtcgtttcgccgggg

SEQ ID NO: 688320 - DNA, 75 bp, synthetic construct
  source 1..75: mol_type = other DNA
attgtcagcaatattctgtatcgctggcgaaccgggtatgtttcacttgaccattccggtatggctaaactggat

SEQ ID NO: 688321 - DNA, 75 bp, synthetic construct
  source 1..75: mol_type = other DNA
ctgccaggctggaagcactgatgcgtcgaagcaacgggcaagccagcaatgagttacatcacggtaacgtaatgc

SEQ ID NO: 688322 - DNA, 75 bp, synthetic construct
  source 1..75: mol_type = other DNA
caaattccgattatgcaaacgtttataataaggtgcttaataaaaacattgctaacaagctcaacaaggcaagca

SEQ ID NO: 688323 - DNA, 75 bp, synthetic construct
  source 1..75: mol_type = other DNA
gacagggtctacaactcgctaaccaatagccttagtaaatctatagcgaaaggacttagcccaaaagatgcttca

SEQ ID NO: 688324 - DNA, 75 bp, synthetic construct
  source 1..75: mol_type = other DNA
agacccctacgcgcaagccggtgaaacaattggtgggtatttagttccaggagttggaacggcaggaagcatggc

SEQ ID NO: 688325 - DNA, 75 bp, synthetic construct
  source 1..75: mol_type = other DNA
tttatgtctgacctcggcgaagcagtaaaagaaactggtcgcggactggtgcaggctggtgtaaatgtggcaaat

SEQ ID NO: 688326 - DNA, 75 bp, synthetic construct
  source 1..75: mol_type = other DNA
cagcttatgaaagagcgctgaataatgctgcgaatgccatcagaccgctgtttgctactgaggcaacacagcagt

SEQ ID NO: 688327 - DNA, 75 bp, synthetic construct
  source 1..75: mol_type = other DNA
atggcctatagtcgtgaacagttgatgacagcattaaggaacgctgatgcggcaggcgatacagaaggagcgcgt

SEQ ID NO: 688328 - DNA, 75 bp, synthetic construct
  source 1..75: mol_type = other DNA
agacaggtggccgatcgatggcacctgctaaaaagtattggtgatgagcctgaacgaatgatgtacagacatatg

SEQ ID NO: 688329 - DNA, 75 bp, synthetic construct
  source 1..75: mol_type = other DNA
atgggcaacgcaatgcactctcttaagacacttctacagttaccttgcggatggcgatgcagtcgacaaattatt

SEQ ID NO: 688330 - DNA, 75 bp, synthetic construct
  source 1..75: mol_type = other DNA
acatgtgcatcatctgcgacgcaaactcggcagtgactttattcgcaccgttcacggtattggctacacattagg

SEQ ID NO: 688331 - DNA, 75 bp, synthetic construct
  source 1..75: mol_type = other DNA
atatcacccgtcttgccgaccgtaaaatctgggaccgcctgatgacggatacggggatgtacaccttcatgagtt

SEQ ID NO: 688332 - DNA, 75 bp, synthetic construct
  source 1..75: mol_type = other DNA
gtaacgggcgtgtgacgctggactgcagcggacgggaggcactggatgacctggtacgtcctttttatctgctgg

SEQ ID NO: 688333 - DNA, 75 bp, synthetic construct
  source 1..75: mol_type = other DNA
atgattattcgatatctgttccaataccctgttgccgagtcgcttgctcccttcgccagttcacaccagcagtct

SEQ ID NO: 688334 - DNA, 75 bp, synthetic construct
  source 1..75: mol_type = other DNA
cttggatcagacgctgagtgcgcttcaaatcatcggcgtcctgctcgtgatcgggagtatctggctgggccaacg

SEQ ID NO: 688335 - DNA, 75 bp, synthetic construct
  source 1..75: mol_type = other DNA
ctggcgacgaagagatgattcgtgagtggggacggccaatcaaattaggcggtaaaaccgaccccgttatcgcta

SEQ ID NO: 688336 - DNA, 75 bp, synthetic construct
  source 1..75: mol_type = other DNA
acagggaagatagtcctgaagggattgtcaaggaaattaaagaatggcgagctgctaacggtaagtcaggattta

SEQ ID NO: 688337 - DNA, 75 bp, synthetic construct
  source 1..75: mol_type = other DNA
agtggtgtcccgttttcagaaactttcttccatgctttcggttctgcctgccagtggggtcatggatttcgatct

SEQ ID NO: 688338 - DNA, 75 bp, synthetic construct
  source 1..75: mol_type = other DNA
atcccctcatccggtcgtcatctttctgttgagcatattgggctgactgatatcgggagcgggcgattcagtctt

SEQ ID NO: 688339 - DNA, 75 bp, synthetic construct
  source 1..75: mol_type = other DNA
atgctgaagagtggggttattttaaaattatccatctggaaggatcgccattaacccgcatcgacggcatgatga

SEQ ID NO: 688340 - DNA, 75 bp, synthetic construct
  source 1..75: mol_type = other DNA
gttatcgcagggcaaaatcaggtatacagagaactaagacggataagagataatgttcagagtgagcgatatttt

SEQ ID NO: 688341 - DNA, 75 bp, synthetic construct
  source 1..75: mol_type = other DNA
gtattgaaagctgatatcaattctactgttccagtaaatatctcggagcttaatatccctcctttttcacggatt

SEQ ID NO: 688342 - DNA, 75 bp, synthetic construct
  source 1..75: mol_type = other DNA
atcctatctcaattacttcataaaaaaggagttaaacgggctctgataaccacccctactcatactctgatattg

SEQ ID NO: 688343 - DNA, 75 bp, synthetic construct
  source 1..75: mol_type = other DNA
atgtcacaccctgcgttaacgcaattgcgtgcgctgcgctactttgaagagatccctgacctagacccacaacaa

SEQ ID NO: 688344 - DNA, 75 bp, synthetic construct
  source 1..75: mol_type = other DNA
ttatttatgagaatgatttcttgagagaaaagattgaagcagtaaaaaacaaaatgaattctcacgaactttatt

SEQ ID NO: 688345 - DNA, 75 bp, synthetic construct
  source 1..75: mol_type = other DNA
ggaccatctgtggtagaagatgccattatgaccactactgtcacaacagattcaggtgaactattccctaccttc

SEQ ID NO: 688346 - DNA, 75 bp, synthetic construct
  source 1..75: mol_type = other DNA
cgttgacactgacgctgtccagcaactcagtctctcacgaaatccttttgccagaaacaaccctagctgaattaa

SEQ ID NO: 688347 - DNA, 75 bp, synthetic construct
  source 1..75: mol_type = other DNA
gctgcgtgctcggcatggtcgtcacgctggaagcgccgtctgccccgatttattgttcacagcgatagcacctgc

SEQ ID NO: 688348 - DNA, 75 bp, synthetic construct
  source 1..75: mol_type = other DNA
tcccgcacagttctgacaccagaacaggctgataacatacgaaaaattctgcagactcagggactgtatagcggc

SEQ ID NO: 688349 - DNA, 75 bp, synthetic construct
  source 1..75: mol_type = other DNA
ccctgccagtaaaaacactttatgatatcggagccacccttgacggccggcgtatcacttctccccccactccgg

SEQ ID NO: 688350 - DNA, 75 bp, synthetic construct
  source 1..75: mol_type = other DNA
atgctgaaacgccagatgtatggtcgagcaggatttgaactactcaggcagagggtaatgagtccactggcatga

SEQ ID NO: 688351 - DNA, 75 bp, synthetic construct
  source 1..75: mol_type = other DNA
ctaatgttgattatcggctgggaaaaacgcttcttccgccgtgcggcaccgcagattgctaaggagatcgcatga

SEQ ID NO: 688352 - DNA, 75 bp, synthetic construct
  source 1..75: mol_type = other DNA
tgttcacccgctgcgtgctcggcatggtcgtcacgctggaagcgccgtctgccccgatttattgttcacagcgat

SEQ ID NO: 688353 - DNA, 75 bp, synthetic construct
  source 1..75: mol_type = other DNA
cggtagctttcccgccactaattattgccactggccccattgcggctattggtatgggagcttccagtattgcac

SEQ ID NO: 688354 - DNA, 75 bp, synthetic construct
  source 1..75: mol_type = other DNA
tctggggacatggaacctgtacaacagcgtcattcagctccagcaagctacatcttattctgagacaatggctgc

SEQ ID NO: 688355 - DNA, 75 bp, synthetic construct
  source 1..75: mol_type = other DNA
cccacagtatctttctcagatatgatgttcatagatggggaacagatgctgcgtcatgactcacgtacctcaaga

SEQ ID NO: 688356 - DNA, 75 bp, synthetic construct
  source 1..75: mol_type = other DNA
agacctataagcgcgataagttgcctctgacagaagatgataaggccataatggccagagcttatcgtctgattg

SEQ ID NO: 688357 - DNA, 75 bp, synthetic construct
  source 1..75: mol_type = other DNA
ggcatctatactgatacagatatgatgcctgcatattctaaacaagtgatttttaaaatcatgatggaaacaaaa

SEQ ID NO: 688358 - DNA, 75 bp, synthetic construct
  source 1..75: mol_type = other DNA
attgctacgattcagtattcccttcaactgacaatatccgggatcgacgaatcgctgcccgggacaacccgtgtg

SEQ ID NO: 688359 - DNA, 75 bp, synthetic construct
  source 1..75: mol_type = other DNA
tttccttccgtggactgccgaaggaatttccgcttacatttgatttatcaaaaccaacgcagtctattatattag

SEQ ID NO: 688360 - DNA, 75 bp, synthetic construct
  source 1..75: mol_type = other DNA
cgaagcagatgctgggccgtacaccaggcaatattgctgccattcgcccgatgaaagatggcgtaatcgccgact

SEQ ID NO: 688361 - DNA, 75 bp, synthetic construct
  source 1..75: mol_type = other DNA
atgttgaaaaaattccgtggcatgttttccaatgacttgtccattgacctgggtactgcgaataccctcatttat

SEQ ID NO: 688362 - DNA, 75 bp, synthetic construct
  source 1..75: mol_type = other DNA
gcaaaaaaatattggcgcgtttgtcgttgtcacccgctcgccgttgacccgttttaaaaatatgagtgatggaat

SEQ ID NO: 688363 - DNA, 75 bp, synthetic construct
  source 1..75: mol_type = other DNA
caacaggtaagatggtgaaactcaaattacctgtagatgtggaagctctattaattgaggcaagtgagagaagtg

SEQ ID NO: 688364 - DNA, 75 bp, synthetic construct
  source 1..75: mol_type = other DNA
gaagaagtcgatcgtttgaggcagtaataagacttaaagatcatcttcaccgctatccaaagtttaacagggcag

SEQ ID NO: 688365 - DNA, 75 bp, synthetic construct
  source 1..75: mol_type = other DNA
caccgggtaacaaagtcttattaatactggatgagacaactaatcagaaacttttagcagctagggatcgtagcg

SEQ ID NO: 688366 - DNA, 75 bp, synthetic construct
  source 1..75: mol_type = other DNA
gatggcgaggagatgcgcctggcaacaccgcgcattaacttgtctgaatcactgaccagcgtgcctggtttgcag

SEQ ID NO: 688367 - DNA, 75 bp, synthetic construct
  source 1..75: mol_type = other DNA
ccgttttgcccgcactgcttgccctttcccccgttgtttttgccgctgatgaacagaccatgattgtcagtgccg

SEQ ID NO: 688368 - DNA, 75 bp, synthetic construct
  source 1..75: mol_type = other DNA
gattctcctttctccttccacttttgccgctaatgaacaaaccatgattgttagcgccgcgccgcaggtagtttc

SEQ ID NO: 688369 - DNA, 75 bp, synthetic construct
  source 1..75: mol_type = other DNA
atctggcaacgcataccagcgccctgcctcgtgaacaaccgggcggggctgcaaatcgtccggtttttgtctggc

SEQ ID NO: 688370 - DNA, 75 bp, synthetic construct
  source 1..75: mol_type = other DNA
tcgtgctgtgcgcggcgtcattgacctccgtccaggcggcgcaatcgattaccgaaccggagttcgcctctgaca

SEQ ID NO: 688371 - DNA, 75 bp, synthetic construct
  source 1..75: mol_type = other DNA
caataacacgctggcggcaattggcagcggcggcgtctattccacgcctggcgatatgatgcgctggatgcagca

SEQ ID NO: 688372 - DNA, 75 bp, synthetic construct
  source 1..75: mol_type = other DNA
taaaacagacgaggcagcagacagagtcattgaccatttgattaagtttcctgacttctataactcagaaatata

SEQ ID NO: 688373 - DNA, 75 bp, synthetic construct
  source 1..75: mol_type = other DNA
gcgggatgtcacagggttattatcttgatgtcagcttactggacaatgtcacgctttatgacagttttgttccgg

SEQ ID NO: 688374 - DNA, 75 bp, synthetic construct
  source 1..75: mol_type = other DNA
cggtctatgctcctgtccctgtacccgtaaacggcaacacgcattacaccagtgaaagcatcgagcgtttaccga

SEQ ID NO: 688375 - DNA, 75 bp, synthetic construct
  source 1..75: mol_type = other DNA
aatggttatgaggagagcaataccggtgataaccaggtggtttataacggtaatctggtctcttacgatagcgtt

SEQ ID NO: 688376 - DNA, 75 bp, synthetic construct
  source 1..75: mol_type = other DNA
tatgacagttttgtgccggttgaatttggtcgcttcaatggcgggggaattgatgcaaagatcaaacgcttcaac

SEQ ID NO: 688377 - DNA, 75 bp, synthetic construct
  source 1..75: mol_type = other DNA
gggacacccgcttgtcctggacgccacaatttctgaaaacaacaaaacctgacgatcagtgccgatattctcaat

SEQ ID NO: 688378 - DNA, 75 bp, synthetic construct
  source 1..75: mol_type = other DNA
aagatttccttaaatatggatttcactcatcaaccaagcggactggtgtgggcgaatacactggcctggcaagaa

SEQ ID NO: 688379 - DNA, 75 bp, synthetic construct
  source 1..75: mol_type = other DNA
tcgcagattgataaactgaaacggaatttgcatgagaacatcggtgtctggcggcaggatcagcaccgggaaaaa

SEQ ID NO: 688380 - DNA, 75 bp, synthetic construct
  source 1..75: mol_type = other DNA
ggttttcctcggcggaaccgggggcggtatctatgacgtgaaatggaacgacactctgcgcagtaacttctccct

SEQ ID NO: 688381 - DNA, 75 bp, synthetic construct
  source 1..75: mol_type = other DNA
cactggataacggtgcgaccacacgctttaaagcaatgttggctgacggacaaagagattacaacgactggactg

SEQ ID NO: 688382 - DNA, 75 bp, synthetic construct
  source 1..75: mol_type = other DNA
aaagctcgcattatcctgggtaagacaaatgcgcaatacatcagcgaatattcagattacaagcagtatgttgac

SEQ ID NO: 688383 - DNA, 75 bp, synthetic construct
  source 1..75: mol_type = other DNA
ttagctggcgtaatgtgtcattaatgcccggcgtgcggtatgactatgacaactatctgtcaaaccacaatatct

SEQ ID NO: 688384 - DNA, 75 bp, synthetic construct
  source 1..75: mol_type = other DNA
ctaaccataccatttaccataaaggtaaaggcagcctgggaattgacaactacacgctgtatatggcggatcgca

SEQ ID NO: 688385 - DNA, 75 bp, synthetic construct
  source 1..75: mol_type = other DNA
ggtgctggtgccgcgtgaaatgccgcttagcaccatccatctcgaaaatatgctcgcactttcacgcatgggcgt

SEQ ID NO: 688386 - DNA, 75 bp, synthetic construct
  source 1..75: mol_type = other DNA
acaaccggagtatatggcgtcattgattaacactgatgctccggaacaatggcatatgaccgatatcacatgtca

SEQ ID NO: 688387 - DNA, 75 bp, synthetic construct
  source 1..75: mol_type = other DNA
cgcagatcgccggacagtatataggctctttccgcaacatgccgacaagcagcattacagcatatgttgagcaat

SEQ ID NO: 688388 - DNA, 75 bp, synthetic construct
  source 1..75: mol_type = other DNA
ccctatcaggagagagttatatacgtcagcatgttgaaatttttctttcatcacttgagattgaatgccagtctc

SEQ ID NO: 688389 - DNA, 75 bp, synthetic construct
  source 1..75: mol_type = other DNA
tcattggttgttttttgtttctatgcattagggtataaacatataaatatagctaaagaattaaaaatcacagaa

SEQ ID NO: 688390 - DNA, 75 bp, synthetic construct
  source 1..75: mol_type = other DNA
atccgcgaagaagcagggctatagaactcttgtttctcattctgtttatcgtgctgctgataccgatatcctcaa

SEQ ID NO: 688391 - DNA, 75 bp, synthetic construct
  source 1..75: mol_type = other DNA
aagttgtcgatgtgctgctggatgctccagaccttcagtcaaccaaagtgggcgcattgtctggcaaagcgtcag

SEQ ID NO: 688392 - DNA, 75 bp, synthetic construct
  source 1..75: mol_type = other DNA
ggctacgccgatgcgttacgtgccgctcacgcgagtggtattagcgagccgtggctacccctgccgccagaactg

SEQ ID NO: 688393 - DNA, 75 bp, synthetic construct
  source 1..75: mol_type = other DNA
atggaagaggaatggtcacgcctgcagcaggcgctaaccacctattttagtcaaggggtcacctttaaagatggc

SEQ ID NO: 688394 - DNA, 75 bp, synthetic construct
  source 1..75: mol_type = other DNA
tgcctacgaagaaggccagtttcaggcgacgctgctgaacaatggtaaaaatgccgcagcattgtatggcgacaa

SEQ ID NO: 688395 - DNA, 75 bp, synthetic construct
  source 1..75: mol_type = other DNA
ctgaacacgggattcgtgcattagggcgaaacctgatgtcgtatcagaggcagggtattgataccgtcagcgaga

SEQ ID NO: 688396 - DNA, 75 bp, synthetic construct
  source 1..75: mol_type = other DNA
ttcgactcagggattctcatcgtttcagacaccaaatgtcggtgatgtacttggcgatgttgcagagcaatatgc

SEQ ID NO: 688397 - DNA, 75 bp, synthetic construct
  source 1..75: mol_type = other DNA
gatttattcaggaataaatgtatcacgacaggagtaatgaacgaaatattaactatcgtaagtgaatatatgggt

SEQ ID NO: 688398 - DNA, 75 bp, synthetic construct
  source 1..75: mol_type = other DNA
ctggttgctggcgacgatgggtaacatcccgcgtccggagtttatcggcatcgcgagaagggcggtaatattgat

SEQ ID NO: 688399 - DNA, 75 bp, synthetic construct
  source 1..75: mol_type = other DNA
gcgttgctgacctttgccccgcctgttgtggggggcttctgttcccgaacggattcctgtacgccattggttatg

SEQ ID NO: 688400 - DNA, 75 bp, synthetic construct
  source 1..75: mol_type = other DNA
gcaaaccgatgatcgttctgattctgctatttggtattggcaatgcattgatccatattttatcgagctttaatt

SEQ ID NO: 688401 - DNA, 75 bp, synthetic construct
  source 1..75: mol_type = other DNA
ccgccagaccagttaaccatcatgcacatatcagcatggccgcgagaaaagccgagcgtgcgcatatctgcgaat

SEQ ID NO: 688402 - DNA, 75 bp, synthetic construct
  source 1..75: mol_type = other DNA
aatacttgcaaggtttttttattacatagaacaagataaaaaaatacctttctgtgaaataaatagtgatgagcg

SEQ ID NO: 688403 - DNA, 75 bp, synthetic construct
  source 1..75: mol_type = other DNA
cgcatgacggcgattgtgctgggggcgaaagtcattaccttcttcctcaccttcggtagcctgctggggcatgtg

SEQ ID NO: 688404 - DNA, 75 bp, synthetic construct
  source 1..75: mol_type = other DNA
gcaaaggctggaacgtggtcaacggcatttccattgcctttgtgctctacatcctgacctatgcctatatttctg

SEQ ID NO: 688405 - DNA, 75 bp, synthetic construct
  source 1..75: mol_type = other DNA
ggcggcaggcagtcttgtgcagctgattgaccagcgggtgcaggcggtgatgctgtccatgcgacgtgacggagg

SEQ ID NO: 688406 - DNA, 75 bp, synthetic construct
  source 1..75: mol_type = other DNA
atgtgtgcgctggatcctagagaaaggccacttaacagtcaatctataaataattacatccttaatgttcaggat

SEQ ID NO: 688407 - DNA, 75 bp, synthetic construct
  source 1..75: mol_type = other DNA
gtatctgctgatgacactaccgttctgtctggcgtcgtttggttatcacggcaacgtaccaagcctgatgaagta

SEQ ID NO: 688408 - DNA, 75 bp, synthetic construct
  source 1..75: mol_type = other DNA
cttcggtagcttgctggggcatgtgcagcctgcgacattgttcaacgttgcggaaagcaatgcgtcttatgcacc

SEQ ID NO: 688409 - DNA, 75 bp, synthetic construct
  source 1..75: mol_type = other DNA
gtatctgttgatgacactgccgttttgtctggcatcgtttggctatcacggcaacgttccgagcctgatgaaata

SEQ ID NO: 688410 - DNA, 75 bp, synthetic construct
  source 1..75: mol_type = other DNA
atttagagaaaagttaacaccgctttttgcagggtttaattacataccgttaagtgttaatcaagtcaaaggaat

SEQ ID NO: 688411 - DNA, 75 bp, synthetic construct
  source 1..75: mol_type = other DNA
tctcaggtgagcaggggtcttttgcctggtatccggtgaacagcaacagtaataacggcaattcgggggctgaat

SEQ ID NO: 688412 - DNA, 75 bp, synthetic construct
  source 1..75: mol_type = other DNA
tctgatcagacaacttattacagatgaaccatcgccggtgtacttcagggatgcggtggctttttccagtctggc

SEQ ID NO: 688413 - DNA, 75 bp, synthetic construct
  source 1..75: mol_type = other DNA
cgtagagcagaagaaataaaaaaagaaagagacaaagaacgtcatgcagtagtgtttgagtggaaaagaccagaa

SEQ ID NO: 688414 - DNA, 75 bp, synthetic construct
  source 1..75: mol_type = other DNA
gatatggatcaggtagtggagcttacaacccttagccgtcgcacattgctaaaccttgaggctcgcggagagttc

SEQ ID NO: 688415 - DNA, 75 bp, synthetic construct
  source 1..75: mol_type = other DNA
tgaccggtgtaaccgatgaacatgctatcggcaaagccttcactgaatctctgcccttcaccgcactgttgacgg

SEQ ID NO: 688416 - DNA, 75 bp, synthetic construct
  source 1..75: mol_type = other DNA
aactctgttttctgtttatcgaacccagcgcagtgataatgccgacaacatgttgcacattgaaaatatcgccct

SEQ ID NO: 688417 - DNA, 75 bp, synthetic construct
  source 1..75: mol_type = other DNA
cacggggtattccatcccgataacgagcctggattcttctacaagggtgagccggttcaaaaccataaagggatg

SEQ ID NO: 688418 - DNA, 75 bp, synthetic construct
  source 1..75: mol_type = other DNA
tccaaatatcacacgtggtatttatcaggccgttatggaaaatgatcttgataaagcacgttcttttcagcaaca

SEQ ID NO: 688419 - DNA, 75 bp, synthetic construct
  source 1..75: mol_type = other DNA
gccatgtgattttaaaagagtttcatctcgataatcccagcgactactttatcaactactgccgccgctatagcg

SEQ ID NO: 688420 - DNA, 75 bp, synthetic construct
  source 1..75: mol_type = other DNA
gcaagccacgcagtgaaatgggtgtgacttgtgttggtcgccagaaaatgaaattaggcagcaaaccactgtatg

SEQ ID NO: 688421 - DNA, 75 bp, synthetic construct
  source 1..75: mol_type = other DNA
agactgggcaaggcggtcctggacattatgaccgaaggaaaactttcacatgtgaaagttcctgaacgacaagac

SEQ ID NO: 688422 - DNA, 75 bp, synthetic construct
  source 1..75: mol_type = other DNA
aaaaagccagatgcggcgctatgcctcaagattgagcgtgtacgtcgcaatgcgcgggatggtcgctataagttg

SEQ ID NO: 688423 - DNA, 75 bp, synthetic construct
  source 1..75: mol_type = other DNA
ggttcgaaaatcgaactgttacgtacgtaattcttttacacagagtataaaaaatacgtacgtagatcaggaaga

SEQ ID NO: 688424 - DNA, 75 bp, synthetic construct
  source 1..75: mol_type = other DNA
gggcgtatccggggaaatatctatatgttacatgatgagccggtgaatgcgtttgatgcagagacattagatccg

SEQ ID NO: 688425 - DNA, 75 bp, synthetic construct
  source 1..75: mol_type = other DNA
atgatcgatgtcatgcgtaaagcaataacgacgatcaaatcggctggcggcaccgtttctttcgatcccaatatt

SEQ ID NO: 688426 - DNA, 75 bp, synthetic construct
  source 1..75: mol_type = other DNA
ttgcaggatatcaaatccgatacccgtatgcgccaccggcactcacgcgttgcactgatagaagcccggttatca

SEQ ID NO: 688427 - DNA, 75 bp, synthetic construct
  source 1..75: mol_type = other DNA
tacgtcgccatctggcgggaaaaaagaggtcaaacgcgcccggagagagtttgtgtctggtgtgatggctgagat

SEQ ID NO: 688428 - DNA, 75 bp, synthetic construct
  source 1..75: mol_type = other DNA
ttatccagcgtacgctggcgaagatgcaaaaccggattgagcaaaaagcgcagtccggtgagcagagtaatgagc

SEQ ID NO: 688429 - DNA, 75 bp, synthetic construct
  source 1..75: mol_type = other DNA
gtcgcattcttcctctgcaatgggttcgagccggggcgcgttgctattggccgaaatgttgctgttttttgtccc

SEQ ID NO: 688430 - DNA, 75 bp, synthetic construct
  source 1..75: mol_type = other DNA
tgagtacggtgatggtgctgggcacgactgcctgggtagtggaaaaagtctatcgctatgaaatgcgcaggttaa

SEQ ID NO: 688431 - DNA, 75 bp, synthetic construct
  source 1..75: mol_type = other DNA
agatttcccgcaccgaactcaggaacagcgggctgacagagcctgcccgccgtgtggctgaccttctgaatatcg

SEQ ID NO: 688432 - DNA, 75 bp, synthetic construct
  source 1..75: mol_type = other DNA
tggcctacgaaatagcgaaggactattacgctggcgtgatggcgaagaagggcgttgtatcaggtgagattgaca

SEQ ID NO: 688433 - DNA, 75 bp, synthetic construct
  source 1..75: mol_type = other DNA
caaccagcacaaaacgttacacaggtaatgcggcattcgatgctgcatctccggaggcgcaggcgacattccttc

SEQ ID NO: 688434 - DNA, 75 bp, synthetic construct
  source 1..75: mol_type = other DNA
atcaaaccctgacacactaaaggctttgtgtgcctcaattatccagcatgagaacggcagccagccatacagcga

SEQ ID NO: 688435 - DNA, 75 bp, synthetic construct
  source 1..75: mol_type = other DNA
tggagggagtggttaaaagagcaacgagaaagcggtaattataacgccagccggatatggcgggaaatggtggcc

SEQ ID NO: 688436 - DNA, 75 bp, synthetic construct
  source 1..75: mol_type = other DNA
cggaaatacaggttgtctcgcgtgatcgcagtggagtctatgcgacagcagcacgtgaaggtgcacctcaggcca

SEQ ID NO: 688437 - DNA, 75 bp, synthetic construct
  source 1..75: mol_type = other DNA
agcggttcagcagaatttcggcgcgtggcggcggggatggaagctgatgctgcagctatatgtgaggcaatcagt

SEQ ID NO: 688438 - DNA, 75 bp, synthetic construct
  source 1..75: mol_type = other DNA
gttgtcagagagttatcactgaagaaatcacctgagccagaaatatctgtgcctgtagcatcgctccgtcgtctg

SEQ ID NO: 688439 - DNA, 75 bp, synthetic construct
  source 1..75: mol_type = other DNA
ccgagtcgcttgctcccttcgccggttcacaccagcagtcttcacaggcgttacaaaatttacaacgtcaactgg

SEQ ID NO: 688440 - DNA, 75 bp, synthetic construct
  source 1..75: mol_type = other DNA
gtcatataaatcgcctgaagatgctaaaacgccagatgtatggtcgagccggatttgaactactcaggcagaggg

SEQ ID NO: 688441 - DNA, 75 bp, synthetic construct
  source 1..75: mol_type = other DNA
gcaccacgctctattcgctggaaaaagccctcaaaccgctgggacgcgaaccgcactcagtgattggatcatcgt

SEQ ID NO: 688442 - DNA, 75 bp, synthetic construct
  source 1..75: mol_type = other DNA
agctctattacggccattttatgtgctatgtcttccaccaggattacatcgtcaaaaaaggtgtggatgtacatg

SEQ ID NO: 688443 - DNA, 75 bp, synthetic construct
  source 1..75: mol_type = other DNA
acaggtctgaccgaaggatcgacgccaaacggtaacgactatgatcgcgatatcgtgatcatcagcaccctgcgt

SEQ ID NO: 688444 - DNA, 75 bp, synthetic construct
  source 1..75: mol_type = other DNA
cactggtactgccgtaacccggcttgttcacgtaaaatttttgccgggtcgcttgctcccttcgccggttcacac

SEQ ID NO: 688445 - DNA, 75 bp, synthetic construct
  source 1..75: mol_type = other DNA
ttctcacaattttcttcccagcaacgaaaagagatagctgcattttgcttaagtcatgtagatggcaaagtgcct

SEQ ID NO: 688446 - DNA, 75 bp, synthetic construct
  source 1..75: mol_type = other DNA
cagtcttcacaggcgttacagaatttacaacgtcaactgggattaatagccggaggtgaggctggaaaacgggct

SEQ ID NO: 688447 - DNA, 75 bp, synthetic construct
  source 1..75: mol_type = other DNA
gacatatacctctgatacgtcttgttgccagtgagttgtcaccaaagaaatcacctgatccagaaccatctgtgc

SEQ ID NO: 688448 - DNA, 75 bp, synthetic construct
  source 1..75: mol_type = other DNA
aacatcagcgatgcggtaaaacgtgctgacgccattatgagcaaaattgaagctcacctggcgcaaaccgcttaa

SEQ ID NO: 688449 - DNA, 75 bp, synthetic construct
  source 1..75: mol_type = other DNA
tgtcccgggtaagccggtggttgatgccctggagaataatcaggggggaagaaaattatgcttcccgatttatta

SEQ ID NO: 688450 - DNA, 75 bp, synthetic construct
  source 1..75: mol_type = other DNA
tgctcccttcgccggttcacatcagcagtcttcacaggcgttacaaaatttacagcgtcaactgggattaatagc

SEQ ID NO: 688451 - DNA, 75 bp, synthetic construct
  source 1..75: mol_type = other DNA
ctacgatgccttccagtcgctggagtacgaagtaaacaccctgcacaccgccaacggtcaaacgccgtttgtaac

SEQ ID NO: 688452 - DNA, 75 bp, synthetic construct
  source 1..75: mol_type = other DNA
gtattgttgctaaacactatgcacgtcagcacctgttgccgcgtgacgtggtgcaggcgcatgagcgtggcgata

SEQ ID NO: 688453 - DNA, 75 bp, synthetic construct
  source 1..75: mol_type = other DNA
cgtgtccatctggtgttgcccatacctatatggcggcagaggcgctggaaagtgccgcgaaagcgaaaggctggg

SEQ ID NO: 688454 - DNA, 75 bp, synthetic construct
  source 1..75: mol_type = other DNA
attatcaggtggttaactggaataaacagcgaatcattattcgttgggaggacgagatgtttgctgtgcactggc

SEQ ID NO: 688455 - DNA, 75 bp, synthetic construct
  source 1..75: mol_type = other DNA
atcttgccaattcaaatatattgcagaaccacgtaggcctgataagcgtagcgcatcaagcagttttgcgtttgt

SEQ ID NO: 688456 - DNA, 75 bp, synthetic construct
  source 1..75: mol_type = other DNA
aggttttctggattatcaaataattaactggaataaacagcagatcatcattcgtcgagaggatgagacatttgc

SEQ ID NO: 688457 - DNA, 75 bp, synthetic construct
  source 1..75: mol_type = other DNA
aaacagcaggtcatcattcatcgtgagaatgagatgtttgctgtgcactggcagataaaagaaaaaatagtcata

SEQ ID NO: 688458 - DNA, 75 bp, synthetic construct
  source 1..75: mol_type = other DNA
acaccagcagaacacgagcgactcgcggactgtggtttagccttttctctggcgctgacactggcattttccgcc

SEQ ID NO: 688459 - DNA, 75 bp, synthetic construct
  source 1..75: mol_type = other DNA
aatcttgccaattcaatatattgcaggaccacgtaggcctgataagcgtagcgcatcaggcagttttgcgtttgt

SEQ ID NO: 688460 - DNA, 75 bp, synthetic construct
  source 1..75: mol_type = other DNA
atgaaaccgaccaccatctccttgctgaacaaatacaaacaagaaaaaaaacgcttcgccactattaccgcttac

SEQ ID NO: 688461 - DNA, 75 bp, synthetic construct
  source 1..75: mol_type = other DNA
tggtctggttgatggtctgaactttgctgctcagtatcagggtaaaaatgaccgcactgacgtaactgaagccaa

SEQ ID NO: 688462 - DNA, 75 bp, synthetic construct
  source 1..75: mol_type = other DNA
atgactggtcgcaccacaggtgttgcaacctatcgtaacaacgacttctttggtctggttgatggtctgaacttt

SEQ ID NO: 688463 - DNA, 75 bp, synthetic construct
  source 1..75: mol_type = other DNA
aaactcagaatatgaccgtttttggtaataaccatattgcaaacaaagcacaaaactttgaagcagtagcacaat

SEQ ID NO: 688464 - DNA, 75 bp, synthetic construct
  source 1..75: mol_type = other DNA
aacctgtagacatgataatccaagtgataaaacaggtgctagaggagactcctcctgaattagcggctgacatgg

SEQ ID NO: 688465 - DNA, 75 bp, synthetic construct
  source 1..75: mol_type = other DNA
gtaactgaagccaatggtgatggtttcggtttctccactacttatgagtatgaaggattcggcgtgggtgcaacc

SEQ ID NO: 688466 - DNA, 75 bp, synthetic construct
  source 1..75: mol_type = other DNA
accgcactgacgtaactgaagccaatggtgatggtttcggtttctccactacttatgagtatgaaggattcggtg

SEQ ID NO: 688467 - DNA, 75 bp, synthetic construct
  source 1..75: mol_type = other DNA
tttcgcaccgacggcatgatcgttattccatgcagtatgaaaacgctcgccggtatccgcgccgggtacgccgaa

SEQ ID NO: 688468 - DNA, 75 bp, synthetic construct
  source 1..75: mol_type = other DNA
atgagactgatcgtcgggatgacaggggccaccggagcgcctcttggtgtggcattactgcaagcgctgcgggag

SEQ ID NO: 688469 - DNA, 75 bp, synthetic construct
  source 1..75: mol_type = other DNA
cggtatccgcgctggttacgccgatggcctggtagggcgcgcggcggacgtcgtgctcaaagaaggccgcaaact

SEQ ID NO: 688470 - DNA, 75 bp, synthetic construct
  source 1..75: mol_type = other DNA
tttttatcatcatgtgctgctcagtattatattatcgacaggattttatttgatgtttgtctgctttatgtattc

SEQ ID NO: 688471 - DNA, 75 bp, synthetic construct
  source 1..75: mol_type = other DNA
tggcacaattaggaaggaactgcaaactgcaatgggatttgttgagggtgttttatcaataattcacgcagtgtg

SEQ ID NO: 688472 - DNA, 75 bp, synthetic construct
  source 1..75: mol_type = other DNA
ttgcaaagaaaaggaaatgttcagatgggactgtcagaaaagaattgcaagccgcaattggatttgtggaaggcg

SEQ ID NO: 688473 - DNA, 75 bp, synthetic construct
  source 1..75: mol_type = other DNA
agatgatcttactttaattaaaagagtatcatttataaatagaagcaaggttattttagaggaaatagtaaaaag

SEQ ID NO: 688474 - DNA, 75 bp, synthetic construct
  source 1..75: mol_type = other DNA
aatgctggatgtgctggggatgtcagcgcgtacagtgataagttatgagcgcgtttgcaggctgtataaaaaatc

SEQ ID NO: 688475 - DNA, 75 bp, synthetic construct
  source 1..75: mol_type = other DNA
atgagaggaaaactgatatctgccattcatgtggcaaaacgcgagcttgctctggatgatgaaacctatacatcc

SEQ ID NO: 688476 - DNA, 75 bp, synthetic construct
  source 1..75: mol_type = other DNA
agtattatagaaaatgaattgagcgagtatagaataaacacctcaacatttatggtgttagtttcattatatatg

SEQ ID NO: 688477 - DNA, 75 bp, synthetic construct
  source 1..75: mol_type = other DNA
aagccgcacaatgtcgctggaggacgaatactttgaacttctggaaatgatgaagtgtatccctcgcttcgagaa

SEQ ID NO: 688478 - DNA, 75 bp, synthetic construct
  source 1..75: mol_type = other DNA
tgaagttcatccctcgcttcgagaaattcacccgctctgatgtgattcgtgctgctattttccatctggcagaga

SEQ ID NO: 688479 - DNA, 75 bp, synthetic construct
  source 1..75: mol_type = other DNA
gtcagaacccggttaaccgggccttaaaaccgggtacggtgaccgctaaaattcgcgccatctggaaggtgatgc

SEQ ID NO: 688480 - DNA, 75 bp, synthetic construct
  source 1..75: mol_type = other DNA
gaaataaaagattttttactctttggaaagcatgatgataatcagattaacacttctgtaagcaatgatttttta

SEQ ID NO: 688481 - DNA, 75 bp, synthetic construct
  source 1..75: mol_type = other DNA
tagaaggcttttctaatttaatcaatgatattcaatttcaatccaatgaaaatcgagaagaaatatgtctagatt

SEQ ID NO: 688482 - DNA, 75 bp, synthetic construct
  source 1..75: mol_type = other DNA
tgtacaaagattgctctaccagacagatagtctggtagaaaagacatattttatagttcatgaaaatgctagttt

SEQ ID NO: 688483 - DNA, 75 bp, synthetic construct
  source 1..75: mol_type = other DNA
ccgcagctagcggcaaatacggcatcattctgccgggcgcgaaagactacctgaagcctgacttcgcagaaaact

SEQ ID NO: 688484 - DNA, 75 bp, synthetic construct
  source 1..75: mol_type = other DNA
cgcacaattcccggttgtggaatcaacgggtcaggtttccagttatggtgactacaacaataatgggcaggtaaa

SEQ ID NO: 688485 - DNA, 75 bp, synthetic construct
  source 1..75: mol_type = other DNA
aactctggcattccatggtacttcactaattacgttgacccggaactgattcgcatccttgtcactccgatgaaa

SEQ ID NO: 688486 - DNA, 75 bp, synthetic construct
  source 1..75: mol_type = other DNA
ttaaaagagcaacgagaaagtagtaattataacgccagccggatatggcgggaaatggtggcccggggatttaca

SEQ ID NO: 688487 - DNA, 75 bp, synthetic construct
  source 1..75: mol_type = other DNA
gaggcagtgataccacttgcatcagtgctgatgactaaaggaatgggcctgggggcattaatggccttgataatc

SEQ ID NO: 688488 - DNA, 75 bp, synthetic construct
  source 1..75: mol_type = other DNA
tcatttatttacggctttattccagcgcaatggattgcagcacatgccggaacggataatccactggccatcccc

SEQ ID NO: 688489 - DNA, 75 bp, synthetic construct
  source 1..75: mol_type = other DNA
gagccgtttattccgaaatctggcgcgcgcgtaatgtcgctgctggagccgaccaaaaagatgtccaagtctgac

SEQ ID NO: 688490 - DNA, 75 bp, synthetic construct
  source 1..75: mol_type = other DNA
atggatcgcatcgaatatttgaaatggcttatagctgaatcgccttctacgactcagcaacttatggcatggcta

SEQ ID NO: 688491 - DNA, 75 bp, synthetic construct
  source 1..75: mol_type = other DNA
ctaacaagtctgttggtaatggaaatgaagatgattatatatctgcattatctactcagccttaccgtaatagtt

SEQ ID NO: 688492 - DNA, 75 bp, synthetic construct
  source 1..75: mol_type = other DNA
ttaattaaagaactgcatataacatcaaacaaatcagtagggaaggggaatgaggatgattatatatcaggtctt

SEQ ID NO: 688493 - DNA, 75 bp, synthetic construct
  source 1..75: mol_type = other DNA
aattaaagatagttatatatatttgttcttgtatgtatatgtatcattttatgtgtttttgcatgaaatgactca

SEQ ID NO: 688494 - DNA, 75 bp, synthetic construct
  source 1..75: mol_type = other DNA
cctgtgtgatggatggtaacaccctgaaagccggtcggtggcgggcgttagtcatctgcgtaatccggttcttgc

SEQ ID NO: 688495 - DNA, 75 bp, synthetic construct
  source 1..75: mol_type = other DNA
ttacattttttctaatgtttgcatgtgggatggctaagtcagcaaaattggccgagactatgttgactattaatg

SEQ ID NO: 688496 - DNA, 75 bp, synthetic construct
  source 1..75: mol_type = other DNA
caagatgtatggtcacctgaaaggcgaagtagctgaagcggtttccggtatgctgactgaattgcaggagcgtta

SEQ ID NO: 688497 - DNA, 75 bp, synthetic construct
  source 1..75: mol_type = other DNA
aaaagcaccatctttgttcagtcccacgtaccggaacacgcacagttaggttgggcgctgaactgctatacctat

SEQ ID NO: 688498 - DNA, 75 bp, synthetic construct
  source 1..75: mol_type = other DNA
aagacagtaaagaaagagcaaaatatatcggcgtgttgtccctcaattctatcagaaaaatcttctgaaagttgt

SEQ ID NO: 688499 - DNA, 75 bp, synthetic construct
  source 1..75: mol_type = other DNA
cttttcttaaattatgctgcgaatctaatccgtggaacgatgtagttattgaggatgtaaaaaatccataccttc

SEQ ID NO: 688500 - DNA, 75 bp, synthetic construct
  source 1..75: mol_type = other DNA
agcagcgataaggaataacagtcatcgtctggatttgacggaagcctggcagaagatggcgacagagagaatgaa

SEQ ID NO: 688501 - DNA, 75 bp, synthetic construct
  source 1..75: mol_type = other DNA
tcccgggcttatacagataaaagtgtacgggatgcccgtaaagaagcgaaaagccaggcagaacatctcagcgat

SEQ ID NO: 688502 - DNA, 75 bp, synthetic construct
  source 1..75: mol_type = other DNA
gacagcgaagtagaaagcctgcaccgtgtggtgcgggagcttaaaaaccgcggggtgagcattatctatgtgacg

SEQ ID NO: 688503 - DNA, 75 bp, synthetic construct
  source 1..75: mol_type = other DNA
tggctttattccctcagcgtggattgccgctcatgcaggagcagataatcccttcgccatcccattaagcgccgt

SEQ ID NO: 688504 - DNA, 75 bp, synthetic construct
  source 1..75: mol_type = other DNA
cgatgatagttgcattcctgacggttatcttaggtatggctatcttaatgggctatttgactcaaatgctatttt

SEQ ID NO: 688505 - DNA, 75 bp, synthetic construct
  source 1..75: mol_type = other DNA
ctcagcgatgtgcttgtgaagaacagggcgcagacggatgcagcaatagcctcaaatacagcagcgataaggaat

SEQ ID NO: 688506 - DNA, 75 bp, synthetic construct
  source 1..75: mol_type = other DNA
tatttcctgctgccgatcatttttttgtcgataagcattttgaacaggtggtaggttatgtgaaccagacgattg

SEQ ID NO: 688507 - DNA, 75 bp, synthetic construct
  source 1..75: mol_type = other DNA
ggtggcctgatttatggcttgctgatgcgtgaatccagtgaacacacactgcgtctggcgactgctgttgcagcc

SEQ ID NO: 688508 - DNA, 75 bp, synthetic construct
  source 1..75: mol_type = other DNA
accctgtctttgaagttgtctgccgtatcctggggaacggctggcgcgtgaacaaacttgatgattgtccgtctc

SEQ ID NO: 688509 - DNA, 75 bp, synthetic construct
  source 1..75: mol_type = other DNA
ctgtcagttcctcaaacgcatggtaacgggttgccggataggatgacggctattgacgtgtcaatactgtgggag

SEQ ID NO: 688510 - DNA, 75 bp, synthetic construct
  source 1..75: mol_type = other DNA
ggtcgaccttttctgaaagcggtgaggctttccagatgaatatggtgtacgcctttggttttgactgtaccgatg

SEQ ID NO: 688511 - DNA, 75 bp, synthetic construct
  source 1..75: mol_type = other DNA
atgaaatttatctcgaactggcaagacctgccgtcgctccttcttcccgattcagttatgactgtcctgagaaaa

SEQ ID NO: 688512 - DNA, 75 bp, synthetic construct
  source 1..75: mol_type = other DNA
cagcagccgggtaaagaaatcgccggaacagcagtcggtactggttctgcaccgtacccgcatgcaactggtgaa

SEQ ID NO: 688513 - DNA, 75 bp, synthetic construct
  source 1..75: mol_type = other DNA
atgaacaacaaactgacttcgacggaactccagtcccgcctgctacagggcaattttgatcggggaagatcgccc

SEQ ID NO: 688514 - DNA, 75 bp, synthetic construct
  source 1..75: mol_type = other DNA
cagaaacgggaaacgattgtcagctattccgatatccagaccctgccggatttatcctgttacgtcacgctgccc

SEQ ID NO: 688515 - DNA, 75 bp, synthetic construct
  source 1..75: mol_type = other DNA
ggatatgcagcggcgtgaagaggtcaatatcaaccacagccaccgccacgatgaacaggatgatgtcgagattgg

SEQ ID NO: 688516 - DNA, 75 bp, synthetic construct
  source 1..75: mol_type = other DNA
agcttcattgagcgggcgctggggatcaacaaggcgcgggaactttaccagcaggtggaaaagtgccagctttcg

SEQ ID NO: 688517 - DNA, 75 bp, synthetic construct
  source 1..75: mol_type = other DNA
cgaaggcgtaaacctgaaacagaggaagaagaagttggcacgccagcccctcagcctgaaccagaagaagcacca

SEQ ID NO: 688518 - DNA, 75 bp, synthetic construct
  source 1..75: mol_type = other DNA
ggaaaacgatatgcacggcaaactcagcttcatcgagcgggcgctggggatcaacaaggcgcgggagctgtacca

SEQ ID NO: 688519 - DNA, 75 bp, synthetic construct
  source 1..75: mol_type = other DNA
atctttgcactgcacttgatcaatcacagcctaagatctcccggcatctggctatgttgcgagaaagtgggattt

SEQ ID NO: 688520 - DNA, 75 bp, synthetic construct
  source 1..75: mol_type = other DNA
tcttcaaaaacctctccgatgaaacccgtttgggcatcgtgttgctgctcagagagatgggagagctgtgcgtgt

SEQ ID NO: 688521 - DNA, 75 bp, synthetic construct
  source 1..75: mol_type = other DNA
attcattagtaaacaccctaatattagaacatcatatggccgcaacacgtatgggctttatagacatgttcactc

SEQ ID NO: 688522 - DNA, 75 bp, synthetic construct
  source 1..75: mol_type = other DNA
tgcaacagctgcaggcgggacacaacaggaactggcgcagcagtcagcggaacagggacaggacatgctgccggc

SEQ ID NO: 688523 - DNA, 75 bp, synthetic construct
  source 1..75: mol_type = other DNA
actctcgatgcgcgggtggatgcgcggctcagtgcgttgcttgaagcgcgggaagctgaaggcagccttgccagg

SEQ ID NO: 688524 - DNA, 75 bp, synthetic construct
  source 1..75: mol_type = other DNA
tcttcaaaattcttgccgatgaaacccgtttgggcatcgttttactgctcagcgagctgggagagttatgcgtct

SEQ ID NO: 688525 - DNA, 75 bp, synthetic construct
  source 1..75: mol_type = other DNA
aaataaaattgttatcatatttttataaaagaaaaaatcggtctacacaattcggtcgctacactgttttattct

SEQ ID NO: 688526 - DNA, 75 bp, synthetic construct
  source 1..75: mol_type = other DNA
gcggagtttatccagctgcgcctgcagatggtctatttcgcgctcccggttgctcagcttttcctgcagggcgtg

SEQ ID NO: 688527 - DNA, 75 bp, synthetic construct
  source 1..75: mol_type = other DNA
ctacattacgctggcaccgattgcgaccgtgcttgggctggcgtttactccccggaaaaattactcggcggtgca

SEQ ID NO: 688528 - DNA, 75 bp, synthetic construct
  source 1..75: mol_type = other DNA
taagagcgatagaaaagctcaaaagggacatggggccaagtctgatggaagcgttggaagatcctgaaacgctgg

SEQ ID NO: 688529 - DNA, 75 bp, synthetic construct
  source 1..75: mol_type = other DNA
ttgcggggggtggctggttgatgtgtgcgatgcgttgaccgatcattccagcgaatttatcgagcagctgcacga

SEQ ID NO: 688530 - DNA, 75 bp, synthetic construct
  source 1..75: mol_type = other DNA
gaactggaaggtttccgtgatagccatgaatggaatggcgttcgatctttcgtcgccgtatggacgaatgctggc

SEQ ID NO: 688531 - DNA, 75 bp, synthetic construct
  source 1..75: mol_type = other DNA
gtttccgtgatagccatgaatggaatggcgttcgatctttcgtcgccgtatggacgggcactgttgcaaagttag

SEQ ID NO: 688532 - DNA, 75 bp, synthetic construct
  source 1..75: mol_type = other DNA
gtgtctggaaatataggggcaaatccaaataaaaacggcatctctgcaacaatcaatgttgatgaccatatactc

SEQ ID NO: 688533 - DNA, 75 bp, synthetic construct
  source 1..75: mol_type = other DNA
aatgctcttgcaacctggagcgatccgcgaagtacgacgctctggctcgatgattttggctcaggcaatgcgggt

SEQ ID NO: 688534 - DNA, 75 bp, synthetic construct
  source 1..75: mol_type = other DNA
ctgcaacaatcaatgttgatgaccatatactcaacatattgctaagaccagagattaaaaacctcgttggccaca

SEQ ID NO: 688535 - DNA, 75 bp, synthetic construct
  source 1..75: mol_type = other DNA
tggttcgcgttttgcaggtcagatcccgccgctggttgcaggtccggcatttgcaattcgtaagaaagcctcccg

SEQ ID NO: 688536 - DNA, 75 bp, synthetic construct
  source 1..75: mol_type = other DNA
cgagagctattgaaaaactcagaagagatatggggccactactgatggaagccctcgaagatcctgagacgcttg

SEQ ID NO: 688537 - DNA, 75 bp, synthetic construct
  source 1..75: mol_type = other DNA
tttttccgccatgctaccgccgccgttcgtgaacgtatttttctcgaacaactggcactgattgaaaagcataaa

SEQ ID NO: 688538 - DNA, 75 bp, synthetic construct
  source 1..75: mol_type = other DNA
accacgctgaccgatccgttatggcatgccagcgtgagtaccttaggctggcgtgttgactcccggcttggcgat

SEQ ID NO: 688539 - DNA, 75 bp, synthetic construct
  source 1..75: mol_type = other DNA
tgggacaccggaatattcaccataccgttcgttatacagcagggagtgctgagcgcttcagaggtatatggcatg

SEQ ID NO: 688540 - DNA, 75 bp, synthetic construct
  source 1..75: mol_type = other DNA
aaaacctgaagatctggcgcactatgatttgaatgtcgccacccgaaaaacgttacgtttgaaaggtcttctgta

SEQ ID NO: 688541 - DNA, 75 bp, synthetic construct
  source 1..75: mol_type = other DNA
gtgcagtgatttttatcagaaatgcacaattagtgattaaggcaacagatggggatgttattgatatctctcccg

SEQ ID NO: 688542 - DNA, 75 bp, synthetic construct
  source 1..75: mol_type = other DNA
tgtcgcaacgtattcaaagtagccaaagggcgctgggactggaagtcaatctggcggaagaaacccctgtggatg

SEQ ID NO: 688543 - DNA, 75 bp, synthetic construct
  source 1..75: mol_type = other DNA
atgcccgatatccttcatacaatgacaataatattgccgaattcggctcttccctggagtcgtgttaatgatcat

SEQ ID NO: 688544 - DNA, 75 bp, synthetic construct
  source 1..75: mol_type = other DNA
gctcaacgttgcaggcgtgggcgaagtgccgttcaccatgattagccagtttggcgtacccgatgccgacagtga

SEQ ID NO: 688545 - DNA, 75 bp, synthetic construct
  source 1..75: mol_type = other DNA
cgatgcgatcctggaggcggctcgttgcgagggcatccgtccggtgccggtcaaaagcgtgcagcagcaacaggt

SEQ ID NO: 688546 - DNA, 75 bp, synthetic construct
  source 1..75: mol_type = other DNA
acatcacaggatggtgactcagaaaagatctgtgcggccatgaaccatgctttagtgggtaatgctgccaactta

SEQ ID NO: 688547 - DNA, 75 bp, synthetic construct
  source 1..75: mol_type = other DNA
ggcgacgacattatggtgcagaccaccgccttgcaggtgagcgaccagaccattaacggtcgcgctacgctggac

SEQ ID NO: 688548 - DNA, 75 bp, synthetic construct
  source 1..75: mol_type = other DNA
gtttgtcgctgagatccaaaaccaggacccgaccgacccgactgacgccaccgaatatatcgaccagctttcgtc

SEQ ID NO: 688549 - DNA, 75 bp, synthetic construct
  source 1..75: mol_type = other DNA
actttaccgatgccgcaggcgatgactatacggtgtcgctgatcccggaaggcagttcgtccgttggaccaggcc

SEQ ID NO: 688550 - DNA, 75 bp, synthetic construct
  source 1..75: mol_type = other DNA
gtgcttggaagtggcgtaccctatgatatttatactattgatagtgatatattaagtagtgtctgtaaggtcatg

SEQ ID NO: 688551 - DNA, 75 bp, synthetic construct
  source 1..75: mol_type = other DNA
aagtacccaaatctggcaaaggtttaccccactaataaattgccggatctacggggcgaatttattcgcggctgg

SEQ ID NO: 688552 - DNA, 75 bp, synthetic construct
  source 1..75: mol_type = other DNA
aaaaaccttggtttgggagaaggctctgcattacctgttggtgtcccggttccgtggccttcagccactccgcca

SEQ ID NO: 688553 - DNA, 75 bp, synthetic construct
  source 1..75: mol_type = other DNA
atgcgctacagcaaattgaccatgcttatcccttgcgcactgttactcagtgcttgcaccaccgtcacgccagcc

SEQ ID NO: 688554 - DNA, 75 bp, synthetic construct
  source 1..75: mol_type = other DNA
gcagttaaagctcacgttaacgaccagtttggcaacccggtgacgcatcaactcgcgacattcagtgcagcgcca

SEQ ID NO: 688555 - DNA, 75 bp, synthetic construct
  source 1..75: mol_type = other DNA
gagtattggtaacacaggtggaagcgaaacccgtccacgaaatattgcatttaactatatcgtgagggctgcata

SEQ ID NO: 688556 - DNA, 75 bp, synthetic construct
  source 1..75: mol_type = other DNA
tggtgtgcctgttccatggccttcagccacaccgccaacaggctggctgaaatgcaacggtgcggcattttctgc

SEQ ID NO: 688557 - DNA, 75 bp, synthetic construct
  source 1..75: mol_type = other DNA
agcccagagtatgtcctttcctgaaagaaatcgctgtctaattatgatggctttcattcacggttttagggccag

SEQ ID NO: 688558 - DNA, 75 bp, synthetic construct
  source 1..75: mol_type = other DNA
accagagcatccaggccggtcttgcggatgtggatgcaggtcgtgtgatgagccactcggacatggtggattttg

SEQ ID NO: 688559 - DNA, 75 bp, synthetic construct
  source 1..75: mol_type = other DNA
gattattaaggaagcgttgaccagtatgctggccgaaagagaacggcgtcaccagagcatccaggccggtcttgc

SEQ ID NO: 688560 - DNA, 75 bp, synthetic construct
  source 1..75: mol_type = other DNA
ctaaaccagcatgtctgtatgcatgaactggcccctgtagatttagtaattaggactgggggggagcatcgcatt

SEQ ID NO: 688561 - DNA, 75 bp, synthetic construct
  source 1..75: mol_type = other DNA
tgcctttagtagtgaaaactggaatcgaccagcgcaggaagtcagtgcgttaatggaactgtttgtgtgggcgct

SEQ ID NO: 688562 - DNA, 75 bp, synthetic construct
  source 1..75: mol_type = other DNA
gcaggattagctgtaaaagcacatcctcatatgttacgtcatgcctgtggttttgctctggctgacaatggtgtc

SEQ ID NO: 688563 - DNA, 75 bp, synthetic construct
  source 1..75: mol_type = other DNA
cgcctgtatagcacggactggcgtgatggcggatgaaatcgctcaggtgatgcaggaaaatttagcgcgtcgtac

SEQ ID NO: 688564 - DNA, 75 bp, synthetic construct
  source 1..75: mol_type = other DNA
gtacatctgaactgaccgccagcgataaaaaactggtgggttatgccgttcgctggaacagcctttcagaaatta

SEQ ID NO: 688565 - DNA, 75 bp, synthetic construct
  source 1..75: mol_type = other DNA
cagcgcgtttccggtgcattttttgggataatggttggttcgggggttccgggaacgcgcttctgtcagaccttg

SEQ ID NO: 688566 - DNA, 75 bp, synthetic construct
  source 1..75: mol_type = other DNA
atgcgttatccctggagcgtgagcgccagccggaaatacaggaacgcacactggatggcccttcgctgggatggt

SEQ ID NO: 688567 - DNA, 75 bp, synthetic construct
  source 1..75: mol_type = other DNA
gatgtatgggataccacaacagatccatgcgtgcgcaccgtgctggtggcggaactgtacgaaattaccgttaca

SEQ ID NO: 688568 - DNA, 75 bp, synthetic construct
  source 1..75: mol_type = other DNA
ttttatttaagtcaactttacagttatgacagtgactggtatctgacggtggtggatcagattggtgattgtggg

SEQ ID NO: 688569 - DNA, 75 bp, synthetic construct
  source 1..75: mol_type = other DNA
ctggaggaaacagccagaaaggtgattatgggctttcagcaagaagatgcccaattaatcaactcgttaattgat

SEQ ID NO: 688570 - DNA, 75 bp, synthetic construct
  source 1..75: mol_type = other DNA
taatcgattttttaatatggacgcgatggcaactttcgaagaggtttttacttaccttcacgaaaatcatccctc

SEQ ID NO: 688571 - DNA, 75 bp, synthetic construct
  source 1..75: mol_type = other DNA
taacgggtttagccgttttgaccctgagtatcttcttcgatatgaacgcagtagttttattaagaacctctccag

SEQ ID NO: 688572 - DNA, 75 bp, synthetic construct
  source 1..75: mol_type = other DNA
taatcggttctttaatatggatgcgatggcaacttttgaagaggtttttggctatcttcatgaaaatcatccctc

SEQ ID NO: 688573 - DNA, 75 bp, synthetic construct
  source 1..75: mol_type = other DNA
aaaaagccgaggctgctgctgcggcgctgaagaagaaagctgaagcggcagaagcagctgaagcaagaaagaaag

SEQ ID NO: 688574 - DNA, 75 bp, synthetic construct
  source 1..75: mol_type = other DNA
taatttgtggctggattatctgaacgcactggaactggttgatacctccagtgcgccagatattgaatggcctac

SEQ ID NO: 688575 - DNA, 75 bp, synthetic construct
  source 1..75: mol_type = other DNA
ggtgcgctactaataattttaggtgccacaatctttctgcgtaacgcctatcctatgaataatgggaaatatgat

SEQ ID NO: 688576 - DNA, 75 bp, synthetic construct
  source 1..75: mol_type = other DNA
atcgaactggttaaacgtggtgacatctcgggcatgagctttggctttcgttcccgtaaggatgtatgggatacg

SEQ ID NO: 688577 - DNA, 75 bp, synthetic construct
  source 1..75: mol_type = other DNA
gcgaaaacattcatagacttcgttgctaaacgttggagcgagcaatggagagaccaggaaaaacgtgctcgtgaa

SEQ ID NO: 688578 - DNA, 75 bp, synthetic construct
  source 1..75: mol_type = other DNA
atacagcaaaagaggctcttgctgccgggactccgttagatctggagtcacttttcaacggcgaagtggcctctg

SEQ ID NO: 688579 - DNA, 75 bp, synthetic construct
  source 1..75: mol_type = other DNA
aactggatgaaaccgtggtcactgtcatcccaactcacggtgctattgccagagcaacatttaatgcacaaatcg

SEQ ID NO: 688580 - DNA, 75 bp, synthetic construct
  source 1..75: mol_type = other DNA
taccatccatctcttggtaaagatgctgcatttgctcgtccgacagaaatgcttaaactaaatgtcaggcatact

SEQ ID NO: 688581 - DNA, 75 bp, synthetic construct
  source 1..75: mol_type = other DNA
cttcctgaggttaaggagatgcgtcgtctcgctgctgcaatcgttaaacaggatcttgccactgtaaggaaatag

SEQ ID NO: 688582 - DNA, 75 bp, synthetic construct
  source 1..75: mol_type = other DNA
cattgatgtggctctgcgcaacgctttgaaatgtccgatttgccaaggttaccttgatactgaaaagtcagtttc

SEQ ID NO: 688583 - DNA, 75 bp, synthetic construct
  source 1..75: mol_type = other DNA
cgaagccctgttacagcagcagcttcagacgcagtggcaaaccacctggcaacagcattttgccaccgcgccgtg

SEQ ID NO: 688584 - DNA, 75 bp, synthetic construct
  source 1..75: mol_type = other DNA
gggccgcctcacgggaggtttatagccaggcgcgcgcagcaggtcgcggtcgccaggactggtccgccattctgg

SEQ ID NO: 688585 - DNA, 75 bp, synthetic construct
  source 1..75: mol_type = other DNA
tggaaatccggtcatcggaaatcaccaccagcggagccggtacgctgacgggctacgttgttcgctgggataagc

SEQ ID NO: 688586 - DNA, 75 bp, synthetic construct
  source 1..75: mol_type = other DNA
attcagagtggtaaaacaacgccagaagatgtcactaaactagtatttagccaaagcccagcggaaagggcgcaa

SEQ ID NO: 688587 - DNA, 75 bp, synthetic construct
  source 1..75: mol_type = other DNA
atgctgcggcgattcgccagcaaattcagtcgttatgtgccgcagagccactactttcagcgttttcgctgctta

SEQ ID NO: 688588 - DNA, 75 bp, synthetic construct
  source 1..75: mol_type = other DNA
atgccgtgctgattcgccaacaaattcaggctgaatgttccgcagatcccctgctttatgcgttttcactgctgt

SEQ ID NO: 688589 - DNA, 75 bp, synthetic construct
  source 1..75: mol_type = other DNA
caatatggggcaaatcagtagtaaccggtttcatgcggtaggggaagatagcgcaccggtgccttttgttattca

SEQ ID NO: 688590 - DNA, 75 bp, synthetic construct
  source 1..75: mol_type = other DNA
ggcgccgcgtcgtttggtttaacgtcgcaggagcggtcatccttacactggcctactttggcagccgaattgtcc

SEQ ID NO: 688591 - DNA, 75 bp, synthetic construct
  source 1..75: mol_type = other DNA
tggtgctgttaacgctcactctttgcactggcctgttctacatgcacaacttatttagcatggaaaatatcgaca

SEQ ID NO: 688592 - DNA, 75 bp, synthetic construct
  source 1..75: mol_type = other DNA
atcagcagtcagggagacaacttcattcaggttgatttcgacacgccgtggtgtcagccggaaagcgacgttatt

SEQ ID NO: 688593 - DNA, 75 bp, synthetic construct
  source 1..75: mol_type = other DNA
gtgaagtggcctgtggggtatgaggtgaatatcagtagtcagggagacaacttcattcaggttgatttcgacacg

SEQ ID NO: 688594 - DNA, 75 bp, synthetic construct
  source 1..75: mol_type = other DNA
catgaaatggctgctgaagcggggattaatcccgtacgcattgatgagatcgcagagtttttgaatcaatggggt

SEQ ID NO: 688595 - DNA, 75 bp, synthetic construct
  source 1..75: mol_type = other DNA
tcgccttggcgaattttatcttcatggtagtaatggtaaaccgctggattatgcaatggcgaggtactggtatga

SEQ ID NO: 688596 - DNA, 75 bp, synthetic construct
  source 1..75: mol_type = other DNA
gcaatcagcggaacaggggaatccacgagcgcaaagcaaactcggctggatctacctgaaagggttgggcgtcag

SEQ ID NO: 688597 - DNA, 75 bp, synthetic construct
  source 1..75: mol_type = other DNA
ttcgcaccggggatttagcccgtggcgctgccgccgttagtaccgatgaaatgggcgatatcattgcccgctatg

SEQ ID NO: 688598 - DNA, 75 bp, synthetic construct
  source 1..75: mol_type = other DNA
cctatgccacgctaattatcgccgccctgtacgcgctgcaactggcgtggattgattaccaactgaagaacaaga

SEQ ID NO: 688599 - DNA, 75 bp, synthetic construct
  source 1..75: mol_type = other DNA
atgcccgtttttgctctgctcgcgcttgtcgcctactccgtcagtcttgcgctgattgttcccggtctgctgcaa

SEQ ID NO: 688600 - DNA, 75 bp, synthetic construct
  source 1..75: mol_type = other DNA
atggtcactcaacatcgcaatatcgcaatatcgcaatatcgccttggcgaattttatcttcatggtagcgacggt

SEQ ID NO: 688601 - DNA, 75 bp, synthetic construct
  source 1..75: mol_type = other DNA
catcggaacacgcccaacggttgccggtattcgccagcagctggaagtgcatttgttagatgttgcaatggacct

SEQ ID NO: 688602 - DNA, 75 bp, synthetic construct
  source 1..75: mol_type = other DNA
gttggcgcagtgaaagccgcgacagatgccggctccgctgctgcgagtaaagtgggagaactggtctccgtacat

SEQ ID NO: 688603 - DNA, 75 bp, synthetic construct
  source 1..75: mol_type = other DNA
gcgtgattgtcgagggggactctgacgagagtattaatatttttgcagattatttgcgtcaggcgctcaaccact

SEQ ID NO: 688604 - DNA, 75 bp, synthetic construct
  source 1..75: mol_type = other DNA
cgtatgcgcgccgagcgtgaagcggtagcgcgtcgtcaccgttcacaaggtcaggaagaagcggagaaactgcgc

SEQ ID NO: 688605 - DNA, 75 bp, synthetic construct
  source 1..75: mol_type = other DNA
cgcccggagcgtctgcgtgcagttgctcaatttcgcgggcaacaggtcaatagcgatctgggtgaaggttttgtt

SEQ ID NO: 688606 - DNA, 75 bp, synthetic construct
  source 1..75: mol_type = other DNA
tccgccaacgtgcagctggttggctatgaaaagattggttcgggtctgattacggtgatggtccgtggcgatgtt

SEQ ID NO: 688607 - DNA, 75 bp, synthetic construct
  source 1..75: mol_type = other DNA
cgtcggcgaagtaaaagccgtgcacgttattccccgcccacataccgatgtcgaaaaaatcttaccaaagggaat

SEQ ID NO: 688608 - DNA, 75 bp, synthetic construct
  source 1..75: mol_type = other DNA
atgatcaaagtgcttagtgaaatcacgtccagcctgaataaagactcgctggttgtctctattgcagcgggcgtc

SEQ ID NO: 688609 - DNA, 75 bp, synthetic construct
  source 1..75: mol_type = other DNA
agataccgctgatgtactgaatattttccgctgctttggcgaagcggaagtaattgctgagccgatgatccaccc

SEQ ID NO: 688610 - DNA, 75 bp, synthetic construct
  source 1..75: mol_type = other DNA
gcaccaccattgaagcagtacgcgtactggaagagaaaggcttccgtgccgcagtgatcgaagcgatgacgaagt

SEQ ID NO: 688611 - DNA, 75 bp, synthetic construct
  source 1..75: mol_type = other DNA
gtttatgcgttgcagtcaccggaagatctgggtcatgatttgcagacttatctgcaggatatgtctccggaatta

SEQ ID NO: 688612 - DNA, 75 bp, synthetic construct
  source 1..75: mol_type = other DNA
ggggggaatgccacgcgcgcaggcgtataaatttgccgcccaggcggtaatgggttctgcaaaaatggtgctgga

SEQ ID NO: 688613 - DNA, 75 bp, synthetic construct
  source 1..75: mol_type = other DNA
cgctatgccaaatacccccgcgctagtcaatgccgggatgacttccgtaacgccaaacgcgctggttacgcctga

SEQ ID NO: 688614 - DNA, 75 bp, synthetic construct
  source 1..75: mol_type = other DNA
gacattgccgctaacggcttcgacatcctgtgcgtgcgcgaactgaccggcggcatctatttcggtcagccaaaa

SEQ ID NO: 688615 - DNA, 75 bp, synthetic construct
  source 1..75: mol_type = other DNA
gagggagtggttaaaagagcaacgagaaagtggtaattataacgccagccggatatggcgggaaatggtggcccg

SEQ ID NO: 688616 - DNA, 75 bp, synthetic construct
  source 1..75: mol_type = other DNA
tcactcgagtccacgaaagcggatcagcagaatttcggcgcgtggctgcggggatggaagctgatgctgcagcta

SEQ ID NO: 688617 - DNA, 75 bp, synthetic construct
  source 1..75: mol_type = other DNA
tcactcgagtccacgaaagcggatcagcagaatttcggcgcgtggcagcggggatggaagctgatgctgctgcta

SEQ ID NO: 688618 - DNA, 75 bp, synthetic construct
  source 1..75: mol_type = other DNA
tggacttatatatacctatcttgaagatctatataacatccatgtaaggatgcgagaaggtacactaaattcaca

SEQ ID NO: 688619 - DNA, 75 bp, synthetic construct
  source 1..75: mol_type = other DNA
caatggattcatgctatcacataaaggtagtgaagtgattgatgctgttatcgcaggccagaatcaggcttacag

SEQ ID NO: 688620 - DNA, 75 bp, synthetic construct
  source 1..75: mol_type = other DNA
atggtggcccgggggtttacaggcagtgaaaccatcgtcagggatactgttaccaaatggcgtaaaggctggatc

SEQ ID NO: 688621 - DNA, 75 bp, synthetic construct
  source 1..75: mol_type = other DNA
tcactcgagtccacgaaagcggatcagcagaatttcggagcgtggctgcggggatggaagctgatgctgccgcta

SEQ ID NO: 688622 - DNA, 75 bp, synthetic construct
  source 1..75: mol_type = other DNA
aaatagcgcagcaactggcactcgagttctaccgtattctgaaaacccaaaataaatcacagctaagtagctagt

SEQ ID NO: 688623 - DNA, 75 bp, synthetic construct
  source 1..75: mol_type = other DNA
aagaaaattatgcttcccgatttattagtctgatgtgtgaaaaagaaccggagctgaaaatagcgcagcaactgg

SEQ ID NO: 688624 - DNA, 75 bp, synthetic construct
  source 1..75: mol_type = other DNA
tcactcgagtccacgaaagcggatcagcagaatttcggtgcgtggccgcggggatggaagctgatgctgcagcta

SEQ ID NO: 688625 - DNA, 75 bp, synthetic construct
  source 1..75: mol_type = other DNA
tcactcgagtccacgaaagcggatcagcagaatttcggtgcgtggcagcggggatggaagctgatgctgccgcta

SEQ ID NO: 688626 - DNA, 75 bp, synthetic construct
  source 1..75: mol_type = other DNA
tcactcgagtccacgaaagcggatcagcagaatttcggagcgtggccgcggggatggaagctgatgctgctgcta

SEQ ID NO: 688627 - DNA, 75 bp, synthetic construct
  source 1..75: mol_type = other DNA
gctcagcgatctgacaccggaatgcacagaacaggctatatcgttaaaagattataaattcatactgagaggggg

SEQ ID NO: 688628 - DNA, 75 bp, synthetic construct
  source 1..75: mol_type = other DNA
tttaacgaaaccagcgacgatttcgagttcaacgccgaccgttacctgttcgcagaaaacccggttgtgcatctg

SEQ ID NO: 688629 - DNA, 75 bp, synthetic construct
  source 1..75: mol_type = other DNA
agatcagaagcaaactgtaagcacgctggcaacgctgtcagcgggtatggccggcggtattgccagtggcgatgt

SEQ ID NO: 688630 - DNA, 75 bp, synthetic construct
  source 1..75: mol_type = other DNA
aacgccattgctcacgccattctgggcggcgcagtggcggcaatgcagggtaataatgtcgctgccggtgcagca

SEQ ID NO: 688631 - DNA, 75 bp, synthetic construct
  source 1..75: mol_type = other DNA
cagatatgtcaggacagagagatgaactactcccagtgcgtcagaatgtttatcagtcagggaattaaggccggg

SEQ ID NO: 688632 - DNA, 75 bp, synthetic construct
  source 1..75: mol_type = other DNA
gttactgaagtcaaaggagatttgggaatctcaaaagaaatgaaaccaagcaatgtccccagctcaattggtgac

SEQ ID NO: 688633 - DNA, 75 bp, synthetic construct
  source 1..75: mol_type = other DNA
gacccagcgtagccataacccgtactggaaaaaactgcacgaacacattgattcccgtaccgtcgataactggtg

SEQ ID NO: 688634 - DNA, 75 bp, synthetic construct
  source 1..75: mol_type = other DNA
atgatgggcttactgctgagcctgattgtcgccgttgcggcgtttaacattattacctcgctagggctgatggtg

SEQ ID NO: 688635 - DNA, 75 bp, synthetic construct
  source 1..75: mol_type = other DNA
tttacaggcagtgaaaccatcgtcagggatgcggttgccaaatggcgtaaaggctggaacccaccggttactact

SEQ ID NO: 688636 - DNA, 75 bp, synthetic construct
  source 1..75: mol_type = other DNA
aacctgtcgcctttgagctgagtttgatttactgggccgggaacaacataaatgttcaaccagaggatgaagcaa

SEQ ID NO: 688637 - DNA, 75 bp, synthetic construct
  source 1..75: mol_type = other DNA
gtaccgcatcttccatctatgttgcatcagcgctggctctgaaactgggcatgaagcgcgagcatatgctgcagc

SEQ ID NO: 688638 - DNA, 75 bp, synthetic construct
  source 1..75: mol_type = other DNA
tgctgcaaaactttggtagcagccacgacatcatggtccgtatgccgcctgctgaaggcgaaaccggcggtcagg

SEQ ID NO: 688639 - DNA, 75 bp, synthetic construct
  source 1..75: mol_type = other DNA
gtggcacaggaatatactgttgaacaactaaaccacggccgtaaagtctatgactttatgcgctgggactactgg

SEQ ID NO: 688640 - DNA, 75 bp, synthetic construct
  source 1..75: mol_type = other DNA
tggcattgatcgtccgcgcactggtgaagcatccgaccttgcttattcttgatgaaccattgcaagggcttgatc

SEQ ID NO: 688641 - DNA, 75 bp, synthetic construct
  source 1..75: mol_type = other DNA
caaatgaaagtgttttgttattcgatgctaacggagaaggctggctaattggctggcgttctctctggtacacct

SEQ ID NO: 688642 - DNA, 75 bp, synthetic construct
  source 1..75: mol_type = other DNA
tgcagcactggaaaacaaagtaataccagtgtcagctgaactgccgccagcgaatgaaagtattctgttatttga

SEQ ID NO: 688643 - DNA, 75 bp, synthetic construct
  source 1..75: mol_type = other DNA
gtacgtgacgcgctgaactccggttctgcgggtacagaagatgaagttactacccctgcagcagataacgccatt

SEQ ID NO: 688644 - DNA, 75 bp, synthetic construct
  source 1..75: mol_type = other DNA
cgctaaagaggaactgctccagcaagcactcgtcgcgcaactggcacatagcgaacagcttgaaggtgtgcaact

SEQ ID NO: 688645 - DNA, 75 bp, synthetic construct
  source 1..75: mol_type = other DNA
taaaaccctgctctgtcaggcgctgatgtcagatcctgatttactgattcttgatgaaccattcgatggccttga

SEQ ID NO: 688646 - DNA, 75 bp, synthetic construct
  source 1..75: mol_type = other DNA
gtggacatttcaggtcggggaccttgaaaacgtcaatatcactcactgggcagtaatgccaaaagcaccggaggc

SEQ ID NO: 688647 - DNA, 75 bp, synthetic construct
  source 1..75: mol_type = other DNA
gttggcctgggcaacgttatcggctcgacgattctggcttattactgggatgatttcgccccggcgctggcaacc

SEQ ID NO: 688648 - DNA, 75 bp, synthetic construct
  source 1..75: mol_type = other DNA
tgattgaacgcgcacaaatctgctttacctcggcatttcgcgacatgtggatcaccggtcgaacccatatggcga

SEQ ID NO: 688649 - DNA, 75 bp, synthetic construct
  source 1..75: mol_type = other DNA
tgccgcgcttcgtgaggcctttggaggcgaactggcttgcgtagtactggatgcgacgggaaataaagcttcaat

SEQ ID NO: 688650 - DNA, 75 bp, synthetic construct
  source 1..75: mol_type = other DNA
aattcgacgcgcttgaagctaaatgtgcggcactggaaaacaaaataataccagtgtcaactgaactgccaccag

SEQ ID NO: 688651 - DNA, 75 bp, synthetic construct
  source 1..75: mol_type = other DNA
ggggtcaaaaagaaaccggagaatggcagtggacatttcaggtcggggaccttgaaaacgtcaatatcactcact

SEQ ID NO: 688652 - DNA, 75 bp, synthetic construct
  source 1..75: mol_type = other DNA
acgtattcagaccatggacaaccaggccgaccgctttgtgaccaaagagaagaaagacctgatcgtcgactctta

SEQ ID NO: 688653 - DNA, 75 bp, synthetic construct
  source 1..75: mol_type = other DNA
gcgcgtaaatacgcgattgagcagatgatagcccgaaacgaagcgcggaggctggcacagtcgagagaatctgcg

SEQ ID NO: 688654 - DNA, 75 bp, synthetic construct
  source 1..75: mol_type = other DNA
cattacagcccccattttcatattttgcctgatgtatggttttctgcgtccaatgttcaacaactggctacaaaa

SEQ ID NO: 688655 - DNA, 75 bp, synthetic construct
  source 1..75: mol_type = other DNA
atttgttgtggtaatgacaagcttttttctgcgttatgccaggcactggatctgacggagctggttgatgatccc

SEQ ID NO: 688656 - DNA, 75 bp, synthetic construct
  source 1..75: mol_type = other DNA
atgaagaaaacgcagatactgtcttttattcaggagataaacacgccatgcagaacgactgatatttcttcacat

SEQ ID NO: 688657 - DNA, 75 bp, synthetic construct
  source 1..75: mol_type = other DNA
gatgccttctggcggggctgcttgtcctgtcggcttgctcaagcgtccctcagccaaacaacgaatacgcgaagg

SEQ ID NO: 688658 - DNA, 75 bp, synthetic construct
  source 1..75: mol_type = other DNA
ttgaaaaacatctgataggaggcataacagacgctacccaaggtttaatgatgtcttattcttcaatgatgatgg

SEQ ID NO: 688659 - DNA, 75 bp, synthetic construct
  source 1..75: mol_type = other DNA
aaaaaaatatcatcggtgggataactgacgcgactaatggtttgatgatgtcttattcgtcaatgatgatggggc

SEQ ID NO: 688660 - DNA, 75 bp, synthetic construct
  source 1..75: mol_type = other DNA
ttcccgtggtcgtctgaccctggaagtacgtgacgcgctgaactccggttctgcgggtacagaagatgaagttac

SEQ ID NO: 688661 - DNA, 75 bp, synthetic construct
  source 1..75: mol_type = other DNA
gaaaacatctggcaaatgttagataatttatggaaaagcgcaagagtattagggaaaactctacatgacatggat

SEQ ID NO: 688662 - DNA, 75 bp, synthetic construct
  source 1..75: mol_type = other DNA
tattacagcccctattttcatattttgcctgatgtatggttttttgcgcccgatgttcaacaactggctacaaaa

SEQ ID NO: 688663 - DNA, 75 bp, synthetic construct
  source 1..75: mol_type = other DNA
aattacttgaaggtgcgcccgtttcgctggatatcgctgaaatgaaacgccgcatgtgccggaaaatcccggaag

SEQ ID NO: 688664 - DNA, 75 bp, synthetic construct
  source 1..75: mol_type = other DNA
atgaccacctttacccaaaaagaactgattaaagaaatcaaagagcgcatcagcagcctcgacgtccgagacgat

SEQ ID NO: 688665 - DNA, 75 bp, synthetic construct
  source 1..75: mol_type = other DNA
tgtctccggacgcggtgtcggtatggatgtcgtcaaacgtaatatccaggagatgggcggtcatgtcgaaatcaa

SEQ ID NO: 688666 - DNA, 75 bp, synthetic construct
  source 1..75: mol_type = other DNA
acggaattgaactgccggaaaaacgcctcgccgcaggcaaaaacagcgtcggaaatttggttctgtctgctgaac

SEQ ID NO: 688667 - DNA, 75 bp, synthetic construct
  source 1..75: mol_type = other DNA
atcagacattttttgatgaagcggacgaactgttggctgacatggagcagcatctgctggttttgcagccggaag

SEQ ID NO: 688668 - DNA, 75 bp, synthetic construct
  source 1..75: mol_type = other DNA
gcgtgcctgatgaacaggatattgcggtcaataatgctgatggttcgttagacttcagtaaagccgatgccaaaa

SEQ ID NO: 688669 - DNA, 75 bp, synthetic construct
  source 1..75: mol_type = other DNA
tggcaaaagcggcctcgcaaggtctgaccgtcagcgaaaacatgagcgacgacgaagttgcaatgctgatatttg

SEQ ID NO: 688670 - DNA, 75 bp, synthetic construct
  source 1..75: mol_type = other DNA
cgccaaccggtcgcgtggagcgggaaaaaacgacgcgcagcagtgaatccaccagcatccgtgtagcggtagaaa

SEQ ID NO: 688671 - DNA, 75 bp, synthetic construct
  source 1..75: mol_type = other DNA
atggtctggcgcacctggaattttgagggcggtgccgggtactggatgaatcatgtcatccgtgatttcgggatt

SEQ ID NO: 688672 - DNA, 75 bp, synthetic construct
  source 1..75: mol_type = other DNA
tggttcgtgacgaactggatattattgtcgaagctcatcaagggattaatactgacaatgctgggctcaagatca

SEQ ID NO: 688673 - DNA, 75 bp, synthetic construct
  source 1..75: mol_type = other DNA
aaaaggttatagcgaatttgatgcgctgagtattattaatgctgtagaaaaatatgcgccaggaatgcaaaaata

SEQ ID NO: 688674 - DNA, 75 bp, synthetic construct
  source 1..75: mol_type = other DNA
gatgtcgttaaacgtaatatccaggagatgggggggcatgtcgaaatccagtcgaagcagggcacaggtactacc

SEQ ID NO: 688675 - DNA, 75 bp, synthetic construct
  source 1..75: mol_type = other DNA
aatgagcagagtaacagtgagtcgccgcgacgaattatcctttcacgcctgaaggcggatgaagtcgatctgctg

SEQ ID NO: 688676 - DNA, 75 bp, synthetic construct
  source 1..75: mol_type = other DNA
atgcaagaacagctcgacgcttataaacagtcgcaagagccggatgccgccagcttcgatatctgccaggccttg

SEQ ID NO: 688677 - DNA, 75 bp, synthetic construct
  source 1..75: mol_type = other DNA
cggcgaatgtaccgctacgccgtcaggtctccccggtgaaaggggtttatgcggtggaagtgctgggcctcggtg

SEQ ID NO: 688678 - DNA, 75 bp, synthetic construct
  source 1..75: mol_type = other DNA
tgattccgcagcaagttgaaaacctgttggtttgcggacgggcaatcgatgtagataatttcgcctacgcgacaa

SEQ ID NO: 688679 - DNA, 75 bp, synthetic construct
  source 1..75: mol_type = other DNA
gttcctggagtacggtcaccgagtatggtgatgcgaattacttgaacgttgtcagcatccctgccgttgattgta

SEQ ID NO: 688680 - DNA, 75 bp, synthetic construct
  source 1..75: mol_type = other DNA
tatttgatgctaacggagaaggctggctgattggctggcgttctctctggtacacctggggacaaaaagaaaccg

SEQ ID NO: 688681 - DNA, 75 bp, synthetic construct
  source 1..75: mol_type = other DNA
atgaccacctttacccaaaaagaactgattaaagaaattaaagatcgcatcagcagcctcgacgtgcgagacgat

SEQ ID NO: 688682 - DNA, 75 bp, synthetic construct
  source 1..75: mol_type = other DNA
atgaccacctttacccaaaaagaactgattaaagaaattaaagaacgcatcagcagcctcgacgttcgagacgat

SEQ ID NO: 688683 - DNA, 75 bp, synthetic construct
  source 1..75: mol_type = other DNA
atgaccacctttacccaaaaagaactgattaaagaaataaaagaccgcatcagcagcctcgacgtacgagacgat

SEQ ID NO: 688684 - DNA, 75 bp, synthetic construct
  source 1..75: mol_type = other DNA
ccgcaaacaggccgaagccgttgccgcacagtaccggaacgtctttatcgaggatgaccacggcgaacagtttcg

SEQ ID NO: 688685 - DNA, 75 bp, synthetic construct
  source 1..75: mol_type = other DNA
gtcagttgctcgataaccaccatgacctgaaagtcgtggaaacaccaatctatggttatgtgtggctgaacatgg

SEQ ID NO: 688686 - DNA, 75 bp, synthetic construct
  source 1..75: mol_type = other DNA
taccgcaatgtgtttactgaagatgaccagggaacatattcccggctggttatccgtaatgctgtaagcgtcaac

SEQ ID NO: 688687 - DNA, 75 bp, synthetic construct
  source 1..75: mol_type = other DNA
ggaagaactaaagcattgctttgacggtcagcttgcttgcacgttactggatgcgacaggaaacaaacattccat

SEQ ID NO: 688688 - DNA, 75 bp, synthetic construct
  source 1..75: mol_type = other DNA
acttaaactaatctatgcaacgcgaacggggtatcaaagtggtgcaaagataaaagcagagcagcataacattca

SEQ ID NO: 688689 - DNA, 75 bp, synthetic construct
  source 1..75: mol_type = other DNA
aggggctgccagacggtccttttacccgaaaacaggccgaagccgttgccgcacagtaccggaacgtctttatcg

SEQ ID NO: 688690 - DNA, 75 bp, synthetic construct
  source 1..75: mol_type = other DNA
gcaaaagcacggtcattatcattacggagccagtgagataccgccgcccagcgggctggggcgtcctcgcacagt

SEQ ID NO: 688691 - DNA, 75 bp, synthetic construct
  source 1..75: mol_type = other DNA
cctgctgaaagacaaccagtttacacgtgatgccggcatcaataccgatgatattgttgcagtaggtctggtcta

SEQ ID NO: 688692 - DNA, 75 bp, synthetic construct
  source 1..75: mol_type = other DNA
ttattggcgggcgtgaaaccaatattgttagcgccagagcgtcgcataaggcgctcggggtaggtcgtgatttca

SEQ ID NO: 688693 - DNA, 75 bp, synthetic construct
  source 1..75: mol_type = other DNA
tgcacagcggatttctgaaagctgtcatattccggttcaaatcatgtctgatgtctggacactgctgggtacagg

SEQ ID NO: 688694 - DNA, 75 bp, synthetic construct
  source 1..75: mol_type = other DNA
gttgttaaggaatcctctcgacaatggatcaatccccgtccggtcatggataaaaacaccggcaaaaccgttccc

SEQ ID NO: 688695 - DNA, 75 bp, synthetic construct
  source 1..75: mol_type = other DNA
atgcacactccttacccttttaattccagatacacgatgaactggtttctgctgtctctactcaatgaccacctg

SEQ ID NO: 688696 - DNA, 75 bp, synthetic construct
  source 1..75: mol_type = other DNA
ccggcggctggctggagccggattatcaaatcaccgttccccgcgcatttaaaccaggaggagtcgaagatggat

SEQ ID NO: 688697 - DNA, 75 bp, synthetic construct
  source 1..75: mol_type = other DNA
caagcagtgtcattgcaggtataacaatggcgctaacttgccatgctgtgacagtaacagccactcatacagttg

SEQ ID NO: 688698 - DNA, 75 bp, synthetic construct
  source 1..75: mol_type = other DNA
tgtcttggtaaaggctggggctaccaacattattgtgctggaagccaattttgaacatggtgtaaaaacgacaca

SEQ ID NO: 688699 - DNA, 75 bp, synthetic construct
  source 1..75: mol_type = other DNA
catattccggtacggatcacacctgatgtactgacatacctgaatacatccacaaccggcagcacacaacaaatc

SEQ ID NO: 688700 - DNA, 75 bp, synthetic construct
  source 1..75: mol_type = other DNA
cccatcacctatatggacagtcaggtggcctataacgctactgtggtcagcggcaccatgtcctcaaacggctca

SEQ ID NO: 688701 - DNA, 75 bp, synthetic construct
  source 1..75: mol_type = other DNA
tcgcctgcggcgttccttcgttgatatcgttcgaacacgccgacgctctgtttcagggaatgaatcttctcagcc

SEQ ID NO: 688702 - DNA, 75 bp, synthetic construct
  source 1..75: mol_type = other DNA
gactaagcaatcagcatcatatggatcgtattcgtgaaacgctagataagtctttacaggaatacccaaggacat

SEQ ID NO: 688703 - DNA, 75 bp, synthetic construct
  source 1..75: mol_type = other DNA
catcaagaaaacactggatgtgaaatccatccactttgactccgcgtgggtgccttacaccaatagactggcccc

SEQ ID NO: 688704 - DNA, 75 bp, synthetic construct
  source 1..75: mol_type = other DNA
ttgcggtagcagcattttctcgcaataccgtggtagccattcaaccgccaaccttgtctgaaacggctgaagtgt

SEQ ID NO: 688705 - DNA, 75 bp, synthetic construct
  source 1..75: mol_type = other DNA
ctgattgaagatggaacaacactggcaagtatctttttggctatagagccgtggaaggaattgttagcggcttat

SEQ ID NO: 688706 - DNA, 75 bp, synthetic construct
  source 1..75: mol_type = other DNA
atccttgaagatacgcatccactttctgcggcagctgcgcgttcgtttgccctggcaaatgctgacgttgtcatg

SEQ ID NO: 688707 - DNA, 75 bp, synthetic construct
  source 1..75: mol_type = other DNA
ggtgtggcgcgatattttaaatatccacaagcagcaaaatgcacaaaaaatgcatgaaaaattaagtacagatac

SEQ ID NO: 688708 - DNA, 75 bp, synthetic construct
  source 1..75: mol_type = other DNA
aataatctcaggtcatgaaacatctgtacgatttcccaatcctcgtgctaaaaaatgttgtcgggatgggtataa

SEQ ID NO: 688709 - DNA, 75 bp, synthetic construct
  source 1..75: mol_type = other DNA
tatggaagaaggggaagatttttcgacctattttaatcgtgagcggttcccgactgatgagtttgacatagaaag

SEQ ID NO: 688710 - DNA, 75 bp, synthetic construct
  source 1..75: mol_type = other DNA
agccacgcaccaaaactgttttggagcaactccagcgcaaagaagaaaaccggagaaagcatgaagaacaacgct

SEQ ID NO: 688711 - DNA, 75 bp, synthetic construct
  source 1..75: mol_type = other DNA
tccccattgacgaatttgatatagaaagtagctgcgatgcttctggttttatcaaaggtgataaggaacgctgga

SEQ ID NO: 688712 - DNA, 75 bp, synthetic construct
  source 1..75: mol_type = other DNA
catcaaaatggctgagcctccagcgttatagctattttaagaaaagaaatgatgtaaatatgcatctggtttttc

SEQ ID NO: 688713 - DNA, 75 bp, synthetic construct
  source 1..75: mol_type = other DNA
cattaagaagttatgccagcaagaaggtgggctgcccatacgaattggcaacatcaaaatggttgagccaccaga

SEQ ID NO: 688714 - DNA, 75 bp, synthetic construct
  source 1..75: mol_type = other DNA
ctggcaatgaaacagatgaagaacctaccatcgtcgtagccgacggtgcttttgattcgctcgctgctcacatgg

SEQ ID NO: 688715 - DNA, 75 bp, synthetic construct
  source 1..75: mol_type = other DNA
gccgcgcatatagcgcatgggtggatattggtggcgatagtcagatctggacaactgcgcaatttatttcgtggc

SEQ ID NO: 688716 - DNA, 75 bp, synthetic construct
  source 1..75: mol_type = other DNA
tggaatgaagacagttcccgctgagacgtttaattttgaagagcatattagtgaaggcagatcgggcaaagacta

SEQ ID NO: 688717 - DNA, 75 bp, synthetic construct
  source 1..75: mol_type = other DNA
ataatacaccacaggatattgatttgctggagcatatttcccatgttgccgctagtgctcatgctccgtttttga

SEQ ID NO: 688718 - DNA, 75 bp, synthetic construct
  source 1..75: mol_type = other DNA
ctcacgcgccgtttttgagtgcgattgctccggggatgttgtccatgaattcatttggcgaattaccctatccac

SEQ ID NO: 688719 - DNA, 75 bp, synthetic construct
  source 1..75: mol_type = other DNA
cttactacaacaatcggtgataacagccctagaaacattctcttctttaagaatattcacagcactaccaaggct

SEQ ID NO: 688720 - DNA, 75 bp, synthetic construct
  source 1..75: mol_type = other DNA
aattcgattttttctataatagattcaatacggaaaatggaacatttagcggtgataatagaagcatgcagatct

SEQ ID NO: 688721 - DNA, 75 bp, synthetic construct
  source 1..75: mol_type = other DNA
gggagtccgggggcttatcgtgcaattgcatggattaaacctcattttcaacttgagggcttaagtatgtcattg

SEQ ID NO: 688722 - DNA, 75 bp, synthetic construct
  source 1..75: mol_type = other DNA
tcttcaggagcattggttgtatctagtgatctgatcggaagtatagaaaagcggattgctgtgattgatgaagta

SEQ ID NO: 688723 - DNA, 75 bp, synthetic construct
  source 1..75: mol_type = other DNA
cagatcagaatgtgctcaatattttacttaatggacgagtgcattaccttgataagaagtacaattataatgcat

SEQ ID NO: 688724 - DNA, 75 bp, synthetic construct
  source 1..75: mol_type = other DNA
ataatgcattatgtaactccgaataaaccatggtacaaaatatttagagcgcaaaattttgatcattatttttca

SEQ ID NO: 688725 - DNA, 75 bp, synthetic construct
  source 1..75: mol_type = other DNA
caatgtccgactgaggttgctatctcagaccgcagggaaaaagaactgtcagacctcggctttattccacttatt

SEQ ID NO: 688726 - DNA, 75 bp, synthetic construct
  source 1..75: mol_type = other DNA
tcagacatatctgcaaaactggatcatgcaatatgttgtggcatcagataacgccggacaggaaacaaaggcacg

SEQ ID NO: 688727 - DNA, 75 bp, synthetic construct
  source 1..75: mol_type = other DNA
ttaagccaatgtgtgccgcgctggaggcgtaccgggctgaactgggtaaaaacacgctccagcaccattacacca

SEQ ID NO: 688728 - DNA, 75 bp, synthetic construct
  source 1..75: mol_type = other DNA
gaaattatcccggttatttccggcgttattggcgggcgtgaaaccaatattgttagcgctagagcgttgcataat

SEQ ID NO: 688729 - DNA, 75 bp, synthetic construct
  source 1..75: mol_type = other DNA
taatgacactatcctctggtgtctcacagcctttgcttgctgatgttcaatatttcgaactctatagtagttcgg

SEQ ID NO: 688730 - DNA, 75 bp, synthetic construct
  source 1..75: mol_type = other DNA
gtgataccgattggtgcgggcaatgaagtgacggtggtgttccaggatggcttccagctgaaaaccgtggaggaa

SEQ ID NO: 688731 - DNA, 75 bp, synthetic construct
  source 1..75: mol_type = other DNA
cagcggaagagggtaacccggaaagccctgtgccgaatcttccctcggcagaaagccacctgaacggttttaaca

SEQ ID NO: 688732 - DNA, 75 bp, synthetic construct
  source 1..75: mol_type = other DNA
tggagtgcgcgccagactttcaacggcgggatcaccggggcgctgacagggaacgccgataccgcgacgaaattg

SEQ ID NO: 688733 - DNA, 75 bp, synthetic construct
  source 1..75: mol_type = other DNA
cgcccgtacatatccgttcgcggcgggatactgattcttccaattggtctgaatgggcgcaggtctatacgtcaa

SEQ ID NO: 688734 - DNA, 75 bp, synthetic construct
  source 1..75: mol_type = other DNA
gccaacacctgaacccggtacaaaaaacacacagatcgcaaatgcggcctttgtctatgcagctataaatgcgct

SEQ ID NO: 688735 - DNA, 75 bp, synthetic construct
  source 1..75: mol_type = other DNA
atgttagtgaaacagtaccgacgctagcatctgatgagcgaatcatgcgctttaaatatttctatttcaggaagc

SEQ ID NO: 688736 - DNA, 75 bp, synthetic construct
  source 1..75: mol_type = other DNA
ccagcaattaggcgactcggtggaaaaactgttactgatcaatgcgattcttggacagaacgcacaagacagcga

SEQ ID NO: 688737 - DNA, 75 bp, synthetic construct
  source 1..75: mol_type = other DNA
ggtactggatgatctccaacattcccggtaatgactccaacttactgatagtgttttatgttcagataatgcccg

SEQ ID NO: 688738 - DNA, 75 bp, synthetic construct
  source 1..75: mol_type = other DNA
agtactacatcaaaagggccgagcagtatcacccggtcattccgattggtgccggcaacgaagttaccgtcgtgt

SEQ ID NO: 688739 - DNA, 75 bp, synthetic construct
  source 1..75: mol_type = other DNA
tctgctttttcaaaacgaaactgcgcttcaacctttccgtgaggatgttggtatagaggcgttgcgggagtttcg

SEQ ID NO: 688740 - DNA, 75 bp, synthetic construct
  source 1..75: mol_type = other DNA
ctcatttgagctggattatctaattcgagtaccagaagagtttcgaatctctggcggacaagaatgggcaaaagt

SEQ ID NO: 688741 - DNA, 75 bp, synthetic construct
  source 1..75: mol_type = other DNA
accagtgacggtaacgatatgacgtactggtattccgtggactgggtgcagattaacgtcgatatgcagctcgcc

SEQ ID NO: 688742 - DNA, 75 bp, synthetic construct
  source 1..75: mol_type = other DNA
ggcttcgatcagcgcaacgtactgccagtgagcatgctgctgggggccacgctgatgctgctggcagatgtactc

SEQ ID NO: 688743 - DNA, 75 bp, synthetic construct
  source 1..75: mol_type = other DNA
tgatattgtagcaaaaaacacaacaacaaaaaaatgtgttggtattgaaataagttttcaagttacaacaaactc

SEQ ID NO: 688744 - DNA, 75 bp, synthetic construct
  source 1..75: mol_type = other DNA
tactacgcataatgaaatgataggtccaattgcaacaaatcaaaaatacataagcttgtggcatggaatgccttt

SEQ ID NO: 688745 - DNA, 75 bp, synthetic construct
  source 1..75: mol_type = other DNA
atgtcaacgcttctttatttgcatggattcaacagttcgccgcgttcagcgaaagcgagcttgttgaaaaactgg

SEQ ID NO: 688746 - DNA, 75 bp, synthetic construct
  source 1..75: mol_type = other DNA
tgcccgcagtggtggtcaacccggcggtgcgcccgtttgaactgctgacggactatctcggtcagaacgagaacc

SEQ ID NO: 688747 - DNA, 75 bp, synthetic construct
  source 1..75: mol_type = other DNA
atagtctggccgacaggtactcccatccgcatcagcattgataatgcgctggtagaccacggcgtgatgctgcca

SEQ ID NO: 688748 - DNA, 75 bp, synthetic construct
  source 1..75: mol_type = other DNA
tggcgaaatacgccaccctcagctggaatgatcttgctaactggcggtggatagtctggccgacaggtactccca

SEQ ID NO: 688749 - DNA, 75 bp, synthetic construct
  source 1..75: mol_type = other DNA
cggcaaattgttattgcaacatgcccaacggttaatcaatgacatggagcgatcgcaacatgaactggcccgttt

SEQ ID NO: 688750 - DNA, 75 bp, synthetic construct
  source 1..75: mol_type = other DNA
aacaatagaaagaaaagcaggattagccaaaagcagaagagatttgctcaattcaagaggacataaaatagcata

SEQ ID NO: 688751 - DNA, 75 bp, synthetic construct
  source 1..75: mol_type = other DNA
atgaaactgcgaaaaacgcccgtacaggggcagggcttcgttcggcctgaaaaccagagccaacaaaatttcggc

SEQ ID NO: 688752 - DNA, 75 bp, synthetic construct
  source 1..75: mol_type = other DNA
ggactcacactttttgagcggcacagcaaaggacttcgtcctactgaaggcggcaaattgttattgcaacatgcc

SEQ ID NO: 688753 - DNA, 75 bp, synthetic construct
  source 1..75: mol_type = other DNA
ctgatgtggcgttaccgtgcaacggacactggctactattgctcggcaataccagtcgttgacgaccctactact

SEQ ID NO: 688754 - DNA, 75 bp, synthetic construct
  source 1..75: mol_type = other DNA
ggttatccgggaaatgatgataaaggtcgtgagctgcaacagcaggttgatccaaccaaactgatgaatgatttc

SEQ ID NO: 688755 - DNA, 75 bp, synthetic construct
  source 1..75: mol_type = other DNA
gaacgcggcagcggtggcatatccggaactggcctgcgcggtgccgttttatggtcgccaggctctggccgccga

SEQ ID NO: 688756 - DNA, 75 bp, synthetic construct
  source 1..75: mol_type = other DNA
gattttgctatggcggtggcgtatcgaacgcggcggctgtcgcgtatccggaactggcctgcgcggtgccgtttt

SEQ ID NO: 688757 - DNA, 75 bp, synthetic construct
  source 1..75: mol_type = other DNA
ttaaagaaaataattgcgatagcgtgatttccttaggcggtggttctccacacgactgcgcaaaaggtattgcgc

SEQ ID NO: 688758 - DNA, 75 bp, synthetic construct
  source 1..75: mol_type = other DNA
atctggttcaaacatagctcattgctcggcgaaatgccgcaagagcgccgtctggataccttgtgtgaactgaac

SEQ ID NO: 688759 - DNA, 75 bp, synthetic construct
  source 1..75: mol_type = other DNA
aaccgcgaaacccttgagcaacgttaccgtcacgggatctccaacctcaagctgaagcacatcaatcacaaataa

SEQ ID NO: 688760 - DNA, 75 bp, synthetic construct
  source 1..75: mol_type = other DNA
agcagcccggcatttttgaagcgcctggatacccagctttctccgccacccgttcaggtgcttctctctgctggc

SEQ ID NO: 688761 - DNA, 75 bp, synthetic construct
  source 1..75: mol_type = other DNA
gctgaacatcaccaacaacatcccgacatctcgttgctggatgcctggcttgatttcgccgcgattaaatatcag

SEQ ID NO: 688762 - DNA, 75 bp, synthetic construct
  source 1..75: mol_type = other DNA
gacggcattagcattgtttgatttgctcaggccaaattacgcatgggcgacccaggtggagtttaccgacccgga

SEQ ID NO: 688763 - DNA, 75 bp, synthetic construct
  source 1..75: mol_type = other DNA
gtggcagcattgtcagtatgcgcgatccgcagctttttcatgcaccagaagatgaaaagcaactgcgtaaaatca

SEQ ID NO: 688764 - DNA, 75 bp, synthetic construct
  source 1..75: mol_type = other DNA
gttgcaacgttcaccgaatattttgctgatccctgggacatcttccattgcgcacttgcgggagaatatggctgc

SEQ ID NO: 688765 - DNA, 75 bp, synthetic construct
  source 1..75: mol_type = other DNA
taacctgccaaagatagaacaaaaagggagcgttggtgtgttctggcgaaataatattccactctcgtatgcctt

SEQ ID NO: 688766 - DNA, 75 bp, synthetic construct
  source 1..75: mol_type = other DNA
ggtttcgccagggcatcgggtatggctgcgcgttaatccggggtttggtcacggacatagccaaaaaaccaatac

SEQ ID NO: 688767 - DNA, 75 bp, synthetic construct
  source 1..75: mol_type = other DNA
gtacaccgatcttcccgccgcactggaagtgatacagcggcatcaattgcagctggtcggcattcacatgcacat

SEQ ID NO: 688768 - DNA, 75 bp, synthetic construct
  source 1..75: mol_type = other DNA
ataccgatctcaccgccgaaaatctgctgcgtttgcccgcagaatttggctgcccggtgtgggtctacgatgcgc

SEQ ID NO: 688769 - DNA, 75 bp, synthetic construct
  source 1..75: mol_type = other DNA
attacagctgcggaatatttcgattcattccctgacatggggcggaaaaatgccgaggttcagttacaggaagca

SEQ ID NO: 688770 - DNA, 75 bp, synthetic construct
  source 1..75: mol_type = other DNA
ccgggaaaatggacgtcaaaggcaccggcgcattaaccgatatgcctgataacgttatgtccgtctggcgcaaca

SEQ ID NO: 688771 - DNA, 75 bp, synthetic construct
  source 1..75: mol_type = other DNA
tgaatcgggcgatgtttttacccagcaggaggggggaaatgtcgaaacccgcgctttgccggaagtgaaggcggg

SEQ ID NO: 688772 - DNA, 75 bp, synthetic construct
  source 1..75: mol_type = other DNA
catttcgcgttaatcagccgcaggatcttggcattgcattggcacgcgctatccgggtctcagtatcgggtcgcc

SEQ ID NO: 688773 - DNA, 75 bp, synthetic construct
  source 1..75: mol_type = other DNA
tttcgtcatgagcagtcggcaggctatgccgctgcggcaagcggttttcttacccaaaaaccagggatctgcctg

SEQ ID NO: 688774 - DNA, 75 bp, synthetic construct
  source 1..75: mol_type = other DNA
tggcacctggggggttatgggcatcggtatgggttatgctatcggcgcgagtgtaacctctggttccccagttgt

SEQ ID NO: 688775 - DNA, 72 bp, synthetic construct
  source 1..72: mol_type = other DNA
atgcggcgtgatgaactgaaccccaaaacctggacagtttcagttaaccggctttttgatactcagtccggt

SEQ ID NO: 688776 - DNA, 75 bp, synthetic construct
  source 1..75: mol_type = other DNA
gaactgaaccccaaaacctggacagtttcagttaaccggctttttgatactcagtccggtattctaccgggctga

SEQ ID NO: 688777 - DNA, 75 bp, synthetic construct
  source 1..75: mol_type = other DNA
tgtaggcctgataagacgcgctatgaactgaaccccaaaacctggacagtttcagttaaccggctttttgatgct

SEQ ID NO: 688778 - DNA, 75 bp, synthetic construct
  source 1..75: mol_type = other DNA
accgaggatgaaatctggcagtacatcggcacggcatcctactttgatcctgaagaactctacagcgcgcgagag

SEQ ID NO: 688779 - DNA, 75 bp, synthetic construct
  source 1..75: mol_type = other DNA
cgggctgccggaattcagcgccatccgcgaagaaattaacaaagccagccacccgtcacagcctgagctgaactg

SEQ ID NO: 688780 - DNA, 75 bp, synthetic construct
  source 1..75: mol_type = other DNA
ggcatcttccacaccagaagcggtagtgcctcccctgcccggcctgtctgatatgaaagtggaagtgcgcagtct

SEQ ID NO: 688781 - DNA, 75 bp, synthetic construct
  source 1..75: mol_type = other DNA
ttgatgtatgtggttggtactgtgtaccagttaaagatcataattcagttatagttcaactgtcctgcaaacaac

SEQ ID NO: 688782 - DNA, 75 bp, synthetic construct
  source 1..75: mol_type = other DNA
ccagccagggacaactggtgatcctcaacctgccaaagatagaacagaaaggcagcgtcggtgtgttctggcgca

SEQ ID NO: 688783 - DNA, 75 bp, synthetic construct
  source 1..75: mol_type = other DNA
atggtggtctggcagcctgagttcacagataaaacactctcccggaaaaccggggcggttcaatccgacctacca

SEQ ID NO: 688784 - DNA, 75 bp, synthetic construct
  source 1..75: mol_type = other DNA
ggcgtgttaagtcgctggttgttgctgaaaaatcactctctaccggaaacggcaattattgataaaggggtcggg

SEQ ID NO: 688785 - DNA, 75 bp, synthetic construct
  source 1..75: mol_type = other DNA
tcattctcaaggatgacgagaagcgtgaggagttccgctggatccagtatcgggcacagtacgctaaaggcgagg

SEQ ID NO: 688786 - DNA, 75 bp, synthetic construct
  source 1..75: mol_type = other DNA
aggacgacgagaagcgcgaggagttccgctggattcagtatcgggcacagtacgcgaggggagaggggaaagcac

SEQ ID NO: 688787 - DNA, 75 bp, synthetic construct
  source 1..75: mol_type = other DNA
gccggatgaacaaaaaaccatgaccatcacggccgcagagtttcatgatgcttttcctgacatgggacggcagca

SEQ ID NO: 688788 - DNA, 75 bp, synthetic construct
  source 1..75: mol_type = other DNA
tgtgataaatatcaaacatataaatctcttaaccaacagttattaaaaccctgcattgatgaattaaacctgaaa

SEQ ID NO: 688789 - DNA, 75 bp, synthetic construct
  source 1..75: mol_type = other DNA
agaggaatttcgttggatacaacgtcgtgcgcaatacctgaaaggcgaagcaaaggtacagatcactttttctga

SEQ ID NO: 688790 - DNA, 75 bp, synthetic construct
  source 1..75: mol_type = other DNA
agaatgacgagaagcgtgaggagttccgctggatccagtatcgagcacagtacgctaaaggtgaggccaaggctc

SEQ ID NO: 688791 - DNA, 75 bp, synthetic construct
  source 1..75: mol_type = other DNA
gtcggacggaaaacttccttaaccgtacgttgtatgcaaccgcagatgacaggcctgcggatgatcctgatgggc

SEQ ID NO: 688792 - DNA, 75 bp, synthetic construct
  source 1..75: mol_type = other DNA
ggggatgctgatgcttatcagccatttttacgaaaaccgctcgtcggttacggaagtggagaaactcgacatgcc

SEQ ID NO: 688793 - DNA, 75 bp, synthetic construct
  source 1..75: mol_type = other DNA
atgattcaaagggatattgaatactcgggacaatattcaaaggatgtaaaacttgcacaaaagcgtcataaggat

SEQ ID NO: 688794 - DNA, 75 bp, synthetic construct
  source 1..75: mol_type = other DNA
catgaccttcagtgaagggaacacctttaatcaggagcagctgaacggtcgtgcgcaggtcgtggttctcgacag

SEQ ID NO: 688795 - DNA, 75 bp, synthetic construct
  source 1..75: mol_type = other DNA
gcgcaccggctgcggggcgggccagtccattatgggaccgttctattgcccggcggatggcacggtttatatcga

SEQ ID NO: 688796 - DNA, 75 bp, synthetic construct
  source 1..75: mol_type = other DNA
cggcggatggcacggtctatatcgatctctccttctatgatgacatgaaagacaagctgggcgcggatggcgatt

SEQ ID NO: 688797 - DNA, 75 bp, synthetic construct
  source 1..75: mol_type = other DNA
tgctgggctttggcttaatttcttcggcctgggccactgaaaccgtgaatatccatgagcgggtcaacaatgcac

SEQ ID NO: 688798 - DNA, 75 bp, synthetic construct
  source 1..75: mol_type = other DNA
tcacttctgcaaactaacgccagaacaagtgaaatcaatatataaatcaaaaggcaaatacagagatatagccaa

SEQ ID NO: 688799 - DNA, 75 bp, synthetic construct
  source 1..75: mol_type = other DNA
ccataataattggtgccatattatccggccctgcatcatttgcagaatctatagcagtaacctcggttaaagctg

SEQ ID NO: 688800 - DNA, 75 bp, synthetic construct
  source 1..75: mol_type = other DNA
ttgcccgtgccaaagcgcgcaagctggagcagcaacaggctaatgccgagccagaacaacaggtcgatccgcgca

SEQ ID NO: 688801 - DNA, 75 bp, synthetic construct
  source 1..75: mol_type = other DNA
ccatgaatttatgaataacggtcagtccggcccacatcaggccatggccgaagcgcatcgtcgtatgctcaatgc

SEQ ID NO: 688802 - DNA, 75 bp, synthetic construct
  source 1..75: mol_type = other DNA
aagtcagaccgtttcccctaccgggccgtcgggtaatgactccaacttattgatagtgttttatgttcagataat

SEQ ID NO: 688803 - DNA, 75 bp, synthetic construct
  source 1..75: mol_type = other DNA
gggcagtcgtggctgaactccattactgtcagggtgaaagaaggctttgacagcgctgaggcggaacagcaactc

SEQ ID NO: 688804 - DNA, 75 bp, synthetic construct
  source 1..75: mol_type = other DNA
aaaatgattcgcgtcgccgttcaggagtatattatttaaatgcttataaagatgcatatgtacaatataataggg

SEQ ID NO: 688805 - DNA, 75 bp, synthetic construct
  source 1..75: mol_type = other DNA
cctggtgatgaagtggaattgattggggctgaactggtggcggaatacaaaatgactgaaggagaaaacggaggg

SEQ ID NO: 688806 - DNA, 75 bp, synthetic construct
  source 1..75: mol_type = other DNA
tttgatgcaaaacaccttgaagatctaaataaagtcagaggctttgtttttgcttcgctggtgcttaatcctttc

SEQ ID NO: 688807 - DNA, 75 bp, synthetic construct
  source 1..75: mol_type = other DNA
catgaaaatagcggtgctgtgcttaacgaaaaacttataaacaaccagcttgatatggcggtggtttatgagcat

SEQ ID NO: 688808 - DNA, 75 bp, synthetic construct
  source 1..75: mol_type = other DNA
acgccggaaaaattctctatacccatgcgcgggcaattttacgtcagtgtgaacaggcccaactggcggtgcata

SEQ ID NO: 688809 - DNA, 75 bp, synthetic construct
  source 1..75: mol_type = other DNA
tatttaattaataatttgcctgcgcgtgatacagatgattataaattcatctcttatggtatgaggttgttagag

SEQ ID NO: 688810 - DNA, 75 bp, synthetic construct
  source 1..75: mol_type = other DNA
gacacaggaacattcatcatactgtactgtatacagccagtaatcctggtcgttttaatcgggtctggcgaagtt

SEQ ID NO: 688811 - DNA, 75 bp, synthetic construct
  source 1..75: mol_type = other DNA
aacagttattttagcaaaaatggaataaaacaaaaagacacaaataaatataacacatatttcttcaattacttt

SEQ ID NO: 688812 - DNA, 75 bp, synthetic construct
  source 1..75: mol_type = other DNA
gttgggatgtcggtggcaatgctgaaatagcctcaccatcaattatatcagtaattgattatgaagatgtattcg

SEQ ID NO: 688813 - DNA, 75 bp, synthetic construct
  source 1..75: mol_type = other DNA
taaagaaattggacaattcgcaggtaaacgcggcgcatgtttccgtgtggctactgaagacgacgcgcacgttaa

SEQ ID NO: 688814 - DNA, 75 bp, synthetic construct
  source 1..75: mol_type = other DNA
ttttccgtggcactatttcagaagatgaaaaaaatggcaaattcgccgggcaacctggcgcatgtttccgtgtag

SEQ ID NO: 688815 - DNA, 75 bp, synthetic construct
  source 1..75: mol_type = other DNA
ttttccgtggtactttaccgaacgaagaaagattgggggaattcgccgggcaacctggcgcatgtttccgtgtag

SEQ ID NO: 688816 - DNA, 75 bp, synthetic construct
  source 1..75: mol_type = other DNA
gtggacggtctgtcagacggtgaatttatccagacaggacgtattgctgcaggcgcttatgattacatgctgggg

SEQ ID NO: 688817 - DNA, 75 bp, synthetic construct
  source 1..75: mol_type = other DNA
ttgagaagacccgcgatgcaattaccgcgctggccgtggaacggtgtcaggcgcttaaaaaggatcaccctctgg

SEQ ID NO: 688818 - DNA, 75 bp, synthetic construct
  source 1..75: mol_type = other DNA
tgaggaatacgaagggtttgatccttctaaatcaacagccgcagcgcgtggacgcaactttgcccaggttggcaa

SEQ ID NO: 688819 - DNA, 75 bp, synthetic construct
  source 1..75: mol_type = other DNA
ataacgagacatacgagccgccattccggggcgctatcgtgatagcacagaatgcggatacagacggcagcaagg

SEQ ID NO: 688820 - DNA, 75 bp, synthetic construct
  source 1..75: mol_type = other DNA
cgttcccggatggtgctacggtgaaaaacacctttacatcaggacaattaacatccgcatctgaatttaaaaaac

SEQ ID NO: 688821 - DNA, 75 bp, synthetic construct
  source 1..75: mol_type = other DNA
gccttaaccagaatggcattgcggccgtttctgtcatgtctgccgtgaattatcctgatgaggcgctggaagaac

SEQ ID NO: 688822 - DNA, 75 bp, synthetic construct
  source 1..75: mol_type = other DNA
ggcatcaatcattcatcagatgaaaatgaaatcgcggttaatttcaatcacatggaagaggtcgccgcagcacac

SEQ ID NO: 688823 - DNA, 75 bp, synthetic construct
  source 1..75: mol_type = other DNA
agcgcatcattgaccagccagaccgtttcaaacagaaggcgcatttctcaggcaattacggtggtcactggtggg

SEQ ID NO: 688824 - DNA, 75 bp, synthetic construct
  source 1..75: mol_type = other DNA
atataccgccagagccgttcacgcgggtcattgtcgcattgcaaactcacgtgccgctgactcagtggcagccgt

SEQ ID NO: 688825 - DNA, 75 bp, synthetic construct
  source 1..75: mol_type = other DNA
cgccttgctatcgaccgagcctttaccgtaaagggcgcggggctggtggtgaccggcacggcgttaagtggggaa

SEQ ID NO: 688826 - DNA, 75 bp, synthetic construct
  source 1..75: mol_type = other DNA
gcctgtagtgctgatagaaggtgaccgcaccacggataatgctaaacagcgcgcttttgactgggatgagctgaa

SEQ ID NO: 688827 - DNA, 75 bp, synthetic construct
  source 1..75: mol_type = other DNA
ggaagccaaggcgcgggcagtgaaagaatctggctgcgtgactgaaatcgccaactgctggctgactccgttgta

SEQ ID NO: 688828 - DNA, 75 bp, synthetic construct
  source 1..75: mol_type = other DNA
ggtatttttaacgctctcagtttatgccaggccggtttacccgctgtggctacactcagtagcaataactatcct

SEQ ID NO: 688829 - DNA, 75 bp, synthetic construct
  source 1..75: mol_type = other DNA
tgatggagttctgggaggcgttcgacttcctggacggcataacaaaatacggtgtaaaccactacggcaagggat

SEQ ID NO: 688830 - DNA, 75 bp, synthetic construct
  source 1..75: mol_type = other DNA
actggcatatgcagccagcgtttcagcatacggctgcccatcggcgtgacggtgcagtcgagcacagaagccagc

SEQ ID NO: 688831 - DNA, 75 bp, synthetic construct
  source 1..75: mol_type = other DNA
actgctaatggtgcaggaggctggaatatagcggacattccactcgattttaaattgagaaacgctcagcagttt

SEQ ID NO: 688832 - DNA, 75 bp, synthetic construct
  source 1..75: mol_type = other DNA
ggacaacctgacacgagaacaaatccgcatcagttcgctgattgcgtgggagcttcacgacattaaagagcagat

SEQ ID NO: 688833 - DNA, 75 bp, synthetic construct
  source 1..75: mol_type = other DNA
aagccagaaacaaagccagaaacaaagccagaaacaaagccagaaacaaagccagaaacaaaaccagaaacaaaa

SEQ ID NO: 688834 - DNA, 75 bp, synthetic construct
  source 1..75: mol_type = other DNA
caactggataagccagttgatgacgtcagccgtatgcttcgtcttaacgagcgcattacctcggtagacacccct

SEQ ID NO: 688835 - DNA, 75 bp, synthetic construct
  source 1..75: mol_type = other DNA
gtgtgttggacgcgactcagctttaccggtgagattggttattcaccactgttaacggccgaagaagaagtttat

SEQ ID NO: 688836 - DNA, 75 bp, synthetic construct
  source 1..75: mol_type = other DNA
ttattaaccgtcttattcgtgattacaactttaaagaagaaaataactatcttcgctatggtgtttgtccgcaat

SEQ ID NO: 688837 - DNA, 75 bp, synthetic construct
  source 1..75: mol_type = other DNA
cagacctgctgaccaaagaactttacccggatgtgttttcatcatggtcagatcgctatatcagcacgaaagacg

SEQ ID NO: 688838 - DNA, 75 bp, synthetic construct
  source 1..75: mol_type = other DNA
catatacaccgataaaaaacgccattcacctgatacccgactggcggcgagacggctggaactctaccccgtcga

SEQ ID NO: 688839 - DNA, 75 bp, synthetic construct
  source 1..75: mol_type = other DNA
gaggcgtcagcagtaaacccatccgtgaacgtctctcccgggcagcagactcaccaacccgcgaggcatatgaca

SEQ ID NO: 688840 - DNA, 75 bp, synthetic construct
  source 1..75: mol_type = other DNA
ctcagaaaaactggccaccgtcattgcccaggacgggcaggccacccgtcagcagatgatattcagtaatgaaac

SEQ ID NO: 688841 - DNA, 75 bp, synthetic construct
  source 1..75: mol_type = other DNA
atcatgaagaagtacaagcctaagaaatcccgaaccaaacgcgctaggaatggatcggcggtggcaaaacgtcgc

SEQ ID NO: 688842 - DNA, 75 bp, synthetic construct
  source 1..75: mol_type = other DNA
atgctgacgaaatatgcccttgtggcagtcatagtgctgtgtttgacggtcctgggatttacgcttctggtcggg

SEQ ID NO: 688843 - DNA, 75 bp, synthetic construct
  source 1..75: mol_type = other DNA
atgctgacgaaatatgcccttgtggcagtcatagtgctgtgtttcacggtcctgggatttacgcttctggtcggc

SEQ ID NO: 688844 - DNA, 75 bp, synthetic construct
  source 1..75: mol_type = other DNA
atgctgacgaaatatgcccttgtggcagtcatagtgctgtgtttaacggtcctgggatttacgcttctggtcgga

SEQ ID NO: 688845 - DNA, 75 bp, synthetic construct
  source 1..75: mol_type = other DNA
cacgccggagcaggcgaagattgctgacgtacagttgccgccgggcgtctggcatgaggatgagttttacggcaa

SEQ ID NO: 688846 - DNA, 75 bp, synthetic construct
  source 1..75: mol_type = other DNA
actgggattcacgttgatggtaggcgactcgttgtgtgagttgagtatcagagaacgtggtatggagtttaaggc

SEQ ID NO: 688847 - DNA, 75 bp, synthetic construct
  source 1..75: mol_type = other DNA
atgctgacgaaatatgcccttgtggcagtcatagtgctgtgtttgacggtgctgggatttacgcttctggtcggc

SEQ ID NO: 688848 - DNA, 75 bp, synthetic construct
  source 1..75: mol_type = other DNA
ttcttcattaaaacgtcataaggctaatattacagtttatattgatggtattgctgcatcggctgcaaccattat

SEQ ID NO: 688849 - DNA, 75 bp, synthetic construct
  source 1..75: mol_type = other DNA
aaccatatcttcccggcggttggtcacctgcccgttgctgcgcttaaaacgcaggatttcaccgcactgctgcgg

SEQ ID NO: 688850 - DNA, 75 bp, synthetic construct
  source 1..75: mol_type = other DNA
tccccggcgaccataacccgtataaaccgatgagtgaaaacactatcaaccgggcgctgcgtctgatgggttacg

SEQ ID NO: 688851 - DNA, 75 bp, synthetic construct
  source 1..75: mol_type = other DNA
atgctgacgaaatatgcccttgtggcagtcatagtgctgtgtttaacggtactgggatttacgcttctggtcggc

SEQ ID NO: 688852 - DNA, 75 bp, synthetic construct
  source 1..75: mol_type = other DNA
aatatgacctgttggggagtggaaaagcggcttcagttagcgcaaagttggtgcctcaacaggtctttgattatt

SEQ ID NO: 688853 - DNA, 75 bp, synthetic construct
  source 1..75: mol_type = other DNA
accgcagcactttgctttttcagagactttaaaattatgggttgtgccataccggataatggcaaaacgtggtga

SEQ ID NO: 688854 - DNA, 75 bp, synthetic construct
  source 1..75: mol_type = other DNA
aactaccgtatctcaccagcaggcactgctggaatgcctgaagtctcatcatccatatcaaaaccccggaacttc

SEQ ID NO: 688855 - DNA, 75 bp, synthetic construct
  source 1..75: mol_type = other DNA
ataccgatataacacaccatcagcctaatgggcgacaagggagagacagtccgttaatgggtgatgctgccaact

SEQ ID NO: 688856 - DNA, 75 bp, synthetic construct
  source 1..75: mol_type = other DNA
acctccaacacaaccgaaaagagtttgattgtggtatcaatgaattgaaccagttcttgcagcaacaagcccggc

SEQ ID NO: 688857 - DNA, 75 bp, synthetic construct
  source 1..75: mol_type = other DNA
gtcaactgcaacaaaacgcgacgcaggcggaagtgaaccgcttatctgtgcgtatggaactccaggccgactgtt

SEQ ID NO: 688858 - DNA, 75 bp, synthetic construct
  source 1..75: mol_type = other DNA
actgactgttattaaccataatttttatgcattactggcaataccgttaatttccattatcgggaatatccgttt

SEQ ID NO: 688859 - DNA, 75 bp, synthetic construct
  source 1..75: mol_type = other DNA
atctctccaccgcttacacctacgccaaacatcgccctgaccacgctgacgatgaaaccacctctttcatgcagt

SEQ ID NO: 688860 - DNA, 75 bp, synthetic construct
  source 1..75: mol_type = other DNA
gggctggacgtaccgggaagtgaaagcgggatgatggtgagcgccatgtatgaagcgttaaaaggcgtttatctc

SEQ ID NO: 688861 - DNA, 75 bp, synthetic construct
  source 1..75: mol_type = other DNA
cctggggattacgcttgtggtcggcgcttggcgtcgcgttctttggctgggcgtttgtcaccagcttacaagcca

SEQ ID NO: 688862 - DNA, 75 bp, synthetic construct
  source 1..75: mol_type = other DNA
agttccaggcggcgctacagcatccttacgtgcttatcggcctcgctatcgtctttaccttgctggcgatgtcga

SEQ ID NO: 688863 - DNA, 75 bp, synthetic construct
  source 1..75: mol_type = other DNA
tacttaccagggatgcgccgacgccggtttctgttatccgccagaaactaaaatagtgccgttaagcgaagtgct

SEQ ID NO: 688864 - DNA, 75 bp, synthetic construct
  source 1..75: mol_type = other DNA
ggagcatccacaagcacgcgtcacgggctttatggatgctgaaaccttcagcgcacatttgcgcgatcgccaacc

SEQ ID NO: 688865 - DNA, 75 bp, synthetic construct
  source 1..75: mol_type = other DNA
cctgtaaagagtttgagaaatacaccttcagcgacccgcaggtgcaaaaagcgttagcagacacggtcttacttc

SEQ ID NO: 688866 - DNA, 75 bp, synthetic construct
  source 1..75: mol_type = other DNA
taccgcgcaaactcagacgcatctcaactttacacaaatcaaaacggtagatgagttaaatcaggcgctcgttga

SEQ ID NO: 688867 - DNA, 75 bp, synthetic construct
  source 1..75: mol_type = other DNA
gcagcatttcactgcgttactgcgggttattgaggataaaggttttctggaagtcgcgtcccgtacccggcagca

SEQ ID NO: 688868 - DNA, 75 bp, synthetic construct
  source 1..75: mol_type = other DNA
gcacgaataaacaaaaagtgttcagcgtggcccccatccacctgaatggtgagctgcgcggctatttgtacatca

SEQ ID NO: 688869 - DNA, 75 bp, synthetic construct
  source 1..75: mol_type = other DNA
gcttctggtcagattcgtcaggtgactgatggtcgcagcaacaacaccgaaccgacctggttcccggacagccag

SEQ ID NO: 688870 - DNA, 75 bp, synthetic construct
  source 1..75: mol_type = other DNA
acttgttgacactggcggcgcaccgggtactgtacttgctcagaactcgtacaaagtgaacaagcagtggctgcg

SEQ ID NO: 688871 - DNA, 75 bp, synthetic construct
  source 1..75: mol_type = other DNA
atgaataaaatcttgttagttgatgatgaccgagagctaacgtccctgttaaaggaactgctcgagatggaaggt

SEQ ID NO: 688872 - DNA, 75 bp, synthetic construct
  source 1..75: mol_type = other DNA
cccgtattcgcgcgattctgcgccgttcgcactggagcgagcagcaacagcaaaacaacgacaacggttctccga

SEQ ID NO: 688873 - DNA, 75 bp, synthetic construct
  source 1..75: mol_type = other DNA
tgcgggcgcaattgttccagcgaccatcagcgctcagccaaaaagcctcacgcgaaacgcggggggactggggct

SEQ ID NO: 688874 - DNA, 75 bp, synthetic construct
  source 1..75: mol_type = other DNA
cagtgattacagcgctgttagacttcgtgttgatgaggctttttccctacggcggctcacggcaaaagtcattgg

SEQ ID NO: 688875 - DNA, 75 bp, synthetic construct
  source 1..75: mol_type = other DNA
atgattttatggctgattagcggcaacatgaacttcagacgcctgaaatacttcgtaaaaattgtagatattggt

SEQ ID NO: 688876 - DNA, 75 bp, synthetic construct
  source 1..75: mol_type = other DNA
gccggcttacagcgaaagtcatcggtgaaattgagtctatcgctacgcttaccgctgcgattgccagcggtatgg

SEQ ID NO: 688877 - DNA, 75 bp, synthetic construct
  source 1..75: mol_type = other DNA
ctgccacagcagccgggtagtgcgcaggaagtacaaccagctgcatggtccgcactgggcattgacgctgtagtt

SEQ ID NO: 688878 - DNA, 75 bp, synthetic construct
  source 1..75: mol_type = other DNA
catccacatcgtaccggcaatcagagcggtgaaacggtgcagattatggcgttatgcgactgtcaggcactcgct

SEQ ID NO: 688879 - DNA, 75 bp, synthetic construct
  source 1..75: mol_type = other DNA
ttttgatgcaaaaaggaaaggttgtcgcaaatggcaaaccgcaggacgtattgacacaacaggcgctgacaatgc

SEQ ID NO: 688880 - DNA, 75 bp, synthetic construct
  source 1..75: mol_type = other DNA
caggctgatgccagccattatttttccgatgagtttcagccgttattaaataccgaaggtccggtgaaatatgtt

SEQ ID NO: 688881 - DNA, 75 bp, synthetic construct
  source 1..75: mol_type = other DNA
gattttgagcatcctcgtaaaggtgcgagcggctggtgggagtggaagccgcataaacgtcatctggaagggctc

SEQ ID NO: 688882 - DNA, 75 bp, synthetic construct
  source 1..75: mol_type = other DNA
agtcactatagcggagggtaatagccagcaggctgcgttacttgtagataactacatacagcgtcttgagaataa

SEQ ID NO: 688883 - DNA, 75 bp, synthetic construct
  source 1..75: mol_type = other DNA
gttggtcgagcggcggcgcgcggcgttggcccatctggacgcgcaactggcctccatgccagccgagcgggcgca

SEQ ID NO: 688884 - DNA, 75 bp, synthetic construct
  source 1..75: mol_type = other DNA
ttgtgccactttcccgacaggccattgccattctgaagcagatacaggatatctcaggtcatctggatctggtgt

SEQ ID NO: 688885 - DNA, 75 bp, synthetic construct
  source 1..75: mol_type = other DNA
agagcgcattctcgccagcatgaataaccatatatttccggcgattggtcatctgcccgttaccacgctgaaaac

SEQ ID NO: 688886 - DNA, 75 bp, synthetic construct
  source 1..75: mol_type = other DNA
attgcgctgggtgcctatccagccatctccctgtctgatgcgcgacagcaacgtgaaggtatccgtaaaatgctg

SEQ ID NO: 688887 - DNA, 75 bp, synthetic construct
  source 1..75: mol_type = other DNA
aaaaaacagtgctcgccgcagaccggtgaccgggcgaagcccgcgaaccggcgaggaagcgcaatatatctgtag

SEQ ID NO: 688888 - DNA, 75 bp, synthetic construct
  source 1..75: mol_type = other DNA
cacggtctgacgcaactacaggcaaaacaggaattaggcgcgttgattgctgcctgccgccgggaacatgtgttt

SEQ ID NO: 688889 - DNA, 75 bp, synthetic construct
  source 1..75: mol_type = other DNA
atgaaaaagaaatcatcacttagcgaggaggaccaggcgctttttcgccagttgatggcgggaacccgccagata

SEQ ID NO: 688890 - DNA, 75 bp, synthetic construct
  source 1..75: mol_type = other DNA
ggcgaagcccgcgaaccggcgaggaagcgcaatgtatctgtcgttacagggagcaggtacgccctgaagcccttt

SEQ ID NO: 688891 - DNA, 75 bp, synthetic construct
  source 1..75: mol_type = other DNA
accgggcgaagcccgcgaaccggcgaggaagcgcaatgtatctgtagttacagtgagcaggtacgccctgaagcc

SEQ ID NO: 688892 - DNA, 75 bp, synthetic construct
  source 1..75: mol_type = other DNA
tttctggaatgatttatccacatatccggaggcccgatccagtaaacagatccatgaatgatcaacaaaggatcc

SEQ ID NO: 688893 - DNA, 75 bp, synthetic construct
  source 1..75: mol_type = other DNA
atatttttagcgttatttatgatggcacccaacctaaccccaccacggaaaacgtcgccgcaggtttgaaattac

SEQ ID NO: 688894 - DNA, 75 bp, synthetic construct
  source 1..75: mol_type = other DNA
gggcggtttctcccccacgctccgttcttcgccgcggcagccttgaacggcctcaatttcctgacgggctgtttc

SEQ ID NO: 688895 - DNA, 75 bp, synthetic construct
  source 1..75: mol_type = other DNA
gatatgcaggttaatcctgacaatatcatgtgggattatcgtggcggtaaactcgatatcaacggtaatagtctt

SEQ ID NO: 688896 - DNA, 75 bp, synthetic construct
  source 1..75: mol_type = other DNA
atctggttcactcgaacgacgtcaccgcccactatggcattctgctggcgctgtatgcgttgatgcaatttgcct

SEQ ID NO: 688897 - DNA, 75 bp, synthetic construct
  source 1..75: mol_type = other DNA
gagattatggggattcgccatcgccagtgggatctggaaggggtgcagttccatccagaaagtattcttagcgaa

SEQ ID NO: 688898 - DNA, 75 bp, synthetic construct
  source 1..75: mol_type = other DNA
cgcagtggctatatcgacgtgtcgattgtgccggaagagctgggatttgcggtgaacgtcggcgaactgctgatg

SEQ ID NO: 688899 - DNA, 75 bp, synthetic construct
  source 1..75: mol_type = other DNA
atttgcggtgaacgtcggcgaactgctgatgaccgaatgtgaaatggtcaacggttttatcgacccaccggatga

SEQ ID NO: 688900 - DNA, 75 bp, synthetic construct
  source 1..75: mol_type = other DNA
tcatgtgggattatcgtggcggtaaactcgatatcaacggtaatagtcttaccttccatcagcttaagggagccg

SEQ ID NO: 688901 - DNA, 75 bp, synthetic construct
  source 1..75: mol_type = other DNA
atccaggatactttagtcgctcttctcttaatattggagataatgcaactctgacctctactgccggattttact

SEQ ID NO: 688902 - DNA, 75 bp, synthetic construct
  source 1..75: mol_type = other DNA
tctcaaaaagtatattgctgaccttgaatctcaggttggtaccacatcacgacgccaggggcctgcaaggtttta

SEQ ID NO: 688903 - DNA, 75 bp, synthetic construct
  source 1..75: mol_type = other DNA
gagggttagatgaagctattttgggatgttcagatacggaaaatagcccagctgatacccatacagtttttgcta

SEQ ID NO: 688904 - DNA, 75 bp, synthetic construct
  source 1..75: mol_type = other DNA
atgaatgctccgtttacatattcatcgcccacgcttagcgtagaagctcttaagcactctatcgcttacaagctg

SEQ ID NO: 688905 - DNA, 75 bp, synthetic construct
  source 1..75: mol_type = other DNA
cgcctccgggtatgcgggttatggaaacgcgatccagcggttttgatataaatcacgatgttggctatacgcata

SEQ ID NO: 688906 - DNA, 75 bp, synthetic construct
  source 1..75: mol_type = other DNA
agctaccgcgccaaaagttgatggtgagatcaaggtatcatttataaatatgccaccaggtatgcgggttacgga

SEQ ID NO: 688907 - DNA, 75 bp, synthetic construct
  source 1..75: mol_type = other DNA
gattacttcgcggcggtggaggacaaaaaccactccgagaacgtttcccgcgtgctttacccggatgattccacc

SEQ ID NO: 688908 - DNA, 75 bp, synthetic construct
  source 1..75: mol_type = other DNA
ggagtgcccaagccagtagcgaaattaaccttggtaaattcaaccagggcgactacttcgcggcagtggaagata

SEQ ID NO: 688909 - DNA, 75 bp, synthetic construct
  source 1..75: mol_type = other DNA
ataaaatcgcgattcatctcaatgatacccatccggtactgtcgattcctgagatgatgcgtctgctgatcgatg

SEQ ID NO: 688910 - DNA, 75 bp, synthetic construct
  source 1..75: mol_type = other DNA
tttttgcctggtcgccgctggggatggtaatcaataactggggaccggttgttaagtggtttcaggatatgtggg

SEQ ID NO: 688911 - DNA, 75 bp, synthetic construct
  source 1..75: mol_type = other DNA
ttcaggacatcaataaactggctattggcctgggtaaccagctacccggtacaacggctgattttcagaacatga

SEQ ID NO: 688912 - DNA, 75 bp, synthetic construct
  source 1..75: mol_type = other DNA
tggaaattcatgacttcgctattgatgccataaatgaaaagcgcgatcacttatgctgccgtgcagttgaaaaaa

SEQ ID NO: 688913 - DNA, 75 bp, synthetic construct
  source 1..75: mol_type = other DNA
ataactggggcccaatcgtgaaatggttccaggacatgtgggaaaagctgaggcccatcattgagtggttctctg

SEQ ID NO: 688914 - DNA, 75 bp, synthetic construct
  source 1..75: mol_type = other DNA
acccttcaggtggtcaatgcgctgatcgataaaggaaaggatggctacgatcagatccagcagaagatgaataaa

SEQ ID NO: 688915 - DNA, 75 bp, synthetic construct
  source 1..75: mol_type = other DNA
cagaaactcggggtgcagctcgattttactgacggcaaagggagttttggcggtcttgataacatgtttaagcaa

SEQ ID NO: 688916 - DNA, 75 bp, synthetic construct
  source 1..75: mol_type = other DNA
gcgcagaagtggctggaagaggtggagattcccgccaaccggatcgacgacctgccgaccaccttttccggcggt

SEQ ID NO: 688917 - DNA, 75 bp, synthetic construct
  source 1..75: mol_type = other DNA
gccttcgttatggattttccgggacacatcgacgagctgatgctgccgctgattgtctggctcatgcacaaccag

SEQ ID NO: 688918 - DNA, 75 bp, synthetic construct
  source 1..75: mol_type = other DNA
gtacgtcatcaggcattttgtatacaggcgatatctacgcaccagaggctaatgtcagcattgataacacttcat

SEQ ID NO: 688919 - DNA, 75 bp, synthetic construct
  source 1..75: mol_type = other DNA
gttttcatcatggatttcacggaaagcatcgacaacatcatgctgccggtaatggcgtggctgtaccgcaaccag

SEQ ID NO: 688920 - DNA, 75 bp, synthetic construct
  source 1..75: mol_type = other DNA
atgaaacgacttctgattctgaagcgagtaaacttaaaggatatcttcagaggaggatacgcgatgaaacgactt

SEQ ID NO: 688921 - DNA, 75 bp, synthetic construct
  source 1..75: mol_type = other DNA
atgaaacgacttctgattcttacggcactcctgccgtttgtcggctttgcacagcccattaatactctgaacaac

SEQ ID NO: 688922 - DNA, 75 bp, synthetic construct
  source 1..75: mol_type = other DNA
tgctgtcaatgacgacgacagcaccgacctgttactggagattcccgtgcgcgagcgcgtgaaagtctgccgcaa

SEQ ID NO: 688923 - DNA, 75 bp, synthetic construct
  source 1..75: mol_type = other DNA
ctggcagaatatgtcgccggtcttcctgatgcgttgctaccggcacaacgcaaacgcaggaattacatcagcagt

SEQ ID NO: 688924 - DNA, 75 bp, synthetic construct
  source 1..75: mol_type = other DNA
ttattcccgtccgcgggacaggcaggatcgttcagcagaaatctacaggttttttatcaatgcgttgtatgttgc

SEQ ID NO: 688925 - DNA, 75 bp, synthetic construct
  source 1..75: mol_type = other DNA
tggggtctgcccataccctgtatgaggagttcaggggcgtgattggtgcggtcgcttccggcaacggaccgctgt

SEQ ID NO: 688926 - DNA, 75 bp, synthetic construct
  source 1..75: mol_type = other DNA
agtgaaaatcctgggagggaaaaaggatgtttataaatacagtgaagaggctgtcggatactgggcggagatgat

SEQ ID NO: 688927 - DNA, 75 bp, synthetic construct
  source 1..75: mol_type = other DNA
ctggcagagtgtgtggcccatcttccggaggcgctgctgccgggacgtcgcaaacgaaggagttatatcagcagc

SEQ ID NO: 688928 - DNA, 75 bp, synthetic construct
  source 1..75: mol_type = other DNA
cattttcgttgatgaagttcaggatatgacgcctgttcagctgcagctggtactgaaaacgttacgtcatcccgg

SEQ ID NO: 688929 - DNA, 75 bp, synthetic construct
  source 1..75: mol_type = other DNA
tccgatacttccatgcaagcggcaacacttgtgcatgactcattgaataacgctatcaatagattgcatttactc

SEQ ID NO: 688930 - DNA, 75 bp, synthetic construct
  source 1..75: mol_type = other DNA
gcactgggtgaactcgctcgcttaacgctggcgcaatggcaatcacaactgttgattcctgtcgcggttaaaccg

SEQ ID NO: 688931 - DNA, 75 bp, synthetic construct
  source 1..75: mol_type = other DNA
aaaagccgatatcgacatgttaagaaaaaattaggacgaaaggagggaagcaaataccgacgtgatatcacaata

SEQ ID NO: 688932 - DNA, 75 bp, synthetic construct
  source 1..75: mol_type = other DNA
tggtcgccgctggggatggtgatcaataactgggggccggttgttaagtggtttcaggatatgtgggacaagctg

SEQ ID NO: 688933 - DNA, 75 bp, synthetic construct
  source 1..75: mol_type = other DNA
tctaaggattcactgttatggtcctcctattcagcacactcatggcatctgaacgggaaggacccgaagctttct

SEQ ID NO: 688934 - DNA, 75 bp, synthetic construct
  source 1..75: mol_type = other DNA
atgaactgcgaaaaaatgaaaaaggatctgaaaaagaatctgaaacagagtaaagaagagaaggagaaaactatg

SEQ ID NO: 688935 - DNA, 75 bp, synthetic construct
  source 1..75: mol_type = other DNA
ttcacaaaacccaatatcgttatcaaacctaacgccaacagccgaccggcgataccactggttatctggctaatc

SEQ ID NO: 688936 - DNA, 75 bp, synthetic construct
  source 1..75: mol_type = other DNA
gacaaactggtatttattaccgataccgttcagccggtgatcaacaagggcggaactaaagccgacctgacattg

SEQ ID NO: 688937 - DNA, 75 bp, synthetic construct
  source 1..75: mol_type = other DNA
acctgctatccagcaaccgaatgtctccggtaccgtctggatccgtcagaaagtcgcactgccgcctgatgccgt

SEQ ID NO: 688938 - DNA, 75 bp, synthetic construct
  source 1..75: mol_type = other DNA
acgactaccgtaccttcaacttcaccaacccaggtgaatccgtcttcggcagttccagctcctacgcaatattaa

SEQ ID NO: 688939 - DNA, 75 bp, synthetic construct
  source 1..75: mol_type = other DNA
tcaccgatggcaaaggcagtttcggcggtattgataaaatgtttacgcagttatcgaaactcagaaaattaactg

SEQ ID NO: 688940 - DNA, 75 bp, synthetic construct
  source 1..75: mol_type = other DNA
tgggcttgggaatcagttacctggcacgactgctgattttcagaacatgatgcagatgcttgttcgccagggtat

SEQ ID NO: 688941 - DNA, 75 bp, synthetic construct
  source 1..75: mol_type = other DNA
gggaaccaaagccgacctgacattggttccggttcagcaaaccgccgtgcctgtccaggccagtggtggcgcaac

SEQ ID NO: 688942 - DNA, 75 bp, synthetic construct
  source 1..75: mol_type = other DNA
gggacaacatccgttttggactggagtttgagaaatccgcctttggtaagtacaacgttgataatgctgtcaacg

SEQ ID NO: 688943 - DNA, 75 bp, synthetic construct
  source 1..75: mol_type = other DNA
atttcttgctgtctgatgctggactgtgacgacgatatccgtcccggactggaggaacacttcagaaatgaactc

SEQ ID NO: 688944 - DNA, 75 bp, synthetic construct
  source 1..75: mol_type = other DNA
aaaacggcctggtatacaggtccggtcctttcaggcggaagtggatggaatatggcctgtgaagataacggggtg

SEQ ID NO: 688945 - DNA, 75 bp, synthetic construct
  source 1..75: mol_type = other DNA
tctgaatctgttcgatgactacgggctatggtgtaactatggtcagcttcatcgcgactttacctattgttacag

SEQ ID NO: 688946 - DNA, 75 bp, synthetic construct
  source 1..75: mol_type = other DNA
tgaacaacgcgttttacctggcggaaaacattgatctttacaaagaacaaaacacctggccatctgacgcgatga

SEQ ID NO: 688947 - DNA, 75 bp, synthetic construct
  source 1..75: mol_type = other DNA
ggctctccggtatcattaatttcagcccccggggggacatctcctgagttgttctctctgaagacggcaacccgc

SEQ ID NO: 688948 - DNA, 75 bp, synthetic construct
  source 1..75: mol_type = other DNA
ttaataatacatcttctgaaaaaattctctggacttttgacaatcaaaccggtaatgggaatctaacccaagggg

SEQ ID NO: 688949 - DNA, 75 bp, synthetic construct
  source 1..75: mol_type = other DNA
gcgatgatattgagggcttgttgaatgtagttaaacctgtcctgccagctgaggccagaccgagagtggtcattc

SEQ ID NO: 688950 - DNA, 75 bp, synthetic construct
  source 1..75: mol_type = other DNA
gtattgtgccgtttcgttttccataattttacaattttattactatgacggtgttttccccattcttaacctggc

SEQ ID NO: 688951 - DNA, 75 bp, synthetic construct
  source 1..75: mol_type = other DNA
ctctggattcctgttcgcttcctgctgatcgcgaacgttgtcatccagttttttaaaatgctttttaaatggagt

SEQ ID NO: 688952 - DNA, 75 bp, synthetic construct
  source 1..75: mol_type = other DNA
cgcagcgcggcggatctgcgtctgatgatgcgcgcattgagcacattctgggtggaaccgccgcgtattcccgat

SEQ ID NO: 688953 - DNA, 75 bp, synthetic construct
  source 1..75: mol_type = other DNA
gcgtaacgacgaaattggttacagaaacgctgtcgcacgtgcgtattatggtgcttatcaccacgtacttccgtg

SEQ ID NO: 688954 - DNA, 75 bp, synthetic construct
  source 1..75: mol_type = other DNA
tcacgatgttctacaaagaaatgggctgggacccacagcttggttgtccaacccgcgaaacattgcagcgtctgg

SEQ ID NO: 688955 - DNA, 75 bp, synthetic construct
  source 1..75: mol_type = other DNA
accgggtagctacgctattttcttcccgcaggatgttcaccgaccggcatgtaataaaaatgcccctacggcaat

SEQ ID NO: 688956 - DNA, 75 bp, synthetic construct
  source 1..75: mol_type = other DNA
cagcgaatcactattagagcagcgcgatattattttttatcacgatagtgaacatgaatcatttatagaaatggt

SEQ ID NO: 688957 - DNA, 75 bp, synthetic construct
  source 1..75: mol_type = other DNA
aattgattaatcaggccaacgaatacatcaacagtaaacaatggccaggtaaagcatcaattggtcgtctgaaag

SEQ ID NO: 688958 - DNA, 75 bp, synthetic construct
  source 1..75: mol_type = other DNA
aagaaaacactaggattagtcttaacatcgagcgttcagcctttggccattacgatattgataaggcaatcaacg

SEQ ID NO: 688959 - DNA, 75 bp, synthetic construct
  source 1..75: mol_type = other DNA
ctaatccgtgccttttacccgctgccatcgaaaaggtactcggttttctgcgcaccaccgatttcaatgctctgg

SEQ ID NO: 688960 - DNA, 75 bp, synthetic construct
  source 1..75: mol_type = other DNA
aaaaccgtcctgaggttcatcgtcgctatctggatattcagtttctggcctggggcgaagagaaaatcggtgtag

SEQ ID NO: 688961 - DNA, 75 bp, synthetic construct
  source 1..75: mol_type = other DNA
tatgattgataaatataaatcagagggatgggatttatcagatgctaaggaagtgaatcaaaatattatcagtga

SEQ ID NO: 688962 - DNA, 75 bp, synthetic construct
  source 1..75: mol_type = other DNA
gtcgttcagcagtgtctttactttcatccagcgactcaccgtcctgggctccctattcagcaaagacatggcatc

SEQ ID NO: 688963 - DNA, 75 bp, synthetic construct
  source 1..75: mol_type = other DNA
tgcccatatgggcggcttttttgccgcgcaaatgaaattcgctggatacgacgtcattattatcgaagggaaagc

SEQ ID NO: 688964 - DNA, 75 bp, synthetic construct
  source 1..75: mol_type = other DNA
ttacgcccctcgattctcagacctggaaaggcggcgggatcattattaatggcgatagtatcgttgactggcagg

SEQ ID NO: 688965 - DNA, 75 bp, synthetic construct
  source 1..75: mol_type = other DNA
taacccacaatatgtcgtcagtgttaagcataatggtggctatagtagagtacggtttggtacgagtaattatac

SEQ ID NO: 688966 - DNA, 75 bp, synthetic construct
  source 1..75: mol_type = other DNA
gcttttgtcatcgatggtggcattgatataaatggcagcttcagccagtatggcggaaacctctattttcagggg

SEQ ID NO: 688967 - DNA, 75 bp, synthetic construct
  source 1..75: mol_type = other DNA
ttacaataacttccgcctgaatcgcggcgtgccggaatacgggcaaaaaggtgagttgcgccgcgacgaacgcaa

SEQ ID NO: 688968 - DNA, 75 bp, synthetic construct
  source 1..75: mol_type = other DNA
ccgctgtgggttgcggttaatgagcgggatcaaccgattgggtttatgttgctaagcgggcagcatatggatgcg

SEQ ID NO: 688969 - DNA, 75 bp, synthetic construct
  source 1..75: mol_type = other DNA
ggaaaccgtatccattgctgaatctggcatatgtgggggataatgcggatatctgcactcgccgcaactcttcgt

SEQ ID NO: 688970 - DNA, 75 bp, synthetic construct
  source 1..75: mol_type = other DNA
caaagtgacgcaggccgggcatcaggcaaccattgtttcgacagataaaggctactgccagctactttcgccaac

SEQ ID NO: 688971 - DNA, 75 bp, synthetic construct
  source 1..75: mol_type = other DNA
ctggctggttgctggtagcggaatttattttcactctggcgatggccctgaaatgctacccgctgctccccggtg

SEQ ID NO: 688972 - DNA, 75 bp, synthetic construct
  source 1..75: mol_type = other DNA
cgacgcagtgtgtggtctttgaagatgccgatttcggtattcaggcggcccgtgcagcaggcatggacgctgtgg

SEQ ID NO: 688973 - DNA, 75 bp, synthetic construct
  source 1..75: mol_type = other DNA
ggcaaaaatctgaccttcctcggctctgatgggcaaatcatgttgaacaattccgtggatcaaggtgcagggacg

SEQ ID NO: 688974 - DNA, 75 bp, synthetic construct
  source 1..75: mol_type = other DNA
gactacttcgcggcagtggaagataaaaaccactctgagaacgtatcccgcgtactgtacccggatgactccacc

SEQ ID NO: 688975 - DNA, 75 bp, synthetic construct
  source 1..75: mol_type = other DNA
gcaacatgaagtttgcacttaacggtgcgctgactatcggtacgctggacggcgcgaatgttgagatgctggatc

SEQ ID NO: 688976 - DNA, 75 bp, synthetic construct
  source 1..75: mol_type = other DNA
gggcgtcgatcattgatgaatctaatgggcgtcgtgtgcggatggcctggctggctgttgtggtcagtcacaaag

SEQ ID NO: 688977 - DNA, 75 bp, synthetic construct
  source 1..75: mol_type = other DNA
cgggcatcaggcaaccattgtttcgacagataaaggctactgtcagctcctttcacctgcactgcgtattcgtga

SEQ ID NO: 688978 - DNA, 75 bp, synthetic construct
  source 1..75: mol_type = other DNA
cgcacaacaacgttgaggctgctgaactttcttacgctacttaattggatagatgatcaaacattgattccatca

SEQ ID NO: 688979 - DNA, 75 bp, synthetic construct
  source 1..75: mol_type = other DNA
ctgggacgacgcttttgaagtgtgctgcgaggtcttctcctacaccaaccacacgctgatgagcgaggcgctgga

SEQ ID NO: 688980 - DNA, 75 bp, synthetic construct
  source 1..75: mol_type = other DNA
ccgtcaggataaaatccgtctgattgtccaggcgattatcggcgtctggctggtgactgcgctggcactgcatct

SEQ ID NO: 688981 - DNA, 75 bp, synthetic construct
  source 1..75: mol_type = other DNA
cgtcggattatggaaactgtatcaccacccgaaagtcagtgagacggcccggcgcagtctgaagcgcagcgggct

SEQ ID NO: 688982 - DNA, 75 bp, synthetic construct
  source 1..75: mol_type = other DNA
gtgttgctggccgtggctcagctggggctgagttattacggtgaggcggacagtctgcgccgggcgttttaccgt

SEQ ID NO: 688983 - DNA, 75 bp, synthetic construct
  source 1..75: mol_type = other DNA
ttgctatggaaaacgcaaagataagttaatcaaaagcgtggtatttggttcgctgctggcgctggtgatttatct

SEQ ID NO: 688984 - DNA, 75 bp, synthetic construct
  source 1..75: mol_type = other DNA
tcgataggttatgtaccggaagatggttggtatgcaggcacggaagcgcgttatatgggcgatattatggcagat

SEQ ID NO: 688985 - DNA, 75 bp, synthetic construct
  source 1..75: mol_type = other DNA
aagatttacagctgtcgattcgcggatttggctcccgttccacttacggaattcgcggtattcgcctgtatgtgg

SEQ ID NO: 688986 - DNA, 75 bp, synthetic construct
  source 1..75: mol_type = other DNA
aactggcaaaatttgactttacctggtttattcctgccattataaaatacaggagaatatttattgaaacccttg

SEQ ID NO: 688987 - DNA, 75 bp, synthetic construct
  source 1..75: mol_type = other DNA
gcctgtggcgatgtctccttttcgtcagcaacgttatatgaatatttagccccactttgtgagcgcccgaattag

SEQ ID NO: 688988 - DNA, 75 bp, synthetic construct
  source 1..75: mol_type = other DNA
cactgcgacaggcgcgtattgatctgttaaccggcaaacgggtggtatctgttcagaaggatggacggcgtgttg

SEQ ID NO: 688989 - DNA, 75 bp, synthetic construct
  source 1..75: mol_type = other DNA
atggcttttaactcctgatgtaacgcatcaaatagagtcaggatgcgagggagccaaaatgcctcgtgcagattg

SEQ ID NO: 688990 - DNA, 75 bp, synthetic construct
  source 1..75: mol_type = other DNA
aaacttaatcagcctccggagaactgggtgcatcttacccgcggagatatgaaactgcatatgcaggcgaggtat

SEQ ID NO: 688991 - DNA, 75 bp, synthetic construct
  source 1..75: mol_type = other DNA
cagtacgttaaatagcggaccggcaacgcgcattctctcggttgcggcttatcctgcgcattacgaccgcttacg

SEQ ID NO: 688992 - DNA, 75 bp, synthetic construct
  source 1..75: mol_type = other DNA
cggtcgcatagccttcgccatggcagacgtcatacccgcaaaggcgaaagaggtacgattaacatagtgaacgga

SEQ ID NO: 688993 - DNA, 75 bp, synthetic construct
  source 1..75: mol_type = other DNA
tgttcagtatcagggtcaaaacggcagcgtaagcggtgaaggttctgaggattacaccggtcatggcatcaccaa

SEQ ID NO: 688994 - DNA, 75 bp, synthetic construct
  source 1..75: mol_type = other DNA
ttgctcagtaccagttcgactttggtctgcgtccgtccctggcttacctgcagtctaaaggtaaaaacctgggtc

SEQ ID NO: 688995 - DNA, 75 bp, synthetic construct
  source 1..75: mol_type = other DNA
tgaactgtctctgggcaaactgggcgtgctgggctttgaagttgatcatgaacgcaacctggctgcacgtttcgg

SEQ ID NO: 688996 - DNA, 75 bp, synthetic construct
  source 1..75: mol_type = other DNA
tcttcccgctggggggctttacgccactgcaatcctccacgctttccgatgttgctacgagccttaatgcgacac

SEQ ID NO: 688997 - DNA, 75 bp, synthetic construct
  source 1..75: mol_type = other DNA
tttccgatggaagcataataagctttttctgcttctgccggaggagtatggcccagcctttccagcaatcgtcga

SEQ ID NO: 688998 - DNA, 75 bp, synthetic construct
  source 1..75: mol_type = other DNA
aagacgcctgtgggctaacgaatccgatacaggcgacacatgaggagattgttgcaatttatcaggcagcaatgt

SEQ ID NO: 688999 - DNA, 75 bp, synthetic construct
  source 1..75: mol_type = other DNA
cgcgactgcgcggctgcaatgggcgtgaacgtgacaggaaaaaatgatgcggaaggtgcagaagcctgcattaat

SEQ ID NO: 689000 - DNA, 75 bp, synthetic construct
  source 1..75: mol_type = other DNA
atcatcactgacgaagcgcgtcacatcaaaatggcgattgtggataaacatgtaactccgctgctttctgtcaat

SEQ ID NO: 689001 - DNA, 75 bp, synthetic construct
  source 1..75: mol_type = other DNA
caacctgctggacgacaataacttcacccgcgctgcaggcatcaacactgatgacatcgtagctctgggtctggt

SEQ ID NO: 689002 - DNA, 75 bp, synthetic construct
  source 1..75: mol_type = other DNA
aacctgggtaccatcgctggtcgtaactacgacgacgaagatatcctgaaatatgttgatgttggtgctacctac

SEQ ID NO: 689003 - DNA, 75 bp, synthetic construct
  source 1..75: mol_type = other DNA
tggtaccggctctgctggtagcaggcgcagcaaatgcggctgaaatttacaacaaagacggcaacaaattagatc

SEQ ID NO: 689004 - DNA, 75 bp, synthetic construct
  source 1..75: mol_type = other DNA
gtctggcgaaatacatcggcgcttacaccgcgctgatggatggtcgtctggatgccgttgtattcaccggtggta

SEQ ID NO: 689005 - DNA, 75 bp, synthetic construct
  source 1..75: mol_type = other DNA
ggaaccgattgccggatacggatgggaaagtacctggcgaccgctggcggatgaaaattttcatttaggactggg

SEQ ID NO: 689006 - DNA, 75 bp, synthetic construct
  source 1..75: mol_type = other DNA
atgatttatatattcctgccatcacctggcatgcacgtttcgcttacgacaaagaaaaaaccgatcgctataacg

SEQ ID NO: 689007 - DNA, 75 bp, synthetic construct
  source 1..75: mol_type = other DNA
taatgcaggtattaagggtagtcccgatactttaggatggcaatcccttgaagagcgagccaaaaagataaaagc

SEQ ID NO: 689008 - DNA, 75 bp, synthetic construct
  source 1..75: mol_type = other DNA
cacgtcaccctgatatggggagatggttaacgactaatttggacctgagtgcagttgatggttttgtactgccca

SEQ ID NO: 689009 - DNA, 75 bp, synthetic construct
  source 1..75: mol_type = other DNA
catcaaaatgctcgtttcggtcttcggcccgcgtgattttgccctgaccgcgcctgtatgtgagcatattgacga

SEQ ID NO: 689010 - DNA, 75 bp, synthetic construct
  source 1..75: mol_type = other DNA
gctactgccagttactttcaccgacattacgtattcgtgattacttccagaaacgttggctggatgcaccattta

SEQ ID NO: 689011 - DNA, 75 bp, synthetic construct
  source 1..75: mol_type = other DNA
tttgtcagtctatcgttgatattttaacgaccccgctgggaacccgtgtaatgctgccggaatatgggagcaaat

SEQ ID NO: 689012 - DNA, 75 bp, synthetic construct
  source 1..75: mol_type = other DNA
agcgccttttttcctcatggatgaaaatcctttgaactgggatgacgctaaagcattcaatcgcctacgtatgag

SEQ ID NO: 689013 - DNA, 75 bp, synthetic construct
  source 1..75: mol_type = other DNA
tacgacctgtgttcttggccgtggcggttggactatcggtgagcgatttgatgaccgctttgataccgaggtggg

SEQ ID NO: 689014 - DNA, 75 bp, synthetic construct
  source 1..75: mol_type = other DNA
gttttccctgcttctattatgttatttggcattagtgatgtcattacacatgctaaaccaataccggcatcgtgg

SEQ ID NO: 689015 - DNA, 75 bp, synthetic construct
  source 1..75: mol_type = other DNA
taaaaactctttttatgagattgttttcagattatttcaagaggattaccaacttagtgattcaaatgaaccctc

SEQ ID NO: 689016 - DNA, 75 bp, synthetic construct
  source 1..75: mol_type = other DNA
gcaattcacatcaacaacactgacggtagatcttgaggtatacaacggctgctgggatgcgctgtacagtaagcg

SEQ ID NO: 689017 - DNA, 75 bp, synthetic construct
  source 1..75: mol_type = other DNA
aagatgcctgtgggctgacgaacccgatacaggcgacacatgaagagatagttgcaatttatcgtgcagcaatgt

SEQ ID NO: 689018 - DNA, 75 bp, synthetic construct
  source 1..75: mol_type = other DNA
atctacaccaccgatccacgcgtggtttccgcagcaaaacgcattgatgaaatcgcgtttgccgaagcggcagag

SEQ ID NO: 689019 - DNA, 75 bp, synthetic construct
  source 1..75: mol_type = other DNA
gcggcggcgctggcaacgtctccggcgctgacagatgaactggtcagccacggcgagctgatgtcgaccctgctg

SEQ ID NO: 689020 - DNA, 75 bp, synthetic construct
  source 1..75: mol_type = other DNA
ggcgtcggcaaagaagtatttggcgtgctggaaccgttcaacatccgcatgatttgctacggcgcttccagcaat

SEQ ID NO: 689021 - DNA, 75 bp, synthetic construct
  source 1..75: mol_type = other DNA
actgtacaacgtgcgcactggtcatttacgccagggacacgcgcatcggtttggggaatcaatggtcgttacctg

SEQ ID NO: 689022 - DNA, 75 bp, synthetic construct
  source 1..75: mol_type = other DNA
aaggccttgcactggtggcgctgattggtaataacctgttaaaagcctgcggcgtcggtaaagaagtgttcggcg

SEQ ID NO: 689023 - DNA, 75 bp, synthetic construct
  source 1..75: mol_type = other DNA
ggagaatattactgttctggcagaagccgcggcgctggcaacgtctccggcgctaacggatgagctggtcagcca

SEQ ID NO: 689024 - DNA, 75 bp, synthetic construct
  source 1..75: mol_type = other DNA
cttgagcaacgttaccgtcacgggatttccaacctcaagctgaaacacgccaaccacaaaaaaaaatgccatgcc

SEQ ID NO: 689025 - DNA, 75 bp, synthetic construct
  source 1..75: mol_type = other DNA
gcgtaatagcggcctggcttcacaggtcatttcgctcccccgtttcaggttgatctctctcgccgtgaattatct

SEQ ID NO: 689026 - DNA, 75 bp, synthetic construct
  source 1..75: mol_type = other DNA
atcctgagctggtacaggcattctataatgctcgccgccgtcagttacagcagccagaaattcaacctaacgccg

SEQ ID NO: 689027 - DNA, 75 bp, synthetic construct
  source 1..75: mol_type = other DNA
gcgtttgccgaagcggcagagatggcaacttttggtgcaaaagtactgcatccggcaacgttgctacccgcagta

SEQ ID NO: 689028 - DNA, 75 bp, synthetic construct
  source 1..75: mol_type = other DNA
gcctgtttgagaatggaaacgttcatatttgcatcgccagtatctcgcttctgaatgctctgaacgatcttatca

SEQ ID NO: 689029 - DNA, 75 bp, synthetic construct
  source 1..75: mol_type = other DNA
gatctcggattgccagacgaggacggtctgtcactgattcgccgctggcgtagcaatgatgtttcactgccgatt

SEQ ID NO: 689030 - DNA, 75 bp, synthetic construct
  source 1..75: mol_type = other DNA
acttggcgaagctggtgtcccataaactattggaaagatttaagtggaagcaacacggtccgaccgatcatgatt

SEQ ID NO: 689031 - DNA, 75 bp, synthetic construct
  source 1..75: mol_type = other DNA
attcgcagtcgcgatatcagtctgggtgatgacccgggtattaatggacaactgtgggacgtcaaccgtattgat

SEQ ID NO: 689032 - DNA, 75 bp, synthetic construct
  source 1..75: mol_type = other DNA
gacgctggacagtcagagcagttgcccgtgtaaggcgcgatttattgcgtcaatgatggatgatacgtatgagac

SEQ ID NO: 689033 - DNA, 75 bp, synthetic construct
  source 1..75: mol_type = other DNA
cagcaggtctataacggccttgccgggatgtggctggtggaagatgaagtcagcaagtcgctgcccattcctaac

SEQ ID NO: 689034 - DNA, 75 bp, synthetic construct
  source 1..75: mol_type = other DNA
gtgcaaaaagcactggaagaacacagtgtttttagcgttatttatgatggcgtccagcctaatccaaccacagaa

SEQ ID NO: 689035 - DNA, 75 bp, synthetic construct
  source 1..75: mol_type = other DNA
ttttgattgatgacgaggcaaccaccggtaatacctttattaacctgctttctgccctacgtaataccggcaagc

SEQ ID NO: 689036 - DNA, 75 bp, synthetic construct
  source 1..75: mol_type = other DNA
tggcactatcgagttcggaaatggggcaaaactctcattgttaggggaatcatcgtcaacctttacgcctttttc

SEQ ID NO: 689037 - DNA, 75 bp, synthetic construct
  source 1..75: mol_type = other DNA
aattgcaacatgatttttatgatttctttaatcctcctaaacctactaaaggaaggagagataaggctgtaaact

SEQ ID NO: 689038 - DNA, 75 bp, synthetic construct
  source 1..75: mol_type = other DNA
agttgcagcatgatttttatgatttttttaatcctcctaaacctactaaaggaagaagggataaggctgtcaatt

SEQ ID NO: 689039 - DNA, 75 bp, synthetic construct
  source 1..75: mol_type = other DNA
actataagcataatttctatgactatttttatcctcctaaacccaaaaaagggaaaagacctgcggcagttaatt

SEQ ID NO: 689040 - DNA, 75 bp, synthetic construct
  source 1..75: mol_type = other DNA
ttcaggcatcggggattgcactgtgtgcaggagcagtccccctgaaggcaagcgcagccgggcaacagcaaccgc

SEQ ID NO: 689041 - DNA, 75 bp, synthetic construct
  source 1..75: mol_type = other DNA
gaaccgggaagcggcggctttgttggtgatacgctgctggttaacggtgtacaaagcccgtacgttgaagtctcg

SEQ ID NO: 689042 - DNA, 75 bp, synthetic construct
  source 1..75: mol_type = other DNA
acagcctgccgatgcgcttgttaccgactgaaataatggccggttcaccgattcgcagccgtgatattagcctgg

SEQ ID NO: 689043 - DNA, 75 bp, synthetic construct
  source 1..75: mol_type = other DNA
ttacagggggggaatagctgggctatttacgatgactcattacctgaaaaaggacgcggcaatgttcgttggcgc

SEQ ID NO: 689044 - DNA, 75 bp, synthetic construct
  source 1..75: mol_type = other DNA
agatactcggtttaacctgccgtttaatctgttttcacgtagaataacgcgcgctgcgtctcatgggagtgtgct

SEQ ID NO: 689045 - DNA, 75 bp, synthetic construct
  source 1..75: mol_type = other DNA
ccttgccgaacaataaaatgctcgatcgcgacgatatgatccacattggtatctgcgcctggcgtagtggtcagg

SEQ ID NO: 689046 - DNA, 75 bp, synthetic construct
  source 1..75: mol_type = other DNA
agaatcagacgggcggctactgccttgtcctggcggcgcgccagctaacgttgcggtgggaatcgccagattagg

SEQ ID NO: 689047 - DNA, 75 bp, synthetic construct
  source 1..75: mol_type = other DNA
ccttcagatggatcctgaggtcgaaattcaaagggatgaaaaaagtgttagtgcgctacgcaaaaactgcgctac

SEQ ID NO: 689048 - DNA, 75 bp, synthetic construct
  source 1..75: mol_type = other DNA
aacaggtttatacccagtcccgcaatggtagttaccgtccggtgggaaccagcgatctgtttcgcgaactgactg

SEQ ID NO: 689049 - DNA, 75 bp, synthetic construct
  source 1..75: mol_type = other DNA
acaatgagttaccggcttgtgacaggagcatacagttcggtgatggatgttttacaacggctgtgataaaccgtg

SEQ ID NO: 689050 - DNA, 75 bp, synthetic construct
  source 1..75: mol_type = other DNA
aggattcgctggcagcaagcgatcgggcaacgcaatttggcgatggttgtttcaccacagccagaattatcgacg

SEQ ID NO: 689051 - DNA, 75 bp, synthetic construct
  source 1..75: mol_type = other DNA
atcgggttcaggtgttggctgcgctgatggccatcggggaggagctgcgtcggctgcgtctggccgtcagggaac

SEQ ID NO: 689052 - DNA, 75 bp, synthetic construct
  source 1..75: mol_type = other DNA
ggtcgccgtcaaccaggctggtttgacgctggtaagtacccgttggatcaaagaacttaatgttgaattactcaa

SEQ ID NO: 689053 - DNA, 75 bp, synthetic construct
  source 1..75: mol_type = other DNA
agcgaaaacgcataattattgaacttgcagaggctgatgttggtcaacatatcggtcgcttgcaacctgttattc

SEQ ID NO: 689054 - DNA, 75 bp, synthetic construct
  source 1..75: mol_type = other DNA
tcccgtttaagcattccttattccgactggtctatactggaagatgagatgcaaagtctggcacgacaagctgag

SEQ ID NO: 689055 - DNA, 75 bp, synthetic construct
  source 1..75: mol_type = other DNA
aagttaaagctgagttttcagttaataacatagctaacgaaattataaaactatcgagtatgagagttgattttt

SEQ ID NO: 689056 - DNA, 75 bp, synthetic construct
  source 1..75: mol_type = other DNA
taatgacgggctggcggcttatcatcatgtactgtcagcggcggtcagtacgccccgttatgcgcaacagaaaag

SEQ ID NO: 689057 - DNA, 75 bp, synthetic construct
  source 1..75: mol_type = other DNA
cgtggagattctgggggggaggaaggatttttacaaacacagtgaggaggttgtcggatactgggtggaggtgat

SEQ ID NO: 689058 - DNA, 75 bp, synthetic construct
  source 1..75: mol_type = other DNA
gcgtcacgataatggctaccaccgtggctgggataagcgtaaagcgtatgaacgaggctaccgcgaaggctggcg

SEQ ID NO: 689059 - DNA, 75 bp, synthetic construct
  source 1..75: mol_type = other DNA
aggggctggaatacgaaacggtgatcctctacaacatggtcagcggtgcccggcaggcatttgatgatatctgcg

SEQ ID NO: 689060 - DNA, 75 bp, synthetic construct
  source 1..75: mol_type = other DNA
atctgcaggatatgtcaccgaaattagtggatatgctgggagggaagaagggtttttacgaacgcagtgaaaagt

SEQ ID NO: 689061 - DNA, 75 bp, synthetic construct
  source 1..75: mol_type = other DNA
cccggttgccgtgttgcgggatattgaacgttatggtgttgatcaccgttcgccgtttaatcttactccgctgat

SEQ ID NO: 689062 - DNA, 75 bp, synthetic construct
  source 1..75: mol_type = other DNA
tgatgccaccgaacgggctgaactactggaagagcagcttgaatctctcaccaacaaaaaaacagagctcgatgc

SEQ ID NO: 689063 - DNA, 75 bp, synthetic construct
  source 1..75: mol_type = other DNA
gctggaaaagcggatcgttgagttggagggcaagctggaggcgaaagccgcagatctgacccgagcacaggatca

SEQ ID NO: 689064 - DNA, 75 bp, synthetic construct
  source 1..75: mol_type = other DNA
cgctcttgttcaagacaaaggcatgatggctggtcagttgcaggaaaaagaccagcaggccaagagcctcgaaca

SEQ ID NO: 689065 - DNA, 75 bp, synthetic construct
  source 1..75: mol_type = other DNA
gacgtcaatgcggataatgacatggaatatcccgcacacttgaataaaattcaagctcttcttaattttgccgtg

SEQ ID NO: 689066 - DNA, 75 bp, synthetic construct
  source 1..75: mol_type = other DNA
ccgatctggcccgagcacaggatcgcctggagctggctgaaagtgaaaatcgctctttgagccaaaaattggcaa

SEQ ID NO: 689067 - DNA, 75 bp, synthetic construct
  source 1..75: mol_type = other DNA
ctacagagggtgagttggaggagcaaaaaggcaagagtatagagcagacagaaaagctccgggccgctcaggaac

SEQ ID NO: 689068 - DNA, 75 bp, synthetic construct
  source 1..75: mol_type = other DNA
ccgaagcgtgcgaggcagctgcggtaaagctcgtcggcgtggtcgtgaagggcttcgcagatgtccgcctggtcg

SEQ ID NO: 689069 - DNA, 75 bp, synthetic construct
  source 1..75: mol_type = other DNA
ctaatatggaagttaacggacaacgattttcttatggaattactggtgggaatgtttttgttagttgtcttgttt

SEQ ID NO: 689070 - DNA, 75 bp, synthetic construct
  source 1..75: mol_type = other DNA
gcgttggtggtgatatccgggattacgggcggtctggcttatccactgctgaaaatatggatgattgactggtag

SEQ ID NO: 689071 - DNA, 75 bp, synthetic construct
  source 1..75: mol_type = other DNA
aatattaaatgcgtatgatagttctgtgtatgcaaatgatgatattgagaatttacagcaatttatggaaatgca

SEQ ID NO: 689072 - DNA, 75 bp, synthetic construct
  source 1..75: mol_type = other DNA
cggacgctgacctgttcactgtgcgggtctgtactggatccatttgaatttatccttgagcgtgcccgtaatgct

SEQ ID NO: 689073 - DNA, 75 bp, synthetic construct
  source 1..75: mol_type = other DNA
acatttacggcctgacgaaccagttcaccacctactcgctccgcgattgtggcagtcttcgaaatccccggacga

SEQ ID NO: 689074 - DNA, 75 bp, synthetic construct
  source 1..75: mol_type = other DNA
agatgacaaacatgatctcatatcagggacttgttcgcaccttccttagttttaattgctctatgaaagggttct

SEQ ID NO: 689075 - DNA, 75 bp, synthetic construct
  source 1..75: mol_type = other DNA
atggttaactctgatttttctgttttacggctcacagagtggtccttgatcgggtctaattatgattactgtttg

SEQ ID NO: 689076 - DNA, 75 bp, synthetic construct
  source 1..75: mol_type = other DNA
atgaaaaatcgtctttctccctggaatcttggtgccactctatacatgcctgcaacacgggaagatattgctgat

SEQ ID NO: 689077 - DNA, 75 bp, synthetic construct
  source 1..75: mol_type = other DNA
aacacccccgttgccgatgaggaatggtggcaggatttccgggccgcaatgctggaacttcaggaacgtcgtcgg

SEQ ID NO: 689078 - DNA, 75 bp, synthetic construct
  source 1..75: mol_type = other DNA
aacatcgcatatgaccagacgaacgtcatcggccaaacagtgaaacgcgttgttctcaataatcctgtattggct

SEQ ID NO: 689079 - DNA, 75 bp, synthetic construct
  source 1..75: mol_type = other DNA
tgacggtgaactcacgctcaatcttatgaatgaatcgtttgtaggatatgtgacgatccctatggatgccacaat

SEQ ID NO: 689080 - DNA, 75 bp, synthetic construct
  source 1..75: mol_type = other DNA
tgttatagggatattgcaagataatgaagaccctaaaaatgaacttcataaaaatgaatcatttttcaccgtaga

SEQ ID NO: 689081 - DNA, 75 bp, synthetic construct
  source 1..75: mol_type = other DNA
tatccttgagcgtgcccgtaatgctgaaaatatcgtacatgaaattaaacgtcttcataaaaagctggaagcact

SEQ ID NO: 689082 - DNA, 75 bp, synthetic construct
  source 1..75: mol_type = other DNA
catcgccccagcgcctggtatgcggcggattattgcgcctggccaatggcaagtctggagtcatcttcattaacg

SEQ ID NO: 689083 - DNA, 75 bp, synthetic construct
  source 1..75: mol_type = other DNA
tgctggcaggcaacacaatcatcttcaagcccagcgagctgacaccgtggagcggagaagtgattatgcgtttgt

SEQ ID NO: 689084 - DNA, 75 bp, synthetic construct
  source 1..75: mol_type = other DNA
tgtgaagcgtaatccggtatcgggcgaggtgttatggcagggcaatgatgccgatgctgctcaggtcgagcaggc

SEQ ID NO: 689085 - DNA, 75 bp, synthetic construct
  source 1..75: mol_type = other DNA
atcgttaactggaacaaaccgctgaccggtgcggccagtactgcaccatttggtggcgtaggcgcttccggcaat

SEQ ID NO: 689086 - DNA, 75 bp, synthetic construct
  source 1..75: mol_type = other DNA
cgcgaaaccggtcaggcgctgagtgcgctggaagatctcgatggtttgctgtttaccggtagcgccaacactggc

SEQ ID NO: 689087 - DNA, 75 bp, synthetic construct
  source 1..75: mol_type = other DNA
atgactttatggatcaacggtgactgggtaacaggccagggcacaccgcgcgtgaagcgtaatccggtatcgggc

SEQ ID NO: 689088 - DNA, 75 bp, synthetic construct
  source 1..75: mol_type = other DNA
ccgaacggacatatcgttccggcattgctggcaggtaacaccattatctttaaacccagcgaactgacaccgtgg

SEQ ID NO: 689089 - DNA, 75 bp, synthetic construct
  source 1..75: mol_type = other DNA
cggacgctgacctgttcactgtgtggggctgtactggatccatttgaatttatccttgaccgtgcccgtaatgct

SEQ ID NO: 689090 - DNA, 75 bp, synthetic construct
  source 1..75: mol_type = other DNA
ccaatgccactcaggtcgagcaggcttgtcgggccgcccgtgcggcgtttccgcgttgggcgcgattctccttta

SEQ ID NO: 689091 - DNA, 75 bp, synthetic construct
  source 1..75: mol_type = other DNA
ggaagcggcaaccgaagtgacggcgatgatcaataaaatcgcgatatcaattaaggcgtatcacgttcgtaccgg

SEQ ID NO: 689092 - DNA, 75 bp, synthetic construct
  source 1..75: mol_type = other DNA
gaggtgttatggcagggcaatgatgccgatgccgctcaggttgagcaggcttgtcgggctgcccgtgcggcgttt

SEQ ID NO: 689093 - DNA, 75 bp, synthetic construct
  source 1..75: mol_type = other DNA
taattctgcgacgattaccagtctggagataccggaaggtcaggtaatggtcgcacaagacgtagcagttaaagc

SEQ ID NO: 689094 - DNA, 75 bp, synthetic construct
  source 1..75: mol_type = other DNA
gtttttgacgatcagatccgtggtccgatcgagttcagcaaccaggagctggatgatctgattatccgccgtacc

SEQ ID NO: 689095 - DNA, 75 bp, synthetic construct
  source 1..75: mol_type = other DNA
gatggttctccaacctataacttctgtgtggtggttgacgactgggatatggaaatcacccacgttatccgtggc

SEQ ID NO: 689096 - DNA, 75 bp, synthetic construct
  source 1..75: mol_type = other DNA
actacgctctacggctatactgcagaaaccgccggacatgtgctggtagaaaatgattgcgaattcttacgtgag

SEQ ID NO: 689097 - DNA, 75 bp, synthetic construct
  source 1..75: mol_type = other DNA
ctgtggcggcgggcgaaaactctcggtcagaaaccggcttacttctgggtatggcttttgatgctggccctgact

SEQ ID NO: 689098 - DNA, 75 bp, synthetic construct
  source 1..75: mol_type = other DNA
cgggctgagcggaatggaatttgaagaggcgtatgccgccgtgacggaggggcaatactggtttatcacactgat

SEQ ID NO: 689099 - DNA, 75 bp, synthetic construct
  source 1..75: mol_type = other DNA
tttggctggctggcatggttgatcccggtttatctgtggcgtcgggcaaaaatcctcgggcaaaaacctgcttat

SEQ ID NO: 689100 - DNA, 75 bp, synthetic construct
  source 1..75: mol_type = other DNA
agcagtacggggtcggaccgtatgcagcgaactgcatattgccccgtcaacgtattaccactgtcagcaacagcg

SEQ ID NO: 689101 - DNA, 75 bp, synthetic construct
  source 1..75: mol_type = other DNA
cggatggcctcaaggctggaagttcctcaacctgatgaagcacatagcgtggagtatcgggtgattgaaaggtaa

SEQ ID NO: 689102 - DNA, 75 bp, synthetic construct
  source 1..75: mol_type = other DNA
cgacatttctctttctgttattgatcactggcggtgtttatccgctactgaccaccgcgctggggcaatggtggt

SEQ ID NO: 689103 - DNA, 75 bp, synthetic construct
  source 1..75: mol_type = other DNA
acattaggcgctcataccgtggtggttgggggggcaatcactcgtccgcagcagataacgacacgctttatcgcg

SEQ ID NO: 689104 - DNA, 75 bp, synthetic construct
  source 1..75: mol_type = other DNA
aaggtaaattaatcgtctcctgtcaggctctggaaaatgagcctctacatagtccgtttattatgtcacgtatgg

SEQ ID NO: 689105 - DNA, 75 bp, synthetic construct
  source 1..75: mol_type = other DNA
tccggtattggcggcgcagatggcaaacatggcctgcatgaatacctgcagacccaagtggtttatttacagtcg

SEQ ID NO: 689106 - DNA, 75 bp, synthetic construct
  source 1..75: mol_type = other DNA
cttgctacagtactgcagcaaagcaccatcccgcccgcactgccggggcaccgcattcccggcggagtggtatgg

SEQ ID NO: 689107 - DNA, 75 bp, synthetic construct
  source 1..75: mol_type = other DNA
gatggttccccaacctataacttctgtgtgattgtcgatgactgggatatggaaatcacccacgttatccgtggc

SEQ ID NO: 689108 - DNA, 75 bp, synthetic construct
  source 1..75: mol_type = other DNA
gtgaatgtaaatttctttgttacctgtattggtgatgcactgaaatcaaggatggcacgagactccgtgctgcta

SEQ ID NO: 689109 - DNA, 75 bp, synthetic construct
  source 1..75: mol_type = other DNA
atgcgcaatgaaatagccatcaatcaccatatgcttcgtgctgcacagaacaaagcagtaatagccagatttatt

SEQ ID NO: 689110 - DNA, 75 bp, synthetic construct
  source 1..75: mol_type = other DNA
ttacgacgatgaaaaaggtttgttagccaaccaattgtatagtcaggggaaattgcacgctgactacggcggcgt

SEQ ID NO: 689111 - DNA, 75 bp, synthetic construct
  source 1..75: mol_type = other DNA
ggtaccgacgaccagacgagagccgatattgctcgcgcctttgaagatgcggtggtcgatacgctgatgattaaa

SEQ ID NO: 689112 - DNA, 75 bp, synthetic construct
  source 1..75: mol_type = other DNA
gggctggtctcacggcgatcaggaaatcttcacccgtgaagagatgatcaaatacttcaccctgaatgccgtcag

SEQ ID NO: 689113 - DNA, 75 bp, synthetic construct
  source 1..75: mol_type = other DNA
gggctggtcccacggcgatcaggaaatcttcactcgtgaagagatgatcaaatacttcactttgaatgccgtcag

SEQ ID NO: 689114 - DNA, 75 bp, synthetic construct
  source 1..75: mol_type = other DNA
ttctgattatttcagtggtctgcgcaattggcattgtgcgaattattcattcagtaaaaaagattgagcgttttt

SEQ ID NO: 689115 - DNA, 75 bp, synthetic construct
  source 1..75: mol_type = other DNA
tggtgtggcaacagggcatgctggaatggcagccagtttcagccacatcactggcggaaatactgaaacaaagtg

SEQ ID NO: 689116 - DNA, 75 bp, synthetic construct
  source 1..75: mol_type = other DNA
ggtgattccaaaatgtggcttgaagcaaataaagagatgaaattagctatcaaccttccatggtatcgcaggaaa

SEQ ID NO: 689117 - DNA, 75 bp, synthetic construct
  source 1..75: mol_type = other DNA
atcggtaagacccgcagtatcgagcgtatcaacaaagcgctggcttttattgctgaacgcgaaaatcagcagtaa

SEQ ID NO: 689118 - DNA, 75 bp, synthetic construct
  source 1..75: mol_type = other DNA
atgatgaaccgtgtgttgtacgttttgctaacccgcaggaaggttctgttgtttttgacgatcagatccgtggtc

SEQ ID NO: 689119 - DNA, 75 bp, synthetic construct
  source 1..75: mol_type = other DNA
ggtttctttaaatgggtatcggccagcgtgtcttccggcagcacaagcgcggggattaataacggaactgatacc

SEQ ID NO: 689120 - DNA, 75 bp, synthetic construct
  source 1..75: mol_type = other DNA
ataaagcaccagcttgaagaggataaaatgggagagcagttatcgattccctatccgggcagcccgtttaattct

SEQ ID NO: 689121 - DNA, 75 bp, synthetic construct
  source 1..75: mol_type = other DNA
atggggaacgaaaagagcttagcgcacacccgattgaactgtaaatatcacatagtttttgcgccaaaataccga

SEQ ID NO: 689122 - DNA, 75 bp, synthetic construct
  source 1..75: mol_type = other DNA
cgtatccggctttatgggatatctgaaagggaaaagcagtctgatgctttacgagcagtttggtgatttgaaatt

SEQ ID NO: 689123 - DNA, 75 bp, synthetic construct
  source 1..75: mol_type = other DNA
tgggttgtcgggcatcggggcggtgattgtgcgccaacgcgcgaggaactactcctcgcacacaaaaacgtatag

SEQ ID NO: 689124 - DNA, 75 bp, synthetic construct
  source 1..75: mol_type = other DNA
acgcacttttatgtcgttcagcggtgtggaaaatcagtggaatcaccagtggctggcgcgactaaccgttgcacc

SEQ ID NO: 689125 - DNA, 75 bp, synthetic construct
  source 1..75: mol_type = other DNA
atcgaaccgtttgatgagaaccgtgtgaaaataaaacacaaactctcatatgttcgtccgactaaccgcgggaaa

SEQ ID NO: 689126 - DNA, 75 bp, synthetic construct
  source 1..75: mol_type = other DNA
tttatcctgctggaggcggggtggtggcaacggaagtctcgcccgtggcattgtttaacaccttgcaacttggcg

SEQ ID NO: 689127 - DNA, 75 bp, synthetic construct
  source 1..75: mol_type = other DNA
tcacttaacgcattagcgttgaatgagcggggcaacattgtgcgactgtgcggtgaagtgttactggctggagtg

SEQ ID NO: 689128 - DNA, 75 bp, synthetic construct
  source 1..75: mol_type = other DNA
tctggtgcagagggtactacgtcgatacagtgggtaagaacacggcgaatatacaggattacataaagcaccagc

SEQ ID NO: 689129 - DNA, 75 bp, synthetic construct
  source 1..75: mol_type = other DNA
tatccggctttatgggatatctgaaagggaaaagcagtctgatgctttacgagcagtttgatgatttgaaattca

SEQ ID NO: 689130 - DNA, 75 bp, synthetic construct
  source 1..75: mol_type = other DNA
catctgaccgcggtaaaggcagcgacggaaatttgcggagctatagtagacggcgcggaactgggttcgcagcgc

SEQ ID NO: 689131 - DNA, 75 bp, synthetic construct
  source 1..75: mol_type = other DNA
catctgacggcggtaaaggcggcgacggaaatttgcggggcgacggtggaaggcgcggagctggggtcgcagcgt

SEQ ID NO: 689132 - DNA, 75 bp, synthetic construct
  source 1..75: mol_type = other DNA
cttgccgggctggcctctggcggatgccgtattactgggcaatgcagtggcgtcgtgggttgtcgggcatcgggg

SEQ ID NO: 689133 - DNA, 75 bp, synthetic construct
  source 1..75: mol_type = other DNA
tttacgcgttatcggcgggcgttatcattacacggcggtagggcagttggctcagcatgaagacacttctacggt

SEQ ID NO: 689134 - DNA, 75 bp, synthetic construct
  source 1..75: mol_type = other DNA
ctttcgatgtttttcatatcggtcatgtgaatatacttgaaagggctaaagcatacggagataaattaatcgtcg

SEQ ID NO: 689135 - DNA, 75 bp, synthetic construct
  source 1..75: mol_type = other DNA
atcgaaccatttgatgagaaccgagtgaaaatcaaacacaaactctcatatgttcgcccgactaaccgcgggaaa

SEQ ID NO: 689136 - DNA, 75 bp, synthetic construct
  source 1..75: mol_type = other DNA
gtagtaacattggttacatgaaaaacactatcagcgaacgtattcggaatcgtcgaaaagacgttggattaaccc

SEQ ID NO: 689137 - DNA, 75 bp, synthetic construct
  source 1..75: mol_type = other DNA
tgtcactgaatccgctttacaaacccattgaactgaatgtcggttacactattaaaggtaaagtttcacaaatac

SEQ ID NO: 689138 - DNA, 75 bp, synthetic construct
  source 1..75: mol_type = other DNA
gggcgtggtgtggtgattgaaccgcaggcgcaggtgatttatcagggcgtgcagcaggatgattttaccgccgct

SEQ ID NO: 689139 - DNA, 75 bp, synthetic construct
  source 1..75: mol_type = other DNA
taccggtcgtgccggtccgcgtccgcgtacccaggcgttgctgcgtttcctggccgatcactctcgttcgaaaga

SEQ ID NO: 689140 - DNA, 75 bp, synthetic construct
  source 1..75: mol_type = other DNA
gccgccggttgaagccgcagccgtcattgtggatttggcgaaacgtatgctggagcagaaagcatccggcatcaa

SEQ ID NO: 689141 - DNA, 75 bp, synthetic construct
  source 1..75: mol_type = other DNA
atggatcaaaaacagattgaagaaattgtacgcagcgtgatggcgtcaatgggacaaacggcccccgcgccgtca

SEQ ID NO: 689142 - DNA, 75 bp, synthetic construct
  source 1..75: mol_type = other DNA
aagtcgcttccggtgtgatgaacacgaaaaccaaaggtaaggtctcgctcaacctggaaatcgaaccatttgatg

SEQ ID NO: 689143 - DNA, 75 bp, synthetic construct
  source 1..75: mol_type = other DNA
tgactcgcccggatatgggccgccgcctgtgtgcagaagctgttgaagcgctgaaagcgcagtgtgttgccaatc

SEQ ID NO: 689144 - DNA, 75 bp, synthetic construct
  source 1..75: mol_type = other DNA
gaagcaaaagcgtggattggtgttgaaaacccgcatcgcgcagacgtattaacagaactgcgccgcagcaccgtg

SEQ ID NO: 689145 - DNA, 75 bp, synthetic construct
  source 1..75: mol_type = other DNA
aactgtcgtgaagcgtggcacaaatgtcaggcctggctgaaagatattgaaggcagtcggttgcagcataatcag

SEQ ID NO: 689146 - DNA, 75 bp, synthetic construct
  source 1..75: mol_type = other DNA
tgatttagacacgacttaccgttttaacagtcgtatcggtgaggtggcaaaccggtttattcagcagaacccagg

SEQ ID NO: 689147 - DNA, 75 bp, synthetic construct
  source 1..75: mol_type = other DNA
gatcacagtgagcaagaactgcgacgtaaactcgcggcaccgattatgggcaaaaatggcccggaagagattgat

SEQ ID NO: 689148 - DNA, 75 bp, synthetic construct
  source 1..75: mol_type = other DNA
catttgtcatgtcaaagaaagaaatgtgtgtcttccctaatttcatagtgcgtgccattaataaatttccaaaat

SEQ ID NO: 689149 - DNA, 75 bp, synthetic construct
  source 1..75: mol_type = other DNA
ttgaggatttcccggacgccgaagaacgacggttaatgtacgttgcgttgacccgcgcacgacatcgggtatggg

SEQ ID NO: 689150 - DNA, 75 bp, synthetic construct
  source 1..75: mol_type = other DNA
cgcaaagctgctgaagagatggatgagcgtattcgcgaacggctacataccgaagacattaccgcgcgcacgttt

SEQ ID NO: 689151 - DNA, 75 bp, synthetic construct
  source 1..75: mol_type = other DNA
ctagcgccgagcagcacaataacagcattaatcatatctacccgcgcatcgcccgtgtgcgtagcgttgaagaga

SEQ ID NO: 689152 - DNA, 75 bp, synthetic construct
  source 1..75: mol_type = other DNA
ttatgtgggatctcgaccaatatcggtgttgaatccaccgcccgcaatgcctgggaactcggttttaatctggtg

SEQ ID NO: 689153 - DNA, 75 bp, synthetic construct
  source 1..75: mol_type = other DNA
ccgccggggtatcgatacaatagtattatgtgggatctcgaccaatatcggtgttgaatccaccgcccgcaatgc

SEQ ID NO: 689154 - DNA, 75 bp, synthetic construct
  source 1..75: mol_type = other DNA
cttcctcatcaggcaccaagcgtacataccggaaaggtaaccctgttccggctagagagaggcaaagagcttctc

SEQ ID NO: 689155 - DNA, 75 bp, synthetic construct
  source 1..75: mol_type = other DNA
gacggttggtaaccttaagtttccgggagaggaagaggttattgctgttgttccccagtgtctgcaccggattat

SEQ ID NO: 689156 - DNA, 75 bp, synthetic construct
  source 1..75: mol_type = other DNA
aaaaggtgaaagcttcggcggctgcatcttctgctgtaacgacatccacaacatccgccaccacacagacaatta

SEQ ID NO: 689157 - DNA, 75 bp, synthetic construct
  source 1..75: mol_type = other DNA
tcctgggctggcgagcacccgcgatggctcgtttggcgtaggtgataaagcggctcagaagcgttttggcacgtt

SEQ ID NO: 689158 - DNA, 75 bp, synthetic construct
  source 1..75: mol_type = other DNA
cggttctaatgcgtctttggatgcgattgaggtgctggctaacgctctcagtgttgagccgtggcagttgttagc

SEQ ID NO: 689159 - DNA, 75 bp, synthetic construct
  source 1..75: mol_type = other DNA
gaagacggacaggatttttatgaatcactggataaattcacgaagaaatacaaattgtgtattcacccggaaacc

SEQ ID NO: 689160 - DNA, 75 bp, synthetic construct
  source 1..75: mol_type = other DNA
ccgctcagaagcgttttggctcgtttatcgaagctcttgagtatctccgtagcatggagacggcaaagtggcgta

SEQ ID NO: 689161 - DNA, 75 bp, synthetic construct
  source 1..75: mol_type = other DNA
ctctcagtgttgaaccgtggcagttgttagtattcgactcatccgaagaaaacgacccagaactactggttccct

SEQ ID NO: 689162 - DNA, 75 bp, synthetic construct
  source 1..75: mol_type = other DNA
tatctccgtagcatggagacggcaaaatggcgtaggcccaatgccagtggaaactggggcattgtttcggcggtg

SEQ ID NO: 689163 - DNA, 75 bp, synthetic construct
  source 1..75: mol_type = other DNA
ggcgtgatttattcaatggcggaagacgtgtcccgtctttatcctgttggttttaccattgtggaagtggatgaa

SEQ ID NO: 689164 - DNA, 75 bp, synthetic construct
  source 1..75: mol_type = other DNA
tggtgttgggggagccgctattgctgagctgtacatagttggtggttacttggcttgtttaattggaggtatgct

SEQ ID NO: 689165 - DNA, 75 bp, synthetic construct
  source 1..75: mol_type = other DNA
aagctaaagtgatgctcgcgggcattgatacgctgtggcactgctccagctttacctcgccctgggggacacaac

SEQ ID NO: 689166 - DNA, 75 bp, synthetic construct
  source 1..75: mol_type = other DNA
gcgctggatttaagcgccgttactgatgaagcctcccttaatgccatcagctggccggagcatcccgatgccgca

SEQ ID NO: 689167 - DNA, 75 bp, synthetic construct
  source 1..75: mol_type = other DNA
gatggcatatatcaaagcggtgaaggcgctggatttaagcctggtcagtgataaatcttcctttgatttaattca

SEQ ID NO: 689168 - DNA, 75 bp, synthetic construct
  source 1..75: mol_type = other DNA
agcgcttgctgaatgaagcaaaggaaatcacttccgactggaaaaccgagctggagcttggcaccatcagtgatg

SEQ ID NO: 689169 - DNA, 75 bp, synthetic construct
  source 1..75: mol_type = other DNA
ttcaaaaagctcaaaacccaaaaactgatcaagtccgtcaacggtcagccttaccgcatcaacaccaccgggctg

SEQ ID NO: 689170 - DNA, 75 bp, synthetic construct
  source 1..75: mol_type = other DNA
tatcgtcaaagatggcatcctgacccagtggttgttgaccagctattctgcgcgcaagctggggctgaaaagtac

SEQ ID NO: 689171 - DNA, 75 bp, synthetic construct
  source 1..75: mol_type = other DNA
gtaggtgaatatgctcttaatattcttggtcaaaatattccaagaaccatgacaggaaaaaaaacatatgacata

SEQ ID NO: 689172 - DNA, 75 bp, synthetic construct
  source 1..75: mol_type = other DNA
aacgcatctacgctccacaactgtgcctgcaacacctgaacatactgtaagaagaagcgactacagagccacttt

SEQ ID NO: 689173 - DNA, 75 bp, synthetic construct
  source 1..75: mol_type = other DNA
tgtgctcgccgtactttatcgcgtctgtcaccgcgtaaactctccaccatgaaagcgccggtcatttttgccaat

SEQ ID NO: 689174 - DNA, 75 bp, synthetic construct
  source 1..75: mol_type = other DNA
ggcctttgacgcgccggaccttgacttgttccaccctgcggacgtttctccggatgaagccattgaactggcggc

SEQ ID NO: 689175 - DNA, 75 bp, synthetic construct
  source 1..75: mol_type = other DNA
agatgggcaccgggctggtggtgacggagctgatgggccagggcgtgagtgccattaccggtgattattcccgtg

SEQ ID NO: 689176 - DNA, 75 bp, synthetic construct
  source 1..75: mol_type = other DNA
caaagcagtaatagccagatttattggtgattcaaaaatgtggcttgaagcaaataaagcgatgaaatcagcgat

SEQ ID NO: 689177 - DNA, 75 bp, synthetic construct
  source 1..75: mol_type = other DNA
tatgagctgctcggcgagtctattgatgatgccgccggggaagcgtttgacaaaaccgcgaagctgctggggctg

SEQ ID NO: 689178 - DNA, 75 bp, synthetic construct
  source 1..75: mol_type = other DNA
ccggaatttccgtttgtggcgctgctggtttccggcggtcatacgcagttaatcagcgtgactggcattggtcag

SEQ ID NO: 689179 - DNA, 75 bp, synthetic construct
  source 1..75: mol_type = other DNA
atgtttagcataagaacccaactaccgattagcagcaccatatcagttccgacaaaacaatctcaatccatccca

SEQ ID NO: 689180 - DNA, 75 bp, synthetic construct
  source 1..75: mol_type = other DNA
ccctataatccacaggcttctggcgggagcaatctggcagtcagtaacccggagctggataaacagatagccgca

SEQ ID NO: 689181 - DNA, 75 bp, synthetic construct
  source 1..75: mol_type = other DNA
atgcgcaatgaaatagccatcaatcaccagatgcttcgtgcagcacagaacaaagcagtaatagccagatttatt

SEQ ID NO: 689182 - DNA, 75 bp, synthetic construct
  source 1..75: mol_type = other DNA
cttcttaagtgcggagatgaatttttatcaccggcagatattgtcgaccgcattgttaaatataatcttcatgaa

SEQ ID NO: 689183 - DNA, 75 bp, synthetic construct
  source 1..75: mol_type = other DNA
gccttgccgcgcagcctgccaccaccacacttcagttctctgtggatgaggcactgaccattgatgtgctgatcc

SEQ ID NO: 689184 - DNA, 75 bp, synthetic construct
  source 1..75: mol_type = other DNA
ttcacaaatgccggaagccgtatggcataccgctttcatgccatgcaggcccatcccaacatcgttgacgtcgcc

SEQ ID NO: 689185 - DNA, 75 bp, synthetic construct
  source 1..75: mol_type = other DNA
cttcttaagtgtggagatgaatttttatcgccgacagatattgtcgaccgcattgttcaacataatcttcatgag

SEQ ID NO: 689186 - DNA, 75 bp, synthetic construct
  source 1..75: mol_type = other DNA
atgggtggccagtatctgctttttgccgccatcttcaagggggaggggggggatcaaatctctgcaacccaggct

SEQ ID NO: 689187 - DNA, 75 bp, synthetic construct
  source 1..75: mol_type = other DNA
acggccagctctggcggttcagagcaggaagacaatgaccggctccgggagcgtatcaggctggccccggagtca

SEQ ID NO: 689188 - DNA, 75 bp, synthetic construct
  source 1..75: mol_type = other DNA
aacagcgccatacagaactgggtggcatcacgtaccgccacgctggggcgcgatattgttcccagccagattatc

SEQ ID NO: 689189 - DNA, 75 bp, synthetic construct
  source 1..75: mol_type = other DNA
tggtctggctttgctggtacgatttgatgctgggtaattgccttgatgactggaccgacaacctcaggttcaaaa

SEQ ID NO: 689190 - DNA, 75 bp, synthetic construct
  source 1..75: mol_type = other DNA
ttaccggcaacggctattttcatggtcgcccgtcggcaacggcagaaatgccctataatccacaggcttctggcg

SEQ ID NO: 689191 - DNA, 75 bp, synthetic construct
  source 1..75: mol_type = other DNA
agccgattttgataccttcggcaaaggtgcctggacttttgaattgcgcgttaatgccgtggcggcgctggaaac

SEQ ID NO: 689192 - DNA, 75 bp, synthetic construct
  source 1..75: mol_type = other DNA
tcaaaagaggtctttagcagaacacgtctatgccgagtttgaacgtcgcggaattaacgtttctatatcaggtta

SEQ ID NO: 689193 - DNA, 75 bp, synthetic construct
  source 1..75: mol_type = other DNA
cggcctgccggaggacagcatccttacgctggtagagagtttctgctcggacgaaaaagtcaggccgctcactga

SEQ ID NO: 689194 - DNA, 75 bp, synthetic construct
  source 1..75: mol_type = other DNA
ttgaacgcgatgccgataaaatcacggctgaaatgattgcacaatacgaagccgcaaccggcaaaacgctgtacc

SEQ ID NO: 689195 - DNA, 75 bp, synthetic construct
  source 1..75: mol_type = other DNA
accacgccgtacatttttgcgattggcagcctgctggacggaaacgggaagaaaattgccacggataatgagacg

SEQ ID NO: 689196 - DNA, 75 bp, synthetic construct
  source 1..75: mol_type = other DNA
gaagccgaatggtcagcagacactgcgtatcatcatggcctcggaccatctgccgaaggataaagagtcggtgta

SEQ ID NO: 689197 - DNA, 75 bp, synthetic construct
  source 1..75: mol_type = other DNA
tacggtgagcttgaagcttggacgattaacaacatacagaaatcagtcgagttgaagaaaaatagtaaagatacc

SEQ ID NO: 689198 - DNA, 75 bp, synthetic construct
  source 1..75: mol_type = other DNA
cctgatgactattgcgagcaattgttatctgaacagttgaaacggcagggtaataccacacgttgggtaaaagtt

SEQ ID NO: 689199 - DNA, 75 bp, synthetic construct
  source 1..75: mol_type = other DNA
aatggaatggagtaacgtacatttcgattggcatacgattaacggtaaatcattacccaacccagatacagccgt

SEQ ID NO: 689200 - DNA, 75 bp, synthetic construct
  source 1..75: mol_type = other DNA
attcttggatcgctggtaaggtgaagccagtattagaggcaacgccagaattaaaagcgatgatcaccgacaaat

SEQ ID NO: 689201 - DNA, 75 bp, synthetic construct
  source 1..75: mol_type = other DNA
gaatgtggttaaggttgcttcactgaacgattacggtgaactgcagacctggacaattaaccagaaaaaaacgcc

SEQ ID NO: 689202 - DNA, 75 bp, synthetic construct
  source 1..75: mol_type = other DNA
gtgagtaagcgtaatgcagtaacgacgtttttcgctaaacgggtgacaaaagtactgggaatgactctggcgctg

SEQ ID NO: 689203 - DNA, 75 bp, synthetic construct
  source 1..75: mol_type = other DNA
aaatgtggttaaggttgattccctgaacgattacggcgaactgcagacctggacgattaataagaagaaaccgac

SEQ ID NO: 689204 - DNA, 75 bp, synthetic construct
  source 1..75: mol_type = other DNA
atttttgctattggatctctacttgatgaaaaaggaaaaaaattggcagttaatcaagatgcggcccagaaattg

SEQ ID NO: 689205 - DNA, 75 bp, synthetic construct
  source 1..75: mol_type = other DNA
gttactatcactaataataataaagagcatacatttggtggacaggcatggttggataatattgtagagaaagat

SEQ ID NO: 689206 - DNA, 75 bp, synthetic construct
  source 1..75: mol_type = other DNA
ccctgaacgattacggtgaactgcagacctggacgattaaccagaaaaaaacgtcagcttcttccgggcataagg

SEQ ID NO: 689207 - DNA, 75 bp, synthetic construct
  source 1..75: mol_type = other DNA
atgaaactgatttctaataaggccaaattaaaaaagattcttaaaaatatctctgcggcaattcgcccacctaaa

SEQ ID NO: 689208 - DNA, 75 bp, synthetic construct
  source 1..75: mol_type = other DNA
gtcttacgttgtcctttaattcatcctacagtaatgtttagagcgaaagtgtttaaacatggtcttcgatatcca

SEQ ID NO: 689209 - DNA, 75 bp, synthetic construct
  source 1..75: mol_type = other DNA
gcatgattgtaaggaagagatgggatgggatatctttttcgaacaggactatttgttgcaagaaaacaaactggc

SEQ ID NO: 689210 - DNA, 75 bp, synthetic construct
  source 1..75: mol_type = other DNA
attcaatcagaagataaacattcaggcccggaactggagcctagtgtgtcggaagatgttgctttgcctggtaat

SEQ ID NO: 689211 - DNA, 75 bp, synthetic construct
  source 1..75: mol_type = other DNA
gccgcatccggcatgaacaaagcttactttgtctacaatctgaatcggggctatcgtgcccagtttattctttat

SEQ ID NO: 689212 - DNA, 75 bp, synthetic construct
  source 1..75: mol_type = other DNA
ctgactggtgcggatggcggcccgatcaagaccgagacgaccaacctcaccgcagatcaggccgcagagatttac

SEQ ID NO: 689213 - DNA, 75 bp, synthetic construct
  source 1..75: mol_type = other DNA
tgaaaaagatgaaactaataactttgagtaatttaatattgttgtcattcaaatttatatcccactttatgccgc

SEQ ID NO: 689214 - DNA, 75 bp, synthetic construct
  source 1..75: mol_type = other DNA
aaatcattaaagcatcaaaaatttttatcatgcctcctgctgattacacgccgtcagaatgggtcgaacagaact

SEQ ID NO: 689215 - DNA, 75 bp, synthetic construct
  source 1..75: mol_type = other DNA
gacgaaatcgatgctgctacagcctcagaagaaggtgatccggtggcactggctgctaaccgtttaactaccttt

SEQ ID NO: 689216 - DNA, 75 bp, synthetic construct
  source 1..75: mol_type = other DNA
tcgtgagctattaacacgcaacttgaaggataatccgcatattggcttagagatatcacacaccgttcctgatga

SEQ ID NO: 689217 - DNA, 75 bp, synthetic construct
  source 1..75: mol_type = other DNA
tcgtgcgctaaaaattattaatgtaactccactaccaaagcaattattaaaaaacatccgaagcacattcacttc

SEQ ID NO: 689218 - DNA, 75 bp, synthetic construct
  source 1..75: mol_type = other DNA
tgatctgaacgaggatgtggaaatcagtaaattaaacgaactgaaaactgatatcagtatcagaaatattccaga

SEQ ID NO: 689219 - DNA, 75 bp, synthetic construct
  source 1..75: mol_type = other DNA
agaagaacaaaacgaaacaaattctcctgttattcaaactcctgaaccacgtcgaaacattatcaaacgaaacag

SEQ ID NO: 689220 - DNA, 75 bp, synthetic construct
  source 1..75: mol_type = other DNA
atgacagaagagaactttcatcaggtcatcgatcactttctggttatgcgtatctgtctggagccgcaagcttgc

SEQ ID NO: 689221 - DNA, 75 bp, synthetic construct
  source 1..75: mol_type = other DNA
cggacgttaattgcccgcacgcgcaatagctggcatgcgaataaaggcgaatatgacttctcacacgaagtcaaa

SEQ ID NO: 689222 - DNA, 75 bp, synthetic construct
  source 1..75: mol_type = other DNA
ggatatgtgcgatccgcaacaagagattttgatgaagcaaatctctgatgacgtggtggcgctgactgcgaaata

SEQ ID NO: 689223 - DNA, 75 bp, synthetic construct
  source 1..75: mol_type = other DNA
ccagcctgtgttactgccattttcgccaaatggcaaagcccagcatatcaaaggctttcttaatcgttttgcgaa

SEQ ID NO: 689224 - DNA, 75 bp, synthetic construct
  source 1..75: mol_type = other DNA
ttattggtgtctatccatctggtactcatcatggtcaagatagcccaaatgaaaaatattttgatggtaacaacc

SEQ ID NO: 689225 - DNA, 75 bp, synthetic construct
  source 1..75: mol_type = other DNA
cggtttatgaatcaatcactggcgtctatccagagatgaaatacacggctttgtcatcgaacactatggtaggag

SEQ ID NO: 689226 - DNA, 75 bp, synthetic construct
  source 1..75: mol_type = other DNA
cgatatttgcccgttttggcgcgaaactggaaaaatgtcagcgtgggttgctgcggcatggcagggacttacgga

SEQ ID NO: 689227 - DNA, 75 bp, synthetic construct
  source 1..75: mol_type = other DNA
agaaataaaatacctggcttcaaagagatagaaacaaacaacaagattggcaaaaactatcgctttaacatcaag

SEQ ID NO: 689228 - DNA, 75 bp, synthetic construct
  source 1..75: mol_type = other DNA
tgattgaaaataaatacaacgaatttagagaagaaatatctttactttttgactatttaaatcagataaatgata

SEQ ID NO: 689229 - DNA, 75 bp, synthetic construct
  source 1..75: mol_type = other DNA
tgacagcgactttctttttcatatgcaggggaaaccgctgtttcgttttgcttcttcgcttattgaagattattt

SEQ ID NO: 689230 - DNA, 75 bp, synthetic construct
  source 1..75: mol_type = other DNA
gaatacagcccggcgtttttcggtgaggaactttttgcagaactgcgcaaagtgaaagcggcatttgacccgcat

SEQ ID NO: 689231 - DNA, 75 bp, synthetic construct
  source 1..75: mol_type = other DNA
ctccccgatgcggtggtatttccgcgttcaaccgcagatgtggcgctgatcgcccgtcttgccgcgcaggaacgc

SEQ ID NO: 689232 - DNA, 75 bp, synthetic construct
  source 1..75: mol_type = other DNA
atgattccacagatttcccaggcacccggcgtcgttcaactggtgcttaattttttgcaagagctggagcaacaa

SEQ ID NO: 689233 - DNA, 75 bp, synthetic construct
  source 1..75: mol_type = other DNA
ggtcacctgatgtatgggctggtggaggtattggacttattgcaggtctgctacttcgctatttcatcgtcagag

SEQ ID NO: 689234 - DNA, 75 bp, synthetic construct
  source 1..75: mol_type = other DNA
cggatgtattggttgtggctgcctttcgcgcagtgattgcccgttgcgtaacccgggcgaccgcttagggaaggt

SEQ ID NO: 689235 - DNA, 75 bp, synthetic construct
  source 1..75: mol_type = other DNA
gcagtgaacaggcacgcatccgccgccaacaatatttgcaacagtacaaaatgccaaatgagatacatgaaaatg

SEQ ID NO: 689236 - DNA, 75 bp, synthetic construct
  source 1..75: mol_type = other DNA
tcgcgattttgattgtctttgcaatcctttttccgattttaatttcatcagataacaaactgtccgcactttttt

SEQ ID NO: 689237 - DNA, 75 bp, synthetic construct
  source 1..75: mol_type = other DNA
tctggctgagaagctggcgcaacgcatcttaaaaggtgaatatgaacccggcaccattttgcctggtgagattga

SEQ ID NO: 689238 - DNA, 75 bp, synthetic construct
  source 1..75: mol_type = other DNA
ctgctccgctatttcatcgttcgggtgtttatcgtgttcagattgttcggtcgtgaatggtcgtttgacctcaag

SEQ ID NO: 689239 - DNA, 75 bp, synthetic construct
  source 1..75: mol_type = other DNA
tcgcgtagcgactgcccgttgcgtaacccgggcgaccgcttaggggaagaaggtactggcgcgcgtttgctggaa

SEQ ID NO: 689240 - DNA, 75 bp, synthetic construct
  source 1..75: mol_type = other DNA
tgtttatcgtgttcagattgtttggtcgagaatggtcgtttgacctcaaggacaggactcgaacagataaccata

SEQ ID NO: 689241 - DNA, 75 bp, synthetic construct
  source 1..75: mol_type = other DNA
acgcctgctacggcaaaaaaagcgtcgtctacgcaatctcgcctgcagaatgctggtgcgaagaaacgccctaaa

SEQ ID NO: 689242 - DNA, 75 bp, synthetic construct
  source 1..75: mol_type = other DNA
catagtttttgcgccaaaataccgaagacaggtgttctacagagagaagcgtaaagcaataggcagtattttgag

SEQ ID NO: 689243 - DNA, 75 bp, synthetic construct
  source 1..75: mol_type = other DNA
aggattgcgcggagcagaaaacggaaaatctggaatccctgtcagaagaaattctcgcagccagcgccgtatcgc

SEQ ID NO: 689244 - DNA, 75 bp, synthetic construct
  source 1..75: mol_type = other DNA
catagtatttgcgccaaaataccgaagacaggtgttctacagagagaagcgtagagcaagaggcagtattttgag

SEQ ID NO: 689245 - DNA, 75 bp, synthetic construct
  source 1..75: mol_type = other DNA
catagtatttgcgccaaaataccgaagacaggtgttctacagagagaagcgtagagcaaaaggcggtattttgag

SEQ ID NO: 689246 - DNA, 75 bp, synthetic construct
  source 1..75: mol_type = other DNA
ccttcgcctcgaaggcagactggaggcgcaacaatacccagcaattgatcgccaaagtatcgcgcaccattaaaa

SEQ ID NO: 689247 - DNA, 75 bp, synthetic construct
  source 1..75: mol_type = other DNA
tggatgagataaaagaagagttagcaaaagatattcaaaaacagtttaatgatatgctcaaaaaggcatttaaag

SEQ ID NO: 689248 - DNA, 75 bp, synthetic construct
  source 1..75: mol_type = other DNA
cagatagctcgccgtcataaggaggcgattgcacttggaaatgaccccaaggcagagcgcgataattatcgtgcg

SEQ ID NO: 689249 - DNA, 75 bp, synthetic construct
  source 1..75: mol_type = other DNA
cgttatccggttgatggtgtgcagttcgacgactatttctacaccgaatcaccaggttcactgcttaacgataac

SEQ ID NO: 689250 - DNA, 75 bp, synthetic construct
  source 1..75: mol_type = other DNA
gcaatttatgctcgatgaagcccacaagcgtgggatgaaagtacacgcctggtttaacccctatcgcgtatcggt

SEQ ID NO: 689251 - DNA, 75 bp, synthetic construct
  source 1..75: mol_type = other DNA
ttcaaagccaccagccacgacgcaacaatcgtcacaaccgatgcgtggcatctggctggccacggtttctcggct

SEQ ID NO: 689252 - DNA, 75 bp, synthetic construct
  source 1..75: mol_type = other DNA
gtttattgcgccagaggattacgtgattgtttctgcggactactcgcagattgaactgcgcattatggcgcatct

SEQ ID NO: 689253 - DNA, 75 bp, synthetic construct
  source 1..75: mol_type = other DNA
atctgaaaatgtggccggatctgcagaaacacaaagggccgttgaacgtcttcgaaaacatcgaaatgccgctgg

SEQ ID NO: 689254 - DNA, 75 bp, synthetic construct
  source 1..75: mol_type = other DNA
tttctggcgtagaagcagacgatgttatcggcactctggcacgcgaagcagaaaaagccggtcgcccggtactga

SEQ ID NO: 689255 - DNA, 75 bp, synthetic construct
  source 1..75: mol_type = other DNA
ttgcattatccattattgattcgatcccacgggctggcagcaacccctatctgtttgccgtaaaagataatggaa

SEQ ID NO: 689256 - DNA, 75 bp, synthetic construct
  source 1..75: mol_type = other DNA
ggtgatgatgttttatgccttgtgttttattaatcaaagcattcaacaactgaaacaacctgcgcaggaggccag

SEQ ID NO: 689257 - DNA, 75 bp, synthetic construct
  source 1..75: mol_type = other DNA
tattaggtgctgcatataccgtcggcgcgcagcgacatctctctattgatttatttgctctcgccctgaataagc

SEQ ID NO: 689258 - DNA, 75 bp, synthetic construct
  source 1..75: mol_type = other DNA
ttctgttccgcgaagattaccttaataagccacagacccaacaagccgttagttatctgcaaagtcgttggggta

SEQ ID NO: 689259 - DNA, 75 bp, synthetic construct
  source 1..75: mol_type = other DNA
caataggcagtattttgagaaagctgtgtgagtggaaaagtgtacggattctggaagctgaatgctgtgcagatc

SEQ ID NO: 689260 - DNA, 75 bp, synthetic construct
  source 1..75: mol_type = other DNA
catagtttttgcgccaaaataccgaagacaggtgttctacagagagaggcgtagagcaataggcagtattttgag

SEQ ID NO: 689261 - DNA, 75 bp, synthetic construct
  source 1..75: mol_type = other DNA
caggcatggctgcccgttgagaaatcctggaaactgaacgaacgtcactacggtgcgttgcagggtctgaacaaa

SEQ ID NO: 689262 - DNA, 75 bp, synthetic construct
  source 1..75: mol_type = other DNA
agagggtactacgtcgatacggtgggtaagaacacggcgaagatacaggattacataaagcaccagcttgaagag

SEQ ID NO: 689263 - DNA, 75 bp, synthetic construct
  source 1..75: mol_type = other DNA
gatcttttttgccgtaggtggcatcggctggttgttggcagtgctgaaaaaactgtcaccggcattacgcacgct

SEQ ID NO: 689264 - DNA, 75 bp, synthetic construct
  source 1..75: mol_type = other DNA
tgggatatctgaaagggaaaagcagtctgatgctttacgagcagtttggtgatttgaaattcaaatacaggaaca

SEQ ID NO: 689265 - DNA, 75 bp, synthetic construct
  source 1..75: mol_type = other DNA
tgttcgcccgactaaccgtgggaaaatttccgaagaagacaccaccgaaacgccgatgtatgtcaatcgcggtgg

SEQ ID NO: 689266 - DNA, 75 bp, synthetic construct
  source 1..75: mol_type = other DNA
ctacctcgacaacggagttgctggaggccgtgcagcgcctgcggactgagtttcccgacacctggctgcagacgc

SEQ ID NO: 689267 - DNA, 75 bp, synthetic construct
  source 1..75: mol_type = other DNA
aattagcgattagaagaccagcggtactggttgcactggcacttttactgtgtagttgcaaaagcacgcccccag

SEQ ID NO: 689268 - DNA, 75 bp, synthetic construct
  source 1..75: mol_type = other DNA
tgttcgtccgactaaccgcgggaaaatttccgaagaagacaccaccgaaacgccgatgtatgtcaatcgcggtgg

SEQ ID NO: 689269 - DNA, 75 bp, synthetic construct
  source 1..75: mol_type = other DNA
attctaccttcgactgggttttatacagttaaaggaagaaaactgtgattcgctcttctacccgacaaaatctat

SEQ ID NO: 689270 - DNA, 75 bp, synthetic construct
  source 1..75: mol_type = other DNA
cggcggcgtatttgaaaccaaaatcggcgctgttctcagtgaagtcgcttccggtgtgatgaacacgaaaaccaa

SEQ ID NO: 689271 - DNA, 75 bp, synthetic construct
  source 1..75: mol_type = other DNA
cgggcaaaacctgaaatacgatcgcggtattctggcgaactacggcattgagctgcgtgggattgcgtttgatac

SEQ ID NO: 689272 - DNA, 75 bp, synthetic construct
  source 1..75: mol_type = other DNA
attgctcgcgggcatcgtcacattgcctatctcggcgcacgtctcgacgaacgtactatcatcaaacagaaggga

SEQ ID NO: 689273 - DNA, 75 bp, synthetic construct
  source 1..75: mol_type = other DNA
gattcccgtggtggaactgatggacagcaagtcgccatgcctcgatattgccgtcggctttgataactttgaagc

SEQ ID NO: 689274 - DNA, 75 bp, synthetic construct
  source 1..75: mol_type = other DNA
tgcaccacagctaaaaggttatcagcctgcggttccgctactttccgtatcattcattctgcttctggcaggaga

SEQ ID NO: 689275 - DNA, 75 bp, synthetic construct
  source 1..75: mol_type = other DNA
agcgtctggggttgaaagttcctgacgatatggcgattgccggtttccacggtcatgacattggccaggtgatgg

SEQ ID NO: 689276 - DNA, 75 bp, synthetic construct
  source 1..75: mol_type = other DNA
gaccaaaatgacggtcagccgctttttacgtaacccggagcaggtttccgtcgctctacgcggcaagattgccgc

SEQ ID NO: 689277 - DNA, 75 bp, synthetic construct
  source 1..75: mol_type = other DNA
ccttaaaaatgattgaggtagcgggaattccggtggtggagctgatggacagccagtcgccgtgtcttgatattg

SEQ ID NO: 689278 - DNA, 75 bp, synthetic construct
  source 1..75: mol_type = other DNA
gagctggcacatggaagtaccagcttttctaaaaaaggtcaaatagaccctttagaagaagtcaaatcgaggtca

SEQ ID NO: 689279 - DNA, 75 bp, synthetic construct
  source 1..75: mol_type = other DNA
accggcgtgactgtctcggagaatttgttcagattgatggttctccacatgactggtttgaaggacgcgccccaa

SEQ ID NO: 689280 - DNA, 75 bp, synthetic construct
  source 1..75: mol_type = other DNA
actccctgagtcactgaagctgcgtgtactttctttacttcacgatcactacagcgactttggaccaacgcttgc

SEQ ID NO: 689281 - DNA, 75 bp, synthetic construct
  source 1..75: mol_type = other DNA
atgggaaatggatggcatgagtggccactggttatctttaccgtattgggtcaatgcgtagtaggcgcgctgatt

SEQ ID NO: 689282 - DNA, 75 bp, synthetic construct
  source 1..75: mol_type = other DNA
aaaaaagagtctctacagattatttaaaagaatataaattttatcttccatcaatatttgagcaagaaaaaattg

SEQ ID NO: 689283 - DNA, 75 bp, synthetic construct
  source 1..75: mol_type = other DNA
taggtgggattttacagatttaaaatatcttgatctcagtgtaaaagaaaaggataaatatttggttaaagaagg

SEQ ID NO: 689284 - DNA, 75 bp, synthetic construct
  source 1..75: mol_type = other DNA
cgcactgcacagtggcacgggtaaagtcagctacgtgggcggcaacagcaaaagttcagcgctgtttatcgctct

SEQ ID NO: 689285 - DNA, 75 bp, synthetic construct
  source 1..75: mol_type = other DNA
gtgctgcacaatcattctgaagagctcactcttcgtctggctgagctggaaaagaaagcgcatgaaattgcaggt

SEQ ID NO: 689286 - DNA, 75 bp, synthetic construct
  source 1..75: mol_type = other DNA
gatgcggatgtcaccttgcagttgcatctgaaaatgtggccggatctgcaaaaacacaaagggccgttgaacgtc

SEQ ID NO: 689287 - DNA, 75 bp, synthetic construct
  source 1..75: mol_type = other DNA
gccaagggaaaaacctttcgtgatgaactgtttgaacattacaaatcacatcgcccgccaatgccggacgatctg

SEQ ID NO: 689288 - DNA, 75 bp, synthetic construct
  source 1..75: mol_type = other DNA
ctcgcgtgacaaggggttgctgacggcgttcgccgaaggaaaagatatccatcgggctacggcggcagaagtgtt

SEQ ID NO: 689289 - DNA, 75 bp, synthetic construct
  source 1..75: mol_type = other DNA
taacggcgtgaagatcgatccgaaagtactgcacaatcattctgaagagctcactctgcgtctggcggagctgga

SEQ ID NO: 689290 - DNA, 75 bp, synthetic construct
  source 1..75: mol_type = other DNA
atgatcatgcaggtacacgatgaactggtatttgaagttcataaagatgatgtcgatgccgtcgcgaagcagatt

SEQ ID NO: 689291 - DNA, 75 bp, synthetic construct
  source 1..75: mol_type = other DNA
gttctggctttggcgctgctcaaaggcgacctgcgagcagaagcccagcagcgtgttatcgcctgcatgttgggt

SEQ ID NO: 689292 - DNA, 75 bp, synthetic construct
  source 1..75: mol_type = other DNA
aaagtttactggccctggactcactgggaacaggtgccgtttctttttcgtttgggcaaccccagggaaagtgca

SEQ ID NO: 689293 - DNA, 75 bp, synthetic construct
  source 1..75: mol_type = other DNA
agaccccgccaggctactttcatgcgccctggatcccgcctggcacacaacggattatacactgactgataaaga

SEQ ID NO: 689294 - DNA, 75 bp, synthetic construct
  source 1..75: mol_type = other DNA
tgtgttacaggcactggcaaaagccggaaaactcacctcttctatcggcgttgtcacttatcaggaaactattcc

SEQ ID NO: 689295 - DNA, 75 bp, synthetic construct
  source 1..75: mol_type = other DNA
atgcagggcgcagagctggcgactattcatagctctgtgcagcaggccgcagcgctggtgccggactatggtgcg

SEQ ID NO: 689296 - DNA, 75 bp, synthetic construct
  source 1..75: mol_type = other DNA
tgtttatgggcggcccgttactgggttacctgttgctgagtctggctggtgtcgatggctgggcgatgcgtctgc

SEQ ID NO: 689297 - DNA, 75 bp, synthetic construct
  source 1..75: mol_type = other DNA
ccgatggttcctgttttcaccccggtttggcgagcacccgtgatggttcgtttggcgtaggtgataaagcggctc

SEQ ID NO: 689298 - DNA, 75 bp, synthetic construct
  source 1..75: mol_type = other DNA
ttagtcgccctgccatctgccggatgcttgggggaattagcaggggaacgttttacttatggcgtaaaaaatggg

SEQ ID NO: 689299 - DNA, 75 bp, synthetic construct
  source 1..75: mol_type = other DNA
ctaactcggtggccagtttttgttgaccacttcacttatactcgccagggatatgcaattgaagcaattaccgcc

SEQ ID NO: 689300 - DNA, 75 bp, synthetic construct
  source 1..75: mol_type = other DNA
aaattacttatcaggattggcttcaacttttcaggcatcgaagagggtgagcatatttatgttctggatttaaca

SEQ ID NO: 689301 - DNA, 75 bp, synthetic construct
  source 1..75: mol_type = other DNA
cggccggaggaatggctggcagaccggcaagctcgcctcgacatgcggttgcgcgagcttggccgtgccgctcgc

SEQ ID NO: 689302 - DNA, 75 bp, synthetic construct
  source 1..75: mol_type = other DNA
atgaaactgacaacaataattgcggcgttgcgtgagcgatgcccgcgttttgataatcgggttggtggcgcggcg

SEQ ID NO: 689303 - DNA, 75 bp, synthetic construct
  source 1..75: mol_type = other DNA
cagtttaaggcgatccctgatgccggaaaactgcgactgcctgctgcctatgttgtcccctctgacgatgcgccg

SEQ ID NO: 689304 - DNA, 75 bp, synthetic construct
  source 1..75: mol_type = other DNA
tattaaaaacttgccgaaaaacagcaatatcagcccgcagagtcgctctccagattatccattccaatattatct

SEQ ID NO: 689305 - DNA, 75 bp, synthetic construct
  source 1..75: mol_type = other DNA
atggcaggtaaagttacggaaaccgctgttgtgggtggcgtggatacacataaagatctgcacgttgccgctgtc

SEQ ID NO: 689306 - DNA, 75 bp, synthetic construct
  source 1..75: mol_type = other DNA
atattatctctgccccggatgaattacgtgaacagctcagaaatatgacgcgcatgcagctcatcaggactctgg

SEQ ID NO: 689307 - DNA, 75 bp, synthetic construct
  source 1..75: mol_type = other DNA
ttgctgggagttcttacacttgctcgcgatattcaattggccattgtcaacaagatgacgcaggttttgattggt

SEQ ID NO: 689308 - DNA, 75 bp, synthetic construct
  source 1..75: mol_type = other DNA
aattgttcatcaatagacaataagagtgggagttataaaaatgataattgtgctttacgtaataacaatacccca

SEQ ID NO: 689309 - DNA, 75 bp, synthetic construct
  source 1..75: mol_type = other DNA
gattgtttatcgacgccagataataaatttgatgaacataaatacgataaatgtgctctacggagtaataataaa

SEQ ID NO: 689310 - DNA, 75 bp, synthetic construct
  source 1..75: mol_type = other DNA
agtatacgcaagctaaaaattcagaatacagagatggcctttctttctgatgatgagattgagcggcttcttgag

SEQ ID NO: 689311 - DNA, 75 bp, synthetic construct
  source 1..75: mol_type = other DNA
attatggtatcgcacgatatgaagaatttacgtcaacaatgtgatatggggatagtgcttcgcaacagcaccctt

SEQ ID NO: 689312 - DNA, 75 bp, synthetic construct
  source 1..75: mol_type = other DNA
gcaggcgaatccacaaacgcgctttactattctgcgcccacaaagtctgttcggaccgcacgataaagtctttat

SEQ ID NO: 689313 - DNA, 75 bp, synthetic construct
  source 1..75: mol_type = other DNA
cggtcgcaacgaagcgatgggcaaattgctggaaaaaataggtgcagagtttgtccatgcggatctgactgagct

SEQ ID NO: 689314 - DNA, 75 bp, synthetic construct
  source 1..75: mol_type = other DNA
accgacacagtttaacggacgatcgctggtacagattgcgcaggcgcttgctgcgcctttcggcattgaggtggt

SEQ ID NO: 689315 - DNA, 75 bp, synthetic construct
  source 1..75: mol_type = other DNA
cgcgaacaggatatcgcccaggcaaaagccagcctcgaacaggcgcaggcgcaactggcgcaggcggagctgaat

SEQ ID NO: 689316 - DNA, 75 bp, synthetic construct
  source 1..75: mol_type = other DNA
tggcggtagtggtacttgccgccgtggttgccggaggctactggtggtatcaaagccgccaggataacggcctga

SEQ ID NO: 689317 - DNA, 75 bp, synthetic construct
  source 1..75: mol_type = other DNA
atggaccgcgcgatcggtcataagctggcgaaaggccgcccggagcgcgaatatttacagactggcgatgcggta

SEQ ID NO: 689318 - DNA, 75 bp, synthetic construct
  source 1..75: mol_type = other DNA
ggaagaaatcgccaaattactggatgcagtaagcggtgatgcccggcggattacgctactttgtctcagtactgg

SEQ ID NO: 689319 - DNA, 75 bp, synthetic construct
  source 1..75: mol_type = other DNA
aactttgcaacagtgccgttgctggcattgctcgaggagacggctgatgatcgggtgacccgttttgtgtggctg

SEQ ID NO: 689320 - DNA, 75 bp, synthetic construct
  source 1..75: mol_type = other DNA
ctgccttccgggcgagcatataacattaccaacggcgagcatcgcactctacgcagcatcgtgcaaaaactgatc

SEQ ID NO: 689321 - DNA, 75 bp, synthetic construct
  source 1..75: mol_type = other DNA
agttaggttatcagccagtcatcaccctggatgaaggtatcgagaaaactgccgcctggctacgcgaccacggaa

SEQ ID NO: 689322 - DNA, 75 bp, synthetic construct
  source 1..75: mol_type = other DNA
atttggcatgaaagcgccggggctgggacgactgtgttttagcctggaagataaaggcgactatcgtactatcga

SEQ ID NO: 689323 - DNA, 75 bp, synthetic construct
  source 1..75: mol_type = other DNA
gtaaccaacgtttatcgcatttcattaaagtcccttgcccgacgctatctcgagttacatgacgaaatcgctgat

SEQ ID NO: 689324 - DNA, 75 bp, synthetic construct
  source 1..75: mol_type = other DNA
aaaacggtgccttccgtaccctgacggttaagacacttgatgccacgggcagtgattttgtcctgcgcactgacc

SEQ ID NO: 689325 - DNA, 75 bp, synthetic construct
  source 1..75: mol_type = other DNA
acaaaaagggctctacagtgacggccgggttcagattggaaagaacggtacgctttccctgagcggcacgccgga

SEQ ID NO: 689326 - DNA, 75 bp, synthetic construct
  source 1..75: mol_type = other DNA
gaaaaaagcgcatccggtgctgttaatcggcgtgacttttgtgctctctattgtttgttccgcattcggcatttt

SEQ ID NO: 689327 - DNA, 75 bp, synthetic construct
  source 1..75: mol_type = other DNA
aaacgtcagtatgaataatggcctgtggcagctgaccggagattccgacatcaacagtctgacgacccgtaacag

SEQ ID NO: 689328 - DNA, 75 bp, synthetic construct
  source 1..75: mol_type = other DNA
aacggtcaaactggggcaggccgatgcgctggataaaaatagtgattacagaggtatttattttaccagccgtgg

SEQ ID NO: 689329 - DNA, 75 bp, synthetic construct
  source 1..75: mol_type = other DNA
cattctgggaacaacatatggtaaggcattctccagtaaggatacctgggccttttttgcccgatatgaccagaa

SEQ ID NO: 689330 - DNA, 75 bp, synthetic construct
  source 1..75: mol_type = other DNA
acgaccccatcaaaaagaagaagaaaatgaaggcaccgttggcgtctatggtattggtatgaaaagagccatttt

SEQ ID NO: 689331 - DNA, 75 bp, synthetic construct
  source 1..75: mol_type = other DNA
catacagcaacaggaaaactcagccaataaaaataataatacagattataagaccaataatcaggtatcatcatt

SEQ ID NO: 689332 - DNA, 75 bp, synthetic construct
  source 1..75: mol_type = other DNA
tcatggttctgtttcaggtaatacagagataaaccaccagtttgatacccaaaaaaataatagtcgcctgattct

SEQ ID NO: 689333 - DNA, 75 bp, synthetic construct
  source 1..75: mol_type = other DNA
cgactgggaaaaccggcattttcgttttaagacgttgaatctggataatgctgagttcacaactgcacgaaactc

SEQ ID NO: 689334 - DNA, 75 bp, synthetic construct
  source 1..75: mol_type = other DNA
tatgtccccggagttctttgtgacaaagattatgttactgattttgccagactggaaagtgaggcaaataagaaa

SEQ ID NO: 689335 - DNA, 75 bp, synthetic construct
  source 1..75: mol_type = other DNA
cgtgatgcatccggagagaaacggattaagggggagaaggacagccggatgttgtttaatgtcggcatgaacgcg

SEQ ID NO: 689336 - DNA, 75 bp, synthetic construct
  source 1..75: mol_type = other DNA
tggcagtagcagctatacgggcaatattacactgcaaaaaggctccacgctggacatcaacaaccggttcactgg

SEQ ID NO: 689337 - DNA, 75 bp, synthetic construct
  source 1..75: mol_type = other DNA
cggctccacctctgaatttacgccgggttatgtcaagccgaagcacttagcatggctttctgaggctttcgtgta

SEQ ID NO: 689338 - DNA, 75 bp, synthetic construct
  source 1..75: mol_type = other DNA
gacgatgcgatgggaatgcagtacctgatccccggctggacgttcgataacaagcgtccgtgcatggtgcgttaa

SEQ ID NO: 689339 - DNA, 75 bp, synthetic construct
  source 1..75: mol_type = other DNA
tgcgattccgctggtggtgggtaaaacgctgggcgagtacaaaaacgttctgacgctggtgcgtaacacgtttgc

SEQ ID NO: 689340 - DNA, 75 bp, synthetic construct
  source 1..75: mol_type = other DNA
tttggatgtcatgattgcggcaattgtcgatgagctggcgcctgaactgattaaacgtaatgctattgtgtcaac

SEQ ID NO: 689341 - DNA, 75 bp, synthetic construct
  source 1..75: mol_type = other DNA
tactctcaaaacgatcgcttacggataatatcatctctcaggtttgttgatgaagtatttttggaggagtcatta

SEQ ID NO: 689342 - DNA, 75 bp, synthetic construct
  source 1..75: mol_type = other DNA
taagttcgatccgctgtttctgcgcctgtttttccgtgaaacctatcctttcaccacggaaaaagtctatctctc

SEQ ID NO: 689343 - DNA, 75 bp, synthetic construct
  source 1..75: mol_type = other DNA
tgccgactgcaaccaatatgatcgccaccgactggcggcaaatgggccatacgctctcgttacaatccgttgata

SEQ ID NO: 689344 - DNA, 75 bp, synthetic construct
  source 1..75: mol_type = other DNA
gaacatcagccagcaggcgcatgtttccggggatgttcatgcaaccagttcatccagcattcgtattggctccga

SEQ ID NO: 689345 - DNA, 75 bp, synthetic construct
  source 1..75: mol_type = other DNA
atcaggggatatctttaaggcgggcacccgagtgacaggcttcagccgggtaacaccgacactgcgtgttgacac

SEQ ID NO: 689346 - DNA, 75 bp, synthetic construct
  source 1..75: mol_type = other DNA
gacgatgcgatgggaatgcagtacctgattcctggctggacgttcgataacaagcgtccgtgcatggtgcgttaa

SEQ ID NO: 689347 - DNA, 75 bp, synthetic construct
  source 1..75: mol_type = other DNA
gcctggcggaagcggcatatgaaaaatatggcttcaacgatttcaaactgaagggcggtgtactggccggggaag

SEQ ID NO: 689348 - DNA, 75 bp, synthetic construct
  source 1..75: mol_type = other DNA
tagcgaagtcgaaatgctcggttatctgttcttcgtcggtaatcgcaaagccacaccgctgccgtatcaaagcca

SEQ ID NO: 689349 - DNA, 75 bp, synthetic construct
  source 1..75: mol_type = other DNA
gcagatttgaaggagagggaaagtattgtttatcgactacgaaagactgaactggcacaaagcatcgctggtctt

SEQ ID NO: 689350 - DNA, 75 bp, synthetic construct
  source 1..75: mol_type = other DNA
actgacatttccggatgacgttcctgcagatttgaaggagagggaaagtattgtttatcgactacgaaagactga

SEQ ID NO: 689351 - DNA, 75 bp, synthetic construct
  source 1..75: mol_type = other DNA
gtcagacctggccctgttgacagatgtacaggcagcccttcagcaggaaaagcatcatgcccttttcctgatggt

SEQ ID NO: 689352 - DNA, 75 bp, synthetic construct
  source 1..75: mol_type = other DNA
gcatcgatgttatggcccgtatccctgataacgccattgatttcatgtcgggtagcagctgcacattactgtgca

SEQ ID NO: 689353 - DNA, 75 bp, synthetic construct
  source 1..75: mol_type = other DNA
cagtggagtaaccggcctgctaaccatcatcggtgtactgcattattcccggctccccatgacatggcacgcaca

SEQ ID NO: 689354 - DNA, 75 bp, synthetic construct
  source 1..75: mol_type = other DNA
gatgatatcatcgaacgtgatgaagttgcctacaagcgatttctggaaatactgaaatccgaagggcatgttgat

SEQ ID NO: 689355 - DNA, 75 bp, synthetic construct
  source 1..75: mol_type = other DNA
aggcgatattgttgagaaaggtcaggtactgctgacactggatgatacccgaagctctgccatgctgagggaaag

SEQ ID NO: 689356 - DNA, 75 bp, synthetic construct
  source 1..75: mol_type = other DNA
cctcagggtgggtgctgttctagttatattgcaaatcttttattttttaatagtgagtataatatctataataga

SEQ ID NO: 689357 - DNA, 75 bp, synthetic construct
  source 1..75: mol_type = other DNA
gattcaggaaggtgaagatgtcctgattcgtcgctgtgattaccatctgaatctgattcatccgaaagattacag

SEQ ID NO: 689358 - DNA, 75 bp, synthetic construct
  source 1..75: mol_type = other DNA
accgggcgtaaaacagtattccagtatctgattaaaccgataaccagaatgaagcaggcacttcaggaaagataa

SEQ ID NO: 689359 - DNA, 75 bp, synthetic construct
  source 1..75: mol_type = other DNA
ataaatacctgacggaagccggtgctgaactggtgaagacagaagcagagcttgctcaggacaaaagagaatatg

SEQ ID NO: 689360 - DNA, 75 bp, synthetic construct
  source 1..75: mol_type = other DNA
tgtgcgcgaaggggcaatgtcggaagtcgaactgttacgtatgcagcgtcagtcagcagagctgcagttacagat

SEQ ID NO: 689361 - DNA, 75 bp, synthetic construct
  source 1..75: mol_type = other DNA
tggcggcatggctggcagcaaacgcaactgcgcgcgatttcgccacctgccaactggcaggtcaaccgaatgcag

SEQ ID NO: 689362 - DNA, 75 bp, synthetic construct
  source 1..75: mol_type = other DNA
atgaggatcatcgataacttagaacagttccgccagatttatgcctctggtaaaaagtggcaacgttgcgttgaa

SEQ ID NO: 689363 - DNA, 75 bp, synthetic construct
  source 1..75: mol_type = other DNA
ttgcgatatccatgaagcgtatcggtttatctgcaataacgcggtcaaaaaagtggttctcaaagtcaccatcga

SEQ ID NO: 689364 - DNA, 75 bp, synthetic construct
  source 1..75: mol_type = other DNA
acaactctgtatatatgttttgaacttactacacccaaaaaatcatgtggtgactattgggagcattattttgag

SEQ ID NO: 689365 - DNA, 75 bp, synthetic construct
  source 1..75: mol_type = other DNA
tccttcaaacactcaatactcattgctaaatcagcgagtactaaagatagttccaaaaaataacgcgagctctgg

SEQ ID NO: 689366 - DNA, 75 bp, synthetic construct
  source 1..75: mol_type = other DNA
tttatctgcaataacgcggtcaaaaaagtggttctcaaagtcggtaatgactccaacttattgatagtgttttat

SEQ ID NO: 689367 - DNA, 75 bp, synthetic construct
  source 1..75: mol_type = other DNA
accgtgaatatttaaaaggctgcggagaaaccgttgaggtccacgaagggcaaatcgttatttgcgatatccatg

SEQ ID NO: 689368 - DNA, 75 bp, synthetic construct
  source 1..75: mol_type = other DNA
acggtggtgttccaggatggcttccagctgaaaaccgtggaggagatggcgctggagcagtcacagagccaggcg

SEQ ID NO: 689369 - DNA, 75 bp, synthetic construct
  source 1..75: mol_type = other DNA
cccgcaatatcagttgcctgaaggagggtaaaaccatcgatatgccggttaaagggcatgtcagcttccggggta

SEQ ID NO: 689370 - DNA, 75 bp, synthetic construct
  source 1..75: mol_type = other DNA
gtgtccagtgagcgtgccattgtacgcacccgcaatatcagctgcctgaaggacggcaaaactattgatatgccg

SEQ ID NO: 689371 - DNA, 75 bp, synthetic construct
  source 1..75: mol_type = other DNA
ttagcaatactagtagaaaaattactcctgcgggattactaaatagctcagctgttcttttgccaaaaggtagtt

SEQ ID NO: 689372 - DNA, 75 bp, synthetic construct
  source 1..75: mol_type = other DNA
tcgcctgcctgaaagacgagaaaaaagccctgatgcagcagttactgaccggcaaacgtcgtgttaaggtcgatg

SEQ ID NO: 689373 - DNA, 75 bp, synthetic construct
  source 1..75: mol_type = other DNA
cgcctgcctgagagatgagaaaaaagccctgatgcaacagctactgactggcaaacgtcgtgttaaggtcgatga

SEQ ID NO: 689374 - DNA, 75 bp, synthetic construct
  source 1..75: mol_type = other DNA
ggtagttgttggtggcgacggtaatatgctcggcgcagcgcgcacgctcgcccgctacgatattaaagttatcgg

SEQ ID NO: 689375 - DNA, 75 bp, synthetic construct
  source 1..75: mol_type = other DNA
cggggacgccatcacccattacatcaccattcgttaccgccgggggatcactgctgattatgaggtggtctgtga

SEQ ID NO: 689376 - DNA, 75 bp, synthetic construct
  source 1..75: mol_type = other DNA
gcgcaacctacattctgccggaccccggtgaactgaataaacgcgtcctgatccgcctgcgggtggatatgcccg

SEQ ID NO: 689377 - DNA, 75 bp, synthetic construct
  source 1..75: mol_type = other DNA
ggcgcttgctgcgcctttcggcattgaggtggtgaacagcggtgcgccgtcgggtgttattcctgatgtccagcc

SEQ ID NO: 689378 - DNA, 75 bp, synthetic construct
  source 1..75: mol_type = other DNA
acccaacgcattgagcgtaataatctgacgctacgcacccgtattaagcggttggctcgtaaaacaatctgcttc

SEQ ID NO: 689379 - DNA, 75 bp, synthetic construct
  source 1..75: mol_type = other DNA
cacgcttcccctatgaagaccggctggatctggtattaaaaggcaccgccgatattccacatctgactgtgcatc

SEQ ID NO: 689380 - DNA, 75 bp, synthetic construct
  source 1..75: mol_type = other DNA
gatctgaacggggcgcggcgctttctgctgctggagtgtacggagctgggcgaatgtaggcagagtcacggaggc

SEQ ID NO: 689381 - DNA, 75 bp, synthetic construct
  source 1..75: mol_type = other DNA
agacgaaaaccattaccgcattgctatcgctgtcgcggggtttgctgagagtgaactggaaattaccgcccagga

SEQ ID NO: 689382 - DNA, 75 bp, synthetic construct
  source 1..75: mol_type = other DNA
ctgtgacacggaaagaagcatcagagagcggttttctgaatatcaggtcagtgggcagcgaccgggcaacgacga

SEQ ID NO: 689383 - DNA, 75 bp, synthetic construct
  source 1..75: mol_type = other DNA
cagcccagagttaaaaacggcgacaaggttgaggttctaatcggtgatgacctggtggttaccggttgggttgaa

SEQ ID NO: 689384 - DNA, 75 bp, synthetic construct
  source 1..75: mol_type = other DNA
accaggtggcggggcagcgtgccggaaacgacgatgatttcggtgaggccaccaccaccgcgctgcgggcccgca

SEQ ID NO: 689385 - DNA, 75 bp, synthetic construct
  source 1..75: mol_type = other DNA
tttaccgttctgctattggatttgaccgtttgtttaaccacttagaaaacaaccagagccagagtaatggtggct

SEQ ID NO: 689386 - DNA, 75 bp, synthetic construct
  source 1..75: mol_type = other DNA
tttatcgttctgctattgggtttgaccgtttgtttaatcatttagaaaacaaccagagccagagtaatggcggct

SEQ ID NO: 689387 - DNA, 75 bp, synthetic construct
  source 1..75: mol_type = other DNA
gatacgacattgagttaaggaaaaaagaatctagtttagagtacgacattgaaggattctctagagcaactggcc

SEQ ID NO: 689388 - DNA, 75 bp, synthetic construct
  source 1..75: mol_type = other DNA
cgcggtagttgttggtggcgacggtaatatgctgggcgcggcgcgcacgctcgcccgctacgatattaaagttat

SEQ ID NO: 689389 - DNA, 75 bp, synthetic construct
  source 1..75: mol_type = other DNA
atgaaacatttatattttgaggtattgcagacgcgcgaccgcaatatttttgaagaagggaagatctattgcggc

SEQ ID NO: 689390 - DNA, 75 bp, synthetic construct
  source 1..75: mol_type = other DNA
catgcgcttcaaagaagagcagcaaaatgcttttaatgagagttgcagaaaaacagatggaactattaactattc

SEQ ID NO: 689391 - DNA, 75 bp, synthetic construct
  source 1..75: mol_type = other DNA
cccgttacgatattaaagttattggaatcaaccgtggcaacctgggtttcctgactgaccttgaccccgataacg

SEQ ID NO: 689392 - DNA, 75 bp, synthetic construct
  source 1..75: mol_type = other DNA
catcaaccgtggcaacctgggtttcctgactgaccttgaccccgataacgcccagcaacaattagccgatgtgct

SEQ ID NO: 689393 - DNA, 75 bp, synthetic construct
  source 1..75: mol_type = other DNA
gaatctaattcatccgaaagattacagctatttcaatacattaagtaccaaactcggctggtcaaaaaaattatt

SEQ ID NO: 689394 - DNA, 75 bp, synthetic construct
  source 1..75: mol_type = other DNA
actgataacaatgagaaagctgacaattacaaaaataacggaaaatctaaatgtaagggaaggttacgcatttaa

SEQ ID NO: 689395 - DNA, 75 bp, synthetic construct
  source 1..75: mol_type = other DNA
gaaaacaaagaatcaatacttcttttagaaaaaataaatgaaaataactctaatattctcagtaaagaaatacta

SEQ ID NO: 689396 - DNA, 75 bp, synthetic construct
  source 1..75: mol_type = other DNA
tcaggaacgccatcaaattttatggtattcaataaaagtggcagccaaattgatgatgaaagatttttggaagat

SEQ ID NO: 689397 - DNA, 75 bp, synthetic construct
  source 1..75: mol_type = other DNA
atgaatactgatagcgagtctgcaactgcttggtttgataccagaaatgcaaaatcgaccacatcactgatgggg

SEQ ID NO: 689398 - DNA, 75 bp, synthetic construct
  source 1..75: mol_type = other DNA
aattgccaataaaaacagaaacaaaaatagcagcaattttaagtaatgctcataagaggccgagtgaaagatcgc

SEQ ID NO: 689399 - DNA, 75 bp, synthetic construct
  source 1..75: mol_type = other DNA
tattgcaggggaaggattaactgagtccacccttaaatggcgcttaagaaagttaacggctttagcaaaaaaact

SEQ ID NO: 689400 - DNA, 75 bp, synthetic construct
  source 1..75: mol_type = other DNA
actcatacatcacccgaattaggagttaggcctcaggagttgattaatcaaagattattagtagattgtgattta

SEQ ID NO: 689401 - DNA, 75 bp, synthetic construct
  source 1..75: mol_type = other DNA
aagtgggactgttgaagaaattcacaagcatttagacgcgggcaaacctgcaatgatatatttttcatctaaacc

SEQ ID NO: 689402 - DNA, 75 bp, synthetic construct
  source 1..75: mol_type = other DNA
ctgtaatgatcgcatcccctggtgatgttactgaagaaagaagaattatccgggaagtaatccacgaatggaatg

SEQ ID NO: 689403 - DNA, 75 bp, synthetic construct
  source 1..75: mol_type = other DNA
gacagtacggtcagggagttgatagcgcagggtaggcgttaccggtatatccgctggggagtgacaccggacgat

SEQ ID NO: 689404 - DNA, 75 bp, synthetic construct
  source 1..75: mol_type = other DNA
gggcatgacttcatgctggaagtacttaatcgcctgaaacaacggggcatgtgtttttactggctgattgtggga

SEQ ID NO: 689405 - DNA, 75 bp, synthetic construct
  source 1..75: mol_type = other DNA
taatatagcaggactgagccgtctgatatgctgtcaccgcttcagtattgtcagacaaaaaacctacatcacccg

SEQ ID NO: 689406 - DNA, 75 bp, synthetic construct
  source 1..75: mol_type = other DNA
gtggaaattagcgagaagcagttctcagaagcgattcttgaggctgccagaaaagccggatttacgagaggttaa

SEQ ID NO: 689407 - DNA, 75 bp, synthetic construct
  source 1..75: mol_type = other DNA
agctggcgcgtttggttgagcgtctcagccgtgcaatggccccgctggaaaccggatctctggagacagccatct

SEQ ID NO: 689408 - DNA, 75 bp, synthetic construct
  source 1..75: mol_type = other DNA
gtaatggcgcgtcaacttttcaataaggtggcccgtcagcaccgtcattacggtaatgccacatccgcacgtatc

SEQ ID NO: 689409 - DNA, 75 bp, synthetic construct
  source 1..75: mol_type = other DNA
agttgctggtgtgaagccacgcgttgggcctttgttccttgaaagagcggcacaggtcagtgagaaacagttcgc

SEQ ID NO: 689410 - DNA, 75 bp, synthetic construct
  source 1..75: mol_type = other DNA
atgggcctgaagtatgactcgcatcagtttaagcgtgctggcgacagactcaataacagccagaaagcctttaag

SEQ ID NO: 689411 - DNA, 75 bp, synthetic construct
  source 1..75: mol_type = other DNA
tgacttcaacggtgttgttgaagaagtggattacgagaaatctcgtctgaaagtgtctgtttctatcttcggtcg

SEQ ID NO: 689412 - DNA, 75 bp, synthetic construct
  source 1..75: mol_type = other DNA
gccgtgcgaaaacgcgccaatgatatcgcgctcaaatgcaaatactgtgaaaaagagttttctcataatgtggtg

SEQ ID NO: 689413 - DNA, 75 bp, synthetic construct
  source 1..75: mol_type = other DNA
cccggaacagggctggactctgcggcgttctggcacaattttgatgatattgttcacgatctgtcgccagagaat

SEQ ID NO: 689414 - DNA, 75 bp, synthetic construct
  source 1..75: mol_type = other DNA
cgttcacgatctggcgcccgaaaatcgtcagttgctggcagaacgcgatcgcattcaggcggcgctcgacgagtg

SEQ ID NO: 689415 - DNA, 75 bp, synthetic construct
  source 1..75: mol_type = other DNA
attccggttgctgaaaacgctaactggtcggcgcaagagatccaacaagagctggataacaacgtgcaggggatt

SEQ ID NO: 689416 - DNA, 75 bp, synthetic construct
  source 1..75: mol_type = other DNA
cggatgattactttattcagcttacttccgagaagcgagtaataaaggctggtgcctgggtatgggtgaagaaag

SEQ ID NO: 689417 - DNA, 75 bp, synthetic construct
  source 1..75: mol_type = other DNA
gttaaaaacatgtaaggaggccgatgaagtattagctaaacatgcacaaattatcaatggggtgggtgtgaatgg

SEQ ID NO: 689418 - DNA, 75 bp, synthetic construct
  source 1..75: mol_type = other DNA
aatgttcgatgaaaaaggaaataacctgactgaacaaagcaaaatggcagggatgtcagaaacgttgaaatcact

SEQ ID NO: 689419 - DNA, 75 bp, synthetic construct
  source 1..75: mol_type = other DNA
acttgcgtagctgtatcgctcaggcgcgcaatcgcgtggcgttcatcaataccggtttcctcgaccgtaccggcg

SEQ ID NO: 689420 - DNA, 75 bp, synthetic construct
  source 1..75: mol_type = other DNA
aaaatggagaaaaacggtcgacaaatcgtgcgtaaactgaatgacgatcgtcattacaccgccgccgatggctct

SEQ ID NO: 689421 - DNA, 75 bp, synthetic construct
  source 1..75: mol_type = other DNA
gctatcaggatgtggtggcgtttaaggtggtcgataaacaattacgcatccagttgaaaaatggtaaagaaacca

SEQ ID NO: 689422 - DNA, 75 bp, synthetic construct
  source 1..75: mol_type = other DNA
atccgcagcgcggtgagcaggttatcgcctgggttcggcgtttcctcgatgaatcactaccgctggaaaacggca

SEQ ID NO: 689423 - DNA, 75 bp, synthetic construct
  source 1..75: mol_type = other DNA
ggaaggcattcttgatggcgtcatgactggcgcgattgccctctatgatttaaaagtgcagaaaaactcgcgcac

SEQ ID NO: 689424 - DNA, 75 bp, synthetic construct
  source 1..75: mol_type = other DNA
gtggcatcgcagcaatccgggccggtaaaagataaagcggcctataaatctttcctgcgtgaactgggctacctg

SEQ ID NO: 689425 - DNA, 75 bp, synthetic construct
  source 1..75: mol_type = other DNA
atgcaacacgcacagcaacacggctgggaagtagtgcaggataccgcctgggaaggctacacaaaaatcccaacc

SEQ ID NO: 689426 - DNA, 75 bp, synthetic construct
  source 1..75: mol_type = other DNA
gatgacaaagtaagcaaagcggatctggaaatttttgtcgatccgttaggcaagccgctgccgttcagcgaagtt

SEQ ID NO: 689427 - DNA, 75 bp, synthetic construct
  source 1..75: mol_type = other DNA
cggcggcggcgttactggcactgatctcaccttccgaaggggaggctaatcagtgtcggacgatattgtcgcaga

SEQ ID NO: 689428 - DNA, 75 bp, synthetic construct
  source 1..75: mol_type = other DNA
gttgattgcccgtggtgctgttgctgcggcactggcaacgctggtaacaccggcggcggcgttactggcactgat

SEQ ID NO: 689429 - DNA, 75 bp, synthetic construct
  source 1..75: mol_type = other DNA
tatgtgcgtgggacatttaaaaatccgcaggctggggtgaaagccgggccgttgattgctcgcggagccgtcgcg

SEQ ID NO: 689430 - DNA, 75 bp, synthetic construct
  source 1..75: mol_type = other DNA
gtgcgatatttggtgacgatgaggtgcgggtgaactgcgcggcggcgaatctgaatattgccaacggcgtggcgc

SEQ ID NO: 689431 - DNA, 75 bp, synthetic construct
  source 1..75: mol_type = other DNA
gcccgcagatttttgctttcgatactgagaacgcgttgattaacgttaccggcacggcaagttttgcttcggaac

SEQ ID NO: 689432 - DNA, 75 bp, synthetic construct
  source 1..75: mol_type = other DNA
aatgtcattattaaaaacatcgacggcagcaactatcggcagcctgttggttacaccctgaactgttcgaacagc

SEQ ID NO: 689433 - DNA, 75 bp, synthetic construct
  source 1..75: mol_type = other DNA
gctcttgagtatcttcgtagcatggagacagcaaaatggcgtaggcctaatgccagtggcaactggggtattgtt

SEQ ID NO: 689434 - DNA, 75 bp, synthetic construct
  source 1..75: mol_type = other DNA
cgatggctcgtgctttaatcctggacttgcgagtagtcgcgatggttcgtttggcgtaggtgataaagcggctca

SEQ ID NO: 689435 - DNA, 75 bp, synthetic construct
  source 1..75: mol_type = other DNA
atagcgatatccacggttctctggtctacaccaccggaaagccacgaccaaaactggaaggtgatgtcgagtcgc

SEQ ID NO: 689436 - DNA, 75 bp, synthetic construct
  source 1..75: mol_type = other DNA
ggctcatggttgccatttaatttttcctcgggagtttcccgttctggaagctgtgccggtgaaacagagtggtac

SEQ ID NO: 689437 - DNA, 75 bp, synthetic construct
  source 1..75: mol_type = other DNA
gcatatgttcgttttgttgatttcgccacacaagacgcaccaaccgaagtttggggcacacattttaccgcgcga

SEQ ID NO: 689438 - DNA, 75 bp, synthetic construct
  source 1..75: mol_type = other DNA
gcttcggagcaactggatttgactattgatccggagagcaaagggattcgtattatcacgctgcgttcgccgctg

SEQ ID NO: 689439 - DNA, 75 bp, synthetic construct
  source 1..75: mol_type = other DNA
tcaataatctgccgacactgaatgcagttcccgtcaagcagagtggggctcagctaatggcgtcggaatttaatg

SEQ ID NO: 689440 - DNA, 75 bp, synthetic construct
  source 1..75: mol_type = other DNA
ataaccaaccgcaattgaaagccgtacctgtgaaagagaatggtgcgcagctagcgacaggagaatttaacgcca

SEQ ID NO: 689441 - DNA, 75 bp, synthetic construct
  source 1..75: mol_type = other DNA
tctcaaagcggtgccggtaaaacaaagtggagtgcagcttacgccagcggaatttaacgccagcatgacgatggt

SEQ ID NO: 689442 - DNA, 75 bp, synthetic construct
  source 1..75: mol_type = other DNA
cgaacctaacccgctgggctgggaaatcctacgtaactgcgccacccaattcatctcctgccaggacagcgttgc

SEQ ID NO: 689443 - DNA, 75 bp, synthetic construct
  source 1..75: mol_type = other DNA
agttccaccagaaaatagctggttatcgcccaacaccgctttgtgcgctggacgatctcgcaaacctttttggtg

SEQ ID NO: 689444 - DNA, 75 bp, synthetic construct
  source 1..75: mol_type = other DNA
atggcgcgtcaacttttcaataaggtggcccgtcagcaccgtcattacggtaatgccacatccgcacgtatctga

SEQ ID NO: 689445 - DNA, 75 bp, synthetic construct
  source 1..75: mol_type = other DNA
cgggcattgcgctgctggcctgtaacgtggcggggaatgttgccagtgcggaaaccagacccatcactctggagc

SEQ ID NO: 689446 - DNA, 75 bp, synthetic construct
  source 1..75: mol_type = other DNA
gcggttgagtttggcaatgtggtgatcaacaggatcgatggcacgaattaccggcaggatgcgaaatacaccctg

SEQ ID NO: 689447 - DNA, 75 bp, synthetic construct
  source 1..75: mol_type = other DNA
ttcggcaatatgattgctgataacgttgatggcaccaattatcggcaagatgcgaaatacacgctgaactgcaca

SEQ ID NO: 689448 - DNA, 75 bp, synthetic construct
  source 1..75: mol_type = other DNA
tctcaaagcagtgccggttaaacagagcggagcgcagcttatgcctgcggtttttaacgccactatgacgatggt

SEQ ID NO: 689449 - DNA, 75 bp, synthetic construct
  source 1..75: mol_type = other DNA
aaagtgggtgaaggtaactggtctgatttcaatgttaaccagttgcccaatctcaaagccgtgccggtaaaacag

SEQ ID NO: 689450 - DNA, 75 bp, synthetic construct
  source 1..75: mol_type = other DNA
gaaaccagacccatcactctggagcttaaagtcagggtggatgcgccgccgccctgtaccgttaccggtagtgcg

SEQ ID NO: 689451 - DNA, 75 bp, synthetic construct
  source 1..75: mol_type = other DNA
caataaccggcaggaagaaaaccctgcgctgacccgtctgatggacgagtacgtctgctttgcgtggcgaacgac

SEQ ID NO: 689452 - DNA, 75 bp, synthetic construct
  source 1..75: mol_type = other DNA
cgtaccgacaatcaggttcacaaaggtactcataacactcgttatggagatcgcttcgatgcaactgctggcggt

SEQ ID NO: 689453 - DNA, 75 bp, synthetic construct
  source 1..75: mol_type = other DNA
ctttcgactatggtcgtaactacggtgtcgtatatgacatcgaagcatggaccgatatgctgccagaatttggtg

SEQ ID NO: 689454 - DNA, 75 bp, synthetic construct
  source 1..75: mol_type = other DNA
ctctcttccatgcagagtagtttgcctggcggcaccgatgcagtagataaaatccccgttgcccgtatcgttgaa

SEQ ID NO: 689455 - DNA, 75 bp, synthetic construct
  source 1..75: mol_type = other DNA
aggtactttctgctcatccggcacatcgtctgcacagccagctgaattacagttctctgcgcgaattgtacgcgg

SEQ ID NO: 689456 - DNA, 75 bp, synthetic construct
  source 1..75: mol_type = other DNA
cgggcaaattcttgccggagcggtgattagtgaaggcatcaggcctggtgtgatttgcattcacgaaggggcatg

SEQ ID NO: 689457 - DNA, 75 bp, synthetic construct
  source 1..75: mol_type = other DNA
acttgttggataaagatgacgatttctatgacaacaatggcatcgcaacagatgacgttgttggtgtgggcttag

SEQ ID NO: 689458 - DNA, 75 bp, synthetic construct
  source 1..75: mol_type = other DNA
tttgtaggtgcatatagcaaatctgatcgtactaatgaacaagctagtgacggctacggtgataacgctgaagtg

SEQ ID NO: 689459 - DNA, 75 bp, synthetic construct
  source 1..75: mol_type = other DNA
accgtatcgacaactatgaagtggttggcaaatcgcgccccagtctgccggagcgcatcgacaatgtgctggtct

SEQ ID NO: 689460 - DNA, 75 bp, synthetic construct
  source 1..75: mol_type = other DNA
aatcaacctgctggacaacgacgatgacttctacgaagcaaacggcatcgctaccgatgatatcgttgctgtggg

SEQ ID NO: 689461 - DNA, 75 bp, synthetic construct
  source 1..75: mol_type = other DNA
tcgggacattgctcaagaaaatggtgatggtttcggtatgtccacttcctatgacttcgacttcggtttaagtct

SEQ ID NO: 689462 - DNA, 75 bp, synthetic construct
  source 1..75: mol_type = other DNA
agacgttcgcttccagaacggtgatggttttggtctttccacttcatatgactttgacttcggtttgagcttagg

SEQ ID NO: 689463 - DNA, 75 bp, synthetic construct
  source 1..75: mol_type = other DNA
atcatcaggatactaaccgcttgatccgcgcctggcaaaaaccagagctggtggtgatatctgaatgcttctgga

SEQ ID NO: 689464 - DNA, 75 bp, synthetic construct
  source 1..75: mol_type = other DNA
acgacgcagaacgaggtggttttgattatgccgttaagtttctacgcagtgaagcgtctagtgtacgtttgttcg

SEQ ID NO: 689465 - DNA, 75 bp, synthetic construct
  source 1..75: mol_type = other DNA
cgaagaacaccacactttttccattgatcccaacactgactggaatgcgatcttttcgttatgccaggccatgag

SEQ ID NO: 689466 - DNA, 75 bp, synthetic construct
  source 1..75: mol_type = other DNA
gatcaatgaacaactattcacgctcaccggacttctgcatgacgatctgctgttgatcatacgcggcaataagtt

SEQ ID NO: 689467 - DNA, 75 bp, synthetic construct
  source 1..75: mol_type = other DNA
tcatcgttcagaatgtttcaaaacaactcttcatggccctttctgacgcgatttacgcggcatcaaagcgttctt

SEQ ID NO: 689468 - DNA, 75 bp, synthetic construct
  source 1..75: mol_type = other DNA
atgtcactgaggatacctggattgagccacaggctgagctggtttacggttctgtatccggtaaacagtttgcat

SEQ ID NO: 689469 - DNA, 75 bp, synthetic construct
  source 1..75: mol_type = other DNA
agacctgattatcaacaaaggagctactgttaccgcccagggaaaaatgtatgtagataaagccattgaactggc

SEQ ID NO: 689470 - DNA, 75 bp, synthetic construct
  source 1..75: mol_type = other DNA
ttaggcattgctcatacgctggtggaaaacggctggcatgacgaggcatttttggcgcgttataccacgggttac

SEQ ID NO: 689471 - DNA, 75 bp, synthetic construct
  source 1..75: mol_type = other DNA
ctggggatcgcccatacgctggtggaaaatgactggcacgacgaagagtttctggcgcgttgcaccacgggttat

SEQ ID NO: 689472 - DNA, 75 bp, synthetic construct
  source 1..75: mol_type = other DNA
ttggccaattcatcctcacgttattccgttctgactgccgcccactggggacccatgctggttgaaaccgacggt

SEQ ID NO: 689473 - DNA, 75 bp, synthetic construct
  source 1..75: mol_type = other DNA
ccgactggaatgcgatattttcgctatgccaggccatgagcctgttcgccagtcgacaaacgctattgctgctgt

SEQ ID NO: 689474 - DNA, 75 bp, synthetic construct
  source 1..75: mol_type = other DNA
ggaagatgatgttactgaaaccccagccaccgacgctttcctagctgaagttcgagcgcagggtgtagatatggc

SEQ ID NO: 689475 - DNA, 75 bp, synthetic construct
  source 1..75: mol_type = other DNA
ggcatccaatgtggctggagccggacgaatggcagggcaatgccgaaccggaacagttgcaggtactttctgctc

SEQ ID NO: 689476 - DNA, 75 bp, synthetic construct
  source 1..75: mol_type = other DNA
tggtaaatcgcgccccagtctgccggagcgcatcgacaatgtgctggtctgcccgaacagcaactgtatcagcca

SEQ ID NO: 689477 - DNA, 75 bp, synthetic construct
  source 1..75: mol_type = other DNA
cgccaggttcacgtcatcctaaacgctggcaggacatcgaagagctgctggaagctggcattgatgttttcacta

SEQ ID NO: 689478 - DNA, 75 bp, synthetic construct
  source 1..75: mol_type = other DNA
ttggggcacacattttaccgcgcgaattgcgccagacgcgatcaacaaatggctaagtggatttttctcccgcga

SEQ ID NO: 689479 - DNA, 75 bp, synthetic construct
  source 1..75: mol_type = other DNA
cacgcaagaaacaaaatcaaccatcagcctcatctgcgtctgctgccatgcccggcaacacgacggacatgctta

SEQ ID NO: 689480 - DNA, 75 bp, synthetic construct
  source 1..75: mol_type = other DNA
ttataaagatgaggatggcgctaaatataaatcctctgttgatgtcagaagtaacgagtttatgttaggcgcaac

SEQ ID NO: 689481 - DNA, 75 bp, synthetic construct
  source 1..75: mol_type = other DNA
gagttaaaaattcaaggagataatgttattacaatagatttcagaactcctgtaacaatagagaaagtgaacagt

SEQ ID NO: 689482 - DNA, 75 bp, synthetic construct
  source 1..75: mol_type = other DNA
aagaagtaaatacagaagaagcaccaactaagccaactccaaaacgagtaataaggccgcgtaaaggtggtggat

SEQ ID NO: 689483 - DNA, 75 bp, synthetic construct
  source 1..75: mol_type = other DNA
ttagttcggcgagaaatgaaacccttgattgtcttaattactcgcttatatgtttccagtggtatctatccaagt

SEQ ID NO: 689484 - DNA, 75 bp, synthetic construct
  source 1..75: mol_type = other DNA
tcgcttaccggagaaaaaacgtcgggcaattctcagcgccttacgtctggcgcaggagctgggcgcggagacggc

SEQ ID NO: 689485 - DNA, 75 bp, synthetic construct
  source 1..75: mol_type = other DNA
ggccgaaattggtatcaatgcccacgttgagggcgaaaatctacaactggatgtctgggataacggccccggtct

SEQ ID NO: 689486 - DNA, 75 bp, synthetic construct
  source 1..75: mol_type = other DNA
ccagcgaacagtttattgcctccacgtttcatgcccgcagccaggtgttgttacccgatgacgatggtagattgc

SEQ ID NO: 689487 - DNA, 75 bp, synthetic construct
  source 1..75: mol_type = other DNA
caatgaccggcaggctgaaaaccctgcgctgaccagtatgatggacgagtatgtctgctttgcatggcggacgac

SEQ ID NO: 689488 - DNA, 75 bp, synthetic construct
  source 1..75: mol_type = other DNA
aacgtggcggtcgcttcaaaggtgtacgacgacatcaaagccaccgtgtcggcgatgctctcggcagaaggcagc

SEQ ID NO: 689489 - DNA, 75 bp, synthetic construct
  source 1..75: mol_type = other DNA
taggaactatctctttgatggctgcggtttgcaacgcagaaccagaagttaaaaccgcagaatggtatatgcagc

SEQ ID NO: 689490 - DNA, 75 bp, synthetic construct
  source 1..75: mol_type = other DNA
agagcaggtgaaagccctgggtgctaatcccgtcacggcgaccggtgagcctgtaccgcagatgcctgcctcacc

SEQ ID NO: 689491 - DNA, 75 bp, synthetic construct
  source 1..75: mol_type = other DNA
agcctgatgcagatagggctgattatgaaattgatgataatggacttaaggttgaggtccgatctatcttggaaa

SEQ ID NO: 689492 - DNA, 75 bp, synthetic construct
  source 1..75: mol_type = other DNA
acgacgacatcaaagccaccgtgtccgccatgctttcctcagaaggctcctcctggctggcaccgggcagcgcca

SEQ ID NO: 689493 - DNA, 75 bp, synthetic construct
  source 1..75: mol_type = other DNA
ccaccatcggggtcacctcgtcttccggtcgtctgtccgggtcggaagtgctgattaaggcgctgaaccagcagg

SEQ ID NO: 689494 - DNA, 75 bp, synthetic construct
  source 1..75: mol_type = other DNA
tgggcatggggcgcgggatttgttgacggtatcggtcagggaatggagcgagcttcacagccagctgtcgggctg

SEQ ID NO: 689495 - DNA, 75 bp, synthetic construct
  source 1..75: mol_type = other DNA
ggatgtcctgaacaaacagcgcggtgatgaccagcgtcgtattgaaaagctgggacaggacaatgccgccctggc

SEQ ID NO: 689496 - DNA, 75 bp, synthetic construct
  source 1..75: mol_type = other DNA
gatgcagctgcgtatcaccggtctggtggaaatgccgaacagcaaaacgtatgacgcaacgggatgttttgtggg

SEQ ID NO: 689497 - DNA, 75 bp, synthetic construct
  source 1..75: mol_type = other DNA
tgaaaaccgtggaggaaatggcactggagcagtcacagagtacagcggaagagggtaacccggaaagcccggtgc

SEQ ID NO: 689498 - DNA, 75 bp, synthetic construct
  source 1..75: mol_type = other DNA
tctggaagcctgggggggatgtgtccagtgagcgtgccattgtacgcacccgcaatatcagttgcctgaaggacg

SEQ ID NO: 689499 - DNA, 75 bp, synthetic construct
  source 1..75: mol_type = other DNA
gaagacaatccggaaagtccggttcctgttccgccatcagctgaaagtcatcttaacggctttaatactgaccag

SEQ ID NO: 689500 - DNA, 75 bp, synthetic construct
  source 1..75: mol_type = other DNA
tggtgaacttatgcaccagcgaacatctgctggttcatcatccgatgctggaaggcattctgctgtctgaatgtg

SEQ ID NO: 689501 - DNA, 75 bp, synthetic construct
  source 1..75: mol_type = other DNA
tgccttgacgactggacggagaatctgaaacggaaatcagaaaaagagctggaggaatggatcatcaaccgtcag

SEQ ID NO: 689502 - DNA, 75 bp, synthetic construct
  source 1..75: mol_type = other DNA
aattggtgccgtactggcgaacaccttgagcaacctgatttcagccgtactgctcatctatctgttccgcctgta

SEQ ID NO: 689503 - DNA, 75 bp, synthetic construct
  source 1..75: mol_type = other DNA
gatttatggcccggacaaacgggccacgccgcccctggatgatgatctgatagtgaatttatgcaccagtgaaca

SEQ ID NO: 689504 - DNA, 75 bp, synthetic construct
  source 1..75: mol_type = other DNA
ccgggtgggtgtcattcaatggtgaaaaaccggagattgccatcgtaccccagagtctgcaccggctgatttatg

SEQ ID NO: 689505 - DNA, 75 bp, synthetic construct
  source 1..75: mol_type = other DNA
aacgtctgaaacatcattctctggcaaataaactgatcagcctcttccgtcagtttggtggcacggagttgcgcc

SEQ ID NO: 689506 - DNA, 75 bp, synthetic construct
  source 1..75: mol_type = other DNA
agtgacggtatgaagattgcccgtccgcgtcagctgtataccggctacgcgcagcgtgattttaagtcggatatt

SEQ ID NO: 689507 - DNA, 75 bp, synthetic construct
  source 1..75: mol_type = other DNA
ggcacgtacggttggctggatcgcccactggagcgaaatgcacagtgacggtatgaagattgcccgtccgcgtca

SEQ ID NO: 689508 - DNA, 75 bp, synthetic construct
  source 1..75: mol_type = other DNA
cggcttaagcaaattgtttgtgctgaccacgcgcagtattcactggttccaggaacgtggatttaccccggtgga

SEQ ID NO: 689509 - DNA, 75 bp, synthetic construct
  source 1..75: mol_type = other DNA
aacgtctgaggcagcgttctctggcaaataaactgatcagcctcttccgtcagtttggtggcatggagttgcgcc

SEQ ID NO: 689510 - DNA, 75 bp, synthetic construct
  source 1..75: mol_type = other DNA
atgaaagactataaaccacgttacgaagaactgaataaatattaccagacctggctgacgggttatacccgactg

SEQ ID NO: 689511 - DNA, 75 bp, synthetic construct
  source 1..75: mol_type = other DNA
ctggctgacgggttatacccggctggcggtctgccagggaatgtgccatcagaatatatatcaccatcataccct

SEQ ID NO: 689512 - DNA, 75 bp, synthetic construct
  source 1..75: mol_type = other DNA
cacgccgtatcatggggcgtgtgtcatccgaatatctactatttccataatctgacgcccgggtgggtgtcattc

SEQ ID NO: 689513 - DNA, 75 bp, synthetic construct
  source 1..75: mol_type = other DNA
atctcccagcgcctgatccccggtgcggttctggcgattgactgtgcggccatctatagcttcgcgccgaacgct

SEQ ID NO: 689514 - DNA, 75 bp, synthetic construct
  source 1..75: mol_type = other DNA
ggctggcgtgcggcgctgaagatttgtctggtgatggggatgatcgaaatctttggctgcgtctgggcggtgaaa

SEQ ID NO: 689515 - DNA, 75 bp, synthetic construct
  source 1..75: mol_type = other DNA
accgccgatgatgcagggcttcttctccattggtatcgcctttatggctgtcatcattgtaattgcactggctta

SEQ ID NO: 689516 - DNA, 75 bp, synthetic construct
  source 1..75: mol_type = other DNA
atgagcaatctgagccctgactttgtactacccggaaatttttgcgctaacccacaggaagcgtggaccattcct

SEQ ID NO: 689517 - DNA, 75 bp, synthetic construct
  source 1..75: mol_type = other DNA
gtcagctgattgcggttggcatcctggtcgcctgcggttcctcgatcctgattatcccaggctttatcccgatgt

SEQ ID NO: 689518 - DNA, 75 bp, synthetic construct
  source 1..75: mol_type = other DNA
tatctatagcttcgcgccgaacgccgtggtctggggctttatgtggggcactatcggtcagctgattgcggttgg

SEQ ID NO: 689519 - DNA, 75 bp, synthetic construct
  source 1..75: mol_type = other DNA
tggctgcaggcgcgtattgcacagtcccgtccgtaattcttaaccgttcatctgcagcagacgcagtctccggcc

SEQ ID NO: 689520 - DNA, 75 bp, synthetic construct
  source 1..75: mol_type = other DNA
acctgctgattcatcatccgatgctggaagggatcctgctgtctgaatgtgagcgcctgaagcaacattctctgg

SEQ ID NO: 689521 - DNA, 75 bp, synthetic construct
  source 1..75: mol_type = other DNA
tcaaactggtctggctttgctggcttgatttaatgaccggaaacagccttgacgactggacgaaaaacctgaaac

SEQ ID NO: 689522 - DNA, 75 bp, synthetic construct
  source 1..75: mol_type = other DNA
cgggcgtgatgcaggcgaaaccgaattatctgcccgtcttaatgagccgctggcaaatggtgccgtgatccacat

SEQ ID NO: 689523 - DNA, 75 bp, synthetic construct
  source 1..75: mol_type = other DNA
aacccggaattcagcagcgcctttggttgcacttatattaaacaagtggtcgatggtgaaacgctgcttgaactt

SEQ ID NO: 689524 - DNA, 75 bp, synthetic construct
  source 1..75: mol_type = other DNA
tggtcgtggtctatggagcgcgcccgcagatcgatgcgaatctggcagcgcatcaccacgaaccgctatatcaca

SEQ ID NO: 689525 - DNA, 75 bp, synthetic construct
  source 1..75: mol_type = other DNA
attgtctcccagtacgtgggtgaccagctggtgctggtgaatgccccggatatttatctggctgatgacggcggc

SEQ ID NO: 689526 - DNA, 75 bp, synthetic construct
  source 1..75: mol_type = other DNA
cgtcataacagcaagaagcaagttgctgatgaactgggcatcggcattgctacgctctatcgcaagattaagaaa

SEQ ID NO: 689527 - DNA, 75 bp, synthetic construct
  source 1..75: mol_type = other DNA
tgccgggttatgcggcaattaaaacgactcattagccgtatcgcgcccagcccatccagcgtaatggtggtcggg

SEQ ID NO: 689528 - DNA, 75 bp, synthetic construct
  source 1..75: mol_type = other DNA
cgtcaggtgccgttcaatatccgtgtgcacgcccaggtgtccggcggtgctgccggctgggtgggtgagggtaag

SEQ ID NO: 689529 - DNA, 75 bp, synthetic construct
  source 1..75: mol_type = other DNA
gcagcccaccggtgcggtctggctgatgtccagcaccaatgccctggcgctgtccatgcgtaaaaatgcgctggg

SEQ ID NO: 689530 - DNA, 75 bp, synthetic construct
  source 1..75: mol_type = other DNA
ccggtggagctggtttccatgttccagaccggcagcgtggccatccgtgcggagcgctggatcaactggcgtcgt

SEQ ID NO: 689531 - DNA, 75 bp, synthetic construct
  source 1..75: mol_type = other DNA
ttcgcgcaccgagcaacaggccgcttcgctggaagagacggcagccagcatggagcaactgaccgcaacggtgaa

SEQ ID NO: 689532 - DNA, 75 bp, synthetic construct
  source 1..75: mol_type = other DNA
acagaacgccgagaatgcgcgccaggccagccacctggcgttaagtgcttctgaaacggcgcaacgcggcggcaa

SEQ ID NO: 689533 - DNA, 75 bp, synthetic construct
  source 1..75: mol_type = other DNA
atgttaaaacgtatcaaaattgtgaccagcctactgctggttttggccgtttttggccttttacaactgacatca

SEQ ID NO: 689534 - DNA, 75 bp, synthetic construct
  source 1..75: mol_type = other DNA
gtcggtttacccgggcattgcccctgatgttgttgagttattacgtaagcatcgctggccggggaatttgcgcga

SEQ ID NO: 689535 - DNA, 75 bp, synthetic construct
  source 1..75: mol_type = other DNA
gatgtcgtcgaaatattgcgtaagcatcgttggcccggaaacctgcgcgagttaagcaatttgatggaatatctg

SEQ ID NO: 689536 - DNA, 75 bp, synthetic construct
  source 1..75: mol_type = other DNA
ttaccgcgatgcgatgctgtctgccgcgaacccgtacaggtcgctggcgctgcagtgtcgctcaagcgtccagcg

SEQ ID NO: 689537 - DNA, 75 bp, synthetic construct
  source 1..75: mol_type = other DNA
gaaagtgtcggccattgcggtactgacggaagaattgatccgtttttccagtccggctgctgatgcactggtccg

SEQ ID NO: 689538 - DNA, 75 bp, synthetic construct
  source 1..75: mol_type = other DNA
ttacagttctcagggactgattgatgaaatcccgctggtgacgttcctgaccgtcatgttcaagaagaatccgct

SEQ ID NO: 689539 - DNA, 75 bp, synthetic construct
  source 1..75: mol_type = other DNA
atggccctgacaaacgggccacgccgcccctggatgatgatctgatagtgaatttatgcaccagtgaacatctgc

SEQ ID NO: 689540 - DNA, 75 bp, synthetic construct
  source 1..75: mol_type = other DNA
aactggcaatcgagtttttacgccgcgaccaaagcaatctttctcctgcccaatatctcaaacgactgaaacaat

SEQ ID NO: 689541 - DNA, 75 bp, synthetic construct
  source 1..75: mol_type = other DNA
cgatggcgatattgtctccgaacttttccctaacgaggcgcaagcgcgagtagaagcccaggaagagaaaggcga

SEQ ID NO: 689542 - DNA, 75 bp, synthetic construct
  source 1..75: mol_type = other DNA
tagaaacccaggaagagcaaggcgattacaactccggtacggtgcgttttttgcgtggcgcggtgaaagcctgtc

SEQ ID NO: 689543 - DNA, 75 bp, synthetic construct
  source 1..75: mol_type = other DNA
tggtcgagggattccgtcattcggttccctatatcaatactcaccggggaaaaacgtttgtcatcatgcttggcg

SEQ ID NO: 689544 - DNA, 75 bp, synthetic construct
  source 1..75: mol_type = other DNA
gatctgatagtgaatttatgcaccagtgaacatctgctggttcatcatccgatgctggaaggcattctcctgtct

SEQ ID NO: 689545 - DNA, 75 bp, synthetic construct
  source 1..75: mol_type = other DNA
atgcgcgatatctccaccagttcacagaaaatcgccgatattatcagcgtaattgacggcattgccttccagacc

SEQ ID NO: 689546 - DNA, 75 bp, synthetic construct
  source 1..75: mol_type = other DNA
gctggcgcaatcgggtatgacaatgttgtgtgtaacacatgagatggggtttgcacgaaccgtcgctgaccgggt

SEQ ID NO: 689547 - DNA, 75 bp, synthetic construct
  source 1..75: mol_type = other DNA
gctgacctgcttactctctcttctgctgaattaaaagaagaaatctactttgcctggcgtctgggcgtgcattga

SEQ ID NO: 689548 - DNA, 75 bp, synthetic construct
  source 1..75: mol_type = other DNA
ctcaaactggtctggctttgctggcttgatttaatgaccggaaactgccttgacgactggacggagaatctgaaa

SEQ ID NO: 689549 - DNA, 75 bp, synthetic construct
  source 1..75: mol_type = other DNA
gaagggatcctgctgtctgaatgtgagcgcctgaagcaacattctctggcaaacaaactgatcagcctcttccgt

SEQ ID NO: 689550 - DNA, 75 bp, synthetic construct
  source 1..75: mol_type = other DNA
gattgcatcactggcatcagatgccggctgcgcaatccccgattcgatgaaactggagatgcaggaagcggcgag

SEQ ID NO: 689551 - DNA, 75 bp, synthetic construct
  source 1..75: mol_type = other DNA
ggtgaaatgcgcgtggggtcccgagtggtatctcaggagatcagcactgcagatgaaggcgatggtggtcaggtt

SEQ ID NO: 689552 - DNA, 75 bp, synthetic construct
  source 1..75: mol_type = other DNA
ggtgaaatgcgcgtgggctcccgtgtggtatctcaggagatcagcactgcagacgaaggcgatggtggtcaggtt

SEQ ID NO: 689553 - DNA, 75 bp, synthetic construct
  source 1..75: mol_type = other DNA
cggtgttttccagattgttctgggggctgtcgccattgcggcttcgttttttactgcaggagcctctctggctat

SEQ ID NO: 689554 - DNA, 75 bp, synthetic construct
  source 1..75: mol_type = other DNA
cgggggccagtatgatccttggcggtgtggcgcagatgctggcaccgaaagccagtaccgcaacaacgaccagca

SEQ ID NO: 689555 - DNA, 75 bp, synthetic construct
  source 1..75: mol_type = other DNA
cagcaacatcatgttttccatgggctctgcaatggcactgggtggtgtggcccagatgctggccccgaaggcaaa

SEQ ID NO: 689556 - DNA, 75 bp, synthetic construct
  source 1..75: mol_type = other DNA
ggtgaaatgcgcgtgggttcccgagtggtatctcaggagatcagcactgcagaggaaggcgatggtggtcaggtt

SEQ ID NO: 689557 - DNA, 75 bp, synthetic construct
  source 1..75: mol_type = other DNA
gtgaacacggcagcggaagctattcgtgccctgtctctgcagctgccgggattccgccgtcagatgaccgaaggc

SEQ ID NO: 689558 - DNA, 75 bp, synthetic construct
  source 1..75: mol_type = other DNA
agcaatattatgttttccatgggggctgccatgtcgctgggtggtgtggcccagatgctggccccgaaggcaaaa

SEQ ID NO: 689559 - DNA, 75 bp, synthetic construct
  source 1..75: mol_type = other DNA
ctggttggctcccggcgaatctcccaggacatcagtacccgtgatgaaggcggtgacgggaaggtggtggttatc

SEQ ID NO: 689560 - DNA, 75 bp, synthetic construct
  source 1..75: mol_type = other DNA
aacggcaaacagaacacctatttttcttcactggataatatggttgcccagggcaatgttctgcccgttctgtac

SEQ ID NO: 689561 - DNA, 75 bp, synthetic construct
  source 1..75: mol_type = other DNA
gatgtctccccggcgtccatcacccatgatgtgaagggcacggcatcaaccggtaacccggatgcggatgcagag

SEQ ID NO: 689562 - DNA, 75 bp, synthetic construct
  source 1..75: mol_type = other DNA
tctgaagccctggaagtggcccgtcgtcagtatccggatgacagtcgtctgcatcatgtcctgaaatcggcggtg

SEQ ID NO: 689563 - DNA, 75 bp, synthetic construct
  source 1..75: mol_type = other DNA
gtgatcaccgggattgcgtcaacgccttctccggatcgggatggtgacatcctggagccggagggcgcggagttt

SEQ ID NO: 689564 - DNA, 75 bp, synthetic construct
  source 1..75: mol_type = other DNA
ggaagggaaaatcgcggaaactcgtttcgaaaactatcaccgtattctggaaagcatggcgcaggtaaaaacgcg

SEQ ID NO: 689565 - DNA, 75 bp, synthetic construct
  source 1..75: mol_type = other DNA
aaccggtgaggaagatacgctgaaaaaagagaggctcgatgaagtacaggcccgtccgcgtcaggcgggggtgcg

SEQ ID NO: 689566 - DNA, 75 bp, synthetic construct
  source 1..75: mol_type = other DNA
cggataacggcagacagaacacgtacttttcctcgctggataacatgattgcacaggggaacccgatgccggtgc

SEQ ID NO: 689567 - DNA, 75 bp, synthetic construct
  source 1..75: mol_type = other DNA
tgtacggtgaaatgcgcgtggggtcacgtgtggtatctcaggagatcagcacagctgatgaaggtgatggtggtg

SEQ ID NO: 689568 - DNA, 75 bp, synthetic construct
  source 1..75: mol_type = other DNA
tggcgtcatcgggcatggcacgaatctgcctttacggggatttgcaacgattcggccgccgcatcgaccttcgtg

SEQ ID NO: 689569 - DNA, 75 bp, synthetic construct
  source 1..75: mol_type = other DNA
gtggtttttctgccaccacgatgctgttttcactgggggccagcatgatactgggtggtgtggctcagatgcttg

SEQ ID NO: 689570 - DNA, 75 bp, synthetic construct
  source 1..75: mol_type = other DNA
atgttctgcctgttctgtacggtgaaatgcgcgtggggtcgcgggtggcttctcaggagatcagcacggcagacg

SEQ ID NO: 689571 - DNA, 75 bp, synthetic construct
  source 1..75: mol_type = other DNA
gccgctcccatatgccgattgtgcgtatcttatcagtcatttttatcgagttctggcgcggcgtaccgctaatca

SEQ ID NO: 689572 - DNA, 75 bp, synthetic construct
  source 1..75: mol_type = other DNA
aatctggcattactgattggcctggtttcgattgcgccgatgttctggaaaatattcccacatcgcggtcgctat

SEQ ID NO: 689573 - DNA, 75 bp, synthetic construct
  source 1..75: mol_type = other DNA
tttgggtacgcaagatgccaaagaaagaggctgaagctctggcgatgcattaccttgagcgggtgagaattgccg

SEQ ID NO: 689574 - DNA, 75 bp, synthetic construct
  source 1..75: mol_type = other DNA
ttgcggaagtcgtgcgaggcggattacaggcgctgcctaaagggcaatatgaagcggcagagtcgctggcgttgg

SEQ ID NO: 689575 - DNA, 75 bp, synthetic construct
  source 1..75: mol_type = other DNA
aaggtcaatatgaagctgcagagtcgctggcgctgggttactggaaaacccaggggctggttattctgccacagg

SEQ ID NO: 689576 - DNA, 75 bp, synthetic construct
  source 1..75: mol_type = other DNA
cgaggtggattgcaggcgctccccaaaggtcaatatgaagctgcagagtcgctggcgctgggttactggaaaacc

SEQ ID NO: 689577 - DNA, 75 bp, synthetic construct
  source 1..75: mol_type = other DNA
tggaaccctgtgggctggctgggtgccgcggctgtatcgggcatgtatgcggcaggggccagtatgatcctgggc

SEQ ID NO: 689578 - DNA, 75 bp, synthetic construct
  source 1..75: mol_type = other DNA
cgtaactgcgaaaacgtcgccaatttcgatagcgacaaagcgcaactggttccggtgcgtctggaagaatatgcc

SEQ ID NO: 689579 - DNA, 75 bp, synthetic construct
  source 1..75: mol_type = other DNA
tggattctccgactccgttcaggttgaccgctactggcacacgatgcacggcaactggacgctgcaatacggctt

SEQ ID NO: 689580 - DNA, 75 bp, synthetic construct
  source 1..75: mol_type = other DNA
atcttaccggctttgcggcggcgagctatcagcgcggcgttcgtttcattcaagtcccgacgacgttactgtcgc

SEQ ID NO: 689581 - DNA, 75 bp, synthetic construct
  source 1..75: mol_type = other DNA
tgcacgcgaggggcgcaaggattacagcgttcaccgtatcacgctggacgatgccatcgctgacgggctgtaccg

SEQ ID NO: 689582 - DNA, 75 bp, synthetic construct
  source 1..75: mol_type = other DNA
taaccagctggcaaaggctgatgtctgggagcagaccttctgggacagcgacaaaaaagaagaaatcctcactta

SEQ ID NO: 689583 - DNA, 75 bp, synthetic construct
  source 1..75: mol_type = other DNA
gtcgcgggtgatttcgcaagagatcagcacggcagatgaaggggatggcggccagattgtggtgattggtcgctg

SEQ ID NO: 689584 - DNA, 75 bp, synthetic construct
  source 1..75: mol_type = other DNA
gacggtgcggtgatccacattgttccccggcttgccggtgcaaagcatggcggaatttttcagaccatcctgggg

SEQ ID NO: 689585 - DNA, 75 bp, synthetic construct
  source 1..75: mol_type = other DNA
ccgcgtcttgcgggagcaaaaagtggcggtgtgtttcaggcggtgctgggtgcggcgttgattgctacggcaatc

SEQ ID NO: 689586 - DNA, 75 bp, synthetic construct
  source 1..75: mol_type = other DNA
cacagatgctggcccctaaacccaaaaccccccgcacacagacaacggataacggcaaacagaacacctattttt

SEQ ID NO: 689587 - DNA, 75 bp, synthetic construct
  source 1..75: mol_type = other DNA
gcatgtatgcggcaggggccagtatgatcctgggcggagtggcgcagatgctggcaccgaaagccaggacgccca

SEQ ID NO: 689588 - DNA, 75 bp, synthetic construct
  source 1..75: mol_type = other DNA
tgtacggtgaaatgcgcgtggggtcacgtgttgtctctcaggagattagcacggcagatgaaggtgacggtggtc

SEQ ID NO: 689589 - DNA, 75 bp, synthetic construct
  source 1..75: mol_type = other DNA
ggcgagtttgaagcgcagaacatcacgattgcccggcaccagaccacacttgatgacctgctccacatcaaggtg

SEQ ID NO: 689590 - DNA, 75 bp, synthetic construct
  source 1..75: mol_type = other DNA
ccgcaaaattgatctgtccggtgaaaaagccctgctgggcgtggatgtgccggacagccttgatttgcccggtga

SEQ ID NO: 689591 - DNA, 75 bp, synthetic construct
  source 1..75: mol_type = other DNA
atttctcgtcactggataacatggttgctcagggcaatgttttgcctgttctgtacggtgaaatgcgtgtggggt

SEQ ID NO: 689592 - DNA, 75 bp, synthetic construct
  source 1..75: mol_type = other DNA
tgtacggtgaaatgcgcgtggggtcacgtgtggcatctcaggagatcagtacagctgatgaaggtgatggtggtg

SEQ ID NO: 689593 - DNA, 75 bp, synthetic construct
  source 1..75: mol_type = other DNA
acctttactcgttatgtaatgaatgttcgtcgccagcgtggaaaaggctgggtggcatttcaaagaatgtggccg

SEQ ID NO: 689594 - DNA, 75 bp, synthetic construct
  source 1..75: mol_type = other DNA
gcagtcagtttaccagtgatgcatttattgatgtattgaaatcaaatggcattcaaatcagtatggatggtaaag

SEQ ID NO: 689595 - DNA, 75 bp, synthetic construct
  source 1..75: mol_type = other DNA
cggcactgctgacggcaaacggtctgtacgctgtcgtctttgtgatgtgcttcctgttaggtttcgtcagccgtc

SEQ ID NO: 689596 - DNA, 75 bp, synthetic construct
  source 1..75: mol_type = other DNA
gcagagctgtttggtcgtcaggaggcgcaacagctgctggatcgcgtcgcccaggagatgccaaagctgacggaa

SEQ ID NO: 689597 - DNA, 75 bp, synthetic construct
  source 1..75: mol_type = other DNA
aagtgcgctaaaagaacaggcgcagattcaggggtacacagtggttgaggccagcacggtggtagcaacgcatct

SEQ ID NO: 689598 - DNA, 75 bp, synthetic construct
  source 1..75: mol_type = other DNA
cgacgccttgtgtcactgacctcttctctcgctcagcatgcaggtctttctattgtgaaatcatcccagtccact

SEQ ID NO: 689599 - DNA, 75 bp, synthetic construct
  source 1..75: mol_type = other DNA
ttacgcccgataacaccattatggcactggcagaagattttctttcccgacgccagtacggcattcgttttcgta

SEQ ID NO: 689600 - DNA, 75 bp, synthetic construct
  source 1..75: mol_type = other DNA
gtacgaagacggtaaattcctgaagaagaaaaatacgtttaatgattatcttgatgcctgcgatgcattgttaaa

SEQ ID NO: 689601 - DNA, 75 bp, synthetic construct
  source 1..75: mol_type = other DNA
agctaaaaacggacgaccatctgttgttgttatgtaccgacatggattcagggcatggcggtaaatcaggacgct

SEQ ID NO: 689602 - DNA, 75 bp, synthetic construct
  source 1..75: mol_type = other DNA
aaagaaaaatgggggatcggcgtgctgtttctctctgttgcggcgctgtgctacatcctcggtcagttaggtttt

SEQ ID NO: 689603 - DNA, 75 bp, synthetic construct
  source 1..75: mol_type = other DNA
ctgcatcgggctggtgtatgtcgctatttttattctgaccttcggctgtgaattcccggcactgggcaaacatgc

SEQ ID NO: 689604 - DNA, 75 bp, synthetic construct
  source 1..75: mol_type = other DNA
tcacatggattagctttctctcctacgcactgactggtgcgttggttattgtcaccgggatggtgatgggaaata

SEQ ID NO: 689605 - DNA, 75 bp, synthetic construct
  source 1..75: mol_type = other DNA
aatggcagagaataataccgttgtcgaagcgacgtggaacgatgtacaactggaagattctctgggaatggaagt

SEQ ID NO: 689606 - DNA, 75 bp, synthetic construct
  source 1..75: mol_type = other DNA
ccgatgaaactgacttccgcattggcgcgctgcaacagttgctacaaatctaccaggctaccagcgagtggcaga

SEQ ID NO: 689607 - DNA, 75 bp, synthetic construct
  source 1..75: mol_type = other DNA
gtatgccaggaaagcagatggcgattgatgccgaccttaacgccggattgattggtgaagatgaggcgaaaaaac

SEQ ID NO: 689608 - DNA, 75 bp, synthetic construct
  source 1..75: mol_type = other DNA
caacatggcatgagcatgggacacgcggcggaaagttatacgctattgaccattggcgacggtctggtggcacaa

SEQ ID NO: 689609 - DNA, 75 bp, synthetic construct
  source 1..75: mol_type = other DNA
ccaggacagagaactggtcagcgaaacgctggaaatgctgcaaacctgctatcagcagttgggtaaaactgccga

SEQ ID NO: 689610 - DNA, 75 bp, synthetic construct
  source 1..75: mol_type = other DNA
agtgtggttttactgcatatacgctctactggcattgcccgtcatgtcgggcgtggtcaaccattaaacctattc

SEQ ID NO: 689611 - DNA, 75 bp, synthetic construct
  source 1..75: mol_type = other DNA
catcatgatggggcgtgtctttatggcgaagggggaatacgcaaaagcggttgaaagcctgcaacgcgtcatctc

SEQ ID NO: 689612 - DNA, 75 bp, synthetic construct
  source 1..75: mol_type = other DNA
cggggcgctggctggcgattaaccctggaaccgctgccgggacgttacctggtgaggcgaccgacgagattgtat

SEQ ID NO: 689613 - DNA, 75 bp, synthetic construct
  source 1..75: mol_type = other DNA
acattcgcgacaatatggatctgcaacctgcccgctatcgcattttgatgaaaggcgtggagataggcagtggtg

SEQ ID NO: 689614 - DNA, 75 bp, synthetic construct
  source 1..75: mol_type = other DNA
acaatggcagatccttgccggaccgattttgatcttgctgattttgtcgatgatggtgctgccattgcctgcatt

SEQ ID NO: 689615 - DNA, 75 bp, synthetic construct
  source 1..75: mol_type = other DNA
aagcattatcccgtcaggagatgctgggtgcgccgccagtactgttggtgaaccacgcgctgcgtccgctattgt

SEQ ID NO: 689616 - DNA, 75 bp, synthetic construct
  source 1..75: mol_type = other DNA
tgatttctaccgccgcgggggtcatcgttacacgtgtcagcaccgatcaggatgttggcgagcagatggtgaatc

SEQ ID NO: 689617 - DNA, 75 bp, synthetic construct
  source 1..75: mol_type = other DNA
acaatatggatctacagcctgcccgctatcgtatcttgatgaaaggcgttgagattggcagtggtgatgcttatc

SEQ ID NO: 689618 - DNA, 75 bp, synthetic construct
  source 1..75: mol_type = other DNA
atggcctcgcaacaagccttgcaggatcgcatcttaaaggaaatcatcgaccgcattccgcaaagagaagtttct

SEQ ID NO: 689619 - DNA, 75 bp, synthetic construct
  source 1..75: mol_type = other DNA
caggatagatggagtatattcacctgatcttggtactccctgccatttttgtcatatagagagatggctgagcag

SEQ ID NO: 689620 - DNA, 75 bp, synthetic construct
  source 1..75: mol_type = other DNA
ttgtgctgcaacaggaacgccaccagcatgatgatgtgaggccgtatcagtggaagaaaccggacaggccgcgac

SEQ ID NO: 689621 - DNA, 75 bp, synthetic construct
  source 1..75: mol_type = other DNA
ggcattcgctatcgttacgactggaaagcttaccgactggatttgcccctatatttccagacatctgttatcact

SEQ ID NO: 689622 - DNA, 75 bp, synthetic construct
  source 1..75: mol_type = other DNA
atgaaaaaggctaaaatactttctggcgtattattactctgcttttcgtcaccattaatttctcaggctgcaaca

SEQ ID NO: 689623 - DNA, 75 bp, synthetic construct
  source 1..75: mol_type = other DNA
gacggtgcgcccgggaatgttaacgcattttagcagcaacggcacccgctacggaccctacgtaaaactgtcctg

SEQ ID NO: 689624 - DNA, 75 bp, synthetic construct
  source 1..75: mol_type = other DNA
ttcattagcgcggaaaccagaccaatgaccggtacagtgtcagtgaatggtgcaaacctaccgacagcttcattc

SEQ ID NO: 689625 - DNA, 75 bp, synthetic construct
  source 1..75: mol_type = other DNA
gccaatgaggcggtgacattcacgctaccggcagatgtgagcgcaagctttactctcggacaaggcggttccgcc

SEQ ID NO: 689626 - DNA, 75 bp, synthetic construct
  source 1..75: mol_type = other DNA
gttgatgctaccggtaaagtgacatttaaaaatgtcggcagcaattcggaaaggattacggcgacgccaaaatca

SEQ ID NO: 689627 - DNA, 75 bp, synthetic construct
  source 1..75: mol_type = other DNA
aggattttttaactcgccatcctgatgcggttgtattcagccctaaaaagcgccagtggggaacgcaggatgatt

SEQ ID NO: 689628 - DNA, 75 bp, synthetic construct
  source 1..75: mol_type = other DNA
gtccgcttatcggtgtcaatgctcctaaaggcgctactctgacggcaatgctaacctctgcaaatggcactccag

SEQ ID NO: 689629 - DNA, 75 bp, synthetic construct
  source 1..75: mol_type = other DNA
acttcgccttaaaaagcggctctgccacattaacgtcattaacagcggtgacagatcaaaacggaatcgcgacaa

SEQ ID NO: 689630 - DNA, 75 bp, synthetic construct
  source 1..75: mol_type = other DNA
gtcactattttcacgaggcatagcagtcgttgcagtttatctaattataaaacccgcaacgccgatgtacatcag

SEQ ID NO: 689631 - DNA, 75 bp, synthetic construct
  source 1..75: mol_type = other DNA
acggcaaaaactttggcttataccgtacccgtatgcgtgatgagcaacagtgggaagagttaattccgccacgcg

SEQ ID NO: 689632 - DNA, 75 bp, synthetic construct
  source 1..75: mol_type = other DNA
atgaaaaaggctaaaatactttctggcgcattattactgtgcttttcgtcaccactgatttctcaggctgcgaca

SEQ ID NO: 689633 - DNA, 75 bp, synthetic construct
  source 1..75: mol_type = other DNA
atgtttgccacgctgtttttagaaaacggcctgctgcccgcctcatttttgccaggcgacagcttgttgatactg

SEQ ID NO: 689634 - DNA, 75 bp, synthetic construct
  source 1..75: mol_type = other DNA
ggcgttatcgcccaggtgccgtttgttgatgttgtaacaacaatgctggatgaatcaattcctcttaccaccggc

SEQ ID NO: 689635 - DNA, 75 bp, synthetic construct
  source 1..75: mol_type = other DNA
ccatcttttattgctctgtaccgacatggactcaggccatggcggtaaatctggtcgctttaaatcgtacgaagg

SEQ ID NO: 689636 - DNA, 75 bp, synthetic construct
  source 1..75: mol_type = other DNA
atctggaaacaggtaactggtacccggaactgctggataacgttgaacccagctttgtctgggcaaatgactcct

SEQ ID NO: 689637 - DNA, 75 bp, synthetic construct
  source 1..75: mol_type = other DNA
ttgtccgcacgctgctgccaacaatggcggggatttccggtctgccaaaccgtcgcttccagtttttcaactggc

SEQ ID NO: 689638 - DNA, 75 bp, synthetic construct
  source 1..75: mol_type = other DNA
ctgcttgctggacgttttctcgcctttgtccgcacactgctgccaaccatggcggggatttccggactgccaaac

SEQ ID NO: 689639 - DNA, 75 bp, synthetic construct
  source 1..75: mol_type = other DNA
gtaatacctggaataccattcatgataataaaaaggaaaatgccgcactcaatgatgttcaggtggaagttaatt

SEQ ID NO: 689640 - DNA, 75 bp, synthetic construct
  source 1..75: mol_type = other DNA
ctgcgctctggcaacacgactttgccgcgctggcggaccctcatattgttagcgttgtttactttgtcatgtttg

SEQ ID NO: 689641 - DNA, 75 bp, synthetic construct
  source 1..75: mol_type = other DNA
gatgatcctgccgattgccctgttaaccgcaggcctgttaggcacgctgtttgtggtgattaaaaagaaatacgg

SEQ ID NO: 689642 - DNA, 75 bp, synthetic construct
  source 1..75: mol_type = other DNA
ggcggggatttccgggttgccaaaccgccgcttccagtttttcaactggttaagtggattgctatgggtcagcgt

SEQ ID NO: 689643 - DNA, 75 bp, synthetic construct
  source 1..75: mol_type = other DNA
ccgtatgttcagattaaacgagagtattgatcaagctctacaccatttcttaagtaaagaaggtgataaaaatga

SEQ ID NO: 689644 - DNA, 75 bp, synthetic construct
  source 1..75: mol_type = other DNA
aagatttgcgtctgaaagtggtacgcaaaatgtttgaactacggtttggcgaaccagcgcccgcccgacgctccg

SEQ ID NO: 689645 - DNA, 75 bp, synthetic construct
  source 1..75: mol_type = other DNA
gtttgaacttcggtttggagaacctgcgcctgcccggcgctccgtagagcaactcagaggtatagaaggcagtcg

SEQ ID NO: 689646 - DNA, 75 bp, synthetic construct
  source 1..75: mol_type = other DNA
caccaacaaccgtatggagttgatggccgctattgtcgcgctggaagcgttaaaagaacactgtgaagtcattct

SEQ ID NO: 689647 - DNA, 75 bp, synthetic construct
  source 1..75: mol_type = other DNA
tggtgagcttcgatccggcaagcggaaaaaccgcgatgtacggttatcccatcgacagcgcggcctacagcaaaa

SEQ ID NO: 689648 - DNA, 75 bp, synthetic construct
  source 1..75: mol_type = other DNA
gtaccctggcaccgatttgggtacgcaagatgcctaagaaagaggctgaagctctggcgatgcattaccttgagc

SEQ ID NO: 689649 - DNA, 75 bp, synthetic construct
  source 1..75: mol_type = other DNA
cgtttaaaatcaggaatgctgctcgcaaaataaaaacgcacccatcatttctgacagaggcgtttaatttatccg

SEQ ID NO: 689650 - DNA, 75 bp, synthetic construct
  source 1..75: mol_type = other DNA
gttcccgaaacagatttcgaagaattctttagcgacatgggcgtaaaggaacagtatgacgctcaggaagtgttg

SEQ ID NO: 689651 - DNA, 75 bp, synthetic construct
  source 1..75: mol_type = other DNA
gggcgtatccggcggattgatgaagacgcgatccatcgtcaactggacagcggtgcaatagtgctaatggggccg

SEQ ID NO: 689652 - DNA, 75 bp, synthetic construct
  source 1..75: mol_type = other DNA
gatgtaatagatggcgcgtttgtacttatcgacaagacagggatccgcactcatattcctgttggctcggttgcc

SEQ ID NO: 689653 - DNA, 75 bp, synthetic construct
  source 1..75: mol_type = other DNA
agcactttggcccaacccaggtgctgcacaatatcgatttgaacattgcccagggcgaagtcgtggtgattatcg

SEQ ID NO: 689654 - DNA, 75 bp, synthetic construct
  source 1..75: mol_type = other DNA
cgcgtttcttcttccgccatgccgggttcccatttacgggttgtatgggtatcgcccaccgataaatatccttcg

SEQ ID NO: 689655 - DNA, 75 bp, synthetic construct
  source 1..75: mol_type = other DNA
atacatggaagcttaatgacgttccgagctggattgacaaaaaggcgttcgccaacgttaaagggatgaatgaac

SEQ ID NO: 689656 - DNA, 75 bp, synthetic construct
  source 1..75: mol_type = other DNA
aaattttaagtgaaaatggcctctatgctgtgctcgttgaaaatggaaatattgttagtcattgctgtattcaat

SEQ ID NO: 689657 - DNA, 75 bp, synthetic construct
  source 1..75: mol_type = other DNA
tgtcgcgatattttccgtagtagtaaattaacgggcaaattaattccgttaattgaggaagtccttgccgccggt

SEQ ID NO: 689658 - DNA, 75 bp, synthetic construct
  source 1..75: mol_type = other DNA
gaaattgaaccaccacaacccgcgccggatatgttaccaccagccatacctgaacctaaaacgctgggtgatagc

SEQ ID NO: 689659 - DNA, 75 bp, synthetic construct
  source 1..75: mol_type = other DNA
tactccgctggcaaaaattattgctcacattcgcgaaatcgccggtggtaacctggcgaataccctgaccattga

SEQ ID NO: 689660 - DNA, 75 bp, synthetic construct
  source 1..75: mol_type = other DNA
gtacataccggcaacggtagtatcgatctgattattcctggcgtacataaagccaatggcctgcgtcaactccaa

SEQ ID NO: 689661 - DNA, 75 bp, synthetic construct
  source 1..75: mol_type = other DNA
gcaggctttagttttgcaatggaaaatgccggcagcgcggtcgtcgcagcggcaaaataccggcaggctccaata

SEQ ID NO: 689662 - DNA, 75 bp, synthetic construct
  source 1..75: mol_type = other DNA
atggaaatcttgttagtcattaccgcattatgtgtttgcgaaagaatggggctgcgttaattaattttgtggatg

SEQ ID NO: 689663 - DNA, 75 bp, synthetic construct
  source 1..75: mol_type = other DNA
tttccgattaaggttaaccgtggctaccgttcagcggggtatagtgccagtgatgaaatattgaaaggtctggct

SEQ ID NO: 689664 - DNA, 75 bp, synthetic construct
  source 1..75: mol_type = other DNA
aaaaggcattcgccagcgttaaaggaatgaatgaacctgctgatagtgcaatgaatcttgttaaaaccagtaatg

SEQ ID NO: 689665 - DNA, 75 bp, synthetic construct
  source 1..75: mol_type = other DNA
gaaattgaaccgccacaacctgcgccggatatgctacctccagccatccccgaacctgaaacgttaggcgatagc

SEQ ID NO: 689666 - DNA, 75 bp, synthetic construct
  source 1..75: mol_type = other DNA
gctgatcgacaaaaccgggatccgcacgcatattccagtgggatcggtcgcctgcattatgctcgaaccgggaac

SEQ ID NO: 689667 - DNA, 75 bp, synthetic construct
  source 1..75: mol_type = other DNA
gagccaccgccagctcgccgttcagtggagcagctacgtggaattgagggatctcgcgttcgccagacgtatgca

SEQ ID NO: 689668 - DNA, 75 bp, synthetic construct
  source 1..75: mol_type = other DNA
attatctcaattttggaagattgccagctctcgtcgttctctgcttacatgctggtttttttggccttattggca

SEQ ID NO: 689669 - DNA, 75 bp, synthetic construct
  source 1..75: mol_type = other DNA
attattggcggtttccgttcgggattattcacaccaacagaagctggcgcggttgcggcattctacgccttgttt

SEQ ID NO: 689670 - DNA, 75 bp, synthetic construct
  source 1..75: mol_type = other DNA
attaatgccattagtgaaagaagcgggaatagaccctatctattttggcatcatgtttattatcaactgttcgat

SEQ ID NO: 689671 - DNA, 75 bp, synthetic construct
  source 1..75: mol_type = other DNA
gcatgattttctgaaacgctatccatttaatcctgatttatttcctcaacagattgaggaaagtgaagagaaact

SEQ ID NO: 689672 - DNA, 75 bp, synthetic construct
  source 1..75: mol_type = other DNA
tggaggtattattgcggccattatcccgccctctattccgctcattatcttcggcgtctccagcggactctccat

SEQ ID NO: 689673 - DNA, 75 bp, synthetic construct
  source 1..75: mol_type = other DNA
ttgactcgcctcgcttattattcatcgtaattatgctcgccattatggtgatcagtacagtcatggatttaactc

SEQ ID NO: 689674 - DNA, 75 bp, synthetic construct
  source 1..75: mol_type = other DNA
atgacaatccttatatttattgtcagtttgttaggggctatcgcaattggcgttcccatcgcctgggcattatta

SEQ ID NO: 689675 - DNA, 75 bp, synthetic construct
  source 1..75: mol_type = other DNA
atggctggaacacagcataccccacgtctggcgcacacacaaactgcctttgtgtggcgttttctggcactgagt

SEQ ID NO: 689676 - DNA, 75 bp, synthetic construct
  source 1..75: mol_type = other DNA
ccgctaactttgattcgctgccgtggtatcagaaaatcaccgattatctgtggcatatcacgctgccggtgctgg

SEQ ID NO: 689677 - DNA, 75 bp, synthetic construct
  source 1..75: mol_type = other DNA
caccgttgaagcccaccttacgctcggaaacttattccgttcgcgtggcgaagtcgatcgcgctattcgtattca

SEQ ID NO: 689678 - DNA, 75 bp, synthetic construct
  source 1..75: mol_type = other DNA
gagccatggaaactattcgcttttcgagcctcaacctatgctcgaagaaaataaaacttatttcagaaagatttt

SEQ ID NO: 689679 - DNA, 75 bp, synthetic construct
  source 1..75: mol_type = other DNA
ccagcgaacaggaagcccgtcggcaatcaccggctggctgcgtgatggtattcactgcccgtattcgtcaggggg

SEQ ID NO: 689680 - DNA, 75 bp, synthetic construct
  source 1..75: mol_type = other DNA
ggaagcacgcctgcaatccccggctggctgcgtgatggtattcgccgcccgtattcgtcaggggtcacatcatgc

SEQ ID NO: 689681 - DNA, 75 bp, synthetic construct
  source 1..75: mol_type = other DNA
tgttcccatcgcctgggcattattactgtgcggcatctcattgatgttctggatggatatctttgatgtgcaaat

SEQ ID NO: 689682 - DNA, 75 bp, synthetic construct
  source 1..75: mol_type = other DNA
agccctcgtcgtcctctgcctgttagccggtttctttggactgcttggcgttttgctacagcacacctgcatctt

SEQ ID NO: 689683 - DNA, 75 bp, synthetic construct
  source 1..75: mol_type = other DNA
gggaacgaatctcatcaaggctatttattaccatgtaaccaaaaactccgtttacattaaatatattaaccacat

SEQ ID NO: 689684 - DNA, 75 bp, synthetic construct
  source 1..75: mol_type = other DNA
tggtgtgaagcgaaccgtgacgagctgacgaacggcggcaaagtgaaaagtgctaacctcgttaccggtgatgtg

SEQ ID NO: 689685 - DNA, 75 bp, synthetic construct
  source 1..75: mol_type = other DNA
atgagtttattcgctgactataacaccccttatcttttcgctatttcttttgtacttttgatcggccttttagaa

SEQ ID NO: 689686 - DNA, 75 bp, synthetic construct
  source 1..75: mol_type = other DNA
ctgttcgtggttcctgtcagtttactgtttacgattattgcggtgcattataccggtaaaatagttgcgccctgg

SEQ ID NO: 689687 - DNA, 75 bp, synthetic construct
  source 1..75: mol_type = other DNA
acaggtaatattagtcaggcgcttcattatctcaatatcggaaggttgccagccctcgtcatcctctgcctgcta

SEQ ID NO: 689688 - DNA, 75 bp, synthetic construct
  source 1..75: mol_type = other DNA
tgacgaacggcggcaaagtgaagacggcaaatcttgtcaccggcgatgtgtcatggcgtcaacgcccgccatcag

SEQ ID NO: 689689 - DNA, 75 bp, synthetic construct
  source 1..75: mol_type = other DNA
caaacgcgccaatatttattatctggaaaaatgccgggtacaggtgaatggtgggcgggtggagtatgttaccag

SEQ ID NO: 689690 - DNA, 75 bp, synthetic construct
  source 1..75: mol_type = other DNA
gaagatcctgaacgagttcctgaatcgctatcccttcaatcccgatttgttccctcaagttcctgaggccgcaac

SEQ ID NO: 689691 - DNA, 75 bp, synthetic construct
  source 1..75: mol_type = other DNA
tggtgtgaagcgaaccgcgacgaactgacgaacggcggcaaagtgaagacggcgaatcttgtcaccggtgatgta

SEQ ID NO: 689692 - DNA, 75 bp, synthetic construct
  source 1..75: mol_type = other DNA
gcaatcccgcgatgccgtggtatgtgatatccgccggattggtgacctgcaacgcgaagcggcacgacttgaaac

SEQ ID NO: 689693 - DNA, 75 bp, synthetic construct
  source 1..75: mol_type = other DNA
taagtattcgcggtgtggatgcggtgatggaaacgctggagcgtcttggcctgcaacgttttattcgcacgaaac

SEQ ID NO: 689694 - DNA, 75 bp, synthetic construct
  source 1..75: mol_type = other DNA
tctgcgccggtgatccgtgtggagcagaaactggataaggggattggcttcgcccgctttgccaaatcgctggct

SEQ ID NO: 689695 - DNA, 75 bp, synthetic construct
  source 1..75: mol_type = other DNA
caactcatcaatgagcgtgaccatgctgagtccgctttagatgatatgtactttgcagcaacaggtaacaggccg

SEQ ID NO: 689696 - DNA, 75 bp, synthetic construct
  source 1..75: mol_type = other DNA
ggagagaaccgatttgatggtgatgatgcactaattcatcgcgaggctgctggatatattcccatttgcagaatt

SEQ ID NO: 689697 - DNA, 75 bp, synthetic construct
  source 1..75: mol_type = other DNA
ttcaggtactgaaagatcgcggtcagccgatgactatccataacctcatcgcgcctaccgtcgatggcgttctgg

SEQ ID NO: 689698 - DNA, 75 bp, synthetic construct
  source 1..75: mol_type = other DNA
acttccaactggtcgaggagtgcgaaattcctgctggcggatctctggtcgagtacgttgacgatatgcgcgaga

SEQ ID NO: 689699 - DNA, 75 bp, synthetic construct
  source 1..75: mol_type = other DNA
cagaattgctgatttagaagctaaacaatgcattgaagagatgagtaaacaaagttgcgaagctcgggagcgtga

SEQ ID NO: 689700 - DNA, 75 bp, synthetic construct
  source 1..75: mol_type = other DNA
ggcacttgtcaaaaatcagtaatgtgccggtaccggaagataaacaaacggtaagcggctcgccagaaccgtatt

SEQ ID NO: 689701 - DNA, 75 bp, synthetic construct
  source 1..75: mol_type = other DNA
tgggatattacacattatccggcagttgttttgaacgagccgcactgccctcgaaatcgaaacagaaaaaaattc

SEQ ID NO: 689702 - DNA, 75 bp, synthetic construct
  source 1..75: mol_type = other DNA
gacgatgagatttactccactgacggcataaagcatgagcaaatagctatggtgttcagtgaaaacgaatctcgt

SEQ ID NO: 689703 - DNA, 75 bp, synthetic construct
  source 1..75: mol_type = other DNA
gccggggaaatagaaatcgcgatgaaggctattggtgtaccggttcagtggactaatggcgatgcggaaaagcgc

SEQ ID NO: 689704 - DNA, 75 bp, synthetic construct
  source 1..75: mol_type = other DNA
atgaagatttccaaatggaacagcaggccaatgctgaattcatcgccgcagccagtccagctaccgtgctggcac

SEQ ID NO: 689705 - DNA, 75 bp, synthetic construct
  source 1..75: mol_type = other DNA
gtggtggcctttgataaaaataatctgatgcaggcggtagctgtggcatccgggcgggttcaggtgaaagtcggg

SEQ ID NO: 689706 - DNA, 75 bp, synthetic construct
  source 1..75: mol_type = other DNA
aaccttttgcctctgatgctgagttacttcaacagcaaggggtttgaagcattgagaaataggccattcgaaaga

SEQ ID NO: 689707 - DNA, 75 bp, synthetic construct
  source 1..75: mol_type = other DNA
attgcagcagctaacgcgatgggcggtcgcgtggtagccattgatatcgacgatcgtaagcaggcggtagcgaag

SEQ ID NO: 689708 - DNA, 75 bp, synthetic construct
  source 1..75: mol_type = other DNA
cagttcctgtctgagcggtcgcccgaatgcctgtaaaaacaaccagactcttggcgttcagcgccagggcggtat

SEQ ID NO: 689709 - DNA, 75 bp, synthetic construct
  source 1..75: mol_type = other DNA
gtttttcaacaattcacctaatgatcataaaagaacttaggctagaaagaggtgtgcatcaaggagtgctggctc

SEQ ID NO: 689710 - DNA, 75 bp, synthetic construct
  source 1..75: mol_type = other DNA
gatgaagcatatagaaattgggtcgataacggtgctgatgtggataatcgagattatctggagtcatcaacaggt

SEQ ID NO: 689711 - DNA, 75 bp, synthetic construct
  source 1..75: mol_type = other DNA
ataacggcgctaaatcgaacatatcaaatgattctctctcattaacatttgaatcatttgggaaggaagggggag

SEQ ID NO: 689712 - DNA, 75 bp, synthetic construct
  source 1..75: mol_type = other DNA
tatccggtagaaaagctggtcagcgctcactatccgttggagcaggccggtcgtgctttcagtgactgggcaaat

SEQ ID NO: 689713 - DNA, 75 bp, synthetic construct
  source 1..75: mol_type = other DNA
gtgaaaaggcagagaaagcaacgagtggtgtgtggtcgctcgaatatggagagggccgatttgatggtgatgatg

SEQ ID NO: 689714 - DNA, 75 bp, synthetic construct
  source 1..75: mol_type = other DNA
attcgcagcaatgtgacgtggcggcagaactggtgctgttaaatgacggtcgcggcccggaagtggtgattgaag

SEQ ID NO: 689715 - DNA, 75 bp, synthetic construct
  source 1..75: mol_type = other DNA
ttgtggggtaattggccttggcgctatcgccgcggcatccgccatgggggcgcgcgtaattgctatcgatattga

SEQ ID NO: 689716 - DNA, 75 bp, synthetic construct
  source 1..75: mol_type = other DNA
cataaagtcattgtctgtaatgccttaagtgttgatgagttagcgctggtagaaccgctggccgtgggactacat

SEQ ID NO: 689717 - DNA, 75 bp, synthetic construct
  source 1..75: mol_type = other DNA
tcgcggtgcgggtgctgggcctgcggcagggaggtatcagtgaagaaacacaaaatgacagctgtgagaaaatac

SEQ ID NO: 689718 - DNA, 75 bp, synthetic construct
  source 1..75: mol_type = other DNA
tcgtgcggctgctgaatccagcatccaagtgaaaaacaaaggtagcatcaagctcagtaacgtgaagtcggttgt

SEQ ID NO: 689719 - DNA, 75 bp, synthetic construct
  source 1..75: mol_type = other DNA
caggtaccggttatgcgtaccaccaggatcgtatgcgtcgccgtgctgcgggtgaagctccggctgcaccgcagg

SEQ ID NO: 689720 - DNA, 75 bp, synthetic construct
  source 1..75: mol_type = other DNA
tccggcgaacggcgaaccaatcatcgttccgtctcaggacgttgtgctgggtctgtactacatgacccgtgactg

SEQ ID NO: 689721 - DNA, 75 bp, synthetic construct
  source 1..75: mol_type = other DNA
cgtatccgtgaccagcataaagatgaaaagatggcagcaatccataaagcactggacgaatgcagcgcagaacat

SEQ ID NO: 689722 - DNA, 75 bp, synthetic construct
  source 1..75: mol_type = other DNA
tttttccgtctggtaacgtgtctgtggcaatagaaccccggcttccacaggtggattttcctgagcatcaccatg

SEQ ID NO: 689723 - DNA, 75 bp, synthetic construct
  source 1..75: mol_type = other DNA
ctctctgcatgcgcgcgtcaaagtgcgtatcactgaatacgaaaaagatgctaacggtgaattagtagcgaaaac

SEQ ID NO: 689724 - DNA, 75 bp, synthetic construct
  source 1..75: mol_type = other DNA
ctccggttacctgactcgtcgtctggttgacgtggcgcaggacctggtggttaccgaagacgattgtggtactca

SEQ ID NO: 689725 - DNA, 75 bp, synthetic construct
  source 1..75: mol_type = other DNA
ccggcactgaaaatcgttgatgctcagggtaacgacgttctgatcccaggtaccgatatgcctgcgcagtacttc

SEQ ID NO: 689726 - DNA, 75 bp, synthetic construct
  source 1..75: mol_type = other DNA
ccagaacgtgacggccttttctgcgcccgtatctttgggccggtaaaagactacgagtgcctgtgcggtaagtac

SEQ ID NO: 689727 - DNA, 75 bp, synthetic construct
  source 1..75: mol_type = other DNA
gacccagactaaagtacgccgtgagcgtatgggtcacatcgagctggcttctccgactgcgcacatttggttcct

SEQ ID NO: 689728 - DNA, 75 bp, synthetic construct
  source 1..75: mol_type = other DNA
gttccgtctcaggacgttgttctgggtctgtactatatgacccgtgactgtgttaacgctaaaggcgaaggcatg

SEQ ID NO: 689729 - DNA, 75 bp, synthetic construct
  source 1..75: mol_type = other DNA
gcatgacattctgcgtctgcgtggtgttcatgctgtgactcgttacatcgttaacgaagtacaggacgtataccg

SEQ ID NO: 689730 - DNA, 75 bp, synthetic construct
  source 1..75: mol_type = other DNA
aaatggagaacggctgcctgctgagtcatggaagtcaaaagggtttacggtatctctggaagcaggatattcatg

SEQ ID NO: 689731 - DNA, 75 bp, synthetic construct
  source 1..75: mol_type = other DNA
cgtcgtgtgctgcttcaggtggtttattaccgtacattcgagcgtcttccggtgattgaactcagtaatggacgg

SEQ ID NO: 689732 - DNA, 75 bp, synthetic construct
  source 1..75: mol_type = other DNA
agtaccagtcatgggatcgtaaggagaacgaatggcttcagcgtgaacgccgccgcgtgcttcttcaggtggttt

SEQ ID NO: 689733 - DNA, 75 bp, synthetic construct
  source 1..75: mol_type = other DNA
tgagaaaatactgacgccgacagaatggaaactacagtgggttaagctggaaggaaaaccgcttctgttacagac

SEQ ID NO: 689734 - DNA, 75 bp, synthetic construct
  source 1..75: mol_type = other DNA
gcgcctacagttgatggcgttctgggtatggaggccaaaacgcggactgacctgttagtgatgtcagatgagcct

SEQ ID NO: 689735 - DNA, 75 bp, synthetic construct
  source 1..75: mol_type = other DNA
gccgcctcaggtgcaggctgttgtgctcgatctgtgggttaatcttctggatgtgccgcagaaacaggaatttgt

SEQ ID NO: 689736 - DNA, 75 bp, synthetic construct
  source 1..75: mol_type = other DNA
tgtttccgctggttcctttctggggataccgaaaggataaaaccggggagccatacgggctaatttcccgcgcca

SEQ ID NO: 689737 - DNA, 75 bp, synthetic construct
  source 1..75: mol_type = other DNA
ggggacatggggagatgcatcgttaaccgttattgatggggcgagtgctgaatttactaatggcatccttagtat

SEQ ID NO: 689738 - DNA, 75 bp, synthetic construct
  source 1..75: mol_type = other DNA
atctttcaggattatataatagccaaaaagatgcttataatacatcaataattttttctggcgggtataattcat

SEQ ID NO: 689739 - DNA, 75 bp, synthetic construct
  source 1..75: mol_type = other DNA
ggcgtattaattcttgctgcacctgatgctcttggtcggactgagtatttatatttatcccgtggcgcagaactg

SEQ ID NO: 689740 - DNA, 75 bp, synthetic construct
  source 1..75: mol_type = other DNA
gacggcttacgcggtgaagctgcgcaggttatccgccagattatgggctatgcccgcgccacggtgaggctgtta

SEQ ID NO: 689741 - DNA, 75 bp, synthetic construct
  source 1..75: mol_type = other DNA
atcaggacgagccgctaaaaaacgaaggattctggccagacctgaacctgaaggactttcaggcacagcgagcga

SEQ ID NO: 689742 - DNA, 75 bp, synthetic construct
  source 1..75: mol_type = other DNA
gggacaggaaagcatggacacccgcgccggattactggctgaagcatcggtggtgatccgccgtatgaaagggct

SEQ ID NO: 689743 - DNA, 75 bp, synthetic construct
  source 1..75: mol_type = other DNA
tcaaggggggaacatggtttttcacggtgaatttacgaaatcgtcgaagccaacttttgaccacccagtaccaga

SEQ ID NO: 689744 - DNA, 75 bp, synthetic construct
  source 1..75: mol_type = other DNA
ttacccatgcttgtggattgaaaaatatctggcaaccacgtttttgggagcacgccatccgcaataccaaagatt

SEQ ID NO: 689745 - DNA, 75 bp, synthetic construct
  source 1..75: mol_type = other DNA
gtatttgactatccagaaagtcacagataaaaacgccgacgaaattatcaaggaaatgattaaaaatgaactggc

SEQ ID NO: 689746 - DNA, 75 bp, synthetic construct
  source 1..75: mol_type = other DNA
gtaaagttaatcgcgcccatctgttagggctggcagcagcgtacatgaatctgttactggtacaaccggagatca

SEQ ID NO: 689747 - DNA, 75 bp, synthetic construct
  source 1..75: mol_type = other DNA
taaaggggggaacatggtttttcacggtaaatttacggaatcgtcgaagccaacttttgaccgctcagttacaga

SEQ ID NO: 689748 - DNA, 75 bp, synthetic construct
  source 1..75: mol_type = other DNA
gtaaagcaagtgagtgattggccattctcaacgttccatcgcgatgtcgcgaaagggttatatcccatcgattgg

SEQ ID NO: 689749 - DNA, 75 bp, synthetic construct
  source 1..75: mol_type = other DNA
gcgttatgatcgtccgcacacactgttctactgcgacccaccgtacctgggtacggaaggctatggtgtggattt

SEQ ID NO: 689750 - DNA, 75 bp, synthetic construct
  source 1..75: mol_type = other DNA
cgactggccaccggtttcctcggttaacattagtaaccccaccagccgggcacgtgtacaacaacaggcgatgat

SEQ ID NO: 689751 - DNA, 75 bp, synthetic construct
  source 1..75: mol_type = other DNA
ttcaaagccaccagccatgacgcaacaatcgtcacaaccgatgcgtggcatctggctggccacggtgtctcgcct

SEQ ID NO: 689752 - DNA, 75 bp, synthetic construct
  source 1..75: mol_type = other DNA
gaattgaataatagaatcaatcatcttgctcctagtgaatttctcagaaacccaagctttaagaaaaactgcgac

SEQ ID NO: 689753 - DNA, 75 bp, synthetic construct
  source 1..75: mol_type = other DNA
ttacgcttacaggcagctgaagctgtagcagaagctggcctagataccacatatgaattagttcataaatttacc

SEQ ID NO: 689754 - DNA, 75 bp, synthetic construct
  source 1..75: mol_type = other DNA
cgcgttttaacctgttgcgtattgaagaggaactgtcgatggcacacctgcgcctgtccagaacactgatagagc

SEQ ID NO: 689755 - DNA, 75 bp, synthetic construct
  source 1..75: mol_type = other DNA
cagtgtgaatctgtccggcagcgttttgattatgagtgctttgatgtggacgtatgggaaggcctgcgttttggt

SEQ ID NO: 689756 - DNA, 75 bp, synthetic construct
  source 1..75: mol_type = other DNA
gttcccttcagcccattaggcaaaggcttcctgacgggatctattaagccaggaacaacttttggcatggatgat

SEQ ID NO: 689757 - DNA, 75 bp, synthetic construct
  source 1..75: mol_type = other DNA
gagagaaggcccgatcgtaaacgtcttctggtgagtctcggcactgtcaaaccgatggttgacggccttgatcta

SEQ ID NO: 689758 - DNA, 75 bp, synthetic construct
  source 1..75: mol_type = other DNA
cagggagccgatcgcccggtaaatgcccgcgttgttgccgaacgcggctgcgggattatccccggcgacgtcggc

SEQ ID NO: 689759 - DNA, 75 bp, synthetic construct
  source 1..75: mol_type = other DNA
gggaacaactttcggtaaggatgattaccgtagcaccgtaccgcgtttcgctgcacaagccattgaagccaatga

SEQ ID NO: 689760 - DNA, 75 bp, synthetic construct
  source 1..75: mol_type = other DNA
gttagcacaaaaaccgtggattgttcccatcccgggcaccactaaactgcaccggctggaagaaaacctgggcgc

SEQ ID NO: 689761 - DNA, 75 bp, synthetic construct
  source 1..75: mol_type = other DNA
aggaacaacttttggcatggatgattaccgcagcactgtgccgcgtttcgccgagcaggcgattgaagccaatga

SEQ ID NO: 689762 - DNA, 75 bp, synthetic construct
  source 1..75: mol_type = other DNA
atgcagatacagcaggaaatcaatgttctccacagctttcgagagtttaacgtcgatgacggggaggtttgtgat

SEQ ID NO: 689763 - DNA, 75 bp, synthetic construct
  source 1..75: mol_type = other DNA
tcggtgatggtgtgtgttttctgtatatagacctgtatcagtggtatgcagacatgcaacttgattccatcagac

SEQ ID NO: 689764 - DNA, 75 bp, synthetic construct
  source 1..75: mol_type = other DNA
cgctccgtaacgctattattaacgttaagcgagacagaccttttgaaattaacgcttgggtagttttgccggagc

SEQ ID NO: 689765 - DNA, 75 bp, synthetic construct
  source 1..75: mol_type = other DNA
atggtaaatctccctcaggaattggggtcacctgatttgtgggctggtggaggtgtgggtctgttcgcaggtctg

SEQ ID NO: 689766 - DNA, 75 bp, synthetic construct
  source 1..75: mol_type = other DNA
ggtgaatttacgcaatcgtcgaagccaactcttgaccacccagtaccagatgctccgtaacgccattattaaagt

SEQ ID NO: 689767 - DNA, 75 bp, synthetic construct
  source 1..75: mol_type = other DNA
ttaatgctctccatcactttcacaggcagaacgacaatgccggagtggtttgtgattatatctggacgtcgataa

SEQ ID NO: 689768 - DNA, 75 bp, synthetic construct
  source 1..75: mol_type = other DNA
ggtcacctgatgtatgggctggtggaggtgttgggctgattgcaggcttattacttcgctatttcatcgtcagag

SEQ ID NO: 689769 - DNA, 75 bp, synthetic construct
  source 1..75: mol_type = other DNA
acagtatcgaaggtattatttttattgatgaaatagatgcgcatttacatgtttctttgcaaaagcaaatattaa

SEQ ID NO: 689770 - DNA, 75 bp, synthetic construct
  source 1..75: mol_type = other DNA
acataaatgcaagtgcatttattgactatgcaaaaatgcaggttttaaaatataaaaaagcaaattctcaggaga

SEQ ID NO: 689771 - DNA, 75 bp, synthetic construct
  source 1..75: mol_type = other DNA
caaaagaaaaagaaggtgaaattcgttcactattgagatttcacaaagctctacgtgaagcatcaattacctcgc

SEQ ID NO: 689772 - DNA, 75 bp, synthetic construct
  source 1..75: mol_type = other DNA
agaatgacaaagaaaatttcactgttttacaaaccattcgccagcagcaatccacgctgaatggcagctgggtcg

SEQ ID NO: 689773 - DNA, 75 bp, synthetic construct
  source 1..75: mol_type = other DNA
ctggtggatgacagaagagaactttcatcaggtcatcgatcactttctggttatgcgtatctgtctggagccgca

SEQ ID NO: 689774 - DNA, 75 bp, synthetic construct
  source 1..75: mol_type = other DNA
tcaaaggcgggagcccagtgctttattattatctctgcttgcaattattattgattcttagcggcgtaatggggg

SEQ ID NO: 689775 - DNA, 75 bp, synthetic construct
  source 1..75: mol_type = other DNA
cctcggcgccgctaatgtcatcctttctcagacggagatgcagaagatagaacaggcgctggagacggtaaaaat

SEQ ID NO: 689776 - DNA, 75 bp, synthetic construct
  source 1..75: mol_type = other DNA
ggtgaatcatgtggaacggctatggcaggcacttcatgacacgataacccgtaatcatcagtgccgctcaatgtg

SEQ ID NO: 689777 - DNA, 75 bp, synthetic construct
  source 1..75: mol_type = other DNA
cataaaagaacttaggctagaaagaggtgtgcatcaaggagtactggctcaagctgctggaaaaacaccaaacgc

SEQ ID NO: 689778 - DNA, 75 bp, synthetic construct
  source 1..75: mol_type = other DNA
aaaaatctcataataactggtggtaacgggtgtggaaaaactagtttcattagatctatttatgatttccttaaa

SEQ ID NO: 689779 - DNA, 75 bp, synthetic construct
  source 1..75: mol_type = other DNA
tatcaacaccgggttgatccacagatcccaatcgaagatgttgccggagtggttaaagatttaatggatcaaggg

SEQ ID NO: 689780 - DNA, 75 bp, synthetic construct
  source 1..75: mol_type = other DNA
ttggctggaacattgaccaacagacgggtaagcgtctgccgggccttaacagcaggccggagcatatcaggcagg

SEQ ID NO: 689781 - DNA, 75 bp, synthetic construct
  source 1..75: mol_type = other DNA
agtggtggataacgtagtacagaccatgcgcgatatctccaccagctcgcagaaaatcgccgatattatcagcgt

SEQ ID NO: 689782 - DNA, 75 bp, synthetic construct
  source 1..75: mol_type = other DNA
tggcaggctggggaattcagcgccagcaatatggtgaacagaaacactggatgctggtgacgctggcggcgatgt

SEQ ID NO: 689783 - DNA, 75 bp, synthetic construct
  source 1..75: mol_type = other DNA
tctttgacgataatgccacctggatcgcgccgaatatgggcaccgacgtggcactgatgttagggattgcgcata

SEQ ID NO: 689784 - DNA, 75 bp, synthetic construct
  source 1..75: mol_type = other DNA
cttttgaacatatctgcaccctgttacgtgagctgataaagcattctcccggcgattttggttatcaacgttcac

SEQ ID NO: 689785 - DNA, 75 bp, synthetic construct
  source 1..75: mol_type = other DNA
atgaaagaacaatctttacccatagtcccctggattggggggaaacgtcgtctggccaaacacattctgccgttg

SEQ ID NO: 689786 - DNA, 75 bp, synthetic construct
  source 1..75: mol_type = other DNA
ggcacttcttatactgcatcagaaatttctatcaaacgtgttcctgatgggctgtgtcgagtgagtaattcattg

SEQ ID NO: 689787 - DNA, 75 bp, synthetic construct
  source 1..75: mol_type = other DNA
atgcagacggtgtaatgaagtttacctatcgtgagtttgcaaacgatatggctcgtgcagcgtttacaacagatt

SEQ ID NO: 689788 - DNA, 75 bp, synthetic construct
  source 1..75: mol_type = other DNA
ggttgagatcaccggcccccgcctggatatggataacgatttcaagacctgggtggggatcattcattcctttgc

SEQ ID NO: 689789 - DNA, 75 bp, synthetic construct
  source 1..75: mol_type = other DNA
gccagccatctggcattaagtgcttctgaaacagcacaacgcggcggaaatgtggtggatagcgtggtacagacc

SEQ ID NO: 689790 - DNA, 75 bp, synthetic construct
  source 1..75: mol_type = other DNA
gaaacatcggctgtggtaaaaaccgtgacgccagctacgccgcgtaaaatggccgtggcagatagcggggagaac

SEQ ID NO: 689791 - DNA, 75 bp, synthetic construct
  source 1..75: mol_type = other DNA
gcattaagcgcgaaatccgacgctgaaagagtgatgataaaaatggcctccttgcttggttttgacccgataagc

SEQ ID NO: 689792 - DNA, 75 bp, synthetic construct
  source 1..75: mol_type = other DNA
cttcttctccactttcgcttccggtgggaatcgctcaacaggagtccgcagtgacagaagaaaagcaacaaactg

SEQ ID NO: 689793 - DNA, 75 bp, synthetic construct
  source 1..75: mol_type = other DNA
gctggatgaatgcagcgcagagcatccggtattttatgaagatgaagtggatatccaccttaatcctaaaatcgg

SEQ ID NO: 689794 - DNA, 75 bp, synthetic construct
  source 1..75: mol_type = other DNA
ctgcctttacggggattttcaacgatttggccgccgcatcgaacttcgtgtgaaaacgggggcagaagctatccg

SEQ ID NO: 689795 - DNA, 75 bp, synthetic construct
  source 1..75: mol_type = other DNA
atggtgcagtgatccacatcgtgccgcgtctggcgggagccaaaagtggcggtgtttttcaggcggtgctgggtg

SEQ ID NO: 689796 - DNA, 75 bp, synthetic construct
  source 1..75: mol_type = other DNA
ctgcctttacggggatttgcaacgatttggccgccgcatcgagcttcgtgtgaaaacgggggcagaagccatccg

SEQ ID NO: 689797 - DNA, 75 bp, synthetic construct
  source 1..75: mol_type = other DNA
ctgcctttacggggatttccaacgatttggccgccgcatcgagcttcgtgtgaaaacgggggcagaagcgatccg

SEQ ID NO: 689798 - DNA, 75 bp, synthetic construct
  source 1..75: mol_type = other DNA
tgatgcaggtgaaaccgaattgtctgcccgtcttaatgagccgctggcaaatggtgcagtgatccacatagtacc

SEQ ID NO: 689799 - DNA, 75 bp, synthetic construct
  source 1..75: mol_type = other DNA
gtttcgccagaaactgaatgagggctggtatcaggtgcgcatttccgggcgtgatgcaggcgaaaatgaattatc

SEQ ID NO: 689800 - DNA, 75 bp, synthetic construct
  source 1..75: mol_type = other DNA
gtttcgtcagaaactgagcgacggctggtaccaggtacggattgccgggcgggatgcaggagaaaccgaattatc

SEQ ID NO: 689801 - DNA, 75 bp, synthetic construct
  source 1..75: mol_type = other DNA
aatggtgccgtgatccacatcgtaccgcgtctggcgggtgctaaaagtggtggtgtatttcaggcggtgctgggt

SEQ ID NO: 689802 - DNA, 75 bp, synthetic construct
  source 1..75: mol_type = other DNA
gggcactgtcattactgcttcccggttttcgtcagcatctgtcgcagggctggtatcagttgcggattgcgggga

SEQ ID NO: 689803 - DNA, 75 bp, synthetic construct
  source 1..75: mol_type = other DNA
gcccgtcttcacgaacagctgggtgagggaacggttatccatattgtgccgcgactggccggtgcagggaaaggc

SEQ ID NO: 689804 - DNA, 75 bp, synthetic construct
  source 1..75: mol_type = other DNA
tggcgtcaccgggcatggcacgcatctgcctttacggggattttcaacgatttggccgccgcatcgaccttcggg

SEQ ID NO: 689805 - DNA, 75 bp, synthetic construct
  source 1..75: mol_type = other DNA
gccagaactccccgcacacaggcaacagataacggcaaacagaacacctatttttcttcgctggataatatggtt

SEQ ID NO: 689806 - DNA, 75 bp, synthetic construct
  source 1..75: mol_type = other DNA
tgctcagggcaatgttttgccggttctgtacggtgaaatgcgcgtggggtcacgggtgatttcgcaggagatcag

SEQ ID NO: 689807 - DNA, 75 bp, synthetic construct
  source 1..75: mol_type = other DNA
cgtgccgcgtctggcaggagccaaaagtggcggtgtgtttcaggctgtgctgggggcggctgttatggcggttgc

SEQ ID NO: 689808 - DNA, 75 bp, synthetic construct
  source 1..75: mol_type = other DNA
cgggggccgaagccatccgggcgctggccatgcagatcccggcgtttcgtcagaagctgagcgacggctggtatc

SEQ ID NO: 689809 - DNA, 75 bp, synthetic construct
  source 1..75: mol_type = other DNA
ggcgcagatgctggcaccgaaaccgaaaacaccggaatacaacagtgctgataatggtaagcagaacacgtattt

SEQ ID NO: 689810 - DNA, 75 bp, synthetic construct
  source 1..75: mol_type = other DNA
gtgaaaacggggtctgaagccatccgggcgctggccatgcagctcccggtgtttcgtcagaaactgagtgagggc

SEQ ID NO: 689811 - DNA, 75 bp, synthetic construct
  source 1..75: mol_type = other DNA
aatgcgcgtggggtcacgtgttgtctctcaggagatcagcacggcagacgagggggacggtggtcaggttgtggt

SEQ ID NO: 689812 - DNA, 75 bp, synthetic construct
  source 1..75: mol_type = other DNA
gcgccctgtcgctgcaggtgccgggttttcgccgtcagatgaacgaaggctggtaccagatacgtattgccgggc

SEQ ID NO: 689813 - DNA, 75 bp, synthetic construct
  source 1..75: mol_type = other DNA
tggcgtcaccgggaatggcacgcatctgcctttacggggatttgcaacgatttggccgccgcatcgaccttcgtg

SEQ ID NO: 689814 - DNA, 75 bp, synthetic construct
  source 1..75: mol_type = other DNA
ggaaccctgtgggctggctgggtgccgcggctgtatcgggcatgtatgcggcaggggccagtatgatcctgggtg

SEQ ID NO: 689815 - DNA, 75 bp, synthetic construct
  source 1..75: mol_type = other DNA
atcccgtcttaatgagccgctggcaaatggtgcagtgatccacatcgtgccgcgtcttgcgggagcaaaaagtgg

SEQ ID NO: 689816 - DNA, 75 bp, synthetic construct
  source 1..75: mol_type = other DNA
gagggggcggtcatccatattgtgccgcgactggccggggccggaaaaggcggactgcagattgtgctgggggcg

SEQ ID NO: 689817 - DNA, 75 bp, synthetic construct
  source 1..75: mol_type = other DNA
tatcgggcgatttggtcagggggggatcccggcccttcgtcaggttccgttcaatatccgtgtgcatgcccaggt

SEQ ID NO: 689818 - DNA, 75 bp, synthetic construct
  source 1..75: mol_type = other DNA
atctgtttggcgagcctgatgaaggtatcgtcatcagccgctttggtatgcacgctgatgtggaatccgcagatg

SEQ ID NO: 689819 - DNA, 75 bp, synthetic construct
  source 1..75: mol_type = other DNA
gatcgctcactggagcgaaatgcacagtgacggcatgaagatcgcccgtccgcgccagttgtatacaggatatga

SEQ ID NO: 689820 - DNA, 75 bp, synthetic construct
  source 1..75: mol_type = other DNA
aaatcgcggcgttccgtctgctgtcgaaaatgccgaccatggcagcaatgtgctacaagtattccattggtcagc

SEQ ID NO: 689821 - DNA, 75 bp, synthetic construct
  source 1..75: mol_type = other DNA
ctgtacggggaaatgcgcgtggggtcgcgggtggcttctcaggagatcagcacggcagacgagggggacggtggt

SEQ ID NO: 689822 - DNA, 75 bp, synthetic construct
  source 1..75: mol_type = other DNA
gtaggaattatggcgagtaatctgctgttttctctcggtgccagtatgacgcttggcggtgttgcacagatgctg

SEQ ID NO: 689823 - DNA, 75 bp, synthetic construct
  source 1..75: mol_type = other DNA
atgaaccgctggcaaatggtgctgtgatccatatcgtgccgcgtctggcaggagccaaaagtggcggtgtgtttc

SEQ ID NO: 689824 - DNA, 75 bp, synthetic construct
  source 1..75: mol_type = other DNA
gcttgtatcgcagcaggtattgcttcgctgtgggggccagctcacggtggtgctaacgaagctgcgctgaaaatg

SEQ ID NO: 689825 - DNA, 75 bp, synthetic construct
  source 1..75: mol_type = other DNA
aaatcgccgcgttccgtctgctgtcgaaaatgccgaccatggctgcgatgtgttacaaatactccatcggtcagc

SEQ ID NO: 689826 - DNA, 75 bp, synthetic construct
  source 1..75: mol_type = other DNA
atgtgctggggtgtggccagatgctggcaccgaaagccagaacccccgacacagacaacggataacggcaaacag

SEQ ID NO: 689827 - DNA, 75 bp, synthetic construct
  source 1..75: mol_type = other DNA
aaaaatgccgaccatggccgcgatgtgttacaaatactctatcggccagccgtttgtttacccacgcaacgatct

SEQ ID NO: 689828 - DNA, 75 bp, synthetic construct
  source 1..75: mol_type = other DNA
tgctaacgaagcggcgctgaaaatgctggaagaaatcagctccgttaaacacattccggaatttgttcgtcgtgc

SEQ ID NO: 689829 - DNA, 75 bp, synthetic construct
  source 1..75: mol_type = other DNA
gctggaagtggctatggagctggaaaacatcgcgctgaacgacccgtactttatcgagaagaaactgtacccgaa

SEQ ID NO: 689830 - DNA, 75 bp, synthetic construct
  source 1..75: mol_type = other DNA
gaacagcatttatctgttcacctacgtaacaaagggcaattgcccgtatgcgaagacatttgatactgcggattc

SEQ ID NO: 689831 - DNA, 75 bp, synthetic construct
  source 1..75: mol_type = other DNA
gaacagcatttacctgttcacctacgtaacaaagggcaagtgcccatttgcgaagacatttgacactgatgatgc

SEQ ID NO: 689832 - DNA, 75 bp, synthetic construct
  source 1..75: mol_type = other DNA
cctttcacaggaaacgggcggcatgaccagcatcaccatctccaattccgacacaccggaaaccagacgcattta

SEQ ID NO: 689833 - DNA, 75 bp, synthetic construct
  source 1..75: mol_type = other DNA
atgcaatttgacccgcaaatcgtcgcacaggcgaacacatttgtaaatgccttgcgcagtggtaaacgcgcccgt

SEQ ID NO: 689834 - DNA, 75 bp, synthetic construct
  source 1..75: mol_type = other DNA
atggcttatcaatctcaagatatcattcgtcgttccgcgactaacggtctgaccccccccccccccccccccccg

SEQ ID NO: 689835 - DNA, 75 bp, synthetic construct
  source 1..75: mol_type = other DNA
gacggtcagtataagccgtcccgctcggatgttctgcgttcgtttatagcgcagggtgttcgcgggaaatttact

SEQ ID NO: 689836 - DNA, 75 bp, synthetic construct
  source 1..75: mol_type = other DNA
cctcgtgttcaccaaaaactacacatccaaatctgcgtatgtcgcgtaccgtcacgaatgcgcttacatcctggc

SEQ ID NO: 689837 - DNA, 75 bp, synthetic construct
  source 1..75: mol_type = other DNA
cgtcatcacccgacggaaaagcccgttaccagcctgcaaccgctgattgagagcttcacacacccgaacgcaatt

SEQ ID NO: 689838 - DNA, 75 bp, synthetic construct
  source 1..75: mol_type = other DNA
tggttttaactttgcagtgacaaccttaggttttctcattgctggtttcacaatatttgcaacactatccaaacc

SEQ ID NO: 689839 - DNA, 75 bp, synthetic construct
  source 1..75: mol_type = other DNA
tggttgagccgtttgtgggtggcgcatcggtattcatgaacaccagttacaagcgttacatcctgggtgattcca

SEQ ID NO: 689840 - DNA, 75 bp, synthetic construct
  source 1..75: mol_type = other DNA
tagagatcaagagcaagtacatagacttgttccagataatatgagagggctgttgagagagctgccatcgttacc

SEQ ID NO: 689841 - DNA, 75 bp, synthetic construct
  source 1..75: mol_type = other DNA
agagtgttacctctgcatttagagagttcggagggtttgagaaagagttactaccaaagaatgaagatataccgt

SEQ ID NO: 689842 - DNA, 75 bp, synthetic construct
  source 1..75: mol_type = other DNA
cgagttggcaaaaaactgccggttatttggtgaaaagtcagaagttgttaccgggtgaggatcgggacgacagtt

SEQ ID NO: 689843 - DNA, 75 bp, synthetic construct
  source 1..75: mol_type = other DNA
caggcttgttctacaacatactgctcttcctgggtaactcgacgattgcgatgctgatttcactgctgttcgcga

SEQ ID NO: 689844 - DNA, 75 bp, synthetic construct
  source 1..75: mol_type = other DNA
ggcggttgtcaccatcatccagatgactcatgccaaaagtgccgcggattcaggcttattttacaacgtgatact

SEQ ID NO: 689845 - DNA, 75 bp, synthetic construct
  source 1..75: mol_type = other DNA
tttcgcggcacactgaacgctttctttaccgcgaacaacattgcggtcattggcgggctggccaccagcggaatt

SEQ ID NO: 689846 - DNA, 75 bp, synthetic construct
  source 1..75: mol_type = other DNA
gtggtgtgacctgctggaagagaactctgtcgacgcggtaaaagtacgttctgttgtatcttgtgacaccgactt

SEQ ID NO: 689847 - DNA, 75 bp, synthetic construct
  source 1..75: mol_type = other DNA
cgtgccattctgtggatgattgtaccgaaaggtctgccttactccatcgtcaaccaggcgctgggtaaaaaagca

SEQ ID NO: 689848 - DNA, 75 bp, synthetic construct
  source 1..75: mol_type = other DNA
atctggctgcgccggacatcatcgtacgtaacgaaaaacgtatgctgcaggaagcggtagacgccctgctggata

SEQ ID NO: 689849 - DNA, 75 bp, synthetic construct
  source 1..75: mol_type = other DNA
gccggatgcgaaggttcactgtgtcatggagtatttgttttgccagagtccggctgttttttatcagtacataca

SEQ ID NO: 689850 - DNA, 75 bp, synthetic construct
  source 1..75: mol_type = other DNA
ggataaccagtaccgggcactttgcctgtctcctttgcagacgctggcagaacgacttcagtgtgtgccggcatc

SEQ ID NO: 689851 - DNA, 75 bp, synthetic construct
  source 1..75: mol_type = other DNA
attaataaggaggaggtggttgctgataatgtgtcgccggctattttagccgaagattttattacctggcttcgt

SEQ ID NO: 689852 - DNA, 75 bp, synthetic construct
  source 1..75: mol_type = other DNA
ccgctgccgcacttctgcctccgtttaccttgttagttatactgcaactggcatttggtaaaaaagtggcggcaa

SEQ ID NO: 689853 - DNA, 75 bp, synthetic construct
  source 1..75: mol_type = other DNA
tttatgaccgtaactggatcgccgcacctatcggcgcagtagctggcgcattaggcgcggcgttctcaaccaacg

SEQ ID NO: 689854 - DNA, 75 bp, synthetic construct
  source 1..75: mol_type = other DNA
tctagcaaccttgttcaatctgttgttagcggtatcgccattgcattaatgatatctattttttttaataggggt

SEQ ID NO: 689855 - DNA, 75 bp, synthetic construct
  source 1..75: mol_type = other DNA
ttgggaagaaatgacctgcttattcgcaccttccctaattgggtgacgatttcggatgtcaaagctaataatgtt

SEQ ID NO: 689856 - DNA, 75 bp, synthetic construct
  source 1..75: mol_type = other DNA
atgaacgaccagcaaatcgaaaaagaaatcgttgagaaaggcaaaacagctccgcgagttaccccgcagaacatc

SEQ ID NO: 689857 - DNA, 75 bp, synthetic construct
  source 1..75: mol_type = other DNA
atattcaggcaaccgccatcacccgacggaaaagcccgttaccagcctgcaaccactgattgagagcttcacaca

SEQ ID NO: 689858 - DNA, 75 bp, synthetic construct
  source 1..75: mol_type = other DNA
gcatcgatgttatggccacgtttccggacaatgctgtcgatttcatcctcaccgacccgccgtatctcgtcggtt

SEQ ID NO: 689859 - DNA, 75 bp, synthetic construct
  source 1..75: mol_type = other DNA
atgaacgaccagcaaatcgaaaaagaaatcgttgagaaaggcaaaaccgctccgcgagttaccccgcagcacatc

SEQ ID NO: 689860 - DNA, 75 bp, synthetic construct
  source 1..75: mol_type = other DNA
tgaccgctttatggcagcctggaaacgcgccggattcagcgtggttggccacctggtcttcaccaaaaactacac

SEQ ID NO: 689861 - DNA, 75 bp, synthetic construct
  source 1..75: mol_type = other DNA
cccggagatcggtcgcaagatcgcccgcgaaaatgctgtaaacaaaatctggatgctcgaaggttacttgctgaa

SEQ ID NO: 689862 - DNA, 75 bp, synthetic construct
  source 1..75: mol_type = other DNA
tgacagacccgccatatctcgtcggttttcgtgaccgttccgggcgcaccatcgccggcgataaaaccgatgaat

SEQ ID NO: 689863 - DNA, 75 bp, synthetic construct
  source 1..75: mol_type = other DNA
ttacagacccgccatatctcgtcggtttacgtgaccgttccgggcgcaccatcgccggcgataaaaccgatgaat

SEQ ID NO: 689864 - DNA, 75 bp, synthetic construct
  source 1..75: mol_type = other DNA
cggagctgtcgctcaatattatcgaccgttacctggtggcctgcgaaaccttgcagattgagccgattattgtgc

SEQ ID NO: 689865 - DNA, 75 bp, synthetic construct
  source 1..75: mol_type = other DNA
aaatcgttgagaaaggcaaaacggcgccgcgcgttacgccagaccatatcgagagcattattgctcaggaggcat

SEQ ID NO: 689866 - DNA, 75 bp, synthetic construct
  source 1..75: mol_type = other DNA
gcatcgatgttatggcccgtatccctgataacgccattgatttcatactgactgacccgccgtacctcgtcggtt

SEQ ID NO: 689867 - DNA, 75 bp, synthetic construct
  source 1..75: mol_type = other DNA
tgactgacccgccatatctcgtcggtttacgtgaccgttccgggcgcaccatcgccggcgataaaaccgatgaat

SEQ ID NO: 689868 - DNA, 75 bp, synthetic construct
  source 1..75: mol_type = other DNA
ttactcaatattacgcaacctgcattaacgcgaagaataaaaaagatggaggaagatttacatattcccgaattc

SEQ ID NO: 689869 - DNA, 75 bp, synthetic construct
  source 1..75: mol_type = other DNA
ctgcaaccggcctgtaatgaaatgtaccgcgtactcaaaaaagacgcgctgatggtgagcttctatggctggaac

SEQ ID NO: 689870 - DNA, 75 bp, synthetic construct
  source 1..75: mol_type = other DNA
tgggcacctcgtgttcaccaaaaactacacatccaaatctgcgtatgtcgtgtaccgccacgaatgcgcttacat

SEQ ID NO: 689871 - DNA, 75 bp, synthetic construct
  source 1..75: mol_type = other DNA
tggccacctcgtatttaccaaaagctactcatccaaatccgcttttgtcggctaccgccacgaatgcgcctatat

SEQ ID NO: 689872 - DNA, 75 bp, synthetic construct
  source 1..75: mol_type = other DNA
gcgtgcaggtgatgtcccgtttcccggcgcgtgccgtcgattttattcttaccgatccgccgtatctggttggct

SEQ ID NO: 689873 - DNA, 75 bp, synthetic construct
  source 1..75: mol_type = other DNA
gtgcgactttcacgtcgcacattaaccgacccgccttacctggtgggcttccgtgaccgttccggacgcaccatt

SEQ ID NO: 689874 - DNA, 75 bp, synthetic construct
  source 1..75: mol_type = other DNA
ggaaaaatgcgggattcagtgtggttgggcacctggtcttcaccaaaaactacacatcgaaggccgcatatgtgg

SEQ ID NO: 689875 - DNA, 75 bp, synthetic construct
  source 1..75: mol_type = other DNA
aaaaactacacatcgaaggccgcatatgtgggctatcgccacgaatgcgcctacatcctggcaaaaggccgtcca

SEQ ID NO: 689876 - DNA, 75 bp, synthetic construct
  source 1..75: mol_type = other DNA
ggacagcaacgactggccgccgtacaacgggccatgcagcagggggctgcaaatgataactggtttgaaccggag

SEQ ID NO: 689877 - DNA, 75 bp, synthetic construct
  source 1..75: mol_type = other DNA
gcttcacacacccgaacgcgattgtgctggacccgtttgcaggcagcggctcaacctgcgtcgccgccctccagt

SEQ ID NO: 689878 - DNA, 75 bp, synthetic construct
  source 1..75: mol_type = other DNA
cgactggccgccgtgcaacgggccatgcagcagggggctgcgaatgataactggtttgaaccggaggctgcgtaa

SEQ ID NO: 689879 - DNA, 75 bp, synthetic construct
  source 1..75: mol_type = other DNA
ccggacgccggtatatcggtatcgagctgcttgagcagtatcaccgtgccggacagcaacgactggctgccgtgc

SEQ ID NO: 689880 - DNA, 75 bp, synthetic construct
  source 1..75: mol_type = other DNA
ggcaatcgccatcacccgacggaaaagcccgttaccagcctgcaaccgctgattgagagcttcacacacccgaac

SEQ ID NO: 689881 - DNA, 75 bp, synthetic construct
  source 1..75: mol_type = other DNA
gtgccagctacaacgttgaaggtgcgttccaggcctccaacaaaaatatcgccgatgcggttaacagtgtgctga

SEQ ID NO: 689882 - DNA, 75 bp, synthetic construct
  source 1..75: mol_type = other DNA
aataaaagtagaggacatgcttgctgacgatctcattcgagaacttgctgagcgcaaaagaaattcaagtacgag

SEQ ID NO: 689883 - DNA, 75 bp, synthetic construct
  source 1..75: mol_type = other DNA
gcaggccggactggaagcccgtgtccgggaaaatatcaccctgggcgttcaggccggttatgcccacagcatcaa

SEQ ID NO: 689884 - DNA, 75 bp, synthetic construct
  source 1..75: mol_type = other DNA
cggttttctctatgcgggcctgatgatcgacaaacagggcaatccgaaggttattgaatttaactgccgctttgg

SEQ ID NO: 689885 - DNA, 75 bp, synthetic construct
  source 1..75: mol_type = other DNA
caatattaccggctggcgtttgtggctggatgagccgctgaaagtcgactcattaagtcagcaaaaactgcctga

SEQ ID NO: 689886 - DNA, 75 bp, synthetic construct
  source 1..75: mol_type = other DNA
ctatcgaaccattgcaggtcattgtgattgcgctggtggcgatggctatcgcgctgttgtctacgctttatcctt

SEQ ID NO: 689887 - DNA, 75 bp, synthetic construct
  source 1..75: mol_type = other DNA
aattaaccgatagcgagcgcgatattgctgccgaaatatggaacgcctgccgcaccgccatgcttcagtccggaa

SEQ ID NO: 689888 - DNA, 75 bp, synthetic construct
  source 1..75: mol_type = other DNA
cgtaggcgataaagataccggaccaaacacgggcgggatgggcgcttactcccccgcgccggtagtaaccgatga

SEQ ID NO: 689889 - DNA, 75 bp, synthetic construct
  source 1..75: mol_type = other DNA
cgtcattaaagcggacggtctggctgccgggaaaggcgttatcgtggcgatgacgctggaagaagcggaagcggc

SEQ ID NO: 689890 - DNA, 75 bp, synthetic construct
  source 1..75: mol_type = other DNA
agttcatcagcgcacgatggaacgcatcatctggccaaccgtaaaaggcatggcggcggaaggcaacacctacac

SEQ ID NO: 689891 - DNA, 75 bp, synthetic construct
  source 1..75: mol_type = other DNA
gcgggcgcgagcacgcgctggcctggaaagcggcccagtcaccgctggttgagactgtttttgttgctccgggta

SEQ ID NO: 689892 - DNA, 75 bp, synthetic construct
  source 1..75: mol_type = other DNA
aacaccggcgggatgggcgcttactcccccgcgccggtagtaaccgatgaagttcatcagcgcaccatggaacgt

SEQ ID NO: 689893 - DNA, 75 bp, synthetic construct
  source 1..75: mol_type = other DNA
atcatctggccaaccgtgaaaggcatggcggcggaagggaatacctacaccggcttcctgtatgcgggcctgatg

SEQ ID NO: 689894 - DNA, 75 bp, synthetic construct
  source 1..75: mol_type = other DNA
gatcgtaaaggcgagttgttccaggccgtacgcatggaaaaaaatatgatgggtttactgctgagcctgattgtc

SEQ ID NO: 689895 - DNA, 75 bp, synthetic construct
  source 1..75: mol_type = other DNA
ggcatgtgcaacgccagcagaaattgaaggaacaggtcgatacgcgcgtcgcggcggcgatagagaaaaaaggga

SEQ ID NO: 689896 - DNA, 75 bp, synthetic construct
  source 1..75: mol_type = other DNA
gcaagttccggtaactccggatggttggataagctgtagtgagcgaatgccgaataccaaaacagccgttcttgt

SEQ ID NO: 689897 - DNA, 75 bp, synthetic construct
  source 1..75: mol_type = other DNA
cactatcgggcaactatccggtaactccggatggttggataagctgtagtgagctaatgccagatgatggtcagc

SEQ ID NO: 689898 - DNA, 75 bp, synthetic construct
  source 1..75: mol_type = other DNA
aagctgtagtgatcaaatgcctgaaaagaaccagaacgtgcttatttcggtgaatttcgatagtgatctggttga

SEQ ID NO: 689899 - DNA, 75 bp, synthetic construct
  source 1..75: mol_type = other DNA
ggagcgacgccatgcttcatggagccgaacctgtaagccaaacttacaacttgccagaattaatcgaagggatgg

SEQ ID NO: 689900 - DNA, 75 bp, synthetic construct
  source 1..75: mol_type = other DNA
ccggttttacctgggagacacagaaccggcaagcggatatcgacgcggcgaaagaggtctggtcggaaagcaaac

SEQ ID NO: 689901 - DNA, 75 bp, synthetic construct
  source 1..75: mol_type = other DNA
ctatgaaatgctggtgaatattgaggatgcctcgcgtctgatgcgttatccggcaggcaatattaccggctggcg

SEQ ID NO: 689902 - DNA, 75 bp, synthetic construct
  source 1..75: mol_type = other DNA
ctaccggtgatgtggtactgcaaagcgcgcgcagcgtggcggtcggggtgatgctgggtatcgatccggcgcaaa

SEQ ID NO: 689903 - DNA, 75 bp, synthetic construct
  source 1..75: mol_type = other DNA
cttgatggcgcggcgctgccggtcgctatcgaacctttacaggtcattgttattgcgctggtggcgatggctatc

SEQ ID NO: 689904 - DNA, 75 bp, synthetic construct
  source 1..75: mol_type = other DNA
gcagaatgcactatcgggcaactatccggtaactccggatagttggataagctgtagtgagcgaatgcctgagaa

SEQ ID NO: 689905 - DNA, 75 bp, synthetic construct
  source 1..75: mol_type = other DNA
gcttcagtccggaaactttcgggaaagcaagaattcgtcaaccaataattttcgggaaatcccggaagcgtcaac

SEQ ID NO: 689906 - DNA, 75 bp, synthetic construct
  source 1..75: mol_type = other DNA
gggcgtattccaagtcagcgcctgttcaatgtgattggcacttttgccgccaacagtgaagtcgatggctatgaa

SEQ ID NO: 689907 - DNA, 75 bp, synthetic construct
  source 1..75: mol_type = other DNA
gtggttggtggatacgtgaagtgggtctgtttgatgagtccggggcattgattgccgtaggcaactgcccggaaa

SEQ ID NO: 689908 - DNA, 75 bp, synthetic construct
  source 1..75: mol_type = other DNA
aagccactgagcaagccactgcagcagcgaggtctgcttctgcagcaaaaacctctgaaacaaatgcaaagactt

SEQ ID NO: 689909 - DNA, 75 bp, synthetic construct
  source 1..75: mol_type = other DNA
ctcaaatagcggcgtttataatgcgactattagtggagcgtcaacattgattcttcactttaatatgaatgcggg

SEQ ID NO: 689910 - DNA, 75 bp, synthetic construct
  source 1..75: mol_type = other DNA
actggacaacggcacaattgattgaatggctggattctcaaggggcattcaatcacccatactggatgtgcaaat

SEQ ID NO: 689911 - DNA, 75 bp, synthetic construct
  source 1..75: mol_type = other DNA
agcgcccttaaacagtcctgcactgaccggaacgccaacaacgccaactgcgccaaaagggactaataatactca

SEQ ID NO: 689912 - DNA, 75 bp, synthetic construct
  source 1..75: mol_type = other DNA
atgagtaccacaacacgaaaatttaaaaccgttatcaccgatacgggtgaaaaaaaattagcgcaggcagccaca

SEQ ID NO: 689913 - DNA, 75 bp, synthetic construct
  source 1..75: mol_type = other DNA
atagtcaggtctggacaaccgcgcaatttatttcgtggctggagagtcagggagcatttaaccatccttactgga

SEQ ID NO: 689914 - DNA, 75 bp, synthetic construct
  source 1..75: mol_type = other DNA
cgtgcgtattgagttagcgaaacccggcaaagaagatatgttgagtctgttttcgctgccggtatttccagaaaa

SEQ ID NO: 689915 - DNA, 75 bp, synthetic construct
  source 1..75: mol_type = other DNA
tcaccactgttggtgcagcaaagctggcagcggcaaccgcaccgggagggcggaaggtcaacattaccacgatgg

SEQ ID NO: 689916 - DNA, 75 bp, synthetic construct
  source 1..75: mol_type = other DNA
aatggagaagcaaacaaagcaccacaacaaaagacctgatgacgctgaaatgggatgcactaaatattcttgtta

SEQ ID NO: 689917 - DNA, 75 bp, synthetic construct
  source 1..75: mol_type = other DNA
gcgactaacagcatgtctgaaacgctcgccgcaacaccaaaagccgttaagacggtaatggatgaaacgaacaag

SEQ ID NO: 689918 - DNA, 75 bp, synthetic construct
  source 1..75: mol_type = other DNA
catcttgcaggttgcgttattgaggttatgggtaataaaggtgccatgaccatccgtgtaacaacaccaagcact

SEQ ID NO: 689919 - DNA, 75 bp, synthetic construct
  source 1..75: mol_type = other DNA
tttactcagttaagcagcgcgaccaacagcacgtctgaaacactggccgcaacgccgaaagcggtaaaggccgca

SEQ ID NO: 689920 - DNA, 75 bp, synthetic construct
  source 1..75: mol_type = other DNA
tcatcttgcaggttgcgttattgaggttatgggtaataaaggtgccatgaccatccgtgtaaccaccccgagcac

SEQ ID NO: 689921 - DNA, 75 bp, synthetic construct
  source 1..75: mol_type = other DNA
ctgcgcaggatgccaccacggcgcgaaaaggccttgttcagctcagtagtgcgactaacagcacgtctgaaacgc

SEQ ID NO: 689922 - DNA, 75 bp, synthetic construct
  source 1..75: mol_type = other DNA
tggatggttcaggctggcaactgtaaccatgccacaggccagttccgtggtttacataagcctgattggtggtgc

SEQ ID NO: 689923 - DNA, 75 bp, synthetic construct
  source 1..75: mol_type = other DNA
caatgatgccttcctgatttgggaaagaaacactgactgggcgaaaattggatttaaaaatgattcagatgctga

SEQ ID NO: 689924 - DNA, 75 bp, synthetic construct
  source 1..75: mol_type = other DNA
tgccgcgcgtatggcgggcgatgccgtggcccagttccgatttacagatttcctggtcatcggaatatatcaatt

SEQ ID NO: 689925 - DNA, 75 bp, synthetic construct
  source 1..75: mol_type = other DNA
aactcaaatagcggcgtttataatgcgactattagtggagcgtcaacattgattcttcactttaatatgaatgcg

SEQ ID NO: 689926 - DNA, 75 bp, synthetic construct
  source 1..75: mol_type = other DNA
accgctacaagtgctggggcacatgcacacactgttggtattggcgctcatacgcactctgttgcgattggttca

SEQ ID NO: 689927 - DNA, 75 bp, synthetic construct
  source 1..75: mol_type = other DNA
gccaccacggcgcgaaaagggcttgtccagctcagtagcgccaccaacagtgattctgaaacgctggccgcaaca

SEQ ID NO: 689928 - DNA, 75 bp, synthetic construct
  source 1..75: mol_type = other DNA
attggcggtctgggaaataagcaatttggcatctacatgattaataactcaaggacagccaatggcaccgatggt

SEQ ID NO: 689929 - DNA, 75 bp, synthetic construct
  source 1..75: mol_type = other DNA
atacctggtggtatgacgttaataaagcggccaaactgccgtcagccagacaacagggagaatgtaatgaacgca

SEQ ID NO: 689930 - DNA, 75 bp, synthetic construct
  source 1..75: mol_type = other DNA
cgaaaaccacatcgtcgtttgattacgggacgaaaacaacctcactatttgactatgggaccaaaactaccagta

SEQ ID NO: 689931 - DNA, 75 bp, synthetic construct
  source 1..75: mol_type = other DNA
gcaaaaggctttgttcaactcagtagcgccactaacagcgattctgaaacgctggccgcaacgccgaaagcggtt

SEQ ID NO: 689932 - DNA, 75 bp, synthetic construct
  source 1..75: mol_type = other DNA
atccggatgaggtcaaacgtcgccgcaaggctgaaattgatgaaaacagcagactggggctggtctttgatactg

SEQ ID NO: 689933 - DNA, 75 bp, synthetic construct
  source 1..75: mol_type = other DNA
ggcgcggtaacccgcccggtgtaccgtgcatggctgaatatggtggttgctgccggtctgctgaaaatcccgtct

SEQ ID NO: 689934 - DNA, 75 bp, synthetic construct
  source 1..75: mol_type = other DNA
ggctgaagatggctattgctgccggagaaatcaagctgccgagaggcatcgatatggactcgctttataacgcgg

SEQ ID NO: 689935 - DNA, 75 bp, synthetic construct
  source 1..75: mol_type = other DNA
gtgcaaataaccgaagcattactttcagagccgggagacatccggcgttttgttcagcaggcggtggaccactgg

SEQ ID NO: 689936 - DNA, 75 bp, synthetic construct
  source 1..75: mol_type = other DNA
gcgttaaaaacagtcgcattgtctctggggttaccggttgtgagtgccattacccatcgcccgctacagcgctgt

SEQ ID NO: 689937 - DNA, 75 bp, synthetic construct
  source 1..75: mol_type = other DNA
gatatccgggtgccggaccatctgataatcggtggcagccaggttttctcctttgcggaacacggtctgctttaa

SEQ ID NO: 689938 - DNA, 75 bp, synthetic construct
  source 1..75: mol_type = other DNA
cctgaagttgtgcgtgagctggcacgaattgcactggcatcactggaagcagaaccggtggtttacatgtgggat

SEQ ID NO: 689939 - DNA, 75 bp, synthetic construct
  source 1..75: mol_type = other DNA
aagaatcagaacgtacttatttcggtgaatttcgatagtgatctggttgagccgctaatatgctccgcacgcaat

SEQ ID NO: 689940 - DNA, 75 bp, synthetic construct
  source 1..75: mol_type = other DNA
ctttatgcgcaatatcgagacggtgagttttttgatgtcgtccgtaatggtgatgaatttttcgaaacacatagc

SEQ ID NO: 689941 - DNA, 75 bp, synthetic construct
  source 1..75: mol_type = other DNA
cacctgtgcccatgatggtcagtatgtgaactactggatgcactccggaatggtgatggttgaccgcgagaagat

SEQ ID NO: 689942 - DNA, 75 bp, synthetic construct
  source 1..75: mol_type = other DNA
cagctgaactacagcgaagagaacctgaagcaggcgcgtgcggcgctggagcgtctctacactgcgctgcgcggc

SEQ ID NO: 689943 - DNA, 75 bp, synthetic construct
  source 1..75: mol_type = other DNA
gagttaagcgaattaacgtggtgcagccacaatcagcaccatgatgacacactatatgttcgagctgaccttgtg

SEQ ID NO: 689944 - DNA, 75 bp, synthetic construct
  source 1..75: mol_type = other DNA
agcacgggaatggctgattcttaacatggcgggactggagcgtgaagagttccgggtgctgtatctgaataacca

SEQ ID NO: 689945 - DNA, 75 bp, synthetic construct
  source 1..75: mol_type = other DNA
tggatatccgggtgccggaccatctgatagtcggtggcagacaggttttctcctttgccgaacatggtctgcttt

SEQ ID NO: 689946 - DNA, 75 bp, synthetic construct
  source 1..75: mol_type = other DNA
ggtacaggcactggccctggtggatatccgggtaccggaccatctgatagttggtggcagtcaggttttctcctt

SEQ ID NO: 689947 - DNA, 75 bp, synthetic construct
  source 1..75: mol_type = other DNA
tcgagccggtggaggacgggcagacccgtggggccaatcagttttacagcgtcatggaacggctgaagatgcttg

SEQ ID NO: 689948 - DNA, 75 bp, synthetic construct
  source 1..75: mol_type = other DNA
aacagctttcctttctgcccggagcgatgacgcccgacgagcgcagcctcattcagcgggccctgaaaaccctgg

SEQ ID NO: 689949 - DNA, 75 bp, synthetic construct
  source 1..75: mol_type = other DNA
gcacgagaatggctgattctgaacatggcgggactggagcgtgaagagttccgggtgctgtatctgaacaaccag

SEQ ID NO: 689950 - DNA, 75 bp, synthetic construct
  source 1..75: mol_type = other DNA
gaagggaaacgcacgtttacagaatttatccgtgaaggtgtgggtgttcatgcgtttaacggcgaaatctttgtg

SEQ ID NO: 689951 - DNA, 75 bp, synthetic construct
  source 1..75: mol_type = other DNA
atggagaagcagcaatacaatgcctgttgctgctcaaccagacgagcatttgccatacgcgtgccagtgccacaa

SEQ ID NO: 689952 - DNA, 75 bp, synthetic construct
  source 1..75: mol_type = other DNA
gacctggggggagataagtgcaggcggacaatgccgggtggaaaggtgttatcaggttgcccgggatgatacatc

SEQ ID NO: 689953 - DNA, 75 bp, synthetic construct
  source 1..75: mol_type = other DNA
agccgtgagtccgaaacgggtggacacgccaggacatggtatcgggaaccgttttctgcgggccggtgtggaggt

SEQ ID NO: 689954 - DNA, 75 bp, synthetic construct
  source 1..75: mol_type = other DNA
gaagggaaacgcacgtttaccgaatttattcgtgaaggtgtgggcgttcatgcgtttaacggcgaaatctttgtg

SEQ ID NO: 689955 - DNA, 75 bp, synthetic construct
  source 1..75: mol_type = other DNA
gaagggaaacgcacgtttactgaatttatccgtgaaggtgtgggagttcatgcgtttaacggcgaaatctttgtg

SEQ ID NO: 689956 - DNA, 75 bp, synthetic construct
  source 1..75: mol_type = other DNA
gcaacgattaagccgggtaatggtattgagcaggcaactcactggatgccgctaccggagccaccgcaggaggtg

SEQ ID NO: 689957 - DNA, 75 bp, synthetic construct
  source 1..75: mol_type = other DNA
taatctcccatgcacgcgaaagcgttagttatctggaagacttgaaaggacgtgttagtaaagaaggtgcggact

SEQ ID NO: 689958 - DNA, 75 bp, synthetic construct
  source 1..75: mol_type = other DNA
ttgaagcatacgcaaaacgtgcggagataacacctaaaccactattcgccgcacctccagtgccagcagtaccgg

SEQ ID NO: 689959 - DNA, 75 bp, synthetic construct
  source 1..75: mol_type = other DNA
tggcacccagcaattacgagaaagaattagccgtgttttgggcgacgttattacgccatatcatcataaacaagc

SEQ ID NO: 689960 - DNA, 75 bp, synthetic construct
  source 1..75: mol_type = other DNA
caaccagctctccggtaactccgcctcttttgcctggtggtttcaccattgaggatgcgaaggagttacatgaag

SEQ ID NO: 689961 - DNA, 75 bp, synthetic construct
  source 1..75: mol_type = other DNA
cacggcaaccaccctcaaactaatgaatatggtctgattagcaatgtaacccactggatgccgctgccagaaccg

SEQ ID NO: 689962 - DNA, 75 bp, synthetic construct
  source 1..75: mol_type = other DNA
aacgacgacatggcttacgcattccatcacgcattgtcagattcatcgctaggcgctgatgaagtagaggaaatt

SEQ ID NO: 689963 - DNA, 75 bp, synthetic construct
  source 1..75: mol_type = other DNA
ccgccatgcttcatggtgccgaacctgtaagccagacttacaagttgaacgagctgtcgggcaactctccggtaa

SEQ ID NO: 689964 - DNA, 75 bp, synthetic construct
  source 1..75: mol_type = other DNA
gttatcgaagggctggtatgttcagccgctatatatagctcagccagtacacgtgccggaggaaatgaatctggc

SEQ ID NO: 689965 - DNA, 75 bp, synthetic construct
  source 1..75: mol_type = other DNA
tgtttcggatggcattgtaatgtccgggatttcttattctcgtcgtgacgggttctatatagccgcattggagta

SEQ ID NO: 689966 - DNA, 75 bp, synthetic construct
  source 1..75: mol_type = other DNA
atggctgaattaacaaaagaacaattaatcgaagaagctaaattaaaaatagcgattgcgaaatgccatcccaat

SEQ ID NO: 689967 - DNA, 75 bp, synthetic construct
  source 1..75: mol_type = other DNA
atggcttacgcattccaccatgcgctttctgactcatcgcttggctctgatgaaatcgaagaaattaaaaccggg

SEQ ID NO: 689968 - DNA, 75 bp, synthetic construct
  source 1..75: mol_type = other DNA
ttactgacaatggggaagaaccggcatcgaaagtaacccactggatgccgctaccggagccgccgcaggaggtga

SEQ ID NO: 689969 - DNA, 75 bp, synthetic construct
  source 1..75: mol_type = other DNA
gaaggcagcagcaaagcggctgcatacgctacaggctggaacgattgccgcgaagccatgcttcagtccggaaac

SEQ ID NO: 689970 - DNA, 75 bp, synthetic construct
  source 1..75: mol_type = other DNA
tctggaactgtttactggcgttctgcatgtttgtcggtcgcttcggggtgattatcccggtgatggcaattgccg

SEQ ID NO: 689971 - DNA, 75 bp, synthetic construct
  source 1..75: mol_type = other DNA
aggtgcgctgcaaaactttctgccctatcaggcagtgaataccgttgaaggagcgcaacagctgttaccaatggg

SEQ ID NO: 689972 - DNA, 75 bp, synthetic construct
  source 1..75: mol_type = other DNA
ggcgtctctgaccgtgagatgaactggaagcaatatctctgtgccattctcggcctgaacatgctggggctggcg

SEQ ID NO: 689973 - DNA, 75 bp, synthetic construct
  source 1..75: mol_type = other DNA
acatcctcgagtatgccaggcagcagagacgctttggccagctttgtaaaattctgccaggagatatggttgaaa

SEQ ID NO: 689974 - DNA, 75 bp, synthetic construct
  source 1..75: mol_type = other DNA
atgaccactataaccaaagagcgactgctgacaatcaagcagtggcgcgaaacatacggacctggtagcaacgtt

SEQ ID NO: 689975 - DNA, 75 bp, synthetic construct
  source 1..75: mol_type = other DNA
acgcacggcccgctgtttgttggcctgttaatcggcaccgtgttgctggttggcgcactgacctttatccctgcc

SEQ ID NO: 689976 - DNA, 75 bp, synthetic construct
  source 1..75: mol_type = other DNA
gaaaggctttttgatgaagattacctaatggattcgaaagaatgcattgacgtaattcgtgaagaagtaaagcga

SEQ ID NO: 689977 - DNA, 75 bp, synthetic construct
  source 1..75: mol_type = other DNA
gctgggatgatggcaccgaatatccggatccgcactcagttacgcactggcgtgaaatgccagcagcaccgcagc

SEQ ID NO: 689978 - DNA, 75 bp, synthetic construct
  source 1..75: mol_type = other DNA
ttcctgcggtgcggtgattgcgatgcatgattcgtttaccgctcctggtggcatggtgccgatgtggttgatgca

SEQ ID NO: 689979 - DNA, 75 bp, synthetic construct
  source 1..75: mol_type = other DNA
gcatgagcacactcgggaatgcctgggtcgatctgctacgcatcacgttatgggtgctcgtccctgtggcgttgt

SEQ ID NO: 689980 - DNA, 75 bp, synthetic construct
  source 1..75: mol_type = other DNA
tttactggtgttaatggtgctggcgcgtcctttaggcagcgggctggcgcggctgattaatgacattcctcttcc

SEQ ID NO: 689981 - DNA, 75 bp, synthetic construct
  source 1..75: mol_type = other DNA
gacagttatctgagcaggaaaaatccctgctggcgcataaagacgagacgctggagtacaaacgccagctggctg

SEQ ID NO: 689982 - DNA, 75 bp, synthetic construct
  source 1..75: mol_type = other DNA
accgaccgtcaggcgcagcgggagtcggaagagcagcgccttcgtgacgtgtacggtgataatccggctgcgctg

SEQ ID NO: 689983 - DNA, 75 bp, synthetic construct
  source 1..75: mol_type = other DNA
gcgtgcaacaggcgtcagcaaaggtccggggcagcagtaagccgtcaggagcgcggcgtcggctgaagagctgac

SEQ ID NO: 689984 - DNA, 75 bp, synthetic construct
  source 1..75: mol_type = other DNA
cgggtcaccggggcactgaaacagacatgggcggatgaagacatgctgcgcggtgactggctggccgggctgaag

SEQ ID NO: 689985 - DNA, 75 bp, synthetic construct
  source 1..75: mol_type = other DNA
acgctggaaaaacacagcggtgcgaatgagaaaatcagccagcagcgtcgcgatttatggaaagcggaaaatcag

SEQ ID NO: 689986 - DNA, 75 bp, synthetic construct
  source 1..75: mol_type = other DNA
cagcgccgtgatttatggaaggcggaaagtcagtatgcggtcctgaaagaggctgccacgaaacgacagttatcc

SEQ ID NO: 689987 - DNA, 75 bp, synthetic construct
  source 1..75: mol_type = other DNA
ccgcctgaaaaacagtctcgaccacaccgaaagtctgacccagcagcgccgcagcaaggccaccggcggtggcgg

SEQ ID NO: 689988 - DNA, 75 bp, synthetic construct
  source 1..75: mol_type = other DNA
gatcctgatgaccactctggcggcgctgttgggcgcgctgccgttaatgttgagcacgggtgtcggcgcggaatt

SEQ ID NO: 689989 - DNA, 75 bp, synthetic construct
  source 1..75: mol_type = other DNA
gaaagtgcgacggacagtttttcgcaggttaaaagcgcggccacgcagacctttgacggtattgcacagaatatg

SEQ ID NO: 689990 - DNA, 75 bp, synthetic construct
  source 1..75: mol_type = other DNA
catgcttcagcagggtgggcagatcagcgactccttcggcgggccgctcagcctgcttaccctgctgaaggagga

SEQ ID NO: 689991 - DNA, 75 bp, synthetic construct
  source 1..75: mol_type = other DNA
gcgtgcaacaggcgtcagcaaaggtccggggcagcagcaagccgtcaggatcgccgcgtcggctgaagagctgac

SEQ ID NO: 689992 - DNA, 75 bp, synthetic construct
  source 1..75: mol_type = other DNA
acctgatttcagtggcaacgcctgttgagctggaatttgaagacctgcctgaaaccgtgttcaccgccctgaccg

SEQ ID NO: 689993 - DNA, 75 bp, synthetic construct
  source 1..75: mol_type = other DNA
ctgaatgacgtgcatgaagcggtgaccgctgtcgctgaacatgtgcaggaaaaactgagcgccactgagcagcgc

SEQ ID NO: 689994 - DNA, 75 bp, synthetic construct
  source 1..75: mol_type = other DNA
aatctggcgggatttcagtatatcgcggatgcggtgctcaagcccggcgcgataccagtgcaactgatagtcgaa

SEQ ID NO: 689995 - DNA, 75 bp, synthetic construct
  source 1..75: mol_type = other DNA
ttgccacgtttttactggtattaatggtgctggcgcgtcccttaggtagcgggctggcgcggctgattaatgata

SEQ ID NO: 689996 - DNA, 75 bp, synthetic construct
  source 1..75: mol_type = other DNA
aacgcacggcccgctgtttgttggcctgttaatcggcaccgtgttgctggttggcgcactgacctttatccctgc

SEQ ID NO: 689997 - DNA, 75 bp, synthetic construct
  source 1..75: mol_type = other DNA
tgatcgcactgttttttatacaacaaggtgcgctgcaaaactttttgccttatcaggctgtgacgaccattgaag

SEQ ID NO: 689998 - DNA, 75 bp, synthetic construct
  source 1..75: mol_type = other DNA
gctggcggcaacgctgggcgcggatctgattttgctctccgacgtcagcggcattctcgacggcaaagggcaacg

SEQ ID NO: 689999 - DNA, 75 bp, synthetic construct
  source 1..75: mol_type = other DNA
agagttaggccatgttggactggcgcagccaggttcgcctaagcttatcaactccttgctggagaacggttatct

SEQ ID NO: 690000 - DNA, 75 bp, synthetic construct
  source 1..75: mol_type = other DNA
gcgtgcaacaggcgtcagcaaaggtccggggcagcagcaagccgtcaggaccgctgcgtcggctgaagagctgac

SEQ ID NO: 690001 - DNA, 75 bp, synthetic construct
  source 1..75: mol_type = other DNA
ttgcagaaggtctacacctcaatggaaatccagccgaattttgccaataccggcaaatgctacctcgtcggcctt

SEQ ID NO: 690002 - DNA, 75 bp, synthetic construct
  source 1..75: mol_type = other DNA
aacgcttaggcgatgtggttgagctgaaagccgagaagattgacgatgattctgtgcttaacggcaaatgggcgt

SEQ ID NO: 690003 - DNA, 75 bp, synthetic construct
  source 1..75: mol_type = other DNA
accgaaagtttcagccagccgcgacgcacgaaagccagcggcggtggtggcgatgagctgctgaccgactgctga

SEQ ID NO: 690004 - DNA, 75 bp, synthetic construct
  source 1..75: mol_type = other DNA
tggatgcgctcagtacctgggtgccacagttgatggaaaaactccagcaactgccacagctttctgatgtctcca

SEQ ID NO: 690005 - DNA, 75 bp, synthetic construct
  source 1..75: mol_type = other DNA
gggtgtatgtgcggcgatggctgtctccttcgttgtctctgccattctgctgaaaaccagcaaagtgaaagaaga

SEQ ID NO: 690006 - DNA, 75 bp, synthetic construct
  source 1..75: mol_type = other DNA
tgaataacttctccgcaggcatcatcgggatgatcctcgctattctggcatttctcggcattggcccggttgttg

SEQ ID NO: 690007 - DNA, 75 bp, synthetic construct
  source 1..75: mol_type = other DNA
tgctattaccgtggtgctgattttgcctattttctggcttaaacccaccacgaaaacgcgtaataatagccagga

SEQ ID NO: 690008 - DNA, 75 bp, synthetic construct
  source 1..75: mol_type = other DNA
cggtggtaagctggtaggcggcgaacgtggcggcgtagtcggtgccatcaccaccatgggcgttatcgtcggcgc

SEQ ID NO: 690009 - DNA, 75 bp, synthetic construct
  source 1..75: mol_type = other DNA
tgcaaagctttggtcgtttcctcagcaacatggtgatgccaaatatcggcgcatttatcgcgtggggtatcatca

SEQ ID NO: 690010 - DNA, 75 bp, synthetic construct
  source 1..75: mol_type = other DNA
cgctattctggcattcctcggcattggcccgattgttgaagctctgtctaaaatgctggctgcgggcgttaactt

SEQ ID NO: 690011 - DNA, 75 bp, synthetic construct
  source 1..75: mol_type = other DNA
acagaacagcgaacggaagagagccgtcagtggttcagccgcgtcatgacactcatcagcaaaacacgcacagcg

SEQ ID NO: 690012 - DNA, 75 bp, synthetic construct
  source 1..75: mol_type = other DNA
ggcgaacagtttgcgcagatgcgtgacgttgtggagcgcgtggcctctgcgcacgctgacctgcttgaccgtttc

SEQ ID NO: 690013 - DNA, 75 bp, synthetic construct
  source 1..75: mol_type = other DNA
cggacgcatgaagaaactgctggatgacggcaaaaagatttatgccagcgtcgagctttacccgcagtcattcat

SEQ ID NO: 690014 - DNA, 75 bp, synthetic construct
  source 1..75: mol_type = other DNA
tgacctttaccgacctgctacgttctaaaacctatcgcggcaacgtgctgatatacgcggcctgttcagccagtt

SEQ ID NO: 690015 - DNA, 75 bp, synthetic construct
  source 1..75: mol_type = other DNA
cgttcaaaaatctatcgcggaaacgtactgatttatgctgcctgttcagccagtttctttgcctggctgaccggt

SEQ ID NO: 690016 - DNA, 75 bp, synthetic construct
  source 1..75: mol_type = other DNA
tggtctgacctttaccgatctgctgcgttcaaaaatctatcgcggaaacgtactgatttatgctgcctgttcagc

SEQ ID NO: 690017 - DNA, 75 bp, synthetic construct
  source 1..75: mol_type = other DNA
caacgtccggtattcagcgatcgccgggtccgggaagcgatcactctcgcctttgactttgaatggatgaacaaa

SEQ ID NO: 690018 - DNA, 75 bp, synthetic construct
  source 1..75: mol_type = other DNA
tgcaaaaagtcatcgcccgtctgcaaacggcggtagataaagtgccgggcgtcgatctcttcctgcaaccaacgc

SEQ ID NO: 690019 - DNA, 75 bp, synthetic construct
  source 1..75: mol_type = other DNA
atcatccgtggctgactttaagcgtagcgctcagcacgctgctgcttagcgttctcttgtgggtgttcattccga

SEQ ID NO: 690020 - DNA, 75 bp, synthetic construct
  source 1..75: mol_type = other DNA
aaggtttcttcccggtacaggacaacggcattattcagggcactttgcaggcaccgcaatccagctcctttgcca

SEQ ID NO: 690021 - DNA, 75 bp, synthetic construct
  source 1..75: mol_type = other DNA
atgtcgccgcgcgaagctatttaccaggcctgtctgttgcgttttcgtccgatcctgatgaccactctggcggct

SEQ ID NO: 690022 - DNA, 75 bp, synthetic construct
  source 1..75: mol_type = other DNA
ccggcagatccgccgatcatgacgctcgccgtcacctcaaccgccatgccgatgacgcaagtggaagatatggtg

SEQ ID NO: 690023 - DNA, 75 bp, synthetic construct
  source 1..75: mol_type = other DNA
gaaacccgcgtcgcgcagaaaatctcgcagatttccggcgtcggcctggtgacgctttccggcggtcagcgtccg

SEQ ID NO: 690024 - DNA, 75 bp, synthetic construct
  source 1..75: mol_type = other DNA
ccgtggtgtcgctgactctgacgccgatgatgtgcgcgcggatgctcagccaggagtcgctgcgtaaacagaacc

SEQ ID NO: 690025 - DNA, 75 bp, synthetic construct
  source 1..75: mol_type = other DNA
atgcaggtgttacccccgagcagcacaggcggcccgtcgcgcctgtttattatgcgtcctgtggccaccacgctg

SEQ ID NO: 690026 - DNA, 75 bp, synthetic construct
  source 1..75: mol_type = other DNA
acctgatttcagtggcaacgcccgtgagcgaaaacctgaccctgcgccgggtcgttgggagcctctcgaaaacct

SEQ ID NO: 690027 - DNA, 75 bp, synthetic construct
  source 1..75: mol_type = other DNA
caggagtcgttgcgtaaacagaaccgcttctcccgtgcctcggaaaaaatgttcgacaggataatcgccgcctat

SEQ ID NO: 690028 - DNA, 75 bp, synthetic construct
  source 1..75: mol_type = other DNA
ctgatggtggcgatcttactcgcaggtctcatcggctaccgcgtcctgcccgtttcagcactgccggaagtggac

SEQ ID NO: 690029 - DNA, 75 bp, synthetic construct
  source 1..75: mol_type = other DNA
ccagatgcaatcggcagaagagtatcgtcagttgattatcgcttatcagaacggcgcaccaattcgtcttggcga

SEQ ID NO: 690030 - DNA, 75 bp, synthetic construct
  source 1..75: mol_type = other DNA
cactgacggcagtgtgtcgagcgttgaagcgataacggaacccgatgaacctgaagaaatgtggacggtgaaacg

SEQ ID NO: 690031 - DNA, 75 bp, synthetic construct
  source 1..75: mol_type = other DNA
tggttgctacaggggccagctccatgtcatgggagtatcgttacaccctgaacgtggtggttgaggatttcagcg

SEQ ID NO: 690032 - DNA, 75 bp, synthetic construct
  source 1..75: mol_type = other DNA
aagccttaactgatgcggtgccggtactgcgtaccaaccccgacatgcttcgcctacgtctggatgatggcaaca

SEQ ID NO: 690033 - DNA, 75 bp, synthetic construct
  source 1..75: mol_type = other DNA
acagctttgacgattctaacgccaacctgttcaaactgggcgcggagaacatcttcctcggtcgtaaagcggcaa

SEQ ID NO: 690034 - DNA, 75 bp, synthetic construct
  source 1..75: mol_type = other DNA
gtggtgttctgccagtacccggaaggcgtgcgcttcggtgaagaagaagatgacattgctcgtctggtgattggt

SEQ ID NO: 690035 - DNA, 75 bp, synthetic construct
  source 1..75: mol_type = other DNA
agatgatattgaagctgctgcacgtcgcgttcaggaaatgaaagctgagtctaaaggcgcatctccgctgtctgc

SEQ ID NO: 690036 - DNA, 75 bp, synthetic construct
  source 1..75: mol_type = other DNA
attaacgtggaattattacatgctgccaatgtggtacatggcggaagaccgtctcgcctggtgggataaattctc

SEQ ID NO: 690037 - DNA, 75 bp, synthetic construct
  source 1..75: mol_type = other DNA
cagcaaaaatctggcctagccgttatgaggaagaaggcgaactgcggcaaccgaaaaatccgctccccgccaggt

SEQ ID NO: 690038 - DNA, 75 bp, synthetic construct
  source 1..75: mol_type = other DNA
cgttaattattacttcaaatcacaggagaacaagcgagcgcaagaggaacacgacgcgcgaatggggaataagta

SEQ ID NO: 690039 - DNA, 75 bp, synthetic construct
  source 1..75: mol_type = other DNA
ggtttttctgtggctgcgggataaccagcctgatgccatcaataacccgacgttacgggaaaagctattcacctt

SEQ ID NO: 690040 - DNA, 75 bp, synthetic construct
  source 1..75: mol_type = other DNA
aagaatatcccggaacccccgccgccggagccggtcacccgcccgatggagctttatatcaatggcgaactggtg

SEQ ID NO: 690041 - DNA, 75 bp, synthetic construct
  source 1..75: mol_type = other DNA
ggtattcaacgatcgccgggttagggaagccatcaccctcgccttcgactttgaatggatgaacaaggccttgtt

SEQ ID NO: 690042 - DNA, 75 bp, synthetic construct
  source 1..75: mol_type = other DNA
ccagcctgaccgaacgtctggttgctgcccagcgccatactgaaaacgaagtgaaagtgaaagacagtctgaaag

SEQ ID NO: 690043 - DNA, 75 bp, synthetic construct
  source 1..75: mol_type = other DNA
tttggcgatggttatctggtcggtaaaacgggcaatcagttctttgtcaccaaaggcaccggctatgtggcggga

SEQ ID NO: 690044 - DNA, 75 bp, synthetic construct
  source 1..75: mol_type = other DNA
ttaaacgaacatcctcttttggtgtgggtactgagaacgcgctcggcggaaactccattgccatcggtgacaacg

SEQ ID NO: 690045 - DNA, 75 bp, synthetic construct
  source 1..75: mol_type = other DNA
ggcgacatcaacggggggatcatcaggatcacaacaggtctcgaaagcccaaaccctgccgacatgtacctccgc

SEQ ID NO: 690046 - DNA, 75 bp, synthetic construct
  source 1..75: mol_type = other DNA
tgatttgcgtatggaaaacgacgccaaaaactgggccacgcgttataccggtaaaaatttcgataaaaaatacat

SEQ ID NO: 690047 - DNA, 75 bp, synthetic construct
  source 1..75: mol_type = other DNA
actaccaggaaaacaggctgtcactcgatcagcactgtaatacaggagcgccgggagtattcttttttcgaagtg

SEQ ID NO: 690048 - DNA, 75 bp, synthetic construct
  source 1..75: mol_type = other DNA
taatgacgacagggaaaacaaactttccgcagattgttattcatgcgaaaacggattttgaggtcaatgacaagc

SEQ ID NO: 690049 - DNA, 75 bp, synthetic construct
  source 1..75: mol_type = other DNA
tggcgcttatacgaaagcagagtgtgacgcccgttatgttgctgacgttcagttaggaacgggaacgcgggttac

SEQ ID NO: 690050 - DNA, 75 bp, synthetic construct
  source 1..75: mol_type = other DNA
gtgggtgaagcagggcaacgctggacaacagaacaattcgtggaatggctgaatgaacgtggcgccttcagacca

SEQ ID NO: 690051 - DNA, 75 bp, synthetic construct
  source 1..75: mol_type = other DNA
caatggtcacgcccacctccccgtcccgtatctggctgaatgtgtggtggaccggtacgctcaccagtgaatgga

SEQ ID NO: 690052 - DNA, 75 bp, synthetic construct
  source 1..75: mol_type = other DNA
attttcaggaagcgaacaacaataccagtgcagcaatgaattacccggagaatagcgcgggttctctgatggtac

SEQ ID NO: 690053 - DNA, 75 bp, synthetic construct
  source 1..75: mol_type = other DNA
tggatgggaacgcttacgagcatttgggcggtacaaagcaaaatcacggttgccgccgaccttaaagattacgtg

SEQ ID NO: 690054 - DNA, 75 bp, synthetic construct
  source 1..75: mol_type = other DNA
cacctggccgtctgcttactaatggcagcgcaattgcaacccgttcagttgcagcatcgaatgcagaatgggctt

SEQ ID NO: 690055 - DNA, 75 bp, synthetic construct
  source 1..75: mol_type = other DNA
acgcttagaaatgactataacggcgtgaatcttttttctgaaaacgttgcgcctcgcgcacataacacacattaa

SEQ ID NO: 690056 - DNA, 75 bp, synthetic construct
  source 1..75: mol_type = other DNA
ttattgataccgacaccgctatgatggtgcaaagcttcactgattccggtgtatcaattgactttgacaggctgt

SEQ ID NO: 690057 - DNA, 75 bp, synthetic construct
  source 1..75: mol_type = other DNA
agcaattgaaggttttattcagggaattgaaactggtgaaccacgttttatgtttcccgttaccgactcaaacat

SEQ ID NO: 690058 - DNA, 75 bp, synthetic construct
  source 1..75: mol_type = other DNA
gacggattcgaaggtggtgcattaatggagttggtgattatctgttttgtattggttggtatgattgcaggtgcg

SEQ ID NO: 690059 - DNA, 75 bp, synthetic construct
  source 1..75: mol_type = other DNA
gctcgatcagttcaataatcccgataacccttatgcgcattacaccaccaccgggccggaaatctggcagcaaac

SEQ ID NO: 690060 - DNA, 75 bp, synthetic construct
  source 1..75: mol_type = other DNA
gcaatacgcctctggtgaagttgcagcgaatggggccggataacggcagtgaagtgtggttaaaactggaaggca

SEQ ID NO: 690061 - DNA, 75 bp, synthetic construct
  source 1..75: mol_type = other DNA
gaaaagattggttatcgagcaaacgaacaaacacagcattagccctgaaaaatatctcaaggcggctatagcaat

SEQ ID NO: 690062 - DNA, 75 bp, synthetic construct
  source 1..75: mol_type = other DNA
tgattgataacgacactgccatgatgattcaggctttcactgatgcaggtgtggcaattgattttgataagttgt

SEQ ID NO: 690063 - DNA, 75 bp, synthetic construct
  source 1..75: mol_type = other DNA
aacaaatacagtatttccccagagcgatttttgaaaggtgctgtgacaatcctgtacagcgataatattttggtt

SEQ ID NO: 690064 - DNA, 75 bp, synthetic construct
  source 1..75: mol_type = other DNA
aagatgctcggcactaatggcggcggtttctttaatgccaactcatcgcatccgtttgaaaacccgaccgcactg

SEQ ID NO: 690065 - DNA, 75 bp, synthetic construct
  source 1..75: mol_type = other DNA
atgaacaattacgaattacagatttttgttgataacgacaccgctcttatgattcaggctttcagtgatgtaggt

SEQ ID NO: 690066 - DNA, 75 bp, synthetic construct
  source 1..75: mol_type = other DNA
aataaatacagcgttagccctgaacaatatctcaaggcggctatagcaattttgtacgctgacaataatttggtt

SEQ ID NO: 690067 - DNA, 75 bp, synthetic construct
  source 1..75: mol_type = other DNA
ataggatgtgacgaaccacgaatgatgttaccaattacagatagcaacatgaagcggcttattatcgaagaaaca

SEQ ID NO: 690068 - DNA, 75 bp, synthetic construct
  source 1..75: mol_type = other DNA
gggcatggaaggtgcgcgcgatctggcgctggagatggcgaatcgtggtgaaggaaagctgctcgatcagttcaa

SEQ ID NO: 690069 - DNA, 75 bp, synthetic construct
  source 1..75: mol_type = other DNA
ggcagtagaaacaggccgtgaaggcgtgaaagcactgaaagccaaaccggttgaaaaagccgcgccagcacccgc

SEQ ID NO: 690070 - DNA, 75 bp, synthetic construct
  source 1..75: mol_type = other DNA
tagttgatgttgccaaaatgattcgcgtctacaacaacccgaaatatgctggcgaacgcgtaatgctgttattta

SEQ ID NO: 690071 - DNA, 75 bp, synthetic construct
  source 1..75: mol_type = other DNA
gcgtatcgacgaccgtctgattcacggtcaggtcgccacccgctggaccaaagaaaccaatgtctcccgtattat

SEQ ID NO: 690072 - DNA, 75 bp, synthetic construct
  source 1..75: mol_type = other DNA
atggcaactattcccaaaaaatggttacaacgcaaaatcgcagaccttgaatcgtgtcgtgaagacatcccattt

SEQ ID NO: 690073 - DNA, 75 bp, synthetic construct
  source 1..75: mol_type = other DNA
ggcagtcgaaacaggccgtgaaggcgtgaaagccctgaaagccaaaccggttgaaaaagcggcgccagcacccgc

SEQ ID NO: 690074 - DNA, 75 bp, synthetic construct
  source 1..75: mol_type = other DNA
gtgaaagcactgaaagccaaaccggttgaaaaagccgcaccagcacccgctgccgcagcaccaaaagcggctccc

SEQ ID NO: 690075 - DNA, 75 bp, synthetic construct
  source 1..75: mol_type = other DNA
tgcgatcgcggcgatcgctacctttctaccggggtgtttggggaagagcattttagtcagggggcggggatttaa

SEQ ID NO: 690076 - DNA, 75 bp, synthetic construct
  source 1..75: mol_type = other DNA
gggcatggaaggcgcacgcgatctggcgctggagatggcgaatcgcggcgaaggaaagttgctcgatcagttcaa

SEQ ID NO: 690077 - DNA, 75 bp, synthetic construct
  source 1..75: mol_type = other DNA
gtggatgaggtgctggatattcatcagcatgatgcggaaaacaccatgcgtgaactggcggtgcgggaagggatt

SEQ ID NO: 690078 - DNA, 75 bp, synthetic construct
  source 1..75: mol_type = other DNA
atgaaaacttttatcaaaactttactcgttgctgtaactattctgttctctgtcttcgctactgcgaaacaagta

SEQ ID NO: 690079 - DNA, 75 bp, synthetic construct
  source 1..75: mol_type = other DNA
tttactatggagatattgttaagcattcagacaatagtctgtcagttgagaacttactgactataagcagaaata

SEQ ID NO: 690080 - DNA, 75 bp, synthetic construct
  source 1..75: mol_type = other DNA
ttctcagtggagccaccataccaaaagtattctacatcagcagttctgataagtattactttatcgatgcaggca

SEQ ID NO: 690081 - DNA, 75 bp, synthetic construct
  source 1..75: mol_type = other DNA
tgtggcgacttcatggaatggcagccggtgcagtattacagccggatcattatgaatccgccgttcagtcacggg

SEQ ID NO: 690082 - DNA, 75 bp, synthetic construct
  source 1..75: mol_type = other DNA
cggaagtccatccccgggaagtgattaaacgcgccctgtaccacaatgccgctgccgtggtgctggcacacaatc

SEQ ID NO: 690083 - DNA, 75 bp, synthetic construct
  source 1..75: mol_type = other DNA
cccgttctcagttaataaacagtattgatatcctccgggcccgccgggcaaccggcctgatggcccgcgacaatt

SEQ ID NO: 690084 - DNA, 75 bp, synthetic construct
  source 1..75: mol_type = other DNA
ccggcaccggggccatactgcgggcgattcgggataccgcgccggaggccatgtgtgatgcggtggagattaaca

SEQ ID NO: 690085 - DNA, 75 bp, synthetic construct
  source 1..75: mol_type = other DNA
caattttaacggtgtcagggtacagtgtggcgacttcatggaatggcagccggtgcagtattacagccggattat

SEQ ID NO: 690086 - DNA, 75 bp, synthetic construct
  source 1..75: mol_type = other DNA
cgtgatcacattctggaaccctctgccggcaccggggccatactgcgggcgattcgggataccgcaccgggggcc

SEQ ID NO: 690087 - DNA, 75 bp, synthetic construct
  source 1..75: mol_type = other DNA
ggcaggcggccagttctcgcccgtctcctgttgaaatctggcagatacttctgtcccgactgctggaccagcact

SEQ ID NO: 690088 - DNA, 75 bp, synthetic construct
  source 1..75: mol_type = other DNA
cacgggcgataaagccctgcctgtcacccgtggttgtctggcaaatgttactgacacgcctgctggaaaagcact

SEQ ID NO: 690089 - DNA, 75 bp, synthetic construct
  source 1..75: mol_type = other DNA
atgaaaacattacctgacacacacgtacgggaggcatcgcgctgcccgtctcccgtcaccatctggcagatactg

SEQ ID NO: 690090 - DNA, 75 bp, synthetic construct
  source 1..75: mol_type = other DNA
tgtgtgatgcggtgaactttctcgtggaaaaatacgcactggtacgaactgaccagccgggattcagcgcaggag

SEQ ID NO: 690091 - DNA, 75 bp, synthetic construct
  source 1..75: mol_type = other DNA
atgaaaacattacccgacacacacgtccgggaggcatcgcgctgcccgtctcccgtcaccatctggcagacactg

SEQ ID NO: 690092 - DNA, 75 bp, synthetic construct
  source 1..75: mol_type = other DNA
atgaacgtgtgattgagcagcatattgaggcagggatttcactgtgtgacgcggtgaactttctcgttgaaaaat

SEQ ID NO: 690093 - DNA, 75 bp, synthetic construct
  source 1..75: mol_type = other DNA
tgtggcgacttcatggaatggctgccggtgcagtattacagccgggttatcatgaatccgccgttcagccacggg

SEQ ID NO: 690094 - DNA, 75 bp, synthetic construct
  source 1..75: mol_type = other DNA
tggttatatcgggaaaaggttacagaaggctgagggtataattgaagggatgttaatggcattagatatccggtt

SEQ ID NO: 690095 - DNA, 75 bp, synthetic construct
  source 1..75: mol_type = other DNA
gctattcttgcgcgctgtaagctgttccgcccgtttatcccgcccgttgttgatggcaaattgtggcaggattat

SEQ ID NO: 690096 - DNA, 75 bp, synthetic construct
  source 1..75: mol_type = other DNA
ttgctcgatatctctacatttctgtttctacattacatcgccgtctagcaagcgagggggtaagtttccaaagta

SEQ ID NO: 690097 - DNA, 75 bp, synthetic construct
  source 1..75: mol_type = other DNA
atgatcatttgtggttgcatggctcgtctgaaaaagaacaaccgtgacttgcatgatctgctcgtggattattac

SEQ ID NO: 690098 - DNA, 75 bp, synthetic construct
  source 1..75: mol_type = other DNA
ctcgcccgcaatgctgtgacgatgacgcgatgatcatttgtggatgtatggctcgcctgaaaaaaaacaacagcg

SEQ ID NO: 690099 - DNA, 75 bp, synthetic construct
  source 1..75: mol_type = other DNA
cgtgatcacattctggaaccctctgccggcaccggggccatactgcgggcgattcgggataccgcgccggaggcc

SEQ ID NO: 690100 - DNA, 75 bp, synthetic construct
  source 1..75: mol_type = other DNA
aacgccgcgccggttgctgaaatccgggctgaatctcagctttttgtgactcctgccccggtctgtgatcgcctg

SEQ ID NO: 690101 - DNA, 75 bp, synthetic construct
  source 1..75: mol_type = other DNA
caggatatccggcatatcctgcgggccttttccctgttgcgtccgggtggcgtgctggttgccgtctgtctgaac

SEQ ID NO: 690102 - DNA, 75 bp, synthetic construct
  source 1..75: mol_type = other DNA
gctgccgtggtgctggcacacaaccacccgtccggtgaagtcactcccagtaaggcagaccggcttattacggaa

SEQ ID NO: 690103 - DNA, 75 bp, synthetic construct
  source 1..75: mol_type = other DNA
ttgctgggttggtcgtttgttgcaaaaagcagaggggatcgtggctggtatgttaatgatgttggatgttaaact

SEQ ID NO: 690104 - DNA, 75 bp, synthetic construct
  source 1..75: mol_type = other DNA
cccgcaatgttgtgacgatgacgcgatgatcatttgtggatgcatggctcgcctgaaaaagaacaacagcgattt

SEQ ID NO: 690105 - DNA, 75 bp, synthetic construct
  source 1..75: mol_type = other DNA
gaatcagctgattgccggtgaaaccctcttcacaggcaccatcaaccgcacagaagtccatccccgggaggtgat

SEQ ID NO: 690106 - DNA, 75 bp, synthetic construct
  source 1..75: mol_type = other DNA
cgctgaatgacacaccgttcgccgatgaacgtgtgattgagcagcatattgaagctggcatttcactgtgtgatg

SEQ ID NO: 690107 - DNA, 75 bp, synthetic construct
  source 1..75: mol_type = other DNA
catccacacttcagcaggaccagaacaccatgaaaacccccgttaccgtgctttctgacatgctgcgcgccatcc

SEQ ID NO: 690108 - DNA, 75 bp, synthetic construct
  source 1..75: mol_type = other DNA
gcgtacagatttacgggatctggtcgccgctcattggggagtcttcccgcgtatgcacgcatccggataactgga

SEQ ID NO: 690109 - DNA, 75 bp, synthetic construct
  source 1..75: mol_type = other DNA
acaggaatctgaccgccagaaaggtaaaaagaatcagcaggctgaacgctacgcgcgcgggaccctgcgcaaaat

SEQ ID NO: 690110 - DNA, 75 bp, synthetic construct
  source 1..75: mol_type = other DNA
actgaacgcgccagccgcaaagcagacctgctgcggggtggcctgaccagtggaaacaaaaaacagacagaaacg

SEQ ID NO: 690111 - DNA, 75 bp, synthetic construct
  source 1..75: mol_type = other DNA
cgcacactacgtggacatgctcaggaatatcggcgtggaggctttacccgcagtcacagaacacagacatcaggg

SEQ ID NO: 690112 - DNA, 75 bp, synthetic construct
  source 1..75: mol_type = other DNA
acgcaatggatgcggttcttgccgccgctgatgccggatgttttgccacctacatagagaaacagggcggcgtac

SEQ ID NO: 690113 - DNA, 75 bp, synthetic construct
  source 1..75: mol_type = other DNA
aaacagcatcgatatcctccgggcccgccgggcgacaggcctgatgacccgcgacaattacagaacggtaaatga

SEQ ID NO: 690114 - DNA, 75 bp, synthetic construct
  source 1..75: mol_type = other DNA
tccgggcacgccgggcaaccggcctgatgacccgcgataactacagaacggtaaataacattacccggggtaagc

SEQ ID NO: 690115 - DNA, 75 bp, synthetic construct
  source 1..75: mol_type = other DNA
tcagtaagcgccgggcaacagaacaagacccggtggcccgtgcctttgccacactgaaggcgcttcccgtttatc

SEQ ID NO: 690116 - DNA, 75 bp, synthetic construct
  source 1..75: mol_type = other DNA
gaacaactccgcgccgcctgtctggtttccagaaaaacatcgccctatctgagccaggacgcgttaagcgagttt

SEQ ID NO: 690117 - DNA, 75 bp, synthetic construct
  source 1..75: mol_type = other DNA
tcaaaatatcacgcaacaacggagaacggtcatccgaatcccaaatggaacggcgccaccatgcgcgattccagc

SEQ ID NO: 690118 - DNA, 75 bp, synthetic construct
  source 1..75: mol_type = other DNA
ttcttgctgccgctgatgccggatgttttgccacctacatagagaaacagggtggcgtacttgttccacgcaaag

SEQ ID NO: 690119 - DNA, 75 bp, synthetic construct
  source 1..75: mol_type = other DNA
cgtctggtacaggcactggctctggtggatatccgggtgccggaccatctgatagtcggtggcaaccaggttttc

SEQ ID NO: 690120 - DNA, 75 bp, synthetic construct
  source 1..75: mol_type = other DNA
cagcatattgaggcagggatttcactgtgtgacgcggtgaactttctcgttgaaaaatacgcactggtgcgtacc

SEQ ID NO: 690121 - DNA, 75 bp, synthetic construct
  source 1..75: mol_type = other DNA
tcccgtcaccatctggcagatactgctgtcccgactgctggaccagcactacggcctcacgctgaatgacacacc

SEQ ID NO: 690122 - DNA, 75 bp, synthetic construct
  source 1..75: mol_type = other DNA
ggaaaaatacgcgctggtgcgtaccgaccagccgggattcagcatttgtccccgctctcagttaataaacagcat

SEQ ID NO: 690123 - DNA, 75 bp, synthetic construct
  source 1..75: mol_type = other DNA
cttcgtcgcagttaatcaacagcattgatattctccgggcacgccgggcaaccggcctgatgacccgcgataact

SEQ ID NO: 690124 - DNA, 75 bp, synthetic construct
  source 1..75: mol_type = other DNA
atgaaaacattatccgacacacatgtacgggaggtatctcgctgcccgtctcccgtcaccatctggaagacactg

SEQ ID NO: 690125 - DNA, 75 bp, synthetic construct
  source 1..75: mol_type = other DNA
attcaacgggccctgaaaaccctggaccgccatcttcatgaacccggcgtggccttcacctccacccgtgcggca

SEQ ID NO: 690126 - DNA, 75 bp, synthetic construct
  source 1..75: mol_type = other DNA
gtgctgtatctgaacaaccagaatcagctgattgccggtgaaaccctcttcaccggcaccatcaaccgtacggaa

SEQ ID NO: 690127 - DNA, 75 bp, synthetic construct
  source 1..75: mol_type = other DNA
cctggtggatatccgggtgccggaccatctgatagttggtggcaaccaggttttctcctttgcggaacacggtct

SEQ ID NO: 690128 - DNA, 75 bp, synthetic construct
  source 1..75: mol_type = other DNA
cattgatattctccgggctcgcagggcgaccggcctgatgacccgggacaattacagaatggtaaataacattac

SEQ ID NO: 690129 - DNA, 75 bp, synthetic construct
  source 1..75: mol_type = other DNA
agacattcttcatgccagaagagcttgcggactgatgactcgtttttcttaccgggaagtaagtaatatagttct

SEQ ID NO: 690130 - DNA, 75 bp, synthetic construct
  source 1..75: mol_type = other DNA
cgcaggcggcgaagccctgcctgttgcccgtggctgtctggcaaatgctgcttgcacgcctgctggaacaacatt

SEQ ID NO: 690131 - DNA, 75 bp, synthetic construct
  source 1..75: mol_type = other DNA
tcatgtccagaagtgggagcgtatctgcgccgcgctgcgggagttgaacaggcaccgggatattgttcgacagat

SEQ ID NO: 690132 - DNA, 75 bp, synthetic construct
  source 1..75: mol_type = other DNA
cacggcaacagaagcgaaaatctcagagtgcgatttaaccgcgacgattgaacaacgcggaccacaaacggcgga

SEQ ID NO: 690133 - DNA, 75 bp, synthetic construct
  source 1..75: mol_type = other DNA
cggacattgtgcagtcgttgccatcgttcaccaaaacgcgagccgatgacctgactttaccatcgctgcatctgg

SEQ ID NO: 690134 - DNA, 75 bp, synthetic construct
  source 1..75: mol_type = other DNA
aagcaatgggaaaagccacatccatagaacttgctgcgcgacttgatgtcagtcgtgaagaagtgctgaacgaac

SEQ ID NO: 690135 - DNA, 75 bp, synthetic construct
  source 1..75: mol_type = other DNA
agcggatgacctggttttaccatcgctgcatatggcaaaccgcgaattgcgtcgggcgaaaagtcatgtccagaa

SEQ ID NO: 690136 - DNA, 75 bp, synthetic construct
  source 1..75: mol_type = other DNA
acggaaactgattttaaagcctttcctcagccagcagatgttgcgttaccagtacaggaagctgcaacacaggaa

SEQ ID NO: 690137 - DNA, 75 bp, synthetic construct
  source 1..75: mol_type = other DNA
gcacgcgttaatcagaacggtaaatttcgttactgcataccgggcgctgatttaccggcagagccggaagctgca

SEQ ID NO: 690138 - DNA, 75 bp, synthetic construct
  source 1..75: mol_type = other DNA
aagcctttcctcagccagcaggtgttgcgttaccagtccgggaagctgcaacacaggaagaaataaaaacggaaa

SEQ ID NO: 690139 - DNA, 75 bp, synthetic construct
  source 1..75: mol_type = other DNA
cagacatgatgattgagtttatcggtcaggagggggctaaaacgtgtgaggaactggcgggtaagttcggtgtca

SEQ ID NO: 690140 - DNA, 75 bp, synthetic construct
  source 1..75: mol_type = other DNA
tgcgccgcgctgcgggagctgaacaagcaccgggatattgttcgactgattgtcgattcctccagtcgtattgtg

SEQ ID NO: 690141 - DNA, 75 bp, synthetic construct
  source 1..75: mol_type = other DNA
tcaggatggtgctaaaacgtgtgaggaactggcgggtaagttcggcgtcagtactcgcaaggttgcttccacgct

SEQ ID NO: 690142 - DNA, 75 bp, synthetic construct
  source 1..75: mol_type = other DNA
ctgtggcagacattgtgcagccgcttgagaagcgagtggataatctggttctgccatcgctgcgacaggcaaacc

SEQ ID NO: 690143 - DNA, 75 bp, synthetic construct
  source 1..75: mol_type = other DNA
gcggaaacggaggataaagcccgaccccagccagcaggtgttacggtaccggtacagggggatgcaatacaggaa

SEQ ID NO: 690144 - DNA, 75 bp, synthetic construct
  source 1..75: mol_type = other DNA
aagcaatggggaaagccacgtcggcagaactggctgcgcgacttgatatcagtcgtgaagaagtgctgaacgagc

SEQ ID NO: 690145 - DNA, 75 bp, synthetic construct
  source 1..75: mol_type = other DNA
tgagggagctgaacaagcaccgggatattgtccgacagattgtcgattcttccagtcgtattgtgtcggaaaagt

SEQ ID NO: 690146 - DNA, 75 bp, synthetic construct
  source 1..75: mol_type = other DNA
cgttgataaaagcgtatacacctggcgtgtggctggcgaaggtgaatcaggggtagccgaagagcagccagcaca

SEQ ID NO: 690147 - DNA, 75 bp, synthetic construct
  source 1..75: mol_type = other DNA
gtgctgaacgaactatgggaactgaaaaaagctggtttcgttgataaaagcgcgtacacctggcgtgtggctgat

SEQ ID NO: 690148 - DNA, 75 bp, synthetic construct
  source 1..75: mol_type = other DNA
attttaccatcgctgcatatggcaaaccgtgaactgcgtcgggcgaaaaatcatgtccagaagtgggagcgagtc

SEQ ID NO: 690149 - DNA, 75 bp, synthetic construct
  source 1..75: mol_type = other DNA
gtaaatcagaacggtaaatttcgttactgcatgccgggcgataatttaccagcagaaccgaaagctgcattggta

SEQ ID NO: 690150 - DNA, 75 bp, synthetic construct
  source 1..75: mol_type = other DNA
tcatgtccggaagtgggagcgagtctgcgcggcgctgcgggaactgtacaggcacaaggatattgtcagacagat

SEQ ID NO: 690151 - DNA, 75 bp, synthetic construct
  source 1..75: mol_type = other DNA
tgcgatttaaccgcgacgattgaacaacgaggaccacaaacggctgatgagctggctacattgtttggtaccaca

SEQ ID NO: 690152 - DNA, 75 bp, synthetic construct
  source 1..75: mol_type = other DNA
acattgtgaggttacagccatcgatcaccgaaatgaaagcagatgacctgattctaccatcgctgcatgtggcta

SEQ ID NO: 690153 - DNA, 75 bp, synthetic construct
  source 1..75: mol_type = other DNA
tggttgactcaaaccgacgaaaacgcatctgtggcacaggcttctaaagtgacagcgcaaatgctgatcgaggcg

SEQ ID NO: 690154 - DNA, 75 bp, synthetic construct
  source 1..75: mol_type = other DNA
agtcgtgaagaagtgttgaacgagctgtgggaacttaaaaaggctggcttcgttgataaaagcgtatacacctgg

SEQ ID NO: 690155 - DNA, 75 bp, synthetic construct
  source 1..75: mol_type = other DNA
agtcgtgaagaagtgctgaacgagctgtgggaactgaaaaaggctggattcgttgataaaagcgtatacacctgg

SEQ ID NO: 690156 - DNA, 75 bp, synthetic construct
  source 1..75: mol_type = other DNA
gccatcgtttactgaaacgcgagcggatgacctgattttaccatcgctgcatatggcaaacctcgaactgcgtcg

SEQ ID NO: 690157 - DNA, 75 bp, synthetic construct
  source 1..75: mol_type = other DNA
aaagcggaaggtgttgttgaaggcatgttgatgatgctggatgtaaagctggagatggatcggtatgttgagcgc

SEQ ID NO: 690158 - DNA, 75 bp, synthetic construct
  source 1..75: mol_type = other DNA
agatactgatgcgtgatatccggcaggttcttgagcgctggggtgcatgggcggcaaataaccatgaggatgtta

SEQ ID NO: 690159 - DNA, 75 bp, synthetic construct
  source 1..75: mol_type = other DNA
accgcaatgttgtgacgatgatgcgatggttatttgtggttgcatggctcgtctgaaaaagagcaacaatgactt

SEQ ID NO: 690160 - DNA, 75 bp, synthetic construct
  source 1..75: mol_type = other DNA
ctgccatcgctgcgacaggcaaaccgcgaactgcgtagggcgaaaagtgatatccggaaatgggagcgagtctgt

SEQ ID NO: 690161 - DNA, 75 bp, synthetic construct
  source 1..75: mol_type = other DNA
aaggggtgaatttgttgccgggattttcgccggagctgcaaggtgtttatagcgaaaccgatgcggatggcatga

SEQ ID NO: 690162 - DNA, 75 bp, synthetic construct
  source 1..75: mol_type = other DNA
aaggctgagggggttgttgaaggcatgttgatgatgctggatgtgaagctggagatggatcggtatgttgagcgg

SEQ ID NO: 690163 - DNA, 75 bp, synthetic construct
  source 1..75: mol_type = other DNA
accatgaggatgtgacctggtcacccattgccgccggatttaagggactgatccccgaaaaagtaaaatcacgcc

SEQ ID NO: 690164 - DNA, 75 bp, synthetic construct
  source 1..75: mol_type = other DNA
tggatatataggaaaaaaacttcagaaggctgaaggaatagtcgaaggaatgttgatggcattggatgttcgtct

SEQ ID NO: 690165 - DNA, 75 bp, synthetic construct
  source 1..75: mol_type = other DNA
atgcgtgatattcagatggttcttgaacgctggggtgcatgggcggcaaataatcatgaggatgtgacctggtcg

SEQ ID NO: 690166 - DNA, 75 bp, synthetic construct
  source 1..75: mol_type = other DNA
catgggtgctctgacacctgtataggtaaacgccttcacaaagcggaggggattgttgaaggcatgctgatgatg

SEQ ID NO: 690167 - DNA, 75 bp, synthetic construct
  source 1..75: mol_type = other DNA
atgatcgtttgtggatgcatggcccgcttgaaaaaaaacaacagtgatttgcatgatttattggtggattattat

SEQ ID NO: 690168 - DNA, 75 bp, synthetic construct
  source 1..75: mol_type = other DNA
aacgctggggagcatgggttgcaaacaatcatgaggatgtgacttggtcaccgattgctgctggatttaaaggac

SEQ ID NO: 690169 - DNA, 75 bp, synthetic construct
  source 1..75: mol_type = other DNA
agtagcggtgcagaagaatattcgtgatgccggaataaacccgccaaaagaaacacaggttacccaggaagaata

SEQ ID NO: 690170 - DNA, 75 bp, synthetic construct
  source 1..75: mol_type = other DNA
gttctggcggtcagcattctgggtaatgactccaacttattgatagtgttttatgttcagataatgcccgatgac

SEQ ID NO: 690171 - DNA, 75 bp, synthetic construct
  source 1..75: mol_type = other DNA
cacaccagcattgagttagtctataaaatctgtgctttcctgccactattggggatgctaaccatattcctgcct

SEQ ID NO: 690172 - DNA, 75 bp, synthetic construct
  source 1..75: mol_type = other DNA
attaaaacagaaactgtggcggacattgtgcagtcgctgccatcgtttactgaaacgcgagcggatgacctggtt

SEQ ID NO: 690173 - DNA, 75 bp, synthetic construct
  source 1..75: mol_type = other DNA
agtacaggaagctgcaacacaggaagatattaaaacagaaactgtggcagacattgtgcagccgcttgagaagcg

SEQ ID NO: 690174 - DNA, 75 bp, synthetic construct
  source 1..75: mol_type = other DNA
caccgaaacgcgagcggatgacctgattttaccatcgctgcatatggcaaaccgcgaactgcatcgggcgaaaag

SEQ ID NO: 690175 - DNA, 75 bp, synthetic construct
  source 1..75: mol_type = other DNA
aaggcaaaccgaaagcaataataatcaatccactgccgcgtaataaggtcgtgctggctgtttgcgtgctgttag

SEQ ID NO: 690176 - DNA, 75 bp, synthetic construct
  source 1..75: mol_type = other DNA
cggatgagtaaaggaaaaccgaaagcagcaataagcaatccactgccgcgtaataaggtcgtactggctgtttgc

SEQ ID NO: 690177 - DNA, 75 bp, synthetic construct
  source 1..75: mol_type = other DNA
ttaccagtacaggaggctgcaacacaggaagatattaaaacagaaactgtggcggacattgtgcagtcgctgcca

SEQ ID NO: 690178 - DNA, 75 bp, synthetic construct
  source 1..75: mol_type = other DNA
ggcggcggtcatcatcgccccttacggcaaaggcaacgttgcatggtttgtgctggcggcgttgctggctattgt

SEQ ID NO: 690179 - DNA, 75 bp, synthetic construct
  source 1..75: mol_type = other DNA
tacgccgcgcaacaccaaatgagtaaaagcaaaccgaaagaagtgattgttaacccgctgccacgcgacaaagtg

SEQ ID NO: 690180 - DNA, 75 bp, synthetic construct
  source 1..75: mol_type = other DNA
ggcctgtcggggataaaatcggtcgaaaatatgtaatttggggctctatcctcggcgttgcgccatttaccttga

SEQ ID NO: 690181 - DNA, 75 bp, synthetic construct
  source 1..75: mol_type = other DNA
atgaagaatgtgcgcaactggtggatttactgcaacagacctggtcggtgataagtgctggcggacaatgccggg

SEQ ID NO: 690182 - DNA, 75 bp, synthetic construct
  source 1..75: mol_type = other DNA
attgtctctggggttaccggttgtgaccgccattacccatcgtccggtacagcgctgtacattgattacagctca

SEQ ID NO: 690183 - DNA, 75 bp, synthetic construct
  source 1..75: mol_type = other DNA
tgcctgttgctgctcagccagacgagtatttgtcacccgcgagcctgtgtcacagttgatgaacaatgttcgcaa

SEQ ID NO: 690184 - DNA, 75 bp, synthetic construct
  source 1..75: mol_type = other DNA
aaggtggatggcaatcagtttgaagcgttgccggcagaggttcgccaggacatgcagcagcggattgatgcggcg

SEQ ID NO: 690185 - DNA, 75 bp, synthetic construct
  source 1..75: mol_type = other DNA
cagagccgggggaaatccggcgttttgttcagcaggcggtggaccactggccgcgtctgcaggcatttcacttca

SEQ ID NO: 690186 - DNA, 75 bp, synthetic construct
  source 1..75: mol_type = other DNA
cgggaacaacatggaggagcaacaatacgatgcctgttactgctcagccagacgagcatttgccatccgcgggcc

SEQ ID NO: 690187 - DNA, 75 bp, synthetic construct
  source 1..75: mol_type = other DNA
gctgccgtggtgctggcacacaaccacccgtccggtgaagtcacccccagtaaggctgaccggcttatcactgag

SEQ ID NO: 690188 - DNA, 75 bp, synthetic construct
  source 1..75: mol_type = other DNA
actgggatcgtgaggagcagacaaactacaacatcatgctctcccactatttcaatatgggcagcattcgtaata

SEQ ID NO: 690189 - DNA, 75 bp, synthetic construct
  source 1..75: mol_type = other DNA
tgcctgaaaacgctgaagcaacccagtcggtggtgcaagccacgctaactgaaggtgccattggctaccgtaaat

SEQ ID NO: 690190 - DNA, 75 bp, synthetic construct
  source 1..75: mol_type = other DNA
tggaaaggtgttttcaggttgcccgtgatgatacatcagaccagtacgttgcgttaaaaacagctgcgatattgt

SEQ ID NO: 690191 - DNA, 75 bp, synthetic construct
  source 1..75: mol_type = other DNA
gcgatcagcctggtcacgggctgagtggattggagccggaagaatggccattgacgggctcaaggaagtccggga

SEQ ID NO: 690192 - DNA, 75 bp, synthetic construct
  source 1..75: mol_type = other DNA
tgaattgctgattgcgctgccgggtgaggaatttacggtagccgctgtcagccacatcgatctgggcggcggtag

SEQ ID NO: 690193 - DNA, 75 bp, synthetic construct
  source 1..75: mol_type = other DNA
ctcagctacaacgggggcggtgcaggatttggcgggcaaatggcggagtggttgccaccggcgcagagtgccgat

SEQ ID NO: 690194 - DNA, 75 bp, synthetic construct
  source 1..75: mol_type = other DNA
agatcaaggcacatctgcgtgttgaccatgacgcggatgatgagatgctgatggacaaggttcgtcaggctaccg

SEQ ID NO: 690195 - DNA, 75 bp, synthetic construct
  source 1..75: mol_type = other DNA
cgtctggtacaggcactggccctggttgatatccgggtaccggaccatctgatagtcggtggcagccaagttttc

SEQ ID NO: 690196 - DNA, 75 bp, synthetic construct
  source 1..75: mol_type = other DNA
cggaatccggatcttgctgagcgggaagacctcgtgcagggggaactgccgttttctgtgtccgtgctgatttac

SEQ ID NO: 690197 - DNA, 75 bp, synthetic construct
  source 1..75: mol_type = other DNA
cgaatggatgcgctcactgaaacggcacgaacgccgggcgctgatgcgttcgctgcgtgacaagcaggcaaaaaa

SEQ ID NO: 690198 - DNA, 75 bp, synthetic construct
  source 1..75: mol_type = other DNA
gtcgtttccgtccgtcacggtgcccgcgtgcgcctggctgacgggcgcacctcgtactggaatgacagcacccgc

SEQ ID NO: 690199 - DNA, 75 bp, synthetic construct
  source 1..75: mol_type = other DNA
gacggtgtactgatccccggcgaggcattaacccggatgaagggggccgccatgcgcctgaccgggatgctgtac

SEQ ID NO: 690200 - DNA, 75 bp, synthetic construct
  source 1..75: mol_type = other DNA
ggatttactgcaacagacctggcggatgataagtgctggcggacaatgcccgggtggaaaagtgttttcgggttg

SEQ ID NO: 690201 - DNA, 75 bp, synthetic construct
  source 1..75: mol_type = other DNA
ctctcccgtccggtgtggatagcacagacgtatcagcagcagatagcggatagccgcaggccggaagaggaggca

SEQ ID NO: 690202 - DNA, 75 bp, synthetic construct
  source 1..75: mol_type = other DNA
gataatccgctcattaatattctggagaagtttacccgctggtatgacatgaataacgtgacgctgggcggtgtt

SEQ ID NO: 690203 - DNA, 75 bp, synthetic construct
  source 1..75: mol_type = other DNA
gttttcgggttacccggcctgatacatcagagcaatacgttgcgttaaaaacggctgttcagtctctgaggccac

SEQ ID NO: 690204 - DNA, 75 bp, synthetic construct
  source 1..75: mol_type = other DNA
tcgccggtggtattacgctggttgcgggaacaacatggaggagcaacaatacgatgcctgttgctgttcagctag

SEQ ID NO: 690205 - DNA, 75 bp, synthetic construct
  source 1..75: mol_type = other DNA
tgccatccgcgagccagcgtcacagttgatgaacaatgttcgcaagtggtggatttactgcaactgatcctaccc

SEQ ID NO: 690206 - DNA, 75 bp, synthetic construct
  source 1..75: mol_type = other DNA
aaaaatgggagtggagtcgctactatgcctggcgggcgttaccgtcattaaaagccaaactggcgctgggcgaag

SEQ ID NO: 690207 - DNA, 75 bp, synthetic construct
  source 1..75: mol_type = other DNA
cagcccgaagcgtgtcagtacacccggttatggtaccggcgatcgttttatgcgtgccggggtggaaataaaccg

SEQ ID NO: 690208 - DNA, 75 bp, synthetic construct
  source 1..75: mol_type = other DNA
ggtgggaaatggcggtaaaaatcccctgaacaccatcatgaaaggctatgcgcgctattacgccaccaatacggt

SEQ ID NO: 690209 - DNA, 75 bp, synthetic construct
  source 1..75: mol_type = other DNA
ttcacctccacccgtgcggcacgagaatggctgattctgaacatggcgggactggagcgtgaagagttccgggtg

SEQ ID NO: 690210 - DNA, 75 bp, synthetic construct
  source 1..75: mol_type = other DNA
tggatatccgtgtccctgaccatctgattgtcggcggcaggcaaatctattcgttcgcagaacacggtctgctgt

SEQ ID NO: 690211 - DNA, 75 bp, synthetic construct
  source 1..75: mol_type = other DNA
ctggctggggatgcgggagaccgcagcaaaaagctttgtcgatgaggtggaggcggcctggtcggaatacgcaga

SEQ ID NO: 690212 - DNA, 75 bp, synthetic construct
  source 1..75: mol_type = other DNA
atgtgaacggcgttccgcttcgtgagagcctcagctacaacgggggcggtgcaggatttggcgggcaaatggcgg

SEQ ID NO: 690213 - DNA, 75 bp, synthetic construct
  source 1..75: mol_type = other DNA
ttatctgggaataaatgaggaggattcacgggcattctcgcgggatgtggaagctgcatggaatgagtatgccga

SEQ ID NO: 690214 - DNA, 75 bp, synthetic construct
  source 1..75: mol_type = other DNA
atgtgaacggcgttccgcttcgggagagcctcagctacaacggtggcggtgcaggatttggcgggcaaatggcag

SEQ ID NO: 690215 - DNA, 75 bp, synthetic construct
  source 1..75: mol_type = other DNA
cctcattcaacgggccctgaaaaccctagaccgccatcttcatgaacccggtgtggccttcacctccacccgtgc

SEQ ID NO: 690216 - DNA, 75 bp, synthetic construct
  source 1..75: mol_type = other DNA
atctgcagacagcacagaatgcggataatggtttttctgaactggaaaaggcgctgttacgttacattgctgccg

SEQ ID NO: 690217 - DNA, 75 bp, synthetic construct
  source 1..75: mol_type = other DNA
acaatcacccgtccggtgaagtcacacccagcaaggcagaccgccttatcacggaacgtctggtacaggcactgg

SEQ ID NO: 690218 - DNA, 75 bp, synthetic construct
  source 1..75: mol_type = other DNA
ttactccgcagcaccggtccgtctgggaggcgcaaaagtgccgcacctgatgccgggggactcactgaacctgca

SEQ ID NO: 690219 - DNA, 75 bp, synthetic construct
  source 1..75: mol_type = other DNA
agggatgtttggcgagatcgacgtggaaggaaaacgcacgtttacggaatttatccgtgaaggtgtgggcgttca

SEQ ID NO: 690220 - DNA, 75 bp, synthetic construct
  source 1..75: mol_type = other DNA
cgctgggagataaaaactatcagtctgcggcacttggcatcggtcgcgatttgtctacgttcggcgcggttgcgt

SEQ ID NO: 690221 - DNA, 75 bp, synthetic construct
  source 1..75: mol_type = other DNA
cgttagcgtttcgtttgctggaagatgcattgctgatcgagctaccgggtgaagaatataccgtggccgccgtca

SEQ ID NO: 690222 - DNA, 75 bp, synthetic construct
  source 1..75: mol_type = other DNA
taatgatctcggcgagccggagtggttattttcgctcgcgctgggggtcgatatcccgctgacatcacttcatat

SEQ ID NO: 690223 - DNA, 75 bp, synthetic construct
  source 1..75: mol_type = other DNA
cccggtcaactggaaggcattgatattaaagctgacctgagtcagtcagcgttagtcatttcattaccccaggct

SEQ ID NO: 690224 - DNA, 75 bp, synthetic construct
  source 1..75: mol_type = other DNA
gatccacgacggcaaatgcctgaaacccggtcaactggaaggcattgatattaaagctgacctgagtcagtcagc

SEQ ID NO: 690225 - DNA, 75 bp, synthetic construct
  source 1..75: mol_type = other DNA
cccggccaactggaaggcattgatattaaagctgacctgagtcagtcagcgttagtgatttcattaccccaggca

SEQ ID NO: 690226 - DNA, 75 bp, synthetic construct
  source 1..75: mol_type = other DNA
gccaatcagttttacagcgtaatggaacggctgaagatgctcgattccctgcaggcaacacagcttcagtcggcc

SEQ ID NO: 690227 - DNA, 75 bp, synthetic construct
  source 1..75: mol_type = other DNA
atgaaacgaacgcctgtcctgattgatgtgaacggcgttccgcttcgtgatagtctcagctacaacgggggcggt

SEQ ID NO: 690228 - DNA, 75 bp, synthetic construct
  source 1..75: mol_type = other DNA
caaacgtgctctgcacttcaacgcggcggcggtgatactcgcgcataaccatccttctggcgagacaacacccag

SEQ ID NO: 690229 - DNA, 75 bp, synthetic construct
  source 1..75: mol_type = other DNA
acgccaggacacggtatagggaaccgctttctgcgggccgggggggaggtcgatcggtatggacgggccgttgcg

SEQ ID NO: 690230 - DNA, 75 bp, synthetic construct
  source 1..75: mol_type = other DNA
atccgcagagcgggaaaaagccggactctcacgtccggtgtggatagcgcaggcgtatcagcagcagatagcgga

SEQ ID NO: 690231 - DNA, 75 bp, synthetic construct
  source 1..75: mol_type = other DNA
atacgcgctggtgcgtaccgaccagccgggattcagcgcctgtacccgttctcagttaataaacaggattgatat

SEQ ID NO: 690232 - DNA, 75 bp, synthetic construct
  source 1..75: mol_type = other DNA
atacgcgctggtgcgtaccgaccagccgggattcagcgcctgtacccgatctcagttaataaacaggatagatat

SEQ ID NO: 690233 - DNA, 75 bp, synthetic construct
  source 1..75: mol_type = other DNA
atacgcgctggtgcgtaccgaccagccgggattcagcgcctgtacccgatctcagttaataaacagaatggatat

SEQ ID NO: 690234 - DNA, 75 bp, synthetic construct
  source 1..75: mol_type = other DNA
atacgcgctggtgcgtaccgaccagccgggattcagcgcctgtacccggtctcagttaataaacaggatggatat

SEQ ID NO: 690235 - DNA, 75 bp, synthetic construct
  source 1..75: mol_type = other DNA
atacgcgctggtgcgtaccgaccagccgggattcagcgcctgtacccgctctcagttaataaacaggatcgatat

SEQ ID NO: 690236 - DNA, 75 bp, synthetic construct
  source 1..75: mol_type = other DNA
atacgcgctggtgcgtaccgaccagccgggattcagcgcctgtacccgctctcagttaataaacagcatggatat

SEQ ID NO: 690237 - DNA, 75 bp, synthetic construct
  source 1..75: mol_type = other DNA
accggcctgatgacccggaacaattacagaatggtaaataacattacccggggcaagcatccggaggcaaaacaa

SEQ ID NO: 690238 - DNA, 75 bp, synthetic construct
  source 1..75: mol_type = other DNA
acggaagtccatccccgggaagtgattaaacgcgccctgtaccacaatgccgctgccgtggtgctggcgcacaat

SEQ ID NO: 690239 - DNA, 75 bp, synthetic construct
  source 1..75: mol_type = other DNA
cgatatcctccgggcccgctgggcaacaggtctgatgacccgcagccactacagaacggtaaataacattacccg

SEQ ID NO: 690240 - DNA, 75 bp, synthetic construct
  source 1..75: mol_type = other DNA
acggcctcacactgaatgacacaccgtttgctgatgaacgtgtgattgagcagcatattgaagcagggatttcac

SEQ ID NO: 690241 - DNA, 75 bp, synthetic construct
  source 1..75: mol_type = other DNA
atctgcgctacggcacaatgccgcagcagtgatccttgcgcataaccatccctccggcgtggcggaacccagtcg

SEQ ID NO: 690242 - DNA, 75 bp, synthetic construct
  source 1..75: mol_type = other DNA
ccggaccggcatcgtcacaccccacgcctgtcggcatctggcagtccctgctgtcgcatctgctggaacaacact

SEQ ID NO: 690243 - DNA, 75 bp, synthetic construct
  source 1..75: mol_type = other DNA
cctccgggctcgcagggcaactggcctgatgatcagcgacaattacagaacggtaaataacattaccctgggtaa

SEQ ID NO: 690244 - DNA, 75 bp, synthetic construct
  source 1..75: mol_type = other DNA
ctcacccggttactggaccagcactacggcctcacactgaatgacacaccgttggctgatgaacgtgtgattgag

SEQ ID NO: 690245 - DNA, 75 bp, synthetic construct
  source 1..75: mol_type = other DNA
ctcacccggttactggaccagcactacggcctcacactgaatgacacaccgtttgcagatgaacgtgtgattgag

SEQ ID NO: 690246 - DNA, 75 bp, synthetic construct
  source 1..75: mol_type = other DNA
tgatattctccgggctcgccgggcaacaggcctgatgacccgccacaactacagaatggtgaacaatatcaccct

SEQ ID NO: 690247 - DNA, 75 bp, synthetic construct
  source 1..75: mol_type = other DNA
acgccctggtgcgtaccgaccagccgggattcagcccctgtacccgctctcagttaatcaacagtatcgatatcc

SEQ ID NO: 690248 - DNA, 75 bp, synthetic construct
  source 1..75: mol_type = other DNA
cccgctctcagttaataaacagcatcgatatcctccgggctcgccgggcaaccggcctgatgacccgcgacaatt

SEQ ID NO: 690249 - DNA, 69 bp, synthetic construct
  source 1..69: mol_type = other DNA
atgcaacagatttcctttctgcccggagagatgacgcccggcgagcgcagtctcattctgcgggccctg

SEQ ID NO: 690250 - DNA, 75 bp, synthetic construct
  source 1..75: mol_type = other DNA
acaggcctgatgacccgcgacaattacagaacggtaaataacattaccttgggtaaacatccgggggcgaaacaa

SEQ ID NO: 690251 - DNA, 75 bp, synthetic construct
  source 1..75: mol_type = other DNA
cctccgggctcgccgggctactggcctgatgaacagcgacaattacagaacggtaaataacattaccctgggtaa

SEQ ID NO: 690252 - DNA, 75 bp, synthetic construct
  source 1..75: mol_type = other DNA
cctccgggctcgctgggcaactggcctgatgagcagcgacaattacagaacggtaaataacattaccctgggtaa

SEQ ID NO: 690253 - DNA, 75 bp, synthetic construct
  source 1..75: mol_type = other DNA
ggcgggcaccactgtatcctgatgatattttatggaattttgaaaaattcttagtgggcagggatggtaaggtta

SEQ ID NO: 690254 - DNA, 75 bp, synthetic construct
  source 1..75: mol_type = other DNA
atccagcgtttttccccggatatgacgccggaagatcccattgtgatggaaagcattaaactggcgttggcaaaa

SEQ ID NO: 690255 - DNA, 75 bp, synthetic construct
  source 1..75: mol_type = other DNA
aaagcctgggccgatcgtggttttgtcgtgctgggatttccgtgcaaccagtttcttgagcaagagccgggcagt

SEQ ID NO: 690256 - DNA, 75 bp, synthetic construct
  source 1..75: mol_type = other DNA
taagattgtcgaacagggcgatgtcgaaacgctgtttaatgcccctaaacatgcggtgacacgcagcctggtttc

SEQ ID NO: 690257 - DNA, 75 bp, synthetic construct
  source 1..75: mol_type = other DNA
cgttatttaattgacatcggcggcgtgacggcaattccgtgctttatcaccagtattctcgcgggttgcatatca

SEQ ID NO: 690258 - DNA, 75 bp, synthetic construct
  source 1..75: mol_type = other DNA
gatccgaaagtgattgagcgggtcgaagcgaatgaaatgccgggcaataaaattggcctgctgaatgtccatcat

SEQ ID NO: 690259 - DNA, 75 bp, synthetic construct
  source 1..75: mol_type = other DNA
aatgcttatctgcctgttctttctcatccgtatccgcctgtttcgcgaactgttgcacaagtcggcacactcccc

SEQ ID NO: 690260 - DNA, 75 bp, synthetic construct
  source 1..75: mol_type = other DNA
gcaagctacatcgcaacctatatcggcaagaacctggacgccagcacctttcacgacaatgacccgaaaaccggc

SEQ ID NO: 690261 - DNA, 75 bp, synthetic construct
  source 1..75: mol_type = other DNA
tgtttggcccgtgggtgggcatcattaccggcgtgatcgccggtattcatcgttatttaattgatattggcggtg

SEQ ID NO: 690262 - DNA, 75 bp, synthetic construct
  source 1..75: mol_type = other DNA
aatgcttatctgcctgtttttcctcattcgtatccgtctgtttcgcgaactgttgcacaagtcggcacactcacc

SEQ ID NO: 690263 - DNA, 75 bp, synthetic construct
  source 1..75: mol_type = other DNA
tatttggcccgtgggtgggcatcattaccggcgtaatagccgggattcaccgctatcttattgatattggaggcg

SEQ ID NO: 690264 - DNA, 75 bp, synthetic construct
  source 1..75: mol_type = other DNA
gcgtacagatttacgggatctggtcgccactcatcggggaatcctcccgtgtgtgcacgcatccggacaactgga

SEQ ID NO: 690265 - DNA, 75 bp, synthetic construct
  source 1..75: mol_type = other DNA
gccgagagcgtggagcgcgccatcggctgggcgcgccttcaccgggtccgccagttccagttctttggcatcccc

SEQ ID NO: 690266 - DNA, 75 bp, synthetic construct
  source 1..75: mol_type = other DNA
ccggataccgctcgccagttgatctttaatctgtcgcgttatctgcgctataacattgaattaaaagacgatgag

SEQ ID NO: 690267 - DNA, 75 bp, synthetic construct
  source 1..75: mol_type = other DNA
ggctggattaacctgaaaatccccaaagcgcagcgttggcgcgtcggtattctgggcggtatgctctgcgaaaca

SEQ ID NO: 690268 - DNA, 75 bp, synthetic construct
  source 1..75: mol_type = other DNA
gcggtggcgattactaataccgatcatgtgctggcctatgttggcgtgggtgaacataactatcagaatggcgat

SEQ ID NO: 690269 - DNA, 75 bp, synthetic construct
  source 1..75: mol_type = other DNA
caaccacagacgaagggaagcgaattaattcgcatcttcaccacgacgaagagcgtcggatcagactggaaaaac

SEQ ID NO: 690270 - DNA, 75 bp, synthetic construct
  source 1..75: mol_type = other DNA
gaccagccgggattcagcgcctgtacccactctcagttaataaacagcatcgatatcctccgggctcgccgggca

SEQ ID NO: 690271 - DNA, 75 bp, synthetic construct
  source 1..75: mol_type = other DNA
atgcaacagctttcctttctgcccggagagatgacgcccggcgagcgcagtctcattctgcgggccctgaaaacc

SEQ ID NO: 690272 - DNA, 75 bp, synthetic construct
  source 1..75: mol_type = other DNA
tgcctccacattatgacgcactgacaacagacaaagaccggaggaacgaaccggacacggagctgctgccgggcg

SEQ ID NO: 690273 - DNA, 75 bp, synthetic construct
  source 1..75: mol_type = other DNA
tagtcggcggtagcggcagcgggaaatcactgacctgcgccgcgacgctgggcattctgcccgcaggcgttcgcc

SEQ ID NO: 690274 - DNA, 75 bp, synthetic construct
  source 1..75: mol_type = other DNA
agacggcgggggaaattttagccgatggcaaaccggtttctccctgcgccctgcgcggcatcaaaattgccacca

SEQ ID NO: 690275 - DNA, 75 bp, synthetic construct
  source 1..75: mol_type = other DNA
atgccgcaacagattgaactacgtaatatcgcgctacaggccgcgcaaccgctagtgcacggcgtatcattaacg

SEQ ID NO: 690276 - DNA, 75 bp, synthetic construct
  source 1..75: mol_type = other DNA
gcagagctgcgcgccctgccgccgtttcttgccggtccgctcatccgggacctggcacgcctgagccgcaaacag

SEQ ID NO: 690277 - DNA, 75 bp, synthetic construct
  source 1..75: mol_type = other DNA
gaagacagcgccagcgaaactgattttgacgttgagggcgactttgtcgccccttggactcgtggcaataactgt

SEQ ID NO: 690278 - DNA, 75 bp, synthetic construct
  source 1..75: mol_type = other DNA
accgctgagccacacatcaccgcacaaatcacccgcgagcttgatgcgctgggcgtgcagctgcatgaaagcgcc

SEQ ID NO: 690279 - DNA, 75 bp, synthetic construct
  source 1..75: mol_type = other DNA
tgcgtctggataacgggggaacagcgtactgggatgagtcagcccgtcacatcatcacagagcagccagtggagg

SEQ ID NO: 690280 - DNA, 75 bp, synthetic construct
  source 1..75: mol_type = other DNA
catcgaaattatgcgcgaagcagcaattaaatcagatcgccacgaactgggggacgatatttcaccgcgctttaa

SEQ ID NO: 690281 - DNA, 75 bp, synthetic construct
  source 1..75: mol_type = other DNA
cgtacccgtggaacgcaccgctaccggttatcgatcctgaaacgttcggcagagcacaaccaaccgcattacgcc

SEQ ID NO: 690282 - DNA, 75 bp, synthetic construct
  source 1..75: mol_type = other DNA
atttaaaagaggaaattaaacgcgtcgaaaaacgcatcattatggaagtgctggaacaacaagaaggaaaccgaa

SEQ ID NO: 690283 - DNA, 75 bp, synthetic construct
  source 1..75: mol_type = other DNA
ccgccaaaattgccctttctcaggccagcgtcttgattagcggtgaaagcggcaccgggaaagagttgattgcca

SEQ ID NO: 690284 - DNA, 75 bp, synthetic construct
  source 1..75: mol_type = other DNA
ccgccgctgcgctcgtaatctgataggtaatgtactgaaattcgattttattccagatgagaaagatccatcgat

SEQ ID NO: 690285 - DNA, 75 bp, synthetic construct
  source 1..75: mol_type = other DNA
cgtcattgaacgcgccgtcgtgatgaactcaggcccgatcattttttctgaagaccttccgccgcagattcgtca

SEQ ID NO: 690286 - DNA, 75 bp, synthetic construct
  source 1..75: mol_type = other DNA
tgctcgaaagtgaactgtttggtcatgaaaaaggcgcatttactggtgcacaaaccttgcgtcagggattatttg

SEQ ID NO: 690287 - DNA, 75 bp, synthetic construct
  source 1..75: mol_type = other DNA
gccagtctgtaatgctggtgaagcaaaaacagcccctgtcggtgagcggagaaagacatcaggtcaactttcaac

SEQ ID NO: 690288 - DNA, 75 bp, synthetic construct
  source 1..75: mol_type = other DNA
atgaataattctattagccataaatttcattacattagtcggagcgaataccaggaattgttagccgtatcccgt

SEQ ID NO: 690289 - DNA, 75 bp, synthetic construct
  source 1..75: mol_type = other DNA
cattttggtttgaatcatcttggtttactggctcccggaaaacaggccgatattgtcctgttaagcgacgcacgt

SEQ ID NO: 690290 - DNA, 75 bp, synthetic construct
  source 1..75: mol_type = other DNA
gtcacctttgaaaccgccacactaccgcgcggcctgacgaccgtcatttgcgatcctcatgaaatcgtcaacgtc

SEQ ID NO: 690291 - DNA, 75 bp, synthetic construct
  source 1..75: mol_type = other DNA
tgatgatccgcgaagggtccgctgcccgcaatctcaacgcgctggcaccgttgatcaacgaatttaacagcccgc

SEQ ID NO: 690292 - DNA, 75 bp, synthetic construct
  source 1..75: mol_type = other DNA
cataacattgtggtgatcggtcgtagcactgaagaaatggcgctggcggtgaatcaggttattcaggacggcggt

SEQ ID NO: 690293 - DNA, 75 bp, synthetic construct
  source 1..75: mol_type = other DNA
gatggcgctggcggtcaatcaggtgattcaggatggcggcgggctgtgcgtggtacgtaacggccaggtccaaag

SEQ ID NO: 690294 - DNA, 75 bp, synthetic construct
  source 1..75: mol_type = other DNA
gaagtcattggcaataacattgatatgctgattccgcgggatttgcgtcctgcgcatcctcaatacattcgtcac

SEQ ID NO: 690295 - DNA, 75 bp, synthetic construct
  source 1..75: mol_type = other DNA
cctcgacgaaattggcgaaatgccgctggtactgcaagccaaattactacgcattctgcaggaacgggaatttga

SEQ ID NO: 690296 - DNA, 75 bp, synthetic construct
  source 1..75: mol_type = other DNA
atgccgcatgtggtcggttctgtagaggtgtatgaacagcagacctcctggccgctgattctggaaaacagctag

SEQ ID NO: 690297 - DNA, 75 bp, synthetic construct
  source 1..75: mol_type = other DNA
ggttccggcaatattatgtgcctggatgtgctgcgcgttctcaataagcaagcgggcgtatacgacttattgtcg

SEQ ID NO: 690298 - DNA, 75 bp, synthetic construct
  source 1..75: mol_type = other DNA
tgaaaaatggtcgtaagggcgagatggtgaaagtgcgcaatgccagcagccagcgggtcatcagcgcaatggtgg

SEQ ID NO: 690299 - DNA, 75 bp, synthetic construct
  source 1..75: mol_type = other DNA
ctggttgcccgcgatacgccgctcacggcgaatgatgtggagttgaagccctacaacatcagcgcccagcggcgg

SEQ ID NO: 690300 - DNA, 75 bp, synthetic construct
  source 1..75: mol_type = other DNA
ctggttgcccgcgatacgccgctcacggcaaatgatgtggagttgaagccctacaacgtcagcgcccagcgccgc

SEQ ID NO: 690301 - DNA, 75 bp, synthetic construct
  source 1..75: mol_type = other DNA
atggcaaaacatttgaacaggagtgaaataaaggcaattaaacacattatactgacttgggacggtaaaatcaca

SEQ ID NO: 690302 - DNA, 75 bp, synthetic construct
  source 1..75: mol_type = other DNA
ttgtaggcctgataagacgcgtcagcgtcgcatcaggcactgaatgccggatgcggcgtgaacgccttatccgtc

SEQ ID NO: 690303 - DNA, 75 bp, synthetic construct
  source 1..75: mol_type = other DNA
gtctggacccgttttgcgctatcgaaagtgagcgccgaggggaaagtttattacctggcgctggtacgggatgcc

SEQ ID NO: 690304 - DNA, 75 bp, synthetic construct
  source 1..75: mol_type = other DNA
cgcggtttgttgattggcatgggaatgacggaaaagcagggcggttccgatgtcatgagcaacaccacccgcgca

SEQ ID NO: 690305 - DNA, 75 bp, synthetic construct
  source 1..75: mol_type = other DNA
gatggaaggctacgaccataaatacttaactgtccttgcgatatttagaccatatagaagccttaatgctttcgc

SEQ ID NO: 690306 - DNA, 75 bp, synthetic construct
  source 1..75: mol_type = other DNA
tctgaagaagcaaaacaccagatataaagaacagtttacactatggcagtacaattcatataagtatggacttaa

SEQ ID NO: 690307 - DNA, 75 bp, synthetic construct
  source 1..75: mol_type = other DNA
atgaataactctattaactataaatttcatcacattagcagagctgaataccaggaattgttagccgtttcccgt

SEQ ID NO: 690308 - DNA, 75 bp, synthetic construct
  source 1..75: mol_type = other DNA
ccggtggacgtaaaaatgtgccgttccagcagtacatcaacgcggggtatttcacggtgaaagaagtggtgctgg

SEQ ID NO: 690309 - DNA, 75 bp, synthetic construct
  source 1..75: mol_type = other DNA
tggttggataagctgtagtgagcgaatgcctgagaacattcccggaagttgtaaagagtatctggtgtttgatgg

SEQ ID NO: 690310 - DNA, 75 bp, synthetic construct
  source 1..75: mol_type = other DNA
gcagttactgacgatgtggaagaaccggcatcgaaagtaacccactggatgccgctaccggaaccgccgcaggag

SEQ ID NO: 690311 - DNA, 75 bp, synthetic construct
  source 1..75: mol_type = other DNA
gaacggcaaatccgccagcttgaaggcaatattctcgccgccatgtgcagcagcccgccatttcatgaaatgggg

SEQ ID NO: 690312 - DNA, 75 bp, synthetic construct
  source 1..75: mol_type = other DNA
gtgttaattaacgaaaatgatgaagtgatgtttttcaaccccgccgcagagaagctctgggggtacaaacgtgaa

SEQ ID NO: 690313 - DNA, 75 bp, synthetic construct
  source 1..75: mol_type = other DNA
gaaggtgaattttacacaaaaagtgcaaaatcccatggcacaagggccgggcgctcttttgaggtcataaccatg

SEQ ID NO: 690314 - DNA, 75 bp, synthetic construct
  source 1..75: mol_type = other DNA
gtccaattgattacaaaaaatatagagctttcacatatttatcaggaaatatcttggatgacgtaacccactgga

SEQ ID NO: 690315 - DNA, 75 bp, synthetic construct
  source 1..75: mol_type = other DNA
catattggaactgggtaatgagtccaattgattacaaaaaatatagagctttcacatatttatcaggaaatatct

SEQ ID NO: 690316 - DNA, 75 bp, synthetic construct
  source 1..75: mol_type = other DNA
cgttcgagagcagacagccattccgcaagttccggtaactccggatggttggataagctgtagtgagcgaatgcc

SEQ ID NO: 690317 - DNA, 75 bp, synthetic construct
  source 1..75: mol_type = other DNA
ttgatgacatcattattgatccctttaaacggcgtccgcctgaagacgctatcgccgtttcagaaaccacctcgc

SEQ ID NO: 690318 - DNA, 75 bp, synthetic construct
  source 1..75: mol_type = other DNA
cttcaggctggaaactttcgggaaaataagggttcgtcaaccaataattttcgggaaatctcggaaacgtcaacc

SEQ ID NO: 690319 - DNA, 75 bp, synthetic construct
  source 1..75: mol_type = other DNA
gcctgccgcgccgccatgcttcagtccggaaactttcgggaaaacaagaattcgtcaaccaataattttcgggaa

SEQ ID NO: 690320 - DNA, 75 bp, synthetic construct
  source 1..75: mol_type = other DNA
tgctgattccgcgggatttgcgtcctgcgcatcctgaatacatccgtcacaaccgtgaaggcggtaaagcgcgcg

SEQ ID NO: 690321 - DNA, 75 bp, synthetic construct
  source 1..75: mol_type = other DNA
gctcttaacagtcatacgcgggagtcttttttttcgcgcatcgcagcgcagatccgtaaaggaggcaaccagtga

SEQ ID NO: 690322 - DNA, 75 bp, synthetic construct
  source 1..75: mol_type = other DNA
caggaagccaaagcgcgcctggagaaaaaaattgcgctctatatcgatgacggctgtgatgctgccgttcttaac

SEQ ID NO: 690323 - DNA, 75 bp, synthetic construct
  source 1..75: mol_type = other DNA
atgaccaatatcgaacgattagaaagcgccgctgatattatgcgccgcaaatggatttacgatcctgaaacgggc

SEQ ID NO: 690324 - DNA, 75 bp, synthetic construct
  source 1..75: mol_type = other DNA
cccgttcgacaccatgagcgaagcggagttttccgccatgagtaccagcgaaaaggccatgcgtgtctatgagca

SEQ ID NO: 690325 - DNA, 75 bp, synthetic construct
  source 1..75: mol_type = other DNA
gctcttaacagtcatacgcgggagtcttttttttcgtgcatcgcagcgcagatccgcaaaggaggcaaccagtga

SEQ ID NO: 690326 - DNA, 75 bp, synthetic construct
  source 1..75: mol_type = other DNA
gcggcgttcgcaccagctcttaactgtcatacgcgggaatcttttttttcgtgcatcgcagcgcagatccacaaa

SEQ ID NO: 690327 - DNA, 75 bp, synthetic construct
  source 1..75: mol_type = other DNA
cagaccagcagcaccagagcctgaaagcactggcagccctgcaaggtaagaccatcaaacaatacgctctcgaac

SEQ ID NO: 690328 - DNA, 75 bp, synthetic construct
  source 1..75: mol_type = other DNA
tttcttgctataatgatttgttaagatatttttatatttctgaaggtcgtgccgaccttgttgaatacattgatg

SEQ ID NO: 690329 - DNA, 75 bp, synthetic construct
  source 1..75: mol_type = other DNA
aagattgatatcagaaagaatagactattataaaaataaaaataaagaatataaagagccttctgtaataagaag

SEQ ID NO: 690330 - DNA, 75 bp, synthetic construct
  source 1..75: mol_type = other DNA
caggaaggtgattttaaagcgacgcttagttatcaaaaagcctgctatgtatacacatacggcgcttatgatgag

SEQ ID NO: 690331 - DNA, 75 bp, synthetic construct
  source 1..75: mol_type = other DNA
taaaggtcatttattagtaactgtaagggaaggtgaatttaaggtaacactcacctatcaaaaagcctgctatgt

SEQ ID NO: 690332 - DNA, 75 bp, synthetic construct
  source 1..75: mol_type = other DNA
atactgctggaaaaccgtatcaacaatgggctggagggaaaagtatctactaaaagtatcggagacattcttgat

SEQ ID NO: 690333 - DNA, 75 bp, synthetic construct
  source 1..75: mol_type = other DNA
aacaagaaaaaacgttgcttatcaatcaactggcaagtgaagaacaacagaaagtgacttctcggctgagcgatg

SEQ ID NO: 690334 - DNA, 75 bp, synthetic construct
  source 1..75: mol_type = other DNA
tggatggatttctgaaaggtaaatgcatcccgcgagatttaaaagttaacgaaacaaacgctgaatatcttgtcc

SEQ ID NO: 690335 - DNA, 75 bp, synthetic construct
  source 1..75: mol_type = other DNA
attgatggacagagaaacgctggtgccaatgcccgttatatcgcggctatcccacccaaagttgtgctggctcta

SEQ ID NO: 690336 - DNA, 75 bp, synthetic construct
  source 1..75: mol_type = other DNA
aactgccttctgacctggcaattgccacctttggcgataacgaactgctcgacttcttacagtgcccggtgctgg

SEQ ID NO: 690337 - DNA, 75 bp, synthetic construct
  source 1..75: mol_type = other DNA
atcttggcgcgctgccggagctttctgtgagcttcttgcgtgagcaaggtttccgtactgcctggaaagatgatc

SEQ ID NO: 690338 - DNA, 75 bp, synthetic construct
  source 1..75: mol_type = other DNA
acctacaagttgaagctaattactctatcaatcaagcccgtgaaatggttgggaaaacggtgaaatctgtccaga

SEQ ID NO: 690339 - DNA, 75 bp, synthetic construct
  source 1..75: mol_type = other DNA
aatagcaccgcttgagactaagctcgcggctctggtggcagagaacgccgggctgaaacacgcaatggctgtaac

SEQ ID NO: 690340 - DNA, 75 bp, synthetic construct
  source 1..75: mol_type = other DNA
cctggcattcttttttgccagcaaaacgtatggatattgttgtgagcgcgctggaaatgaatgagggcggtttgt

SEQ ID NO: 690341 - DNA, 75 bp, synthetic construct
  source 1..75: mol_type = other DNA
ctttaatgcggcggcggtgatgggcgtgctgtgtattatctggattatcaaatcattgccttcgctgcctggcga

SEQ ID NO: 690342 - DNA, 75 bp, synthetic construct
  source 1..75: mol_type = other DNA
tgatggcctgtctggtgaatatgcggagaaatcccttgaagaatgggcggaacagattagcaaaggaggcaacca

SEQ ID NO: 690343 - DNA, 75 bp, synthetic construct
  source 1..75: mol_type = other DNA
cagcgtattcggcccgttcctttatggcgttggtgtgcttttgcttaagcctttcgggctacatcatatcttgct

SEQ ID NO: 690344 - DNA, 75 bp, synthetic construct
  source 1..75: mol_type = other DNA
aatattgatgcaatgtgccgaattgcagagcttgagactaatctcgcggcgctgtcggcggagagtgagctggct

SEQ ID NO: 690345 - DNA, 75 bp, synthetic construct
  source 1..75: mol_type = other DNA
cggcaccaaaaggtaagaaaggcaaagaactgaccgacgagctggccgcgctgatcaatgccgatcctgacgcgc

SEQ ID NO: 690346 - DNA, 75 bp, synthetic construct
  source 1..75: mol_type = other DNA
agttttggtgagtcccgtaatgatttcctgtttacctgtacctccattccgaaggcaccggagccggattatgtc

SEQ ID NO: 690347 - DNA, 75 bp, synthetic construct
  source 1..75: mol_type = other DNA
ccttcagcgcttatgcaggagaaccggataatgatcagaacggccagaaaggtactatgggaatcaatgcccgct

SEQ ID NO: 690348 - DNA, 75 bp, synthetic construct
  source 1..75: mol_type = other DNA
tgctgtggatggcgcataccggcacgtttggtgaggtgcaggcattcggggcaaaacgcaatgattttctggcga

SEQ ID NO: 690349 - DNA, 75 bp, synthetic construct
  source 1..75: mol_type = other DNA
atgaccaaagaaactgttacgatgagtcataaggaactccaccgacttcagattattcaggagtcaattaatcga

SEQ ID NO: 690350 - DNA, 75 bp, synthetic construct
  source 1..75: mol_type = other DNA
ggtggatctgggactggtcgaaaatctggacacctttaaaaagaatctgctcgtggagcgcaacacaaaagaccg

SEQ ID NO: 690351 - DNA, 75 bp, synthetic construct
  source 1..75: mol_type = other DNA
acggcaaaatttaccggcgaatgttccgtgcatgatatccggctgaattattattccggtgaagtgacacctgcc

SEQ ID NO: 690352 - DNA, 75 bp, synthetic construct
  source 1..75: mol_type = other DNA
ccgcttcagacgctggcgcttccgtcacgcatggccccggccccggccgatcgtctgacgcgtgaagagcgtaac

SEQ ID NO: 690353 - DNA, 75 bp, synthetic construct
  source 1..75: mol_type = other DNA
acgtttggtgaggtgcaggcattcggggcaaaacgcaatgattttctggcgacctgcacattcattcccaaagcc

SEQ ID NO: 690354 - DNA, 75 bp, synthetic construct
  source 1..75: mol_type = other DNA
agcgtggcgggtatgggcgatcgccagtacaactatgtcgtcatgccctataaggatgatgcaaacctgaaaatc

SEQ ID NO: 690355 - DNA, 75 bp, synthetic construct
  source 1..75: mol_type = other DNA
tacgggattatcacagcattcaaagccgcatccgggaaaaacagcaacccggatatcagcgccagcatcgcgggg

SEQ ID NO: 690356 - DNA, 75 bp, synthetic construct
  source 1..75: mol_type = other DNA
ctgagtgcaaaatttacgggtgcattatctgccgtggacgtgcgctggaactattacgcgggtgaaaccacccct

SEQ ID NO: 690357 - DNA, 75 bp, synthetic construct
  source 1..75: mol_type = other DNA
gcgcaacagcctgctttataccggaatatccaccgtgaccgtcgcggccggtgatgtggtgcagattgagcgtca

SEQ ID NO: 690358 - DNA, 75 bp, synthetic construct
  source 1..75: mol_type = other DNA
gtatatgaatctggcgggattcggcgtggatggcttaacactggtactgctgagttttggtatcgccagttttgt

SEQ ID NO: 690359 - DNA, 75 bp, synthetic construct
  source 1..75: mol_type = other DNA
cctggttcaggacgcagagccaaacttcgatgtaaatggcaactctccggtaattccggatggttgggttatagt

SEQ ID NO: 690360 - DNA, 75 bp, synthetic construct
  source 1..75: mol_type = other DNA
atgaccacttttaccgacaaagaactgattaaagaaatcaaagagcgcataagcagcctagatgtgcgagacaat

SEQ ID NO: 690361 - DNA, 75 bp, synthetic construct
  source 1..75: mol_type = other DNA
cgtttctgtcacaagggtttatgccgacctttatcttcggtttacccgccgtggcttacgccatctaccgcaccg

SEQ ID NO: 690362 - DNA, 75 bp, synthetic construct
  source 1..75: mol_type = other DNA
acggctggactgagtgcgataccttcgaagggtattacgattgttcgagaaacaaatggtgggcagttactgacg

SEQ ID NO: 690363 - DNA, 75 bp, synthetic construct
  source 1..75: mol_type = other DNA
tgattaaagaaatcaaagaacgaatcagcagcatggacgtgcgagacaatgttgagcgccgtgcttatgaaattg

SEQ ID NO: 690364 - DNA, 75 bp, synthetic construct
  source 1..75: mol_type = other DNA
ttgcagaacgcactgtctggcaactctccggtaattccggatggttggataagctgtagtgagcgaatgccgaac

SEQ ID NO: 690365 - DNA, 75 bp, synthetic construct
  source 1..75: mol_type = other DNA
atgagttttcaattttgcaggcggaagttttatttcctcctggcgctggccttaccgggctacgccgccgtccat

SEQ ID NO: 690366 - DNA, 75 bp, synthetic construct
  source 1..75: mol_type = other DNA
ctacaacgtcagtgcccagcgccgggaggtgttgatggaacccaatgacgcgattggtttcagcagtaaacacgc

SEQ ID NO: 690367 - DNA, 75 bp, synthetic construct
  source 1..75: mol_type = other DNA
ggtgaaagtgcgtaacgccagcagccagcgggtcatcagcgcgatggtggcggaaagcggcgtggtgacaacggt

SEQ ID NO: 690368 - DNA, 75 bp, synthetic construct
  source 1..75: mol_type = other DNA
tgtaagccagacttacaagttgaacgagctgtcgggcaactctccggtaactccggatggttggataagctgtag

SEQ ID NO: 690369 - DNA, 75 bp, synthetic construct
  source 1..75: mol_type = other DNA
gtcacagagaacccagaaagatatcaaagtggctgttgcggatgatgattgtgcttcacgtcctgtgcctgctgc

SEQ ID NO: 690370 - DNA, 75 bp, synthetic construct
  source 1..75: mol_type = other DNA
ccgaactggcaagccagttatcaaccttgagatatcaagcctgcgacaattggcgatttactacgaactcaactc

SEQ ID NO: 690371 - DNA, 75 bp, synthetic construct
  source 1..75: mol_type = other DNA
atgaccactttcaccgataaggaactgattaaagaaatcaaagaacgaatcggcagcttagacgtgcgagacaat

SEQ ID NO: 690372 - DNA, 75 bp, synthetic construct
  source 1..75: mol_type = other DNA
tgcaaagtacaaatacatcgacgaaaatggcgatgagaaaacgtggacaggtcaggggcgaacaccaaaagtgat

SEQ ID NO: 690373 - DNA, 75 bp, synthetic construct
  source 1..75: mol_type = other DNA
ttgtcgaacaggaagttgattccagcattcgtgccagcgcgcaggggctctttatgaccatggtaaatggtgtcg

SEQ ID NO: 690374 - DNA, 75 bp, synthetic construct
  source 1..75: mol_type = other DNA
tgtgcattcgatttcttcaatatttctggttcggtatttgtcgaacaggaagttgattccagcattcgtgccagc

SEQ ID NO: 690375 - DNA, 75 bp, synthetic construct
  source 1..75: mol_type = other DNA
tcgttgagtttttgcctgtcagtttattgacgccaatggctcaggatttaggtatttcggaaggggttgccggac

SEQ ID NO: 690376 - DNA, 75 bp, synthetic construct
  source 1..75: mol_type = other DNA
gagtgaatttattgccgaaaaccgcggcgcggatgccatcacccgaccgaactggtcagccgttttctcggtggc

SEQ ID NO: 690377 - DNA, 75 bp, synthetic construct
  source 1..75: mol_type = other DNA
gtactcttcgtgcgcaggcaagagaatgtacacttgaaacgctggaagaaatgctggaaaaattagaagttgttg

SEQ ID NO: 690378 - DNA, 75 bp, synthetic construct
  source 1..75: mol_type = other DNA
tgcgtcattgctgctgtcggcttatgcgctgactttgccgaagattccggttgcggagaaaaaagcgactacatc

SEQ ID NO: 690379 - DNA, 75 bp, synthetic construct
  source 1..75: mol_type = other DNA
accgattgaatattattcaagtaacgtaatgcaaacgttatcactaatatctacaatgatagagtataacgtaaa

SEQ ID NO: 690380 - DNA, 75 bp, synthetic construct
  source 1..75: mol_type = other DNA
tgcacattgcgttcaatggggaaatgactatccgaaaggctttcatataatccatgatgattcccacagcatcga

SEQ ID NO: 690381 - DNA, 75 bp, synthetic construct
  source 1..75: mol_type = other DNA
gcttgccagcaagctgggtctggatgccttcgtgctgtttaaaaatccacgcatggctatctttttcctctttgc

SEQ ID NO: 690382 - DNA, 75 bp, synthetic construct
  source 1..75: mol_type = other DNA
tttcacagatggctgaagtcggttttattctgacgattccgttctttttaaagcgtttcggtatcaaaacggtca

SEQ ID NO: 690383 - DNA, 75 bp, synthetic construct
  source 1..75: mol_type = other DNA
tttcctcgcagtgatatttttctttggatttaaatataaccatgaccctgaaaagataacacatcgaacagtgac

SEQ ID NO: 690384 - DNA, 75 bp, synthetic construct
  source 1..75: mol_type = other DNA
tggggattatgtctggcgtaataatcttaaactgggtacagggaagtaccgaccattacgcagtgtcgatatcga

SEQ ID NO: 690385 - DNA, 75 bp, synthetic construct
  source 1..75: mol_type = other DNA
gaagtagtacgcgttggaatgggcttcaaacctcttgatttctcgattaatgacattaccgcctggaacaaaagc

SEQ ID NO: 690386 - DNA, 75 bp, synthetic construct
  source 1..75: mol_type = other DNA
gcaatggcgcgaagggtttgatgcgatggtcgataaaaccgcaatcaaagtgatcatgacttacgactttgatga

SEQ ID NO: 690387 - DNA, 75 bp, synthetic construct
  source 1..75: mol_type = other DNA
taaatattagctgctctgccatgcttgacttaatggcaagaaaaataccagaatttacagctaaaagcttgatcg

SEQ ID NO: 690388 - DNA, 75 bp, synthetic construct
  source 1..75: mol_type = other DNA
tagcgaggaagagaagccatttgaattgccggaggggtgggagtgggtgcgattgggtgactttaccaatatcat

SEQ ID NO: 690389 - DNA, 75 bp, synthetic construct
  source 1..75: mol_type = other DNA
aacaattggtagatcttctttaattaaggactgttctgatttcgcactcgtaaggagcgtagcgattataaaacc

SEQ ID NO: 690390 - DNA, 75 bp, synthetic construct
  source 1..75: mol_type = other DNA
tttaaatatttacgacattttcttttatccccagaatgatatcatagaagacaatgtaagtagaatattacagca

SEQ ID NO: 690391 - DNA, 75 bp, synthetic construct
  source 1..75: mol_type = other DNA
gcgtgcaatacattattaataacaacaccggtgtctggttccgccagcagttcgcatctgccattttagacaggg

SEQ ID NO: 690392 - DNA, 75 bp, synthetic construct
  source 1..75: mol_type = other DNA
atgaaaaactatcatgccctgtctgttatttttactcttatgttacccgcgctggcgaatgcgagcatgagcatc

SEQ ID NO: 690393 - DNA, 75 bp, synthetic construct
  source 1..75: mol_type = other DNA
tcacaaagcgacgtaatggctgctcaacaagcagagtataagcaactcacagaggcgctatcagcattacaacaa

SEQ ID NO: 690394 - DNA, 75 bp, synthetic construct
  source 1..75: mol_type = other DNA
tgagcagcaaactaaaaaccagttgcagcatgcttatggattactggaagcacagcacgatacgttaggcttgga

SEQ ID NO: 690395 - DNA, 75 bp, synthetic construct
  source 1..75: mol_type = other DNA
gcgcattactgcacaacataacagcatattagaaatggaaaagcagcttgcacatgctcaagtgcaatctgatga

SEQ ID NO: 690396 - DNA, 75 bp, synthetic construct
  source 1..75: mol_type = other DNA
taattatagaaagtctattagagtgcgctaaatccgccaaacaaacccaactgcaccttgcagacgcactgactg

SEQ ID NO: 690397 - DNA, 75 bp, synthetic construct
  source 1..75: mol_type = other DNA
gattgtttaaaagaaaaaataaaatccgccaaacaaacccaactgcaccttgcagacgcactgactgacgcggcg

SEQ ID NO: 690398 - DNA, 75 bp, synthetic construct
  source 1..75: mol_type = other DNA
actggaacagcaatccctgaccagtctggacgcacatcaacaactggttgaaaccctgttgggaacgcttacaga

SEQ ID NO: 690399 - DNA, 75 bp, synthetic construct
  source 1..75: mol_type = other DNA
gaagcgtattgcggcagaaaaagcagagctggtgaagcaaggtaaaattaaaaagcaaaaaccactgccggaaat

SEQ ID NO: 690400 - DNA, 75 bp, synthetic construct
  source 1..75: mol_type = other DNA
ttttataaccgaaggaaaatttaatgaattaagaagtgggaaaattcaaaaaggtgatttggtttattgcctacg

SEQ ID NO: 690401 - DNA, 75 bp, synthetic construct
  source 1..75: mol_type = other DNA
gttaatgccacctcgaaacatgtatcaaaaaaagcacaagcagatatatttaaatatctaccgatccctgctgaa

SEQ ID NO: 690402 - DNA, 75 bp, synthetic construct
  source 1..75: mol_type = other DNA
tattgcattatatcttaattcgccatctggtataaaagaaatgcaacggctcgctgttaccactagcggtctata

SEQ ID NO: 690403 - DNA, 75 bp, synthetic construct
  source 1..75: mol_type = other DNA
caggccagcgaaatgctgttgcagcgcttacaacactgggcgcttgaacgtggttcgctgattattctttttgaa

SEQ ID NO: 690404 - DNA, 75 bp, synthetic construct
  source 1..75: mol_type = other DNA
cgttgcgccatcgtcacccggcaacactctccggtggagagacacagcgcgtggtcatcgcctgcgccatcgcga

SEQ ID NO: 690405 - DNA, 75 bp, synthetic construct
  source 1..75: mol_type = other DNA
gctgattctggaactggctgtgcgcggtaaactggtgccgcaggacccgaacgatgaaccggcgtcggagctgct

SEQ ID NO: 690406 - DNA, 75 bp, synthetic construct
  source 1..75: mol_type = other DNA
aactcgtccagcaatctccctatttgcagctttctggctgtaccttcagcgtggaagaggaaattgcgtttggac

SEQ ID NO: 690407 - DNA, 75 bp, synthetic construct
  source 1..75: mol_type = other DNA
gcagctctccggctgtacctttagcgtggaagaagaagttgcctttgggccagaaaatctgtgtcttgctgaaga

SEQ ID NO: 690408 - DNA, 75 bp, synthetic construct
  source 1..75: mol_type = other DNA
ctaaacgaacaagccgctaccattcaactcgtccagcaatctccctatttgcagctttctggctgtaccttcagc

SEQ ID NO: 690409 - DNA, 75 bp, synthetic construct
  source 1..75: mol_type = other DNA
gtgctgccgctgtatcccgacatcagcccggaaattattgcgattgctatcggttccggtgcgattggctgcacg

SEQ ID NO: 690410 - DNA, 75 bp, synthetic construct
  source 1..75: mol_type = other DNA
cgcgatgacacccgccaggcgctggatgcggtgtgggaagaggaacaggtgaagtttattgaagataacgccacg

SEQ ID NO: 690411 - DNA, 75 bp, synthetic construct
  source 1..75: mol_type = other DNA
ctgcaggaaaaagcgcagtccattcaggatgtgcttgccgggctggaagaccgtcgtgtggcgttaattcgtcag

SEQ ID NO: 690412 - DNA, 75 bp, synthetic construct
  source 1..75: mol_type = other DNA
gaactgtttggtcatgaagcgggggcgtttaccggtgcgcaaaaacgtcatccagggagatttgaacgtgccgac

SEQ ID NO: 690413 - DNA, 75 bp, synthetic construct
  source 1..75: mol_type = other DNA
tttgacgccctgctgcatctggcgggaagcatactttcaagtgacagtgtcacaaaacaagtgaatagcgaggag

SEQ ID NO: 690414 - DNA, 75 bp, synthetic construct
  source 1..75: mol_type = other DNA
cctgctcaacgcgccgctgctggataaacaggccgaatggtgtgaagtgtttgaccgcgggcgcaccacgtcgct

SEQ ID NO: 690415 - DNA, 75 bp, synthetic construct
  source 1..75: mol_type = other DNA
tgttgatggagtacccagacgagttgttgtgggagtgtaaggacgacgcgctggcgcttatccgccgcgacgcgc

SEQ ID NO: 690416 - DNA, 75 bp, synthetic construct
  source 1..75: mol_type = other DNA
ggtgaagattacgatgtcgccggattctgtgtcggggtagtagaaaaatcagaaatcattgacggttctaaagtc

SEQ ID NO: 690417 - DNA, 75 bp, synthetic construct
  source 1..75: mol_type = other DNA
gcacgccattgcgcatctgaccggtggcggcttttgggaaaatattccgcgcgtattgccggaaaatacccaggc

SEQ ID NO: 690418 - DNA, 75 bp, synthetic construct
  source 1..75: mol_type = other DNA
gctgctcgctagtgggtggcgaaacggcagagatgccggggatgtatcacggcgaagattatgacgtagctggtt

SEQ ID NO: 690419 - DNA, 75 bp, synthetic construct
  source 1..75: mol_type = other DNA
gcgcattaaccgtcagccccgatcaggtgctgcaactgacgccagataggatcgcgatgctgccgcaaggcagtc

SEQ ID NO: 690420 - DNA, 75 bp, synthetic construct
  source 1..75: mol_type = other DNA
cggacctgctggatcgtttggcatttgacgtagtgcaactcccaccgttacgcgaacgccaaagcgatatcatgt

SEQ ID NO: 690421 - DNA, 75 bp, synthetic construct
  source 1..75: mol_type = other DNA
gtgcgcaaaattcttgaagtcagcggttgtgatccgcaaaccaccgaacttgatggtaagccattagccgatcat

SEQ ID NO: 690422 - DNA, 75 bp, synthetic construct
  source 1..75: mol_type = other DNA
gcgtgtgacagctcgccgcttaatcaatatcagcgacgctttagccaggatgtcgacatcagtgcgggaggtggg

SEQ ID NO: 690423 - DNA, 75 bp, synthetic construct
  source 1..75: mol_type = other DNA
tcatcgaacagattttcacgatgattaccaaacggtaatggcatacaaagtttctgaagtcatcgatgcaatccg

SEQ ID NO: 690424 - DNA, 75 bp, synthetic construct
  source 1..75: mol_type = other DNA
aacgccttcaaatttctgaccggaccagaaaccgtgctggcactgctggatgaacgggaaagaaaccagcaatac

SEQ ID NO: 690425 - DNA, 75 bp, synthetic construct
  source 1..75: mol_type = other DNA
accaggcgaatggtgtactgatgactatggggttattgccaatgccggactgaacgccaattactacatagcatc

SEQ ID NO: 690426 - DNA, 75 bp, synthetic construct
  source 1..75: mol_type = other DNA
tgccgctgtatcccgacatcagcccggaaattattgcgattgctatcggttcaggtgcaattggctgcacgatcg

SEQ ID NO: 690427 - DNA, 75 bp, synthetic construct
  source 1..75: mol_type = other DNA
tatagataattataaaaaagttaacaaaaaacatggcgggatagttagaaaactgtttaaagattttgcacatac

SEQ ID NO: 690428 - DNA, 75 bp, synthetic construct
  source 1..75: mol_type = other DNA
taccaaacggtaatggcatacaaagtttctgaagtcatcgctgcaatccgcgccgctggcattcgcatcaaagga

SEQ ID NO: 690429 - DNA, 75 bp, synthetic construct
  source 1..75: mol_type = other DNA
ttgctcaacgttgcgccgatcctcgccctgcttggcggacgcttaaaacaacgcgaggcaccgtggtacgcgtta

SEQ ID NO: 690430 - DNA, 75 bp, synthetic construct
  source 1..75: mol_type = other DNA
ttgctcaatgttgcgccgatcctcgccctgcttggcggtcgcttaaaacaacgcgaggcaccgtggtacgcgttg

SEQ ID NO: 690431 - DNA, 75 bp, synthetic construct
  source 1..75: mol_type = other DNA
tgcgtgaaaaggcagagaaagcaacgtgtggtgtgtggtcgctagaatatggagagagccgatttgattgtgatg

SEQ ID NO: 690432 - DNA, 75 bp, synthetic construct
  source 1..75: mol_type = other DNA
cgttttcgttcgattgaacaagcgatgctcgacgccgggctgagtgccgaagaagccagtgcaggcgcacatgca

SEQ ID NO: 690433 - DNA, 75 bp, synthetic construct
  source 1..75: mol_type = other DNA
tatgtactttctggcggcagaaaaactcaatgtgccgatcggtgagatcctgcatgttggcgatgatctcaccac

SEQ ID NO: 690434 - DNA, 75 bp, synthetic construct
  source 1..75: mol_type = other DNA
tgtatctggagtatttaagtgtgctacccgacaaacaggctaaagaaggtttgctcaacgttgcgccaatcctcg

SEQ ID NO: 690435 - DNA, 75 bp, synthetic construct
  source 1..75: mol_type = other DNA
ggaaaggctatggccattttgaagatgacccagataattacccgatgcaaacaattgtatcagactatttagctc

SEQ ID NO: 690436 - DNA, 75 bp, synthetic construct
  source 1..75: mol_type = other DNA
ctggtgaagtgtcgctggttggcgcgcgcggctttgatggcagcaccgtgttttatccgctgacgcataacctgc

SEQ ID NO: 690437 - DNA, 75 bp, synthetic construct
  source 1..75: mol_type = other DNA
gcgcggttttgatggcagcaccgtgttttatccgctgacgcataacctgcatcaggacggtattttgcgcaccag

SEQ ID NO: 690438 - DNA, 75 bp, synthetic construct
  source 1..75: mol_type = other DNA
atcgagcaggcccagcggcagcaggagaaggcccgcaggctggccagcctcgaactgcccgagcggcagcttagc

SEQ ID NO: 690439 - DNA, 75 bp, synthetic construct
  source 1..75: mol_type = other DNA
tggcaactatccggtaattccggatggttggataagctgtagtgagcgaatgccccctcaagatgattggatttt

SEQ ID NO: 690440 - DNA, 75 bp, synthetic construct
  source 1..75: mol_type = other DNA
ccactgtcacagatgattttaacatccaagatagtacctatcttgatattgctaagctgcgtatggctgggcgca

SEQ ID NO: 690441 - DNA, 75 bp, synthetic construct
  source 1..75: mol_type = other DNA
gcaggatgcgccagttgaaggcagcagcaaagcggctgcatacgctacaggctggaacgcctgccgcgctgccat

SEQ ID NO: 690442 - DNA, 75 bp, synthetic construct
  source 1..75: mol_type = other DNA
cgtctcgatgacgtgttccgtatggccctggaccgtcaggccgggaaatcccttcaggctcattctcaggaataa

SEQ ID NO: 690443 - DNA, 75 bp, synthetic construct
  source 1..75: mol_type = other DNA
accacaggaccgattgcgcgcacgaataccagttatgacggcacaaaacgccgtaacccgaataacgtggttgat

SEQ ID NO: 690444 - DNA, 75 bp, synthetic construct
  source 1..75: mol_type = other DNA
tgactggctgaaactaccactggtgcatctgcactggtacaacaaagaagtgcgtccgggtcgtaaagtgggtca

SEQ ID NO: 690445 - DNA, 75 bp, synthetic construct
  source 1..75: mol_type = other DNA
tatgacggtcgcggtcaatggcgtttacgcgccgatgaaaccgaacagttaccggctgaatgctacggcgaatgt

SEQ ID NO: 690446 - DNA, 75 bp, synthetic construct
  source 1..75: mol_type = other DNA
ccggcaatcctgatattgataacgccatcatcatgctcgatcgcatagatacgctggaaagttgcgatgatgacc

SEQ ID NO: 690447 - DNA, 75 bp, synthetic construct
  source 1..75: mol_type = other DNA
ggtcaagcgcttcggtgatgacctcagcaagtgcgactttatcgccgcgcagaagctggccagccggggccgcag

SEQ ID NO: 690448 - DNA, 75 bp, synthetic construct
  source 1..75: mol_type = other DNA
aagggtggcttggtgatgatatcagcatccctgaatgcgatgtaatcaattggatgccgctaccggaacctccgc

SEQ ID NO: 690449 - DNA, 75 bp, synthetic construct
  source 1..75: mol_type = other DNA
gccagcgttacacaaacggatcaaaaagcgttaccagaggaagaggaagaggaagaggaagatctaaatactgat

SEQ ID NO: 690450 - DNA, 75 bp, synthetic construct
  source 1..75: mol_type = other DNA
gagggtgcatccgcgcaaagccgaaaaattctggtcatgggccatgcggtatcgtccggcagcgcagacgccctg

SEQ ID NO: 690451 - DNA, 75 bp, synthetic construct
  source 1..75: mol_type = other DNA
ttcgatgattttgacggtgacaggcgaggtatcggtgattgtctggatgaggctgagcaagagcttatcgttacc

SEQ ID NO: 690452 - DNA, 75 bp, synthetic construct
  source 1..75: mol_type = other DNA
cgcagggagaatcacgcatgggcgagcctgtaatacgtgagccagcaccggtagtgcctgaagaagcaactccgg

SEQ ID NO: 690453 - DNA, 75 bp, synthetic construct
  source 1..75: mol_type = other DNA
tagtggcagcatattggaactgggtaatgagtccaatttattacaaaaaatatagagctttcacatatttatcag

SEQ ID NO: 690454 - DNA, 75 bp, synthetic construct
  source 1..75: mol_type = other DNA
cgatctggacgccatgaagcaggagggccgggagcctgccgccatcatcgagaccagcccgaagaactatcaggc

SEQ ID NO: 690455 - DNA, 75 bp, synthetic construct
  source 1..75: mol_type = other DNA
gcaatggccgggagccggacgaaattgccaaggccatggccgaggccagtcctgcaatcatggatcgtaaggcgg

SEQ ID NO: 690456 - DNA, 75 bp, synthetic construct
  source 1..75: mol_type = other DNA
ggcatgggtcaaggtggccgacgccgcaggcggtgaacttcgggggcagattgcccggacgctggccagcgagta

SEQ ID NO: 690457 - DNA, 75 bp, synthetic construct
  source 1..75: mol_type = other DNA
gatggtgcttcacgccattcttcaaaaagaagatgtaacccatgtaacagtaattgaaaaagaacaggacgttat

SEQ ID NO: 690458 - DNA, 75 bp, synthetic construct
  source 1..75: mol_type = other DNA
gccagcgttacaaaaacggatcaaaaagcgttaccagaggaagagaaagaggaagagaaagaggaagatataaat

SEQ ID NO: 690459 - DNA, 75 bp, synthetic construct
  source 1..75: mol_type = other DNA
tcgcgccgaaaggtgttcggcctgcgacgttgctccgacaggttaacaccgtctcgttgccggacagtgcgatcc

SEQ ID NO: 690460 - DNA, 75 bp, synthetic construct
  source 1..75: mol_type = other DNA
tgaaggcgtcattttcggcggtggttctttggttaaacgttatggtcgtggctttctcattcactttttcgataa

SEQ ID NO: 690461 - DNA, 75 bp, synthetic construct
  source 1..75: mol_type = other DNA
cgcagttcaggtactggctgaaatgccgggttatcgcgtgctggtggttggtgatatggccgagctgggtgctga

SEQ ID NO: 690462 - DNA, 75 bp, synthetic construct
  source 1..75: mol_type = other DNA
atgattagcgtaacccttagccaacttaccgatattctcaacggtgaactgcaaggtgcagatatcacccttgat

SEQ ID NO: 690463 - DNA, 75 bp, synthetic construct
  source 1..75: mol_type = other DNA
actgacagccaaaacgccgaggaactggctgaaaactgggcgcgtattagcgagcatttcgacacactatttacc

SEQ ID NO: 690464 - DNA, 75 bp, synthetic construct
  source 1..75: mol_type = other DNA
gtgaagaattaaagaatcatatccaatccgcccagcaaacccaactgcaccttgcagacgcactcactgacgcgg

SEQ ID NO: 690465 - DNA, 75 bp, synthetic construct
  source 1..75: mol_type = other DNA
atggaataaacccggagaattttacttccaaaaagcattacatagagttcgtactttttgcaatattccaacaaa

SEQ ID NO: 690466 - DNA, 75 bp, synthetic construct
  source 1..75: mol_type = other DNA
aacctcatgagttagctttttggtcgttagaaaaaaacgatattctaattgttgaaggtaatggtagtgctgatg

SEQ ID NO: 690467 - DNA, 75 bp, synthetic construct
  source 1..75: mol_type = other DNA
tcatgggacttttaatcccacttccaccactgaatcagcaaataacaatcatcgataaattagatgaaacacaca

SEQ ID NO: 690468 - DNA, 75 bp, synthetic construct
  source 1..75: mol_type = other DNA
ttacagcaccgtgaaaaatctcataatttttatgaaatcactgtactcactatgggtaatgataaatatcaatga

SEQ ID NO: 690469 - DNA, 75 bp, synthetic construct
  source 1..75: mol_type = other DNA
aaaccgttgccgccaattagcgatgaggaaaaaccgtttgaactgccggaagggtgggagtggtgtcgattgggt

SEQ ID NO: 690470 - DNA, 75 bp, synthetic construct
  source 1..75: mol_type = other DNA
gtgctcaattattggaagaggctacttttttattatctttgtgcgaccaactggaacaacaatccctgaccagtc

SEQ ID NO: 690471 - DNA, 75 bp, synthetic construct
  source 1..75: mol_type = other DNA
acacatgaacaattaaaaataacagataaaataaatgaaatgatggattattttataactctaaagagtcaaatc

SEQ ID NO: 690472 - DNA, 75 bp, synthetic construct
  source 1..75: mol_type = other DNA
cggaggaggaactccaaagtccgataatccgcaattttgggccaaaaatggtattaagtggattactccagcaga

SEQ ID NO: 690473 - DNA, 75 bp, synthetic construct
  source 1..75: mol_type = other DNA
gatgattattcttactcgctctgaatcatttaaagaaaaactggagtgttttaaatctagattggcatctttaaa

SEQ ID NO: 690474 - DNA, 75 bp, synthetic construct
  source 1..75: mol_type = other DNA
gaaagcatccgccagaatgcagcccagcgcgtgatgtctgatgtcaccattacggcacgcgatatgaacaacgcc

SEQ ID NO: 690475 - DNA, 75 bp, synthetic construct
  source 1..75: mol_type = other DNA
gtatggttgcgcgttcgactttttcaatatctccggttcagtgtttgtcgagcaagaagtggactccaggatccg

SEQ ID NO: 690476 - DNA, 75 bp, synthetic construct
  source 1..75: mol_type = other DNA
catgttattaggtgcggtactacaaattactaacgtttttggtaatcctttcctgcatgattttgcccgcaatcc

SEQ ID NO: 690477 - DNA, 75 bp, synthetic construct
  source 1..75: mol_type = other DNA
ttgatgcgtatcttgagcgacaagctgaactgaatcacatcaacaagtcccacgtaacaaagtcgttcagcattg

SEQ ID NO: 690478 - DNA, 75 bp, synthetic construct
  source 1..75: mol_type = other DNA
ataccagttatgacggcacaaaacgccgtaacccgaataacgtggttgatctgaaaaaccgcaaatatcagtgcg

SEQ ID NO: 690479 - DNA, 75 bp, synthetic construct
  source 1..75: mol_type = other DNA
tcggcacaccctgattttcagtcccgcatcagcgcacagattgcccgacaggtggcgcttgaccgcatcatgatc

SEQ ID NO: 690480 - DNA, 75 bp, synthetic construct
  source 1..75: mol_type = other DNA
cagcaatttccgctctatttagcgggtgaacgtcatgagcattacggtatcccccatggctttagttcgcgtgtt

SEQ ID NO: 690481 - DNA, 75 bp, synthetic construct
  source 1..75: mol_type = other DNA
gttcaacactggctgaacccgcttccgatattaaaacttgcgatcattaccagcaatttccgctctatttagcag

SEQ ID NO: 690482 - DNA, 75 bp, synthetic construct
  source 1..75: mol_type = other DNA
gactcgtttatggtggcgaaggcatttgggaaacgtcctgacaacgtcattcgtgatatcgaaaagactattaag

SEQ ID NO: 690483 - DNA, 75 bp, synthetic construct
  source 1..75: mol_type = other DNA
caatccgtgtttatggcaccgtgggatttattgtcgcaatgtggctggtgagtttattgcatctggagttaagca

SEQ ID NO: 690484 - DNA, 75 bp, synthetic construct
  source 1..75: mol_type = other DNA
tttcacaaatggcagaagttggcttcattcttaccattccattcttcctgaaacgttttggtataaaaaccgtca

SEQ ID NO: 690485 - DNA, 75 bp, synthetic construct
  source 1..75: mol_type = other DNA
aggggaggtgattgctgcagcgggtgcagaaaaggccggggcactttatgaatcatcaggggcatccaaccgctc

SEQ ID NO: 690486 - DNA, 75 bp, synthetic construct
  source 1..75: mol_type = other DNA
agaagaggggttatggcgtgaacgccgtcgtaaaattgccccgtatatatcaacgccgcatgcgacgaccatctt

SEQ ID NO: 690487 - DNA, 75 bp, synthetic construct
  source 1..75: mol_type = other DNA
ggaatgtctcgggaagacgttgcagagatgacaaatttatctcttgctgagattgataaggtaattaaccttatt

SEQ ID NO: 690488 - DNA, 75 bp, synthetic construct
  source 1..75: mol_type = other DNA
acctcaacacgcttcatttagagtcggggagtttcattgaagagagcctgaaaggacacagcacggacgtgctct

SEQ ID NO: 690489 - DNA, 75 bp, synthetic construct
  source 1..75: mol_type = other DNA
tgttttatggtgtgctgagagacagggaaacgggaggggagtctatgatgacgctggcgcagtggtttgaagaga

SEQ ID NO: 690490 - DNA, 75 bp, synthetic construct
  source 1..75: mol_type = other DNA
gttagaaatagtttctatatgttaaggttgcgctatgtgcctatgggatataaattccgcgaaattttctttaat

SEQ ID NO: 690491 - DNA, 75 bp, synthetic construct
  source 1..75: mol_type = other DNA
gattttcatcttattcaatttaatgagaattatggtctcgcatatgcacaaaataaaggcatagaatatgctatg

SEQ ID NO: 690492 - DNA, 75 bp, synthetic construct
  source 1..75: mol_type = other DNA
ttcgcccagcgtcttctgagtaaaggaatgtctcgggaagacgttgcagagatggcaaatttacctcttgctgag

SEQ ID NO: 690493 - DNA, 75 bp, synthetic construct
  source 1..75: mol_type = other DNA
gagacgatgaagctcatcactccgcagccgcgttcggggtattttgtcgcacaacgtaaagcccagccgccagtg

SEQ ID NO: 690494 - DNA, 75 bp, synthetic construct
  source 1..75: mol_type = other DNA
gaaaaacggaaagcaacaagttcgaaccaacaatattgggttgttgcactattgcgtgaactagaagaggagggg

SEQ ID NO: 690495 - DNA, 75 bp, synthetic construct
  source 1..75: mol_type = other DNA
gcccggtggaaattacccagtgggatcaggtactggatatgctggaggcgcatagcgacagttccattgttccgt

SEQ ID NO: 690496 - DNA, 75 bp, synthetic construct
  source 1..75: mol_type = other DNA
aactatatgctgcaacgcggtcatactgaacaagcggatttgttttatggtgtgctgagagacagggaaacggga

SEQ ID NO: 690497 - DNA, 75 bp, synthetic construct
  source 1..75: mol_type = other DNA
ttgccatgcaaaactatatgctgcaacgcggtcatactgtaagcgtaaagccaatgccgtctgtaacacctgctc

SEQ ID NO: 690498 - DNA, 75 bp, synthetic construct
  source 1..75: mol_type = other DNA
ggctgccataactcgatgtcgctagcgttaatggcggtgtgtaaaccgggcgatattgtcgcggtcgaatccccc

SEQ ID NO: 690499 - DNA, 75 bp, synthetic construct
  source 1..75: mol_type = other DNA
tgctgaaaaagccgaagaaacaagtaatcgcgttatcaacggtgttgtcgaactgccaaaagatcaggccgttct

SEQ ID NO: 690500 - DNA, 75 bp, synthetic construct
  source 1..75: mol_type = other DNA
ttaccatcaagcctggccgataaagattatttctcgtatcagaaacggattttaaacactcttatttcacagggt

SEQ ID NO: 690501 - DNA, 75 bp, synthetic construct
  source 1..75: mol_type = other DNA
cggagtattaacacacccgaaaataatattaacgcctttctttctgaaacagatcgcctttattcagggatgttt

SEQ ID NO: 690502 - DNA, 75 bp, synthetic construct
  source 1..75: mol_type = other DNA
tgagttatatgagaaattaaaggaagaaactcctaagtacaatattgattttctatctccagaagcattgcaacc

SEQ ID NO: 690503 - DNA, 75 bp, synthetic construct
  source 1..75: mol_type = other DNA
tttatgactatgagcgagtatctggacgcgagccagtcggacatggcgcggaccggaaacgacaaagagatgtat

SEQ ID NO: 690504 - DNA, 75 bp, synthetic construct
  source 1..75: mol_type = other DNA
aaagcgaagctgtcgctgggggaagattatctcaattccgatattttcgacggctttaactatatcggcagcagc

SEQ ID NO: 690505 - DNA, 75 bp, synthetic construct
  source 1..75: mol_type = other DNA
cccgcgccagtttatggttgacttgtgaattatatgaaatgattaagataaacggttatgaaaatacccttacct

SEQ ID NO: 690506 - DNA, 75 bp, synthetic construct
  source 1..75: mol_type = other DNA
ggagccatctggagagcgtcattcgcctgcagaaaaaaccggtgctgattgtgccggagacgttcatgccgccgg

SEQ ID NO: 690507 - DNA, 75 bp, synthetic construct
  source 1..75: mol_type = other DNA
cgcatcaccaagttctgaagtcggtcgcttctttgaaacccagtcatcaaaaggcgggcgttacactgtcacgct

SEQ ID NO: 690508 - DNA, 75 bp, synthetic construct
  source 1..75: mol_type = other DNA
agcggcgaaagcaaaaggcgcatactctttctacatcgttcgccaaatcgatgccaaccagggcggtaaccaacg

SEQ ID NO: 690509 - DNA, 75 bp, synthetic construct
  source 1..75: mol_type = other DNA
agattctgtcgagttgttcattagaaagtttaagagcgcctggtctactcaaaaaataggaataaaaataaagaa

SEQ ID NO: 690510 - DNA, 75 bp, synthetic construct
  source 1..75: mol_type = other DNA
tattcgcggcacgatcgatggcgataaattcgttacggaaacgcttaaattaaccattcccgaagagaaattagc

SEQ ID NO: 690511 - DNA, 75 bp, synthetic construct
  source 1..75: mol_type = other DNA
gtccggaagatattcatccggacgcgcaagaggaaaataacatttccgccaaaattagcgtggcagaattaaccg

SEQ ID NO: 690512 - DNA, 75 bp, synthetic construct
  source 1..75: mol_type = other DNA
ccggcgctcattttgtctgcatggatgattttcttcgcccgtcccctttcggtatttgccggattgctaccgttc

SEQ ID NO: 690513 - DNA, 75 bp, synthetic construct
  source 1..75: mol_type = other DNA
cctatgagaaatggtacatcgatgaaaaatcgcaggatcagctttatgtaatgggcaaggcgttgattcatgagt

SEQ ID NO: 690514 - DNA, 75 bp, synthetic construct
  source 1..75: mol_type = other DNA
taagactttccatgttaaacgtctacaaatgcaaggcaacaaactagctgttctttcggataaccccgcctatga

SEQ ID NO: 690515 - DNA, 75 bp, synthetic construct
  source 1..75: mol_type = other DNA
aactcgttccgcgtgagctatgccaaagactttgacgaactggacagccgcgtcaccttcgccggataccgcttc

SEQ ID NO: 690516 - DNA, 75 bp, synthetic construct
  source 1..75: mol_type = other DNA
tcagtgggcaaaaagcgatggcggtgctccgcctcgctgatggcagccatccgccgtttggggccgaagtgaata

SEQ ID NO: 690517 - DNA, 75 bp, synthetic construct
  source 1..75: mol_type = other DNA
aggtgcaggaatatgacatcagcaccgcctcgatgccgttcctgacccgtcagggccaggtgcgatataaagtga

SEQ ID NO: 690518 - DNA, 75 bp, synthetic construct
  source 1..75: mol_type = other DNA
ctagcgtatgtgatgtgagtaatcttctacctatggtagaagaacagaagtatccagatttcgccaagagactaa

SEQ ID NO: 690519 - DNA, 75 bp, synthetic construct
  source 1..75: mol_type = other DNA
ccatcatgccgctggtgggtctatctccggcactggctcctctgttaggaagctggctgctggtccatttttcct

SEQ ID NO: 690520 - DNA, 75 bp, synthetic construct
  source 1..75: mol_type = other DNA
agtaagcggtaatacatcccttataacggccaaagctgaacaacagggcgagtggacctactatgaggccactta

SEQ ID NO: 690521 - DNA, 75 bp, synthetic construct
  source 1..75: mol_type = other DNA
ttgaaccgggtaaatacagtttacaggttgaggtgaataaacagccattacccggtgaatatgatatttactggt

SEQ ID NO: 690522 - DNA, 75 bp, synthetic construct
  source 1..75: mol_type = other DNA
aatgcctgggctgatgaagatattcagtttgattcccgttttctggaattaaaaggcgacacgaaaatcgatcta

SEQ ID NO: 690523 - DNA, 75 bp, synthetic construct
  source 1..75: mol_type = other DNA
cggttttaactacatcggcggtagcatcagcaccgacgatcaaatgttgccgccgaacctgcgcggctatgctcc

SEQ ID NO: 690524 - DNA, 75 bp, synthetic construct
  source 1..75: mol_type = other DNA
accggactggcggcgaaggtactggcaaccatccaggcgaacccgaaattcttccaggaactggcggcgcactaa

SEQ ID NO: 690525 - DNA, 75 bp, synthetic construct
  source 1..75: mol_type = other DNA
aatgcgccgtagttcctcacaccacggcgctgatagtttttatcctttgggttctatgccgcgttgctgtaattc

SEQ ID NO: 690526 - DNA, 75 bp, synthetic construct
  source 1..75: mol_type = other DNA
agtcatatcgtacaccacatggaaggcattatgtattcaaagatttaaacgttgaatttcccgagggaaaaagtg

SEQ ID NO: 690527 - DNA, 75 bp, synthetic construct
  source 1..75: mol_type = other DNA
gctattggctaccgtaaatttgcggtgatcagtggtgagaaggcgatggcagtgctgcgcttgcaggatggcagc

SEQ ID NO: 690528 - DNA, 75 bp, synthetic construct
  source 1..75: mol_type = other DNA
gtgttcccgatgatggcggggctggagaatgcgcgtctgttctttaatgtcgccttctttgtggttctggtttca

SEQ ID NO: 690529 - DNA, 75 bp, synthetic construct
  source 1..75: mol_type = other DNA
ctgctattgcagggaacatcgctctcgtgggcagcgaaaaaagccaaagtggtggttccgccagtggggcgtccg

SEQ ID NO: 690530 - DNA, 75 bp, synthetic construct
  source 1..75: mol_type = other DNA
cgttgccataactgcgaagttctctcctttgatgagtattctttaaggtacttctcaagggcaaaagaacacggc

SEQ ID NO: 690531 - DNA, 75 bp, synthetic construct
  source 1..75: mol_type = other DNA
ggctattgtgcttaaaaataataatgtggttgatttctatgataatgtgcaggctggtatagatgagtataaaaa

SEQ ID NO: 690532 - DNA, 75 bp, synthetic construct
  source 1..75: mol_type = other DNA
ggcgattgtgtttaaggatgacaatgcggttagttttcatgaggatgttcaggagggggtagatgagtatcggaa

SEQ ID NO: 690533 - DNA, 75 bp, synthetic construct
  source 1..75: mol_type = other DNA
atggtttactattttgatgatgttgattatgcgattaaacaatatttgattgatgaaaaaataaatccacggtca

SEQ ID NO: 690534 - DNA, 75 bp, synthetic construct
  source 1..75: mol_type = other DNA
atacgataaaagtgccgacaagggggtttatctgtccttaagtttgccgtggggcgacaacagcaccatcagtta

SEQ ID NO: 690535 - DNA, 75 bp, synthetic construct
  source 1..75: mol_type = other DNA
ccagacccgttaccgaatgacctgttcaatggcttgttgttgccatgccagcaaaagggggggaagttctcccgt

SEQ ID NO: 690536 - DNA, 75 bp, synthetic construct
  source 1..75: mol_type = other DNA
atgccagaacattcttttctccgtttacgggggctttcgtggtggattgctctggcaatttctggaagtccattt

SEQ ID NO: 690537 - DNA, 75 bp, synthetic construct
  source 1..75: mol_type = other DNA
ccggtagagcttgggtcaaagctgttcctgtctgacaagaagattaagaaaggcagcctcaagggatttaccgtt

SEQ ID NO: 690538 - DNA, 75 bp, synthetic construct
  source 1..75: mol_type = other DNA
ctgcaatggaaaagttcaaggttaaggaccgatttcgcgaagcagcagagcatgacggctactttggcggcggac

SEQ ID NO: 690539 - DNA, 75 bp, synthetic construct
  source 1..75: mol_type = other DNA
cggttcacgccagccgcatgattgatctgatctcccgtccggttccggacatgctgaagccggcctacaactttg

SEQ ID NO: 690540 - DNA, 75 bp, synthetic construct
  source 1..75: mol_type = other DNA
gctgaccatgccaacattaacgccaacaccgcactgatgaacggcgtcaaactttctggtgccgtgactgaaaac

SEQ ID NO: 690541 - DNA, 75 bp, synthetic construct
  source 1..75: mol_type = other DNA
tggcactcataatttcagcaacatccagcccttttgttttagctggtgataccattgaagcggcggcaacagagc

SEQ ID NO: 690542 - DNA, 75 bp, synthetic construct
  source 1..75: mol_type = other DNA
ccgccattcagaacgcacagcacacagccaactgggcatcgctgaaagctgatgacgcgcagcacgccattatgg

SEQ ID NO: 690543 - DNA, 75 bp, synthetic construct
  source 1..75: mol_type = other DNA
agtttagcgctgcctttgcgctgtttgttctggttgtgatgacaattggagcagtatttatgcgctatttcatcg

SEQ ID NO: 690544 - DNA, 75 bp, synthetic construct
  source 1..75: mol_type = other DNA
ccggttgttcaacgaaagtgcagatcaagccgaacgaaaattatcaggaaaaccagctggcactttgcccggtca

SEQ ID NO: 690545 - DNA, 75 bp, synthetic construct
  source 1..75: mol_type = other DNA
cagggggatctggcgctggctgaatttattcagtcagcctgggaaacgacaaagaatgtgcccggcgttggtgcg

SEQ ID NO: 690546 - DNA, 75 bp, synthetic construct
  source 1..75: mol_type = other DNA
gaagaagagtacgaaaacgagtccatcgaagaaggattcgaagacccggaaaacccttcgtccagtcagagctaa

SEQ ID NO: 690547 - DNA, 75 bp, synthetic construct
  source 1..75: mol_type = other DNA
gtcttcccaccatgatcggggaagacccatataaaaacagtgttaatggaggcgtcatgaactacgagattaagc

SEQ ID NO: 690548 - DNA, 75 bp, synthetic construct
  source 1..75: mol_type = other DNA
ctacgagattaagcaggaagataaacgtaccgttgcaggtttccatctcgttggcccgtgggaacagacggtaaa

SEQ ID NO: 690549 - DNA, 75 bp, synthetic construct
  source 1..75: mol_type = other DNA
tggctgttgttgttgctaccgcggtaagtccatctgcgtttgcgggtgatactgttgaggcagcagcgacagaat

SEQ ID NO: 690550 - DNA, 75 bp, synthetic construct
  source 1..75: mol_type = other DNA
ctggaaaccagtatcgagggagcggtgacggccctcacggtagttgatgagactgcggcgctggttgtccgaatt

SEQ ID NO: 690551 - DNA, 75 bp, synthetic construct
  source 1..75: mol_type = other DNA
cgcaacaatcacagtctgaagcccaacaaacgcagattacagagcaacagaagcagatcgcagccacagaaaaaa

SEQ ID NO: 690552 - DNA, 75 bp, synthetic construct
  source 1..75: mol_type = other DNA
cgcgacgcaaaaaacggtttccgcacttggcgatgcccagaccaacgcacattatcaagagatggttaacgccgg

SEQ ID NO: 690553 - DNA, 75 bp, synthetic construct
  source 1..75: mol_type = other DNA
accggagaaaccagcagagcctgccgcaccggcaaccggtgatgcgaccaggataaagaaaaatatgcgacgggc

SEQ ID NO: 690554 - DNA, 75 bp, synthetic construct
  source 1..75: mol_type = other DNA
tcaccggagacggaataccagcgccggcgttacaccctgacgcttcagaatggccggagtggggaacgggtggaa

SEQ ID NO: 690555 - DNA, 75 bp, synthetic construct
  source 1..75: mol_type = other DNA
gacatgggcaccgcggttctcaaaaagccggtaagaatcggaacggaaattaatcccactcctttttccatcggc

SEQ ID NO: 690556 - DNA, 75 bp, synthetic construct
  source 1..75: mol_type = other DNA
gcacatgcccagtcaacggctgaccatgccaacgctaacgccaacaccgctctgattaacggcgtcaaactgtcc

SEQ ID NO: 690557 - DNA, 75 bp, synthetic construct
  source 1..75: mol_type = other DNA
cagtacggggaacaaattcagcgtctggcgcaagactcaacacaaacgcatgaacaaattgacagcctgacacaa

SEQ ID NO: 690558 - DNA, 75 bp, synthetic construct
  source 1..75: mol_type = other DNA
ctgtaggaacatcttttaatgccggaacgcatacggtacttaaagcaggtatttctgcggatacacaatctgatt

SEQ ID NO: 690559 - DNA, 75 bp, synthetic construct
  source 1..75: mol_type = other DNA
ttaacggcgtcaaactttccggtgctgtgacagaaaacaaaaataatatcgaacagaaccgcagcgatattgctg

SEQ ID NO: 690560 - DNA, 75 bp, synthetic construct
  source 1..75: mol_type = other DNA
aaacgtgttgcagataacagccagcaaatcaattcgctcaataacaacttcagttcgttgaaacacgaagtggaa

SEQ ID NO: 690561 - DNA, 75 bp, synthetic construct
  source 1..75: mol_type = other DNA
cagacagccactgctgatgcgcaacaatcacagtctgaagcccaacaaacgcagattacagagcaacagaagcag

SEQ ID NO: 690562 - DNA, 75 bp, synthetic construct
  source 1..75: mol_type = other DNA
tcagcgatgaagccggtggtggtatcagacaggcggcagaaaatctggcccgtctggcagaaagcgggaaatata

SEQ ID NO: 690563 - DNA, 75 bp, synthetic construct
  source 1..75: mol_type = other DNA
acaaaggttttttttggggatgcagtaagtatcctgattgtcggaatgctgttccagacagaggcggcgtgcctg

SEQ ID NO: 690564 - DNA, 75 bp, synthetic construct
  source 1..75: mol_type = other DNA
ttgaaaactcctgaatataaaagctggtctaaaaatacattaccactgcaattacgaccgttgcaatatatcgtt

SEQ ID NO: 690565 - DNA, 75 bp, synthetic construct
  source 1..75: mol_type = other DNA
aaagtggttcctacagagttaggcttatcgtttattcatgctttaccggaggtcatgacgcgaccagatatgacg

SEQ ID NO: 690566 - DNA, 75 bp, synthetic construct
  source 1..75: mol_type = other DNA
gcgttacacaaagcgttgggcgtgggaaaagacttctctacatggatcactgatcgcatctctgaatatgacttc

SEQ ID NO: 690567 - DNA, 75 bp, synthetic construct
  source 1..75: mol_type = other DNA
actacattaatgttagaagccttgtacggtgcgggggctaatatattaggatatgttactccggggagtttatac

SEQ ID NO: 690568 - DNA, 75 bp, synthetic construct
  source 1..75: mol_type = other DNA
taaacgaatatgaaagcattcaagatctcaaaggatgcgaagatgatgccatatctatgtcagaagtgttaagcc

SEQ ID NO: 690569 - DNA, 75 bp, synthetic construct
  source 1..75: mol_type = other DNA
cagcaatagagattgaatcatttgagatggcctataaaactcagccagaagagaagcacgaatttacatcatatt

SEQ ID NO: 690570 - DNA, 75 bp, synthetic construct
  source 1..75: mol_type = other DNA
gctttgccgctcagcgaaacctatcgcgaagcactaaagcaaattggcgaggccgtgtatcaggcaatggaatga

SEQ ID NO: 690571 - DNA, 75 bp, synthetic construct
  source 1..75: mol_type = other DNA
ccgttattacgcctggcgagccttgccctctttaaaagcgaagctgtcgctgggggaagattatctcaattccga

SEQ ID NO: 690572 - DNA, 75 bp, synthetic construct
  source 1..75: mol_type = other DNA
catcaggcatctgctgttaatgcattcgttacggttagtcaggggatcagggcaagattacgaaagcccgctccc

SEQ ID NO: 690573 - DNA, 75 bp, synthetic construct
  source 1..75: mol_type = other DNA
tcgcttattcagaagcacaaaaccggattgcgtgaactgggtatccttccgtttcaaacggagcgattaaaaacc

SEQ ID NO: 690574 - DNA, 75 bp, synthetic construct
  source 1..75: mol_type = other DNA
tcctcgacgttcagcatctcggtattggtggtaaggacgatcctgcccgcctgatcttcaatacccaaaccggcc

SEQ ID NO: 690575 - DNA, 75 bp, synthetic construct
  source 1..75: mol_type = other DNA
aagaactggcgatggtcgaacgcaccgaacagggccgcgccgttcgccagtacttcatcaaatgcgaggaggagc

SEQ ID NO: 690576 - DNA, 75 bp, synthetic construct
  source 1..75: mol_type = other DNA
atgagcgctataaccaaagaacgtatcaaattattcattaaaaatccgcttgataacggacttactcgtggtgaa

SEQ ID NO: 690577 - DNA, 75 bp, synthetic construct
  source 1..75: mol_type = other DNA
gtatttggcaagtcgttaattgaacaacctctaatgcgtcatgtcttaagtcgcatggcgctccagcttgaagga

SEQ ID NO: 690578 - DNA, 75 bp, synthetic construct
  source 1..75: mol_type = other DNA
ggaacggctgaatcccttgaactggggcggctggcaaatgtgaatccgcctgaattgttgcgctatgacgcgcag

SEQ ID NO: 690579 - DNA, 75 bp, synthetic construct
  source 1..75: mol_type = other DNA
tgcttaaacaggccatggtgggcattgtcgggcgtatcggcagcgccattggtggggttgttggaggtggtgtaa

SEQ ID NO: 690580 - DNA, 75 bp, synthetic construct
  source 1..75: mol_type = other DNA
gcgttgtgaccggaacgctgaaaatttactactgccacgcgcatcagataacctcgtcattacaggaaatggcgg

SEQ ID NO: 690581 - DNA, 75 bp, synthetic construct
  source 1..75: mol_type = other DNA
gagtcattacgcaaagtttgtgaaattattcgcgatgatattcacgccgatgcggtggcgatgactaatactgat

SEQ ID NO: 690582 - DNA, 75 bp, synthetic construct
  source 1..75: mol_type = other DNA
gaaaatgggtgggatgacgcgttttgattgcgccctgggtagccatgccatgatgcgccgtgcattttcgctggc

SEQ ID NO: 690583 - DNA, 75 bp, synthetic construct
  source 1..75: mol_type = other DNA
ctttttgcctgacgggcaacgcaacgcgattcgcctcgagcggctgaaagataagctgggtaatcgctctaacgc

SEQ ID NO: 690584 - DNA, 75 bp, synthetic construct
  source 1..75: mol_type = other DNA
ctcgctccggcgcatttgtggcgcgcgcggcgcgttttatgttgcacgcacaggttgaggcagggtcgttatgtc

SEQ ID NO: 690585 - DNA, 75 bp, synthetic construct
  source 1..75: mol_type = other DNA
cgctgttgagcgatcgctacgattcccatttgctgccaggcgggcaaaaacgcggtctgttgattggcatgggaa

SEQ ID NO: 690586 - DNA, 75 bp, synthetic construct
  source 1..75: mol_type = other DNA
cagctattcctgctgggctgcggtgcgcaaatgttgaaatatgcctctccgccaatggcgcaggcgtggtgtcag

SEQ ID NO: 690587 - DNA, 75 bp, synthetic construct
  source 1..75: mol_type = other DNA
agcgggcgtatacgacttattgtcggaagcatttgtggaagtgaaagggcaggatcgctattttgatcgcgcggt

SEQ ID NO: 690588 - DNA, 75 bp, synthetic construct
  source 1..75: mol_type = other DNA
cactgggcctggtggatatccgggtgccggaccatctgatagtcggtggcaaccaggttttctcctttgccgaac

SEQ ID NO: 690589 - DNA, 75 bp, synthetic construct
  source 1..75: mol_type = other DNA
tgattgcgccggtaactgatgaccaggcagcgtccggcgaagaaggtaatgaacccgctgaacccgctactgcgg

SEQ ID NO: 690590 - DNA, 75 bp, synthetic construct
  source 1..75: mol_type = other DNA
aaagtaacggcagcagcgtcacattgttccagctgtcggcgctgcagcgtattgaatacctcgaatacctgaaac

SEQ ID NO: 690591 - DNA, 75 bp, synthetic construct
  source 1..75: mol_type = other DNA
agtccaggttgtcatgtccgatatggcaccaaacatgagtggaacaccggcggtggatatcccccgtgccatgta

SEQ ID NO: 690592 - DNA, 75 bp, synthetic construct
  source 1..75: mol_type = other DNA
atgaaatggtttacaccggaacacgtcgtagaggcatttaaaaaagatgagctaacacgacatcaagtagtaatg

SEQ ID NO: 690593 - DNA, 75 bp, synthetic construct
  source 1..75: mol_type = other DNA
gctacccagagcgtgaaaaatgctttgacgacgcactaaaaattattgatgaactgcgtaaggcagaagcagaga

SEQ ID NO: 690594 - DNA, 75 bp, synthetic construct
  source 1..75: mol_type = other DNA
cggaacggtcgctgcaagcctggtttttcagacatcggaccgtagcggcagcccgaaaccgcgccagcgggttcg

SEQ ID NO: 690595 - DNA, 75 bp, synthetic construct
  source 1..75: mol_type = other DNA
ggtcattccgatgctgttttatcacggcagtcgtagtccttacccctggtctttgtgctggctggacgaatttgc

SEQ ID NO: 690596 - DNA, 75 bp, synthetic construct
  source 1..75: mol_type = other DNA
tatatctatgtggtgattgaacatcagagccgcgaggatattcatatggcctttcgcctgatgcgatattccatg

SEQ ID NO: 690597 - DNA, 75 bp, synthetic construct
  source 1..75: mol_type = other DNA
gcgcagtttcctcacacaccgtcaggtgtgcagggagcgcaggtcacggcgcgacaggggcagcgcgaccggaac

SEQ ID NO: 690598 - DNA, 75 bp, synthetic construct
  source 1..75: mol_type = other DNA
tgtggccggtgcatctcaccctggacagatggaacgggagggggttacgtctgccccccggaaagtccacagcgg

SEQ ID NO: 690599 - DNA, 75 bp, synthetic construct
  source 1..75: mol_type = other DNA
gtgccccttcagaggagcgaaagctcctcctgccgtccacttcacagggttttctccccgcagtggacctttccg

SEQ ID NO: 690600 - DNA, 75 bp, synthetic construct
  source 1..75: mol_type = other DNA
tgtcgtgatgtattagcgccaggtggcagttttgtagtgaaggtgttccaaggcgaaggtttcgatgagtatcta

SEQ ID NO: 690601 - DNA, 75 bp, synthetic construct
  source 1..75: mol_type = other DNA
cacgctgcatcttgagtcggggagttttattgaagaaagcctgaaagggcacagcactgacgtgctttattccgt

SEQ ID NO: 690602 - DNA, 75 bp, synthetic construct
  source 1..75: mol_type = other DNA
gtggtttataacggtaatctggtctcttacgatagcgttccagtggcggattttaataatccattaaagatctcc

SEQ ID NO: 690603 - DNA, 75 bp, synthetic construct
  source 1..75: mol_type = other DNA
aagtattcctgaatcagaaatctggagtgaacatcctgatcgaaacaaacacggtgttgttcttgtggccgaatc

SEQ ID NO: 690604 - DNA, 75 bp, synthetic construct
  source 1..75: mol_type = other DNA
aaaaagaaatggaagcatctattcacaaaaatcagaaatcctgttttacactggatacaaaccgttgtgttaaat

SEQ ID NO: 690605 - DNA, 75 bp, synthetic construct
  source 1..75: mol_type = other DNA
cgccatcaaggcggctgctaatgaaataggcatctggaagttgctggtggagaaagcaaagacgaagttaaatgc

SEQ ID NO: 690606 - DNA, 75 bp, synthetic construct
  source 1..75: mol_type = other DNA
gtaagacaggaatacgccctgcgttttctgagtaaagggatgtctcgggaagacgttgcagagatggcaaattta

SEQ ID NO: 690607 - DNA, 75 bp, synthetic construct
  source 1..75: mol_type = other DNA
tgaaaatcagcgaatgcagttacttgctcatgccgataatgtcacagctgactggcgagtggaattaatgcttgg

SEQ ID NO: 690608 - DNA, 75 bp, synthetic construct
  source 1..75: mol_type = other DNA
actgttaaagcacaattgatcggtctggttgctctggcttctatgatgccggaaccgagtaaggtagaagaatcg

SEQ ID NO: 690609 - DNA, 75 bp, synthetic construct
  source 1..75: mol_type = other DNA
atgaatctgaatgaaatgctgaaagctctttctccgaaacgtgaatctttaaccctcggaggatttacgttctat

SEQ ID NO: 690610 - DNA, 75 bp, synthetic construct
  source 1..75: mol_type = other DNA
atggctgtcattccaatgtcttactcccctgctactgtagctcgtcgtttttcgatactggatggagtaactatt

SEQ ID NO: 690611 - DNA, 75 bp, synthetic construct
  source 1..75: mol_type = other DNA
tatggagtgaacatccggatcgaagtaagcatggggttgttcttgtcgcagaatccataactggaaaggcggcat

SEQ ID NO: 690612 - DNA, 75 bp, synthetic construct
  source 1..75: mol_type = other DNA
acaaacttcaccataaataaggaaggatgggattccgacctgaaaagcccaaatacttcgggagctatgcctccc

SEQ ID NO: 690613 - DNA, 75 bp, synthetic construct
  source 1..75: mol_type = other DNA
tatatttatgtggtgattgaacatcagagccgcgaggatatccatatggcctttcgcctgatgcgatattccatg

SEQ ID NO: 690614 - DNA, 75 bp, synthetic construct
  source 1..75: mol_type = other DNA
gccaataaactccaaagtcgtcgtctcgaactacttcatgaaaactttcgggagccaccagaaaaatggcggcgc

SEQ ID NO: 690615 - DNA, 75 bp, synthetic construct
  source 1..75: mol_type = other DNA
taaatatactagagaactgatttgggaagccgttcgagttgaatattacccaaaaaagccttcaagacagaaatg

SEQ ID NO: 690616 - DNA, 75 bp, synthetic construct
  source 1..75: mol_type = other DNA
tgccatttatatatgtaaaaagcggtttcaggaacgctgaatatatcggcataagaaactggcttgctggcattc

SEQ ID NO: 690617 - DNA, 75 bp, synthetic construct
  source 1..75: mol_type = other DNA
cctgcaatgggggccggatgcggtcaggtgccgtttgaaagtgttgcccggcagatgaagcaggcgtgggataac

SEQ ID NO: 690618 - DNA, 75 bp, synthetic construct
  source 1..75: mol_type = other DNA
agccagccagccagccagccagccagccagccagccagccagccagccagccagccaggtgtgaatgtggatttt

SEQ ID NO: 690619 - DNA, 75 bp, synthetic construct
  source 1..75: mol_type = other DNA
acaatcagaaacatgcaaacataaaatcgatgagatttatgaaaaaagattctcagaaacagaactaaatacatt

SEQ ID NO: 690620 - DNA, 75 bp, synthetic construct
  source 1..75: mol_type = other DNA
tctggtttatgttaatagtgtgtctgaccctattaatattcacctatctaactcgcaattcactttgtaacatcc

SEQ ID NO: 690621 - DNA, 75 bp, synthetic construct
  source 1..75: mol_type = other DNA
gcgcactttcgcaggccaagcgtcaggggctgaaagtccccgaagacctttctataattggtttcgataacatag

SEQ ID NO: 690622 - DNA, 75 bp, synthetic construct
  source 1..75: mol_type = other DNA
attaaccggtgcggaatttatgctctacaccacggttggggggcacgagttagtggtccgtgctggtgcgttaaa

SEQ ID NO: 690623 - DNA, 75 bp, synthetic construct
  source 1..75: mol_type = other DNA
gaaagtcgactggcccgcccattcggcgatgagcagccacgacgcgctgatggtggcaagcggcatcaccaccgt

SEQ ID NO: 690624 - DNA, 75 bp, synthetic construct
  source 1..75: mol_type = other DNA
tgattgcccgtccatccattattgtcggccacacccatttagggtgcttaccttcaaccagtattttctgggtgt

SEQ ID NO: 690625 - DNA, 75 bp, synthetic construct
  source 1..75: mol_type = other DNA
gatgctttcatggcgcaagtaaaggcatttcgggcttcggtgaatgccgaaacagtggcacctgaatttatagtg

SEQ ID NO: 690626 - DNA, 75 bp, synthetic construct
  source 1..75: mol_type = other DNA
tgatattcttcgctcgtcctctttcggtatttgccggattgctaccgttccgcggttttaatctacgtgagcgcg

SEQ ID NO: 690627 - DNA, 75 bp, synthetic construct
  source 1..75: mol_type = other DNA
atcgacgctggaagtttttcatcaggagttatttttgtcattaaatggtgtgcgtcaggcaaccgatcggctgaa

SEQ ID NO: 690628 - DNA, 75 bp, synthetic construct
  source 1..75: mol_type = other DNA
aaagcgtcaacgctggagatttttcatcaggaactctttttgtcattaaatggtgtacgtcaggcgaccgactga

SEQ ID NO: 690629 - DNA, 75 bp, synthetic construct
  source 1..75: mol_type = other DNA
attcataatgatggatggctgttgggaagggagagggggaggaaagaagggaaagaagaaggggaacagagcctc

SEQ ID NO: 690630 - DNA, 75 bp, synthetic construct
  source 1..75: mol_type = other DNA
atgtcactgtcgtgccagacgacgagattgtgcagcaccgcagagtcgccctgttggagttgatccaaaagcata

SEQ ID NO: 690631 - DNA, 75 bp, synthetic construct
  source 1..75: mol_type = other DNA
ctgaatttggccacctgaacagaggtgatatgctcacctcagaacaacacaggtgctccaatgaaaaaaagaaat

SEQ ID NO: 690632 - DNA, 75 bp, synthetic construct
  source 1..75: mol_type = other DNA
ttctggctacgctaagcaacacaaccttttcctcttcattacaggatcagctctccgcagttgcagaagctgaac

SEQ ID NO: 690633 - DNA, 75 bp, synthetic construct
  source 1..75: mol_type = other DNA
ctgggggaagttattaataataattcagattttgtttattttttatttttgcttaacaaacacatttggcgcaaa

SEQ ID NO: 690634 - DNA, 75 bp, synthetic construct
  source 1..75: mol_type = other DNA
cgttacgaaaaaggcaatgcccaacctcatccttccacaatcaaacttttacgtgttctggataagcatccagaa

SEQ ID NO: 690635 - DNA, 75 bp, synthetic construct
  source 1..75: mol_type = other DNA
cggacgttaagcccgacggagagagaaatattgcgctttatgtcgcgtggctactcaatgacacaaattgccgag

SEQ ID NO: 690636 - DNA, 75 bp, synthetic construct
  source 1..75: mol_type = other DNA
agatattgcattacatgaaaaggaggaaaagaaacctgaaattgaaatcgttgctcatatggggccaatatccct

SEQ ID NO: 690637 - DNA, 75 bp, synthetic construct
  source 1..75: mol_type = other DNA
aaaaacagcgtatatttattgcacgagccctataccggaaaccaggaatattatttatggatgaggctacaagtt

SEQ ID NO: 690638 - DNA, 75 bp, synthetic construct
  source 1..75: mol_type = other DNA
aagaacagagacaacaggcggaaaatgagaagcaaaacctgttacaactcgtcagggataaaactcagctatggg

SEQ ID NO: 690639 - DNA, 75 bp, synthetic construct
  source 1..75: mol_type = other DNA
gaaaaaactggtatgaggaacaaaagaatttccagtctgatacgttgaaaatggtctatgaccataacggcgtta

SEQ ID NO: 690640 - DNA, 75 bp, synthetic construct
  source 1..75: mol_type = other DNA
accgagtggatgctctttgcgcagaaagtcgaatccacagacacctccagcctaccagtaacatttcccgaacaa

SEQ ID NO: 690641 - DNA, 75 bp, synthetic construct
  source 1..75: mol_type = other DNA
atgatgcacttaaaaaacattactgctggcaatccaaaaacattggagcaataccagctaacaaagaaatttaac

SEQ ID NO: 690642 - DNA, 75 bp, synthetic construct
  source 1..75: mol_type = other DNA
cggcatgaccaccattctgctaaacctgcacaacgtgggttatttcgctctggacggtattattcttgccatggg

SEQ ID NO: 690643 - DNA, 75 bp, synthetic construct
  source 1..75: mol_type = other DNA
tgaaaagcaaagcctgttgcaacttgtcagggataaaacccagttatgggactcacagctacggctgggcatcat

SEQ ID NO: 690644 - DNA, 75 bp, synthetic construct
  source 1..75: mol_type = other DNA
cgtcggttgtgtttgacgatatcgtcactaacgagcagatccagaaacgcgcagaaggcatttcccgctattacg

SEQ ID NO: 690645 - DNA, 75 bp, synthetic construct
  source 1..75: mol_type = other DNA
tcgagtacatcaccaatatccgtatgcaggcggttggtttagatctgccgttccagacgcgctccaacccgatcc

SEQ ID NO: 690646 - DNA, 75 bp, synthetic construct
  source 1..75: mol_type = other DNA
gaaggtaacgccaaaattattcgcctgattgcccgcgacgaagccctgcacctgaccggcatccagcatatgctg

SEQ ID NO: 690647 - DNA, 75 bp, synthetic construct
  source 1..75: mol_type = other DNA
accgagtggatgctctatgcgcagaaagtcgaatctacagacacctccagcctgccagtaacatttcccgaacaa

SEQ ID NO: 690648 - DNA, 75 bp, synthetic construct
  source 1..75: mol_type = other DNA
actcacagctacggctgggcatcatttccgatgagaataaacagaaattaaccgagtggatgctatatgcgcaga

SEQ ID NO: 690649 - DNA, 75 bp, synthetic construct
  source 1..75: mol_type = other DNA
cctgaccggcacccagcatatgctgaatctgctgcgcagcggcgcggatgatccggagatggcggaaattgccga

SEQ ID NO: 690650 - DNA, 75 bp, synthetic construct
  source 1..75: mol_type = other DNA
aaactttcaggaagatacaataaaactggcttacactgtagatggaataattgttgctatggataaagatgtatc

SEQ ID NO: 690651 - DNA, 75 bp, synthetic construct
  source 1..75: mol_type = other DNA
atttacacctttggcccgcaaatcgttggtttgttgggattgggggttggcaaaaacgcggcactggggaacgtg

SEQ ID NO: 690652 - DNA, 75 bp, synthetic construct
  source 1..75: mol_type = other DNA
atctggacctgccaggtgatcccaatgttcgccatttacacctttggcccgcaaatcgttggtttgttgggattg

SEQ ID NO: 690653 - DNA, 75 bp, synthetic construct
  source 1..75: mol_type = other DNA
gagcagccgcagcaaacccgttttcgcgatctgtttaatcgccgccattttccttttgttctgtttgttgccgcc

SEQ ID NO: 690654 - DNA, 75 bp, synthetic construct
  source 1..75: mol_type = other DNA
atggatgttgagtatggccagtacagcgtcaccctgctggttgaaggttttccgccttcacatgccgggaccatc

SEQ ID NO: 690655 - DNA, 75 bp, synthetic construct
  source 1..75: mol_type = other DNA
gcgaatatagtgccgccgctgcctgatgtgtggataccgtttaacgattcactggatatgattacgggtttttcg

SEQ ID NO: 690656 - DNA, 75 bp, synthetic construct
  source 1..75: mol_type = other DNA
tttgcagtggctctatcctaatgaactcttcccgacggatatccgcgcctctgccgtgggcgtgattatgtcctt

SEQ ID NO: 690657 - DNA, 75 bp, synthetic construct
  source 1..75: mol_type = other DNA
cgcgtagcaaaaacatgcgcgcgattgccacgcgcgatacggcaatcgagaaacgtctcgccagcttattaaccg

SEQ ID NO: 690658 - DNA, 75 bp, synthetic construct
  source 1..75: mol_type = other DNA
atcttataaaaagattgttattggtgacgatgaaataacaatgccaggcgacaagattgttaagtttaaacgtgc

SEQ ID NO: 690659 - DNA, 75 bp, synthetic construct
  source 1..75: mol_type = other DNA
ggaaataccctgaccgggttgatcccgactatttataccgccctggatattgtatcccgtgagcaggtaggtttt

SEQ ID NO: 690660 - DNA, 75 bp, synthetic construct
  source 1..75: mol_type = other DNA
actgcccgaatccccccgttggctgttgcgcaaagggcgagtgaaagagtgcgaagagatgatgatcaaattgtt

SEQ ID NO: 690661 - DNA, 75 bp, synthetic construct
  source 1..75: mol_type = other DNA
cttgccggttttgccgcagcccagcttctgtgggggccgctctccgaccgttatggtcgtaaaccggtattatta

SEQ ID NO: 690662 - DNA, 75 bp, synthetic construct
  source 1..75: mol_type = other DNA
cgcgtagcaaaaatatgcgcgcgattgccacgcacgatacagcaatcgagaagcgcctggccagtctgttaaccg

SEQ ID NO: 690663 - DNA, 75 bp, synthetic construct
  source 1..75: mol_type = other DNA
cggaagtccatccccgggaagtgattaaacgcgccctgcaccacaatgccgctgccgtggtgctggtacacaatc

SEQ ID NO: 690664 - DNA, 75 bp, synthetic construct
  source 1..75: mol_type = other DNA
gccgctgtcgcgtccgggcggtgtctgcggcccgcatgaaagaactggggctacagatcagttatggtgcgtcat

SEQ ID NO: 690665 - DNA, 75 bp, synthetic construct
  source 1..75: mol_type = other DNA
tacccgcccaatggctggaactgccgctgccgtgtccggccattgtctcaggcccgtctggatgcgatggggctg

SEQ ID NO: 690666 - DNA, 75 bp, synthetic construct
  source 1..75: mol_type = other DNA
gcacggctggacgtactgaccacactacaggcggaagtgctgcgtgctgttgatgagggcatttcacagaaagca

SEQ ID NO: 690667 - DNA, 75 bp, synthetic construct
  source 1..75: mol_type = other DNA
cggctactttttggtgcgcaaatacgcgccggaagccggtggctcggggatcccggaaattgaaggggcgctgga

SEQ ID NO: 690668 - DNA, 75 bp, synthetic construct
  source 1..75: mol_type = other DNA
cgggtctggcggcggcctttaacgccccgctggcgggtattttgtttattatcgaagagatgcgtccgcagtttc

SEQ ID NO: 690669 - DNA, 75 bp, synthetic construct
  source 1..75: mol_type = other DNA
cttgagcgcgataaaaccccgttagccattttgtttatggcggcagtcgtcggcacgcttgtcgggctggctgcg

SEQ ID NO: 690670 - DNA, 75 bp, synthetic construct
  source 1..75: mol_type = other DNA
ctctctgctgtcgcagaagcggaacagcaaggtaaaaatgaagagcaaaggcagcatgacgaatgggtcgcggag

SEQ ID NO: 690671 - DNA, 75 bp, synthetic construct
  source 1..75: mol_type = other DNA
atggtaactattcgtttagcacgtcacggcgctaaaaagcgtccgttctatcaggttgttgtcgctgacagccgt

SEQ ID NO: 690672 - DNA, 75 bp, synthetic construct
  source 1..75: mol_type = other DNA
cgaaaaaaaggtctgctgttactgttgttgattctggtctgcacgatacttttgcttcatggtgtcactacgatt

SEQ ID NO: 690673 - DNA, 75 bp, synthetic construct
  source 1..75: mol_type = other DNA
acgcgatcaaagttatgaagatgagctacgcagcttagagattcagaaacaaaaactggcgctggcgaaagaaga

SEQ ID NO: 690674 - DNA, 75 bp, synthetic construct
  source 1..75: mol_type = other DNA
tgcggataaaaagcgcgatcaaagttatgaagatgagctacgcagcttagagattcagaagcaaaaactggcgct

SEQ ID NO: 690675 - DNA, 75 bp, synthetic construct
  source 1..75: mol_type = other DNA
atgaagaaagtttttctttgcgccatcttagccgctgttagtagctcggctttcgcctcttcattacaggatcaa

SEQ ID NO: 690676 - DNA, 75 bp, synthetic construct
  source 1..75: mol_type = other DNA
gccgtatggtgcttgatattttccgcatgaaaggtgatgaagctcgccacacgttgctggcaaccggtgcagcgg

SEQ ID NO: 690677 - DNA, 75 bp, synthetic construct
  source 1..75: mol_type = other DNA
ctttactctgaggacggaaaaaactggtatgaggaagtgaaaaactttcagccagacaccataaagattgtttac

SEQ ID NO: 690678 - DNA, 75 bp, synthetic construct
  source 1..75: mol_type = other DNA
atgcagcagctttcctttctgcccggagcgatgacgcccggcgagcgcagcctcattcagcgggccctgaaaacc

SEQ ID NO: 690679 - DNA, 75 bp, synthetic construct
  source 1..75: mol_type = other DNA
catcgcaaagccgcaaactggataaaggcggggtggtttatcgtctcgatccggtcactctggaagtgactcagg

SEQ ID NO: 690680 - DNA, 75 bp, synthetic construct
  source 1..75: mol_type = other DNA
caaatcgccgtactgacatttcgggtaaatggatgttcaaagatggcgtagtggtaaagcgaacttataccgagg

SEQ ID NO: 690681 - DNA, 75 bp, synthetic construct
  source 1..75: mol_type = other DNA
agcaattaatccggaaggcgcaagcgtcgttgaattacctgatattacagcaaatcgccgtgctgacatttcggg

SEQ ID NO: 690682 - DNA, 75 bp, synthetic construct
  source 1..75: mol_type = other DNA
ttgttgccataaccaaagatgcctccacacttaaccctgaaggttatagcgtcgttgagattcctgatattaccg

SEQ ID NO: 690683 - DNA, 75 bp, synthetic construct
  source 1..75: mol_type = other DNA
ttaccgggttatcaatatggataagctgaaatcggatatccggggtggaatgcttgaggtactggaaggagatat

SEQ ID NO: 690684 - DNA, 75 bp, synthetic construct
  source 1..75: mol_type = other DNA
accgtgcagatcggcggtaatatcggtcggatggtgcttgatatattccgcctgaaaggtgatgaagcgcgccat

SEQ ID NO: 690685 - DNA, 75 bp, synthetic construct
  source 1..75: mol_type = other DNA
tcccggaaattgaaggggcgctggaagatcaacgtcccgttcgctggtggcgtgtattgccggtgaaattctttg

SEQ ID NO: 690686 - DNA, 75 bp, synthetic construct
  source 1..75: mol_type = other DNA
atacccgtaatggcaatattctggcgaaggttgcggcaccagaatcactggctgtgctgtttaacccagcgcgta

SEQ ID NO: 690687 - DNA, 75 bp, synthetic construct
  source 1..75: mol_type = other DNA
gtcgttgaggttcctgatattacagcaaatcgccgggctgatatttcgggtaaatggatgttcaaagatggcgta

SEQ ID NO: 690688 - DNA, 75 bp, synthetic construct
  source 1..75: mol_type = other DNA
ccgttcgttcacggcggcaaaagcggcacgcctggacgtactgaccacactacaggcggaagtgcaacggggcat

SEQ ID NO: 690689 - DNA, 75 bp, synthetic construct
  source 1..75: mol_type = other DNA
agcagaaccgaaagctgcattggtaacgaaaaatgatggtaaaacctttcctcagccagccggtgttgcgttacc

SEQ ID NO: 690690 - DNA, 75 bp, synthetic construct
  source 1..75: mol_type = other DNA
gagtgccggaagagtgaggttatgcagcgtgtgctggcattttatcagggtaattttcaggaggtgatggcgtga

SEQ ID NO: 690691 - DNA, 75 bp, synthetic construct
  source 1..75: mol_type = other DNA
caaccagaaactggtgtatgtcttccaaatgtagctctttacgcagcaggctaccggaaatcaaaacaactgacg

SEQ ID NO: 690692 - DNA, 75 bp, synthetic construct
  source 1..75: mol_type = other DNA
caaccagaaactggtgtatgtcttccaaacgtagccatttacgcggcaggctaccggaaatccaaacaactgaca

SEQ ID NO: 690693 - DNA, 75 bp, synthetic construct
  source 1..75: mol_type = other DNA
tttacctctttctcagggagtttagtctccaggatttccggggcggttcagagcgcatagaagacgctaagccaa

SEQ ID NO: 690694 - DNA, 75 bp, synthetic construct
  source 1..75: mol_type = other DNA
caataagttcagaagtattacaccgccctactctaagcagagcgcagattcaggctaaaggtactcacgaaacgc

SEQ ID NO: 690695 - DNA, 75 bp, synthetic construct
  source 1..75: mol_type = other DNA
gttattcccctctgaacaggcgcgtaaggactggcaaaacgcccgcaaaaaactctcgagggcaaaggtgaagaa

SEQ ID NO: 690696 - DNA, 75 bp, synthetic construct
  source 1..75: mol_type = other DNA
aaggccagcctttctggtgtgccggatacataccggtatcatctgtctcaccgtattcgtcgcgtggttgggaat

SEQ ID NO: 690697 - DNA, 75 bp, synthetic construct
  source 1..75: mol_type = other DNA
aggctgagaaaggccggaatgccggtggtgactacgagcgtggaggtacacgataacctgacgggaaccacccgt

SEQ ID NO: 690698 - DNA, 75 bp, synthetic construct
  source 1..75: mol_type = other DNA
ccggaatgccgatggtgactacgaccgtggaggtgcacgataacctgacggaaacaacccgcaaagtaccggcat

SEQ ID NO: 690699 - DNA, 75 bp, synthetic construct
  source 1..75: mol_type = other DNA
cggataaatacagttttacagaacggaacgaatccccccgtcttcgccggcagtggcaggatgttctggaggagt

SEQ ID NO: 690700 - DNA, 75 bp, synthetic construct
  source 1..75: mol_type = other DNA
aggctgagaaagagcggaatgccggtggtgacaacgacctcggaggtgcatgataatctgacgggaacaacccgc

SEQ ID NO: 690701 - DNA, 75 bp, synthetic construct
  source 1..75: mol_type = other DNA
agactgagaaagcacgggatacggattgcgacatcatccgttgatatcagagaaaatttgactgaaacgacatgt

SEQ ID NO: 690702 - DNA, 75 bp, synthetic construct
  source 1..75: mol_type = other DNA
caggagcatatcgggcagatttttgccgggtatgggattgtggtcgcgatcacctcttggctatccggcgtctgt

SEQ ID NO: 690703 - DNA, 75 bp, synthetic construct
  source 1..75: mol_type = other DNA
gaaagattccagtttcgctatgttgctggaagcacagcgtcgtggttacgaacttcactatatggagatggccga

SEQ ID NO: 690704 - DNA, 75 bp, synthetic construct
  source 1..75: mol_type = other DNA
ttaagccgctggacggtatgggcggcgcgtcgattttccgcgtgaaagaaggcgatccaaacctcggcgtgattg

SEQ ID NO: 690705 - DNA, 75 bp, synthetic construct
  source 1..75: mol_type = other DNA
taccgagtttatctacgcgacctatattctggaacgtgccgaagagaaagggacgctgatcgttaacaagccgca

SEQ ID NO: 690706 - DNA, 75 bp, synthetic construct
  source 1..75: mol_type = other DNA
tgttcagcactgcgggcgcgatgtttttaatcagtatgctggccggtttattatttaatgttgatcctggttctc

SEQ ID NO: 690707 - DNA, 75 bp, synthetic construct
  source 1..75: mol_type = other DNA
gtatggcttaagtaaggatatcaacaagataaatgccgtcatcgcaggcgtaatatatctgtttttactctcttt

SEQ ID NO: 690708 - DNA, 75 bp, synthetic construct
  source 1..75: mol_type = other DNA
gaccgacattgaaagaaaaagggctgatttttgttggcctggatatcatcggcgaccgcctgactgagattaacg

SEQ ID NO: 690709 - DNA, 75 bp, synthetic construct
  source 1..75: mol_type = other DNA
accaagggagaatccagccgttggcggtcatgattgtcctgctcattaacaacggccacaccccatatcttactt

SEQ ID NO: 690710 - DNA, 75 bp, synthetic construct
  source 1..75: mol_type = other DNA
ttgaggaatgggcgagtatttgggggattacctttatctctaaccaggtcttcaacattatctttggctggatgg

SEQ ID NO: 690711 - DNA, 75 bp, synthetic construct
  source 1..75: mol_type = other DNA
ggtgccgatgatggcgccggataagaagggggcggcgaactcggccgtgaactttggctccggcctggggaattt

SEQ ID NO: 690712 - DNA, 75 bp, synthetic construct
  source 1..75: mol_type = other DNA
ttgtataactggagttatagttgggcacaaatcaaatgatttattaaagcagaaaattcaatctttagctaaaaa

SEQ ID NO: 690713 - DNA, 75 bp, synthetic construct
  source 1..75: mol_type = other DNA
aggatcatagttcaatagcagatgttgaatataaagattctccagatacaggtattgaagacattctggcgagag

SEQ ID NO: 690714 - DNA, 75 bp, synthetic construct
  source 1..75: mol_type = other DNA
atgaaaaacaagaccataacggaagcggagctgataaacatttttgaaagttacggagcctacatttgcccggat

SEQ ID NO: 690715 - DNA, 75 bp, synthetic construct
  source 1..75: mol_type = other DNA
acgttttggctgcgtgtacagcctgaaggccagcctttccggtgtgccggatacattccggtatcatctgtctca

SEQ ID NO: 690716 - DNA, 75 bp, synthetic construct
  source 1..75: mol_type = other DNA
ccggaaaggattaaaggttatattcgccaggcgtttggtgacgtgtctttaggttatgctgtattggatgatata

SEQ ID NO: 690717 - DNA, 75 bp, synthetic construct
  source 1..75: mol_type = other DNA
ttcttatcagtttcagccttaaagataacggtgccgaatatacaatgacattgcgaggcagtgggtttgaatacg

SEQ ID NO: 690718 - DNA, 75 bp, synthetic construct
  source 1..75: mol_type = other DNA
aaataaccgagcaagtggaagcgattgtaagtgcaaatctggccgcaaacggtaattataccgaagacaagattc

SEQ ID NO: 690719 - DNA, 75 bp, synthetic construct
  source 1..75: mol_type = other DNA
atgatgatgggtgaagtacagtcattaccgtctgctgggttacatcctgcgttacaggacgcgttaacgctggca

SEQ ID NO: 690720 - DNA, 75 bp, synthetic construct
  source 1..75: mol_type = other DNA
tgaaattgcctgggtgaaagaactttatcctgaacatgatggttatctggatgtttatcaccagtatggcctgac

SEQ ID NO: 690721 - DNA, 75 bp, synthetic construct
  source 1..75: mol_type = other DNA
gagattgcctctgcgctgcggtttattgaggatggtttattactcattaaacagggaaaagtggaatggtttggc

SEQ ID NO: 690722 - DNA, 75 bp, synthetic construct
  source 1..75: mol_type = other DNA
tttcgaacaaccttctgccgggcagattatgcttgatggcgtcgatttgtcacaggtgccgccttatctgcgccc

SEQ ID NO: 690723 - DNA, 75 bp, synthetic construct
  source 1..75: mol_type = other DNA
ggtgcatatgcaggagttcgccaaacgcaaaccgcatcagctttccggtggtcagcgacagcgtgtggccctggc

SEQ ID NO: 690724 - DNA, 75 bp, synthetic construct
  source 1..75: mol_type = other DNA
ttcgcctgaaaagcgggcagatgatcagcgctcagttacaaaacgcccatcgtcatcgtaaagggctgccgacct

SEQ ID NO: 690725 - DNA, 75 bp, synthetic construct
  source 1..75: mol_type = other DNA
ttaactttgagggagttctttcgttgcgcaactcagattgataaaagtagttatcaggtgctttcatcaaaaaat

SEQ ID NO: 690726 - DNA, 75 bp, synthetic construct
  source 1..75: mol_type = other DNA
ttaattttaagggagttctttcttagagcaacacagatcgataaaaatagttatcaggtgctttcattaaaagat

SEQ ID NO: 690727 - DNA, 75 bp, synthetic construct
  source 1..75: mol_type = other DNA
cggataaatactgttttacagagctgaatgaatccccccgtcttcgccggcagtggcaggatgttctggtggagt

SEQ ID NO: 690728 - DNA, 75 bp, synthetic construct
  source 1..75: mol_type = other DNA
aacggtgaggaacggattctgtttggcatggcaggcactgcgcgccagtgtgaagagttccaccatgaggatgat

SEQ ID NO: 690729 - DNA, 75 bp, synthetic construct
  source 1..75: mol_type = other DNA
tgccggatacataccggtatcatctgtctcatcgtattcgccggctggttgggagtgaaaagacatcatcgccat

SEQ ID NO: 690730 - DNA, 75 bp, synthetic construct
  source 1..75: mol_type = other DNA
tgccggatacataccggtatcatctgtctcatcgtattcgccggctgcttgggactgaaaagacatcatcgccat

SEQ ID NO: 690731 - DNA, 75 bp, synthetic construct
  source 1..75: mol_type = other DNA
tgccggatacataccggtatcatctgtctcatcgtattcgccggctgtttgggattgaaaagacatcatcgccat

SEQ ID NO: 690732 - DNA, 75 bp, synthetic construct
  source 1..75: mol_type = other DNA
aacggtttggttgcgtgtacagcctgaaggccagcctttctggtgtgccggatacataccggtatcatctgtctc

SEQ ID NO: 690733 - DNA, 75 bp, synthetic construct
  source 1..75: mol_type = other DNA
gtacgcgaatgagtttggacataagcaaccagaaactggtgtatgtcttccaaacgtagctctttacgcggcagg

SEQ ID NO: 690734 - DNA, 75 bp, synthetic construct
  source 1..75: mol_type = other DNA
tgccggatacataccggtatcatctgtctcatcgtattcgccgggtgcttgggagtgaaaagacatcatcgccat

SEQ ID NO: 690735 - DNA, 75 bp, synthetic construct
  source 1..75: mol_type = other DNA
acgagcaaaccatcatcttaaaaccgggaatgttcgccgtgtttatgccgggagaaccgcataaaccaggatgcg

SEQ ID NO: 690736 - DNA, 75 bp, synthetic construct
  source 1..75: mol_type = other DNA
ccgggatgcgttgttggcgagccgggtgagattaaaaaggtggtggtgaaggttaaggctgatttaatggcttaa

SEQ ID NO: 690737 - DNA, 75 bp, synthetic construct
  source 1..75: mol_type = other DNA
agaaaaaagcggaattgcacgagcaatacattgatatccagctgttattaaacggtgaggaacggatcctgtttg

SEQ ID NO: 690738 - DNA, 75 bp, synthetic construct
  source 1..75: mol_type = other DNA
tgccggatacataccggtatcatctgtctcatcgtattcgccggctgattgggaatgaaaagacatcatcgccat

SEQ ID NO: 690739 - DNA, 75 bp, synthetic construct
  source 1..75: mol_type = other DNA
tgccggatacataccggtatcatctgtctcatcgtattcgccggatgcttgggaatgaaaagacatcatcgccat

SEQ ID NO: 690740 - DNA, 75 bp, synthetic construct
  source 1..75: mol_type = other DNA
tcgggaagaatggggcctcagccagaaaaatgtggtgttcaacgataaacgctttggctgcgtgtacaacctgaa

SEQ ID NO: 690741 - DNA, 75 bp, synthetic construct
  source 1..75: mol_type = other DNA
ggcgatgacagccgccgtaaaaccggcatgacctttgatgcccaaccgggccgtaaaccaggaatctctcaatga

SEQ ID NO: 690742 - DNA, 75 bp, synthetic construct
  source 1..75: mol_type = other DNA
gggccgtaatgaagaaaaattacgtcaggtagccagccacataaacgaagaaactgggcgtcagccacagtggtt

SEQ ID NO: 690743 - DNA, 75 bp, synthetic construct
  source 1..75: mol_type = other DNA
tgattcgtttcacccctcgagagcacgcttggctggcgcggcacaacgccactgaagttgctctgccgcccgtag

SEQ ID NO: 690744 - DNA, 75 bp, synthetic construct
  source 1..75: mol_type = other DNA
ttatcgctctgcaactggagttaatttcgttaccgctgatgttagtctggtgcgcggcggctatgtttctttgcg

SEQ ID NO: 690745 - DNA, 75 bp, synthetic construct
  source 1..75: mol_type = other DNA
tactcaatgatcgtattatcctggtaaccggcgccagcgacggcattggtcgtgaagccgctcagacttatgcgc

SEQ ID NO: 690746 - DNA, 75 bp, synthetic construct
  source 1..75: mol_type = other DNA
cgctgatatcatgccgctatacctctggctgatgggcgatgacagccgccgtaaaaccggcatgacctttgacgc

SEQ ID NO: 690747 - DNA, 75 bp, synthetic construct
  source 1..75: mol_type = other DNA
cgtcagcaaaattatctccctgacggcagataccctcaccgttgagcgcgaactggaagatgaaaccgaaacctt

SEQ ID NO: 690748 - DNA, 75 bp, synthetic construct
  source 1..75: mol_type = other DNA
caaaccgaacgcaaacacatcattttcgaaaacgattcgccggaagccattgccgagctggcggaacatctgaaa

SEQ ID NO: 690749 - DNA, 75 bp, synthetic construct
  source 1..75: mol_type = other DNA
tgtattccctgccactcggaagggacaactctcggatactgctttactggcagtcctaaagcgaatgggatacac

SEQ ID NO: 690750 - DNA, 75 bp, synthetic construct
  source 1..75: mol_type = other DNA
ggaatacatcgtcggtatgccgattgctgcgcggctgacgaaagaacaggagcatatgatcgcgccgctggtcaa

SEQ ID NO: 690751 - DNA, 75 bp, synthetic construct
  source 1..75: mol_type = other DNA
cgagcgctttgtcgagttgccggaataccctggcgttcgggtgctgaaaactggcgatcgtgctcgttgggcaac

SEQ ID NO: 690752 - DNA, 75 bp, synthetic construct
  source 1..75: mol_type = other DNA
agccgcaagccagctcgcgacagacgatgatgagatagccgcactgacggttggcggttcgttattgcagaactc

SEQ ID NO: 690753 - DNA, 75 bp, synthetic construct
  source 1..75: mol_type = other DNA
cgcaatctggtttgtatgctggagttgcaaatcaatgcgtactgggccacgcgccccagccatttcgtgttattg

SEQ ID NO: 690754 - DNA, 75 bp, synthetic construct
  source 1..75: mol_type = other DNA
ccattaaaaatgcgctttcttgggttttttattgtttaacattctggtatgtctttacgtctttaacttcattgc

SEQ ID NO: 690755 - DNA, 75 bp, synthetic construct
  source 1..75: mol_type = other DNA
ttcatgggttttttattgccttacgttctggtatgtctttacttctttaacttcattgcttcgcaaagggggtga

SEQ ID NO: 690756 - DNA, 75 bp, synthetic construct
  source 1..75: mol_type = other DNA
tacccaatggtaacggctgctctgattttattatttttcccggtgaggtttatcagattgatattggttgcgata

SEQ ID NO: 690757 - DNA, 75 bp, synthetic construct
  source 1..75: mol_type = other DNA
ccgcgatcccgatttttgaacgtattgctgaagaagccaagcttaaagaaggtgaatctgtcagcactgatactt

SEQ ID NO: 690758 - DNA, 75 bp, synthetic construct
  source 1..75: mol_type = other DNA
tatggcctaactctgaattccgtcttgtgttttctgacgcttgtacttacagcgactctccaggccagaaagata

SEQ ID NO: 690759 - DNA, 75 bp, synthetic construct
  source 1..75: mol_type = other DNA
caaccaagatggcactaaacaaactgtttattatattgatgcagctatgcaggcttctgcctgtcagggggctaa

SEQ ID NO: 690760 - DNA, 75 bp, synthetic construct
  source 1..75: mol_type = other DNA
ggcacgtcgccttctggcagcgactacgttatttttgccgcctttatctgcaagtagtcaggaattacatcgtct

SEQ ID NO: 690761 - DNA, 75 bp, synthetic construct
  source 1..75: mol_type = other DNA
cgtttgaaattcgagtgtaccgccattaccgtattgtgcatggtacgcgagtcgcgctggcgtttctgcttacct

SEQ ID NO: 690762 - DNA, 75 bp, synthetic construct
  source 1..75: mol_type = other DNA
tatgctggagttgcaaatcaatgcatactgggccacgcgccccagccatttcgtgttattgaacgcgcaaaaact

SEQ ID NO: 690763 - DNA, 75 bp, synthetic construct
  source 1..75: mol_type = other DNA
tgtttttactggcgattgtacttacagcgattcaccagggcagaaggataaatattggtctttaacggcttatat

SEQ ID NO: 690764 - DNA, 75 bp, synthetic construct
  source 1..75: mol_type = other DNA
gatgaggagcaggaaaaacctatttatctggaaaaattgctggatggggttgaggttgagtggttgccattgggg

SEQ ID NO: 690765 - DNA, 75 bp, synthetic construct
  source 1..75: mol_type = other DNA
caagtgatattttccaaaaatatcttgatgaaatgttgaatagctcaaccattaacaacttgaactcagccgtaa

SEQ ID NO: 690766 - DNA, 75 bp, synthetic construct
  source 1..75: mol_type = other DNA
ggtgataatcctgccgcatggaaaggtatgttgaaacctctgttgcctcagccaagtaaagttcaggtcaccaaa

SEQ ID NO: 690767 - DNA, 75 bp, synthetic construct
  source 1..75: mol_type = other DNA
ccaggaagttttattccccaagagatttatttaatctggttgaaaatgaatacaataaaaataataagtcaaatt

SEQ ID NO: 690768 - DNA, 75 bp, synthetic construct
  source 1..75: mol_type = other DNA
gcgcgttgttctatgcctggtaccagggctcttccactctgtctgatttcaacaaaacgctggtactgtcgggca

SEQ ID NO: 690769 - DNA, 75 bp, synthetic construct
  source 1..75: mol_type = other DNA
ttcaccgtggtgaatttgttttcaccaaagaggctaccagccggatcggcgtcggcaatctttaccggatgatga

SEQ ID NO: 690770 - DNA, 75 bp, synthetic construct
  source 1..75: mol_type = other DNA
gggtcggacaaaccggtaaaccgatggttgatgtgatcggttggcgtcttgatgatgttgttgccttaatcaaag

SEQ ID NO: 690771 - DNA, 75 bp, synthetic construct
  source 1..75: mol_type = other DNA
tttatcgctggaaggtattggcgcagtgttgcaaatggatgatgactacaccgttatcaattcgatggtggcggg

SEQ ID NO: 690772 - DNA, 75 bp, synthetic construct
  source 1..75: mol_type = other DNA
tttttgtggttgttaatggccattgcgatgggcgcgttaattatcctggcgcactctttcttccagatctatctc

SEQ ID NO: 690773 - DNA, 75 bp, synthetic construct
  source 1..75: mol_type = other DNA
atgttatataatataccttgtcgaatttatatcctttccactctgtcattatgcatttctgggatagtttctact

SEQ ID NO: 690774 - DNA, 75 bp, synthetic construct
  source 1..75: mol_type = other DNA
aatgattgtcttatggtcaggcattatctcgcatggacgaaataagctccttgaactggcaggaaaatgccatag

SEQ ID NO: 690775 - DNA, 75 bp, synthetic construct
  source 1..75: mol_type = other DNA
ttgggaagaaatgacctgcttattcgcaccttccctaagtatctcgaaattacggcaaccaaatatgattcacca

SEQ ID NO: 690776 - DNA, 75 bp, synthetic construct
  source 1..75: mol_type = other DNA
ggccaggcagagcgagctcaataaggctctgaaagaggggcggatcctccaggctgactacaacatcaacctggc

SEQ ID NO: 690777 - DNA, 75 bp, synthetic construct
  source 1..75: mol_type = other DNA
caggcagcggggctgacgttcaatcagaccagcgaagccctgagcgagcttatcaacgcgggggtgggcgcgagt

SEQ ID NO: 690778 - DNA, 75 bp, synthetic construct
  source 1..75: mol_type = other DNA
gtttagtggcacatggaatgaatacatatttttttcaagacacttttacctcttatctgaattcaaacgaagaga

SEQ ID NO: 690779 - DNA, 75 bp, synthetic construct
  source 1..75: mol_type = other DNA
tgtttattcctgcgggtcccattgttcaggtccgcgataacaacggcaaggttcgtgaagacagcgataccgacg

SEQ ID NO: 690780 - DNA, 75 bp, synthetic construct
  source 1..75: mol_type = other DNA
aggggaagcagtgggctggtgactggaaatatgtccagacaaaagaagattgtaacgacagaccgaactatgaaa

SEQ ID NO: 690781 - DNA, 75 bp, synthetic construct
  source 1..75: mol_type = other DNA
aaccaatcttcaagcagcctgcttgccaatgtgtttcgtatcgcactggcatcgttggaagcagagccagtcgcg

SEQ ID NO: 690782 - DNA, 75 bp, synthetic construct
  source 1..75: mol_type = other DNA
ttggcagataaggctgaggctgcgtatcaacgtgggacattatggcctaagcgggtggcgttgatggatgagtgg

SEQ ID NO: 690783 - DNA, 75 bp, synthetic construct
  source 1..75: mol_type = other DNA
tcgacattccgtgattgggctggtgaaacgaccaactacccgcgtgaggtaattgaacatgcgttagctcatcag

SEQ ID NO: 690784 - DNA, 75 bp, synthetic construct
  source 1..75: mol_type = other DNA
caccatgcggcccttccctataaccagctcggctcctttatgaaagaactacgtgaacgaagcggtgtttcgcct

SEQ ID NO: 690785 - DNA, 75 bp, synthetic construct
  source 1..75: mol_type = other DNA
ctatgaaattcaggcgttattcacggcccagcctgtgccactgacacccgaaggattgattaaagcggtgcgctt

SEQ ID NO: 690786 - DNA, 75 bp, synthetic construct
  source 1..75: mol_type = other DNA
cgcacgtttcaacgccatgaaggacaagcgcaatatcgtctctctgaactacgccgtgcgtgaaaaagagaataa

SEQ ID NO: 690787 - DNA, 75 bp, synthetic construct
  source 1..75: mol_type = other DNA
acggaagcagtgtcgctttctggcctgtttatcccatctggcccgattgtgcaggttcgcgataataacggcaaa

SEQ ID NO: 690788 - DNA, 75 bp, synthetic construct
  source 1..75: mol_type = other DNA
cgtctggcgcaaaccaacagcgaagatgttttctcgctggcaatgacggcgtttgcacgtgaaatcgacccgcat

SEQ ID NO: 690789 - DNA, 75 bp, synthetic construct
  source 1..75: mol_type = other DNA
ccaaaaaccaggttacggcgtttatcgggccgtccggctgcggtaaatcgacgctgctgcgtactttcaacaaaa

SEQ ID NO: 690790 - DNA, 75 bp, synthetic construct
  source 1..75: mol_type = other DNA
cgtctgtttgagaagctctcccgtgccgacatggacgagcgcgtgcagtgggcattgaccaaagccgcattgtgg

SEQ ID NO: 690791 - DNA, 75 bp, synthetic construct
  source 1..75: mol_type = other DNA
gtacacgatccagaaattctatcgcgttaacggcggcagtacgcaacgtaaaggcgtaacgccagacatcatcat

SEQ ID NO: 690792 - DNA, 75 bp, synthetic construct
  source 1..75: mol_type = other DNA
ctttgccagagccataaactggcgggtggcagcattgtcagtatgcgcgatccgcagctttttcatgcaccagaa

SEQ ID NO: 690793 - DNA, 75 bp, synthetic construct
  source 1..75: mol_type = other DNA
tatgtttaagcgtcgaacgggttactcgcccggtaaatttaccagtcgattagcgatgcatgattatgcaatcac

SEQ ID NO: 690794 - DNA, 75 bp, synthetic construct
  source 1..75: mol_type = other DNA
ccgtcgcaaagtaccacagataaacaacagttacgtttttcagccctcgagacactgatacttcaggaaataaaa

SEQ ID NO: 690795 - DNA, 75 bp, synthetic construct
  source 1..75: mol_type = other DNA
gattttgaagtcgtcaaatatttgacctcacccaattcggcgagcgcaaaatctcgccagcagcttgctcatgat

SEQ ID NO: 690796 - DNA, 75 bp, synthetic construct
  source 1..75: mol_type = other DNA
agccctttgcgaccatctgaaaatgctctgccagagccataaactggcgggcggcagtattgttgacatgcgcga

SEQ ID NO: 690797 - DNA, 75 bp, synthetic construct
  source 1..75: mol_type = other DNA
ctgatgtggcgttaccgcacaacggacactggctactattgttcggcaacgccagttgttgatgattttaccttt

SEQ ID NO: 690798 - DNA, 75 bp, synthetic construct
  source 1..75: mol_type = other DNA
gtcactgaggatgcctggattgagccacaggctgagctggtttacggcgcagtatccggtaaacagtttgcatgg

SEQ ID NO: 690799 - DNA, 75 bp, synthetic construct
  source 1..75: mol_type = other DNA
tttgccggacttggaacccgtgattacagcacgcattcatggtatgccggtgcagaagcgggctaccgctatcat

SEQ ID NO: 690800 - DNA, 75 bp, synthetic construct
  source 1..75: mol_type = other DNA
agcgcatgggggaacttcgtgacattaaaggagaagccggtgcatgggcccgtatcatgagcggaacaggcgctg

SEQ ID NO: 690801 - DNA, 75 bp, synthetic construct
  source 1..75: mol_type = other DNA
atgggctggagaaagcgtctggctagtccatgccagcagcgcgctttggctgcccccacaatgccgcataagttt

SEQ ID NO: 690802 - DNA, 75 bp, synthetic construct
  source 1..75: mol_type = other DNA
tgcggcattttaccttgctcgcaatgcaggattaacgacgacaatcaatgccaataattccactgttactttggg

SEQ ID NO: 690803 - DNA, 75 bp, synthetic construct
  source 1..75: mol_type = other DNA
ccggcactggcatcaatcctggaacgctcagtgtgggtgatggaacagttgtgctcgcccaaaaaccagatagca

SEQ ID NO: 690804 - DNA, 75 bp, synthetic construct
  source 1..75: mol_type = other DNA
ggagtatggatttaaaaagggagtggattttgaagtcgtcaaatatttgacctcacccaatccggcgagcgcaaa

SEQ ID NO: 690805 - DNA, 75 bp, synthetic construct
  source 1..75: mol_type = other DNA
gtataaaacaggtggaatagtaaatacgccggctatatctgactggagttttgtcacgaataccactaatactcc

SEQ ID NO: 690806 - DNA, 75 bp, synthetic construct
  source 1..75: mol_type = other DNA
aacatatatacagccgcaaacagagttgatctacggtactgtatctgagaatcagtttgcctggcaattcaatgg

SEQ ID NO: 690807 - DNA, 75 bp, synthetic construct
  source 1..75: mol_type = other DNA
gtcggttaccctgtatcattggttactgccccgaaaaatacacaaagcgatatatttacacttaacccggtttca

SEQ ID NO: 690808 - DNA, 75 bp, synthetic construct
  source 1..75: mol_type = other DNA
attggcacagcgtgctgatgataacggactgagccaggcgttcagttctgtcagtattgtaagtgggcgtcctac

SEQ ID NO: 690809 - DNA, 75 bp, synthetic construct
  source 1..75: mol_type = other DNA
actaggataagtctgaatgtggagcgttctgagttcggttcatacaatattgataagttaataaatgctaatatt

SEQ ID NO: 690810 - DNA, 75 bp, synthetic construct
  source 1..75: mol_type = other DNA
tgttactgaggttacaccgctagatataaccaatgcgggcactgctaatggaacctatcaaaatgctgaccgttt

SEQ ID NO: 690811 - DNA, 75 bp, synthetic construct
  source 1..75: mol_type = other DNA
acatcttatggaacaatatcccgatgttccgttcacctggctggagtttgataacggcggcgatggtgtgtttat

SEQ ID NO: 690812 - DNA, 75 bp, synthetic construct
  source 1..75: mol_type = other DNA
tggtgaactgatcaacaataaatttgccggactcatcagcaaacaaccgcagcatattctggatatgtgcactgg

SEQ ID NO: 690813 - DNA, 75 bp, synthetic construct
  source 1..75: mol_type = other DNA
acgtcattccgattcgttccgatctgttccgcgacttgccgaaagtgcagtacgacctgattgtcactaacccgc

SEQ ID NO: 690814 - DNA, 75 bp, synthetic construct
  source 1..75: mol_type = other DNA
gatacgctggaggccactaacagttcgttcattatcaatgccgatggtaaagcagcagatacggtgacggtaaac

SEQ ID NO: 690815 - DNA, 75 bp, synthetic construct
  source 1..75: mol_type = other DNA
ctgcaagaagtttgccgccgggtttaataactgttgtaaggattccggctggggccaggatatcgggttgtccag

SEQ ID NO: 690816 - DNA, 75 bp, synthetic construct
  source 1..75: mol_type = other DNA
tctgacctccagcgaaaaacaccgtattgttgagcgcgtgatccgccgcgtcaacgaacgcattccggtggctta

SEQ ID NO: 690817 - DNA, 75 bp, synthetic construct
  source 1..75: mol_type = other DNA
aacgttttatggatatccgttacagaaacttcttatctgaggtgaataaccttaaccgacgtatgggtgatctac

SEQ ID NO: 690818 - DNA, 75 bp, synthetic construct
  source 1..75: mol_type = other DNA
gtcggcaatatcagcgacagtaattaccgtggcggacgcggattagatccagaagtgatcgctgagatcactcat

SEQ ID NO: 690819 - DNA, 75 bp, synthetic construct
  source 1..75: mol_type = other DNA
ctgttccctctacgcggcctggtttccgctaactttgattcgctgccgtggtatcagaaaatcaccgattatctg

SEQ ID NO: 690820 - DNA, 75 bp, synthetic construct
  source 1..75: mol_type = other DNA
atgttccatatgaaggagtaaaagcccgtatgttcagattaaacgagagtattgatcaagctctacaccatttct

SEQ ID NO: 690821 - DNA, 75 bp, synthetic construct
  source 1..75: mol_type = other DNA
ctggaaagtttgatgtaggcatctttaactcagctaacatgatcaaacaaggtttggctggacttgcatcaccat

SEQ ID NO: 690822 - DNA, 75 bp, synthetic construct
  source 1..75: mol_type = other DNA
ctccctgcaaaaacactgcgatcacttcgcaattgccgcaactgaaaaagaagcccgttctctgatccctgatca

SEQ ID NO: 690823 - DNA, 75 bp, synthetic construct
  source 1..75: mol_type = other DNA
aacagcggtgtctttcgataaaaacacctttactcgttatgtaatgaatgttcgccgccagcgtggaaaaggctg

SEQ ID NO: 690824 - DNA, 75 bp, synthetic construct
  source 1..75: mol_type = other DNA
cgtaactgtgaaaacgtcgccaatttcgacagcgacaaagcgcaactggtcccggtgcgtctggaagagtatgcc

SEQ ID NO: 690825 - DNA, 75 bp, synthetic construct
  source 1..75: mol_type = other DNA
gaattgcctgccgggttcgataagctggagggcgagattaagtggaactcgttttatcgcgaagtgatgcgtcat

SEQ ID NO: 690826 - DNA, 75 bp, synthetic construct
  source 1..75: mol_type = other DNA
gcttaaccgcagccagcctgacgttcttgatatgatggtggatgaagcgatgaatgactggcagcgtaccggcga

SEQ ID NO: 690827 - DNA, 75 bp, synthetic construct
  source 1..75: mol_type = other DNA
ccgtatgttcagattaaacgagagtattgatcaggctctacaccatttcttaagtaaagaaggttgtaaaaatga

SEQ ID NO: 690828 - DNA, 75 bp, synthetic construct
  source 1..75: mol_type = other DNA
cgatggtaataaccttttaggtcgtgcaaccgaaattaaattgccggatgtcagtttaattatgcaggagcataa

SEQ ID NO: 690829 - DNA, 75 bp, synthetic construct
  source 1..75: mol_type = other DNA
atggctggaaaaattcaaattaaccgtattaccaacgccaatatttatctcgatggtaataaccttttaggtcgt

SEQ ID NO: 690830 - DNA, 75 bp, synthetic construct
  source 1..75: mol_type = other DNA
atgatcaatattctgccatttgagataatttccagaaatacaaagaccctgcttattacctacatttcttcagta

SEQ ID NO: 690831 - DNA, 75 bp, synthetic construct
  source 1..75: mol_type = other DNA
cagacccacggtggtactgagtgatgctaagcaggtaaatcccgacaatgtgaagtggggttaccgcggcggtaa

SEQ ID NO: 690832 - DNA, 75 bp, synthetic construct
  source 1..75: mol_type = other DNA
cagtctgcaggttcagatatccgcatgcaacgtgaccagatgaaacctttgattggtcgtacgggggtggaatcc

SEQ ID NO: 690833 - DNA, 75 bp, synthetic construct
  source 1..75: mol_type = other DNA
agaagttatttatggatattccaccaggaaaacagattggaacactgaatggaaaaccagcactgatagatattc

SEQ ID NO: 690834 - DNA, 75 bp, synthetic construct
  source 1..75: mol_type = other DNA
cttggacgaaatgcgcagctcactactgatattagtgcagataactcatctgtcacccttggcagtgaagatgtc

SEQ ID NO: 690835 - DNA, 75 bp, synthetic construct
  source 1..75: mol_type = other DNA
caataattcaggtgattttattgttgatggtggtataaatataaatgataattttgagcaaaatggtgggaaatt

SEQ ID NO: 690836 - DNA, 75 bp, synthetic construct
  source 1..75: mol_type = other DNA
gtatggaactcccggtgacagtggttcaccgctacttggatgggatacaactctaaataaatgggctcttgtggg

SEQ ID NO: 690837 - DNA, 75 bp, synthetic construct
  source 1..75: mol_type = other DNA
atgcaggcgattgaagcgttgcgtcaattccagccaggatttgaacaggcacaattaaaaaatttcggtatgacg

SEQ ID NO: 690838 - DNA, 75 bp, synthetic construct
  source 1..75: mol_type = other DNA
acgggaaaattgtgtgggagactgggtatcaggtctggggtaacacgatacaggagaaggaccacggcggggtgg

SEQ ID NO: 690839 - DNA, 75 bp, synthetic construct
  source 1..75: mol_type = other DNA
atttcgtgttattgaacgcgcaaaaacttcgtgatacccagcatatgatgcagcaaatactgctgagccttgttc

SEQ ID NO: 690840 - DNA, 75 bp, synthetic construct
  source 1..75: mol_type = other DNA
gccggtttttgccaatacggaaaaattgaacgatgctgtggaagagctgcgtcagttgctcaataaccaccatga

SEQ ID NO: 690841 - DNA, 75 bp, synthetic construct
  source 1..75: mol_type = other DNA
gcgccgaaacagcgcgagcgtcagcgcatcgtgattgaaggcgacggcgaagaacagatcgccgcatttgctgaa

SEQ ID NO: 690842 - DNA, 75 bp, synthetic construct
  source 1..75: mol_type = other DNA
atcggtagtatttgcggctcgattatcgcctcactgtttggcggcttctatgtaaccttctacgtcattttcgcc

SEQ ID NO: 690843 - DNA, 75 bp, synthetic construct
  source 1..75: mol_type = other DNA
tcggtttatacctggagcctgtttaacggcgcgctttccgccaagctggatgcgccggtaagccaggtcgctttc

SEQ ID NO: 690844 - DNA, 75 bp, synthetic construct
  source 1..75: mol_type = other DNA
cgaccatcaggacgcaacacatcgacatccagtttctctttagcggtgtcgataccgatataatgaagttcatgt

SEQ ID NO: 690845 - DNA, 75 bp, synthetic construct
  source 1..75: mol_type = other DNA
ggccgaagactcatttccacgagcgttatgcgattacaacgaaatggtcgatgaaatatttcagttaattgtaat

SEQ ID NO: 690846 - DNA, 75 bp, synthetic construct
  source 1..75: mol_type = other DNA
ctgctgattctgtcactggcgctttctacgaccattcgccagccagagcagaaaatgttgcgtgaggcgcatggc

SEQ ID NO: 690847 - DNA, 75 bp, synthetic construct
  source 1..75: mol_type = other DNA
ctatgtgaccttctacgtgattttcgccctgctgattctgtcattggcgctttctacgacgattcgtcagccaga

SEQ ID NO: 690848 - DNA, 75 bp, synthetic construct
  source 1..75: mol_type = other DNA
ctattatagtcgccatcatggctctcggtatcacgggttgtgatgataaaaaagctgaaacagaaacacctccgc

SEQ ID NO: 690849 - DNA, 75 bp, synthetic construct
  source 1..75: mol_type = other DNA
ggagaaccgcataaaccaggatgcgttgtcggcgaacctgatgagattaaaaaggttgtggtgaaggttaaggct

SEQ ID NO: 690850 - DNA, 75 bp, synthetic construct
  source 1..75: mol_type = other DNA
atacattgatatccagctgttattaaacggtgaggaacggattctgtttggcacggcaggcactgcgcgtgagtg

SEQ ID NO: 690851 - DNA, 75 bp, synthetic construct
  source 1..75: mol_type = other DNA
tggtcggtctggcggatggcgcgggttacctgttgacgctctctaactgcgtgaagtggtttccggagcgtaagg

SEQ ID NO: 690852 - DNA, 75 bp, synthetic construct
  source 1..75: mol_type = other DNA
ctggtgatgattgttttcggcgcaacgttaatgaaagacgcaccaaaacaggaagtgaaaaccagcaatggtgtg

SEQ ID NO: 690853 - DNA, 75 bp, synthetic construct
  source 1..75: mol_type = other DNA
ctattattgtcgccgtaatggccctcagtgtcactggatgtgatgataaaaaagctgaaacagaaagctctccgt

SEQ ID NO: 690854 - DNA, 75 bp, synthetic construct
  source 1..75: mol_type = other DNA
gaaatcccgaccatgcaggctgctgaatttgcccaactgttctctgactacgaactcctgccaccgttccgtcaa

SEQ ID NO: 690855 - DNA, 75 bp, synthetic construct
  source 1..75: mol_type = other DNA
tccggtggccaacgtcagcgagtggcgctggcccgaagcctcgccaaacgcccgaaactattactgctcgatgaa

SEQ ID NO: 690856 - DNA, 75 bp, synthetic construct
  source 1..75: mol_type = other DNA
gataaatggcatccacgcggcgtttcattatttgaaaaagaattacatttcaggttgcgttatgacagtcccaac

SEQ ID NO: 690857 - DNA, 75 bp, synthetic construct
  source 1..75: mol_type = other DNA
gtgaatgacgctatccctcgcccgcaggcgaaaacccgtaaggcgctgacgccgctattagaaatccgcaacctg

SEQ ID NO: 690858 - DNA, 75 bp, synthetic construct
  source 1..75: mol_type = other DNA
cgttttcgcaaagggttaccgacctggggcgatgaagttcgtttgtgctgggaatcagacagttgtgtggtgctg

SEQ ID NO: 690859 - DNA, 75 bp, synthetic construct
  source 1..75: mol_type = other DNA
acaggacaagttaccaaaagcggaaattgccagccgggtcaacgagatgctcgggttggtgcatatgcaggagtt

SEQ ID NO: 690860 - DNA, 75 bp, synthetic construct
  source 1..75: mol_type = other DNA
ggatcggtcaatgttttcgaagggctgctaaaggaacgccaggaagatggcctgttgctttattcgcctgggctg

SEQ ID NO: 690861 - DNA, 75 bp, synthetic construct
  source 1..75: mol_type = other DNA
caacttcccggacccggtagaccgtgcagcccaggaagaagagttcagcctcgaactgcgtaaccgcgatcgcga

SEQ ID NO: 690862 - DNA, 75 bp, synthetic construct
  source 1..75: mol_type = other DNA
ctggctaattacagccgttccatcacgtttaccacaggcgggaaatgctcccgccttattttttgttcaaagaga

SEQ ID NO: 690863 - DNA, 75 bp, synthetic construct
  source 1..75: mol_type = other DNA
tgttgatgaggctagagtgcggagagaaggcaatccgctgccgcagttcagcaataaagatggatatactcctcc

SEQ ID NO: 690864 - DNA, 75 bp, synthetic construct
  source 1..75: mol_type = other DNA
tgccttttcgtctgcttttaacccggacgtcacagctgattgttacacttcgggaagcatgggatatcagccaga

SEQ ID NO: 690865 - DNA, 75 bp, synthetic construct
  source 1..75: mol_type = other DNA
atgcatatacgaattgactatctggcggataaatactgctttacagaactgaatgaatctccacgccttcgccgg

SEQ ID NO: 690866 - DNA, 75 bp, synthetic construct
  source 1..75: mol_type = other DNA
gcctgaaggccagtctttctggtgtaccggatacattccggtatcatctgtctcatcgtattcgccggatggttg

SEQ ID NO: 690867 - DNA, 75 bp, synthetic construct
  source 1..75: mol_type = other DNA
aaatggagtgaggttgaaaacttattgctaaatacgccaggcattgccggatgggaaatacacaataacagtaac

SEQ ID NO: 690868 - DNA, 75 bp, synthetic construct
  source 1..75: mol_type = other DNA
tgcgtgtttgtgctgatcgcttctgagtttatgccagtcagcctgcttacgctcattgcccatgatttgcacgtt

SEQ ID NO: 690869 - DNA, 75 bp, synthetic construct
  source 1..75: mol_type = other DNA
atgagtggtcaagggaagcgattaatggtgatggcaggcggtactggcggacatgtgttcccggggcttgcggtt

SEQ ID NO: 690870 - DNA, 75 bp, synthetic construct
  source 1..75: mol_type = other DNA
agcttataaacctgatgtagtgctcggtatgggcggctacgtttcaggacccggtggtctggctgcgtggtcatt

SEQ ID NO: 690871 - DNA, 75 bp, synthetic construct
  source 1..75: mol_type = other DNA
atgagtagtgtgctgctcctttgcgcgggcgtactgacctttgttaccgcacgccagaaggccggtgcgctttag

SEQ ID NO: 690872 - DNA, 75 bp, synthetic construct
  source 1..75: mol_type = other DNA
tccgcgatcctaaagtgtggcgtgaagccgacacatggtggatggtagtcggggcgaaagatccaggcaacacgg

SEQ ID NO: 690873 - DNA, 75 bp, synthetic construct
  source 1..75: mol_type = other DNA
cgcactggcaatttttaacggtggcaacgcgctggccaccgttgtggctgcgccgcttggtagctatctggggac

SEQ ID NO: 690874 - DNA, 75 bp, synthetic construct
  source 1..75: mol_type = other DNA
gtgaggatctttacattgatctcaatgacgggaatggcgtggcaaccaaaccaacattgggtaagtcaaaggcaa

SEQ ID NO: 690875 - DNA, 75 bp, synthetic construct
  source 1..75: mol_type = other DNA
atatgataaaaatggcaatcccgtcatgacgctaaataaagcgccaatgattgacttcagctctaatgactcgac

SEQ ID NO: 690876 - DNA, 75 bp, synthetic construct
  source 1..75: mol_type = other DNA
atacaaaacaagatgagggggatattcattggtcatatgacgaaaaaacgggacttggttcattaacccagggaa

SEQ ID NO: 690877 - DNA, 75 bp, synthetic construct
  source 1..75: mol_type = other DNA
tatcgtcattggagggttctggtcaatgtcggctgcaaccgccattcggctcgtgccgaagcagcatgtcccccg

SEQ ID NO: 690878 - DNA, 75 bp, synthetic construct
  source 1..75: mol_type = other DNA
aatggccatatcgggaatagttatcaccatagcacctgactatccggtttatatgctggggagggccctgattgg

SEQ ID NO: 690879 - DNA, 75 bp, synthetic construct
  source 1..75: mol_type = other DNA
aatggccatatcgggaataattatcactatagcacctgactatccgatttatatgctggggagggctctgattgg

SEQ ID NO: 690880 - DNA, 75 bp, synthetic construct
  source 1..75: mol_type = other DNA
gctatgagtagcgtgctgctcctttgcgctggcgtactgacctttgttaccgcacgccagaaggccggtgcgctt

SEQ ID NO: 690881 - DNA, 75 bp, synthetic construct
  source 1..75: mol_type = other DNA
tgataggcacaactcaaggtggaagggataaagaaattgaacgactgctgaatagcgtagctagcagtacgtaca

SEQ ID NO: 690882 - DNA, 75 bp, synthetic construct
  source 1..75: mol_type = other DNA
gtaaactgtcagtgccggatgctcacccgtgtccggcgcacgcactccacctcacccgtggagaactccttaatt

SEQ ID NO: 690883 - DNA, 75 bp, synthetic construct
  source 1..75: mol_type = other DNA
aacatgactcgttattatacgttgctgaatcgtcagcacggaggcagcgggaaattaacgtgtgggcgggttcaa

SEQ ID NO: 690884 - DNA, 75 bp, synthetic construct
  source 1..75: mol_type = other DNA
tcaaaaagaatgatgtcatcattgttgcgggggaagtttctcaacagaacgagagtaagatccttgccattataa

SEQ ID NO: 690885 - DNA, 75 bp, synthetic construct
  source 1..75: mol_type = other DNA
gccgattactttcacatcgatatcatggacggcccactttgtgccgaatctgacgctctcaccgttcttcgtaag

SEQ ID NO: 690886 - DNA, 75 bp, synthetic construct
  source 1..75: mol_type = other DNA
caattatttttaaaacacgcaaaaaatataaaatacaagttggttaaatcaaataaagtaccactttcaactgct

SEQ ID NO: 690887 - DNA, 75 bp, synthetic construct
  source 1..75: mol_type = other DNA
aaagacaaaggtaagaaaggggaacgtggcggtatcggtacgccagctacgcgagcaacgattatcagtaatctc

SEQ ID NO: 690888 - DNA, 75 bp, synthetic construct
  source 1..75: mol_type = other DNA
gtattattgcccgaagtagcggaacagattaaatcaacgtgtatttctaaaccttcaactgtagttgtagccaaa

SEQ ID NO: 690889 - DNA, 75 bp, synthetic construct
  source 1..75: mol_type = other DNA
agcgctatgaagattttaaaaaccatgttaaatctaattactatgatgtttattccagtcatgacattttgaaat

SEQ ID NO: 690890 - DNA, 75 bp, synthetic construct
  source 1..75: mol_type = other DNA
attcagccacaagaaacgctggatattactcaaaaattacgctctcaagaacatagcgcgatttcttataaccgc

SEQ ID NO: 690891 - DNA, 75 bp, synthetic construct
  source 1..75: mol_type = other DNA
agtaaatcttttgaagcggcgctaattattgataaaaatgctaaacgtgtagtttttgactttcctgagcgtaag

SEQ ID NO: 690892 - DNA, 75 bp, synthetic construct
  source 1..75: mol_type = other DNA
atatgacagcattatggcatgagcaacaaatgatgataatggagggtgatcttgaattaggcgatttcattatca

SEQ ID NO: 690893 - DNA, 75 bp, synthetic construct
  source 1..75: mol_type = other DNA
gaagagcgcatggcagatccgcagactccggaaaacatcggtgctgagcaaccggcagatgatactaccgataac

SEQ ID NO: 690894 - DNA, 75 bp, synthetic construct
  source 1..75: mol_type = other DNA
cgtcgactggcccgcaaataccatcctgatgtcagcaaagagccggatgccgaagcccgcttcaaagaggtcgct

SEQ ID NO: 690895 - DNA, 75 bp, synthetic construct
  source 1..75: mol_type = other DNA
agattttgacgatatcttctcgtcaattttcggtcagcatgcgcgccaaagtcgtcagcgccccgcaacacgcgg

SEQ ID NO: 690896 - DNA, 75 bp, synthetic construct
  source 1..75: mol_type = other DNA
gcaggaagccatcgccagcggtcaggtgcagatgattgtcggtacacacgccatcttccaggaacaggtgcagtt

SEQ ID NO: 690897 - DNA, 75 bp, synthetic construct
  source 1..75: mol_type = other DNA
gcctgatagccatacttgcgaccttgcgagtgatcacccataccaatcaggtacacgcgctgctgtacctgatta

SEQ ID NO: 690898 - DNA, 75 bp, synthetic construct
  source 1..75: mol_type = other DNA
aacaacgtcgcgctgagtatgatcagatgtggcaacatcgcaacgatccgcaatttaaccgtcagttccagcatg

SEQ ID NO: 690899 - DNA, 75 bp, synthetic construct
  source 1..75: mol_type = other DNA
ttgcgcgttaaaggcaaaggtctggtgagcaaaaaacagaccggcgatctgtatgcggtactgaaaatcgtgatg

SEQ ID NO: 690900 - DNA, 75 bp, synthetic construct
  source 1..75: mol_type = other DNA
agtgctgaactgcaatatctccttcggcggtcggcggatgatgacctgccagatcagcgacggttccggcattct

SEQ ID NO: 690901 - DNA, 75 bp, synthetic construct
  source 1..75: mol_type = other DNA
aagagttgaaactggcgctaccagagttgaatgttggcctggtacacggacggatgaagccagccgagaagcagg

SEQ ID NO: 690902 - DNA, 75 bp, synthetic construct
  source 1..75: mol_type = other DNA
gcgctacgaagatcgcacccatctctaccccatcggtgaactactgccgggcgtttatgccacggtggaaggcga

SEQ ID NO: 690903 - DNA, 75 bp, synthetic construct
  source 1..75: mol_type = other DNA
tctcgatacctcggtcattgatgaactgccgccagggcgtaccccggtgacgacagtggcaatcccggatacgcg

SEQ ID NO: 690904 - DNA, 75 bp, synthetic construct
  source 1..75: mol_type = other DNA
caaaccaacgggtgctcaggcacgtgtggtggcggaaatcgagcgcgatatggcgctcgatgttccgatgatgcg

SEQ ID NO: 690905 - DNA, 75 bp, synthetic construct
  source 1..75: mol_type = other DNA
aattgttaggtacgcgtcagacgggtaatgctgagtttaaagtggcggatttactgcgcgatcaggcgatgatcc

SEQ ID NO: 690906 - DNA, 75 bp, synthetic construct
  source 1..75: mol_type = other DNA
gtcgtgaagagcgtgcgggtgaagtgctgagcaatcgtaaagacgacagcgcgaaaagaaaaacggaggagcacg

SEQ ID NO: 690907 - DNA, 75 bp, synthetic construct
  source 1..75: mol_type = other DNA
caatatcagatttgtcgaaaaagtgcctgatgatgtgctggtctgtactgtggagaactttaaattctggatgga

SEQ ID NO: 690908 - DNA, 75 bp, synthetic construct
  source 1..75: mol_type = other DNA
atcaggcgtgggatgtgttcgaaaaactggaagactgttatttcagccagaaacagccaccagcagcacaaaact

SEQ ID NO: 690909 - DNA, 75 bp, synthetic construct
  source 1..75: mol_type = other DNA
gctttctgcgcagggcatccgcgtcgttggtatgaactataaagacgacaggcagaaagcgattggctggctgaa

SEQ ID NO: 690910 - DNA, 75 bp, synthetic construct
  source 1..75: mol_type = other DNA
gctctgttacgtaacgccaaaagagcatctgggtctgcctaataaagaagatgttaagcaggggcttatcaccta

SEQ ID NO: 690911 - DNA, 75 bp, synthetic construct
  source 1..75: mol_type = other DNA
ctcggcggtcacctcttccatcgaagaagaagtggaaaagctggtatggtccacgcgctggggagcggatacggt

SEQ ID NO: 690912 - DNA, 75 bp, synthetic construct
  source 1..75: mol_type = other DNA
aaaggatccgtcagcgccagcttcatgccagaaaagttacgacacgcgagttctctgttatcagcgaggcggtgt

SEQ ID NO: 690913 - DNA, 75 bp, synthetic construct
  source 1..75: mol_type = other DNA
tggtgatgaaaccggcttgtaccagggtacaaacatccagaacgccgcgaacttttcgcgttttggcatcgtttc

SEQ ID NO: 690914 - DNA, 75 bp, synthetic construct
  source 1..75: mol_type = other DNA
caaaaagacggtggatatttatctggtggtacgcacctgggaagttccgctgcaaatcaccatcagtctgttact

SEQ ID NO: 690915 - DNA, 75 bp, synthetic construct
  source 1..75: mol_type = other DNA
gccatcagaaccgtttcaacggtgccacccgtgaagtggagcgcacactgctttttgtgggctatggcaaaaaga

SEQ ID NO: 690916 - DNA, 75 bp, synthetic construct
  source 1..75: mol_type = other DNA
gaatcactggacaatccggggcagttttatcaggcggatgtgttgacccagggcaaaccagtgctgctcaacgtc

SEQ ID NO: 690917 - DNA, 75 bp, synthetic construct
  source 1..75: mol_type = other DNA
gggcaaaccggtgctgcttaacgtctgggcgacctggtgtccgacctgccgtgcggaacatcaatatctgaatca

SEQ ID NO: 690918 - DNA, 75 bp, synthetic construct
  source 1..75: mol_type = other DNA
caatcgtccgttgatccgtgcccaacatacagcatcaatggaagaggctcatgttacgggacaaattctggcgcg

SEQ ID NO: 690919 - DNA, 75 bp, synthetic construct
  source 1..75: mol_type = other DNA
gcagttgcaccagcttcgcgggcgtgtaggtcgtggtgcggtggcttctcactgcgtgctgctctacaaaacgcc

SEQ ID NO: 690920 - DNA, 75 bp, synthetic construct
  source 1..75: mol_type = other DNA
gccgcaccggagaaacccgaccccgcgccggtggcgccaccgccgccgcgtaaagtacatggctgctacagttcg

SEQ ID NO: 690921 - DNA, 75 bp, synthetic construct
  source 1..75: mol_type = other DNA
tccagccaggtgattctgttgccgtatttggtcttggcgcgattggtctggcagtggttcagggcgcgcgtcagg

SEQ ID NO: 690922 - DNA, 75 bp, synthetic construct
  source 1..75: mol_type = other DNA
cggggagtgtgaattctgtcagtccgggaaaacgaacctctgtgtatcggttcgcgaaactcagggaaaaggact

SEQ ID NO: 690923 - DNA, 75 bp, synthetic construct
  source 1..75: mol_type = other DNA
attggtaaagatatggctggtcagcttggtttatggacttacatagacaagcgtgaaatccttgttaatgatgtt

SEQ ID NO: 690924 - DNA, 75 bp, synthetic construct
  source 1..75: mol_type = other DNA
ttgatccattgctgtttgatagggttgcgttcgacagtacagtaatcctgaaaaaacagcctaatggtaaacctc

SEQ ID NO: 690925 - DNA, 75 bp, synthetic construct
  source 1..75: mol_type = other DNA
acgtaaccataagttacgtaaggctgagcatgatgatgaagaagaaggtattgaatatgaggatactgagtatga

SEQ ID NO: 690926 - DNA, 75 bp, synthetic construct
  source 1..75: mol_type = other DNA
cgtctggagtttgacgccgggcacaccgacattgcgctgtcattcatggcaatccgtcgcgccaccaccgccagc

SEQ ID NO: 690927 - DNA, 75 bp, synthetic construct
  source 1..75: mol_type = other DNA
cgatctggcctgggcaacgatgcacgcactgtttaacgaaccgctgcagggtgaatccgccaataccagcaatat

SEQ ID NO: 690928 - DNA, 75 bp, synthetic construct
  source 1..75: mol_type = other DNA
gtccgggagtttgtctacaaccccaatgttaaaaacgccctggtactcaaggcctacgacattatcagccaccgc

SEQ ID NO: 690929 - DNA, 75 bp, synthetic construct
  source 1..75: mol_type = other DNA
cggtcaggaaatctccacccgtccattccagttggtcaccggtcgcgtatggaaaggttccgcgtttggcggcgt

SEQ ID NO: 690930 - DNA, 75 bp, synthetic construct
  source 1..75: mol_type = other DNA
tcagcttgatgccatcctttatgccaacagaaagaaggaattaacagagcctcaaatcagcgaaggcacatggcg

SEQ ID NO: 690931 - DNA, 75 bp, synthetic construct
  source 1..75: mol_type = other DNA
tcaacttgacgccatcctttatgccaacagaaagaaggaattaacagagcctcaaatcagagaaggccccgagaa

SEQ ID NO: 690932 - DNA, 75 bp, synthetic construct
  source 1..75: mol_type = other DNA
tgatagcgatcctgctaaagatgtagtgggtgagcctgaatctggacacggcatctttttaggtcaaacaggtac

SEQ ID NO: 690933 - DNA, 75 bp, synthetic construct
  source 1..75: mol_type = other DNA
gcgattacgttctcagtggtggtgagttaccagcaatgacgctgattgactccgtttctcggtttattccgggag

SEQ ID NO: 690934 - DNA, 75 bp, synthetic construct
  source 1..75: mol_type = other DNA
gaaattgacgaagaatggtcaatcggggattacgttctgagtggtggtgagttaccagcaatgacgttgattgac

SEQ ID NO: 690935 - DNA, 75 bp, synthetic construct
  source 1..75: mol_type = other DNA
attgatgatgcgattcaaatcatgggcggtctgggctataccgatgaggcgcgcgtctcccgcttctggcgtgat

SEQ ID NO: 690936 - DNA, 75 bp, synthetic construct
  source 1..75: mol_type = other DNA
tctcgatacctcggtgatagatgagctgccgccaggccgcacgccagtgactacggtcgctattcctgatacccg

SEQ ID NO: 690937 - DNA, 75 bp, synthetic construct
  source 1..75: mol_type = other DNA
ttgtgaatctcatttttgggtttgaggccgttgaaactgatgatggttatcagctcaaccttaccaaagatcagt

SEQ ID NO: 690938 - DNA, 75 bp, synthetic construct
  source 1..75: mol_type = other DNA
aatctgtaccgcatgtttataagtacctcacagcagtaagaaaatggccttcggatctgcttgctaaagtacaaa

SEQ ID NO: 690939 - DNA, 75 bp, synthetic construct
  source 1..75: mol_type = other DNA
ggtgggtcgactccagtaagcccggcattaaaatcaatccactgcataaaatcggctggcatatgctcagcacct

SEQ ID NO: 690940 - DNA, 75 bp, synthetic construct
  source 1..75: mol_type = other DNA
gtgccggaagagcgaagttatgcagcgagtgctggcgttttatcagggaaattatcagggggggggctgtgagta

SEQ ID NO: 690941 - DNA, 75 bp, synthetic construct
  source 1..75: mol_type = other DNA
atggcaagagtatttacacaggaagagcgggaaaaaattaaagggcaggttgttgaacttgtacgccagagtgga

SEQ ID NO: 690942 - DNA, 75 bp, synthetic construct
  source 1..75: mol_type = other DNA
acagtgctactaccacttacacgcgtaaaaatggcaaggtttacatcaacggccagaaaacctttattaccggcg

SEQ ID NO: 690943 - DNA, 75 bp, synthetic construct
  source 1..75: mol_type = other DNA
gatccgaaaaaagccttcaccctgtggtgggttgagtccagtaagcccggcattaagatcaatccgctgcataaa

SEQ ID NO: 690944 - DNA, 75 bp, synthetic construct
  source 1..75: mol_type = other DNA
atgcgggcgctggcggataacggtatttccatgcttggcgtgccggaagaatttggtggtatccctgcggattac

SEQ ID NO: 690945 - DNA, 75 bp, synthetic construct
  source 1..75: mol_type = other DNA
cgtgggcggcagccttaccgaaaagattaagggcgtccgtcacagtattgcgctggcgcagaagctggttggcga

SEQ ID NO: 690946 - DNA, 75 bp, synthetic construct
  source 1..75: mol_type = other DNA
acctacaaacaagccctgcgagtcgccgcgcgcgagtcaaaagcggtccgccgttcgctgatcgacaaactggaa

SEQ ID NO: 690947 - DNA, 75 bp, synthetic construct
  source 1..75: mol_type = other DNA
cagcctgacactgttaaagatggtcaatgaagcgcgtaagttatgtggggaaccagaggttcggaacaacaaatt

SEQ ID NO: 690948 - DNA, 75 bp, synthetic construct
  source 1..75: mol_type = other DNA
atgatgaaaccagtaaaacgcctttacctttcaacggatgaagttcacctcgtggatgctagtctggtactggag

SEQ ID NO: 690949 - DNA, 75 bp, synthetic construct
  source 1..75: mol_type = other DNA
agagcgtcaacaccctgaccatgatgctggacaccattgatttgctggcagagctggcgcggcaatgtgcgagcc

SEQ ID NO: 690950 - DNA, 75 bp, synthetic construct
  source 1..75: mol_type = other DNA
caccccaaaacgggcacgtctccgcaggccgcacagttcagccaggtcgctcaggagtgccgccagcttaaaaat

SEQ ID NO: 690951 - DNA, 75 bp, synthetic construct
  source 1..75: mol_type = other DNA
gtggggtattccgatctgcttttgcgctggtttactggttatgtggaacgctcacaacccgccgaaaacggtttt

SEQ ID NO: 690952 - DNA, 75 bp, synthetic construct
  source 1..75: mol_type = other DNA
aaggaggcacatagaatgaccagtaataatttgaatgttaaaaaaccagcatctgttgcttcagctacgccatca

SEQ ID NO: 690953 - DNA, 75 bp, synthetic construct
  source 1..75: mol_type = other DNA
tacatggacagtacctgttgcatttttctttttagtagtgctggctggtatagtattcaatattggcaggaaaag

SEQ ID NO: 690954 - DNA, 75 bp, synthetic construct
  source 1..75: mol_type = other DNA
cgttgccggtaccgatggccgggaatgattcgggtatgtttcagtttccgccagaagggacgctggttgaggttg

SEQ ID NO: 690955 - DNA, 75 bp, synthetic construct
  source 1..75: mol_type = other DNA
ccggtcgatatcccggcagagtttagcctgggggcggctggcggtaattccatgacgctgccggtgatccagagt

SEQ ID NO: 690956 - DNA, 75 bp, synthetic construct
  source 1..75: mol_type = other DNA
gcacaggctatcagttgctgaataatctgggcagggcgttcagtatcccggattacatctggtaccagctgccgg

SEQ ID NO: 690957 - DNA, 75 bp, synthetic construct
  source 1..75: mol_type = other DNA
atcgcagcccgctgaaaacggttttcagcgtctgttcattcgtgagctggtaggtgtgtttgaaaggatgtggcc

SEQ ID NO: 690958 - DNA, 75 bp, synthetic construct
  source 1..75: mol_type = other DNA
cattcctggcgtatctgggctatcttgccggatatcagcacattaatgactgcatggaggatgaacattatcgtc

SEQ ID NO: 690959 - DNA, 75 bp, synthetic construct
  source 1..75: mol_type = other DNA
tattcttgctacggaacatttcagtgactggggatattatgaggtcaatttaatcggcggcgaacagcaaattgc

SEQ ID NO: 690960 - DNA, 75 bp, synthetic construct
  source 1..75: mol_type = other DNA
cgattttgggctgcgtccggcagtctctttcctgatgtctaaaggcaaggatttggtcggtaccgacggtgataa

SEQ ID NO: 690961 - DNA, 75 bp, synthetic construct
  source 1..75: mol_type = other DNA
gcgtttctggccaagcctcgaaaccttcaccaatgtgaccgagttcgaatatgaaattctggcgaaacgtctgcg

SEQ ID NO: 690962 - DNA, 75 bp, synthetic construct
  source 1..75: mol_type = other DNA
gcgggcctgccgggcaaactggcagactgccaggagcgcgatccggcgctttccgaactgtaccttgtggaaggg

SEQ ID NO: 690963 - DNA, 75 bp, synthetic construct
  source 1..75: mol_type = other DNA
gccgtcgtatgctgcgcgttaccgttaaagatgcgattgctgccgaccagttgttcaccacgctgatgggcgacg

SEQ ID NO: 690964 - DNA, 75 bp, synthetic construct
  source 1..75: mol_type = other DNA
ctgtgcttgcactcaatcacgaagcgctgttgttaattttctctgtcgcgctgctcacacttctgctggtttcta

SEQ ID NO: 690965 - DNA, 75 bp, synthetic construct
  source 1..75: mol_type = other DNA
cgaaattcgccagggtggtagcgcccagtgaagccgtgaaaagcggcaatttctccgatccgttcaggccgcgct

SEQ ID NO: 690966 - DNA, 75 bp, synthetic construct
  source 1..75: mol_type = other DNA
tgccgaaaatggccagagtggtatcacacagcgaggcggtcaccagcggtaattttgccgatccgttccggccaa

SEQ ID NO: 690967 - DNA, 75 bp, synthetic construct
  source 1..75: mol_type = other DNA
aggacagagctgccgaacctcggtaaagagcagatttttgttcgcctgaagccctggtgcgcacaacgccacctg

SEQ ID NO: 690968 - DNA, 75 bp, synthetic construct
  source 1..75: mol_type = other DNA
atcatgctgacgaaattcccggcattgcagagtgataatcacagtgacgccaaacaaggatcgttctccgcatcg

SEQ ID NO: 690969 - DNA, 75 bp, synthetic construct
  source 1..75: mol_type = other DNA
gaccgcaggctttgccgctaactatttaaccggaaccatggtgtgcttctttattggtcgtttcaccggtacctg

SEQ ID NO: 690970 - DNA, 75 bp, synthetic construct
  source 1..75: mol_type = other DNA
gcatcatgaactatgatgccgtcattacatggactgtaccagttgtatttttctttttagtgttactggctggta

SEQ ID NO: 690971 - DNA, 75 bp, synthetic construct
  source 1..75: mol_type = other DNA
ggataagaactgcaccgatgatgtgtgggtgtacgacctgcgtaccaatatgccgagcttcggcaagcgcacgcc

SEQ ID NO: 690972 - DNA, 75 bp, synthetic construct
  source 1..75: mol_type = other DNA
tatcgtttcggcaaaagcacattcagaaaaattattgaatatcgtcttatcccgatgatggacctgatcttctgg

SEQ ID NO: 690973 - DNA, 75 bp, synthetic construct
  source 1..75: mol_type = other DNA
tttcacgcattactgtcgatattcatctggaagaggcatcaaccgaagagatcattgaacatctgaaagtgctga

SEQ ID NO: 690974 - DNA, 75 bp, synthetic construct
  source 1..75: mol_type = other DNA
gaaaaattattgattatcgtcttatcccgatgatggacctgatcttctggggagaagataacggcattaaaatcc

SEQ ID NO: 690975 - DNA, 75 bp, synthetic construct
  source 1..75: mol_type = other DNA
aatccgattcgctggatatctcctggctgaaagataaagacagtattgatgccgacaacctgccggagccggatg

SEQ ID NO: 690976 - DNA, 75 bp, synthetic construct
  source 1..75: mol_type = other DNA
gaccacggcggcgcaatccgtctgggcaacaccctgggcagcgacggtgaaaacctgccgaaggcgcatattgtc

SEQ ID NO: 690977 - DNA, 75 bp, synthetic construct
  source 1..75: mol_type = other DNA
gatcaggcgtgggaagtgttcgaaaaactggaagactgttatttcagccagaaacagccaccagcaacacaaaac

SEQ ID NO: 690978 - DNA, 75 bp, synthetic construct
  source 1..75: mol_type = other DNA
gcactacgcccgccagggcatcatcacgccggaaatggaattcatcgccatccgcgagaatatgggccgcgagcg

SEQ ID NO: 690979 - DNA, 75 bp, synthetic construct
  source 1..75: mol_type = other DNA
agcaggacgccgcgtcacccaactgcactacgcccgccagggcatcatcacaccggaaatggaattcatcgccat

SEQ ID NO: 690980 - DNA, 75 bp, synthetic construct
  source 1..75: mol_type = other DNA
ccacgcaaaaatgctcgaaaccgatcaggcgtgggaagtgttcgaaaaactcgaaggctgttatttcagccaaaa

SEQ ID NO: 690981 - DNA, 75 bp, synthetic construct
  source 1..75: mol_type = other DNA
aactggaagactgttatttcagccaaaaacaaccaccagcagcacaaaactccctcaacgaaaatgatggatgcg

SEQ ID NO: 690982 - DNA, 75 bp, synthetic construct
  source 1..75: mol_type = other DNA
gatcaggcgtgggaagtattcgaaaaactggaagactgttatttcagccaaaaacaaccaccagcagcacaaaac

SEQ ID NO: 690983 - DNA, 75 bp, synthetic construct
  source 1..75: mol_type = other DNA
cggtgaaatctttttcagtggtgataccgctacccttggacatgagcttgccagaacctacgcggtaaatcctac

SEQ ID NO: 690984 - DNA, 75 bp, synthetic construct
  source 1..75: mol_type = other DNA
ataaaacattactcataacagataaaacgtttttcaaaattcctcctgaattgttatctgactgtaatatttata

SEQ ID NO: 690985 - DNA, 75 bp, synthetic construct
  source 1..75: mol_type = other DNA
ctgaaaaatatattttagtacagaacactcaagaacttattaagcagacagcaaagcaaatcaataattgcgagt

SEQ ID NO: 690986 - DNA, 75 bp, synthetic construct
  source 1..75: mol_type = other DNA
atgattaatcccacacctatttataataaatttaagtatgtctccgccccttgtggttcaggtaaaactactgct

SEQ ID NO: 690987 - DNA, 75 bp, synthetic construct
  source 1..75: mol_type = other DNA
agataaagccgctatatggagccgatattacaaagcagtacaaaaaaaagccgcagatgcagtccgaaacaccga

SEQ ID NO: 690988 - DNA, 75 bp, synthetic construct
  source 1..75: mol_type = other DNA
aaactcgctacagatacatcccaaaaaatcaccccctgcaaattactaattagcgatttaatgcccaacagtaaa

SEQ ID NO: 690989 - DNA, 75 bp, synthetic construct
  source 1..75: mol_type = other DNA
gaacaaaagcgattctcagagcctcaaaaacggcacagagataagcccggatgccagagggtttaaccagtacca

SEQ ID NO: 690990 - DNA, 75 bp, synthetic construct
  source 1..75: mol_type = other DNA
gccggaacctatgccaaaaaactggcggaaaagggatttgtcactattgcttatgacgcatcttatcaaggtgaa

SEQ ID NO: 690991 - DNA, 75 bp, synthetic construct
  source 1..75: mol_type = other DNA
gccggaacctatgccgaaaaactggcggaaagggatttgtcactattgcttatgacgcatcttatcaaggtgaaa

SEQ ID NO: 690992 - DNA, 75 bp, synthetic construct
  source 1..75: mol_type = other DNA
cttgaagattacatgatggaaaacaactacttgaaagactcccctgttgaaaagcatgtagaagacgacaggaat

SEQ ID NO: 690993 - DNA, 75 bp, synthetic construct
  source 1..75: mol_type = other DNA
aagctaaacagtgcaaattgttctttaagattgacggcgaggcgatacacctcgcaagagagtacgaaagtctac

SEQ ID NO: 690994 - DNA, 75 bp, synthetic construct
  source 1..75: mol_type = other DNA
atcgcgcattcttctggaaattaccgacgtgcgtgtggaacggctgcatgacatgagcgaggcagatgctaaagc

SEQ ID NO: 690995 - DNA, 75 bp, synthetic construct
  source 1..75: mol_type = other DNA
ttacaaaaacttaggcctgattacggctatgacgttgaggcaaataacttcaaatatcctaccgatatagaggct

SEQ ID NO: 690996 - DNA, 75 bp, synthetic construct
  source 1..75: mol_type = other DNA
acctaggtacgccacaactgaaagcgtctacgtcgataaacgtcccagacccgacgccgtttgtgacttatttct

SEQ ID NO: 690997 - DNA, 75 bp, synthetic construct
  source 1..75: mol_type = other DNA
agttttttgaacagcctgaagtcgacgttatcacgcaaatttccattaagtgataaacaactgacggtcgcagcc

SEQ ID NO: 690998 - DNA, 75 bp, synthetic construct
  source 1..75: mol_type = other DNA
cgctgtattgcctgtaatgccactggctatagcctggtcactacccgtacctgttacaccctgactgcactgtat

SEQ ID NO: 690999 - DNA, 75 bp, synthetic construct
  source 1..75: mol_type = other DNA
tggcggatattggcggttatctcagctatgaatcgcaatggggtacatggtctggctcagcatcggctgacactg

SEQ ID NO: 691000 - DNA, 75 bp, synthetic construct
  source 1..75: mol_type = other DNA
ccgtatgagcactgactttaacggcagccatcgtttgagcgccagcgccaacggcagcagcggcgatggaaaata

SEQ ID NO: 691001 - DNA, 75 bp, synthetic construct
  source 1..75: mol_type = other DNA
gaaggaaccgtaccgcctggcgaattcgccattgatgacatcatgccttctggctacggcaatgatctggtggtc

SEQ ID NO: 691002 - DNA, 75 bp, synthetic construct
  source 1..75: mol_type = other DNA
ctgctggagcagggcaaagcgagttatacccatgttggccatgacggctcagggcgcttccgtcagggtgtcttt

SEQ ID NO: 691003 - DNA, 75 bp, synthetic construct
  source 1..75: mol_type = other DNA
ttgtgttctatactggtcgaaggtgctacagatgttaccattaatgatgaagtacgaatgtgtattgagcacctt

SEQ ID NO: 691004 - DNA, 75 bp, synthetic construct
  source 1..75: mol_type = other DNA
tctgctggcttgatgaatttgccgagcctgctatagcccgcaaaatatattcatcggcttttccgctggtggata

SEQ ID NO: 691005 - DNA, 75 bp, synthetic construct
  source 1..75: mol_type = other DNA
tcaagagaataaaaattctcaacctgaccgcagcacattgaaaactaaactgatcgcaattgtcgaattgttaga

SEQ ID NO: 691006 - DNA, 75 bp, synthetic construct
  source 1..75: mol_type = other DNA
atctcggtacgccacaactgaaagcgtcaacatcgataagcattccggacccgacaccgtttgtgacttattttt

SEQ ID NO: 691007 - DNA, 75 bp, synthetic construct
  source 1..75: mol_type = other DNA
aggtcactacgagacgccaacctgccagaaagtatgtccgatccccaataccattgtgaaagatccggagcatgt

SEQ ID NO: 691008 - DNA, 75 bp, synthetic construct
  source 1..75: mol_type = other DNA
tgaaaaaccagttcaccgtaagcattaaccaaccgctacgctttgggaaggatgattatggctcgttctatacct

SEQ ID NO: 691009 - DNA, 75 bp, synthetic construct
  source 1..75: mol_type = other DNA
cctcaggcctatgtcctgaagagctatggcggctacgttgatccttccttatgggagtcgggaattaacgctgcc

SEQ ID NO: 691010 - DNA, 75 bp, synthetic construct
  source 1..75: mol_type = other DNA
ataaaacctaccaggggcaaagttatcgcgtgacctggaacaaacttttccaggatacagggacatcgtttaacc

SEQ ID NO: 691011 - DNA, 75 bp, synthetic construct
  source 1..75: mol_type = other DNA
agcagcaacggtgctgcggcagacacggtggaatatgacagttccttcttaatgggaactggcgcatcaacgatt

SEQ ID NO: 691012 - DNA, 75 bp, synthetic construct
  source 1..75: mol_type = other DNA
ttattgcagtttcacattaataaaccagatataaatgccgagaattccatccttctacagcgcgaaggcgaactc

SEQ ID NO: 691013 - DNA, 75 bp, synthetic construct
  source 1..75: mol_type = other DNA
tccgcactggccagctatgcgccaatcattcgtggcgtagcaaattctaacgccaaagtgacagtgacccagaac

SEQ ID NO: 691014 - DNA, 75 bp, synthetic construct
  source 1..75: mol_type = other DNA
cagggacaatcggcaatcatgaatattaagcgtaatgacggtaaaaatattccattcgcggcggatatctttgat

SEQ ID NO: 691015 - DNA, 75 bp, synthetic construct
  source 1..75: mol_type = other DNA
tctgtgctggccagttacgccccgaccatccgtggtgtggcaaactccaacgccaaagtcaccgtgacacaaggt

SEQ ID NO: 691016 - DNA, 75 bp, synthetic construct
  source 1..75: mol_type = other DNA
gtagcatcgccattccgcgccagggttccgtcattttcagccattttgacaccgacaccgggcgttctgccattc

SEQ ID NO: 691017 - DNA, 75 bp, synthetic construct
  source 1..75: mol_type = other DNA
cgatgctgactaccaggccttcctgttaggggtcggggtaaacacctcaattggcgccgtgtcgtttgatgtgac

SEQ ID NO: 691018 - DNA, 75 bp, synthetic construct
  source 1..75: mol_type = other DNA
gcgcagccacaaacgctgggaagtaccaacaccttattacttaacaatcttacctgtcaggtagcaaatcactaa

SEQ ID NO: 691019 - DNA, 75 bp, synthetic construct
  source 1..75: mol_type = other DNA
atatgtctgccgatgaagacaaaaacaccatgcagacatactcacgcatgaaaaaccagtttaccgtcagcatca

SEQ ID NO: 691020 - DNA, 75 bp, synthetic construct
  source 1..75: mol_type = other DNA
ccatccgtggtgtggcaaactccaacgccaaagtcaccgtgacacaaggtggttataaaatctatgaaaccaccg

SEQ ID NO: 691021 - DNA, 75 bp, synthetic construct
  source 1..75: mol_type = other DNA
attgttttcgcggtggtactggtcacgttgggaaaatatctcttcccggccaaacccgttgtcgcgccagttatt

SEQ ID NO: 691022 - DNA, 75 bp, synthetic construct
  source 1..75: mol_type = other DNA
ggaatgggctggtccccagacgaactggatcgggacggtattctactgctcagcacgctgggagggttacgcggg

SEQ ID NO: 691023 - DNA, 75 bp, synthetic construct
  source 1..75: mol_type = other DNA
cagcacaacatcgcaaccgtgctggtccccggcggcgcgacgctgcccgcaaaggatggagaagacaacggcaag

SEQ ID NO: 691024 - DNA, 75 bp, synthetic construct
  source 1..75: mol_type = other DNA
tggagtgcctggcgctctctgagatgggcgtgtcctgcgcctgtttcaccattggaaagatctataccggactac

SEQ ID NO: 691025 - DNA, 75 bp, synthetic construct
  source 1..75: mol_type = other DNA
gtgttccacgatctcggtaatacctgctttacctttatggctggcaagccggagtacgataaaaccatctccacg

SEQ ID NO: 691026 - DNA, 75 bp, synthetic construct
  source 1..75: mol_type = other DNA
gactacgccccctcatatcacatggaaggtactacaatggctcaggttgccatttttaaacaaatattcgataaa

SEQ ID NO: 691027 - DNA, 75 bp, synthetic construct
  source 1..75: mol_type = other DNA
gtaaattacgcaccggggatttaattgaaattaaaattgattgtcgcgagcttcacggcgaagtcaatttcctcg

SEQ ID NO: 691028 - DNA, 75 bp, synthetic construct
  source 1..75: mol_type = other DNA
gccaaagaagtgagtaaagacagtatgaattctctcttcacaggggcagcagaccgatatcaaattgcatctaaa

SEQ ID NO: 691029 - DNA, 75 bp, synthetic construct
  source 1..75: mol_type = other DNA
atgacagtaaaaactaaacgtgtgcgcctcctggcactcacagaagaaggcaaagcgggtaattgcttcacagta

SEQ ID NO: 691030 - DNA, 75 bp, synthetic construct
  source 1..75: mol_type = other DNA
tccattcatgaaaataatgtggctgaattttatatgcttgataagcagtttcatctgaccatttctgaagccagc

SEQ ID NO: 691031 - DNA, 75 bp, synthetic construct
  source 1..75: mol_type = other DNA
gaacctgtagccgaatctggtaatgactccaacttattgatagtgttttatgttcagataatgcccgatgacttt

SEQ ID NO: 691032 - DNA, 75 bp, synthetic construct
  source 1..75: mol_type = other DNA
cgatgcgtttgcgaaagggaaaacgctgcaccagacattcttaaaaaatctggaagcctttgaacctgtagccga

SEQ ID NO: 691033 - DNA, 75 bp, synthetic construct
  source 1..75: mol_type = other DNA
aaacctttgcccgccagagtagctgggagtggaacttcggtcaggctccggcgttttcgcatctgctggatgaac

SEQ ID NO: 691034 - DNA, 75 bp, synthetic construct
  source 1..75: mol_type = other DNA
agggggtcgtggaatgaaaccttaaagaaaatccaggataaacttctggatcctaaagaacttagaaaaaaaaag

SEQ ID NO: 691035 - DNA, 75 bp, synthetic construct
  source 1..75: mol_type = other DNA
ggaagagcgcgccatggtaggtcgcgaaggctatggttttatccatatgatggaaaactttgaaattgaacgtct

SEQ ID NO: 691036 - DNA, 75 bp, synthetic construct
  source 1..75: mol_type = other DNA
gcatgggaatgcgacaacaacctgtcgatgcgcctctctgcccccatgtgcaaattgtactgtgcgcaatcagcc

SEQ ID NO: 691037 - DNA, 75 bp, synthetic construct
  source 1..75: mol_type = other DNA
gaacttacccgtcgaatgccacaacacagggagcgaataatgacgattgcagagcgaattcataatgatggatag

SEQ ID NO: 691038 - DNA, 75 bp, synthetic construct
  source 1..75: mol_type = other DNA
gtgtgcatattgtactgccgctcagcaattgcattatcagggggtggatatcggcgggaagcgtagtttatatca

SEQ ID NO: 691039 - DNA, 75 bp, synthetic construct
  source 1..75: mol_type = other DNA
acggatacgtaagcttaactacgcatctgcatatacagtgtccaatattctcatacaggattgcggcggggccga

SEQ ID NO: 691040 - DNA, 75 bp, synthetic construct
  source 1..75: mol_type = other DNA
acagcctcaaccccgcgccgctggaagccctcgccgggcgactgcaaggctgcctgtaccgcgcggatatgctgc

SEQ ID NO: 691041 - DNA, 75 bp, synthetic construct
  source 1..75: mol_type = other DNA
gcgtgaccaatctgaccgaattgctgccgggaattacccatgagcaggtttgcgaggccatatccgaaacctttt

SEQ ID NO: 691042 - DNA, 75 bp, synthetic construct
  source 1..75: mol_type = other DNA
aacaagagtgcgaagcgctgttggttgacttcccggaccaggaaaaagagctacgggagttgtcgacgtggatag

SEQ ID NO: 691043 - DNA, 75 bp, synthetic construct
  source 1..75: mol_type = other DNA
atacttccctttccaccattagaggtgagatttattcccatccaacattgggttccagaataagacagttcttcc

SEQ ID NO: 691044 - DNA, 75 bp, synthetic construct
  source 1..75: mol_type = other DNA
gctcaaaaactgtaagagctctagcactacgggctggttataggtgctcattccccggttgtaatcagcttacag

SEQ ID NO: 691045 - DNA, 75 bp, synthetic construct
  source 1..75: mol_type = other DNA
aaaggcattacttcagtgcgttcccgcgtgaccaacctcaccgagctgctgccggggctcaccatgagcaggttt

SEQ ID NO: 691046 - DNA, 75 bp, synthetic construct
  source 1..75: mol_type = other DNA
aactggaaggtcagctcgccatgctgcgccagcgttgtgccccggtggcgcagtttggcacgctaagcgcccgtt

SEQ ID NO: 691047 - DNA, 75 bp, synthetic construct
  source 1..75: mol_type = other DNA
cgtgatgtcggactctcccgtacccaggccaaagcattcatggccggggctatggcgcactgtccctgcgcgacg

SEQ ID NO: 691048 - DNA, 75 bp, synthetic construct
  source 1..75: mol_type = other DNA
gctgaggctggggacaacctgaccgcgcttcatcacgcggtcgaacggcaacaactgccacaagtggcctggctg

SEQ ID NO: 691049 - DNA, 75 bp, synthetic construct
  source 1..75: mol_type = other DNA
gctcgctgaaactgccctcatggatggacaggggagaacccgacaaactgctgcgggccgcgcaggcgttctggt

SEQ ID NO: 691050 - DNA, 75 bp, synthetic construct
  source 1..75: mol_type = other DNA
aatctgttcatcatgcccgttgccgtttgtggcgcgacggcgatgtgggtcgattgctatcgcgataaacacgcg

SEQ ID NO: 691051 - DNA, 75 bp, synthetic construct
  source 1..75: mol_type = other DNA
cacgcagcggtttttactattttgcgcaaggctggaagctcgtctcgcaacctgggattcggcgttttgttattt

SEQ ID NO: 691052 - DNA, 75 bp, synthetic construct
  source 1..75: mol_type = other DNA
ctatagcgcactgtccctgcgcgacgctgaggatgtgagctctgcactgaatgcactgaaaaatctgaacttcta

SEQ ID NO: 691053 - DNA, 75 bp, synthetic construct
  source 1..75: mol_type = other DNA
aaagtaagccggaagaattaatggcttttcgcatgatgcgctattccattgcggcgatgcaaaaccatcttgatg

SEQ ID NO: 691054 - DNA, 75 bp, synthetic construct
  source 1..75: mol_type = other DNA
aatattactccgacatcttgtggtcagtgaaaactgaggaagggatgggatatatttatgtcgtcattgaacacc

SEQ ID NO: 691055 - DNA, 75 bp, synthetic construct
  source 1..75: mol_type = other DNA
gcctatgaagcacgcctggttcggtgccgccatgcgctggaaaaaatcgaaaacaggttagcgcgtttaactcgc

SEQ ID NO: 691056 - DNA, 75 bp, synthetic construct
  source 1..75: mol_type = other DNA
cgcgatgttggactttcgcgaacccaggccaaagcattcatggccgggggatatggcgctttatccctgcgtgat

SEQ ID NO: 691057 - DNA, 75 bp, synthetic construct
  source 1..75: mol_type = other DNA
atgaaaaagactgccgcaattatttctgcctgtatgctgacttttgccctgggcgcctgttccggttcgaactat

SEQ ID NO: 691058 - DNA, 75 bp, synthetic construct
  source 1..75: mol_type = other DNA
cgtcttggggtgggagaggtaaaaaccctggaacgacagctgcagcatgactgggacgttattttactgcgtatc

SEQ ID NO: 691059 - DNA, 75 bp, synthetic construct
  source 1..75: mol_type = other DNA
ccgaaaaaacattgatcagcagctacgacgctatccgcgtttacatgtgggtaggcatgatgcctgacagcgatc

SEQ ID NO: 691060 - DNA, 75 bp, synthetic construct
  source 1..75: mol_type = other DNA
tttcctggtagtgatgcctattacaactatgtgttgaccctgtttggacaaggctgggatcaacaccgtttccgc

SEQ ID NO: 691061 - DNA, 75 bp, synthetic construct
  source 1..75: mol_type = other DNA
gatccggaaggtgtgttcccggcagtactgggtcatgaaggtgcgggtgttgttgtggaagtcggcgaaggggtc

SEQ ID NO: 691062 - DNA, 75 bp, synthetic construct
  source 1..75: mol_type = other DNA
gtgataattaccactggggctggatattcttcatcaacgtgccgattggcgtggcggtggtgttgatgacactgc

SEQ ID NO: 691063 - DNA, 75 bp, synthetic construct
  source 1..75: mol_type = other DNA
agcctgaatatgctgatcttcttccgcgtgattcaggggattgtcgccgggccgttgatcccgctttcgcaaagt

SEQ ID NO: 691064 - DNA, 75 bp, synthetic construct
  source 1..75: mol_type = other DNA
aaacctgggctcatcgctcagccagggaacgtgggtgatcacctccttcggggtggcaaacgccatctcgatccc

SEQ ID NO: 691065 - DNA, 75 bp, synthetic construct
  source 1..75: mol_type = other DNA
ggcgcgttagcgattatttttggctccgaagccatgtcagcaataattggtttattaatcggtaatattattggt

SEQ ID NO: 691066 - DNA, 75 bp, synthetic construct
  source 1..75: mol_type = other DNA
ataccatctggctggatattactgttcacgcagccagttattcagcttcggtggaacaatatatttttacaggtt

SEQ ID NO: 691067 - DNA, 75 bp, synthetic construct
  source 1..75: mol_type = other DNA
cgggcgaacatgccgccgttatcagtttgaggtgatcacgtctgaaagcctggttatcaggactgggtgggatca

SEQ ID NO: 691068 - DNA, 75 bp, synthetic construct
  source 1..75: mol_type = other DNA
gaaacagcgtctcgaaagatttcaacgaaatagagcaaattgcggagaaactgattaaacgccgcaaagatattg

SEQ ID NO: 691069 - DNA, 75 bp, synthetic construct
  source 1..75: mol_type = other DNA
tcacttgatgcagctatcgcatctgcggtcgacaatattgaatcagccggtatcggtgcaattgttgaatccgtc

SEQ ID NO: 691070 - DNA, 75 bp, synthetic construct
  source 1..75: mol_type = other DNA
gcttaaagacggattacgtggcaaaggtgattttccttgccctgttcagcgtatcagcggtcagtctccactctg

SEQ ID NO: 691071 - DNA, 75 bp, synthetic construct
  source 1..75: mol_type = other DNA
cgcatgatgcggtatttaaatcctttttacgccatccagatacagcacgagattttattgatattcatcttccag

SEQ ID NO: 691072 - DNA, 75 bp, synthetic construct
  source 1..75: mol_type = other DNA
atgcgaaataaacatgatattgaagacctggcatttgaagccctgcactctgcgaaaaaaatcagggaagtcgtc

SEQ ID NO: 691073 - DNA, 75 bp, synthetic construct
  source 1..75: mol_type = other DNA
tttccagagatggattaagagagaatgataaagaaattgtttctatgatgattcaggaaatgaacaatgaacggg

SEQ ID NO: 691074 - DNA, 75 bp, synthetic construct
  source 1..75: mol_type = other DNA
gtatacggaaaatgaaagcggcaactactaccacgcaacgcaaccacgccagttaggggaaaaaccccttgataa

SEQ ID NO: 691075 - DNA, 75 bp, synthetic construct
  source 1..75: mol_type = other DNA
ggttacgtgctgatccagactgacaactacaatatcgaaaccagcgtcacgggcctggcgattattttgattctg

SEQ ID NO: 691076 - DNA, 75 bp, synthetic construct
  source 1..75: mol_type = other DNA
aaattatcatcgacggcctgaaacgccagtatgacgatcgcctgctgctaccaatcccacgcctgaaaaccaata

SEQ ID NO: 691077 - DNA, 75 bp, synthetic construct
  source 1..75: mol_type = other DNA
ttttactcaagacggcttaagagagggcgataaagaaataatttctattatgcttaaaaacataaaaagagatga

SEQ ID NO: 691078 - DNA, 75 bp, synthetic construct
  source 1..75: mol_type = other DNA
atgacagctcttttctgatgggaagcggcgcggcaaccattgatgtctcccgatatactgaaggcaacccgacac

SEQ ID NO: 691079 - DNA, 75 bp, synthetic construct
  source 1..75: mol_type = other DNA
tgaagaattaccaaaactatgttgactcttcactgtgggaaaacggtattaacgccgcaatgctagcctacaacg

SEQ ID NO: 691080 - DNA, 75 bp, synthetic construct
  source 1..75: mol_type = other DNA
ttaccagcagagcgcagcaccagaaaaaatagcgcaatctattattttgaatggaattagttgtcagattcagta

SEQ ID NO: 691081 - DNA, 75 bp, synthetic construct
  source 1..75: mol_type = other DNA
ccgatgccgcaggagttgattgcggcgggcgtcagtctggtgagcttctccggcgacaagttgttaggcgggccg

SEQ ID NO: 691082 - DNA, 75 bp, synthetic construct
  source 1..75: mol_type = other DNA
caggcaggaattattgttggtaaaaaagagatgatcgcccgcctgcaaagccacccgctgaagcgtgcattacgc

SEQ ID NO: 691083 - DNA, 75 bp, synthetic construct
  source 1..75: mol_type = other DNA
tcacgaatgacagcttcagtgacgccgacacgatggtactggtaaatgcaccaggcgcgaaaggcgctcgcctga

SEQ ID NO: 691084 - DNA, 75 bp, synthetic construct
  source 1..75: mol_type = other DNA
cacaaaccggaagaagccgcagcgatgcgccgcgacggtttaatgctaacgttacagaataacccgccgcagtaa

SEQ ID NO: 691085 - DNA, 75 bp, synthetic construct
  source 1..75: mol_type = other DNA
agatggtcaaaccgacgatagcatttatctcagcttcacgattccaatagaaaatttactgggtacggaacaccg

SEQ ID NO: 691086 - DNA, 75 bp, synthetic construct
  source 1..75: mol_type = other DNA
agacgaagatcttggtgattgcctcaatctggctgaaatgatccctcaatcatccattcgttacgatgttaacga

SEQ ID NO: 691087 - DNA, 75 bp, synthetic construct
  source 1..75: mol_type = other DNA
gtaaaaagaacgctcaggcctgcattacgcagaaaaatttattgcaatttcatatcagttcaccagacaagaata

SEQ ID NO: 691088 - DNA, 75 bp, synthetic construct
  source 1..75: mol_type = other DNA
gcggaaatgcaaaaccatcttgatgcgggctataaagaactgcctttggtgatcccgatgctgttttatcatggt

SEQ ID NO: 691089 - DNA, 75 bp, synthetic construct
  source 1..75: mol_type = other DNA
atgcatccgcttactcatccattgcctgtcacggcacatgtctcattgttagataagaactctctcactccggcc

SEQ ID NO: 691090 - DNA, 75 bp, synthetic construct
  source 1..75: mol_type = other DNA
atgctgttaattcctctgggcagcgctttgctcttaaccgggtgtgcgggcacagagaccgaatttcaatgtaat

SEQ ID NO: 691091 - DNA, 75 bp, synthetic construct
  source 1..75: mol_type = other DNA
atgcattttacaacttttctgaaaaaacatttcgatatagaaaaaatcgttggcacttctgattctggacatgat

SEQ ID NO: 691092 - DNA, 75 bp, synthetic construct
  source 1..75: mol_type = other DNA
tggtggaaaaaccaaagccggaaaacgcgtcatcaggtggcgttgcaggtggcaatggcggaacatcttattgaa

SEQ ID NO: 691093 - DNA, 75 bp, synthetic construct
  source 1..75: mol_type = other DNA
tgggtcagtcgctgatgaagcacggagaatggcaggaagcatcgctcgccttccgcgcggcgctgaaacaacgtc

SEQ ID NO: 691094 - DNA, 75 bp, synthetic construct
  source 1..75: mol_type = other DNA
atgactactaaagctactcgcggtcgccctgcccgttttacccgtgaacagatggctgatattgcctacgcttac

SEQ ID NO: 691095 - DNA, 75 bp, synthetic construct
  source 1..75: mol_type = other DNA
tggggcggatgaagctggcggacgatggcgcgaatattccggcagggagtgcgattgtcaccccgtcgatcatcc

SEQ ID NO: 691096 - DNA, 75 bp, synthetic construct
  source 1..75: mol_type = other DNA
gtcacgccaaacattatcaaggccgatcagattgccgagtaccagactctggtatggaacggttatgcgcaggat

SEQ ID NO: 691097 - DNA, 75 bp, synthetic construct
  source 1..75: mol_type = other DNA
gtcgcaagtggtgatgtatataattctggctacggggtatttccctctgaacaggctcataaagactggcaaaac

SEQ ID NO: 691098 - DNA, 75 bp, synthetic construct
  source 1..75: mol_type = other DNA
ggtggaactcgtgcgccagagcggtcgtgagacgttacggcaactggaagccaagacaggtgcgacaagatatct

SEQ ID NO: 691099 - DNA, 75 bp, synthetic construct
  source 1..75: mol_type = other DNA
actggcaaaatgcccgtaaaaagctctcaagggcaaagctgaagaaaccatctgcggttgatccggaccttatct

SEQ ID NO: 691100 - DNA, 75 bp, synthetic construct
  source 1..75: mol_type = other DNA
acaggcccgtaaggactggcaaaacgcccgcaaaaaactatccagggcaaagctgaagaaaccatctgtggttga

SEQ ID NO: 691101 - DNA, 75 bp, synthetic construct
  source 1..75: mol_type = other DNA
gttgccagtggtgatgtatatcactctggctatgggttgttcccgtcagaacaggctcgtaaggactggcaaaac

SEQ ID NO: 691102 - DNA, 75 bp, synthetic construct
  source 1..75: mol_type = other DNA
agaacataatttgtcgcgagtgccgtcagagcgaagctatgcagcgcgtgcttgctttctggaggggaaattttc

SEQ ID NO: 691103 - DNA, 75 bp, synthetic construct
  source 1..75: mol_type = other DNA
gcccgcaaaaaactatcgagggcaaaggtgaagaaaccagttgtggttgatctggaccttatttggtcattacca

SEQ ID NO: 691104 - DNA, 75 bp, synthetic construct
  source 1..75: mol_type = other DNA
gcccgcaaaaaactatccagggcaaaggtgaagaaaccatctgtggttgatccggaccttatctggtcattacca

SEQ ID NO: 691105 - DNA, 75 bp, synthetic construct
  source 1..75: mol_type = other DNA
ggcgcctgaatataatctgtcgcgagtgccggaagagcgaagctatgcagcgtgtactggcattttatcaaggaa

SEQ ID NO: 691106 - DNA, 75 bp, synthetic construct
  source 1..75: mol_type = other DNA
agctgaagaaaccatctgcggttgatccggaccttatctggtcattacctgatggagaaatacgtcgctacgaca

SEQ ID NO: 691107 - DNA, 75 bp, synthetic construct
  source 1..75: mol_type = other DNA
agctgaagaaaccatctgtggttgatccggaccttatctgtcattacctgatggagaaatacgtcgttacgacag

SEQ ID NO: 691108 - DNA, 75 bp, synthetic construct
  source 1..75: mol_type = other DNA
ctaaaacaggcgcgacaagatatctgatgagtgttctcgccagagagctggttgccagtggcgatgtatataact

SEQ ID NO: 691109 - DNA, 75 bp, synthetic construct
  source 1..75: mol_type = other DNA
ggcgtcagaacataatctgtcgcgagtgccggaagagtgaagctatgcagcgcgtactggcgttttatcagggga

SEQ ID NO: 691110 - DNA, 75 bp, synthetic construct
  source 1..75: mol_type = other DNA
atcgtcagactatttcttttgattttgagcattttaataatctggtcaatttcagcgagtggaaaacatccccct

SEQ ID NO: 691111 - DNA, 75 bp, synthetic construct
  source 1..75: mol_type = other DNA
atgcagcagctttcctttctgctcggagagatgacgcccggcgagcgcagtctcattctgcgggccctgaaaacc

SEQ ID NO: 691112 - DNA, 75 bp, synthetic construct
  source 1..75: mol_type = other DNA
aactctggttacgggttattcccgtctgaacaggcgcgtaaggactggcaaaacgcccgcaaaaaactctcaagg

SEQ ID NO: 691113 - DNA, 75 bp, synthetic construct
  source 1..75: mol_type = other DNA
gtaaacaatcattgataagtcgttgttatagcctgctgctatccgaacccggcacaaaatggacagcaaacaagg

SEQ ID NO: 691114 - DNA, 75 bp, synthetic construct
  source 1..75: mol_type = other DNA
aatgagcttaagggtactccagtcgttgataataaaggcgtaagcgttccgctttatgatacgccttacttttca

SEQ ID NO: 691115 - DNA, 75 bp, synthetic construct
  source 1..75: mol_type = other DNA
aacttcactgatagtctcggtggtgttgttgtcattgaagatcgcaagagcgatgcttttaccgcagatattaaa

SEQ ID NO: 691116 - DNA, 75 bp, synthetic construct
  source 1..75: mol_type = other DNA
atgagtcaggttagcctgtcgcaacaactgaaagagggtaatctctttgcggaacagtgcccgtcgcgcgaggtg

SEQ ID NO: 691117 - DNA, 75 bp, synthetic construct
  source 1..75: mol_type = other DNA
agaacataatctgtcgcgagtgccggaatagtgaggttatgcagcgagtgctggcgttttatcagggtaattttc

SEQ ID NO: 691118 - DNA, 75 bp, synthetic construct
  source 1..75: mol_type = other DNA
agcgggaaaaaattaaggtacaggttgttgaacttgtgcgtctgagcgggcgcgagacgttacggcaaccggaag

SEQ ID NO: 691119 - DNA, 75 bp, synthetic construct
  source 1..75: mol_type = other DNA
gatggagaaatacgtcgttacgacaggcgtcataatataatttgtactgagtgtcgtaaaagcgaagttatgcag

SEQ ID NO: 691120 - DNA, 75 bp, synthetic construct
  source 1..75: mol_type = other DNA
acgtcaccagccgttggggggtgttgattctggtggcgctacgcgaaggtactcatcgctttagcgacctgcggc

SEQ ID NO: 691121 - DNA, 75 bp, synthetic construct
  source 1..75: mol_type = other DNA
gaaaaggttgctgcactggcggactggattgagttgaatttgcccgaggtgttggcggtgcgggatgaacgtgcg

SEQ ID NO: 691122 - DNA, 75 bp, synthetic construct
  source 1..75: mol_type = other DNA
gttgccagtggtgatgtatacaattctggctacgggttatttccgtctgaacaggctcgcaaggactggcaaaac

SEQ ID NO: 691123 - DNA, 75 bp, synthetic construct
  source 1..75: mol_type = other DNA
gtagacagtggtgttgtatatggttcagggcatggaatattcccttctgagcaggcacgtaaagactggataaaa

SEQ ID NO: 691124 - DNA, 75 bp, synthetic construct
  source 1..75: mol_type = other DNA
ccggctacgggttattcccgtctgaacaggcacgaaaggactggcaaaatgcccgcaaaaaactcttagggcgaa

SEQ ID NO: 691125 - DNA, 75 bp, synthetic construct
  source 1..75: mol_type = other DNA
agcgggaaaaaattaagaggcaggttgttgaactcgtgcgccagagagggcgcgagacgttacgacaactggaag

SEQ ID NO: 691126 - DNA, 75 bp, synthetic construct
  source 1..75: mol_type = other DNA
cgggctttaccccgctgcggcgggcctgcgtgaccatgctgggcattaccaccgcggcgggtatcaccatgttgt

SEQ ID NO: 691127 - DNA, 75 bp, synthetic construct
  source 1..75: mol_type = other DNA
gtcgccagtggtgatgtttacaattcaggctacggattattcccgtctgagcaggctcgtaaggactggcaaaac

SEQ ID NO: 691128 - DNA, 75 bp, synthetic construct
  source 1..75: mol_type = other DNA
ggcgtcagaacataatctgtcgcgagtgccggaaaggcaaggttatgcagcgcgtactggcgttttatcagggga

SEQ ID NO: 691129 - DNA, 75 bp, synthetic construct
  source 1..75: mol_type = other DNA
ggcgtctgattataatctgtagcgagtgccggcagagtgaggttatgcagcgtgtgctggcgttctatcagggta

SEQ ID NO: 691130 - DNA, 75 bp, synthetic construct
  source 1..75: mol_type = other DNA
ataatttgtcgtgagagcaggaggagcgaagttatgcagcgtgtgctggcgttctatcggggaaactttcaggag

SEQ ID NO: 691131 - DNA, 75 bp, synthetic construct
  source 1..75: mol_type = other DNA
gcaggcgcgtaaagactggcaaaacgcccgcaaaaaactatcgagggcaaaggtgaagaaacctgctgtagttga

SEQ ID NO: 691132 - DNA, 75 bp, synthetic construct
  source 1..75: mol_type = other DNA
ctaaaactggggcaacaagatatctgatgagcgttctggccagagaactggttgccagtggcgatgtatacaact

SEQ ID NO: 691133 - DNA, 75 bp, synthetic construct
  source 1..75: mol_type = other DNA
tccagaccttatttggtcattactagacggagaaatacgtcgttacgacaggcgtcataatataatttgtagtga

SEQ ID NO: 691134 - DNA, 75 bp, synthetic construct
  source 1..75: mol_type = other DNA
ggcgtcagaacatgatttgccgtgagtgccgggaaagcaaaggtatgcagcgtatactaacgttctattggggaa

SEQ ID NO: 691135 - DNA, 75 bp, synthetic construct
  source 1..75: mol_type = other DNA
ccagcctgcggcgaccaacgacacgccacagggccgggcagtcaaccggcgtgtcgaaatcagtcttgttccgcg

SEQ ID NO: 691136 - DNA, 75 bp, synthetic construct
  source 1..75: mol_type = other DNA
acgggctcgtaaggactggcaaaacgcccgcaaaaaactctcgagggcaaaggtgaagaaacctgttgtggttga

SEQ ID NO: 691137 - DNA, 75 bp, synthetic construct
  source 1..75: mol_type = other DNA
tccggagcttatctggtcattacctgacggagaaatacgtcgttatgacaggcaccaaaacataatttgctgtga

SEQ ID NO: 691138 - DNA, 75 bp, synthetic construct
  source 1..75: mol_type = other DNA
ggagccagaacataatctgtcgcgagtgccggaaaagcgaagttatgcagcgtgtactggcgttttatcggggaa

SEQ ID NO: 691139 - DNA, 75 bp, synthetic construct
  source 1..75: mol_type = other DNA
cggtgaagaaaaagagcgatcctgacctgatttattcattaccagatggagagatacgccgctacgacagacgtc

SEQ ID NO: 691140 - DNA, 75 bp, synthetic construct
  source 1..75: mol_type = other DNA
ggcgcctgaacataatctgtcgcgagtgccggaatagtgaagttatgcagcgtgtgctggcgttttatcagggta

SEQ ID NO: 691141 - DNA, 75 bp, synthetic construct
  source 1..75: mol_type = other DNA
gttgccagtggcgatgtatacaactccggctacgggttattcccctctgaacaggcgcgtaaggactggcaaaac

SEQ ID NO: 691142 - DNA, 75 bp, synthetic construct
  source 1..75: mol_type = other DNA
attctggctacgggttatttccgtctgaacaggctcgtaaggactggcaaaacgcccgcaaaaaactatcgaggg

SEQ ID NO: 691143 - DNA, 75 bp, synthetic construct
  source 1..75: mol_type = other DNA
aagcgaaaacaggtgcgacaagatatctgatgagtgttctcgccagagagctggttgccagtggcgatgtataca

SEQ ID NO: 691144 - DNA, 75 bp, synthetic construct
  source 1..75: mol_type = other DNA
ataacataatttgcgaggaatgtcgtaacagcgaatcaatgcagcgtgttctggctttttaccggggtaattttc

SEQ ID NO: 691145 - DNA, 75 bp, synthetic construct
  source 1..75: mol_type = other DNA
ccagacggagaaatacgtcgttatgacaggcgtcagaacataatctgtagcgagtgccggaagagcgaagttatg

SEQ ID NO: 691146 - DNA, 75 bp, synthetic construct
  source 1..75: mol_type = other DNA
agctgaagaaacctgcagtggttgatccggaccttatctggtcgttaccagacggcgaaatacgccgctacgaca

SEQ ID NO: 691147 - DNA, 75 bp, synthetic construct
  source 1..75: mol_type = other DNA
agcgagaaaaaattaaagggcaggttgttgagctagtacgccggagtgggcgcgagacgttacggcaactggaag

SEQ ID NO: 691148 - DNA, 75 bp, synthetic construct
  source 1..75: mol_type = other DNA
gccgctgccgtggtgctggcacacaatcacccctccggtgaagtcacacccagtaaggcagaccgccttatcacg

SEQ ID NO: 691149 - DNA, 75 bp, synthetic construct
  source 1..75: mol_type = other DNA
atccttccggcgagacgacgcccagccaggctgacaaagccctcacgcagcgactggttcaggtacttcaactgg

SEQ ID NO: 691150 - DNA, 75 bp, synthetic construct
  source 1..75: mol_type = other DNA
taaggctgaccgccttattacggaacgtctggtacaggtactggccctggtggatatccgggtgccggaccatct

SEQ ID NO: 691151 - DNA, 75 bp, synthetic construct
  source 1..75: mol_type = other DNA
aaggcagaccgccttatcacggaacgtctggtacaggcactgggcctggtggatatccgggtgccggaccatctg

SEQ ID NO: 691152 - DNA, 75 bp, synthetic construct
  source 1..75: mol_type = other DNA
ccgaggtccatccccgggaagtggtcaaacgtgcactgcacttcaatgcggcggcggtgatactggtgcataacc

SEQ ID NO: 691153 - DNA, 75 bp, synthetic construct
  source 1..75: mol_type = other DNA
atggcaggactggagcgggaagagttccgggtgctgtatctgaacaaccagaatcagctgattgccggtgaaacc

SEQ ID NO: 691154 - DNA, 75 bp, synthetic construct
  source 1..75: mol_type = other DNA
acccgtccggtgaagtcacacccagtaaggctgaccggcttattactgaacgtctggttcaggcactggccctgg

SEQ ID NO: 691155 - DNA, 75 bp, synthetic construct
  source 1..75: mol_type = other DNA
attgccggtgaaaccctcttcaccggcaccatcaaccgcacggaagtccatccccgggaagtgattaaacgcgcc

SEQ ID NO: 691156 - DNA, 75 bp, synthetic construct
  source 1..75: mol_type = other DNA
atggccgcgcttgagcgggaagagttccgtgtgttgtatctggacaaccagaatcagttgattgcccatgagacg

SEQ ID NO: 691157 - DNA, 75 bp, synthetic construct
  source 1..75: mol_type = other DNA
agctgattgccggtgaaaccctcttcaccggcaccatcaaccgcacggaagtccatccccgtgaagtgattaaac

SEQ ID NO: 691158 - DNA, 75 bp, synthetic construct
  source 1..75: mol_type = other DNA
tgggcctggtggatatccgggtgccggaccatctgatagtcggtggcagccaggttttctcctttgccgaacatg

SEQ ID NO: 691159 - DNA, 75 bp, synthetic construct
  source 1..75: mol_type = other DNA
agcgggaaaaaattaaagggcaggttgttgaactcgtacgccggagtgggcgtgagacgttacggcaactggaag

SEQ ID NO: 691160 - DNA, 75 bp, synthetic construct
  source 1..75: mol_type = other DNA
tgtaccacaatgccgccgccgtggtactggcacacaatcacccgtccggtgaagtcacacccagcaaggcagacc

SEQ ID NO: 691161 - DNA, 75 bp, synthetic construct
  source 1..75: mol_type = other DNA
atgcaacagctttcctttctgcccggagaaatgacgcccggcgagcgcagtctcattcagcgggccctgaaaacc

SEQ ID NO: 691162 - DNA, 75 bp, synthetic construct
  source 1..75: mol_type = other DNA
ctggaccgccatcttcatgaacccggtgtggccttcacctccacccatgcggcacgggaatggctgattctgaac

SEQ ID NO: 691163 - DNA, 75 bp, synthetic construct
  source 1..75: mol_type = other DNA
gaatcagctgattgcgggtgaaaccctcttcaccggcaccatcaaccgcacagaagttcatccccgggaggtgat

SEQ ID NO: 691164 - DNA, 75 bp, synthetic construct
  source 1..75: mol_type = other DNA
atgaagttgccggagcacttaatattttctatgcagaattaaaagccggtcttccctttagcccacatgttactg

SEQ ID NO: 691165 - DNA, 75 bp, synthetic construct
  source 1..75: mol_type = other DNA
gtatcatgcagggtacttctactaaatggtatttaatacttccggtgggtattgtttggtttgctgtttatttct

SEQ ID NO: 691166 - DNA, 75 bp, synthetic construct
  source 1..75: mol_type = other DNA
gtggcttacgcaatttatcgtacagccaaaccagaaaatcgtcctgtaattaaaggtttactgctttcaggcgta

SEQ ID NO: 691167 - DNA, 75 bp, synthetic construct
  source 1..75: mol_type = other DNA
ccaaaaggcgggcagataacgttatcctccattggcaccttcgataatttcaaccgctatggactacgcggaaac

SEQ ID NO: 691168 - DNA, 75 bp, synthetic construct
  source 1..75: mol_type = other DNA
gctgccgtggtgctggcacacaatcacccgtccggtgaggttacccccagtaaggcagaccggcttattacggaa

SEQ ID NO: 691169 - DNA, 75 bp, synthetic construct
  source 1..75: mol_type = other DNA
cgtctggtacaggcactggccctggtggatatccgggtaccggaccatctgataatcggtggcagccaggttttc

SEQ ID NO: 691170 - DNA, 75 bp, synthetic construct
  source 1..75: mol_type = other DNA
acaacgggtcagccgctcagctttgagttattgctaccttcgagcagcaatagtcagtgggtattaccgttccag

SEQ ID NO: 691171 - DNA, 75 bp, synthetic construct
  source 1..75: mol_type = other DNA
aatgaatccgcacaggatacacgctggctggcctttaacattcaacgcccggtattcagcgatcgccgggttcgg

SEQ ID NO: 691172 - DNA, 75 bp, synthetic construct
  source 1..75: mol_type = other DNA
cagttccgatttacagatttcctggtcatcggaatatatcaattccacttataatgcccccggcgtgcaaagtcc

SEQ ID NO: 691173 - DNA, 75 bp, synthetic construct
  source 1..75: mol_type = other DNA
ctgaggtgcatccccgggaggtcgttaagcgcgccctgtatttcaatgcggcggcggtgatagtggcccataacc

SEQ ID NO: 691174 - DNA, 75 bp, synthetic construct
  source 1..75: mol_type = other DNA
cgtatgcttacgatgccctggaaccgcacttcgataagcagaccatggaaatccaccacaccaaacaccatcagg

SEQ ID NO: 691175 - DNA, 75 bp, synthetic construct
  source 1..75: mol_type = other DNA
ccggactacatcaaagagttctggaacgtggtgaactgggacgaagcagcggcacgtttcgcggcgaaaaaataa

SEQ ID NO: 691176 - DNA, 75 bp, synthetic construct
  source 1..75: mol_type = other DNA
cttggacggtaagttagtgaatgagtggaaaggcaatgtaagcgttgaatacagcggcaatcacggtaaatacaa

SEQ ID NO: 691177 - DNA, 75 bp, synthetic construct
  source 1..75: mol_type = other DNA
tgccgatcgtggcgcagagcatattcgccgctttattcaggcgggaatgagcgaatgcgagatagccgctgaact

SEQ ID NO: 691178 - DNA, 75 bp, synthetic construct
  source 1..75: mol_type = other DNA
ccataacaccggtcatgctatcggtattgaagtccatgaagaaccgcgtttttcaccgcgggacaccacgacgct

SEQ ID NO: 691179 - DNA, 75 bp, synthetic construct
  source 1..75: mol_type = other DNA
gacgttgttaaataccttatatgatctctactgcccgcaggcaggcaccggtaaaggaagccataacaacgaata

SEQ ID NO: 691180 - DNA, 75 bp, synthetic construct
  source 1..75: mol_type = other DNA
ttccctgtggatatgaattttatattgcgaattatccagaagcaggtctttatcttgcagaaatgctttattatc

SEQ ID NO: 691181 - DNA, 75 bp, synthetic construct
  source 1..75: mol_type = other DNA
caacgccggagcattgcagatgctctggctatgccagaagctgctgatattcattttgagccatccagtatgcct

SEQ ID NO: 691182 - DNA, 75 bp, synthetic construct
  source 1..75: mol_type = other DNA
ggagtcagaacatcatttgccaggaatgtcgtaacagcgaatcaatgcagcgtgtactaacgttctattgtggaa

SEQ ID NO: 691183 - DNA, 75 bp, synthetic construct
  source 1..75: mol_type = other DNA
cagtatcaggaaacttcgttatcatagatgtttataatggcaatggttcaacgcaagtaaaaaatctggaggaag

SEQ ID NO: 691184 - DNA, 75 bp, synthetic construct
  source 1..75: mol_type = other DNA
atgataaatagttttagattattaaaagacagaaagagtaaaaaagggttttcacttttagagttgttattagtt

SEQ ID NO: 691185 - DNA, 75 bp, synthetic construct
  source 1..75: mol_type = other DNA
aaatggtcaaataacccattactggcttgagatagataatattgtagttgatataacaggggatcaatataacat

SEQ ID NO: 691186 - DNA, 75 bp, synthetic construct
  source 1..75: mol_type = other DNA
tatgtcagtttcgacgtcaaagacctacaaaaagcgatgttccgccagcagagtttcccgtcagtggtgatgaac

SEQ ID NO: 691187 - DNA, 75 bp, synthetic construct
  source 1..75: mol_type = other DNA
aaggcagaccggcttatcaccgaacgtctggtacaggcactgggcctggtggatatccgggtgccggaccatctg

SEQ ID NO: 691188 - DNA, 75 bp, synthetic construct
  source 1..75: mol_type = other DNA
cgtctggtacaggcactggccatggtggatatccggatgccggaccatctgatagtcggtggcagccaggttttc

SEQ ID NO: 691189 - DNA, 75 bp, synthetic construct
  source 1..75: mol_type = other DNA
atgcagcagctttcctttctgcccggagagatgacacccggtgagcgcagcctcattcaacgggccctgaaaacc

SEQ ID NO: 691190 - DNA, 75 bp, synthetic construct
  source 1..75: mol_type = other DNA
tagatatccgagtccctgaccatctgattgtcggtggcaggcaaatctattcgttcgctgaacacggtttgcttt

SEQ ID NO: 691191 - DNA, 75 bp, synthetic construct
  source 1..75: mol_type = other DNA
tccggtgaagtcacacccagtaaggcagaccggcttatcaccgaacgtctggtacaggcactgggcctggtggat

SEQ ID NO: 691192 - DNA, 75 bp, synthetic construct
  source 1..75: mol_type = other DNA
tccggaccttatctggtcatcacctgacggagaaatacgtcgctacgacagtcgcctaaacataatctgtcgcga

SEQ ID NO: 691193 - DNA, 75 bp, synthetic construct
  source 1..75: mol_type = other DNA
atgagattcacagggttaagcctcttatgccagctttatgtcgtatccgtcaggggaaaaaaagttatcaattgg

SEQ ID NO: 691194 - DNA, 75 bp, synthetic construct
  source 1..75: mol_type = other DNA
atggtagtgtccgctattgccagtacacctcaattatttattggcgcgctgaaagataaagatgtcattgtgatg

SEQ ID NO: 691195 - DNA, 75 bp, synthetic construct
  source 1..75: mol_type = other DNA
taccagccctttctatccgctgtttgctgcactggatgttaacgccaaaattcatgaaggggagagtgggcgtcg

SEQ ID NO: 691196 - DNA, 75 bp, synthetic construct
  source 1..75: mol_type = other DNA
ttctgcgggccctgaaaaccctggaccgccatcttcatgaacccggcgtggccttcacctccacccgtgcggcac

SEQ ID NO: 691197 - DNA, 75 bp, synthetic construct
  source 1..75: mol_type = other DNA
ggtgaaaccctcttcaccggcaccatcaaccgcacggaagtccatccccgggaagtgattaaacgcgccctgtaa

SEQ ID NO: 691198 - DNA, 75 bp, synthetic construct
  source 1..75: mol_type = other DNA
tgaaaattgaagaaatacggatgcataaacgtcacgaaattcatagagttaagcccattatgccagctttatgtc

SEQ ID NO: 691199 - DNA, 75 bp, synthetic construct
  source 1..75: mol_type = other DNA
gatgaaatgcagaactggacacagagccgcaaacagccgcggcctttgcctgataaccacgaattactcgctaaa

SEQ ID NO: 691200 - DNA, 75 bp, synthetic construct
  source 1..75: mol_type = other DNA
cgcgcacagcgcgagaaaacacgcgatttcctgaaaagtttcatgctggaaaacgaagacgggttcacgattgat

SEQ ID NO: 691201 - DNA, 75 bp, synthetic construct
  source 1..75: mol_type = other DNA
atgagtgagtttgcatggagctggaatgaaccacggccagccattgatccggccagatttacggagcgcaggcag

SEQ ID NO: 691202 - DNA, 75 bp, synthetic construct
  source 1..75: mol_type = other DNA
ctgactgtcacctgcccgtcaaaataccacgccacaacagagaacggtcatccgaatcccaaatggaacggggcc

SEQ ID NO: 691203 - DNA, 75 bp, synthetic construct
  source 1..75: mol_type = other DNA
agcaaaaacgcgcagcgatatatgaagcgcgcagaaaacaggcaaaaacgggatttcagaatcccgtaaacgatt

SEQ ID NO: 691204 - DNA, 75 bp, synthetic construct
  source 1..75: mol_type = other DNA
gaaggcgtatcagatgctggcccgcatggcgttacacctgcacgccatgcctccacattatgacgcactgacaac

SEQ ID NO: 691205 - DNA, 75 bp, synthetic construct
  source 1..75: mol_type = other DNA
cttcttccatcgctgccggtaacaacggtaccgcgcgtttctacggcaccatcgaagattccccgtgctccatcg

SEQ ID NO: 691206 - DNA, 75 bp, synthetic construct
  source 1..75: mol_type = other DNA
cacgttcaccggtactaactacgcggggccagccaacacagataactatgcgttattcaacgttgacagcggtgt

SEQ ID NO: 691207 - DNA, 75 bp, synthetic construct
  source 1..75: mol_type = other DNA
actgggagtgcttatttttgtatttctggtgatcttctatgggatcattattttacatgatattccctacctgat

SEQ ID NO: 691208 - DNA, 75 bp, synthetic construct
  source 1..75: mol_type = other DNA
tggcgcgaccgatggcgagctgaccatggatgtaacgctgaaggcgtatcagatgctggcccgcatggcgttaca

SEQ ID NO: 691209 - DNA, 75 bp, synthetic construct
  source 1..75: mol_type = other DNA
aactgaccatggaggtggcgctgaaggcatatcagatgctggcacgcatggcgttacatctgcacaccatgccgc

SEQ ID NO: 691210 - DNA, 75 bp, synthetic construct
  source 1..75: mol_type = other DNA
ggtttcggctacctcggctggaatggtgaatggggattttttaaaccgtatattggattacataaccaatctgga

SEQ ID NO: 691211 - DNA, 75 bp, synthetic construct
  source 1..75: mol_type = other DNA
catccacacttcagcaggaccagaacaccatgaacccccccgttaccgtgctttctgacatgctgcgcgccatcc

SEQ ID NO: 691212 - DNA, 75 bp, synthetic construct
  source 1..75: mol_type = other DNA
aaagggcttggtgcggatttactgcatgatgcggtttgtcgttgttacagagtggccgaaaatacaggtgtgcgt

SEQ ID NO: 691213 - DNA, 75 bp, synthetic construct
  source 1..75: mol_type = other DNA
agcgagggggtaagtttccaaagtatactggacgatgtgaggttaaataatgcgttgtctgctatacaaacgacg

SEQ ID NO: 691214 - DNA, 75 bp, synthetic construct
  source 1..75: mol_type = other DNA
gtaaatgtttatcatttattgcatgcaacacaggtattacatatgtcaagtaatcacgaaacaaaaacacttggc

SEQ ID NO: 691215 - DNA, 75 bp, synthetic construct
  source 1..75: mol_type = other DNA
atatacaattcatgttttagtaaaaatatatttttatatgatgttaatgatggtaattttaaatggtgttcatga

SEQ ID NO: 691216 - DNA, 75 bp, synthetic construct
  source 1..75: mol_type = other DNA
agaagaatggttgtatttaattatacgaagataaataaacaattagagaaagtgttggggggggatagcacgaaa

SEQ ID NO: 691217 - DNA, 75 bp, synthetic construct
  source 1..75: mol_type = other DNA
atgttcaaaaataatattacggaagtcaaaagtatcataatcactatttttatcaacaatgtgaatatctatagt

SEQ ID NO: 691218 - DNA, 75 bp, synthetic construct
  source 1..75: mol_type = other DNA
caaggcagaccgccttatcacggaacgtctggtacaggcactggccctagtggatatccgggtaccggaccatct

SEQ ID NO: 691219 - DNA, 75 bp, synthetic construct
  source 1..75: mol_type = other DNA
gacagtaaaacccatcagcgagattgccagggaaaatggttacaagtgtccttctcgttttactgaaaggttcca

SEQ ID NO: 691220 - DNA, 75 bp, synthetic construct
  source 1..75: mol_type = other DNA
ccagtcaggctgacgggtacgcgcagggaacgctgcgcaagatattcgaacgtctggaccgcaccgaccgccgct

SEQ ID NO: 691221 - DNA, 75 bp, synthetic construct
  source 1..75: mol_type = other DNA
tgctacaacattttctttcgaagaaaaattaaatgttctcaaaacattgagggcactggatggcaaaatattcaa

SEQ ID NO: 691222 - DNA, 75 bp, synthetic construct
  source 1..75: mol_type = other DNA
ttatcaattgggagacgcatagtctaactgttgataataatcagataatattatttccctgtggatatgaatttt

SEQ ID NO: 691223 - DNA, 75 bp, synthetic construct
  source 1..75: mol_type = other DNA
ctgtaaaaattggtccccgctccgtggcttttattgaaagcgaagtcgatgaatggattaaccagcgtatcgagg

SEQ ID NO: 691224 - DNA, 75 bp, synthetic construct
  source 1..75: mol_type = other DNA
aacctgccggttgaagagctgatcaccaaactggaccagctgccagcagacaagaaaaccgtactgcgcaacaac

SEQ ID NO: 691225 - DNA, 75 bp, synthetic construct
  source 1..75: mol_type = other DNA
gtgtggcggtcacagtgcagtcacagccgtcgttcaccagaaagcatccggatggtctgattttaccatcgctgc

SEQ ID NO: 691226 - DNA, 75 bp, synthetic construct
  source 1..75: mol_type = other DNA
gatccgaaaaccgcgccggtaacggaaaatgatggtaaggcctttcctcagccagcaggtgctgcgttaccagtc

SEQ ID NO: 691227 - DNA, 75 bp, synthetic construct
  source 1..75: mol_type = other DNA
acctgaagcgccggatgtggtaaccgaagaggtcgctccaaaagttaccgcagacatgatggttgagtttatcgg

SEQ ID NO: 691228 - DNA, 75 bp, synthetic construct
  source 1..75: mol_type = other DNA
ggctatctcggcgtaagaacccttgacggctttgcccgttacagcaaatcaagccgtcacaaaatgtctgcgggg

SEQ ID NO: 691229 - DNA, 75 bp, synthetic construct
  source 1..75: mol_type = other DNA
aatggaccgcccgtgactgcaatcatccggtcccggaaagcgttacccgtcgcctggctgatgcggcgaaagttc

SEQ ID NO: 691230 - DNA, 75 bp, synthetic construct
  source 1..75: mol_type = other DNA
ttccggcggtaatggtgccggctgacctgcttgaaaccctgctgataaccgctgaacaggcgttgtggcacaggg

SEQ ID NO: 691231 - DNA, 75 bp, synthetic construct
  source 1..75: mol_type = other DNA
cgtgtggctgataacaacgttcagcaggagcagccagcgccggcagaactgccggaagaaactaccacggcaaca

SEQ ID NO: 691232 - DNA, 75 bp, synthetic construct
  source 1..75: mol_type = other DNA
ctcagccagcaggtgttgcgttaccagtacaggaagctgctacacaggaagatattaaaacagaaactgtagcgg

SEQ ID NO: 691233 - DNA, 75 bp, synthetic construct
  source 1..75: mol_type = other DNA
agcagagccgaaaattgcatcggtaacggaaaatgatggtaaagcctttcctcagccagcaggtgttgcgttacc

SEQ ID NO: 691234 - DNA, 75 bp, synthetic construct
  source 1..75: mol_type = other DNA
agtgggagcgggtctgcgccgcgctgcgggagctgaatgaatgccgggatgttgtccgacagataaattcttccg

SEQ ID NO: 691235 - DNA, 75 bp, synthetic construct
  source 1..75: mol_type = other DNA
gcggaaactgctggtaaggcctttcctcagcccgcaggtgttgcgttaccagtacaggaggctgcaacacaggaa

SEQ ID NO: 691236 - DNA, 75 bp, synthetic construct
  source 1..75: mol_type = other DNA
atggagactgtttttgacgcactgaaagcaatgggaaaagccacgtcggtagaacttgctgcgcgacttgatatc

SEQ ID NO: 691237 - DNA, 75 bp, synthetic construct
  source 1..75: mol_type = other DNA
tgttaatacaggttgttaatgccgaagatattcaatggcagattaattctttatttataaaccttttttttaagc

SEQ ID NO: 691238 - DNA, 75 bp, synthetic construct
  source 1..75: mol_type = other DNA
caccgtgccggacagcaacgcctggccgccgtacatcgggccatgcagcagggggccgcgaatgattactggttt

SEQ ID NO: 691239 - DNA, 75 bp, synthetic construct
  source 1..75: mol_type = other DNA
caccgtgccggacagcaacgactggccgccgtccatcgggccatgcagcagggggccgcgaatgattactggttt

SEQ ID NO: 691240 - DNA, 75 bp, synthetic construct
  source 1..75: mol_type = other DNA
gcagtcgtccgggggacctggttgcagattttttcatggggtcgggttcgacagtcaaagccgcgatggcgctgg

SEQ ID NO: 691241 - DNA, 75 bp, synthetic construct
  source 1..75: mol_type = other DNA
gtactatccagggaaacatccgtgcgaaaaaccggcagaaatgttgcagcagataatcaacgcgagcagtcgtcc

SEQ ID NO: 691242 - DNA, 75 bp, synthetic construct
  source 1..75: mol_type = other DNA
cagtccggacgccggtatatcggtatcgagctgcttgaacagtatcaccgtgccggacagcaacgtctggccgcc

SEQ ID NO: 691243 - DNA, 75 bp, synthetic construct
  source 1..75: mol_type = other DNA
atcgtcatcacccgacggaaaagcccgttaccagcctgcaaccactgattgagagcttcacacatccgaacgcga

SEQ ID NO: 691244 - DNA, 75 bp, synthetic construct
  source 1..75: mol_type = other DNA
ctccggcatttagtattgtttcatgggtagcccttattggcggtattgttacctatctgttaggactatggaatg

SEQ ID NO: 691245 - DNA, 75 bp, synthetic construct
  source 1..75: mol_type = other DNA
tatacaagaggggggggggctactattgctctatatattatctttgggtattgcgttaggtatccagaatttaac

SEQ ID NO: 691246 - DNA, 75 bp, synthetic construct
  source 1..75: mol_type = other DNA
tgccgcactgaaaaatgttagagacaagcagagccaaatgaataaggtgaaaagtaacccaacttactctgatac

SEQ ID NO: 691247 - DNA, 75 bp, synthetic construct
  source 1..75: mol_type = other DNA
atgctgcagcagataatcagtgcgagcagtcgtccgggtgacctggttgcagatttcttcatggggtcgggttcg

SEQ ID NO: 691248 - DNA, 75 bp, synthetic construct
  source 1..75: mol_type = other DNA
ctgatgggtgaagccatttctggcgcttccggcttcccgattctggggctggacgtttgggaacacgcttactac

SEQ ID NO: 691249 - DNA, 75 bp, synthetic construct
  source 1..75: mol_type = other DNA
gtggctgttggtatacatcagccatcattatcccagcaacttggtgtgatgcgtcggctaggacttgtttcaaca

SEQ ID NO: 691250 - DNA, 75 bp, synthetic construct
  source 1..75: mol_type = other DNA
cacgacaacgtctacttcggtcgcccggaagatggcacgctggaaagcgaattttccggtaacctggtcgaaatt

SEQ ID NO: 691251 - DNA, 75 bp, synthetic construct
  source 1..75: mol_type = other DNA
atggctacaattcatgtagacggcaaagaatacgaggttaacggagcggacaacttgctggaagcttgtctgtct

SEQ ID NO: 691252 - DNA, 75 bp, synthetic construct
  source 1..75: mol_type = other DNA
caacctgctggaagcttgtctgtctctgggccttgatattccttacttttgctggcatccggcgctgggaagcgt

SEQ ID NO: 691253 - DNA, 75 bp, synthetic construct
  source 1..75: mol_type = other DNA
gaaaaggttgctgcactggcagactggattgagttgaatttgccagaggtgctggcggtgcgggatgaacgtgcg

SEQ ID NO: 691254 - DNA, 75 bp, synthetic construct
  source 1..75: mol_type = other DNA
gtgaaaaccgccctgctgctggaaaaactggaaggacagctcgccacgctgcgtcagcgttgtgccccggtagcg

SEQ ID NO: 691255 - DNA, 75 bp, synthetic construct
  source 1..75: mol_type = other DNA
agtgcgtcaggcggtgaaaggtaaagcacgcgaaatggcggcagcacagaaagtggctgactggcagattgcggc

SEQ ID NO: 691256 - DNA, 75 bp, synthetic construct
  source 1..75: mol_type = other DNA
gaatggaaaagtggcactcgcatcggcatcgcgctataacgcatggcgactgccctctaacaaagttaagcatcg

SEQ ID NO: 691257 - DNA, 75 bp, synthetic construct
  source 1..75: mol_type = other DNA
ttgccagcaatgtgtgtggctgtaggcttgctgatgtgcttgccgctgtggcaaaaacctcgacctgacgagtgg

SEQ ID NO: 691258 - DNA, 75 bp, synthetic construct
  source 1..75: mol_type = other DNA
cctcaccatggcagtaatacctcatcatcgttgccattaattcagcgagtgaatggaaaagtggcactcgcatcg

SEQ ID NO: 691259 - DNA, 75 bp, synthetic construct
  source 1..75: mol_type = other DNA
gttcgcactactgaacatcaaccatgctgattacatgcgccatatcgtgagccatttcgccgctgagcgcatgaa

SEQ ID NO: 691260 - DNA, 75 bp, synthetic construct
  source 1..75: mol_type = other DNA
ctggccgcaacccgcagaccggtaaagagattaccattgctgccgctaaagtaccgagcttccgtgcaggcaagg

SEQ ID NO: 691261 - DNA, 75 bp, synthetic construct
  source 1..75: mol_type = other DNA
tacttcaggtacctcaccatggcagtaatacctcatcatcgttgccattaattcagcgagtgaatggaaaagtgg

SEQ ID NO: 691262 - DNA, 75 bp, synthetic construct
  source 1..75: mol_type = other DNA
ttattgaacaatcgttgtctcgttcaactgaagcaacgctcagtatcatgggcgttaccaacccgcagctgcgtg

SEQ ID NO: 691263 - DNA, 75 bp, synthetic construct
  source 1..75: mol_type = other DNA
acaggcccgacttaagggcgtacaggccagaagcgccaaagccgccatcaaaaaagagttgttaccggacttttc

SEQ ID NO: 691264 - DNA, 75 bp, synthetic construct
  source 1..75: mol_type = other DNA
ggacgaagtgcgcgccaaattatgcaaagcgtgcgcctttgtccgccgtggcctgagtgatgcggacagcatggc

SEQ ID NO: 691265 - DNA, 75 bp, synthetic construct
  source 1..75: mol_type = other DNA
tcctgaccttatctgctcgttatctgacggagaaatacgtcgttacgacaggcgtcataatataatttgtagtga

SEQ ID NO: 691266 - DNA, 75 bp, synthetic construct
  source 1..75: mol_type = other DNA
agcgggaaaaaattaaggtacaggttgttgaacttgtgcgtctgagcgggcgcgagacgttacggcaactggaag

SEQ ID NO: 691267 - DNA, 75 bp, synthetic construct
  source 1..75: mol_type = other DNA
ctgaaacacgttaccagccgttggggggtattgattctggtggcgctgcgtgaaggcactcatcgctttagcgac

SEQ ID NO: 691268 - DNA, 75 bp, synthetic construct
  source 1..75: mol_type = other DNA
gaaaaggttgctgcgctggcggactggattgagattcatctgccagaggtgctggcggtgcgggatgaacgtgtg

SEQ ID NO: 691269 - DNA, 75 bp, synthetic construct
  source 1..75: mol_type = other DNA
caggtcaacgataaagcgttgctcgtgttggtgatagctattggtaagagagagaactcagccgtttatgatgag

SEQ ID NO: 691270 - DNA, 75 bp, synthetic construct
  source 1..75: mol_type = other DNA
tctcgaacaattgattaacatcaaccttttctcttctggcaggacgtcattttgtgaatgcaatcgttttccata

SEQ ID NO: 691271 - DNA, 75 bp, synthetic construct
  source 1..75: mol_type = other DNA
tgttcagtgcaaaaatagaacccgttaaactgggtatatcgtatgcctatcaatataccgatatccaggatggcc

SEQ ID NO: 691272 - DNA, 75 bp, synthetic construct
  source 1..75: mol_type = other DNA
caggccactttaatagggacagtggccttcatagccagacctattgggggcggtttttttggtgccatggctgat

SEQ ID NO: 691273 - DNA, 75 bp, synthetic construct
  source 1..75: mol_type = other DNA
caggctactttaatagggacagtggccttcatagccagacctattggaggtggtttttttggtgccatggctgat

SEQ ID NO: 691274 - DNA, 75 bp, synthetic construct
  source 1..75: mol_type = other DNA
tctgatagtcggtggcagccaggttttctgtgccggaccatctgatagtcggtggcagccaggttttctcctttg

SEQ ID NO: 691275 - DNA, 75 bp, synthetic construct
  source 1..75: mol_type = other DNA
cgtctggtacaggcgctggccctggtggacatccgggtaccggaccatctgatagttggtggcaaccaggttttc

SEQ ID NO: 691276 - DNA, 75 bp, synthetic construct
  source 1..75: mol_type = other DNA
ggcaaaccgtttaccgatcgcgcaggggtcaagcgcgatctgcgctatatgatcaccgcaggcgtgcaaaataat

SEQ ID NO: 691277 - DNA, 75 bp, synthetic construct
  source 1..75: mol_type = other DNA
cggcgctggattttgtcccggcattaacccatgaagcaatcgacgaaagtacctacattgtggcgcaaatgggga

SEQ ID NO: 691278 - DNA, 75 bp, synthetic construct
  source 1..75: mol_type = other DNA
agacatattcaaaaaacgcagcatcccctttagagatgcgccggtatattgaattaatagattatgaattaatta

SEQ ID NO: 691279 - DNA, 75 bp, synthetic construct
  source 1..75: mol_type = other DNA
cgccaacggcaatcctcgggtatggattcccggaagagagcttccgcaaagcgatggcagaatcgcccgatctga

SEQ ID NO: 691280 - DNA, 75 bp, synthetic construct
  source 1..75: mol_type = other DNA
ctcagatgtacaggctgggccggtatatgagttctcgatctatcacctgattgaagccaacgacgcactgcgttt

SEQ ID NO: 691281 - DNA, 75 bp, synthetic construct
  source 1..75: mol_type = other DNA
gaacctgaaaggctgcacatttaaagcggtcaatgacggcgaagtgtacgtcagcggttctaagcatgaagaaac

SEQ ID NO: 691282 - DNA, 75 bp, synthetic construct
  source 1..75: mol_type = other DNA
cagtagaagtgctcttagaacatctgaaaaagcgtgatgttcagcttcgtgacattaaccgaaccaccgttacag

SEQ ID NO: 691283 - DNA, 75 bp, synthetic construct
  source 1..75: mol_type = other DNA
gaaagtttttcactcgttgcgccgccaggccgcgcaaattttggacaggggcggcataggtaagaagttaaagcc

SEQ ID NO: 691284 - DNA, 75 bp, synthetic construct
  source 1..75: mol_type = other DNA
attcgaaaagaacaaataagatagtcagccaatctcattttgcgtttagaacaaaagacggaactgatgcacaca

SEQ ID NO: 691285 - DNA, 75 bp, synthetic construct
  source 1..75: mol_type = other DNA
gcaagaatgcagcttctccagtagagcttaaaaactatattgagcttctacgctaccctgaaatagagaaaggct

SEQ ID NO: 691286 - DNA, 75 bp, synthetic construct
  source 1..75: mol_type = other DNA
cagcgaaaggttgctgatgcattagggattaatgaatcgcaaatttcgcgatggaaagacagctttatcccaaag

SEQ ID NO: 691287 - DNA, 75 bp, synthetic construct
  source 1..75: mol_type = other DNA
acatccgagagattgagggggtgttatgcttcgaagtgacggagggcaagaccaaatcagccgcccgtatcatac

SEQ ID NO: 691288 - DNA, 75 bp, synthetic construct
  source 1..75: mol_type = other DNA
acccgtccggtgaagtcacacccagcaaggcagaccgccttatcacggaacgtctggtacaggcactggtcctgg

SEQ ID NO: 691289 - DNA, 75 bp, synthetic construct
  source 1..75: mol_type = other DNA
ccacaatgccgctgccgtggtactggcacacaatcacccgtccggtgaagtcacacccagtaaggcagaccggct

SEQ ID NO: 691290 - DNA, 75 bp, synthetic construct
  source 1..75: mol_type = other DNA
ccctcttcaccggcaccatcaaccgcacggaagtccatccccgggaggtaattaaacgtgccctgtaccacaatg

SEQ ID NO: 691291 - DNA, 75 bp, synthetic construct
  source 1..75: mol_type = other DNA
aggttttcgtcacagtagcgcaggagaaaagttttagtcgtgcaggagagcgtatcggcctgagtcagtcggcag

SEQ ID NO: 691292 - DNA, 75 bp, synthetic construct
  source 1..75: mol_type = other DNA
gcgaaatgacgccacaggaccggcgtcttatccagcgggcactcagggctctggaccggcacctgcgtgagcccg

SEQ ID NO: 691293 - DNA, 75 bp, synthetic construct
  source 1..75: mol_type = other DNA
tctacggcaccattgaagattccccgtgctccatcgttcctgatgatcacaaactggaagttgatatgggtgaca

SEQ ID NO: 691294 - DNA, 75 bp, synthetic construct
  source 1..75: mol_type = other DNA
caccggagctgccattgacctcactgcgcaccatcaaacgagccctgagtctgcttgaccagcacctgcgcgaac

SEQ ID NO: 691295 - DNA, 75 bp, synthetic construct
  source 1..75: mol_type = other DNA
caaaacctccggcgttataccgacgcaagtcaaacgattacgccaccgactcgctgtgattgatgcagcaagctg

SEQ ID NO: 691296 - DNA, 75 bp, synthetic construct
  source 1..75: mol_type = other DNA
gtctctataccagaataaaaaaagaaaatgattttctttctatggatagatttatggtggaaatagaaaatatca

SEQ ID NO: 691297 - DNA, 75 bp, synthetic construct
  source 1..75: mol_type = other DNA
tattatcatccttcccaggatgataagaagaatggttgtatttaatgatacgaagataaataaacaattagagga

SEQ ID NO: 691298 - DNA, 75 bp, synthetic construct
  source 1..75: mol_type = other DNA
tggatatccgggtaccggaccatctgatagtcggtggcaaccaggttttctcctttgccgaacacggtctgcttt

SEQ ID NO: 691299 - DNA, 75 bp, synthetic construct
  source 1..75: mol_type = other DNA
aaagaaagccgctaaggactttggcgtggcgcagagtgcaatcagtaaagcgcttctcgtcggacgagaaatata

SEQ ID NO: 691300 - DNA, 75 bp, synthetic construct
  source 1..75: mol_type = other DNA
gttacggtaaagcctgatggcagtgtgattggagaggaagttcgtcctttcccaagcaacaagaaaaacaaatag

SEQ ID NO: 691301 - DNA, 75 bp, synthetic construct
  source 1..75: mol_type = other DNA
tgttgaactcgtacgccggagtgggcgtgagacgttacggcaactggaagtcaagacaggtgcgacaagatatct

SEQ ID NO: 691302 - DNA, 75 bp, synthetic construct
  source 1..75: mol_type = other DNA
atgagcacgattattactgaacagtacgaacactggtgcgcaaatcaaatcatcagtggaaaacctgcgcgcccg

SEQ ID NO: 691303 - DNA, 75 bp, synthetic construct
  source 1..75: mol_type = other DNA
aacggcttccgacactttgtcgcgccacttgcaaaaatgacaggagacggcccacaggacctgcgcccggagaca

SEQ ID NO: 691304 - DNA, 75 bp, synthetic construct
  source 1..75: mol_type = other DNA
gatgtttatgccaatggtcagcacgtattccgttttcagaatggcgcgttacaaagtaaccgggcagtgaatgtt

SEQ ID NO: 691305 - DNA, 75 bp, synthetic construct
  source 1..75: mol_type = other DNA
ggcacccgtaatgccatgaccatccgcgtgacaacgccaaccacggtcaccaatggaacagccaaagcgcagttt

SEQ ID NO: 691306 - DNA, 75 bp, synthetic construct
  source 1..75: mol_type = other DNA
gaacgaagaaagtggcgtgctctgcatgattgcacacacacctcgtcagcaaaaaattaaaacagcgaacggcgt

SEQ ID NO: 691307 - DNA, 75 bp, synthetic construct
  source 1..75: mol_type = other DNA
ggaaattttgatgcccgttaccagacgaaaacaggcggtgtacaggaagtgcgtctgggaagctccattggtatt

SEQ ID NO: 691308 - DNA, 75 bp, synthetic construct
  source 1..75: mol_type = other DNA
tcgtctgtcggtgctgaaagacgatgcggtcatgctcgatgggtattaccgggaaggagagccactgcgtctcgg

SEQ ID NO: 691309 - DNA, 75 bp, synthetic construct
  source 1..75: mol_type = other DNA
ggtttgcgcagagtgcaacggaaagcggttttctcaacatcgatgttccgggttcggctatcaatacctgtaaag

SEQ ID NO: 691310 - DNA, 75 bp, synthetic construct
  source 1..75: mol_type = other DNA
gcaggtggaggcgttaaaacgccatctgaacttcttcaactcagagcagacgtttggcgcggtgatccaggggat

SEQ ID NO: 691311 - DNA, 75 bp, synthetic construct
  source 1..75: mol_type = other DNA
aattaatgaggatataaaaatcaaaccaatagagttccaaaagttgatgaaatgctttgatggtatttttttatg

SEQ ID NO: 691312 - DNA, 75 bp, synthetic construct
  source 1..75: mol_type = other DNA
tcaagagaagttagccgaagagctaggtatgacgcagggtggaattggacactggttgcgcggatctcgtcatcc

SEQ ID NO: 691313 - DNA, 75 bp, synthetic construct
  source 1..75: mol_type = other DNA
tcattatttgcgcattctaaaaaaagaatattccttaatgatgccggtaaatattatctgggaattgttaaagaa

SEQ ID NO: 691314 - DNA, 75 bp, synthetic construct
  source 1..75: mol_type = other DNA
attgatggtcaccgtctgggatcacccggaactcaccacgccagcgggtcaataccgtagcgccagcgatacggg

SEQ ID NO: 691315 - DNA, 75 bp, synthetic construct
  source 1..75: mol_type = other DNA
acttgcgccagaacaaactgctgcacccgggcgatattttatttattccgcgcaacgatgatctgaaagtcttcg

SEQ ID NO: 691316 - DNA, 75 bp, synthetic construct
  source 1..75: mol_type = other DNA
taaacggacagatgaccccatcaaactatggaaatttcgatgcccgttatcagcagcgaaatggcggcgtgcagg

SEQ ID NO: 691317 - DNA, 75 bp, synthetic construct
  source 1..75: mol_type = other DNA
aacaagtacttaaccttgatattcctcaacgttggttagatcaaccgaactggctaaaaacatccccacaaacgt

SEQ ID NO: 691318 - DNA, 75 bp, synthetic construct
  source 1..75: mol_type = other DNA
gagtatcgtttcggtaaattctgataagtcaaacttcagcacgaatggcgttgttgctgataatggtcaggtatg

SEQ ID NO: 691319 - DNA, 75 bp, synthetic construct
  source 1..75: mol_type = other DNA
catcatcaaatgaaaatggatggcatgcactcaatacttcggcaactcatgactatagcttttggcaaggtggtc

SEQ ID NO: 691320 - DNA, 75 bp, synthetic construct
  source 1..75: mol_type = other DNA
gatcagcgacagaggtacgcttatcgcgtacggacgttatcccgacacctttttaccagaccagacggactccgt

SEQ ID NO: 691321 - DNA, 75 bp, synthetic construct
  source 1..75: mol_type = other DNA
tcccggtcttatccgggcattacctgatggggaaatccggcgctacgacagacgctacaacataatttgtcgaga

SEQ ID NO: 691322 - DNA, 75 bp, synthetic construct
  source 1..75: mol_type = other DNA
ggctggcatttttacagccagagaaataccgatggcagtatcacattcgctgtaaacggacagatgaccccatca

SEQ ID NO: 691323 - DNA, 75 bp, synthetic construct
  source 1..75: mol_type = other DNA
gggatcaatggtctttttctgcgttattggtgcccccctcattctggtgacctccatagcttatttatggtttgg

SEQ ID NO: 691324 - DNA, 75 bp, synthetic construct
  source 1..75: mol_type = other DNA
atggctcttaacacaccacaaattacgccgacaaaaaagataacagtgagggctatcggcgaggaactgccgcgt

SEQ ID NO: 691325 - DNA, 75 bp, synthetic construct
  source 1..75: mol_type = other DNA
cgccgacaaaaaagataacagtgaggtcaatcggcgaggaactgccgcgtggtgattaccaacgttgcccgcaat

SEQ ID NO: 691326 - DNA, 75 bp, synthetic construct
  source 1..75: mol_type = other DNA
cacggtcatgcctgccctgacggtcagcagcgtcaccggcatcgatgccactggtgcagacggcaaaaattttgg

SEQ ID NO: 691327 - DNA, 75 bp, synthetic construct
  source 1..75: mol_type = other DNA
gaaagcctgttccacttacgccatgaagatggcagcgttcagttcttccctactcccctatccccccatgtattt

SEQ ID NO: 691328 - DNA, 75 bp, synthetic construct
  source 1..75: mol_type = other DNA
ccctgcgtgcgctgcgtcaggtaagccctgccggaaatattcgcgacattccgttcgtcgttctggtaggtggct

SEQ ID NO: 691329 - DNA, 75 bp, synthetic construct
  source 1..75: mol_type = other DNA
aaggttgggaacatattgaaatcgttctgccaggtgatccagaaacgctgaatgcccgtgcgctggcattgcttt

SEQ ID NO: 691330 - DNA, 75 bp, synthetic construct
  source 1..75: mol_type = other DNA
atgcgcattgaaataatgatcgataaagagcagaagattagccagtctaccctggacgctcttgaatcagagctt

SEQ ID NO: 691331 - DNA, 75 bp, synthetic construct
  source 1..75: mol_type = other DNA
ccaaaacggtaattcgcattcgcaaaggtagctctaacggtgtggaactgatcggactgcaactggacgaagaaa

SEQ ID NO: 691332 - DNA, 75 bp, synthetic construct
  source 1..75: mol_type = other DNA
ccaaaacggtaattcgcattcgcaaaggtagctctaacggggtggaactaaccggactgcaactggacgaagaaa

SEQ ID NO: 691333 - DNA, 75 bp, synthetic construct
  source 1..75: mol_type = other DNA
gccactgctgagcgctggcgtcgcgggtttgaacagtgtggcgagcttttgtcagaaaatatgatcaatggcaga

SEQ ID NO: 691334 - DNA, 75 bp, synthetic construct
  source 1..75: mol_type = other DNA
aactgagagatattaacacattggaatcatttaaaaaaccacaagattatttttttatcaacaagagatgctatt

SEQ ID NO: 691335 - DNA, 75 bp, synthetic construct
  source 1..75: mol_type = other DNA
ctaggtgaggagatcctacaggcattgtctgacagccgtacactagatgttttggaagagcgagtagcttttttc

SEQ ID NO: 691336 - DNA, 75 bp, synthetic construct
  source 1..75: mol_type = other DNA
aaaggtgagcatgagcgattacccaatccaacgctggccgtcaccgacggtaaaaccacgattaagtttcatccg

SEQ ID NO: 691337 - DNA, 75 bp, synthetic construct
  source 1..75: mol_type = other DNA
atccgacgctggcggtcaccgatggtaaaacaaccattaagtttcatccgtggtccattgaagagatcgttgcca

SEQ ID NO: 691338 - DNA, 75 bp, synthetic construct
  source 1..75: mol_type = other DNA
aaggctgggaacatatcgaaatcgttctgcctggtgatccagagacactgaacgcccgtgcactggcattacttt

SEQ ID NO: 691339 - DNA, 75 bp, synthetic construct
  source 1..75: mol_type = other DNA
tatcgaaaccatgggcggtgtgatgacgacgctgatcgcgaaaaataccactatcccgaccaagcacagccaggt

SEQ ID NO: 691340 - DNA, 75 bp, synthetic construct
  source 1..75: mol_type = other DNA
gccgccagttgggcgcacaggtggcttcatccagtgtccttcagggcattatcagtgaatggggcgaactggaaa

SEQ ID NO: 691341 - DNA, 75 bp, synthetic construct
  source 1..75: mol_type = other DNA
tggttctcttgtcattgatgttcccggctctgccatccatacctgtaaaacactgaatgcaggcgttgcaaccga

SEQ ID NO: 691342 - DNA, 75 bp, synthetic construct
  source 1..75: mol_type = other DNA
aacggcaatgtcatgaccgtgaagagcaatccggcaggcgtcaccctgaccggcacggatacggacggacagaca

SEQ ID NO: 691343 - DNA, 75 bp, synthetic construct
  source 1..75: mol_type = other DNA
tcatgcctgccctgacagtcagcagcgtcaccggcatcgatgccaccggcgcagatggtcagaactttggtaagc

SEQ ID NO: 691344 - DNA, 75 bp, synthetic construct
  source 1..75: mol_type = other DNA
tacgacggaacagcgatttactcctgtcgccagctgggcgcacaggtggcttcatccggtacccttcagggcatc

SEQ ID NO: 691345 - DNA, 75 bp, synthetic construct
  source 1..75: mol_type = other DNA
gccaccattaccgctgacgcgtatggtcagcagtacacagcccccgtcatcacggtcatgcctgccctgacggtc

SEQ ID NO: 691346 - DNA, 75 bp, synthetic construct
  source 1..75: mol_type = other DNA
gaacgtccggctgacggctgggatatccgtgccgaaggctggctgcctgcgtacccgcagctgggcggtaaactt

SEQ ID NO: 691347 - DNA, 75 bp, synthetic construct
  source 1..75: mol_type = other DNA
cgtgcccgtggcgtaaagaaaccttcctctgatcatggtgagaaggtttatctctacagcaaggctgtcagatta

SEQ ID NO: 691348 - DNA, 75 bp, synthetic construct
  source 1..75: mol_type = other DNA
tgggtactactaactcttgtgtagcgattatggatggcaccactcctcgcgtgctggagaacgccgaaggcgatc

SEQ ID NO: 691349 - DNA, 75 bp, synthetic construct
  source 1..75: mol_type = other DNA
gcttctgccaccctgaccagtacacaggccggtaatgcacaggtatcgctttccctgaacggtacgaccaccaca

SEQ ID NO: 691350 - DNA, 75 bp, synthetic construct
  source 1..75: mol_type = other DNA
gatggtcaggaggcggtcagctacaccctgacgctgaaaaccactgacggtaagcccctttcagggaaaaacgtc

SEQ ID NO: 691351 - DNA, 75 bp, synthetic construct
  source 1..75: mol_type = other DNA
gctgtcacctggcacacggacaacggacagttcacacagcaggatgcagtgacgaatgctgccggtgccgcatct

SEQ ID NO: 691352 - DNA, 75 bp, synthetic construct
  source 1..75: mol_type = other DNA
gggagatgactgggctggaaaattcgattgggttaaatcaaactgtgaagttatttatttgcctagaacaccatc

SEQ ID NO: 691353 - DNA, 75 bp, synthetic construct
  source 1..75: mol_type = other DNA
catttgatgtatttcacgttggacatataaatattttagagcgagcgtctaaactcggagattatttgatcgttg

SEQ ID NO: 691354 - DNA, 75 bp, synthetic construct
  source 1..75: mol_type = other DNA
catttgatgtgtttcatgttgggcatgtgaatattttggaaagagcttctgaatacggtgattatttaattgttg

SEQ ID NO: 691355 - DNA, 75 bp, synthetic construct
  source 1..75: mol_type = other DNA
cagaccccgttaaacccccttcaaaaccccctgtacgtgatggtataggggtatctttatcattttgtgctatct

SEQ ID NO: 691356 - DNA, 75 bp, synthetic construct
  source 1..75: mol_type = other DNA
tcggtgcggactggcaacttcgcggactgcaaaaacgtgtggtaacaccgggacagaatgaaaaatactatctgg

SEQ ID NO: 691357 - DNA, 75 bp, synthetic construct
  source 1..75: mol_type = other DNA
caggcacttcacgacacaataacgcgtaatcatcagtgccgctcaatgtggcaactgttgaaaaaaattcgccat

SEQ ID NO: 691358 - DNA, 75 bp, synthetic construct
  source 1..75: mol_type = other DNA
gctcatcagtttgttccgccagttcagcggtagtgagctgcgtctgaagctggtctggctgtgctggtacgattt

SEQ ID NO: 691359 - DNA, 75 bp, synthetic construct
  source 1..75: mol_type = other DNA
atgaaagattacaagcctcgttacgaagaactttatagatattatcaggtctggttgactgattttacgaagctg

SEQ ID NO: 691360 - DNA, 75 bp, synthetic construct
  source 1..75: mol_type = other DNA
gtttatttactcaggagcatcttttagcacatcaccccatgctggaagggattttactgtctgagtgcgtgcgtt

SEQ ID NO: 691361 - DNA, 75 bp, synthetic construct
  source 1..75: mol_type = other DNA
tataatcaagaagaccgctgtcgtataataaattctcttagagttgtgaatgatgtatttattgaagaatcttta

SEQ ID NO: 691362 - DNA, 75 bp, synthetic construct
  source 1..75: mol_type = other DNA
cttttgacgttttccatgttgggcatgtgaatattcttgaaagggctgccagtcttggcgactatctaatagttg

SEQ ID NO: 691363 - DNA, 75 bp, synthetic construct
  source 1..75: mol_type = other DNA
gtttatttactcaggagcatcttttagcacatcatcccatgctggaagggattttgctgtctgagtgcgtgcgat

SEQ ID NO: 691364 - DNA, 75 bp, synthetic construct
  source 1..75: mol_type = other DNA
ttttttacgatggctacaagcatgaataatatctcttattcgttaccgtcagttaatagtcgctcaggattatcg

SEQ ID NO: 691365 - DNA, 75 bp, synthetic construct
  source 1..75: mol_type = other DNA
aaagttcggcattccggttacggtagggaaatacggtcccaacgccacggaggagcaaatccgcgtactgattga

SEQ ID NO: 691366 - DNA, 75 bp, synthetic construct
  source 1..75: mol_type = other DNA
tataatccggagccttatgtcgaagccacccctgatgctctgcaccttcttactttctgcgtattggtactgaag

SEQ ID NO: 691367 - DNA, 75 bp, synthetic construct
  source 1..75: mol_type = other DNA
aaatcgttgagaaaggcaaaaccgcccagcgcgttacgccagaccatatcgaaagcattattcttgcggaaacgt

SEQ ID NO: 691368 - DNA, 75 bp, synthetic construct
  source 1..75: mol_type = other DNA
gttctgcgcatcagcaaaccggaagatcttaaggttctggtggatgcactgtcgccgctgattgaccgggggatg

SEQ ID NO: 691369 - DNA, 75 bp, synthetic construct
  source 1..75: mol_type = other DNA
cccgtccgcgtcaggctggcgtgcgtccggcctcgccgggcatcagcatcgcttccgggctgaatcccggcaggc

SEQ ID NO: 691370 - DNA, 75 bp, synthetic construct
  source 1..75: mol_type = other DNA
tgaaatccggtctgccgctgcgtaacggtctggcccgtctggtggctgtgatgtatatgctgaaatcctttaccg

SEQ ID NO: 691371 - DNA, 75 bp, synthetic construct
  source 1..75: mol_type = other DNA
acagtaaccacttttcgacgctttttcgccgagagtttaactggtcaccgcgtgatattcgccagggacgggatg

SEQ ID NO: 691372 - DNA, 75 bp, synthetic construct
  source 1..75: mol_type = other DNA
gggtgcagctggcgattaactgcttcggtcaatgccgtcgctttgttgaccaattcagattctggtaccgtatta

SEQ ID NO: 691373 - DNA, 75 bp, synthetic construct
  source 1..75: mol_type = other DNA
gcggattttcctgaacatcatcatgattttcatgaaattgtgattgtcgaacatggcacgggtattcatgtgttt

SEQ ID NO: 691374 - DNA, 75 bp, synthetic construct
  source 1..75: mol_type = other DNA
atgaacgaccagcaaatcgaaaaagaaatcgttgagaaaggcaaaaccgctccgcgtgtaacacccgagaaaatt

SEQ ID NO: 691375 - DNA, 75 bp, synthetic construct
  source 1..75: mol_type = other DNA
aatggcttcaccgtcaccggagagagtgcctgtgcaagcccggaaaactttgatgcagaaattggtcggaagatt

SEQ ID NO: 691376 - DNA, 75 bp, synthetic construct
  source 1..75: mol_type = other DNA
atgaacgaccagcaaatcgaaaaagaaatcgttgagaaaggcaaaactgcaccgcgaatcaccccgcagcacatc

SEQ ID NO: 691377 - DNA, 75 bp, synthetic construct
  source 1..75: mol_type = other DNA
cgtcgcgccaagccagattctgcggaaactcgcctcctatccgcggcagaacgagctcgcgacagccctgcggga

SEQ ID NO: 691378 - DNA, 75 bp, synthetic construct
  source 1..75: mol_type = other DNA
catgagtacgcacctggaaggtttctcaccacacgcaacagtgattgtactggttctggtcttctactttgcaca

SEQ ID NO: 691379 - DNA, 75 bp, synthetic construct
  source 1..75: mol_type = other DNA
gttgtgccgtggaaagacattactcgctataacagcgcatggaacacgctggtcaacctggcaacgctggttgtt

SEQ ID NO: 691380 - DNA, 75 bp, synthetic construct
  source 1..75: mol_type = other DNA
ttctggccgtcggtaaaggtattccgggcgtaccaatggaacaactgtgtatcctgctggtgctgtctatcggta

SEQ ID NO: 691381 - DNA, 75 bp, synthetic construct
  source 1..75: mol_type = other DNA
gccgctccggtgcgttaacggtgagtgaaatcgccgcggcaggactaccggcgttgtttgtgccgtttcaacata

SEQ ID NO: 691382 - DNA, 75 bp, synthetic construct
  source 1..75: mol_type = other DNA
agcgggaaaaaattaaaggacaggttgttgaactcgtacgccagagtgggcgtgagacgttacggcaactggaag

SEQ ID NO: 691383 - DNA, 75 bp, synthetic construct
  source 1..75: mol_type = other DNA
ggctgcggctatgtgaagtcgaaagattactggcgtcttggcgctatcttcggggtgatctacatctcaatgctg

SEQ ID NO: 691384 - DNA, 75 bp, synthetic construct
  source 1..75: mol_type = other DNA
ttattaaccatggcagaacgcgcccgtgctgcatccattccggatgccaccgagcgagtggcaaatgaagtgagc

SEQ ID NO: 691385 - DNA, 75 bp, synthetic construct
  source 1..75: mol_type = other DNA
acctgtgttacaacgagaagggcgcttaagatacggtttatcattaggtcgttatcgctcgtcaatagggcaggg

SEQ ID NO: 691386 - DNA, 75 bp, synthetic construct
  source 1..75: mol_type = other DNA
caacagaaaggaacaggttactcaaaaaaaaatgacactctatctttaagcggtggatttaacattggtggctgg

SEQ ID NO: 691387 - DNA, 75 bp, synthetic construct
  source 1..75: mol_type = other DNA
ctacctgtttgccagcctgtctgcgcacaccgcaaccatgctgccggttattctggccgtcggtaaagggatccc

SEQ ID NO: 691388 - DNA, 75 bp, synthetic construct
  source 1..75: mol_type = other DNA
atcgcccttttcctggtgaaattcatggggaaacgcacactgacgttgggttatgcgattgtcatcatcgatatt

SEQ ID NO: 691389 - DNA, 75 bp, synthetic construct
  source 1..75: mol_type = other DNA
gcgccactgcgaatcttcaacgcctggcgtcaggcgcgggcgattatgaaagcgtacaaacctgacgtggtgctc

SEQ ID NO: 691390 - DNA, 75 bp, synthetic construct
  source 1..75: mol_type = other DNA
ggcgctgccgttgccgcagcaacgtttggctggacgtgaaggtccggttcgtgtgttggtagtgggggggtccca

SEQ ID NO: 691391 - DNA, 75 bp, synthetic construct
  source 1..75: mol_type = other DNA
ggtcatgaattttacgtcgatgaacgagtgctggtgccgcgctcgccgattggtgaattgatcaacaataaattt

SEQ ID NO: 691392 - DNA, 75 bp, synthetic construct
  source 1..75: mol_type = other DNA
ttgccgttagtatggcctttgattttgatatatatcttaccgatgaaattatgtcggtgggggatgctcgcttta

SEQ ID NO: 691393 - DNA, 75 bp, synthetic construct
  source 1..75: mol_type = other DNA
cgtcctcttttatgttggttggttgcacgcctcgcattgaagtggctgcgccgaaagagccaatcaccattaata

SEQ ID NO: 691394 - DNA, 75 bp, synthetic construct
  source 1..75: mol_type = other DNA
catccaaacggctctacgcgttcaatccgtcggccgccccggcgcacctgcgagcgttgatcggcggaaaggtca

SEQ ID NO: 691395 - DNA, 75 bp, synthetic construct
  source 1..75: mol_type = other DNA
tggccatggtggtcgaggcacaggcagcgttacccatggcccggttctggggcatgggcacgtcggcttcgagcg

SEQ ID NO: 691396 - DNA, 75 bp, synthetic construct
  source 1..75: mol_type = other DNA
ataacggcggcgatggtgtgtttatgctcaccaaagagcagctgctggccgcacgagaacatttcgcgatttata

SEQ ID NO: 691397 - DNA, 75 bp, synthetic construct
  source 1..75: mol_type = other DNA
cgccgaaagtagaaggcaaagacgacgttaccggtgaagaactgactacccgtaaagacgatcaggaagaaaccg

SEQ ID NO: 691398 - DNA, 75 bp, synthetic construct
  source 1..75: mol_type = other DNA
acggcttcccgcgtaccattccgcaggcagacgcgatgaaagaagcgggcatcaatgttgattacgttctggaat

SEQ ID NO: 691399 - DNA, 75 bp, synthetic construct
  source 1..75: mol_type = other DNA
ttggctggacgtgaaggtccggttcgtgtgttggtagtgggtggttcccagggcgcacacattcttaaccagaca

SEQ ID NO: 691400 - DNA, 75 bp, synthetic construct
  source 1..75: mol_type = other DNA
atgtcagcttccctgaagaatcaacaaggctttagcctgccggaggtaatgttggcgatggtgctgatggtgatg

SEQ ID NO: 691401 - DNA, 75 bp, synthetic construct
  source 1..75: mol_type = other DNA
atgtgtcagcatcagcgttacgctagtttcacccgggggcagagaaggcgagatgacccgcctgcattgcccgaa

SEQ ID NO: 691402 - DNA, 75 bp, synthetic construct
  source 1..75: mol_type = other DNA
atgaaaattttactggctgcgttgacgtcatcttttatgctggttggctgtacgcctcgcattgaagtcgctgcg

SEQ ID NO: 691403 - DNA, 75 bp, synthetic construct
  source 1..75: mol_type = other DNA
aggccgtatcgctgccgaaggtgcgcttccttatcctccgggtgtgctgtgtgttgttccgggtgaaatctgggg

SEQ ID NO: 691404 - DNA, 75 bp, synthetic construct
  source 1..75: mol_type = other DNA
attgcgaatcgcgacgagaattttatggtcgtcagttagaaaccgctgccagccattatgaaactcaactgcgcc

SEQ ID NO: 691405 - DNA, 75 bp, synthetic construct
  source 1..75: mol_type = other DNA
ggaaacggcacgtaacccgtatggctttatcggtggcattgatgcgcactgttttgaagaaagttacctgcgtga

SEQ ID NO: 691406 - DNA, 75 bp, synthetic construct
  source 1..75: mol_type = other DNA
attgggtgaccgccactggattacgtccgtggttacaggatctgaccgagagcgaacagcagcattttcttacgc

SEQ ID NO: 691407 - DNA, 75 bp, synthetic construct
  source 1..75: mol_type = other DNA
attgggtgactgccactggattacgtccgtggttacaggatctgaccgagagcgaacagcagctttttcttaagc

SEQ ID NO: 691408 - DNA, 75 bp, synthetic construct
  source 1..75: mol_type = other DNA
aggctggtgcaacaccggtttatctggaaacagcacgtaacccgtatggttttatcggtggcattgatgcgcact

SEQ ID NO: 691409 - DNA, 75 bp, synthetic construct
  source 1..75: mol_type = other DNA
cgggccacaaattgtgctcgaccaactacgagcgcagaaagtcaacgtcgtcaccctgccgcgtgtgcctgccac

SEQ ID NO: 691410 - DNA, 75 bp, synthetic construct
  source 1..75: mol_type = other DNA
tgggcggaatggtctctgcaacgttgctggcaatcttcttcgtgccagtgttctttgtggtgatccgtcgatgct

SEQ ID NO: 691411 - DNA, 75 bp, synthetic construct
  source 1..75: mol_type = other DNA
atgtcgcaaatccagggcgcgctggtaggtatcgcgatggtactgtcggcggtatttattccgatggcattcttc

SEQ ID NO: 691412 - DNA, 75 bp, synthetic construct
  source 1..75: mol_type = other DNA
ttatgtcaatcagggcaacagcgcatttgactgccccggtcatcagggcggcgaatttttccgtcgccatccggc

SEQ ID NO: 691413 - DNA, 75 bp, synthetic construct
  source 1..75: mol_type = other DNA
ttggatgatctaacttactcgttgaatagtacattcaaccgttctactagtcgtaaggtatacatggaactactt

SEQ ID NO: 691414 - DNA, 75 bp, synthetic construct
  source 1..75: mol_type = other DNA
gaccatcaggcatgtactgtgcggcggtcttgttgtgctggccgtattttatctgttttatctgctgcgtctgga

SEQ ID NO: 691415 - DNA, 75 bp, synthetic construct
  source 1..75: mol_type = other DNA
cgctacgcggttaatttcacgcctgaacagatcagcgagattcaacaaattattcgtcattataacattaattaa

SEQ ID NO: 691416 - DNA, 75 bp, synthetic construct
  source 1..75: mol_type = other DNA
acaggctcgtaaggactggcaaaacgcccgcaaaaaactatcaagggcaaaactgaagaaaaaaacatctgtgaa

SEQ ID NO: 691417 - DNA, 75 bp, synthetic construct
  source 1..75: mol_type = other DNA
gctaaatgatgtgaatgctgacctgattaacttttacaagactttgcaacgtgaggaacgttcacttatcactct

SEQ ID NO: 691418 - DNA, 75 bp, synthetic construct
  source 1..75: mol_type = other DNA
ctttattgaagttgagcccaaaaaagtgatcgaggatcgcgtggtaaatcaacggaattattatcaggtaacaat

SEQ ID NO: 691419 - DNA, 75 bp, synthetic construct
  source 1..75: mol_type = other DNA
taacccaactgaatattacgtcgtatttgccggactggcagtcgataaaaccgatctcacaagggaaggtgcgaa

SEQ ID NO: 691420 - DNA, 75 bp, synthetic construct
  source 1..75: mol_type = other DNA
aacagctgataacctgcctgaaaataaagagtcgctgttctacattaatgttcgtgccattccagcaaaagaaaa

SEQ ID NO: 691421 - DNA, 75 bp, synthetic construct
  source 1..75: mol_type = other DNA
ttcctcgggcaaaacgaaattccggcaatcgtcaaaccctttatcgatcggctgaatcgggtaatgactccaact

SEQ ID NO: 691422 - DNA, 75 bp, synthetic construct
  source 1..75: mol_type = other DNA
ttagaggctgattccaaattgtgggagatttttcagctggattatcgagtgttgctgcagcagcatgctctcaga

SEQ ID NO: 691423 - DNA, 75 bp, synthetic construct
  source 1..75: mol_type = other DNA
gaggatatcgttgagataaaggctgaacctaagctgtttgagctttaccacatggacagaagggtactgctgcgg

SEQ ID NO: 691424 - DNA, 75 bp, synthetic construct
  source 1..75: mol_type = other DNA
atgccaaaaaccattgaaggtgtattaaccgccatcgtcaccccgtttaccgcgaccggcgtactgaatctcccg

SEQ ID NO: 691425 - DNA, 75 bp, synthetic construct
  source 1..75: mol_type = other DNA
gcacaacgacgccgacgcgtgtttgttgtcgcaagtgctcgaacagatctcgatcccgcaacggtactttttgag

SEQ ID NO: 691426 - DNA, 75 bp, synthetic construct
  source 1..75: mol_type = other DNA
agtcatttctcaaaccagccgttatcgtctgggaaaatgtcccaggagtcttgtcatcggcagataacgccttcg

SEQ ID NO: 691427 - DNA, 75 bp, synthetic construct
  source 1..75: mol_type = other DNA
atctcgattgcaccattgaaaagcaaggtcgtgaaaacttcattatcgttcactctcggaatccgaaacttaaac

SEQ ID NO: 691428 - DNA, 75 bp, synthetic construct
  source 1..75: mol_type = other DNA
aaagatctcatggagaaagagggtaaaggtgttgttgaagcgacactaatggcagtacgtatgcgtctgcgtcct

SEQ ID NO: 691429 - DNA, 75 bp, synthetic construct
  source 1..75: mol_type = other DNA
ggcctggaactggaaagcgtttcacttaccaactttaaccagacgtcgaaagaacatttcaatcctaacaacgcc

SEQ ID NO: 691430 - DNA, 75 bp, synthetic construct
  source 1..75: mol_type = other DNA
ccattaacgtgctttcggatgagcagaccagcctccgcttccgtcttgccctgctggatgcattacctgccgtca

SEQ ID NO: 691431 - DNA, 75 bp, synthetic construct
  source 1..75: mol_type = other DNA
ggcgcctgaacatgatttgtcacgattgccggaagagcgaagctatgcagcgtgtactggctttctatcagggta

SEQ ID NO: 691432 - DNA, 75 bp, synthetic construct
  source 1..75: mol_type = other DNA
ccagacggagaaatacgccgctacgacaggagccagaacataatctgtcgcgagtgccggaagagtgaggttatg

SEQ ID NO: 691433 - DNA, 75 bp, synthetic construct
  source 1..75: mol_type = other DNA
gtgagtcgaacattactcgccgtagcgttggtatttccattatttgcgctggctaacccgcaataccgtccggat

SEQ ID NO: 691434 - DNA, 75 bp, synthetic construct
  source 1..75: mol_type = other DNA
tatcaggataaaaattattctgaaggggcggtaattaaagccgaaggaatactgctgcaatgccagcgggatgac

SEQ ID NO: 691435 - DNA, 75 bp, synthetic construct
  source 1..75: mol_type = other DNA
cgccagattgatggagttccttccgctatcagccagttgcaggaagttgcagataaagtcgggcacaaagtaccg

SEQ ID NO: 691436 - DNA, 75 bp, synthetic construct
  source 1..75: mol_type = other DNA
gacaacttacatcactttcgcaggtaaaccatctcgccaaagacaatgatttgtctaacgataaatcccacaagt

SEQ ID NO: 691437 - DNA, 75 bp, synthetic construct
  source 1..75: mol_type = other DNA
cttattgccatgagttagatcggtgtttatcgattgatgaagcaagaacagaattcttttcaaaaaaaccgcaag

SEQ ID NO: 691438 - DNA, 75 bp, synthetic construct
  source 1..75: mol_type = other DNA
agccaggccagagccattgccgtggcggcaaaatcagaagagcagtcacaggcagaagcccgggcaagtaaagca

SEQ ID NO: 691439 - DNA, 75 bp, synthetic construct
  source 1..75: mol_type = other DNA
atgcaggtcttttccctgcggcacagttagagctaattaatattctaactaaagcagcaaaacaatacgatctgc

SEQ ID NO: 691440 - DNA, 75 bp, synthetic construct
  source 1..75: mol_type = other DNA
aaaatataaatgttgtgaagtttcgcggactgaaaaatataaacatcgagtttggttctcgcctaactgttattt

SEQ ID NO: 691441 - DNA, 75 bp, synthetic construct
  source 1..75: mol_type = other DNA
tcggtgaacccgaagccctgctggacaggcgggaaatactgaactatctggagtgcgtagactttggcaaatggt

SEQ ID NO: 691442 - DNA, 75 bp, synthetic construct
  source 1..75: mol_type = other DNA
tggacggcggcgcggtggcgaataacttcctgatgcagttccagtcggacattcttggcactcgcgttgagcgtc

SEQ ID NO: 691443 - DNA, 75 bp, synthetic construct
  source 1..75: mol_type = other DNA
cgtatgcgcgcggagcgattttcggtctgactcgtggcgtgaacgctaaccacatcatccgcgcgacgctggaat

SEQ ID NO: 691444 - DNA, 75 bp, synthetic construct
  source 1..75: mol_type = other DNA
gaagtggatcctcgaccatgtggaaggctctcgcgagcgtgcgcgtcgtggtgaattgctgtttggtacggttga

SEQ ID NO: 691445 - DNA, 75 bp, synthetic construct
  source 1..75: mol_type = other DNA
acgcttatcgggaaaccaggctcccgctctggtagcaatttcctttgtggttgttttcctgtgccttgctgcact

SEQ ID NO: 691446 - DNA, 75 bp, synthetic construct
  source 1..75: mol_type = other DNA
atgattcagttacccgctggcgcgacgcaagagcggacgcaaaaagtgttggatcaagtgacggattactatctg

SEQ ID NO: 691447 - DNA, 75 bp, synthetic construct
  source 1..75: mol_type = other DNA
gtgcggtgtttatggcaggcgcatccattcagtggctgcgcgatgagatgaagttgattaacgacgcctacgatt

SEQ ID NO: 691448 - DNA, 75 bp, synthetic construct
  source 1..75: mol_type = other DNA
atgaacgggcaaatatcaattgttcgaccgggagcatgtgacgatcgcgagatacgactgattattcgtctggcg

SEQ ID NO: 691449 - DNA, 75 bp, synthetic construct
  source 1..75: mol_type = other DNA
atgaacggacaaatctcaattgttcgaccgggagcatgtgacgatcgcgagatacgaatgattattcgtctggca

SEQ ID NO: 691450 - DNA, 75 bp, synthetic construct
  source 1..75: mol_type = other DNA
attaaccggaaagtcagacctgccagtagagctaaagctgcgaaatgttgagattaaggtgagtatcagcaatga

SEQ ID NO: 691451 - DNA, 75 bp, synthetic construct
  source 1..75: mol_type = other DNA
accggtgagaaagcggtgacatcagaaaatggcctgctgaccaccatcgcctgtggcccgactggcgaagtgaat

SEQ ID NO: 691452 - DNA, 75 bp, synthetic construct
  source 1..75: mol_type = other DNA
atgactgaaaaaaaatatatcgttgcactcgaccagggcacaaccagctcccgcgcagtcgtgatggatcacgat

SEQ ID NO: 691453 - DNA, 75 bp, synthetic construct
  source 1..75: mol_type = other DNA
ttactccagaaaatctcgcattagctttaaccggaaagtcagaactgccagtggagctaaaactgcgaaatgttg

SEQ ID NO: 691454 - DNA, 75 bp, synthetic construct
  source 1..75: mol_type = other DNA
tcgtgccacggtgagtctgtatgtgtcgctgtacaacatcttcgtgagcctgttgagcattcttggcttcgccag

SEQ ID NO: 691455 - DNA, 75 bp, synthetic construct
  source 1..75: mol_type = other DNA
cttctgctgctctgcatatgtgctgaccacccgcaaagatatgtcgttcctcggcggtatgctgatggcgggtat

SEQ ID NO: 691456 - DNA, 75 bp, synthetic construct
  source 1..75: mol_type = other DNA
gccctcgccggagcctgtttattgctgatggcagacacgcttgcccgcacgctggtacagccagcagaaatgccc

SEQ ID NO: 691457 - DNA, 75 bp, synthetic construct
  source 1..75: mol_type = other DNA
aaaaatggaagtgacagcctcgcttcaggcgcagaccgtgcgtcttgacagtatgtcgctgtttgacgtcggaca

SEQ ID NO: 691458 - DNA, 75 bp, synthetic construct
  source 1..75: mol_type = other DNA
aaagtgctggtggacgcactggtgaacatccgggcaaaaccgggctggctgatcctcgtggccggatataccgac

SEQ ID NO: 691459 - DNA, 75 bp, synthetic construct
  source 1..75: mol_type = other DNA
gacccttgcgcttcggtactttgcttatatggaaaagcagtcgggcaaggtggagggagtgaatgcagaagtgct

SEQ ID NO: 691460 - DNA, 75 bp, synthetic construct
  source 1..75: mol_type = other DNA
aaactgcgcagcgatatgttaagcaccattgagtacgctccggtgtggatcatcatggcggtcgcgctggcgtta

SEQ ID NO: 691461 - DNA, 75 bp, synthetic construct
  source 1..75: mol_type = other DNA
gatttaccaggcaagacgcattcgtctcgcccgcaaatacctgaacggaaaaaaaccggaagaaagggctgaacg

SEQ ID NO: 691462 - DNA, 75 bp, synthetic construct
  source 1..75: mol_type = other DNA
tcggtcaggcgcaatggccgacattattggtcgccagttcattcattctgccagccattatggcaacaacctgtc

SEQ ID NO: 691463 - DNA, 75 bp, synthetic construct
  source 1..75: mol_type = other DNA
atgacccgcaaaactcaacgaccaccgataccggagaaacgccgcgttattgaaggattctccagccgcgacggc

SEQ ID NO: 691464 - DNA, 75 bp, synthetic construct
  source 1..75: mol_type = other DNA
tgagaataatatatcaatcgataagcctgttttttacgataacagaagattaccttcattacacgatatagctag

SEQ ID NO: 691465 - DNA, 75 bp, synthetic construct
  source 1..75: mol_type = other DNA
tcatcaaaaatgacagtcataataaaaagacactggaggtggtaaatccatttgggaataactttgacataatta

SEQ ID NO: 691466 - DNA, 75 bp, synthetic construct
  source 1..75: mol_type = other DNA
ggctgcgccgtatttttgtctggcacggttcagtattatccaagatatcctcgcgcttactactcaattttctct

SEQ ID NO: 691467 - DNA, 75 bp, synthetic construct
  source 1..75: mol_type = other DNA
ctgcggtactggcagggtgcgagcgtattgcatatacaccaattccctttgcttacaccctgattttgcatcgca

SEQ ID NO: 691468 - DNA, 75 bp, synthetic construct
  source 1..75: mol_type = other DNA
cggctcacatcaaccaagccgttactacttcccgctctcctgccgagatactttcactggaatgaatgtcgtcta

SEQ ID NO: 691469 - DNA, 75 bp, synthetic construct
  source 1..75: mol_type = other DNA
cattcttccggccgacagttccctagcagagattggtgcaggtctgcggttagccctcagtcgttgcaaagatta

SEQ ID NO: 691470 - DNA, 75 bp, synthetic construct
  source 1..75: mol_type = other DNA
ttcacaccaatacctgtatgaaaggcacaactcaggataactgggaaacggctgggctattgctggcggagcagc

SEQ ID NO: 691471 - DNA, 75 bp, synthetic construct
  source 1..75: mol_type = other DNA
ggcggttcagcgccgcaatggacagctttcagatatcctgtttattagcctcaacgatcggcttaacgatatttc

SEQ ID NO: 691472 - DNA, 75 bp, synthetic construct
  source 1..75: mol_type = other DNA
tcctgaccaacgatgtctctgacaactcggggcttggtcagcacaccacgaccgccgctcggctgtatcacttcc

SEQ ID NO: 691473 - DNA, 75 bp, synthetic construct
  source 1..75: mol_type = other DNA
ctggaagaggcgttgaccgggcgcatcagcatttttgccgggcagtctggcgtcggcaaatccagcctgctgaat

SEQ ID NO: 691474 - DNA, 75 bp, synthetic construct
  source 1..75: mol_type = other DNA
ggaagggaaaatcgcggaaacccgtttcgaaaactatcaccgtattctggaaagcatggcgcaggtaaaaacgcg

SEQ ID NO: 691475 - DNA, 75 bp, synthetic construct
  source 1..75: mol_type = other DNA
aatcgcacgttatcactaactcgcgatgatgaagaaagcgaactctttacgctgacgctgaaagaaaaacaaacc

SEQ ID NO: 691476 - DNA, 75 bp, synthetic construct
  source 1..75: mol_type = other DNA
cgtttgaaggcggtacagatggcgatctgtcctcaattgacgctgatgattatctgaaagcgttagaggttctcg

SEQ ID NO: 691477 - DNA, 75 bp, synthetic construct
  source 1..75: mol_type = other DNA
aaggcggcaccggttatgtggttcgcgtatgcgcaaaagacatgaaagtaccgggcattgccgtttctgttcagg

SEQ ID NO: 691478 - DNA, 75 bp, synthetic construct
  source 1..75: mol_type = other DNA
cctgtctcatatttcaatctcttttgctctggcctaactaatatctgtcgctctttatattttggtatggatgta

SEQ ID NO: 691479 - DNA, 75 bp, synthetic construct
  source 1..75: mol_type = other DNA
tatcaggagcaggtagccgccgggcagcaggctgaagccagttaccttgagcagattgctcaactggagagccag

SEQ ID NO: 691480 - DNA, 75 bp, synthetic construct
  source 1..75: mol_type = other DNA
tggctacgcgactcaggcatctctcagcgtgacgtcctcgccaacatcatcgacaacgcgaagcagtgccgcagc

SEQ ID NO: 691481 - DNA, 75 bp, synthetic construct
  source 1..75: mol_type = other DNA
ctgccgccattgccctgtacgaaagtttaggctttaacgaggcgacgattcgccgcaattactaccccaccacgg

SEQ ID NO: 691482 - DNA, 75 bp, synthetic construct
  source 1..75: mol_type = other DNA
ctgacgacaaaactgctatcgagtctgcgctgactgcactggaaactgctctgaaaggtgaagacaaagccgcta

SEQ ID NO: 691483 - DNA, 75 bp, synthetic construct
  source 1..75: mol_type = other DNA
tgagccgctgaaagttgcactgcaggacgctggcctgtccgtatctgatatcgacgacgttatcctcgttggtgg

SEQ ID NO: 691484 - DNA, 75 bp, synthetic construct
  source 1..75: mol_type = other DNA
caacgcaggacaatgtcgtcgctggcggaaccagataaacgcgttactggatgaacgggaaggattacagaaatg

SEQ ID NO: 691485 - DNA, 75 bp, synthetic construct
  source 1..75: mol_type = other DNA
atgagcagaacgattttttgtactttcctgcaacgtgaagcagaaggtcaagattttcagctgtaccccggcgaa

SEQ ID NO: 691486 - DNA, 75 bp, synthetic construct
  source 1..75: mol_type = other DNA
gcaggagatggtcaatttcctgttcgaaggtaaagaggtacatatcgaaggctatacgccggaagataaaaaata

SEQ ID NO: 691487 - DNA, 75 bp, synthetic construct
  source 1..75: mol_type = other DNA
tatgtgggggtcgcctcagaaaacggaatctatggtcactcccgtttttgcaacaccgattttgacgaaaagtcg

SEQ ID NO: 691488 - DNA, 75 bp, synthetic construct
  source 1..75: mol_type = other DNA
atgaacagccagacgatgccggagcatctttttgctcaggtggtgacagatgttcaggccgtggagcaactgctt

SEQ ID NO: 691489 - DNA, 75 bp, synthetic construct
  source 1..75: mol_type = other DNA
acgagtggatcaagcagtcattgctggtccatttccacaacgaagcctggggtggcgagaaaggttttcatcctg

SEQ ID NO: 691490 - DNA, 75 bp, synthetic construct
  source 1..75: mol_type = other DNA
ttcagctcgctagtgactgttatggcacgaaatggcgtcaacttcggtatccggctctcgggccttggtgaccag

SEQ ID NO: 691491 - DNA, 75 bp, synthetic construct
  source 1..75: mol_type = other DNA
tccgaaacacatgaacatcaaagtgactcgtgcgaaactggaaagcctggtagaagacctggtgaaccgttccat

SEQ ID NO: 691492 - DNA, 75 bp, synthetic construct
  source 1..75: mol_type = other DNA
tccgtgcaagctgctgctgacgaccccaggtattgatgcgcgtaatggcgaatatgaggcgtttggcgttccggc

SEQ ID NO: 691493 - DNA, 75 bp, synthetic construct
  source 1..75: mol_type = other DNA
gcgaatttttccgtcgtcatccggcaggaaatcagtttgtagagtattttggcgaaacgctgttccgttccgact

SEQ ID NO: 691494 - DNA, 75 bp, synthetic construct
  source 1..75: mol_type = other DNA
ctgccttccatctacaaacagcatgaagagcgctacgccggttataccctgcgtcagttgtgtcaggaaatgcat

SEQ ID NO: 691495 - DNA, 75 bp, synthetic construct
  source 1..75: mol_type = other DNA
gggggccgggcgttccgatgtgatgaaggcgctctttggcctcgtttcgtatcaggggactgtgttgattgatgg

SEQ ID NO: 691496 - DNA, 75 bp, synthetic construct
  source 1..75: mol_type = other DNA
cagaccatttccgcgcatcttattccgcaatgcattgctgaaagccatcgccgctatccagatattcagtttgtc

SEQ ID NO: 691497 - DNA, 75 bp, synthetic construct
  source 1..75: mol_type = other DNA
tcgtattttctctttttttaacttcatgtagttgggatcctaatggtgctaaagcgcaggaaaaatggctatccc

SEQ ID NO: 691498 - DNA, 75 bp, synthetic construct
  source 1..75: mol_type = other DNA
ttttggacagatttaaaagcggtttagaaaagttaggtattctttcactagcaagcagtaacaaaaatttgctga

SEQ ID NO: 691499 - DNA, 75 bp, synthetic construct
  source 1..75: mol_type = other DNA
agtggctgaatcttaatgtgctggcggcactgaacggcccggaggcgaaatgcccgccactggcgatggccgtgg

SEQ ID NO: 691500 - DNA, 75 bp, synthetic construct
  source 1..75: mol_type = other DNA
ctggtacagccagcagaaatgcccgtgggattattaaccagcctgcttggtggcccttattttatgtggttgatt

SEQ ID NO: 691501 - DNA, 75 bp, synthetic construct
  source 1..75: mol_type = other DNA
tggcacgtttcgaaaaactgctggaagatgatgcgcctctggcggacgtactgccttccatttacaaacaacatg

SEQ ID NO: 691502 - DNA, 75 bp, synthetic construct
  source 1..75: mol_type = other DNA
cattttaccggtcatcaatacgggtatcgcccacaaacaagcgggggtcgggcaaattggtgccgggatcaccac

SEQ ID NO: 691503 - DNA, 75 bp, synthetic construct
  source 1..75: mol_type = other DNA
tatacacaaatccccacccggggatttgtgatgtctgtcagtctgctttagggggactctttccatccggtagtt

SEQ ID NO: 691504 - DNA, 75 bp, synthetic construct
  source 1..75: mol_type = other DNA
tttttgccgcgctgcatgttgagggtgttcaacgtgtggaactggcttctccgctggcggatgtggttctgaaca

SEQ ID NO: 691505 - DNA, 75 bp, synthetic construct
  source 1..75: mol_type = other DNA
gtgcaaccagcccggcaccagcagaggtggtgctgactgttcttagccgcgaaggcgacggaactgcagaaaaag

SEQ ID NO: 691506 - DNA, 75 bp, synthetic construct
  source 1..75: mol_type = other DNA
tctgcgacagcgcattaacgaagccgcacaggcggtgatggtggcttatgccatagggggcgatctggaccagct

SEQ ID NO: 691507 - DNA, 75 bp, synthetic construct
  source 1..75: mol_type = other DNA
agaaatgcctggcacatgagcaaaaaggtgtgagggcgatatataacaaagccgagtatcgtgatcagcgtacat

SEQ ID NO: 691508 - DNA, 75 bp, synthetic construct
  source 1..75: mol_type = other DNA
ggtggtgctgactgtccttagccgcgaaggcgatggaactgcagaaaaagacttgctggacgtggtggaaaaagc

SEQ ID NO: 691509 - DNA, 75 bp, synthetic construct
  source 1..75: mol_type = other DNA
gtacatcgccagccagacgaggcttggccgggatattcgccgtagcgccatctttgctgctctgcatgttgaggg

SEQ ID NO: 691510 - DNA, 75 bp, synthetic construct
  source 1..75: mol_type = other DNA
gcttcgaagaaaattacctgcgcgaactgattgcagaagtcgcaccgcagcgggcaaaagaggctcgtccgttcc

SEQ ID NO: 691511 - DNA, 75 bp, synthetic construct
  source 1..75: mol_type = other DNA
tctgcgccagcgcattaacgaagccgcgcaggctgtgatggtggcttacgcgatgggcggcgatcttgaccatct

SEQ ID NO: 691512 - DNA, 75 bp, synthetic construct
  source 1..75: mol_type = other DNA
ggtggtgctgactgtcctgagccgtgaaggcgacggaacagcagaaaaagatttgctggatgtggtggagaaagc

SEQ ID NO: 691513 - DNA, 75 bp, synthetic construct
  source 1..75: mol_type = other DNA
gagggggacggtacggcaggggctgacctgctggcggtggttgagcaggcgcttaacagtgaaaaagttcgcccg

SEQ ID NO: 691514 - DNA, 75 bp, synthetic construct
  source 1..75: mol_type = other DNA
acctgctggcagtggttgagcaggcgcttaatagtgaaaaggttcgcccggtggcagaccgcctgacggtgcgca

SEQ ID NO: 691515 - DNA, 75 bp, synthetic construct
  source 1..75: mol_type = other DNA
gttgtttgaccgcaataaccataaatctaaccaccacggtgcgttgctacaggctggcgcgacaccggtttatct

SEQ ID NO: 691516 - DNA, 75 bp, synthetic construct
  source 1..75: mol_type = other DNA
ggacggcagtatcaccggaacgccacgaaactcccggattgcgtcatttggatggaggggccagctgcggcgttt

SEQ ID NO: 691517 - DNA, 75 bp, synthetic construct
  source 1..75: mol_type = other DNA
gcgaatttttccgtcgccatccggcaggtaaccagtttgtagagtattttggtgaaactcttttccgttctgact

SEQ ID NO: 691518 - DNA, 75 bp, synthetic construct
  source 1..75: mol_type = other DNA
tactgcttttagccttacggtataagaagttgctttccctttttaaccgtttacgcaagcaggttcacaacaaat

SEQ ID NO: 691519 - DNA, 75 bp, synthetic construct
  source 1..75: mol_type = other DNA
tcctggctcccatacattatctgtggtcagtgaagattatctcaccacagccggttatctacgccgggctggctt

SEQ ID NO: 691520 - DNA, 75 bp, synthetic construct
  source 1..75: mol_type = other DNA
tgaagaaatacgacaataacccggttctggcagtagctgcctataacgctggcccaggaaaggttgacggctgga

SEQ ID NO: 691521 - DNA, 75 bp, synthetic construct
  source 1..75: mol_type = other DNA
tcctggccccaatacattatctgtggtcagtgaagattatttcaccgcagccactcatctacgctgggctggccg

SEQ ID NO: 691522 - DNA, 75 bp, synthetic construct
  source 1..75: mol_type = other DNA
atgacttataccaccaggatgcacttgactatgataactgaaactgaaattaacgtactgaaagttatggctgag

SEQ ID NO: 691523 - DNA, 75 bp, synthetic construct
  source 1..75: mol_type = other DNA
cgacggtgaacaacgttttaccgcaccgcgcattatgaccaaaaacacccacggcaccggttgtacgctctctgc

SEQ ID NO: 691524 - DNA, 75 bp, synthetic construct
  source 1..75: mol_type = other DNA
tttcgcgaagtccccactcgtaaccagacaagacgtagcccaaccggcggcgaggtcagcacggagccggtggtg

SEQ ID NO: 691525 - DNA, 75 bp, synthetic construct
  source 1..75: mol_type = other DNA
aacaacaaaagcgcacggatataccgtattgccatcagtgctattgatagcccgggcagcagtgaattgcgcacc

SEQ ID NO: 691526 - DNA, 75 bp, synthetic construct
  source 1..75: mol_type = other DNA
gtcagtgaagattatctcaccacagccggttatctatgccgggctggctttactgcttttagccttacgttttaa

SEQ ID NO: 691527 - DNA, 75 bp, synthetic construct
  source 1..75: mol_type = other DNA
gtcagtaaagattatctcaccacagccaatcatctacgctgggctggctttactgcttttagccttacgttataa

SEQ ID NO: 691528 - DNA, 75 bp, synthetic construct
  source 1..75: mol_type = other DNA
gtgcgactgacagcaaaacaagtgacatggctgaaagtttgcctgcatcttgccggatttttgccgtttgtctgg

SEQ ID NO: 691529 - DNA, 75 bp, synthetic construct
  source 1..75: mol_type = other DNA
gtgcaaccagcccggcacctgcagaggtggtgctgacggtcctgagtcgcgaaggcgatggaactgcagaaaaag

SEQ ID NO: 691530 - DNA, 75 bp, synthetic construct
  source 1..75: mol_type = other DNA
tgatgttccgcctgatccagtcccagcgttttaaacgcattctcttccttgtcgaccgccgttctcttggcgagc

SEQ ID NO: 691531 - DNA, 75 bp, synthetic construct
  source 1..75: mol_type = other DNA
taaacagggctttgcggattatgtgctgtttgtcggcctcaaacccatcgcggtggtagaggcgaaacgtaaaaa

SEQ ID NO: 691532 - DNA, 75 bp, synthetic construct
  source 1..75: mol_type = other DNA
ctaccttgacccgaccgggtcacaaaaaacgctggtcttctgcgtcaccaatgcccatgccgatatggtggtgga

SEQ ID NO: 691533 - DNA, 75 bp, synthetic construct
  source 1..75: mol_type = other DNA
ttgctgaaagccatcgccgctatccaagatattcagtttgtcctgcacgatcgtccgcagcagtgggtgatggaa

SEQ ID NO: 691534 - DNA, 75 bp, synthetic construct
  source 1..75: mol_type = other DNA
tggcgcaacagatactcgaagcgcacttcaccgagagtattcaggaagaaatcgctgacgagctgggttttgatc

SEQ ID NO: 691535 - DNA, 75 bp, synthetic construct
  source 1..75: mol_type = other DNA
gaatatgaaacaaatgagcggtaatgtcactacaccaattgtggcgcttgctcactatttatggggtaatggcgc

SEQ ID NO: 691536 - DNA, 75 bp, synthetic construct
  source 1..75: mol_type = other DNA
ctatccgcgtgaccgtgttcttcgacggttgttcagactcaataatgagtttcagcgcaacagaattatccggag

SEQ ID NO: 691537 - DNA, 75 bp, synthetic construct
  source 1..75: mol_type = other DNA
acatggttctggcaagtggaactataggtaatgctacaactctgcactccgttacccctatgggggcaatacgca

SEQ ID NO: 691538 - DNA, 75 bp, synthetic construct
  source 1..75: mol_type = other DNA
cttttggtgacattgagttttttgaccagttagaggaacatgcatgggaccagattcatgatggtatgctaccaa

SEQ ID NO: 691539 - DNA, 75 bp, synthetic construct
  source 1..75: mol_type = other DNA
gcgcatcgcggctatattctcgataaagagcagaccgaaggcgaactgcagttccgcagccagctggattacgtc

SEQ ID NO: 691540 - DNA, 75 bp, synthetic construct
  source 1..75: mol_type = other DNA
atgaaactagctggcaggacaccagcggccaacaacggtttaaaatccccttctgctactcgaccaacgggcgcg

SEQ ID NO: 691541 - DNA, 75 bp, synthetic construct
  source 1..75: mol_type = other DNA
actgtcatattttcttcgccatgactcctacacaaccttagaattaccggcttatattaatttcaccacattatt

SEQ ID NO: 691542 - DNA, 75 bp, synthetic construct
  source 1..75: mol_type = other DNA
ccgtgttgaatttgagttttatttacgaacaggagagtcgtgtggctgccaagggcatgaaatacaacccgagaa

SEQ ID NO: 691543 - DNA, 75 bp, synthetic construct
  source 1..75: mol_type = other DNA
gcgcaggcggtgatggtggcttatgcgatgggcggcgatcttgaccagctcgctgccaactacaacgtgaaccgc

SEQ ID NO: 691544 - DNA, 75 bp, synthetic construct
  source 1..75: mol_type = other DNA
ttgttcgcggcactggacgtcaacgctaaaatgcatgaaggcgtaagcggtcgcaatatgtggatggactgcgtg

SEQ ID NO: 691545 - DNA, 75 bp, synthetic construct
  source 1..75: mol_type = other DNA
gtggctgaccgtctgacggttcgcagcgcagaaatcatcccgtatcgcgtggaagccaccatttttctctatcct

SEQ ID NO: 691546 - DNA, 75 bp, synthetic construct
  source 1..75: mol_type = other DNA
cgatgggcggcgatctggaccaaatcgctgccaactacaacgtgaaacgcttgacggtgacgcctgctgataatg

SEQ ID NO: 691547 - DNA, 75 bp, synthetic construct
  source 1..75: mol_type = other DNA
tgttcaacgtgtggaactggcttctccgctggcggatgtggtcctgaacaaaatacaggcggcatcatgtacgca

SEQ ID NO: 691548 - DNA, 75 bp, synthetic construct
  source 1..75: mol_type = other DNA
ccgctggcggatgtggtcctgaacaaaacgcaggcggcatcatgtacggagtggagcgtgaccaacgggggaacg

SEQ ID NO: 691549 - DNA, 75 bp, synthetic construct
  source 1..75: mol_type = other DNA
tcagacagagaggtgactgtcggtaaaaccgcatatgagaaaacaattacggatattaatgatgcagccaaatac

SEQ ID NO: 691550 - DNA, 75 bp, synthetic construct
  source 1..75: mol_type = other DNA
gcatcgtacattcaagaaacgctagaaaatattgccagtacaaaatcatctgttattgaatatgtaatacctgaa

SEQ ID NO: 691551 - DNA, 75 bp, synthetic construct
  source 1..75: mol_type = other DNA
ttaacatgcgccacgacaatgcgccgattgctctggaagctgctcatatcagatggaagcagcaccatggccctt

SEQ ID NO: 691552 - DNA, 75 bp, synthetic construct
  source 1..75: mol_type = other DNA
ctggcccgtcaggcgcatacgagtattttgcccgcagcgccagcggtctggtacgcgacgcgcgagccatcagcc

SEQ ID NO: 691553 - DNA, 75 bp, synthetic construct
  source 1..75: mol_type = other DNA
acctgctggctgtggtacgtaacgcccttaatggcgaggacgtcaggccggtggccgaccgcgtgaccgtgcagt

SEQ ID NO: 691554 - DNA, 75 bp, synthetic construct
  source 1..75: mol_type = other DNA
ctgtttttattgcaacggaaaatgaagaacgtgtacccgcagaatatctgccacgtatttctggtgtcttcgagc

SEQ ID NO: 691555 - DNA, 75 bp, synthetic construct
  source 1..75: mol_type = other DNA
acatcgacagggatatcgacagaaagatggaaaggacgaagaatcgggtgctggttaaaggcctgatctctcctg

SEQ ID NO: 691556 - DNA, 75 bp, synthetic construct
  source 1..75: mol_type = other DNA
atgctacggagaagactgaataccaggaactccctcatttcccggaagctagacgataaaattaacccgaatcac

SEQ ID NO: 691557 - DNA, 75 bp, synthetic construct
  source 1..75: mol_type = other DNA
tgacctacaatccggtaacgaagatcgtggtatttgcggtctgccgtttacgcgccagtccgacaatcagaccgt

SEQ ID NO: 691558 - DNA, 75 bp, synthetic construct
  source 1..75: mol_type = other DNA
tctgaccaggtatctgatgcgctctggctgtcagcgtggcgtgatttccgggcacaactggcctcggcctacccg

SEQ ID NO: 691559 - DNA, 75 bp, synthetic construct
  source 1..75: mol_type = other DNA
agaacgtcagacacctcctggttcagtgtgcctatttcgacgagcagcagttgcgccggcgtgccggccttccgg

SEQ ID NO: 691560 - DNA, 75 bp, synthetic construct
  source 1..75: mol_type = other DNA
ggcggttacgctggatacaaatatctggtggtcgctgcggcagtcagcgtctggtggttaggtatggccctgcgt

SEQ ID NO: 691561 - DNA, 75 bp, synthetic construct
  source 1..75: mol_type = other DNA
ttcatcatcttaagaagtccgtcggtcagggggagcatgaactctccatcctcaccggagttgagctggttgtca

SEQ ID NO: 691562 - DNA, 75 bp, synthetic construct
  source 1..75: mol_type = other DNA
atgggcaagctgagcggcatctctatgggctgtgactgctgctacaccaaccacgctgacgctgaccagaacctc

SEQ ID NO: 691563 - DNA, 75 bp, synthetic construct
  source 1..75: mol_type = other DNA
cagcagatttacgatcagctgcatccgggcaagtttcatggtgaatttacggaaattctactcgatgatattcag

SEQ ID NO: 691564 - DNA, 75 bp, synthetic construct
  source 1..75: mol_type = other DNA
cgagaccatcgccaacagcccgtttgtgcattatcccaacgaaaaatggtttcctctaaccgaaagtgacgacgt

SEQ ID NO: 691565 - DNA, 75 bp, synthetic construct
  source 1..75: mol_type = other DNA
aaattgccgacctgctgttttccctcaaccgtgagcatggcaccacgttgattatggtgacccacgacctgcaac

SEQ ID NO: 691566 - DNA, 75 bp, synthetic construct
  source 1..75: mol_type = other DNA
gagcctttaacggtcggcctgatgtgctgtttgccgacgaacccaccggcaaccttgaccgccagacgggcgata

SEQ ID NO: 691567 - DNA, 75 bp, synthetic construct
  source 1..75: mol_type = other DNA
gtacggtggcggaaaatatcgcctatggccaccctcaggcaacggcggacgacattcgccgtgcggcagctgctg

SEQ ID NO: 691568 - DNA, 75 bp, synthetic construct
  source 1..75: mol_type = other DNA
ccaaggcgtacatgatggaccttgagtgcgctacggacgttggtcgtcgcggtgtctcgtcagaacaagcatggg

SEQ ID NO: 691569 - DNA, 75 bp, synthetic construct
  source 1..75: mol_type = other DNA
gcagcggcgagaagaattctttcttcaggcttctgctcgatttggaaaaccgtggttattttatccgtggtgtat

SEQ ID NO: 691570 - DNA, 75 bp, synthetic construct
  source 1..75: mol_type = other DNA
tacgcagatcacatcaggttatgtttcgtttgtcatcaacctcaaattatcaatataattcattttatttcaata

SEQ ID NO: 691571 - DNA, 75 bp, synthetic construct
  source 1..75: mol_type = other DNA
gcgggaggcactgacagataaggtggacgttcagctctttggtgctgcagaaaactctgcggttgtgcttgcggg

SEQ ID NO: 691572 - DNA, 75 bp, synthetic construct
  source 1..75: mol_type = other DNA
acatcgaccggatgagaaagccagaggtctcaccgctggtcagtattcgcgacggtattcaggtggtggccgagg

SEQ ID NO: 691573 - DNA, 75 bp, synthetic construct
  source 1..75: mol_type = other DNA
aagaaaatactcgcatcgctggcgaaaaaataaaagtctacgactatccagatggcacgctggcattcaaatacg

SEQ ID NO: 691574 - DNA, 75 bp, synthetic construct
  source 1..75: mol_type = other DNA
tactggcatgcgcaaattcatcactgctcgtactccagggatgaccatgatggacctcatgcagattgcgccgct

SEQ ID NO: 691575 - DNA, 75 bp, synthetic construct
  source 1..75: mol_type = other DNA
atggtgagatgaaactcgcggttacccccattgtgctgcatgaaggatcgcttgctggcgtgtggaaagtagagc

SEQ ID NO: 691576 - DNA, 75 bp, synthetic construct
  source 1..75: mol_type = other DNA
gcctgctctcttccacaggaacatatccagcgcgtcgtggcatttatcaccggtaacgatcacttcttcctcaat

SEQ ID NO: 691577 - DNA, 75 bp, synthetic construct
  source 1..75: mol_type = other DNA
tcgcgctgggcgcagcgatccaggccgcctgccgcttacgcagcgaagacattgaagaagtgatcctcaccgata

SEQ ID NO: 691578 - DNA, 75 bp, synthetic construct
  source 1..75: mol_type = other DNA
attttctcaccgattattgaacgaaacacgactgtacctgtatcgcgtgtagaaacttactcgaccatgcacccg

SEQ ID NO: 691579 - DNA, 75 bp, synthetic construct
  source 1..75: mol_type = other DNA
tgctggtggatgaagtgttaaaacgcgccgcagtggctaaaaacacgctcaacgaaagtgaactggcggcgctgt

SEQ ID NO: 691580 - DNA, 75 bp, synthetic construct
  source 1..75: mol_type = other DNA
ttctttaacccagcatctgcatggtggttcgcgccagcaacgttattcggctaccaaatgggacgtggcgattgc

SEQ ID NO: 691581 - DNA, 75 bp, synthetic construct
  source 1..75: mol_type = other DNA
tcatcagcaccctgctgctgatgtccgccggcagcagccatgcggccctgaccgtcggtgacgtcgatgacctgc

SEQ ID NO: 691582 - DNA, 75 bp, synthetic construct
  source 1..75: mol_type = other DNA
aaatagcaataaatactaaaataaagttattttaccgtcctgaaaggataaatgacaaacaaagaatattaaaca

SEQ ID NO: 691583 - DNA, 75 bp, synthetic construct
  source 1..75: mol_type = other DNA
tgattatcgaaaacaaaccaagtgcacttgatattcacgaattaagtttgcgtgaatcttttgatagagcttggc

SEQ ID NO: 691584 - DNA, 75 bp, synthetic construct
  source 1..75: mol_type = other DNA
caatccatttaggaaacaacctatggattggtacacacgctgtcattatgaatgatattggcgatcacacggcta

SEQ ID NO: 691585 - DNA, 75 bp, synthetic construct
  source 1..75: mol_type = other DNA
gctgatgtccgccggcagcagccatgctgccctgaccgtcggcgacgtcgatgacctgcagcagcagaacgtcat

SEQ ID NO: 691586 - DNA, 75 bp, synthetic construct
  source 1..75: mol_type = other DNA
gcaggcccgcgccgctgaactgcgccagcgcattgcccaggcacagagtcagggggccgccaccgtccccgcgcc

SEQ ID NO: 691587 - DNA, 75 bp, synthetic construct
  source 1..75: mol_type = other DNA
gcgatgcagcaaaacaggcatatcaggacgttctcggtgagcagtatcagaccaatggcacctggcgtatgccta

SEQ ID NO: 691588 - DNA, 75 bp, synthetic construct
  source 1..75: mol_type = other DNA
tgcgcgagtcattccagcaatatcagcaggcgatgacgctgcaaccggtatatcaatccattgttcaggggtctg

SEQ ID NO: 691589 - DNA, 75 bp, synthetic construct
  source 1..75: mol_type = other DNA
ggggataatgagcaaaaaagttttaccggagtccatggtcaacgacgtactgcagcgtattgacaacacgcagga

SEQ ID NO: 691590 - DNA, 75 bp, synthetic construct
  source 1..75: mol_type = other DNA
agactggcgggtgcgccagcagctgcctgtcggagtcgggcctgacgaccggatgccgccaggcagccgggagcc

SEQ ID NO: 691591 - DNA, 75 bp, synthetic construct
  source 1..75: mol_type = other DNA
gggcagttgtccgggggcagacgcaaaagtttttgacgcctgcggcaaaaagttttgtggctggtacatctcccc

SEQ ID NO: 691592 - DNA, 75 bp, synthetic construct
  source 1..75: mol_type = other DNA
tgaccaaattagtgcagacgccggttaagtacactccgggccagtcgaagaattacacggtagaaagtcagcgtg

SEQ ID NO: 691593 - DNA, 75 bp, synthetic construct
  source 1..75: mol_type = other DNA
gcagagccacaaaaggtgagcaccagcacctgggtttatgatgtgaaatccaccagcggtggaaaagctatcggc

SEQ ID NO: 691594 - DNA, 75 bp, synthetic construct
  source 1..75: mol_type = other DNA
gtcgccagaaactgcgcgggaatggatgcggcaagacattggtggtaaagaagcctcagaaatcgctaccagtgg

SEQ ID NO: 691595 - DNA, 75 bp, synthetic construct
  source 1..75: mol_type = other DNA
gtcgccagaaactgcgcgggaatggatgcggcaagaggttggcggtaaagaagcctcagaaattgctaccagtgg

SEQ ID NO: 691596 - DNA, 75 bp, synthetic construct
  source 1..75: mol_type = other DNA
caaagttcttctgctcagtgtgatgaacaccctggatccggttttctggggatatgctcccggatggtgggataa

SEQ ID NO: 691597 - DNA, 75 bp, synthetic construct
  source 1..75: mol_type = other DNA
cattcgcttccatatcccgctgtgggtgcgtcgtacagtcaccatgttgccgtcatttattgtcattctgatggg

SEQ ID NO: 691598 - DNA, 75 bp, synthetic construct
  source 1..75: mol_type = other DNA
cagctactgtgggttgtcgtttgggccaacctgatggcgatgctgattcagatcctctctgccaaactagggatt

SEQ ID NO: 691599 - DNA, 75 bp, synthetic construct
  source 1..75: mol_type = other DNA
tgctggttaagctcgccgcagaccagcgcacactgaaagcgatttattcaaaagagctgaaggccgcgaaaaaac

SEQ ID NO: 691600 - DNA, 75 bp, synthetic construct
  source 1..75: mol_type = other DNA
tcatatcagggagaaataattaaggctaatgtccctaagatgcgagccatgactatttcaggattgtgtaccttc

SEQ ID NO: 691601 - DNA, 75 bp, synthetic construct
  source 1..75: mol_type = other DNA
gacggcaaggtatccattacccgctcgcaactggcaatgctcctcgataagctggactggctgaggctctgctga

SEQ ID NO: 691602 - DNA, 75 bp, synthetic construct
  source 1..75: mol_type = other DNA
gcaaggtatccattacccattcgcaactggtaatgctccttgaaccgccccgggaatcctggagactaaactccc

SEQ ID NO: 691603 - DNA, 75 bp, synthetic construct
  source 1..75: mol_type = other DNA
aagcctcagaaatcgcggccagtggctgtgttccagcaaaccagttctcctggcacccggtatcgcgcgcggtgg

SEQ ID NO: 691604 - DNA, 75 bp, synthetic construct
  source 1..75: mol_type = other DNA
gatggctggtttgagtggaaaaaagaaggcgacaaaaacagccttattttatctatcgcgctgatggacaacctg

SEQ ID NO: 691605 - DNA, 75 bp, synthetic construct
  source 1..75: mol_type = other DNA
cgctaacatcatcgcccgtgatttgggcctcaaagagcagtcgcaagttgaagacgtgacacctgataagggaga

SEQ ID NO: 691606 - DNA, 75 bp, synthetic construct
  source 1..75: mol_type = other DNA
cggcgcgtggctaaaaacctgttatgacgcgcaaaacgatgccatgctggatgacgattccacgttgcaaaaagc

SEQ ID NO: 691607 - DNA, 75 bp, synthetic construct
  source 1..75: mol_type = other DNA
gacgccgaaagtgatgtggtgttggatgacgactccacgttacaaaaagcccgttcaaaattccttcaggtttat

SEQ ID NO: 691608 - DNA, 75 bp, synthetic construct
  source 1..75: mol_type = other DNA
cgccgctggaagcagaacaggccttacattacctctcgcaactggttgagggatatcgtgaaggaatgtctgcgc

SEQ ID NO: 691609 - DNA, 75 bp, synthetic construct
  source 1..75: mol_type = other DNA
cagttttgaagatcgcgaattaccgctatttcgcgacagcgaaaatgccggacagctctttaacagcgatggtga

SEQ ID NO: 691610 - DNA, 75 bp, synthetic construct
  source 1..75: mol_type = other DNA
cagcttgccgacagagtcattgcctgtcgccagccggggcagagtatggagattgatctcgcctgcaacggtgtg

SEQ ID NO: 691611 - DNA, 75 bp, synthetic construct
  source 1..75: mol_type = other DNA
ctttatctgggatatgttcgtccgggtgttaccggagatccccaaagagagcgcctttaacaaacagagcatgag

SEQ ID NO: 691612 - DNA, 75 bp, synthetic construct
  source 1..75: mol_type = other DNA
cactgcctgacagccgctttgtgtcggaggatgtgctggcgctgctggacgtgccggtactggcggcgcggtttg

SEQ ID NO: 691613 - DNA, 75 bp, synthetic construct
  source 1..75: mol_type = other DNA
gcatccggtgcgagcgtttttccagatgcgtttacaggtgcattttcgtaccgaagacagcgaaattcccgatac

SEQ ID NO: 691614 - DNA, 75 bp, synthetic construct
  source 1..75: mol_type = other DNA
ttcgttgatgtcacgccagacagcctgttgcataacatccagtccgacattctcgaactggaaaatcgtgccgtt

SEQ ID NO: 691615 - DNA, 75 bp, synthetic construct
  source 1..75: mol_type = other DNA
atgcgtttgcaggtgaacttccgcactgaagagagcgaaatccctgacaccgagccatttattctggaagggctt

SEQ ID NO: 691616 - DNA, 75 bp, synthetic construct
  source 1..75: mol_type = other DNA
tttatcctcgtcaactggcgccgctgggctttgatctcatgagtcagaagccgaagcgtggcgatcgtagtcgtc

SEQ ID NO: 691617 - DNA, 75 bp, synthetic construct
  source 1..75: mol_type = other DNA
gcgctcaattccgttcaaagtggtctgtctgctgggaatgaacgacggcgtttatcctcgtcaactggcgccgct

SEQ ID NO: 691618 - DNA, 75 bp, synthetic construct
  source 1..75: mol_type = other DNA
ttttatctgggatatgttcgtccgcgtattgccggagatccccaaagagagtgcctttaacaagcagagcatgag

SEQ ID NO: 691619 - DNA, 75 bp, synthetic construct
  source 1..75: mol_type = other DNA
gcgcggtcacgctttccgctaacgaccagatgcaatccgccgaagagtatcgccagctaatcattgcctaccaga

SEQ ID NO: 691620 - DNA, 75 bp, synthetic construct
  source 1..75: mol_type = other DNA
cccaaaagctatcaacggtacgccgaatttaagagaagctttctggcaaaagctgtagctgaaatcgaaaaaaac

SEQ ID NO: 691621 - DNA, 75 bp, synthetic construct
  source 1..75: mol_type = other DNA
agtcgcggtcagtctctgccaaaagaaaaacaggctaaggcgatgatcaccatgtggtcgtcactgaaatctcat

SEQ ID NO: 691622 - DNA, 75 bp, synthetic construct
  source 1..75: mol_type = other DNA
atggattaccggattggaatcactggcgcacagggcagtgggaaaacaaccctggcaaggtacatcgatgcgcac

SEQ ID NO: 691623 - DNA, 75 bp, synthetic construct
  source 1..75: mol_type = other DNA
tgtcgctactgtagagcaaggagcagaaaacagctggctcggcgcgtgggcgaacaaagaacaggccattgtgat

SEQ ID NO: 691624 - DNA, 75 bp, synthetic construct
  source 1..75: mol_type = other DNA
gtgcggtcacgctgtcagcgaatgaccagatgcaatcggcagaagagtatcgtcagttgattatcgcttatcaga

SEQ ID NO: 691625 - DNA, 75 bp, synthetic construct
  source 1..75: mol_type = other DNA
gacgaatcgagcggcttaattgcagaactggtagggcatctggcgtcactgctaatgcaactgaatatctggcgt

SEQ ID NO: 691626 - DNA, 75 bp, synthetic construct
  source 1..75: mol_type = other DNA
ctacagtccgtttattcaggctgtatttggtagcgcgcctgcggatcgttacctgccttatgccatttccgaccg

SEQ ID NO: 691627 - DNA, 75 bp, synthetic construct
  source 1..75: mol_type = other DNA
agaatggcaatctgttcttccttatgatgagtcgagcggcttaattgcagagctggtggggcatctggcgtcact

SEQ ID NO: 691628 - DNA, 75 bp, synthetic construct
  source 1..75: mol_type = other DNA
tcatcgaaatgatgattcagctccccggcgatactcagcgtcgtctggttatctgtcttgctttacgcaaacttg

SEQ ID NO: 691629 - DNA, 75 bp, synthetic construct
  source 1..75: mol_type = other DNA
atgaaaagtatagcaacagcagtatctactatcaatgtgccattccacggcgcagagctttatgttgtcaatcac

SEQ ID NO: 691630 - DNA, 75 bp, synthetic construct
  source 1..75: mol_type = other DNA
tggcacagaaacttgaggaacgcggtttatggcgtcgtgcggcgacccgatggggtgaagtgctgtgtaacgctg

SEQ ID NO: 691631 - DNA, 75 bp, synthetic construct
  source 1..75: mol_type = other DNA
tcaagattggcatgggatttcaagggaatgggctagcgaacgattccttaaagaagacccacgtcttcgttttcg

SEQ ID NO: 691632 - DNA, 75 bp, synthetic construct
  source 1..75: mol_type = other DNA
taaggatggtttccgcttctggggtaaccgcacctgctctgatgacccgcttttcctgtttgagaactacacccg

SEQ ID NO: 691633 - DNA, 75 bp, synthetic construct
  source 1..75: mol_type = other DNA
accgtttccaatatcatcggcaccaccgacgaaaacggtcagtacaccggactgaaagccttgctggcggcggag

SEQ ID NO: 691634 - DNA, 75 bp, synthetic construct
  source 1..75: mol_type = other DNA
aatcgaccaggagcagggctggcataaaacgctgtccaatgtcggggtaaacggtgttaccggcatcagtgcctc

SEQ ID NO: 691635 - DNA, 75 bp, synthetic construct
  source 1..75: mol_type = other DNA
ggcgtcaagccgcgcattctcggcgtgccggggctggacaccaaagaagtggcggttgcactggcgtcggtctgt

SEQ ID NO: 691636 - DNA, 75 bp, synthetic construct
  source 1..75: mol_type = other DNA
agtcaggcgtcactacgctgattcgccgcgacggtttccgattctggggtaaccgtacctgctctgatgacccgc

SEQ ID NO: 691637 - DNA, 75 bp, synthetic construct
  source 1..75: mol_type = other DNA
gtgcctcctcttgaaaatctgaccctgcgccagcgtattacttccagatacctggcaagtctggtcacttcggtt

SEQ ID NO: 691638 - DNA, 75 bp, synthetic construct
  source 1..75: mol_type = other DNA
cgacgaagaaacgaaacttgcgcagaccgtttccaatatcatcggcaccaccgacgaaaacggtcagtacaccgg

SEQ ID NO: 691639 - DNA, 75 bp, synthetic construct
  source 1..75: mol_type = other DNA
ggcatcgttgcaggccatcgccgaccagtcaaaaccggtcaccgttgtcgtgcgtgtggaagacggcaccggcga

SEQ ID NO: 691640 - DNA, 75 bp, synthetic construct
  source 1..75: mol_type = other DNA
agtgttttgggatttgcaggcatccggcactgacgctgacctgctcaacgaggccggggtcacgacgctggtgcg

SEQ ID NO: 691641 - DNA, 75 bp, synthetic construct
  source 1..75: mol_type = other DNA
actacacccgaaccgcgcaggtactgacggacacgatggcagaagcgcacatgtgggcggtggacaaaccgctga

SEQ ID NO: 691642 - DNA, 75 bp, synthetic construct
  source 1..75: mol_type = other DNA
acgtcggggtaaacggtgttaccggcatcagcgcgtccgtattctgggatttgcaggagtccggtaccgatgctg

SEQ ID NO: 691643 - DNA, 75 bp, synthetic construct
  source 1..75: mol_type = other DNA
aggttgtcgagattaacgacggcacccgcgtcatttccaccgtatcaacggctattatcggcatggtctgcacgg

SEQ ID NO: 691644 - DNA, 75 bp, synthetic construct
  source 1..75: mol_type = other DNA
cagtcaaaacctgtcacagttgtcgtgcgcgtggacgaaggtaccggcgacgacgccgaagcgcagacaatttcc

SEQ ID NO: 691645 - DNA, 75 bp, synthetic construct
  source 1..75: mol_type = other DNA
atggtggataagggaaaagagattattgcagtacgaaatgcagcctgcaacgaatacggcgggataaactgtgag

SEQ ID NO: 691646 - DNA, 75 bp, synthetic construct
  source 1..75: mol_type = other DNA
taccgtgcactgggtgaactggctcgcttaacgctggcgcaatggcaatcacaactgttgattcctgtcgcggtt

SEQ ID NO: 691647 - DNA, 75 bp, synthetic construct
  source 1..75: mol_type = other DNA
cgacgaggaatcgaacgataaggaaaccctcaaggccgggaaactgtatatcgactacgactatacgccggttcc

SEQ ID NO: 691648 - DNA, 75 bp, synthetic construct
  source 1..75: mol_type = other DNA
accagcgtgcaaagcgccatcgccaaagcgggtacaaaaggcaccctggccgcatccctccaggcgattgccgac

SEQ ID NO: 691649 - DNA, 75 bp, synthetic construct
  source 1..75: mol_type = other DNA
tcgtctggtggtaatgcgtaataaaacgattgccgatatttattcatgtgaaaatttaacgcagacacaggtaat

SEQ ID NO: 691650 - DNA, 75 bp, synthetic construct
  source 1..75: mol_type = other DNA
aggtcatcgagattaacgatggcgtccgcaccatttccaccgtttcaaccgccatcatcggcatggtctgtacgg

SEQ ID NO: 691651 - DNA, 75 bp, synthetic construct
  source 1..75: mol_type = other DNA
ccggtgttacgccgctgattcgtgccgatggtttccgcttctggggtaaccgtaattgctccgatgacccgctgt

SEQ ID NO: 691652 - DNA, 75 bp, synthetic construct
  source 1..75: mol_type = other DNA
gatggaagcggcgaactacacgtttgagcacaatgggcgtaaatgggactacgggaagtcaacgcagacgcgtct

SEQ ID NO: 691653 - DNA, 75 bp, synthetic construct
  source 1..75: mol_type = other DNA
gaagggggtggagattaatacacggcagttgcagatgaaagcagaggttgaggcgctgacagagctgaaggcgat

SEQ ID NO: 691654 - DNA, 75 bp, synthetic construct
  source 1..75: mol_type = other DNA
tttctgcagatgtgttctgggatctgcagggcccggcaacagatgcaggtctgctgaaccagaacgacgtcacca

SEQ ID NO: 691655 - DNA, 75 bp, synthetic construct
  source 1..75: mol_type = other DNA
gatggatggtatgagtggaaaaaggaaggcgaccaaaaacaaccctactttattcaccgggcagacggtcagccg

SEQ ID NO: 691656 - DNA, 75 bp, synthetic construct
  source 1..75: mol_type = other DNA
ggcggtgccggcagataaatttatctggcacgccgtgacacgcgccgttggcaatgtgaaaaatcagggacctga

SEQ ID NO: 691657 - DNA, 75 bp, synthetic construct
  source 1..75: mol_type = other DNA
gggccgcattatcccccctcgcggcgttactccatcgcgaattgataagccgtccggtggtgcatgcagatgaga

SEQ ID NO: 691658 - DNA, 75 bp, synthetic construct
  source 1..75: mol_type = other DNA
acttcatctcaaacagctatgggggcattgccatatatggccccggaaattatacaaagtcaggggcaagtttca

SEQ ID NO: 691659 - DNA, 75 bp, synthetic construct
  source 1..75: mol_type = other DNA
aatcatacagagtcaaggtaaggtttcgaaacctacagatatttgggcattgggtgcgatgatgttcaggattct

SEQ ID NO: 691660 - DNA, 75 bp, synthetic construct
  source 1..75: mol_type = other DNA
caaaaaccttttactaatgaaaaggttatattttctaagcatcgtggcggtggacatgatcgcgcgcatccggtt

SEQ ID NO: 691661 - DNA, 75 bp, synthetic construct
  source 1..75: mol_type = other DNA
atgacggtctcaaccgaagttgaccacaacgaatacacaggcaatggcgttacgacttcatttccttataccttt

SEQ ID NO: 691662 - DNA, 75 bp, synthetic construct
  source 1..75: mol_type = other DNA
cactgaaaaaaacacagtttttgttttctatgtgcttgattatgtttaaagtaatagattacgtatcgaaacttt

SEQ ID NO: 691663 - DNA, 75 bp, synthetic construct
  source 1..75: mol_type = other DNA
tttgttgattggccagcagtagagggtggcgatgaggacgacgatgatgacgatgattttggggatcatgtagac

SEQ ID NO: 691664 - DNA, 75 bp, synthetic construct
  source 1..75: mol_type = other DNA
tgcggttatttacatctctcaccgcatggatgaaattatgcggatttcggatgatatttcagtgatccgcgatgg

SEQ ID NO: 691665 - DNA, 75 bp, synthetic construct
  source 1..75: mol_type = other DNA
gagctgcaccgcaccgacgccaacggtaatcgtattaaactgcgtttcgccacgatgctggcacgtaaaaaatga

SEQ ID NO: 691666 - DNA, 75 bp, synthetic construct
  source 1..75: mol_type = other DNA
gatgcatttatagaccataaatctcttcctgagcagtcaggaggtgagtcaagactcgtatcacaaaaaggaaat

SEQ ID NO: 691667 - DNA, 75 bp, synthetic construct
  source 1..75: mol_type = other DNA
gggagagtatccttttggattagggtatatggctattccgaacatcttatctggaaagcatactcaatatcctga

SEQ ID NO: 691668 - DNA, 75 bp, synthetic construct
  source 1..75: mol_type = other DNA
tattgtccaccagcttggcacgactgatctcacctccgctgcgggtaagcttctgctgtcaatgctggcagcggt

SEQ ID NO: 691669 - DNA, 75 bp, synthetic construct
  source 1..75: mol_type = other DNA
gtgccgcagcggcacagcgtatcggcgagctggtatccgtacacgttatcccgcgtccgcacggcgacctggaag

SEQ ID NO: 691670 - DNA, 75 bp, synthetic construct
  source 1..75: mol_type = other DNA
cgtgaggtctcgcaggagtgtgaaattatcatcaccatgctccctgatacaccgcatgttgaagatgttcttttt

SEQ ID NO: 691671 - DNA, 75 bp, synthetic construct
  source 1..75: mol_type = other DNA
aagaagctggttgaagtacttgagtcaccccggattgaagcaaacaagctccgtggtatgcctgattgttacaag

SEQ ID NO: 691672 - DNA, 75 bp, synthetic construct
  source 1..75: mol_type = other DNA
atggtgaaacgttggtagttgcaaaactagaccgtctgggacgtgatgcgattgacgttctccagacggtcaggg

SEQ ID NO: 691673 - DNA, 75 bp, synthetic construct
  source 1..75: mol_type = other DNA
cattgtccaccagcttggcacaacggatctctcctctgctgccggtaaacttctgttgtcgatgctgtcagcagt

SEQ ID NO: 691674 - DNA, 75 bp, synthetic construct
  source 1..75: mol_type = other DNA
ttactggtaaggtgcgcaaccataacctgggcgacagcgtcaaagcattaaccctcgaacactatccgggaatga

SEQ ID NO: 691675 - DNA, 75 bp, synthetic construct
  source 1..75: mol_type = other DNA
atggcagaaaccaaaattgttgtcggaccgcagccgttcagcgtaggagaagagtatccgtggctggcggagcgt

SEQ ID NO: 691676 - DNA, 75 bp, synthetic construct
  source 1..75: mol_type = other DNA
aagcgcgaagctacgccggaaggtgaccgctgggtcgaagcgcgggagagcgatcagcaggcagcaaaacgctgg

SEQ ID NO: 691677 - DNA, 75 bp, synthetic construct
  source 1..75: mol_type = other DNA
tcaggaaacaacttaaaattagctggaatgccgttgacggcattatgactcgtgtggttaagcgcggtctgtccc

SEQ ID NO: 691678 - DNA, 75 bp, synthetic construct
  source 1..75: mol_type = other DNA
gaggcgaaaaagcaggcgaagcagtttttcatggatgttgctgccgggttatgtgaagggaacgaaccgttgccg

SEQ ID NO: 691679 - DNA, 75 bp, synthetic construct
  source 1..75: mol_type = other DNA
aggtgatcgacgaaatctgttattacatcacctgccagagcgcggtttacctttgcggccagtatattcgacagg

SEQ ID NO: 691680 - DNA, 75 bp, synthetic construct
  source 1..75: mol_type = other DNA
taggcggagatgccattatcgaatttgatgataatgaagaagtttccgggcgtttaagcattatctccggtgaca

SEQ ID NO: 691681 - DNA, 75 bp, synthetic construct
  source 1..75: mol_type = other DNA
cggagccacagcgatacaccattatcgccggattacaggacaaatacctgatcactccttaccccataagggaat

SEQ ID NO: 691682 - DNA, 75 bp, synthetic construct
  source 1..75: mol_type = other DNA
ccacacctggctttgaaatacaaaacgcccgatgatgttcatcgggcgtttcacagacagaaaagcgtcaactta

SEQ ID NO: 691683 - DNA, 75 bp, synthetic construct
  source 1..75: mol_type = other DNA
aattacgtcgatattacgaaggctgggagagggtgaaatacaatgaagacgtcggcgagctgcaccgcaccgacg

SEQ ID NO: 691684 - DNA, 75 bp, synthetic construct
  source 1..75: mol_type = other DNA
tatcggcacgatgccagttccctgaacttcctttgctttgctttttctgcgatgctgttgagttacgcacagtat

SEQ ID NO: 691685 - DNA, 75 bp, synthetic construct
  source 1..75: mol_type = other DNA
gcgtgacagtgacgccagcgttaaccctcgcttgtgaagtgctgccacaatatcggcacgatgccagttccctga

SEQ ID NO: 691686 - DNA, 75 bp, synthetic construct
  source 1..75: mol_type = other DNA
atgtttatatgtagcggtgtccatgcctgcttttccgcagatgatggcattgctgttgtcacggatggtgacggt

SEQ ID NO: 691687 - DNA, 75 bp, synthetic construct
  source 1..75: mol_type = other DNA
aattgcctcgcggcgtcagcattgctgatgagtttgacgagcgcgtcgaggctgcacgcgccgccgcagacagtg

SEQ ID NO: 691688 - DNA, 75 bp, synthetic construct
  source 1..75: mol_type = other DNA
cttcgcccgggcgttgatctttccggcaaagatctcgcgcgtccccagcgaggatcgcttgaccgtctctatgtt

SEQ ID NO: 691689 - DNA, 75 bp, synthetic construct
  source 1..75: mol_type = other DNA
ttccaactttaatgctatagcgggtcttcgcccgggcgttgatctttccggcaaagatctcgcgcgtccccagcg

SEQ ID NO: 691690 - DNA, 75 bp, synthetic construct
  source 1..75: mol_type = other DNA
ggcattctgcgatgttgttggcgacaacaccgaggttatcgctgaggtggttgggcgagatagcgttctggttat

SEQ ID NO: 691691 - DNA, 75 bp, synthetic construct
  source 1..75: mol_type = other DNA
gtgctcagggcagtgggaaaacaaccctggctaaatatatcgacaaacattacggaatcccttacgtggatgctg

SEQ ID NO: 691692 - DNA, 75 bp, synthetic construct
  source 1..75: mol_type = other DNA
aacgacggactggcgcattgtgccgaaagttccggtcgttgagcctttgactttaaaaagcggcatcgccgcgcc

SEQ ID NO: 691693 - DNA, 75 bp, synthetic construct
  source 1..75: mol_type = other DNA
tgctgcaccaacagaagatcaatcaaccactgagagacgacgcgcgcgcttactggctggcgaaagcatcgacgc

SEQ ID NO: 691694 - DNA, 75 bp, synthetic construct
  source 1..75: mol_type = other DNA
tctggattcagggaaaactacgtatgtgggggcgctggtcgtatattggcggtggcaggtcagggaatatgttca

SEQ ID NO: 691695 - DNA, 75 bp, synthetic construct
  source 1..75: mol_type = other DNA
tcgtctggtggtgatgcgtaataaaacaattgccgatatttattcatgtgaaaatttaacgcagacgcaagtaat

SEQ ID NO: 691696 - DNA, 75 bp, synthetic construct
  source 1..75: mol_type = other DNA
gtggtcgggaatgccaggtaagaatccctggcgtatgtaatggcaatcctgaaacgtctgtactggcacatatcc

SEQ ID NO: 691697 - DNA, 75 bp, synthetic construct
  source 1..75: mol_type = other DNA
atggcattcagtaatcccttcgatgatccgcagggcgtgttttacattttgcgcaatgcgcaggggcaattcagt

SEQ ID NO: 691698 - DNA, 75 bp, synthetic construct
  source 1..75: mol_type = other DNA
attaccgaggacatgatcgctgaagccatagctggggcaaatcccaatagctatatgggattcgttaacaccctt

SEQ ID NO: 691699 - DNA, 75 bp, synthetic construct
  source 1..75: mol_type = other DNA
gactggcgggagcgtgcggaacagcgataaagccacacgatatgcaggcggctattgcctgtagctcgtgccacg

SEQ ID NO: 691700 - DNA, 75 bp, synthetic construct
  source 1..75: mol_type = other DNA
atgtggcttgaatccgcaggaattgagatgtttcagggggatctgtttgctaaagctaaattgaatggtatccct

SEQ ID NO: 691701 - DNA, 75 bp, synthetic construct
  source 1..75: mol_type = other DNA
atgatcgtagatgttgaagagaaaacagttaatgatttctttaaaagcaacacactctcacctttttctgtaaga

SEQ ID NO: 691702 - DNA, 75 bp, synthetic construct
  source 1..75: mol_type = other DNA
agcggcggtaatcaacagaaaatcgtgttatcgaagtggctggagaaaactccgcgtattttattgctcgatgag

SEQ ID NO: 691703 - DNA, 75 bp, synthetic construct
  source 1..75: mol_type = other DNA
aaaaacggattacgagtacgactcattgttgttgatgcacgctgagggtgttttcaggacgctggccatctggcg

SEQ ID NO: 691704 - DNA, 75 bp, synthetic construct
  source 1..75: mol_type = other DNA
tattcaggcgatcataaaatgctgtacatcacttgaaattcaagtcagtgctatgggcgtggcaacaccagaaga

SEQ ID NO: 691705 - DNA, 75 bp, synthetic construct
  source 1..75: mol_type = other DNA
gcaattgatcattttggcgcaggttttgctggtttgttactcctgtcacgcttccagcctgacagaattaaaatc

SEQ ID NO: 691706 - DNA, 75 bp, synthetic construct
  source 1..75: mol_type = other DNA
gaccggtcaaggaatccatatacctcggacttcagactctcgggactttatctgatgatctcgctgcgtcccgtc

SEQ ID NO: 691707 - DNA, 75 bp, synthetic construct
  source 1..75: mol_type = other DNA
cttcagccattttcaccccggcaaaacataaagtttttctggcccgcctcaacaggcttaatgaaaaaggagggt

SEQ ID NO: 691708 - DNA, 75 bp, synthetic construct
  source 1..75: mol_type = other DNA
cattatcgacgagaccggattaacggtggatgcgtcaatgcgagttgatgcttcagccactttcactccggcaaa

SEQ ID NO: 691709 - DNA, 75 bp, synthetic construct
  source 1..75: mol_type = other DNA
ggctgcacagcgtttcggtggcaacgaaaaacaagctctggaactgccgcgtgaactgtttgaagaacaggctaa

SEQ ID NO: 691710 - DNA, 75 bp, synthetic construct
  source 1..75: mol_type = other DNA
tatgtgggggtcgcctcagaaaacggaatctatggtcactcccgtttttgcaacaccgattttgacgaaaagttg

SEQ ID NO: 691711 - DNA, 75 bp, synthetic construct
  source 1..75: mol_type = other DNA
tatgtgggggtcgcctcagaaaacggaatctatggtcactcccgtttttgcaacaccgattttgacgataagtgg

SEQ ID NO: 691712 - DNA, 75 bp, synthetic construct
  source 1..75: mol_type = other DNA
cttcagccagtttccccccggcacaacataaagttttcctgacccgccttaaccgacttaatgaaaaaggatggt

SEQ ID NO: 691713 - DNA, 75 bp, synthetic construct
  source 1..75: mol_type = other DNA
ctgaccagattaaagaagcatttagtgattttactgcgtttatcatctggtacttccgcttaagctatacggcta

SEQ ID NO: 691714 - DNA, 75 bp, synthetic construct
  source 1..75: mol_type = other DNA
ctgcattatacagctgttgtgaaaaaagcgaatggcggtactgtttctgaaggtgctttttctgcagttgcaacc

SEQ ID NO: 691715 - DNA, 75 bp, synthetic construct
  source 1..75: mol_type = other DNA
caggagatggtcaacttcctgttcgagggtaaagaggtgcatatcgagggctatacgccggaagataaaaaataa

SEQ ID NO: 691716 - DNA, 75 bp, synthetic construct
  source 1..75: mol_type = other DNA
ctgcctggcggcatccggtcgtcaggcccgactccgacaggcagctgctggcgcacccgccagtctccgccgaac

SEQ ID NO: 691717 - DNA, 75 bp, synthetic construct
  source 1..75: mol_type = other DNA
ctgcggggagaaaccccgaagaagtggacggcagaaggggctttcgcccctccggggagtaaccggtcggcccgg

SEQ ID NO: 691718 - DNA, 75 bp, synthetic construct
  source 1..75: mol_type = other DNA
aacagatctgacagaagagcttcagcagctcaggaatcagatgatgtccatggaagcgacactcaatgcggaaaa

SEQ ID NO: 691719 - DNA, 75 bp, synthetic construct
  source 1..75: mol_type = other DNA
tgttgaaactccattaaatgatgagttaaacgaaaaattattcattttatctaaaggcaatattggattggctca

SEQ ID NO: 691720 - DNA, 75 bp, synthetic construct
  source 1..75: mol_type = other DNA
tgaggatgctccagcagttaaacctggagatgtaatcgttaaggttgacccgcgttacttccgtccggctgaagt

SEQ ID NO: 691721 - DNA, 75 bp, synthetic construct
  source 1..75: mol_type = other DNA
tacctccaacctgacgcgcattttgcgtgaagtgcagccggacgaagtgtacaacctgggcgcaatgagccacgt

SEQ ID NO: 691722 - DNA, 75 bp, synthetic construct
  source 1..75: mol_type = other DNA
tcgccaaactgtacgcctactggataaccgtcaactaccgcgaatcctatggcatgtacgcctgcaacggcattc

SEQ ID NO: 691723 - DNA, 75 bp, synthetic construct
  source 1..75: mol_type = other DNA
gaactttatcaggacagaggcttcagagtggaacctctctttgccagacgttctgtgtcttgtaagggagacact

SEQ ID NO: 691724 - DNA, 75 bp, synthetic construct
  source 1..75: mol_type = other DNA
attgcaaccggcgatggggttaccaagcggatattcagcgggctacagctacgaatattttggcggtaacgccac

SEQ ID NO: 691725 - DNA, 75 bp, synthetic construct
  source 1..75: mol_type = other DNA
ggcaatattgccctgctggcgtgtgctggcccgatgggcattggcgctatcgattacgccattaacggcggcata

SEQ ID NO: 691726 - DNA, 75 bp, synthetic construct
  source 1..75: mol_type = other DNA
atgtcaaaagtcgctctcatcaccggtgtaaccggacaggatggttcttacctggcagaattgctgctggagaaa

SEQ ID NO: 691727 - DNA, 75 bp, synthetic construct
  source 1..75: mol_type = other DNA
gactggggccacgccaaagactacgtgaaaatgcagtggatgatgctgcaacaggaccatccggaagatttcgtt

SEQ ID NO: 691728 - DNA, 75 bp, synthetic construct
  source 1..75: mol_type = other DNA
ccgcacagcagcaacccgaaatttcacctgcactacggtgatttgaccgacagctccaacctgacgcgcattctg

SEQ ID NO: 691729 - DNA, 75 bp, synthetic construct
  source 1..75: mol_type = other DNA
ggtgtctgaaatggtggctaatgacctcgaagcggcgaaaaaacactctcttcttaaatctcatggatttaatgt

SEQ ID NO: 691730 - DNA, 75 bp, synthetic construct
  source 1..75: mol_type = other DNA
ctaatgacctcgaagcggcgaaaaaacactctctgctgaaatctcacggctacgacgtggcgatcgcgctggagt

SEQ ID NO: 691731 - DNA, 75 bp, synthetic construct
  source 1..75: mol_type = other DNA
aactgcgctttgaaggcacgggcgttgaagagaagggcattgtggtttccgtcaccgggcatgacgcgccgggcg

SEQ ID NO: 691732 - DNA, 75 bp, synthetic construct
  source 1..75: mol_type = other DNA
tcctgcagcgtgaagcagaaggtcaggattttcagctataccccggcgaactgggaaaacgcatctacaacgaga

SEQ ID NO: 691733 - DNA, 75 bp, synthetic construct
  source 1..75: mol_type = other DNA
ggcgcggtagataaagcgaaaaacgcaggtaaagcagtacacattatgggtctgctctccgcaggcggcgtacac

SEQ ID NO: 691734 - DNA, 75 bp, synthetic construct
  source 1..75: mol_type = other DNA
tctgctctccgctggcggcgtacacagccacgaagatcacatcatggcaatggtagaactggccgctgaacgtgg

SEQ ID NO: 691735 - DNA, 75 bp, synthetic construct
  source 1..75: mol_type = other DNA
ccgcgataaccgttgggatcgcgttgaaaaagcttatgacctgctgactctggcgcagggtgagttccaggccga

SEQ ID NO: 691736 - DNA, 75 bp, synthetic construct
  source 1..75: mol_type = other DNA
ctgccggtgatgccagcaatcttaagaacggtgatactaccctgcgctatagcgcttgggtcaaaaaagctacca

SEQ ID NO: 691737 - DNA, 75 bp, synthetic construct
  source 1..75: mol_type = other DNA
ttcgttttattgatgcctgtcaccatcaacaaacgaaaaacctgtggtccttagcagtatacacaggcattcgtc

SEQ ID NO: 691738 - DNA, 75 bp, synthetic construct
  source 1..75: mol_type = other DNA
ccgatcataacgaactaatttgctcgaccagtatcgagcgtatcgtcacaggacgtgatagtgcactgaaccaga

SEQ ID NO: 691739 - DNA, 75 bp, synthetic construct
  source 1..75: mol_type = other DNA
gtcagatgggtaactccgaggtaggtcacgttaacctgggcgcgggtcgcatcgtctatcaggatctgactcgtc

SEQ ID NO: 691740 - DNA, 75 bp, synthetic construct
  source 1..75: mol_type = other DNA
atcgtgtatcaggacctgactcgtctggacgttgaaatcaaagatcgcgctttcttcgctaatccggtgctgact

SEQ ID NO: 691741 - DNA, 75 bp, synthetic construct
  source 1..75: mol_type = other DNA
cgcgcgggcaatcctcgacggtcacattgtgctgtctcgccgactggcggaagccgggcactatccggctatcga

SEQ ID NO: 691742 - DNA, 75 bp, synthetic construct
  source 1..75: mol_type = other DNA
aagaacgtgaaagcggttgaaggcggcaaactttctgacatcgcgccgaccatgttgtcgctgatgggtatggaa

SEQ ID NO: 691743 - DNA, 75 bp, synthetic construct
  source 1..75: mol_type = other DNA
cgcgcagtgctgaatcctcgctgaaaaaattcgaagagaaatttgccgcgctgggtaaaggccgcgtagcgtcca

SEQ ID NO: 691744 - DNA, 75 bp, synthetic construct
  source 1..75: mol_type = other DNA
cacccgcttccctggttaacaccttcggcgagtggatggcgaaaaacgacaaaactcagttgcgtatttccgaaa

SEQ ID NO: 691745 - DNA, 75 bp, synthetic construct
  source 1..75: mol_type = other DNA
agatcgggtattgggctgagaacaaaaactcgtgtcactacgtctttgtcgatactcaataccttgcgcaaagta

SEQ ID NO: 691746 - DNA, 75 bp, synthetic construct
  source 1..75: mol_type = other DNA
acgcaaaattccgttggttatcgccaacgcgcgactctctgcgcgctctgccgcaggttacgccagactgggtaa

SEQ ID NO: 691747 - DNA, 75 bp, synthetic construct
  source 1..75: mol_type = other DNA
gtgttgattatggaaaccgaactatggcctaacctgattgcggcgctacataaacgtaaaattccgctggtgatc

SEQ ID NO: 691748 - DNA, 75 bp, synthetic construct
  source 1..75: mol_type = other DNA
tactcaccgacgccgattaccgtagtttctatggccgtcatgccgttgaagtactgtatcaaaaccagggcgcgc

SEQ ID NO: 691749 - DNA, 75 bp, synthetic construct
  source 1..75: mol_type = other DNA
cggtacgggcacagctattatgattcaggctgcgggtaaaaacgttcccttcgatggtacggagggggacgctaa

SEQ ID NO: 691750 - DNA, 75 bp, synthetic construct
  source 1..75: mol_type = other DNA
caactgaaaatagccgacgcatgcagtttattaccgtgggctcaaaccctgcgtttactctacctgccctgaact

SEQ ID NO: 691751 - DNA, 75 bp, synthetic construct
  source 1..75: mol_type = other DNA
caatgggcgccgcatcgtccagtctggattgccaccagcactcacgatggcgaagagagtgtagtaattgccgcg

SEQ ID NO: 691752 - DNA, 75 bp, synthetic construct
  source 1..75: mol_type = other DNA
gtgctgcattatactgctgttgttaagaagtcgtcagccgttggtgccgctgttactgaaggtgccttctcagca

SEQ ID NO: 691753 - DNA, 75 bp, synthetic construct
  source 1..75: mol_type = other DNA
caggagcagggctacgaaccgggcgtgattatctcgtttcgctacatcctctgcacgtttattgatgaagcggcg

SEQ ID NO: 691754 - DNA, 75 bp, synthetic construct
  source 1..75: mol_type = other DNA
gattttgggcagatttccaaagctcatctggcggctgatggtatttcagtgaaaaaagacctggatattaagctg

SEQ ID NO: 691755 - DNA, 75 bp, synthetic construct
  source 1..75: mol_type = other DNA
ctggactaagctatatcacacgctcttcaggggaagtcccctccaccagcacgcaggttgtggttggcgatacga

SEQ ID NO: 691756 - DNA, 75 bp, synthetic construct
  source 1..75: mol_type = other DNA
catacctttaactttaaagatatttgcgcacggctggagcaggcaagcgggctgattaccgtcaccgatgccact

SEQ ID NO: 691757 - DNA, 75 bp, synthetic construct
  source 1..75: mol_type = other DNA
ccatgacgccaaccggttcggagcgcgtacaatcggctttcgggaaggatgttcagcacgtttatctgccgtatg

SEQ ID NO: 691758 - DNA, 75 bp, synthetic construct
  source 1..75: mol_type = other DNA
atcttggagaacgtctgccggaaatggcacgggaaggacggctggaaaactgccaggctattcaccgcacactgg

SEQ ID NO: 691759 - DNA, 75 bp, synthetic construct
  source 1..75: mol_type = other DNA
cgtgatatggcggaatttctggagatttacggccttccggcgcgcattgcgtactatgcacagggcaccagtgac

SEQ ID NO: 691760 - DNA, 75 bp, synthetic construct
  source 1..75: mol_type = other DNA
tcagctgtcaggaaatcagctgggcgttcgtggataaaacgtggttaccggatgcggtgacgctgcgcccgcata

SEQ ID NO: 691761 - DNA, 75 bp, synthetic construct
  source 1..75: mol_type = other DNA
agtcgtcttgttgattatgcaacacgccttcgaaatgaatcattcgtggcactggttgatgtcatgaaggacggc

SEQ ID NO: 691762 - DNA, 75 bp, synthetic construct
  source 1..75: mol_type = other DNA
tacaggcacggggccgcagggggctatcaaacgcgaactgttttctgacaaagaaagtctgtggggatacagcat

SEQ ID NO: 691763 - DNA, 75 bp, synthetic construct
  source 1..75: mol_type = other DNA
ttattttcgttgaagctgcttattttaaaaaaccaataataactactagtgtagaaggtattccggaggtcgtgg

SEQ ID NO: 691764 - DNA, 75 bp, synthetic construct
  source 1..75: mol_type = other DNA
gatgcggtgacgctgcgcccgcataactggttcattaccctgccggaacacaatgacgaactccggctggatgac

SEQ ID NO: 691765 - DNA, 75 bp, synthetic construct
  source 1..75: mol_type = other DNA
gcagaaaaggagctggccgccgccgtggatgagtggctgcacggcatcccggacatggaggacatcatcctcaac

SEQ ID NO: 691766 - DNA, 75 bp, synthetic construct
  source 1..75: mol_type = other DNA
tagatatcgagcgggaggcgattcgtgttttatcccgaaaccagcccggagcggctggcagaactgaccgatttg

SEQ ID NO: 691767 - DNA, 75 bp, synthetic construct
  source 1..75: mol_type = other DNA
cgcaggcgatgctgtttgcggatatggaagaacgtgatggccatctgttcgccgagatggaaaagcgcaaaaaag

SEQ ID NO: 691768 - DNA, 75 bp, synthetic construct
  source 1..75: mol_type = other DNA
ccattgaccgggcagaacttccggcagaggccattgcgcaggggatgaacgaactggtggcacctctggtgcagg

SEQ ID NO: 691769 - DNA, 75 bp, synthetic construct
  source 1..75: mol_type = other DNA
agaggccatcgcgcaggggatgaacgaactggtggccccgctggtgcaggccatacaggaaggccgggatgcaga

SEQ ID NO: 691770 - DNA, 75 bp, synthetic construct
  source 1..75: mol_type = other DNA
atgatgtgtttgcagaaatggtggcctggcacaatgcagcaggaataaccggaaatggacacttcaccataagtc

SEQ ID NO: 691771 - DNA, 75 bp, synthetic construct
  source 1..75: mol_type = other DNA
acattgcttttacccgcaaagggctgacctcggaagtggtcgcagcggtagcgaagatttgctccaacgcggatc

SEQ ID NO: 691772 - DNA, 75 bp, synthetic construct
  source 1..75: mol_type = other DNA
caagggtatcgcttttaagcgcggaaaagatgctaaaggcggctatcagactggtctgcttaaggtcgggcgttt

SEQ ID NO: 691773 - DNA, 75 bp, synthetic construct
  source 1..75: mol_type = other DNA
aactaccagatatacttcaaacatcgctatcagaacttgcgatgatacaaacataattgccatggcacatgggca

SEQ ID NO: 691774 - DNA, 75 bp, synthetic construct
  source 1..75: mol_type = other DNA
aaccgtatcgccggggaaaactgcctctacttcgaaaccgggcaaggttcggcgctgtctgctggcgctaacttc

SEQ ID NO: 691775 - DNA, 75 bp, synthetic construct
  source 1..75: mol_type = other DNA
caacccggtgacggacgacgtggaaaacttaagccgtgtgctggataccatttacggtgtgatcgacaaattcaa

SEQ ID NO: 691776 - DNA, 75 bp, synthetic construct
  source 1..75: mol_type = other DNA
agcgcgcgcagtgggcgcggagttcaaccgtatcgccggggaaaactgcctctacttcgaaaccggacaaggttc

SEQ ID NO: 691777 - DNA, 75 bp, synthetic construct
  source 1..75: mol_type = other DNA
cgtatccccgccatgaaagtcagcgaatggggccacctgctccgcgcgcttgaaattgagcgggtctgccactga

SEQ ID NO: 691778 - DNA, 75 bp, synthetic construct
  source 1..75: mol_type = other DNA
cttcctggctgttcggtggaaagcccaaaacacccggaaaaatggcacatattttaagagagagttgttgtctga

SEQ ID NO: 691779 - DNA, 75 bp, synthetic construct
  source 1..75: mol_type = other DNA
ttatcggagagccatgatgataattatacgttacagcaggagaaaacatgggagccaccatcacctggaatgtaa

SEQ ID NO: 691780 - DNA, 75 bp, synthetic construct
  source 1..75: mol_type = other DNA
agggcgtggcaggtgaagaggtgaacactgcccattaccgacatcatctggatctggcggaaggtgccgaagcaa

SEQ ID NO: 691781 - DNA, 75 bp, synthetic construct
  source 1..75: mol_type = other DNA
tagcaatcatcgagatgagaacggaaaaatttaaacagttcaggctatccaaaggagacaaaatcatatccagcc

SEQ ID NO: 691782 - DNA, 75 bp, synthetic construct
  source 1..75: mol_type = other DNA
cgagggctgggagcaggcgtgccgctatgccaacgcctgcggcgcgctggtggtctcgcgccacggctgcgcccc

SEQ ID NO: 691783 - DNA, 75 bp, synthetic construct
  source 1..75: mol_type = other DNA
tgctgcgtcgccttaacccatactgtgcacgggcgctggacgccgccgcctcgctgtgtcagacccgcgcccatg

SEQ ID NO: 691784 - DNA, 75 bp, synthetic construct
  source 1..75: mol_type = other DNA
gtctgcagacagacgctggagtacacgcgggtcaatgacaattttatcccacgtaccgagtatccatcaggttat

SEQ ID NO: 691785 - DNA, 75 bp, synthetic construct
  source 1..75: mol_type = other DNA
tgctcgctacgcaaacgctgttattactggcgattgcggcaatggggtttcttgaaccgggtacgcaactacgct

SEQ ID NO: 691786 - DNA, 75 bp, synthetic construct
  source 1..75: mol_type = other DNA
ctatttatatgcaggcagccctggatcatctccgggcgcagggtgaaacactgaatgatgaagatatcgcacgcc

SEQ ID NO: 691787 - DNA, 75 bp, synthetic construct
  source 1..75: mol_type = other DNA
actaccgaccagggcgcgtgctggtacgatggcaggcacaccctgcggcttttgcaaccgcaaggcaaactgctg

SEQ ID NO: 691788 - DNA, 75 bp, synthetic construct
  source 1..75: mol_type = other DNA
aaccataccttaaaaccgttacagccttttgcctttgcggcggaccaggtggttaaagcgaaactgacggcaggg

SEQ ID NO: 691789 - DNA, 75 bp, synthetic construct
  source 1..75: mol_type = other DNA
gctactcagtttgccctgctctcggcgctttccgctgtcggacgggtatatgtcggccccgtggcgggctggttt

SEQ ID NO: 691790 - DNA, 75 bp, synthetic construct
  source 1..75: mol_type = other DNA
ctgatcagtactctggttttcatggcattgtggtacccggtacattacaggattcgatttttgtactggaaggac

SEQ ID NO: 691791 - DNA, 75 bp, synthetic construct
  source 1..75: mol_type = other DNA
aatcgaggagaaggccgccacgctgtggctcgtgcgatttgttacggacaacgcggagagatcagaaagcgttat

SEQ ID NO: 691792 - DNA, 75 bp, synthetic construct
  source 1..75: mol_type = other DNA
ggataagttggcccgaggatatgcagatctgtcaaaagcggagagtcagtgggatgagatgatgcgaaccgctgg

SEQ ID NO: 691793 - DNA, 75 bp, synthetic construct
  source 1..75: mol_type = other DNA
aaccggatgagcttcagctggcacgatattttcaccttgatgaagcagacaaggaatttatcggaaaaagcagag

SEQ ID NO: 691794 - DNA, 75 bp, synthetic construct
  source 1..75: mol_type = other DNA
caacggaaattatcagtcggtcatggaaacggctggggattaacaaggaaaaacatatcacccgcaggggataca

SEQ ID NO: 691795 - DNA, 75 bp, synthetic construct
  source 1..75: mol_type = other DNA
ccgctttgccacggacatatcaatatgctcggccattattccttcacgctggcagaactggtgaccaaaggacat

SEQ ID NO: 691796 - DNA, 75 bp, synthetic construct
  source 1..75: mol_type = other DNA
ttcgttggtggcggagctgtcttcatgaatgccggataccaggaaaatctgctaaatgatgtgaatgctgacctg

SEQ ID NO: 691797 - DNA, 75 bp, synthetic construct
  source 1..75: mol_type = other DNA
cggaacttgctgccagcgatgaagtggagccaggattccggcgcgatcctgtgctacgtcgtgaacgccgtgaag

SEQ ID NO: 691798 - DNA, 75 bp, synthetic construct
  source 1..75: mol_type = other DNA
ggcgcgcacagccagccaggcatggtcacagcgggagaatgatgtcgcctcctccctgcagtcctgcctgtcccg

SEQ ID NO: 691799 - DNA, 75 bp, synthetic construct
  source 1..75: mol_type = other DNA
atcaccggtggcaggtgccgccacctgccgggcgggggccgctgccgaagccggcagcagagccgcctgggagcg

SEQ ID NO: 691800 - DNA, 75 bp, synthetic construct
  source 1..75: mol_type = other DNA
cgtcagcactatgggctggaaacggaaatcaacgacagcctgtatgacgcgctgaccgccgcctgcctgctgccg

SEQ ID NO: 691801 - DNA, 75 bp, synthetic construct
  source 1..75: mol_type = other DNA
cgaagccgttcgcaaacgcccttacagcgtggtgctgctcgacgaagtggaaaaggcgcatcgcgacgtgatgaa

SEQ ID NO: 691802 - DNA, 75 bp, synthetic construct
  source 1..75: mol_type = other DNA
ccgctatgcacagcaccacggcgtgcatatgctggacagcgccattcagaccgccgtgcgcctgtcgcgccgcta

SEQ ID NO: 691803 - DNA, 75 bp, synthetic construct
  source 1..75: mol_type = other DNA
gcgttttgagcggactgcactgtatgccgctgaaaatggtttcagtgtgatcagtagctcactgggcatttcacg

SEQ ID NO: 691804 - DNA, 75 bp, synthetic construct
  source 1..75: mol_type = other DNA
ttataactggcgcaagcagggcggctcgtcccgcatgattgaaatcagcaagcgcgaaaaattctatcagcagga

SEQ ID NO: 691805 - DNA, 75 bp, synthetic construct
  source 1..75: mol_type = other DNA
tcaaagtaaccttgaatgatacgtgttatgccaattggcttaatgaacattttggcgagttaagccatgctaagc

SEQ ID NO: 691806 - DNA, 75 bp, synthetic construct
  source 1..75: mol_type = other DNA
tacataccaccaatacatacagtatccgttggtaatggaagagccgaggttttagatggacaacaaagattaact

SEQ ID NO: 691807 - DNA, 75 bp, synthetic construct
  source 1..75: mol_type = other DNA
atgttttcaaagcctatgaccactttcacaccagaacgtattgaacaaattttggaatttgccgagggtagtaac

SEQ ID NO: 691808 - DNA, 75 bp, synthetic construct
  source 1..75: mol_type = other DNA
aggaatggaatgggagcctgagagggggatccgttgtaccatgtgttttgacatgcgttttgagcggacagcgtt

SEQ ID NO: 691809 - DNA, 75 bp, synthetic construct
  source 1..75: mol_type = other DNA
agcgttccattctctttatgtacaagaaagttggtaatggagttcgcagtactattctcgtgaaggatctacaag

SEQ ID NO: 691810 - DNA, 75 bp, synthetic construct
  source 1..75: mol_type = other DNA
gaaaaaacaaaagcgtgtaatcggtctacgggaaagtaaacgccgtaaactaatttatgatttctatcaggaagt

SEQ ID NO: 691811 - DNA, 75 bp, synthetic construct
  source 1..75: mol_type = other DNA
acttcaaaagcaagactaacgaagcagggtaacattagtggtctgaagaaaaacttatcaagtggacgatacaag

SEQ ID NO: 691812 - DNA, 75 bp, synthetic construct
  source 1..75: mol_type = other DNA
cggttctataaaaataagcacattgttagaaaaacttaagaaaatatcttctgaccattatgaccataatattat

SEQ ID NO: 691813 - DNA, 75 bp, synthetic construct
  source 1..75: mol_type = other DNA
cggggacatgattcatattcctcttaataaagactacagggaaatagcccgtttaataaaatgcaaagttataag

SEQ ID NO: 691814 - DNA, 75 bp, synthetic construct
  source 1..75: mol_type = other DNA
cgtggggcagtgggctttactcaacgttccatccttttcttctatagaaaggttgggagaaattcagttacatcg

SEQ ID NO: 691815 - DNA, 75 bp, synthetic construct
  source 1..75: mol_type = other DNA
tccggcgctggatgaatctcaccggtacgccagcgccgaacggcctggtggatttgtgggggcaggcgtggtttg

SEQ ID NO: 691816 - DNA, 75 bp, synthetic construct
  source 1..75: mol_type = other DNA
gtgtaaggaaatgataagaaatgatcttaacatagcaaagcaacattctctgttaaagttaaatgggtatgatgt

SEQ ID NO: 691817 - DNA, 75 bp, synthetic construct
  source 1..75: mol_type = other DNA
acaatgcttatatttgggtaatctggattcgttgcgtgactggggacacgctaaagattatgttcgcatgcaatg

SEQ ID NO: 691818 - DNA, 75 bp, synthetic construct
  source 1..75: mol_type = other DNA
aaatcaacaaggaaaactctatggtaatcaactccaagacgagctaatcaagcaaacacgccaactatctaaaaa

SEQ ID NO: 691819 - DNA, 75 bp, synthetic construct
  source 1..75: mol_type = other DNA
tcggaattgtagagagtgtttctggtgaagatgcacctgcagttaacgtaggtgacgtaattgtagctgttgatc

SEQ ID NO: 691820 - DNA, 75 bp, synthetic construct
  source 1..75: mol_type = other DNA
tgtttaaccatgaatcaccacgccgtggcgaaacgtttgtaacacgaaaaattacacgtgggctttccaatattg

SEQ ID NO: 691821 - DNA, 75 bp, synthetic construct
  source 1..75: mol_type = other DNA
ggcctgaagactctttatctttacttaaaaatttggatattgaagaagaaaatgttggactcccacaaggtttag

SEQ ID NO: 691822 - DNA, 75 bp, synthetic construct
  source 1..75: mol_type = other DNA
tcgatcatgacatctcagatgaagaacccagcaatgacgcgggttccgacgatgaaaaatgcgcaaaaaattctg

SEQ ID NO: 691823 - DNA, 75 bp, synthetic construct
  source 1..75: mol_type = other DNA
cactcaaaaaagcgcacaaaaaaatgcgcatggagctgatgacgagtccagtaatgacgagtcttacggcgatga

SEQ ID NO: 691824 - DNA, 75 bp, synthetic construct
  source 1..75: mol_type = other DNA
tggaaaaataaccggtaataccagtgtggaaatccccaaactggcaggcaatgatattttaacgcttgatggctc

SEQ ID NO: 691825 - DNA, 75 bp, synthetic construct
  source 1..75: mol_type = other DNA
acgtggtgagaacgggctgaagatcatcatgatgtgtgaaattccgtccaacgccttgctggcagaacagttcct

SEQ ID NO: 691826 - DNA, 75 bp, synthetic construct
  source 1..75: mol_type = other DNA
gtttaacgatcgcgccatctcttatcgtgtgcaccagggttacgatcaccgtggcgtggcgctctccgccggtgt

SEQ ID NO: 691827 - DNA, 75 bp, synthetic construct
  source 1..75: mol_type = other DNA
aaatgttcgccgacctgaaagaggcggctgacgtggaaacccgtgttgccctgtacgacaaaatacttaaagccg

SEQ ID NO: 691828 - DNA, 75 bp, synthetic construct
  source 1..75: mol_type = other DNA
gtgccggacaaatgccgttgacgtggtgctaatggacatgagtatgccgggcattggcggtcttgaggcgacgcg

SEQ ID NO: 691829 - DNA, 75 bp, synthetic construct
  source 1..75: mol_type = other DNA
ttgcacctgagcattttaaagcggtgatatctcaggaaaaacgtgctgaatttcgtttcaatgaccgcgattatt

SEQ ID NO: 691830 - DNA, 75 bp, synthetic construct
  source 1..75: mol_type = other DNA
ttttgtcttctgtgaacaagatggtcaaatagttaacaaagctcgctggattattccagattcgtccgaatcggg

SEQ ID NO: 691831 - DNA, 75 bp, synthetic construct
  source 1..75: mol_type = other DNA
tgataccgcgctcagtcagttgcagtcagcatttgacgcgtacaaaacggagcaggcaacgcttgagaatgctgc

SEQ ID NO: 691832 - DNA, 75 bp, synthetic construct
  source 1..75: mol_type = other DNA
atgccgggcattggcggtcttgaggcgacgcgtaaaatcgcgcgttccacagctgatgtcaaaatcatcatgctt

SEQ ID NO: 691833 - DNA, 75 bp, synthetic construct
  source 1..75: mol_type = other DNA
cctgcggtgaagacgccgttaagtggtgccgggcaaacaccgttgacgtcgtgctaatggacatgagtatgcctg

SEQ ID NO: 691834 - DNA, 75 bp, synthetic construct
  source 1..75: mol_type = other DNA
tcttggcaacatggattctttacgcgattgggggcatgcgaaagattatgttcgtatgcaatggatgatgcttca

SEQ ID NO: 691835 - DNA, 75 bp, synthetic construct
  source 1..75: mol_type = other DNA
cggtaactgaagctgttattaccgtaccggcatactttaacgatgctcagcgtcaagcaaccaaagacgcaggcc

SEQ ID NO: 691836 - DNA, 75 bp, synthetic construct
  source 1..75: mol_type = other DNA
gcaatcgccgccaccatgttctggctcgacccgttcctggcgctgacggcattaagcgcagtgccagtggccgca

SEQ ID NO: 691837 - DNA, 75 bp, synthetic construct
  source 1..75: mol_type = other DNA
aaataaaagatgaaatagaaaagatagaacaagatcataaaaataagtcagatgacctctataagtatatttcta

SEQ ID NO: 691838 - DNA, 75 bp, synthetic construct
  source 1..75: mol_type = other DNA
gagttcctcgccagaaggtggcgatcatctatgatattggcatatcgactttgtataagaggtttccggtcggag

SEQ ID NO: 691839 - DNA, 75 bp, synthetic construct
  source 1..75: mol_type = other DNA
ggcctgcgattctccccgagcatcgaggtaacccattaattgaggcgctaccagcgaagcatactgatgaggagc

SEQ ID NO: 691840 - DNA, 75 bp, synthetic construct
  source 1..75: mol_type = other DNA
ggcagttgcggtaccgggaaaaatcatctggcggtatcaatggcaaaacacatcatccgtaactatctggccagt

SEQ ID NO: 691841 - DNA, 75 bp, synthetic construct
  source 1..75: mol_type = other DNA
aagccgatcgatatgtattacgacaccaaaaatgacatggtctatgtctggggaacaaagtcaactcgtttgatt

SEQ ID NO: 691842 - DNA, 75 bp, synthetic construct
  source 1..75: mol_type = other DNA
tggtcactgagctgatcgtcatagcggatgagtctctgctggaaattgttttttcaactcacagggaatctgtcg

SEQ ID NO: 691843 - DNA, 75 bp, synthetic construct
  source 1..75: mol_type = other DNA
cattatgagctatatcagcaaatactcaccagcatgggataattatatttcagctgtacgtcaagagatcattga

SEQ ID NO: 691844 - DNA, 75 bp, synthetic construct
  source 1..75: mol_type = other DNA
tacacaattgaattgcaaggggcatatttatcgaatattctgacttgttatccacactcaattacacatgcgggt

SEQ ID NO: 691845 - DNA, 75 bp, synthetic construct
  source 1..75: mol_type = other DNA
ctctgagggctgtggttcgtatgcatctattggtaataaatatcaaataaatcatgtggatgaaatttttgtttt

SEQ ID NO: 691846 - DNA, 75 bp, synthetic construct
  source 1..75: mol_type = other DNA
atgcaatgctgaacaatgtcattacaggtctgcataccgtggcgattgcaacagcaacgcttgcgggcttatggg

SEQ ID NO: 691847 - DNA, 75 bp, synthetic construct
  source 1..75: mol_type = other DNA
cgcttccaggacgaagaagtacagcgtgatgtttccatcatgccattcaaaattattgctgctgataacggcgac

SEQ ID NO: 691848 - DNA, 75 bp, synthetic construct
  source 1..75: mol_type = other DNA
gagcatcttcatttaatacagagcgtgttgatcacatttatcaagatcgccacaatcaaaatccaaatttctttc

SEQ ID NO: 691849 - DNA, 75 bp, synthetic construct
  source 1..75: mol_type = other DNA
tgcagaaatggtggctagtgatttagaaaaagctaaacagcatgcacttcttaaaagccatggttttgacgtggc

SEQ ID NO: 691850 - DNA, 75 bp, synthetic construct
  source 1..75: mol_type = other DNA
agaagttggacttgaacttgagttttccggtactggtgttgatgagattgcaatggttgtaaataaaacatcaga

SEQ ID NO: 691851 - DNA, 75 bp, synthetic construct
  source 1..75: mol_type = other DNA
atgtatgcatgtaacggtattttgttcaaccatgaatccccacgtcgtggggaaacatttgtaacacgtaagatc

SEQ ID NO: 691852 - DNA, 75 bp, synthetic construct
  source 1..75: mol_type = other DNA
ttcgcgagtttgtacaaatgtccgcaaagcaagttggtctggatattgagttctctggtcaagggatagatgaaa

SEQ ID NO: 691853 - DNA, 75 bp, synthetic construct
  source 1..75: mol_type = other DNA
ctgaattattcggcctagtgcaggaaatacctcagcgtgaaacaacaccattttatcctcgttcaccttatgctg

SEQ ID NO: 691854 - DNA, 75 bp, synthetic construct
  source 1..75: mol_type = other DNA
gcagaccatcgccgcgcagaactggttatgaataaactttatgataaggttccttctggcgtctggaagtacgtc

SEQ ID NO: 691855 - DNA, 75 bp, synthetic construct
  source 1..75: mol_type = other DNA
gtgaaaacaaagcaggaatggctttttcagttaagaaaatgtacatcaagagatactcttgaaaaagttattgag

SEQ ID NO: 691856 - DNA, 75 bp, synthetic construct
  source 1..75: mol_type = other DNA
gatcggtggtactggaataacagtatccaacggggccgaagtacggcggtcagagacgtaatatcagaagcctta

SEQ ID NO: 691857 - DNA, 75 bp, synthetic construct
  source 1..75: mol_type = other DNA
ccacatggttctaacccaaattttcacttgcactatggagatctgactgattcatctaacctcactagaattcta

SEQ ID NO: 691858 - DNA, 75 bp, synthetic construct
  source 1..75: mol_type = other DNA
agcaggcatcgggttgaggcgctgggggtggaatcgctcctgtcacagtcagcagtcagcagtcaggcattttca

SEQ ID NO: 691859 - DNA, 75 bp, synthetic construct
  source 1..75: mol_type = other DNA
aaaaggtaagagccatcccattgagtgcgtgtttactcgcggtttcgtgcgccagtacaacgccgcactcggata

SEQ ID NO: 691860 - DNA, 75 bp, synthetic construct
  source 1..75: mol_type = other DNA
tcgttgccgataatattcacggtgaaaccggactggatggcccggtattcgagccgctgacccgccaggcagaaa

SEQ ID NO: 691861 - DNA, 75 bp, synthetic construct
  source 1..75: mol_type = other DNA
tcaccattgtggcgggtaatcagacgcttgataaaacattaattaatggcctgaatgtttgccagaaactggaga

SEQ ID NO: 691862 - DNA, 75 bp, synthetic construct
  source 1..75: mol_type = other DNA
acgtcgaagtggacgtcaacagcggcccttgctacgggcgtaccgtctgcgacgaactgggcgttcttggcaagc

SEQ ID NO: 691863 - DNA, 75 bp, synthetic construct
  source 1..75: mol_type = other DNA
ccgctttcaaatatcgcggtggcaatgcgtatgcaacccgcgatcctgccgaaaatccgtgaaattgtgctgatg

SEQ ID NO: 691864 - DNA, 75 bp, synthetic construct
  source 1..75: mol_type = other DNA
cgacatcatgaacttcactctcaaacgcagttcgaaaactacggcctggctggcggcccggtgcacgacgccacc

SEQ ID NO: 691865 - DNA, 75 bp, synthetic construct
  source 1..75: mol_type = other DNA
tgcgtatgcaacccgcgatcctgccgaaaatccgtgaaattgtactgatgggcggcgcttatggtactggcaact

SEQ ID NO: 691866 - DNA, 75 bp, synthetic construct
  source 1..75: mol_type = other DNA
actggtaatgctcctcgataagctggactggcgtcagccaaaaacatcccgccttaactcactgacaatgttgta

SEQ ID NO: 691867 - DNA, 75 bp, synthetic construct
  source 1..75: mol_type = other DNA
atgatttcgctcccgtcaggcactcgaatctggctggttgccggcgttactgatatgcgtaaatccttcaacggt

SEQ ID NO: 691868 - DNA, 75 bp, synthetic construct
  source 1..75: mol_type = other DNA
atgatctcgctcccatcaggcactcggatctggctggttgccggcgttactgatatgcgtaaatctttcaacggt

SEQ ID NO: 691869 - DNA, 75 bp, synthetic construct
  source 1..75: mol_type = other DNA
cgatatcactctggtgccggttggtccactttcaaacatcgcggtggcaatgcgtatgcaacccgcgatcctgcc

SEQ ID NO: 691870 - DNA, 75 bp, synthetic construct
  source 1..75: mol_type = other DNA
atgatctcactcccgtcaggcacccgcatctggctcgttgccggcgttaccgatatgcgtaaatccttcaacgga

SEQ ID NO: 691871 - DNA, 75 bp, synthetic construct
  source 1..75: mol_type = other DNA
ctgggagaacaggtacaacatgtgctgaatgataatcccttctccggtcacctgtttatcttccgtggccgacgg

SEQ ID NO: 691872 - DNA, 75 bp, synthetic construct
  source 1..75: mol_type = other DNA
gcaaaatcgcgatcacccgctcacaacttgccatgctccttgataagctggactggcgccagccaaaaatatccc

SEQ ID NO: 691873 - DNA, 75 bp, synthetic construct
  source 1..75: mol_type = other DNA
gcagatagctcagcttaagacacagaaccgacaattacaggggaagattaacgatgttacccaacgctggatgga

SEQ ID NO: 691874 - DNA, 75 bp, synthetic construct
  source 1..75: mol_type = other DNA
atgagtactgaaatcaaaagtcaggtcgtggtacttggggcaggccccgcaggttactccgctgccttccgttgc

SEQ ID NO: 691875 - DNA, 75 bp, synthetic construct
  source 1..75: mol_type = other DNA
aggttactccgctgccttccgctgcgctgatttaggtctggaaaccgtaatcgtagaacgctacaacaccctcgg

SEQ ID NO: 691876 - DNA, 75 bp, synthetic construct
  source 1..75: mol_type = other DNA
ccggcgttggtaaaagtgtgctgctggggatgatggcccgttacacccgcgccgatgtcattgtcgtgggtttga

SEQ ID NO: 691877 - DNA, 75 bp, synthetic construct
  source 1..75: mol_type = other DNA
atagcaaaccagatgggccatgcagatgcgcaaatggtatttcaggtatacggaaaatggatgtctgacaacaat

SEQ ID NO: 691878 - DNA, 75 bp, synthetic construct
  source 1..75: mol_type = other DNA
tattttgggtggtagcgttgtcgtattggcgtttttctacctgttttatctgctgcgactggatagccagacaca

SEQ ID NO: 691879 - DNA, 75 bp, synthetic construct
  source 1..75: mol_type = other DNA
gcaattcgatcttggaacgctctcacacctctatgttttcacggagtaacaatgtcgaaaaactggatgcgtcac

SEQ ID NO: 691880 - DNA, 75 bp, synthetic construct
  source 1..75: mol_type = other DNA
aatcccgacgcgccacccacggtgcgcaccacctttctcggcctgtacggcgtggattcgccgctgccaaccgcc

SEQ ID NO: 691881 - DNA, 75 bp, synthetic construct
  source 1..75: mol_type = other DNA
aaatgatatatcattttcagaatctattttaacttattaccatctatttgattatgctggtaaaacgtttgaaat

SEQ ID NO: 691882 - DNA, 75 bp, synthetic construct
  source 1..75: mol_type = other DNA
ccacgcgcacccgactctgcatgagtctgtgggcctggcggcagaagtgttcgaaggtagcatcactgacctgcc

SEQ ID NO: 691883 - DNA, 75 bp, synthetic construct
  source 1..75: mol_type = other DNA
catcgcagcgggttctcgcccgatccaactgccatttattccgcacgaagatccgcgtatctgggactccaccga

SEQ ID NO: 691884 - DNA, 75 bp, synthetic construct
  source 1..75: mol_type = other DNA
gcttggcttttcgctctatgtcaattgcgacgacccggcaaatgataatccaacccaaaccgacctcggcattaa

SEQ ID NO: 691885 - DNA, 75 bp, synthetic construct
  source 1..75: mol_type = other DNA
gcagattgcgcaactggagcgcaccaacagacaactacagaggcaggtgaacgatgtcacacaacgctggatgga

SEQ ID NO: 691886 - DNA, 75 bp, synthetic construct
  source 1..75: mol_type = other DNA
ttgcggtcagggtccgtccgaccacgaagactttgccgcatggttgatggaagaggggatcgatagcctgtctct

SEQ ID NO: 691887 - DNA, 75 bp, synthetic construct
  source 1..75: mol_type = other DNA
cgcgttcaccaggggtacgatcaccgtggcgtggcgctctccgccggtgttcagcggatggtgcgttccgacctc

SEQ ID NO: 691888 - DNA, 75 bp, synthetic construct
  source 1..75: mol_type = other DNA
acatgccggatgcctcctttgccggtcagcaggaaactttccttaacgttcaggggtttgacgccgtcctcgtag

SEQ ID NO: 691889 - DNA, 75 bp, synthetic construct
  source 1..75: mol_type = other DNA
catctttcatggaggatacgggacaaccggcgatttgtataaaacaactttttacggtccgacacagtattatct

SEQ ID NO: 691890 - DNA, 75 bp, synthetic construct
  source 1..75: mol_type = other DNA
attacaacaccgccagaacccgtataaaaatgggcaaaatcgatcatgaaattgatcataaaaccgatcatgaaa

SEQ ID NO: 691891 - DNA, 75 bp, synthetic construct
  source 1..75: mol_type = other DNA
cgcaacgatgcagtgaaagcactgctgtcgatggcgattcgtgccgcgaagaagcagggcaaatatgtcgggatt

SEQ ID NO: 691892 - DNA, 75 bp, synthetic construct
  source 1..75: mol_type = other DNA
aatcgcccggctatcgtgcgccgcaccatggggtcgaaaaaaatccgcatggtctacgcgccgacccaggagcac

SEQ ID NO: 691893 - DNA, 75 bp, synthetic construct
  source 1..75: mol_type = other DNA
tgggaaccgatcatgaagaaagcatctgccatcgtcaccaaccgtggcggtcgtacctgtcacgcggcgatcatc

SEQ ID NO: 691894 - DNA, 75 bp, synthetic construct
  source 1..75: mol_type = other DNA
tcgccgaaggccgtgctatcggtcatcgcatcggcgcgggtccggtgaaagtcatccatgacatcagcgaaatga

SEQ ID NO: 691895 - DNA, 75 bp, synthetic construct
  source 1..75: mol_type = other DNA
gtggcgtcgcgctctccgccggtgttcagcggatggtgcgttccgacctcgcgtcctctggcgtgatgttctcca

SEQ ID NO: 691896 - DNA, 75 bp, synthetic construct
  source 1..75: mol_type = other DNA
cgctcggtctggaccgtgactccggcgtggtgtctgaactgttcgatgagcgcaacgatgcggtgaaagcactgc

SEQ ID NO: 691897 - DNA, 75 bp, synthetic construct
  source 1..75: mol_type = other DNA
cgctcggtctggaccgtgactccggcgtggtgtctgaattgttcgatgagcgcaacgatgcggtgaaagcattgc

SEQ ID NO: 691898 - DNA, 75 bp, synthetic construct
  source 1..75: mol_type = other DNA
gcttgatgtgccaatgattgacttcagcagcgtgtctcggcggggctcactgaccctgttgtcgcagggatatgg

SEQ ID NO: 691899 - DNA, 75 bp, synthetic construct
  source 1..75: mol_type = other DNA
aggccgaagccagttaccttgagcagattgctcagcttgagagccagaacaaactactacaggggcaaattaacg

SEQ ID NO: 691900 - DNA, 75 bp, synthetic construct
  source 1..75: mol_type = other DNA
gcaaggtatccattacccgttcgcaactggtaatgctcctcgataagctggactggcgtcagccaaaaacatccc

SEQ ID NO: 691901 - DNA, 75 bp, synthetic construct
  source 1..75: mol_type = other DNA
atgatctcactcccatcaggtacccgcatctggctcgttgccggcgttaccgatatgcgtaaatctttcaacggg

SEQ ID NO: 691902 - DNA, 75 bp, synthetic construct
  source 1..75: mol_type = other DNA
ggtgacatgattaaaatcctctgggctgatgctgatggtctgtgcctgttcaccaaacgcctggaggaaggccag

SEQ ID NO: 691903 - DNA, 75 bp, synthetic construct
  source 1..75: mol_type = other DNA
tttatctggcctgcggtgcgtgacggcaagatatccattacccgttcacaactggcaatgctcctcgataagctg

SEQ ID NO: 691904 - DNA, 75 bp, synthetic construct
  source 1..75: mol_type = other DNA
gtatctggctcgttgccggcgttactgatatgcgtaaatccttcaacggtctgggggagcaaatacagcatgtgc

SEQ ID NO: 691905 - DNA, 75 bp, synthetic construct
  source 1..75: mol_type = other DNA
tcgccaaactgtacgcctactggatcaccgttaactaccgcgaatcctacggcatgtacgcctgtaacggtattc

SEQ ID NO: 691906 - DNA, 75 bp, synthetic construct
  source 1..75: mol_type = other DNA
aaatattattacagccgatttcgatcccattatttcatttaataaaaacagtaaagaacatatgtcatggacata

SEQ ID NO: 691907 - DNA, 75 bp, synthetic construct
  source 1..75: mol_type = other DNA
tccgctttggactggagtttgagaaatccgcctttggtaagtacaacgttgataatgcagtcaacgctaacttcc

SEQ ID NO: 691908 - DNA, 75 bp, synthetic construct
  source 1..75: mol_type = other DNA
caccaaacgcctggaggaaggccagtttatctggcctgcggtacgtgacggcaaggtacccgttctgaaaaactg

SEQ ID NO: 691909 - DNA, 75 bp, synthetic construct
  source 1..75: mol_type = other DNA
ggtacagtgcggatattttggtgatgggcgatgactgggcaggtaagtttgacgatttctcgtgtatctgtgagg

SEQ ID NO: 691910 - DNA, 75 bp, synthetic construct
  source 1..75: mol_type = other DNA
tttgaaggcacgggcgttgaagagaagggcattgtggtttccgtcaccgggcatgatgcaccaggcgttaaaccg

SEQ ID NO: 691911 - DNA, 75 bp, synthetic construct
  source 1..75: mol_type = other DNA
cgctttcgcgacaaatacagcgcctggaagaagatctcggtcagccgctgtttgtgcgtgataaccgcacggtaa

SEQ ID NO: 691912 - DNA, 75 bp, synthetic construct
  source 1..75: mol_type = other DNA
aacgccgtttgagctgggcgtgtgtgcgcagaaaaagcggctacatgagccgctaattgaggcattctggaagat

SEQ ID NO: 691913 - DNA, 75 bp, synthetic construct
  source 1..75: mol_type = other DNA
gtttatcatggccgatcaggggccagtacgccgccgcattgaactgtggtttcgacgcaataaaatcagcaaccc

SEQ ID NO: 691914 - DNA, 75 bp, synthetic construct
  source 1..75: mol_type = other DNA
tggcgttttcgatgctggagaatctggcggtggtgctgattgctcccgcgctgccctgcccggtgcgtaatcagg

SEQ ID NO: 691915 - DNA, 75 bp, synthetic construct
  source 1..75: mol_type = other DNA
tctcggtcaaccattgtttgtacgcgataaccgtacggtgacgctgaccgaagcgggcgaagaactgcgcgtttt

SEQ ID NO: 691916 - DNA, 75 bp, synthetic construct
  source 1..75: mol_type = other DNA
cgctcggctgtggcgtggccttgttgccggaagtggtgctggaaaacagccccgaaccggtgcgtaaccgcgtga

SEQ ID NO: 691917 - DNA, 75 bp, synthetic construct
  source 1..75: mol_type = other DNA
gcgttcgcggcgatgcacgcgctatcaacgaacagcgtaacgctgcgcgtctaccgtcaatactcgctacaccgt

SEQ ID NO: 691918 - DNA, 75 bp, synthetic construct
  source 1..75: mol_type = other DNA
tggcgaacccgttcgctcagaagcgtcatggcgggaagataccggtattcacattccactggcgggatgatcctc

SEQ ID NO: 691919 - DNA, 75 bp, synthetic construct
  source 1..75: mol_type = other DNA
gcgttcgcggcgatgcacgcgctatcaacgaactgcgtaacgctgcgcgccgaccgtcaatactcgccacaccgt

SEQ ID NO: 691920 - DNA, 75 bp, synthetic construct
  source 1..75: mol_type = other DNA
agcaagggccgtcgctctctggtgaattacatatcttctgctcggtgaccgctgcctacagccatctgccgccga

SEQ ID NO: 691921 - DNA, 75 bp, synthetic construct
  source 1..75: mol_type = other DNA
ttcgtggaaacactacctgtagagtttcgaggttcgtgggacgaaaagaagcacgcaccatacatgcgcgttgag

SEQ ID NO: 691922 - DNA, 75 bp, synthetic construct
  source 1..75: mol_type = other DNA
gcgttcgcggcgatgcacgcgctatcaacgaactgcgtaacgctgcgcgtcgaccgtcaatacttgccacaccgt

SEQ ID NO: 691923 - DNA, 75 bp, synthetic construct
  source 1..75: mol_type = other DNA
catgaagcgatggtatcgatggtggcgctcggctgcggcgtggccttgttgccagaagtggtgctggaaaacagc

SEQ ID NO: 691924 - DNA, 75 bp, synthetic construct
  source 1..75: mol_type = other DNA
cgttctggaggggacgagccggacgtataccgtcatcggccaggtattctttgcatcatcagaccgctttaccag

SEQ ID NO: 691925 - DNA, 75 bp, synthetic construct
  source 1..75: mol_type = other DNA
ctgctgatggtgacgctggttaaagatcatggcttacagtatttactggccgcctccatactgaccggggtattc

SEQ ID NO: 691926 - DNA, 75 bp, synthetic construct
  source 1..75: mol_type = other DNA
tccccaggtgggcctctactcggcgttctgtattcctctcgttatggccttctttggcggacgtccggcgatgat

SEQ ID NO: 691927 - DNA, 75 bp, synthetic construct
  source 1..75: mol_type = other DNA
gcctgccgtgcttttgaggttattcgcggttctgatgtgatggaggccgttgccgacttggaggatgaagagtga

SEQ ID NO: 691928 - DNA, 75 bp, synthetic construct
  source 1..75: mol_type = other DNA
tgagtcggtacagcgatacattgtgaagccgggagaagtccacgccgtaaggccgcacccgttgccatcagggca

SEQ ID NO: 691929 - DNA, 75 bp, synthetic construct
  source 1..75: mol_type = other DNA
gtcatgcttgccaccgtcgcggttgtggtggcaacacataatctggccttcggtgtgctgaccggtgtactgatt

SEQ ID NO: 691930 - DNA, 75 bp, synthetic construct
  source 1..75: mol_type = other DNA
tggcgcagttgccggagttgaccaacgtcacctggcacgtttacgccctgacggcggccggtctaggcattattt

SEQ ID NO: 691931 - DNA, 75 bp, synthetic construct
  source 1..75: mol_type = other DNA
gctgatcgcgcctgcgctgccctgcccggtgcgtaatcaggtatcagtcgaaaagcccgactggtcaacggtgcc

SEQ ID NO: 691932 - DNA, 75 bp, synthetic construct
  source 1..75: mol_type = other DNA
tctcggtcagccgctgtttgtgcgcgataaccgcacggtaacgctgacggaagcgggcgaagagctgcgcgtttt

SEQ ID NO: 691933 - DNA, 75 bp, synthetic construct
  source 1..75: mol_type = other DNA
agccaccgttcttacaggtgtgattcagcttattgcgggctatctgaagcttggaagcctgatgcgctatgtttc

SEQ ID NO: 691934 - DNA, 75 bp, synthetic construct
  source 1..75: mol_type = other DNA
accgctgcgggcctgggcatcatttatctcttcccgtatctgaacaaaaccattccctcgccgctgatctgcatc

SEQ ID NO: 691935 - DNA, 75 bp, synthetic construct
  source 1..75: mol_type = other DNA
ggcctcggcgctgaccggcgtgctgcaactggcggccggctacctgaaactgggtagcctgatgcgctacgtctc

SEQ ID NO: 691936 - DNA, 75 bp, synthetic construct
  source 1..75: mol_type = other DNA
gataatggtaaaccggctcgtctgaataaggacttttttgtcaatgccaaagcccaggggtggtggcatcttcgc

SEQ ID NO: 691937 - DNA, 75 bp, synthetic construct
  source 1..75: mol_type = other DNA
atgttccggtgggagtatgggtaatagatcaagctcttctcgaccgcctcgataacggacaagaatgttggccaa

SEQ ID NO: 691938 - DNA, 75 bp, synthetic construct
  source 1..75: mol_type = other DNA
cgcatattctggttaatagccaggcgggtaaaccagattatccgaaggcgatttcgctgttagaaaacgcctcgg

SEQ ID NO: 691939 - DNA, 75 bp, synthetic construct
  source 1..75: mol_type = other DNA
ttgccgatagcgaaagccttttccgcgaggcggttgctgacattggctatccctgcattgtaaaaccggtgatga

SEQ ID NO: 691940 - DNA, 75 bp, synthetic construct
  source 1..75: mol_type = other DNA
cttcccggaaaatgagatgcctgcacctgtgaagacgacatttgcacccttgagcgcttccgcaatgggtgttcc

SEQ ID NO: 691941 - DNA, 75 bp, synthetic construct
  source 1..75: mol_type = other DNA
gctgatgcaccggaaatcgacggcgcggtttatctcaacggcgaaaccaacgttaagccgggcgatatcctgcgt

SEQ ID NO: 691942 - DNA, 75 bp, synthetic construct
  source 1..75: mol_type = other DNA
aaatcggctttgtttcccttggctgtccgaaaaaccttgtcgattcagagcgtattctcaccgaactccgcactg

SEQ ID NO: 691943 - DNA, 75 bp, synthetic construct
  source 1..75: mol_type = other DNA
aaagaaaaccgctacgccattcgcgctcaggtatctgcgtggatcgccagcgacgatgtgcaagtggtgctgatt

SEQ ID NO: 691944 - DNA, 75 bp, synthetic construct
  source 1..75: mol_type = other DNA
gtaattgatggtccactgccactgaatggtgcgcaggctggttacaaaggccaaccgtatccgggtggtatgcat

SEQ ID NO: 691945 - DNA, 75 bp, synthetic construct
  source 1..75: mol_type = other DNA
aaaataaaagaatattatgcgcagcacctgagtatctgcaaaaatatccgcagccacaatcattacaggaattaa

SEQ ID NO: 691946 - DNA, 75 bp, synthetic construct
  source 1..75: mol_type = other DNA
atgtcacgtttgataatgtgcagaatgccgtaggcgcaggtttgcagattcgtttatttggtaagccggaaattg

SEQ ID NO: 691947 - DNA, 75 bp, synthetic construct
  source 1..75: mol_type = other DNA
attttcagtgaggtctcccctcgcccacatgataccgggatggtgacgttaatttctcaggatctctcggaattt

SEQ ID NO: 691948 - DNA, 75 bp, synthetic construct
  source 1..75: mol_type = other DNA
gccgctgtttgaccgtgaggtcgaaggttttggtgaagtgttccgtatgctctcgtttgaagagattggcactgc

SEQ ID NO: 691949 - DNA, 75 bp, synthetic construct
  source 1..75: mol_type = other DNA
tttaaaaattcgcagtttcctgacaatcctgaaagtattgaagcattccagcgttactggaatccctactcagga

SEQ ID NO: 691950 - DNA, 75 bp, synthetic construct
  source 1..75: mol_type = other DNA
accttgagtttctgcgccactgtcatcgtgacgatctggatttactggtttctgtgcttatctgcgatccgaaag

SEQ ID NO: 691951 - DNA, 75 bp, synthetic construct
  source 1..75: mol_type = other DNA
ccggtaaataagctggcaatgccgcttgtgaatctgtctcgttctcccgcgttttcaatttatgaaggtgaactg

SEQ ID NO: 691952 - DNA, 75 bp, synthetic construct
  source 1..75: mol_type = other DNA
aactacaacagcaaatccagtgttgaaaccattgaaatgaatctgctgatgaagatcctggagaaaagccttgag

SEQ ID NO: 691953 - DNA, 75 bp, synthetic construct
  source 1..75: mol_type = other DNA
ttcgaggtagtggcgcggtatttgatccggatgatgaagctgttcgcggggacaacgggcaagccgcacgtctga

SEQ ID NO: 691954 - DNA, 75 bp, synthetic construct
  source 1..75: mol_type = other DNA
gaacccgatctccaaaccttgccgactcggtaatgatcaactatgccccaatgaattcagccctgaacatctggg

SEQ ID NO: 691955 - DNA, 75 bp, synthetic construct
  source 1..75: mol_type = other DNA
acctgtatgcatcgccgtgccggaagccagcgtgaaaccgtgcaggccgtgactgacggtgcgctcatcgacatt

SEQ ID NO: 691956 - DNA, 75 bp, synthetic construct
  source 1..75: mol_type = other DNA
gcgctttaacttccccggacgccagttattgctgacgctgctggacattccgtttgccgtgtcgccggtggttgc

SEQ ID NO: 691957 - DNA, 75 bp, synthetic construct
  source 1..75: mol_type = other DNA
cgctaccgttacagattgaattgctggagcaggactacaacacagtcggttcctttaccgccgccgcgctattga

SEQ ID NO: 691958 - DNA, 75 bp, synthetic construct
  source 1..75: mol_type = other DNA
tattatggcgattttattgctgaaaaaccggatactgccgttggtccggataaatggagaagtgaatatgaaatg

SEQ ID NO: 691959 - DNA, 75 bp, synthetic construct
  source 1..75: mol_type = other DNA
gtaccgtctgcgttttgcgcggatttgtatggtcagtgcgctgtttttcctgctgtgcgaatacgcgattttttc

SEQ ID NO: 691960 - DNA, 75 bp, synthetic construct
  source 1..75: mol_type = other DNA
ccgggagccgggccgggctgcttgtgaaagggatgaaactgctggggaaatgggggctgacagtgattgtcatca

SEQ ID NO: 691961 - DNA, 75 bp, synthetic construct
  source 1..75: mol_type = other DNA
cgttgataaaagcgcgtacacctgccagtacaggaagctgcaacacaggaagatattaaaacagaaactgtggcg

SEQ ID NO: 691962 - DNA, 75 bp, synthetic construct
  source 1..75: mol_type = other DNA
aagtatctgcccggtttgatcaaatccggcaaagtgacgatggcagagctggacgacgctgcccgccacgtgctg

SEQ ID NO: 691963 - DNA, 75 bp, synthetic construct
  source 1..75: mol_type = other DNA
gccgaaagagtctgacccggtggataccaatgccgaaagccgcctgcaccgcaaagaagcgcgtgaagtggcgcg

SEQ ID NO: 691964 - DNA, 75 bp, synthetic construct
  source 1..75: mol_type = other DNA
gaagcacaggggatggcgcacgaagcttccagccgtaccgatatcactattccgcaaagccaacgtgacttgatt

SEQ ID NO: 691965 - DNA, 75 bp, synthetic construct
  source 1..75: mol_type = other DNA
gaagcacaggggatggcgcacgaggcctccagccgtaccgatattactattccgcaaagccaacgtgacttgatt

SEQ ID NO: 691966 - DNA, 75 bp, synthetic construct
  source 1..75: mol_type = other DNA
atgaagcggcagatgatggcctgaatatgacctgggcaccaatggtcgatgtctcgcgcgatccgcgctggggac

SEQ ID NO: 691967 - DNA, 75 bp, synthetic construct
  source 1..75: mol_type = other DNA
caccggtaaacgcgaaggggccacggtagtgcagatgtacttgcaggatgtgacggcttccatgagtcgcccggt

SEQ ID NO: 691968 - DNA, 75 bp, synthetic construct
  source 1..75: mol_type = other DNA
aaggcctgaacgaagagcaaggtaacgttgtttctcgcttcggtctgaaactggtttacggttctactctggtga

SEQ ID NO: 691969 - DNA, 75 bp, synthetic construct
  source 1..75: mol_type = other DNA
ttgaaagcgcgtatggaacagcatcagcggcatcaggaaggcgtactggcctactcaattgttaatttactttcg

SEQ ID NO: 691970 - DNA, 75 bp, synthetic construct
  source 1..75: mol_type = other DNA
tcgacaagcaacgctggcgacgccttccggcactgcatcagcagttgatgcgccagtttcacgattacgcggcgg

SEQ ID NO: 691971 - DNA, 75 bp, synthetic construct
  source 1..75: mol_type = other DNA
actttgccgcttacggcgcggtagaaggcggtaaagagtacaacaccgtcgatatgagtccgcagcgcctgttta

SEQ ID NO: 691972 - DNA, 75 bp, synthetic construct
  source 1..75: mol_type = other DNA
gggcagctggtccgcagccggtgttgccgatcaatccgtgaccgtactgaccgggattaaaaaattccgtcggtg

SEQ ID NO: 691973 - DNA, 75 bp, synthetic construct
  source 1..75: mol_type = other DNA
atgggaattattgcctggattatttttggcctgatagccggcattatcgccaagctaatcatgccggggcgagat

SEQ ID NO: 691974 - DNA, 75 bp, synthetic construct
  source 1..75: mol_type = other DNA
atgaaatggctatgttcagtaggtatcgcggtaagtctggccttacagccagcactggcggatgatttgttcggt

SEQ ID NO: 691975 - DNA, 75 bp, synthetic construct
  source 1..75: mol_type = other DNA
aaacgctgttcaccaacgatctggatcacggcccatatatctctgaaaccttacgtgtcgacccaactaacgacc

SEQ ID NO: 691976 - DNA, 75 bp, synthetic construct
  source 1..75: mol_type = other DNA
ctgggcgctgacgttcgtcagaaagttgacctgagtaccttcagcgatgaagaagttatgcgtctggctgaaaac

SEQ ID NO: 691977 - DNA, 75 bp, synthetic construct
  source 1..75: mol_type = other DNA
cgtgctgtgctggtagccggtggtgttgaagctgagaagctcgacaaactgccgcgcgatcgctggctggagctg

SEQ ID NO: 691978 - DNA, 75 bp, synthetic construct
  source 1..75: mol_type = other DNA
cgtatccgagcgtgttgttcaggaagaccgtttcaccaccatccatattcaggaactggcgtgtgtgtcccgtga

SEQ ID NO: 691979 - DNA, 75 bp, synthetic construct
  source 1..75: mol_type = other DNA
cgtttgctttgaacgatccggccgcaggtacgaccggtccgtggtacaccaacggtacttttggcttaacggcgg

SEQ ID NO: 691980 - DNA, 75 bp, synthetic construct
  source 1..75: mol_type = other DNA
cacggtgttcccgattagcctcggtctggcctcttcttttaacctcgatacggtgaaaactgtggggcgcgtctc

SEQ ID NO: 691981 - DNA, 75 bp, synthetic construct
  source 1..75: mol_type = other DNA
aacgtcaaatatgacatgggactgtttaacgatccgtacagccaccttgggccaaaagagtctgacccggtggat

SEQ ID NO: 691982 - DNA, 75 bp, synthetic construct
  source 1..75: mol_type = other DNA
cgccgtaaactgcctgcgacaatcattctgcgtgccctgaactacaccacagagcagatcctcgacctgttcttt

SEQ ID NO: 691983 - DNA, 75 bp, synthetic construct
  source 1..75: mol_type = other DNA
actggctaacaccatcgttgtggtagcaaccgcgtctgaatccgctgcactgcaatacctggcgccgtatgccgg

SEQ ID NO: 691984 - DNA, 75 bp, synthetic construct
  source 1..75: mol_type = other DNA
gtcttccgcattaccctggtgcaggggctgaaccgtcagattcgtcgcatgtgcgagcactttggttacgaagtg

SEQ ID NO: 691985 - DNA, 75 bp, synthetic construct
  source 1..75: mol_type = other DNA
ggcttccttatttactgggtggtgccaggtattccgctgatccccgcttttgcgctggcggcggtgctctctccg

SEQ ID NO: 691986 - DNA, 75 bp, synthetic construct
  source 1..75: mol_type = other DNA
taaaaggatctcttgatctaagtatacaggaagcggaggaggatattgatgaaagggaagatatatacagacaga

SEQ ID NO: 691987 - DNA, 75 bp, synthetic construct
  source 1..75: mol_type = other DNA
ttctcggttatcaaaccaacgtcctctactggctggcctgctggatcggtaatatcgccatggtggtcattggcg

SEQ ID NO: 691988 - DNA, 75 bp, synthetic construct
  source 1..75: mol_type = other DNA
cattgccttcctctactgcatctgggccgtggtggggtccggagcgaaagaggttatgtggtcatttgtcaccct

SEQ ID NO: 691989 - DNA, 75 bp, synthetic construct
  source 1..75: mol_type = other DNA
attatggagacaaaaactcgtcaatggctcgcttgcttagctacgactggaattattgcaaattcgatgcgagaa

SEQ ID NO: 691990 - DNA, 75 bp, synthetic construct
  source 1..75: mol_type = other DNA
cagaaccaaagccgctgccgcttgcgccaaaatgtacttaccagaagatgtagaatttgaccttaaagagcttgg

SEQ ID NO: 691991 - DNA, 75 bp, synthetic construct
  source 1..75: mol_type = other DNA
cgcaaaagctttgggggcaaagtatcaggataagtatgtttttgtttatgccgacgattactttaaagatgtttg

SEQ ID NO: 691992 - DNA, 75 bp, synthetic construct
  source 1..75: mol_type = other DNA
gtaagaacgaaaaaggccgcagagtttcccccctgcggcctggtccgggcgcaaattgccattacggcagcctga

SEQ ID NO: 691993 - DNA, 75 bp, synthetic construct
  source 1..75: mol_type = other DNA
gcttccactgcatgacggcaaccattatccgggggttcagcaaaacagcggattacaaagcgcgggcgcagaaat

SEQ ID NO: 691994 - DNA, 75 bp, synthetic construct
  source 1..75: mol_type = other DNA
aactgggctttacccagcacctgatgatgggacataacggccagttcggcggttttttgaaagaagttcgcgaaa

SEQ ID NO: 691995 - DNA, 75 bp, synthetic construct
  source 1..75: mol_type = other DNA
ggataaaccgtacatttttcttacgaaaaaggccgcagagtttcactcctgcggcctggtccgggcgcaaattgc

SEQ ID NO: 691996 - DNA, 75 bp, synthetic construct
  source 1..75: mol_type = other DNA
cagatattgaaactgccggactgatgtcgcatccgttatggtcgcatttcgatattgagtttaaaaacttcaact

SEQ ID NO: 691997 - DNA, 75 bp, synthetic construct
  source 1..75: mol_type = other DNA
tcgttactcgctttattaactggcagatgatcggagccatttttgtattgttagtggcgtggttgttcctgtcac

SEQ ID NO: 691998 - DNA, 75 bp, synthetic construct
  source 1..75: mol_type = other DNA
agggcattcaggatgcctctctcgcattgagatgggaggctcttaccgaaataggggttgagctggcgctggatg

SEQ ID NO: 691999 - DNA, 75 bp, synthetic construct
  source 1..75: mol_type = other DNA
cgctggtgggcgatctttccatcggtgaccagcaaatggttgaaatcgccaaagtgctgagctttgagtcgaaag

SEQ ID NO: 692000 - DNA, 75 bp, synthetic construct
  source 1..75: mol_type = other DNA
cgctttaaaacgctgtaccgtgaagggctgaaaaatcgctatggcgcgctgatgcaaaccatttccggcgtgcac

SEQ ID NO: 692001 - DNA, 75 bp, synthetic construct
  source 1..75: mol_type = other DNA
ctcgcagcggtgagtcgccttctgatgcgctgttgcgcggcggcattgaatatatcgaagtgcgttcgctggata

SEQ ID NO: 692002 - DNA, 75 bp, synthetic construct
  source 1..75: mol_type = other DNA
gctggtgtgctctctattcctctgctgttgccggatggaaatgtcttcccggcgcgttatgagctggtgttcctg

SEQ ID NO: 692003 - DNA, 75 bp, synthetic construct
  source 1..75: mol_type = other DNA
ttgttggcgaagggcgcatcccgaaaaaaatcatgggcattttgcagggcgaagcgttgatgaatgacgcctccg

SEQ ID NO: 692004 - DNA, 75 bp, synthetic construct
  source 1..75: mol_type = other DNA
ggtggtggtcactgtagtcggcattggcttccttatttactgggtggtgccgggtatcccgctgatacccgcctt

SEQ ID NO: 692005 - DNA, 75 bp, synthetic construct
  source 1..75: mol_type = other DNA
gccagtccactcgcattggtgccgtactggcagataatgcagaagcatccgctgctcaactcatttttgaggatg

SEQ ID NO: 692006 - DNA, 75 bp, synthetic construct
  source 1..75: mol_type = other DNA
cggggcaatccaatactgaccgtggactgtattattgcaggtacacgaagtaatgccgggaaaggtgtcagttct

SEQ ID NO: 692007 - DNA, 75 bp, synthetic construct
  source 1..75: mol_type = other DNA
gtgaatctaagtacgttgcgatatgtattgcgcctgatgtctgcaaggttggtgatgcgatagtgccgtttgaca

SEQ ID NO: 692008 - DNA, 75 bp, synthetic construct
  source 1..75: mol_type = other DNA
acgtagcgggccttaaacaggcaatcaaaacgccatcggaagagtacgcgaagattggtattgagaaagacggta

SEQ ID NO: 692009 - DNA, 75 bp, synthetic construct
  source 1..75: mol_type = other DNA
gtattgtgtcaactactccatttaccggaaagccgttgcagaccttgcggcgcgcgggttcagcattgttaacag

SEQ ID NO: 692010 - DNA, 75 bp, synthetic construct
  source 1..75: mol_type = other DNA
cgcccgccggggtgttcagacagaaactgcagtatgcccgggatgtccgtgacggcaaaattcatgatccgcact

SEQ ID NO: 692011 - DNA, 75 bp, synthetic construct
  source 1..75: mol_type = other DNA
ccggagacagtccttttgcggcaaatgcactgggtaaactcgcagcacaggaaatgttggctgcgtaccagggtt

SEQ ID NO: 692012 - DNA, 75 bp, synthetic construct
  source 1..75: mol_type = other DNA
cagttgccgggcattccgattgcaggcggcgatgactttggctccgtcaccgccgggctggcacactgggcggaa

SEQ ID NO: 692013 - DNA, 75 bp, synthetic construct
  source 1..75: mol_type = other DNA
cgggcattgcaatacgccaacgcctgcggtgcactggcggtaacccgacgcggcccgatggaagggacttcccgg

SEQ ID NO: 692014 - DNA, 75 bp, synthetic construct
  source 1..75: mol_type = other DNA
atgaccaagtttgaatactgggctatgccacacaaagatgaaaaagtaatgccattctttgagcagcataaatcg

SEQ ID NO: 692015 - DNA, 75 bp, synthetic construct
  source 1..75: mol_type = other DNA
ccggcgacagtccttttgcagcgaatgcgttgggtaaactggcggcgcaggaaatgctggcagcttacgcgggtt

SEQ ID NO: 692016 - DNA, 75 bp, synthetic construct
  source 1..75: mol_type = other DNA
tctgccatggtccggctgcgtttctggcacttcgtcatggtgataacccgctgaacggttattctatttgtgcgt

SEQ ID NO: 692017 - DNA, 75 bp, synthetic construct
  source 1..75: mol_type = other DNA
agtagatgttatacattgtcatagtgttgctttcaatcaagatggcagtgccggtattgctggtgtgattttagg

SEQ ID NO: 692018 - DNA, 75 bp, synthetic construct
  source 1..75: mol_type = other DNA
ggtatccgaatcctaaaatgagaacacaaggacttttttttagagaccaagctagagcactttcaaaagagcatg

SEQ ID NO: 692019 - DNA, 75 bp, synthetic construct
  source 1..75: mol_type = other DNA
atgtattatggcgcgctatccatccgggcaggcgcctggctgattatttcccccgaagtcaccaagatcatggcc

SEQ ID NO: 692020 - DNA, 75 bp, synthetic construct
  source 1..75: mol_type = other DNA
ataaataaattgattaaagattttggttatgatatagagttgagtattgttggtgcgggtccacaatatgattcg

SEQ ID NO: 692021 - DNA, 75 bp, synthetic construct
  source 1..75: mol_type = other DNA
attttaaaacttttgtgaataatgatattgtcgtacataaaattaaaaaagaaaacgacaaaatcaaaatatgtt

SEQ ID NO: 692022 - DNA, 75 bp, synthetic construct
  source 1..75: mol_type = other DNA
caaataaaaattatggtaggtttgagaaaagattaatgcgatgggctttatctaatgctgatatgataatttgtg

SEQ ID NO: 692023 - DNA, 75 bp, synthetic construct
  source 1..75: mol_type = other DNA
aactgaagaaaatgggaatgaacatcgtcaatgatgatatcaccggacgggttcataaagaccgtaaacttctga

SEQ ID NO: 692024 - DNA, 75 bp, synthetic construct
  source 1..75: mol_type = other DNA
aacgcttaggcgatgtggttgaactgaaagctgaaataattgacgacgattctgcgcttaacggcaaatgggcgt

SEQ ID NO: 692025 - DNA, 75 bp, synthetic construct
  source 1..75: mol_type = other DNA
ttcgcatcggcgtcgagggtgatacctgcgacgggcgcattatcagcgccggcgatattcaggaaatggccgaaa

SEQ ID NO: 692026 - DNA, 75 bp, synthetic construct
  source 1..75: mol_type = other DNA
gcaggttgcggaaatgtagtgatggcctgggcgaccaataccgagtcaggttttgaatttcagacctggggtgaa

SEQ ID NO: 692027 - DNA, 75 bp, synthetic construct
  source 1..75: mol_type = other DNA
aacaaacagattatgacaaatgtataacagaagaagaaatcaagttgcttcgagacgaaaagaataagctcgatg

SEQ ID NO: 692028 - DNA, 75 bp, synthetic construct
  source 1..75: mol_type = other DNA
gaaaatggtgtgaaactttatctggaaaacgaatctaaaatcaggaaggaaaaagagaaaatagatgatttaaaa

SEQ ID NO: 692029 - DNA, 75 bp, synthetic construct
  source 1..75: mol_type = other DNA
agcgttatggcgatgtggtcgaactgaaagccgagaagattgacgacgattctgcgcttaacggcaaatgggcgt

SEQ ID NO: 692030 - DNA, 75 bp, synthetic construct
  source 1..75: mol_type = other DNA
ctgattgtacggaaatcgtcggaatcgaaatcagtaaaactgactggaccccgcttagcgactggaaaatatttc

SEQ ID NO: 692031 - DNA, 75 bp, synthetic construct
  source 1..75: mol_type = other DNA
cggcctttagttgaaattagacttagccaggcacaatgggctgctatggttagcagttttggtgtgggcgaaggt

SEQ ID NO: 692032 - DNA, 75 bp, synthetic construct
  source 1..75: mol_type = other DNA
acaacgatctgccaaaactgacgcctgatctgcagcagatagaaacacgtaatgtactaaaagcgtgcataaatg

SEQ ID NO: 692033 - DNA, 75 bp, synthetic construct
  source 1..75: mol_type = other DNA
ttttgaatttcagacctggggtgaaaacagacgtattccggtggatttggatgggttacggttggtttcgtttct

SEQ ID NO: 692034 - DNA, 75 bp, synthetic construct
  source 1..75: mol_type = other DNA
aaaatgtccctccgcgcttacgtggacggctcgcaatctggctactggaagtgcgtgccggtgtgtatgttggtg

SEQ ID NO: 692035 - DNA, 75 bp, synthetic construct
  source 1..75: mol_type = other DNA
cagtcccacactctggtgcagcacatccagcgcggctggtcattcttcaatgaagaaatgaacgagtttgtcgat

SEQ ID NO: 692036 - DNA, 75 bp, synthetic construct
  source 1..75: mol_type = other DNA
gtaatcccaatgtcatgcaggcgaccgacgcgttctcccgttcactgaaagaaatcacccgttgggactggccgt

SEQ ID NO: 692037 - DNA, 75 bp, synthetic construct
  source 1..75: mol_type = other DNA
tggcagtctctaacccgctcgatctgcgcgatgacgccagcagcgagcattatgtcaaaacgctggacattctgc

SEQ ID NO: 692038 - DNA, 75 bp, synthetic construct
  source 1..75: mol_type = other DNA
tgacttccaataccgcaaaaagcgcatcttctgttgcaacaggcgattgccgaaggggctacgtcgctcgatacc

SEQ ID NO: 692039 - DNA, 75 bp, synthetic construct
  source 1..75: mol_type = other DNA
tcgccggatattccacataaatcggaagttcagggcgtcatgctgtacctgcgtacagccaatgaagtccagcaa

SEQ ID NO: 692040 - DNA, 75 bp, synthetic construct
  source 1..75: mol_type = other DNA
taaaaatggcctggccgcaggcgcggatccacggcctgttggtgcaaagtatggctaaccgtgctggcgctcagg

SEQ ID NO: 692041 - DNA, 75 bp, synthetic construct
  source 1..75: mol_type = other DNA
aagtattaattgaagcggtaaagcatcatccccgcagcaagtatgtttctctgctgacgaactggtgcggcgagc

SEQ ID NO: 692042 - DNA, 75 bp, synthetic construct
  source 1..75: mol_type = other DNA
tggattgccagcgatagcaccgaagcggtacatattgctgaacagattggttatccggtggcgctgaaattacgc

SEQ ID NO: 692043 - DNA, 75 bp, synthetic construct
  source 1..75: mol_type = other DNA
acatttaaccagaaaattcttcaggggaaagttattcgcgttctcgatggcgataccattgaagtattgcaggat

SEQ ID NO: 692044 - DNA, 75 bp, synthetic construct
  source 1..75: mol_type = other DNA
atgagacatttttttaatgttctttcctttgctgttgccctgttgccagctacattgtgtgctgctcagattcag

SEQ ID NO: 692045 - DNA, 75 bp, synthetic construct
  source 1..75: mol_type = other DNA
gttaacagtgtgctgaccgataccatcgctgatatgtctcaggacaccagcatccacgaattcatcaagcagaac

SEQ ID NO: 692046 - DNA, 75 bp, synthetic construct
  source 1..75: mol_type = other DNA
caggcttatcgaagcggggctggtcgatgccgccattgtgggtggcgcagacaccctgagccggatgccgattaa

SEQ ID NO: 692047 - DNA, 75 bp, synthetic construct
  source 1..75: mol_type = other DNA
cggttttcacagcctcgaatcgctctcgccaaccttatgtcagccgttcggtcgtgaccgcgcgggcatcaccat

SEQ ID NO: 692048 - DNA, 75 bp, synthetic construct
  source 1..75: mol_type = other DNA
atcgatggtggttaacgccctgtttggcgaacgcgtaccgtgcagctccaccaaacatttgaccggacacacgct

SEQ ID NO: 692049 - DNA, 75 bp, synthetic construct
  source 1..75: mol_type = other DNA
tacgacgtattgatcaaacagaagagatcctcggtgtcacacgagcgatctctgaccctgataacatcgatgccg

SEQ ID NO: 692050 - DNA, 75 bp, synthetic construct
  source 1..75: mol_type = other DNA
agttgggactggccgtgcaagctggtgctggaacactgcgacgccatgacatcttcttcccccgaaaaggctttt

SEQ ID NO: 692051 - DNA, 75 bp, synthetic construct
  source 1..75: mol_type = other DNA
cacgcgcaggctggttgcaggggcatccgcaggcggtcctggctggcgtggatggcgagcttccgcttatcccgg

SEQ ID NO: 692052 - DNA, 75 bp, synthetic construct
  source 1..75: mol_type = other DNA
ccttgctgggcgtcggtgaatcgagcgacgcttatcatatttcggccccgcatccacagggcgaaggcgcaattc

SEQ ID NO: 692053 - DNA, 75 bp, synthetic construct
  source 1..75: mol_type = other DNA
ttatcggtgcatatccctgtgcaccttcttttcaccaaagaagtgaagaggaagagaaagatttctggcgacaat

SEQ ID NO: 692054 - DNA, 75 bp, synthetic construct
  source 1..75: mol_type = other DNA
ggcatcaagttattagaaatccatgctgctgctgatgttcagcaccgcatcgaaatattacgcaatggcattcac

SEQ ID NO: 692055 - DNA, 75 bp, synthetic construct
  source 1..75: mol_type = other DNA
attgaagggcgcaatacaaggcactgttgcaaagttagcgatgaggcagccttttgtcttattcaaaggccttac

SEQ ID NO: 692056 - DNA, 75 bp, synthetic construct
  source 1..75: mol_type = other DNA
ccaaacatttgaccggacacacgctgggcgcagcgggcattaccgaggcagcaattagtatgttgattttacagc

SEQ ID NO: 692057 - DNA, 75 bp, synthetic construct
  source 1..75: mol_type = other DNA
aaaaattcgctgcgcaccgctcgcgcaacaatcagatcctgctggcggcgctggcgcagctccagccgcaggttg

SEQ ID NO: 692058 - DNA, 75 bp, synthetic construct
  source 1..75: mol_type = other DNA
atggcatgaacacgctccctacctggattgccagcgatagcaccgaagcggtgcatattgccgaacagattggtt

SEQ ID NO: 692059 - DNA, 75 bp, synthetic construct
  source 1..75: mol_type = other DNA
cgagcgcatcgcgattgtgcttggcaccagcacctccggcctgcatgaaggcgacacgcacgttaacctgcgcac

SEQ ID NO: 692060 - DNA, 75 bp, synthetic construct
  source 1..75: mol_type = other DNA
ccaaacatttgaccggacacacgctgggcgcggcgggcattaccgaggcggcaatcagcatgttgattttacagc

SEQ ID NO: 692061 - DNA, 75 bp, synthetic construct
  source 1..75: mol_type = other DNA
gcgccagagcgatgatcagcgggcgcaggcttatcgaagcggggctggtcgatgccgccattgtgggtggcgcag

SEQ ID NO: 692062 - DNA, 75 bp, synthetic construct
  source 1..75: mol_type = other DNA
tgaccgtgtacataagccccgacatcgtggaggcgctcaaggaacgccaccagcagaacgtaaaagcaggcattg

SEQ ID NO: 692063 - DNA, 75 bp, synthetic construct
  source 1..75: mol_type = other DNA
tccgtctgattccgttgagcgccagacggcagaacggttgattaacgcctgcccggcaggtcttttttcgctcac

SEQ ID NO: 692064 - DNA, 75 bp, synthetic construct
  source 1..75: mol_type = other DNA
ctagtttagctgggatcttggctgttattttggctggtttagttggggcgttgattgatgataattttgttgata

SEQ ID NO: 692065 - DNA, 75 bp, synthetic construct
  source 1..75: mol_type = other DNA
aaatattactaatgatgccgattaaatttattatattttccaccgtctcaccccgtatatctcgactacgattta

SEQ ID NO: 692066 - DNA, 75 bp, synthetic construct
  source 1..75: mol_type = other DNA
agacattatcccgaaaatcaccgaagctggcatggcgtatgcacatccattcccgttgtcctgcgtgcagtctga

SEQ ID NO: 692067 - DNA, 75 bp, synthetic construct
  source 1..75: mol_type = other DNA
ccatatctacaagcaagactactcgcgtatgcttatcgatcacgtcgaaaaaggcgcacgttgcaccgttgcttg

SEQ ID NO: 692068 - DNA, 75 bp, synthetic construct
  source 1..75: mol_type = other DNA
caggttctgtccatccagaagcgtaaaaaagaagtagaggaggccggtaaggtatttttcgctacgcgcaaacgt

SEQ ID NO: 692069 - DNA, 75 bp, synthetic construct
  source 1..75: mol_type = other DNA
gagcagcgacggggattccgaagccaaaaatccccttcagcaggcggtgaaggatgctcaggctgcactgcagga

SEQ ID NO: 692070 - DNA, 75 bp, synthetic construct
  source 1..75: mol_type = other DNA
ctcaggaaaaccggagcagacctgcatccgctgcatccacccggatgaggagcccctgagaaatttactgggcat

SEQ ID NO: 692071 - DNA, 75 bp, synthetic construct
  source 1..75: mol_type = other DNA
ggtaaatctgaaaaaagatatggggcgagttactgaacgggtggtggatgcggttaatttggcgctcattctcaa

SEQ ID NO: 692072 - DNA, 75 bp, synthetic construct
  source 1..75: mol_type = other DNA
tagtccaccacgcgcctatccgcctgagaattaaagctaaaagtagctggtcgatgcttgaatatgtctttaacg

SEQ ID NO: 692073 - DNA, 75 bp, synthetic construct
  source 1..75: mol_type = other DNA
tcctgaggcatgcggccagttcattaaaacagtcaggtgcgctgccagcctctctggaggacgtgaaaatagtgc

SEQ ID NO: 692074 - DNA, 75 bp, synthetic construct
  source 1..75: mol_type = other DNA
ggcgtgctgttaaccttcgatgattttctgtcgggaatcgaaaccttcggcgagcgcattcaaccactgatgcag

SEQ ID NO: 692075 - DNA, 75 bp, synthetic construct
  source 1..75: mol_type = other DNA
tatcctgagttacaggtgcattttgaattgttcgatcggcaaattgatttagtgcaggataatattgatctggat

SEQ ID NO: 692076 - DNA, 75 bp, synthetic construct
  source 1..75: mol_type = other DNA
tctggcaggcgaagtgcggtgatatctcgggcgctgatgccaaagagaaaatttctgcgggttatttccgcgtta

SEQ ID NO: 692077 - DNA, 75 bp, synthetic construct
  source 1..75: mol_type = other DNA
cgaggcgtctgaacgccgtcagcaggaaatggaagccgctgataccgaaccgtttgcggtgtggctggaaaaaca

SEQ ID NO: 692078 - DNA, 75 bp, synthetic construct
  source 1..75: mol_type = other DNA
agttgcgcgtctgcgtagagtttctggcggcgtggtgccagcaacggctgggcaagcccgccgaaggctatcagg

SEQ ID NO: 692079 - DNA, 75 bp, synthetic construct
  source 1..75: mol_type = other DNA
tatctgcaaaaatatcccctgccacaatcattacaggaattaagccgtcatgactgcctggtgactaaagagcgt

SEQ ID NO: 692080 - DNA, 75 bp, synthetic construct
  source 1..75: mol_type = other DNA
gggcactggaaggtaaagggattatgctgcgttccgaatgggatgtgctgccgtttctggagagtggcaaactgg

SEQ ID NO: 692081 - DNA, 75 bp, synthetic construct
  source 1..75: mol_type = other DNA
cttgcctattgtgaatacaaggaggccagcctgctgaaactggaagctgccctgttacagctgccaccgggtaaa

SEQ ID NO: 692082 - DNA, 75 bp, synthetic construct
  source 1..75: mol_type = other DNA
ctatccgacagtcatcagttttctcctgaattacaggaggctgttagtcgactggtacacgaagagatacagata

SEQ ID NO: 692083 - DNA, 75 bp, synthetic construct
  source 1..75: mol_type = other DNA
atgaaaattggcgtattcgtacctatcggcaacaacggctggttgatctcgacccacgcaccgcagtacatgccg

SEQ ID NO: 692084 - DNA, 75 bp, synthetic construct
  source 1..75: mol_type = other DNA
aatacagggtttaaattaaataaacctttacgcacgcgtcttattcagcaagctcaaggttatccatggttattg

SEQ ID NO: 692085 - DNA, 75 bp, synthetic construct
  source 1..75: mol_type = other DNA
ttactttaggggatgaaaatccagcgtactcaatgtggaatcggctaaaagattatagggttgaaaagaaacttg

SEQ ID NO: 692086 - DNA, 75 bp, synthetic construct
  source 1..75: mol_type = other DNA
gatatttggacctttcgagaggtggtctcggagtatggctctaagcgtactccgcctgctgacacgcttgtagct

SEQ ID NO: 692087 - DNA, 75 bp, synthetic construct
  source 1..75: mol_type = other DNA
caaatttcaggggctacaggaacactacggaaataaacattgatgagggaatgacgggtattgtcgggcgtaatg

SEQ ID NO: 692088 - DNA, 75 bp, synthetic construct
  source 1..75: mol_type = other DNA
accgcgcaaatcgataccttgcaccgcgagcgttacggcaaagataccggtcatttcggcatgattgacgccatt

SEQ ID NO: 692089 - DNA, 75 bp, synthetic construct
  source 1..75: mol_type = other DNA
attgatttactggcgtggtggatgcagcgaaccgatctcactttctctccggcgctaaaaaaactgatggatcag

SEQ ID NO: 692090 - DNA, 75 bp, synthetic construct
  source 1..75: mol_type = other DNA
aggcgtgggtggcaaaaaaagcggggcagatagttgggcgtattaccgcgcaaatagataccttgcaccgcgagc

SEQ ID NO: 692091 - DNA, 75 bp, synthetic construct
  source 1..75: mol_type = other DNA
agccgggcagatagttgggcgaattaccgcgcaaatcgataccttgcaccgtgagcgttacggtgaagataccgg

SEQ ID NO: 692092 - DNA, 75 bp, synthetic construct
  source 1..75: mol_type = other DNA
gatgatccgcaggtttttgccgcgttgtttggtgcagcggaagcgtggttgaagtcacaaggtgcaagtaagatc

SEQ ID NO: 692093 - DNA, 75 bp, synthetic construct
  source 1..75: mol_type = other DNA
agcgggcctttcagcctgaatatcaatcaggaaagcggattactgattgaaggtttcgacactccgccctgtgcg

SEQ ID NO: 692094 - DNA, 75 bp, synthetic construct
  source 1..75: mol_type = other DNA
aggaaggatgactggacaaactgtctatttcatagagcctgaacacatcgagcaacttctcgctgatcctgagct

SEQ ID NO: 692095 - DNA, 75 bp, synthetic construct
  source 1..75: mol_type = other DNA
gatgaggccggacggcaggtggcgaagtcgtatattaaaggcgggcactgccctggctcagagggctataccttc

SEQ ID NO: 692096 - DNA, 75 bp, synthetic construct
  source 1..75: mol_type = other DNA
gcctgcagtacacggctgaaacattgccatccacactgcatgccctggtcgatgaggccggacggcaagtggcga

SEQ ID NO: 692097 - DNA, 75 bp, synthetic construct
  source 1..75: mol_type = other DNA
tgtttggcgcagcggaagcgtggttgaagtcacaaggtgcaagtaagatcagcggtcctttcagcctgaatatca

SEQ ID NO: 692098 - DNA, 75 bp, synthetic construct
  source 1..75: mol_type = other DNA
tcaacggcactatatccaacgaaactaccctgctctgtaatgcccgtgatctgcacgcttttcttggtgttggaa

SEQ ID NO: 692099 - DNA, 75 bp, synthetic construct
  source 1..75: mol_type = other DNA
aatatccggcagtgtttctgcctttcctgtcgtggccggttgattttgcagacagatgctcgagggggcgtggtt

SEQ ID NO: 692100 - DNA, 75 bp, synthetic construct
  source 1..75: mol_type = other DNA
ggtttttgccgcgttgtttggcgcagcggaagcgtggttgaagtcacaaggtgcaagtaagatcagcgggccttt

SEQ ID NO: 692101 - DNA, 75 bp, synthetic construct
  source 1..75: mol_type = other DNA
gcaggtgattacaccggttcgcaggaaggttattttagctatggcgctggcggggctggcggcattaaccagcct

SEQ ID NO: 692102 - DNA, 75 bp, synthetic construct
  source 1..75: mol_type = other DNA
caagtgtcattttaatataacaaaacaatgtttttacgcattacccattggatttgcccctatatttccagacac

SEQ ID NO: 692103 - DNA, 75 bp, synthetic construct
  source 1..75: mol_type = other DNA
caagtgtcattttaatataacaaacaatgtttttacgcattacccatatacccccttcaacaaaacagtatttaa

SEQ ID NO: 692104 - DNA, 75 bp, synthetic construct
  source 1..75: mol_type = other DNA
ttttccgacggacagctcagggaaatggggaaccatacgcaactgttggcgcagggcggcctgtatcaacggctc

SEQ ID NO: 692105 - DNA, 75 bp, synthetic construct
  source 1..75: mol_type = other DNA
cccatgattttattagcgctctgccagaaggttacaacactcgagtcggggaacgtggggtatttctctccggcg

SEQ ID NO: 692106 - DNA, 75 bp, synthetic construct
  source 1..75: mol_type = other DNA
gtggatctgcgtgatatgcagacggacaccctgatgaagcaactctcttttgtgtttcaggagtcgacacgatag

SEQ ID NO: 692107 - DNA, 75 bp, synthetic construct
  source 1..75: mol_type = other DNA
ctgctaagggaggcgacacgacttgaccaagcaagcgcccttttcgaacgggcaaaaccaatgctgaaaagcctt

SEQ ID NO: 692108 - DNA, 75 bp, synthetic construct
  source 1..75: mol_type = other DNA
tataaccaaccggactcgcgacacattgctccgcgaagcagcaaaacttgatcccgccaactatatggtgcatag

SEQ ID NO: 692109 - DNA, 75 bp, synthetic construct
  source 1..75: mol_type = other DNA
attctgcgtggtgtggcgcaacagcgggcgcgtgaggcgcgtttacgtgctgcgcaacagcaggaggctgcatga

SEQ ID NO: 692110 - DNA, 75 bp, synthetic construct
  source 1..75: mol_type = other DNA
ccgcttgtgcaggaaagcgtcataaaaacactactagatcgaataaattcgaatgcatttcccgttagtttacaa

SEQ ID NO: 692111 - DNA, 75 bp, synthetic construct
  source 1..75: mol_type = other DNA
acgcgtaccattgattgtaggtcgtaaccccaataacgaacattatctcgataccaaagccgagaaaatgggtca

SEQ ID NO: 692112 - DNA, 75 bp, synthetic construct
  source 1..75: mol_type = other DNA
gttgatgtcgattacattttggttcaccaaaacagggggatcaaaggacgtggaggcgatcgccgtagcaaagac

SEQ ID NO: 692113 - DNA, 75 bp, synthetic construct
  source 1..75: mol_type = other DNA
tcctgaagggcagtatggtctggaagctgctttccgttccgtattcccgattcagagctatagcggtaattccga

SEQ ID NO: 692114 - DNA, 75 bp, synthetic construct
  source 1..75: mol_type = other DNA
acggtaactccaccactggcgacgccatttatatgcgcggtgccgatacctctaacagtatttatattgatggca

SEQ ID NO: 692115 - DNA, 75 bp, synthetic construct
  source 1..75: mol_type = other DNA
cacacgatcacgatgccttgttggatcagatccaacactacctgatggatcactatcagattgagcacgccacca

SEQ ID NO: 692116 - DNA, 75 bp, synthetic construct
  source 1..75: mol_type = other DNA
aattattttatgtgatggcgcattcgttctttatgcgcaatatcgagacggtgagttttttgatgtagtccgtga

SEQ ID NO: 692117 - DNA, 75 bp, synthetic construct
  source 1..75: mol_type = other DNA
gcgtgggtgcgttttttgcgggtgagaacggtaactccaccactggcgacgccatttatatgcgcggtgctgata

SEQ ID NO: 692118 - DNA, 75 bp, synthetic construct
  source 1..75: mol_type = other DNA
ccgaagggcaaactaacgcggatgacacgctggttgtcgaagcatcaacgccttcgctttatgcgccacaacaat

SEQ ID NO: 692119 - DNA, 75 bp, synthetic construct
  source 1..75: mol_type = other DNA
ttcgatacgctgcaaatcacccgtgattttgagctaaacggcggagttcggctggacaattatcatactgaatac

SEQ ID NO: 692120 - DNA, 75 bp, synthetic construct
  source 1..75: mol_type = other DNA
gctcgtactgatgtaagaacctatatggaggtcgctccaggcaatgctattgagaagggggccggccgaaaaggg

SEQ ID NO: 692121 - DNA, 75 bp, synthetic construct
  source 1..75: mol_type = other DNA
cagcagccacggcccctttatctaccctgttctagctgtgcacgcccaaacaggggagcctattcataagtaccg

SEQ ID NO: 692122 - DNA, 75 bp, synthetic construct
  source 1..75: mol_type = other DNA
tactgtcctccctgttacgccttttctcagggatacggtattgacggagcaataagagagagcctgcccgccggc

SEQ ID NO: 692123 - DNA, 75 bp, synthetic construct
  source 1..75: mol_type = other DNA
tatatgctgccccgccagacagcgccgccatgcttcaggctggaaactttcgggaaaagaagggttcgtcaacca

SEQ ID NO: 692124 - DNA, 75 bp, synthetic construct
  source 1..75: mol_type = other DNA
cgtaattattttatgtgatggcgcattcgttctttatgcgcaatatcgagacggtgagtttttcgatattgtccg

SEQ ID NO: 692125 - DNA, 75 bp, synthetic construct
  source 1..75: mol_type = other DNA
gtgcggctgcatgaaataggtgactttcgggcagaaataacaccactttacgcagcgccatcagcgccggtaatt

SEQ ID NO: 692126 - DNA, 75 bp, synthetic construct
  source 1..75: mol_type = other DNA
ctggttccgccgcggcacactggacgtcaatcaggtcattggtgataccaccgcggtgcgcctgaatgtgatggg

SEQ ID NO: 692127 - DNA, 75 bp, synthetic construct
  source 1..75: mol_type = other DNA
atcctgaggtaaagacccggatgagtgaaaccatctggctggagccggcaaatgaacgcacggtatttctgcaaa

SEQ ID NO: 692128 - DNA, 75 bp, synthetic construct
  source 1..75: mol_type = other DNA
tggctctggttgccggcatggcacaggctgacagcaacagtgattaccgggccggttctgattttgctcaccaga

SEQ ID NO: 692129 - DNA, 75 bp, synthetic construct
  source 1..75: mol_type = other DNA
tcgtgccactgtgagcttatatgtgtcgctgtacaacatcttcgtcagcctgttgagcatcctgggcttcgccag

SEQ ID NO: 692130 - DNA, 75 bp, synthetic construct
  source 1..75: mol_type = other DNA
gaacccgttcgctgttgcgcagaagacgcacgttgtaaacggaactcttggctatgaagcacaactggttaacgc

SEQ ID NO: 692131 - DNA, 75 bp, synthetic construct
  source 1..75: mol_type = other DNA
cgggtctggaactccaagaagtttggtcccggaatattattgtattcatcatcttatttgaaggagcataggtac

SEQ ID NO: 692132 - DNA, 75 bp, synthetic construct
  source 1..75: mol_type = other DNA
tcagatgaaatccttgcaacaaatcaagagcaggttaatgttttgattgagcatttgcaggttttaaggaaaaaa

SEQ ID NO: 692133 - DNA, 75 bp, synthetic construct
  source 1..75: mol_type = other DNA
tgacgtcagtaccggcgtggaatttacccgcgaaacgcagaccaactacggcgttaatccggtgacgttaccggc

SEQ ID NO: 692134 - DNA, 75 bp, synthetic construct
  source 1..75: mol_type = other DNA
caacgataacaccaccattcgcaatactacccgttggtcgcgcgtgaagcaggattacctgatgacggcgattat

SEQ ID NO: 692135 - DNA, 75 bp, synthetic construct
  source 1..75: mol_type = other DNA
ctatacccagcaaaaagcaaccatcaaaaacggcaaagatgttgcccaggatggttcctcatcgctgccgtatac

SEQ ID NO: 692136 - DNA, 75 bp, synthetic construct
  source 1..75: mol_type = other DNA
cggcgcggtgggaacgccagcgtttaccgaaggttactgggtcgccgatgccaaccggggtatcgggttaatcgc

SEQ ID NO: 692137 - DNA, 75 bp, synthetic construct
  source 1..75: mol_type = other DNA
tcgcctcaatcaataagagcggctaccgttatcatccgggcgagccaagaactttcctgctcaccgccaatatgc

SEQ ID NO: 692138 - DNA, 75 bp, synthetic construct
  source 1..75: mol_type = other DNA
tggagccagtatcaggcaaccgatgatatttccgttggtgcgggcgcacgctatatcggcagtatgcataaaggt

SEQ ID NO: 692139 - DNA, 75 bp, synthetic construct
  source 1..75: mol_type = other DNA
ttattctgtggctgctgctttccggaacagctgctgcacaggaatatacaacatattcagtactggacaaaccgg

SEQ ID NO: 692140 - DNA, 75 bp, synthetic construct
  source 1..75: mol_type = other DNA
actgaaacaggtaaccagcataaataccagacccgtgtggtttcaaatgcgaacaaggttaacctgaaatttgaa

SEQ ID NO: 692141 - DNA, 75 bp, synthetic construct
  source 1..75: mol_type = other DNA
gtgcagatacccgtttaattcaggattatctcgggcatcgaaatattcgccatactgtgcgttataccgccagta

SEQ ID NO: 692142 - DNA, 75 bp, synthetic construct
  source 1..75: mol_type = other DNA
gtaaagaagttcaggctatgatgcaggcggtttgctatggaccaacggggctgcgagattattgccttattttac

SEQ ID NO: 692143 - DNA, 75 bp, synthetic construct
  source 1..75: mol_type = other DNA
tgctggggatccctcacgatgcccactgtctggcattgttgccgggcagccgtggtgcggaagtcgaaatgctta

SEQ ID NO: 692144 - DNA, 75 bp, synthetic construct
  source 1..75: mol_type = other DNA
agtgctcggtcgtctgcgtcgcttactgcatattcgtgccgatctgacaaagcgttttggcgaactgaagccaga

SEQ ID NO: 692145 - DNA, 75 bp, synthetic construct
  source 1..75: mol_type = other DNA
ttgcactggtcagttccactctggccctttcagggtgtggtgcgatgagcactgcaatcaagaagcgtaaccttg

SEQ ID NO: 692146 - DNA, 75 bp, synthetic construct
  source 1..75: mol_type = other DNA
ggttaacctgaaatttgaagaggcgaagcctgttctcgaagaccagctggccaaatcaattgctaatatattgta

SEQ ID NO: 692147 - DNA, 75 bp, synthetic construct
  source 1..75: mol_type = other DNA
caaccaggttaatctgaagtttgaagaggctaaacctcatctggaagaccagctggcaaaatcaatcgccaatat

SEQ ID NO: 692148 - DNA, 75 bp, synthetic construct
  source 1..75: mol_type = other DNA
cggcgttggactggctaccggtctgattggcatggccgcggatgcaatggtggaagatataaattacacaatgat

SEQ ID NO: 692149 - DNA, 75 bp, synthetic construct
  source 1..75: mol_type = other DNA
caacatctgaagtcagaactgataatgttgctgctctccgccagggaacctccggtgcaaaagtgcagaccagca

SEQ ID NO: 692150 - DNA, 75 bp, synthetic construct
  source 1..75: mol_type = other DNA
ggttaacctgaaatttgaagaggcgaagcctgttctcgaagaccagctggccaaatcaatcgcaaatattctctg

SEQ ID NO: 692151 - DNA, 75 bp, synthetic construct
  source 1..75: mol_type = other DNA
ggttaacctgaagtttgaagaagcgaagcctgtactggaagagcagctggctaaatccatcgcgaacatcctgta

SEQ ID NO: 692152 - DNA, 75 bp, synthetic construct
  source 1..75: mol_type = other DNA
ctgcctggcgttgctgcctggcagtcgtggcgcggaagttgagatgcttagtgccgatttcctgaaaacggccca

SEQ ID NO: 692153 - DNA, 75 bp, synthetic construct
  source 1..75: mol_type = other DNA
atacgttgatatctacggctatcatctgccgcgcccgctgcactttggtacacagggtgaagggatggtcggtgt

SEQ ID NO: 692154 - DNA, 75 bp, synthetic construct
  source 1..75: mol_type = other DNA
cgcggattgctgcggccagtcgcctgcaccacgggtggctacggcctgttcgatgacgccgccttgcagcgactg

SEQ ID NO: 692155 - DNA, 75 bp, synthetic construct
  source 1..75: mol_type = other DNA
tgctacggccggtcgcgtacaccacgggcggctacggcttgttcgatgacaccgcgttgcaacggctgcgctttg

SEQ ID NO: 692156 - DNA, 75 bp, synthetic construct
  source 1..75: mol_type = other DNA
tctgctacgtcctgaagacttacgcgttgaagagattaacgacgataaccacgctgaaggcctgattggttatgt

SEQ ID NO: 692157 - DNA, 75 bp, synthetic construct
  source 1..75: mol_type = other DNA
atgcgtaaaagcagactgatatttttttgtgtgtgtctggtactgtctggcacagtatatgcagaggaaaatgca

SEQ ID NO: 692158 - DNA, 75 bp, synthetic construct
  source 1..75: mol_type = other DNA
gcagtggcagaactgactgagaagcagaaacgtctgttcagggagtacggtgtgacaggtaccccatccgtattt

SEQ ID NO: 692159 - DNA, 75 bp, synthetic construct
  source 1..75: mol_type = other DNA
gtattactggatacaggccaatgtcctcaaagccgataaaatggatttgcgtacagcccagggattcctgagtca

SEQ ID NO: 692160 - DNA, 75 bp, synthetic construct
  source 1..75: mol_type = other DNA
ggtattaccggctataactcaaattctgccggtgccacactcggtgtaggccttgctgctggtctggtgggtatg

SEQ ID NO: 692161 - DNA, 75 bp, synthetic construct
  source 1..75: mol_type = other DNA
gagttattgcaggaagagtgtgagccgcaaaaactggctgcggcgctgttaccgctgttggcgaacgggaaaacc

SEQ ID NO: 692162 - DNA, 75 bp, synthetic construct
  source 1..75: mol_type = other DNA
cttctgctgctctgcgtatgtgctgactacccgcaaagacatgtctttcctcggcggtatgctgatggcaggtat

SEQ ID NO: 692163 - DNA, 75 bp, synthetic construct
  source 1..75: mol_type = other DNA
gtgggtatggctgcagatgcgatggtggaagatgtgaactataccatgatcacggatgtgcagattgcagagcgt

SEQ ID NO: 692164 - DNA, 75 bp, synthetic construct
  source 1..75: mol_type = other DNA
ctcgtctggggaatatctccccggcagccttcagggaaaaatatcatcagatggctgcttaaaaaaagaacaaat

SEQ ID NO: 692165 - DNA, 75 bp, synthetic construct
  source 1..75: mol_type = other DNA
cgcaacaacttgtctcgccggaacgctgaatttactgcagctcggtgatgaagaagcccactacctcggcgtgaa

SEQ ID NO: 692166 - DNA, 75 bp, synthetic construct
  source 1..75: mol_type = other DNA
acccgtcgctggcccgcgacattatcgaaggtatccgcgccaaaatgcgcagtctggtcagccagggctatctca

SEQ ID NO: 692167 - DNA, 75 bp, synthetic construct
  source 1..75: mol_type = other DNA
aatgatagtgcctagtttatacttgaaaaagtattaccaatcttatttagcaaatgcagatattgagattgtacc

SEQ ID NO: 692168 - DNA, 75 bp, synthetic construct
  source 1..75: mol_type = other DNA
ttcttggtgtgccgggactggacaccaaagaggttgccgtcgcactggcatcagtctgtcagaagctgcgcgctt

SEQ ID NO: 692169 - DNA, 75 bp, synthetic construct
  source 1..75: mol_type = other DNA
tattgccgttgcgaaaagtgacggtaacttcgatcaggacgagaaactggcctcccgcgagatcgctatcgcgtt

SEQ ID NO: 692170 - DNA, 75 bp, synthetic construct
  source 1..75: mol_type = other DNA
cagaaatgcccgtaggattattaaccagtctgcttggtgggccttattttatgtggttgattctgcgtaaccgga

SEQ ID NO: 692171 - DNA, 75 bp, synthetic construct
  source 1..75: mol_type = other DNA
tcagacgattacccgcataaccccaacactgaggacttaagccaattctcttatacggtgagaaataacgattat

SEQ ID NO: 692172 - DNA, 75 bp, synthetic construct
  source 1..75: mol_type = other DNA
tgttgatcagggtgtaaaacgcattctcgaacaactgaagaaaaacggacagtatgacaatacaattattctctt

SEQ ID NO: 692173 - DNA, 75 bp, synthetic construct
  source 1..75: mol_type = other DNA
acaaaaccgcggcttcgattactttatggggttccatgcagcgggaacagcctattacaactcaccttcgctgtt

SEQ ID NO: 692174 - DNA, 75 bp, synthetic construct
  source 1..75: mol_type = other DNA
catggtggcaattgaagctatgggtgctggtaagcctgttttagtgagtacgcgtggggggatgacggaatttgt

SEQ ID NO: 692175 - DNA, 75 bp, synthetic construct
  source 1..75: mol_type = other DNA
gaaccgctggagatggggccgacagaatttaaactgctgcacttttttatgacgcatcctgagcgcgtgtacagc

SEQ ID NO: 692176 - DNA, 75 bp, synthetic construct
  source 1..75: mol_type = other DNA
ccagaggggaagaagaagatcgcgtgcgcggccttgaaaccggcgcggatgactatatcaccaagccgttttcgc

SEQ ID NO: 692177 - DNA, 75 bp, synthetic construct
  source 1..75: mol_type = other DNA
ccgttgctgtatgtgtccgtattgccgtatcgagtgacggcgtaagttcggaagaaaagcagaaaatgatgggct

SEQ ID NO: 692178 - DNA, 75 bp, synthetic construct
  source 1..75: mol_type = other DNA
tgaagcccataagcaccgttcagccacgcgaaaccagtgacactccggtagccaatacccgctcgacaaaaacga

SEQ ID NO: 692179 - DNA, 75 bp, synthetic construct
  source 1..75: mol_type = other DNA
tgaagcccataagcaccgttcagccacgcgaaaccactgacacgccggtaacgaatacccgcgcggcaaaaacga

SEQ ID NO: 692180 - DNA, 75 bp, synthetic construct
  source 1..75: mol_type = other DNA
ccccctcaataaaccagtgctgattaccaatgtgcagagcgcaattgcaaaggccggtaaaaaaggcacgctggc

SEQ ID NO: 692181 - DNA, 75 bp, synthetic construct
  source 1..75: mol_type = other DNA
atcactgatgtgcttactgccagtggtaaggcgggtgaatccggtacgctggcccgctcgctggatgccatcgct

SEQ ID NO: 692182 - DNA, 75 bp, synthetic construct
  source 1..75: mol_type = other DNA
ctacttaaccagaacgatgttaccacacttatccgcaaagacggctttcgcttctggggttcccgctgcctgagt

SEQ ID NO: 692183 - DNA, 75 bp, synthetic construct
  source 1..75: mol_type = other DNA
ctggtgttaccacgctgattcgtgctgatggtttccgcttctggggtaaccgtaattgctccgatgacccgctgt

SEQ ID NO: 692184 - DNA, 75 bp, synthetic construct
  source 1..75: mol_type = other DNA
tcaacgctgtacatgcggaaattgctctcagcggttgtgggatttattactcgacgccacacagcaaggagttaa

SEQ ID NO: 692185 - DNA, 75 bp, synthetic construct
  source 1..75: mol_type = other DNA
gatgcggaaaccctcaaggccggaaaactgtatatcgactacgactatacaccggtgcctcctctcgaaaacctg

SEQ ID NO: 692186 - DNA, 75 bp, synthetic construct
  source 1..75: mol_type = other DNA
tccgttaactgttgaggtggcatctaataaagacaaggtcgttataaaagatggggtcactttaccatttcatgg

SEQ ID NO: 692187 - DNA, 75 bp, synthetic construct
  source 1..75: mol_type = other DNA
ttgcgtacgctgcatcgccgagagtttaactggtcaccgcgtgatattcgtcagggacgggatggttttctgcaa

SEQ ID NO: 692188 - DNA, 75 bp, synthetic construct
  source 1..75: mol_type = other DNA
ggaacaatgtttctattagttatttttgcctgtgcctaaaaaaattaaactatacacacagtattgttagtgcgc

SEQ ID NO: 692189 - DNA, 75 bp, synthetic construct
  source 1..75: mol_type = other DNA
taaaatatttaatatacttaaagattttatgaatatttccgctattcagtttgaacaattctcaacaaaatcttt

SEQ ID NO: 692190 - DNA, 75 bp, synthetic construct
  source 1..75: mol_type = other DNA
tcgctggaacgctaaatttactccagcttggtgatgaagaagcccattacctcggcgtcaacgtaaagcgtaaac

SEQ ID NO: 692191 - DNA, 75 bp, synthetic construct
  source 1..75: mol_type = other DNA
tggtggaccaacagcgaaagacccaagatgaaatcaacaacgaagtcattctggccgtcaaagaggtgttgtcta

SEQ ID NO: 692192 - DNA, 75 bp, synthetic construct
  source 1..75: mol_type = other DNA
aaactggtgattgtcggagatccttttgccagtaaaaaaggcgaaaaagctgaatatcagaaaaaagttctggat

SEQ ID NO: 692193 - DNA, 75 bp, synthetic construct
  source 1..75: mol_type = other DNA
gcagctggcgatgctgctggaaggtatcgactggcgacagcccaagcggctgctgacctccctgaccatgctgta

SEQ ID NO: 692194 - DNA, 75 bp, synthetic construct
  source 1..75: mol_type = other DNA
ctcgcggtcttcgctgaacgccgtcagaaccgcaacggcccctatgtcgtattacgcagcgtcacgctgaattaa

SEQ ID NO: 692195 - DNA, 75 bp, synthetic construct
  source 1..75: mol_type = other DNA
acaggtcactaccagtggcatggcagtgtctgccattactacggacgtgaagttcaggatatcagcggcgttctc

SEQ ID NO: 692196 - DNA, 75 bp, synthetic construct
  source 1..75: mol_type = other DNA
agcccttcaattaatcctggataatgaattaccgctctcctccgtttcagaaagtataggaatatctagcatgcc

SEQ ID NO: 692197 - DNA, 75 bp, synthetic construct
  source 1..75: mol_type = other DNA
ctgtattatgcctgaccgcaggaacgccgatttattcctttgccgctgacccgtgcgaagttgttctttgcatgt

SEQ ID NO: 692198 - DNA, 75 bp, synthetic construct
  source 1..75: mol_type = other DNA
atgattaatcgtaccaagctggagcacatcctcgaatatgccagacagcagaggcatactggtcagcattgtaaa

SEQ ID NO: 692199 - DNA, 75 bp, synthetic construct
  source 1..75: mol_type = other DNA
gaggcatattggtcagcattgtaaaattccaccaggagatatggttgaaatcatggagattgccatgcgcaaggc

SEQ ID NO: 692200 - DNA, 75 bp, synthetic construct
  source 1..75: mol_type = other DNA
ggcgaaaaggctgccctaattatcctcccgaatttaaacagcagctcgttgctgcctcctgtgagcccgggatat

SEQ ID NO: 692201 - DNA, 75 bp, synthetic construct
  source 1..75: mol_type = other DNA
agcagctacgacaactcacattgtggatgatgggcaatcttggacaggcgcaatggccgacgttattggttgcca

SEQ ID NO: 692202 - DNA, 75 bp, synthetic construct
  source 1..75: mol_type = other DNA
tttttcttttccggtagtgctggtgctgtatgaacagatggtttttgccatcgtcggaagtttagtagtctgtac

SEQ ID NO: 692203 - DNA, 75 bp, synthetic construct
  source 1..75: mol_type = other DNA
ggcagaaaaagcgcagaacagcgtcacaattagcatcattatcgcgctattcacgattgttccggcgatctgtta

SEQ ID NO: 692204 - DNA, 75 bp, synthetic construct
  source 1..75: mol_type = other DNA
agttcaggacatacgcggcgttctggctgtatttgctgaacgtcgtcaggaccgcaatggtccctatgtcattct

SEQ ID NO: 692205 - DNA, 75 bp, synthetic construct
  source 1..75: mol_type = other DNA
cgctggtgggcgaaaacggcgcgggtaaatccaccatgatgaaagtgcttactggtatctatactcgcgatgccg

SEQ ID NO: 692206 - DNA, 75 bp, synthetic construct
  source 1..75: mol_type = other DNA
gtatcgataaagcgtttccgggcgtaaaagctctctcgggagccgcgttaaatgtctatccaggtcgtgtgatgg

SEQ ID NO: 692207 - DNA, 75 bp, synthetic construct
  source 1..75: mol_type = other DNA
atgaagattattagcaaacgccaggcgatgacgatttaccgccagcatcctcagttccggttgtttcgcttctgt

SEQ ID NO: 692208 - DNA, 75 bp, synthetic construct
  source 1..75: mol_type = other DNA
aattccggatattcccggtgtgctggcggtatacgccgaacgccgccaggaccgcaacggaccgtatgcctgcct

SEQ ID NO: 692209 - DNA, 75 bp, synthetic construct
  source 1..75: mol_type = other DNA
cgttccggatatcgcaggtgtcctcgcggtatacgccgaacgccgccaggaccgcaacgggccttatgcctgcct

SEQ ID NO: 692210 - DNA, 75 bp, synthetic construct
  source 1..75: mol_type = other DNA
accgaccgatgcgctgaccgataccgaaactgaatccctgttccgtgttatccgcgaactgaaatcgcaggggcg

SEQ ID NO: 692211 - DNA, 75 bp, synthetic construct
  source 1..75: mol_type = other DNA
cgttaatgatgtttcatttaccttacgcaaaggtgaaattcttggcgtctctggtttgatgggcgcaggtcgtac

SEQ ID NO: 692212 - DNA, 75 bp, synthetic construct
  source 1..75: mol_type = other DNA
tgctggcttatggcggatatgatgcggcagaaaaagcgcagaacagcgccacaattagcatcattatcgcgctat

SEQ ID NO: 692213 - DNA, 75 bp, synthetic construct
  source 1..75: mol_type = other DNA
catgcatgaagggcatctcagcggggaatttactcgtgagcaggccacccaagaagtgttaatggctgccgctgt

SEQ ID NO: 692214 - DNA, 75 bp, synthetic construct
  source 1..75: mol_type = other DNA
catgcatgaagggcatctcagcggggaatttactcgtgagcaggccacccaggaagtgttaatagctgccgctgt

SEQ ID NO: 692215 - DNA, 75 bp, synthetic construct
  source 1..75: mol_type = other DNA
ttccatcggtgaccagcaaatggttgaaatcgccaaagtgctgagctttgagtcgaaagtcatcattatggatga

SEQ ID NO: 692216 - DNA, 75 bp, synthetic construct
  source 1..75: mol_type = other DNA
tcttgcagagcgtaaattactggattatcgggatgtagaaaaaaagcttgttcaaattaccccgcatcactattc

SEQ ID NO: 692217 - DNA, 75 bp, synthetic construct
  source 1..75: mol_type = other DNA
tccggcctctacactctgatcctgcgctgccgcgatgcggtaactcctggtactatcccctatcgtttccgcaaa

SEQ ID NO: 692218 - DNA, 75 bp, synthetic construct
  source 1..75: mol_type = other DNA
accatgttctgctacatcgtcggtgtgagcaaatgcctgcgtgatatccagacgcacgcggagtacatcaacgac

SEQ ID NO: 692219 - DNA, 75 bp, synthetic construct
  source 1..75: mol_type = other DNA
cataccttcaaaaatatgcctgataatgagaagtcgaagtttattgaggaagctgatttttatgcaaaaaagata

SEQ ID NO: 692220 - DNA, 75 bp, synthetic construct
  source 1..75: mol_type = other DNA
tgttaacaatgccagttaccactctggtagtaaatttgacacatcaaaagtcaatccgttgcaaacgatggaaat

SEQ ID NO: 692221 - DNA, 75 bp, synthetic construct
  source 1..75: mol_type = other DNA
atgacagctacaaaaagcacgtccattttttctttcgaatcccaagccgatatacgggtaatcgtcattaatggt

SEQ ID NO: 692222 - DNA, 75 bp, synthetic construct
  source 1..75: mol_type = other DNA
gaaattgggtgaccctgtaatttatcgagtgaaagttacagagatggatttgcaatatctttctgctaaaatgaa

SEQ ID NO: 692223 - DNA, 75 bp, synthetic construct
  source 1..75: mol_type = other DNA
cgtcagaccggactgagcgaagatatcgatccttttaataccgcacagaaaaaaacagagaaaccagaggaagaa

SEQ ID NO: 692224 - DNA, 75 bp, synthetic construct
  source 1..75: mol_type = other DNA
cgccaggcttttgctgatatagcacgcgaagcattttctaatagtgtgaatatcccgccaacgctttataaaaat

SEQ ID NO: 692225 - DNA, 75 bp, synthetic construct
  source 1..75: mol_type = other DNA
atcgggcgcggcggcggagctgaccaccatgttctgctacatcgtcggtgtgagcaaatgcctgcgtgatatcca

SEQ ID NO: 692226 - DNA, 75 bp, synthetic construct
  source 1..75: mol_type = other DNA
gaatctgctgaaccagttacaggaagacgggcacgacgtatcgggcgcggcggcggagctgaccaccatgttctg

SEQ ID NO: 692227 - DNA, 75 bp, synthetic construct
  source 1..75: mol_type = other DNA
aatctcaaggttctgacccttatgtggtcaaggtaactcaaaaagacatcgacttgtgggaagtggaatggtccg

SEQ ID NO: 692228 - DNA, 75 bp, synthetic construct
  source 1..75: mol_type = other DNA
atgagaacattagatgaggcgattgccagccgttcaccggaaagccaggcgcgaattaaagaaatggcagatgag

SEQ ID NO: 692229 - DNA, 75 bp, synthetic construct
  source 1..75: mol_type = other DNA
cccttgttatacctgaaaggttttcatgccttgcaggcgtatcgcatcggtcactggctgtggaatcaggggcgt

SEQ ID NO: 692230 - DNA, 75 bp, synthetic construct
  source 1..75: mol_type = other DNA
gggtagcattgcaacatttaccattccgttgattaccgcgcatctttcagaaagaagtattgccgatattatgtg

SEQ ID NO: 692231 - DNA, 75 bp, synthetic construct
  source 1..75: mol_type = other DNA
accgttcgcccaacaacattactgatgctgtacacctttatctcatttattgctctgttggtgatgctgccaact

SEQ ID NO: 692232 - DNA, 75 bp, synthetic construct
  source 1..75: mol_type = other DNA
tcactggctgtggaatcagggccgtcgcgcactggctatttttctgcaaaaccaggtttctgtgacgttccaggt

SEQ ID NO: 692233 - DNA, 75 bp, synthetic construct
  source 1..75: mol_type = other DNA
cgcgaagattggcgcaggttccgtggtgctgcaaccggtgccgccacataccaccgccgctggcgttccggcacg

SEQ ID NO: 692234 - DNA, 75 bp, synthetic construct
  source 1..75: mol_type = other DNA
atgattggcgcgggcgcgaaaatcctcggcaatattgaagttggtcgcggcgcgaagattggcgcaggttccgtg

SEQ ID NO: 692235 - DNA, 75 bp, synthetic construct
  source 1..75: mol_type = other DNA
ttgccagcatcctttttgtatcggacgtaaacgggccagcattgaaagaatgcatattttatttaataactcccg

SEQ ID NO: 692236 - DNA, 75 bp, synthetic construct
  source 1..75: mol_type = other DNA
atcccaccaggctgcacgttatcacttcccgtactcatgccgtgacactttcagcggtatgaatgtggtttacgg

SEQ ID NO: 692237 - DNA, 75 bp, synthetic construct
  source 1..75: mol_type = other DNA
tcctcatcagtcacggctatagcgaagcacaggcgggttcactgcatggtttgctgcaactagccacagcagctc

SEQ ID NO: 692238 - DNA, 75 bp, synthetic construct
  source 1..75: mol_type = other DNA
ggctttttactggtgctgtttattggcgtacgcagtcgaaaagaagcacaacatccatcattaaaggagaatgtt

SEQ ID NO: 692239 - DNA, 75 bp, synthetic construct
  source 1..75: mol_type = other DNA
ttgcttttgtcattggttttacctctgctggaggtgttgtgcaaattggcctgacgttaatggctgaacgtttcc

SEQ ID NO: 692240 - DNA, 75 bp, synthetic construct
  source 1..75: mol_type = other DNA
caataacatcattattgcttatgtttttggtttcctggcgggcatggcgaacagttttctcgatgctggtaccta

SEQ ID NO: 692241 - DNA, 75 bp, synthetic construct
  source 1..75: mol_type = other DNA
acactcatttcagtgaacgttttcttggtgcaatgatggtcgggatgataccggatttaagtcaggcggccagtg

SEQ ID NO: 692242 - DNA, 75 bp, synthetic construct
  source 1..75: mol_type = other DNA
ttgcgtccgattcatcgaaacgagggcctgaacataggaattattgcctggattatttttgacctgatagccggc

SEQ ID NO: 692243 - DNA, 75 bp, synthetic construct
  source 1..75: mol_type = other DNA
cctccactctcgtctgttggagcgtgctgcgcgtgttaacgccgaatacgttgaagctttcaccaaaggtgaagt

SEQ ID NO: 692244 - DNA, 75 bp, synthetic construct
  source 1..75: mol_type = other DNA
gcaaccgcgtctgaatccgcagcactgcaatacctggcaccgtacgctggttgcgcaatgggtgaatacttccgt

SEQ ID NO: 692245 - DNA, 75 bp, synthetic construct
  source 1..75: mol_type = other DNA
ttaaagacaagcttgccatagcactttacgagaagcagaaactagaaaggtctttatattatcgtttaggcaaaa

SEQ ID NO: 692246 - DNA, 75 bp, synthetic construct
  source 1..75: mol_type = other DNA
cgaaatggatttggtaaatggagactctttttatttgcaaacaggtagtatgaatgttaatgggttgccattaga

SEQ ID NO: 692247 - DNA, 75 bp, synthetic construct
  source 1..75: mol_type = other DNA
gatacaatgcctgatgcgcgttattttagtatggcattacgttttaaagggcaaggttcacttcgtattgaacct

SEQ ID NO: 692248 - DNA, 75 bp, synthetic construct
  source 1..75: mol_type = other DNA
tgatctgcgcagcgaacatggagctgagccttgaaccgccccggaaatcctggagactggatctgctggctaagc

SEQ ID NO: 692249 - DNA, 75 bp, synthetic construct
  source 1..75: mol_type = other DNA
gaaggccacttcgtagaagacctggtaacttgccgtagcaaaggcgaatccagtttgttcagccgcgaccaggtt

SEQ ID NO: 692250 - DNA, 75 bp, synthetic construct
  source 1..75: mol_type = other DNA
atggtttactcctataccgagaaaaaacgcattcgtaaggattttggtaaacgtccacaagttctggatgtacct

SEQ ID NO: 692251 - DNA, 75 bp, synthetic construct
  source 1..75: mol_type = other DNA
acactctgggtgcaccaatcgacggtaaaggtccgctggatcacgacggcttctctgctgtagaagcaatcgctc

SEQ ID NO: 692252 - DNA, 75 bp, synthetic construct
  source 1..75: mol_type = other DNA
gcgcgactctgtaggtgcggttgttatgggtccgtacgctgaccttgccgaaggcatgaaagttaagtgtactgg

SEQ ID NO: 692253 - DNA, 75 bp, synthetic construct
  source 1..75: mol_type = other DNA
gcgtgttatcgtttcccagctgcaccgtagtccgggggtcttttttgactccgacaaaggtaaaacccactcttc

SEQ ID NO: 692254 - DNA, 75 bp, synthetic construct
  source 1..75: mol_type = other DNA
tcctcctcttaactatagtatcaagaagcaattgctcgaaagtgctggagtttttgatgaaatcaaacacgataa

SEQ ID NO: 692255 - DNA, 75 bp, synthetic construct
  source 1..75: mol_type = other DNA
atataggcggattacgcgcttcgttggccagcccggcggaagtcgatgaactcacaggctgtgtcttcggcgcga

SEQ ID NO: 692256 - DNA, 75 bp, synthetic construct
  source 1..75: mol_type = other DNA
gtcacatcggtgggctacgcgcttcgctggccagcccggcggaagtcgatgaactgacaggctgtgtctttggcg

SEQ ID NO: 692257 - DNA, 75 bp, synthetic construct
  source 1..75: mol_type = other DNA
caatgtgctttacccaatgctaaaagcggagctgttcctgcgctgggagcgtgacgagttgccgggtgttattga

SEQ ID NO: 692258 - DNA, 75 bp, synthetic construct
  source 1..75: mol_type = other DNA
gcctatggggggagcagctctgcttcctcaaattccggtggtagctcatcaacggccagcaataccaggaacgag

SEQ ID NO: 692259 - DNA, 75 bp, synthetic construct
  source 1..75: mol_type = other DNA
taaatccatcatactgaacactgcggattatttacgcattgcgcaaccagaactggtcaacttccgtcgtactgc

SEQ ID NO: 692260 - DNA, 75 bp, synthetic construct
  source 1..75: mol_type = other DNA
taaatccgttattttgaaaaccgcgggtaatgactccaacttattgatagtgttttatgttcagataatgcccga

SEQ ID NO: 692261 - DNA, 75 bp, synthetic construct
  source 1..75: mol_type = other DNA
gcgcgagcaagcggtgctgatgacctactatcgcaacaacattgcgcatatgttggtgctgccttcgctgatggc

SEQ ID NO: 692262 - DNA, 75 bp, synthetic construct
  source 1..75: mol_type = other DNA
gtgagtgtcttaattatggcgttactcatgcctcaggagattatcttgccaagatggatgatgatgatttttatg

SEQ ID NO: 692263 - DNA, 75 bp, synthetic construct
  source 1..75: mol_type = other DNA
gaaccacttcgcaaagttatcaaatactgccaatccaagaatattcctgtagtattttggaataaggaggatcca

SEQ ID NO: 692264 - DNA, 75 bp, synthetic construct
  source 1..75: mol_type = other DNA
ttattcacggcgggccgcgtgttttcacttattacacgccgaaagaagagtccattaagctgttccacgattatc

SEQ ID NO: 692265 - DNA, 75 bp, synthetic construct
  source 1..75: mol_type = other DNA
catcgaagcggtgcgtccggcctggttaacgccgacggtcaataatattgctgccgatctgatggtacgcattaa

SEQ ID NO: 692266 - DNA, 75 bp, synthetic construct
  source 1..75: mol_type = other DNA
taccttactccacggactctaccgttccttcagccagcgccagcgagcttatcgatcacgcgctgcaaatgaaca

SEQ ID NO: 692267 - DNA, 75 bp, synthetic construct
  source 1..75: mol_type = other DNA
gtgttgtgacgccattttcggcgcaggttaatgccatcaaaacgtcattgcgtaagctggagattaatgacaaag

SEQ ID NO: 692268 - DNA, 75 bp, synthetic construct
  source 1..75: mol_type = other DNA
atttatcgatagtttgatcgctaaagcgcaacaagagcaggcggcgtgccaacagaatatcaactttgcgcagga

SEQ ID NO: 692269 - DNA, 75 bp, synthetic construct
  source 1..75: mol_type = other DNA
ttcgccagagcatgtagtgacgcttttgcatgaacgtttaacttcacagtttatgcaacttcagcaaatcgaacc

SEQ ID NO: 692270 - DNA, 75 bp, synthetic construct
  source 1..75: mol_type = other DNA
cactgatgccaccggatttgcaaaaaatcgcgcagtatatggagaaaaattaccgtaccggcgaaacctggtgga

SEQ ID NO: 692271 - DNA, 75 bp, synthetic construct
  source 1..75: mol_type = other DNA
ccctgctgcgaccggcggtggagctgaacactgccgtggtggcggcaacggcggccggtgtctgtgtgacagcgc

SEQ ID NO: 692272 - DNA, 75 bp, synthetic construct
  source 1..75: mol_type = other DNA
cttccctgctgccgttactggaaaaactcaccaccggcaggattgcagagctgctggcgccggactatatggata

SEQ ID NO: 692273 - DNA, 75 bp, synthetic construct
  source 1..75: mol_type = other DNA
atgcctcactttgtactgaccccagaaagttggacagttaaacacgaggcatataggtctgattccgatattcaa

SEQ ID NO: 692274 - DNA, 75 bp, synthetic construct
  source 1..75: mol_type = other DNA
tctttggtgggctcatcagcgcctgttatgcgttacgcgatagtgatcagatagtcatcagcgttgggcatccgg

SEQ ID NO: 692275 - DNA, 75 bp, synthetic construct
  source 1..75: mol_type = other DNA
ccgcagggctggctggcttctcaccggctgatgaagacggtgcggtgggatacggtcgatcagctcccttcgctg

SEQ ID NO: 692276 - DNA, 75 bp, synthetic construct
  source 1..75: mol_type = other DNA
gctgaatgatgctgttgaaaagctcaataagatgggtatcgctacgaaattggttaatcgtgtccacagcaaaat

SEQ ID NO: 692277 - DNA, 75 bp, synthetic construct
  source 1..75: mol_type = other DNA
ggcagtggtgaaaacagccgcctggtgaccagcgccatcactgccgacacggagtaccgtttcagtggcctgccg

SEQ ID NO: 692278 - DNA, 75 bp, synthetic construct
  source 1..75: mol_type = other DNA
ggagtaccgtttcagtggcctgccgctcggggaatacaccctgacggtcagggcgataaacagctacggccagca

SEQ ID NO: 692279 - DNA, 75 bp, synthetic construct
  source 1..75: mol_type = other DNA
tggccccggactacggcgacctcaacgacccgcgtccggtgttcgactggcagcaggccattcgccagcgggcga

SEQ ID NO: 692280 - DNA, 75 bp, synthetic construct
  source 1..75: mol_type = other DNA
aaaacacgtctgataaagacatgagtgggctgcagggcaaaattgctgatgctgtgaaagcaaaagggtatcagg

SEQ ID NO: 692281 - DNA, 75 bp, synthetic construct
  source 1..75: mol_type = other DNA
tatggctgcagatgcgatggtggaagatgtgaactataccatgatcacggatgtacagattgcagagcgtactaa

SEQ ID NO: 692282 - DNA, 75 bp, synthetic construct
  source 1..75: mol_type = other DNA
ctactggattcaggccaatgtgctgaaggccgataagatggacctgcgggagtctcagggatggctgaaccgggg

SEQ ID NO: 692283 - DNA, 75 bp, synthetic construct
  source 1..75: mol_type = other DNA
atgaaacaaaacattaagttaatggcagtgaccgccatattgtcttccactctggtcttgtctggttgtggtgcg

SEQ ID NO: 692284 - DNA, 75 bp, synthetic construct
  source 1..75: mol_type = other DNA
ttattgtcataagttcagtgttggtgttgtctggttgtggtgcgatgggtactgcaattaaaaaacgaaacctcg

SEQ ID NO: 692285 - DNA, 75 bp, synthetic construct
  source 1..75: mol_type = other DNA
actcggtgtgggccttgctgccggtctggtgggtatggctgcagatgcgatggtggaagatgtgaactataccat

SEQ ID NO: 692286 - DNA, 75 bp, synthetic construct
  source 1..75: mol_type = other DNA
aacagccagaatcgctcgcagaggacccggaaaccctcagtatcagctgtgaggtaacgttccggcacgggacgc

SEQ ID NO: 692287 - DNA, 75 bp, synthetic construct
  source 1..75: mol_type = other DNA
aggacggcccaggtacagggtaactttaacaacctgattatgctgcgcgtcagggaaaaccgcaccgccgagctg

SEQ ID NO: 692288 - DNA, 75 bp, synthetic construct
  source 1..75: mol_type = other DNA
cggtcgctggtcgcgctggggcaacgtccagactttggccttatccagcgttacgtgaacaatatcggcgatctg

SEQ ID NO: 692289 - DNA, 75 bp, synthetic construct
  source 1..75: mol_type = other DNA
gtgtggtctcaaatgcgaacaaggttaatctgaaatttgaagaggcgaagcctgttctcgaagaccagttggcca

SEQ ID NO: 692290 - DNA, 75 bp, synthetic construct
  source 1..75: mol_type = other DNA
cagtgccaacaaagttaacctgaaatttgaagaagccaaaccggttcttgaagatcagttagcaaaatctattgc

SEQ ID NO: 692291 - DNA, 75 bp, synthetic construct
  source 1..75: mol_type = other DNA
cgatggtggaagatatcaactacaccatggtaactgatgtgcagatcgcagagcgcacttccgcgcaggtgacga

SEQ ID NO: 692292 - DNA, 75 bp, synthetic construct
  source 1..75: mol_type = other DNA
cggcctgcgccgccagccaggaggaaaggctgagcctcatttcccgcgcaaatgaggccctgtcgctctgggata

SEQ ID NO: 692293 - DNA, 75 bp, synthetic construct
  source 1..75: mol_type = other DNA
atggcgctcattgtgctagtgggatgttcgacaccgccacccgaacagaaagcgcaacgggtaaaagttgatccg

SEQ ID NO: 692294 - DNA, 75 bp, synthetic construct
  source 1..75: mol_type = other DNA
atattgttatcgcaggcgttcagcgcagtgagctggaaaagcaggcgatggaaaccgtcattaacgcactggtaa

SEQ ID NO: 692295 - DNA, 75 bp, synthetic construct
  source 1..75: mol_type = other DNA
ttcccgattggtcgtctggataaagattcccaggggctgattttcctcaccaaccacggcgatctggtgaataaa

SEQ ID NO: 692296 - DNA, 75 bp, synthetic construct
  source 1..75: mol_type = other DNA
tatccgtaccgcgctggcacagtatcgtgaactggcagcgttctctcagtttgcatccgacctcgacgatgcaac

SEQ ID NO: 692297 - DNA, 75 bp, synthetic construct
  source 1..75: mol_type = other DNA
ctggaaattcgatggggtatgtacaagttgtaaccattgcttttaattatattttgtgtttgttgttattattct

SEQ ID NO: 692298 - DNA, 75 bp, synthetic construct
  source 1..75: mol_type = other DNA
tacacatcaatggccgcgaatggaaagaaattcgccaggtactgatatatgcctttatctatcagggcgtgccca

SEQ ID NO: 692299 - DNA, 75 bp, synthetic construct
  source 1..75: mol_type = other DNA
cccggcagtcgataaatactcaaccccattgttatatctgaaaggttttcacgccttgcaggcgtatcgcatcgg

SEQ ID NO: 692300 - DNA, 75 bp, synthetic construct
  source 1..75: mol_type = other DNA
ctgctattgctatccgtgaagtggtggaagaagcctacgccgccgacccggaaatgatcgcctctgcggcctgtg

SEQ ID NO: 692301 - DNA, 75 bp, synthetic construct
  source 1..75: mol_type = other DNA
cccggcagtagataaatactcaacgccattgttatatctgaaaggttttcatgccttgcaggcgtatcgcattgg

SEQ ID NO: 692302 - DNA, 75 bp, synthetic construct
  source 1..75: mol_type = other DNA
agctcatcgaaaattcctcttccgaggcaaaacctaaagcgaaggccaaaccgaaaacagcgggcatcaaacgtc

SEQ ID NO: 692303 - DNA, 75 bp, synthetic construct
  source 1..75: mol_type = other DNA
tgaacgtcagtttaagcggcattccgctgggtgagtggcgcgatttaactgacgatgagttaatcgacctgttta

SEQ ID NO: 692304 - DNA, 75 bp, synthetic construct
  source 1..75: mol_type = other DNA
cgaggcaaaacctaaagtgaaggccaaaccgaaaacagcgggcatcaaacgtccagtcgttaagatggaaaaaac

SEQ ID NO: 692305 - DNA, 75 bp, synthetic construct
  source 1..75: mol_type = other DNA
gctttccgtttatacctctgcatttatcgccgagattatccgcgccgggatccaggcggtgccttatggtcaaca

SEQ ID NO: 692306 - DNA, 75 bp, synthetic construct
  source 1..75: mol_type = other DNA
acatctggcaaaaacagatcgcattaatgccagagtccttgcgcaaatggcggaggtcattaaccgacatccaga

SEQ ID NO: 692307 - DNA, 75 bp, synthetic construct
  source 1..75: mol_type = other DNA
tcgtgccacggttagcctgtatgtttcgctgtacaacatcttcgttagcctgttgagcattctgggcttcgccag

SEQ ID NO: 692308 - DNA, 75 bp, synthetic construct
  source 1..75: mol_type = other DNA
catgcggttggcccatggtgggatttggttgcgggtgtcaggcaggatttcagacctgcttctgcccggacctgg

SEQ ID NO: 692309 - DNA, 75 bp, synthetic construct
  source 1..75: mol_type = other DNA
ccctgtacatggcagcgcttgtcgcaacccgctttaacccggtaataaaggtgttttacatgcgactgcttgccg

SEQ ID NO: 692310 - DNA, 75 bp, synthetic construct
  source 1..75: mol_type = other DNA
ggttacctgtatacgcaagctgctgactatcctgaacgcaatgctcagaaagaacgaagaatggaatgaatcgta

SEQ ID NO: 692311 - DNA, 75 bp, synthetic construct
  source 1..75: mol_type = other DNA
tgtatatggccgcgcttgtcgcaacccgttttaatccggtaataaaagccttttacatgcgtctgcttgcagctg

SEQ ID NO: 692312 - DNA, 75 bp, synthetic construct
  source 1..75: mol_type = other DNA
atcgccgaaattatccgcgcagggatccaggcagtgccttatggtcaacatgaagcagctcggtcactgggatta

SEQ ID NO: 692313 - DNA, 75 bp, synthetic construct
  source 1..75: mol_type = other DNA
ccagtatctcaacatcgtcaaaaactcctctcttgccgccgctattggctatccggatatggtttcgctgtttgc

SEQ ID NO: 692314 - DNA, 75 bp, synthetic construct
  source 1..75: mol_type = other DNA
tacggttcgcgcctggcttttccagatccttgccgttgtcgccgtcgtcggcattgtaggctggctattccataa

SEQ ID NO: 692315 - DNA, 75 bp, synthetic construct
  source 1..75: mol_type = other DNA
ttgtaactgagagcagaacgccaattccgcctgttaccgatgccgaccggaaggctgcattcggcaatttacagg

SEQ ID NO: 692316 - DNA, 75 bp, synthetic construct
  source 1..75: mol_type = other DNA
gatctggcgaaacattgcgaatttgaagaagtggcgcatctgctgatccacagcaaactgccgacccgtgacgaa

SEQ ID NO: 692317 - DNA, 75 bp, synthetic construct
  source 1..75: mol_type = other DNA
aaaccggtcaactacgtcgcacatggcctgtcgccgctgtgatgatcattggtttacctttgctggcgcaatggc

SEQ ID NO: 692318 - DNA, 75 bp, synthetic construct
  source 1..75: mol_type = other DNA
ggagcgcgtggcggccaaacaggtgctgtcggaaatgaccgtagcggatatccgcaacaatccggtgatttccta

SEQ ID NO: 692319 - DNA, 75 bp, synthetic construct
  source 1..75: mol_type = other DNA
tcttgcctacgcatcagaggtttaccggatttatacctggataaagagcagtaaaggcatccgggttccgaccac

SEQ ID NO: 692320 - DNA, 75 bp, synthetic construct
  source 1..75: mol_type = other DNA
taccaggataaagagcagtaaaggcatccgggttccgaccacgaagaaatcactttcccaaattaacagtgtgca

SEQ ID NO: 692321 - DNA, 75 bp, synthetic construct
  source 1..75: mol_type = other DNA
ttatctggcaatagcgtttaaaaaatggggcgtcgcctgggaggccgttggtgcatacaatgcgggattcaggaa

SEQ ID NO: 692322 - DNA, 75 bp, synthetic construct
  source 1..75: mol_type = other DNA
tggaagaggctatcgatttctcccgccagatgcgtgaaatcaccctcggcgaaaacccgaacgtcaccattccgc

SEQ ID NO: 692323 - DNA, 75 bp, synthetic construct
  source 1..75: mol_type = other DNA
tcgccgtgccacgaacacgactgtgtgggatcgatggcgggcgttacctcggcctcgatgtttatgcacatcgtg

SEQ ID NO: 692324 - DNA, 75 bp, synthetic construct
  source 1..75: mol_type = other DNA
catggagagcggtcggcgcttacaatgctggttttcgcaacacagaggaacaggatcggcgcaggaaaacttatg

SEQ ID NO: 692325 - DNA, 75 bp, synthetic construct
  source 1..75: mol_type = other DNA
ttatctggcaatagcctttaaaaaatggggcgtcccctgggaggccgttggtgcatacaatgcgggattcaggaa

SEQ ID NO: 692326 - DNA, 75 bp, synthetic construct
  source 1..75: mol_type = other DNA
ttatctggcaatagcttttaaaaaatggggcgtctcctgggaggccgttggtgcatacaatgcgggattcaggaa

SEQ ID NO: 692327 - DNA, 75 bp, synthetic construct
  source 1..75: mol_type = other DNA
ttatctggcaatagcttttaaaaaatggggcgtcacctgggaggccgttggtgcatacaatgctggattcaggaa

SEQ ID NO: 692328 - DNA, 75 bp, synthetic construct
  source 1..75: mol_type = other DNA
ttatctggcaatagcgtttaaaaaatggggcgtcccctgggaggccgttggtgcatacaatgccggattcaggaa

SEQ ID NO: 692329 - DNA, 75 bp, synthetic construct
  source 1..75: mol_type = other DNA
ttatctggcaatagcgtttaaaaaatggggcgtctcctgggaggccgttggtgcatacaatgctggattcaggaa

SEQ ID NO: 692330 - DNA, 75 bp, synthetic construct
  source 1..75: mol_type = other DNA
ttatctggcaatagcgtttaaaaaatggggcgtcacctgggaggccgttggtgcatacaatgcaggattcaggaa

SEQ ID NO: 692331 - DNA, 75 bp, synthetic construct
  source 1..75: mol_type = other DNA
gcgagcagatggcgaagattttgcgtatgggcgctaacgaccagagcgtgatcgaccgcctcaactggatgcgtg

SEQ ID NO: 692332 - DNA, 75 bp, synthetic construct
  source 1..75: mol_type = other DNA
atgaaatccatgaattttaagcaaggctgcatattgagtgaactgggtgagagtcgtctgttacgggcggcactg

SEQ ID NO: 692333 - DNA, 75 bp, synthetic construct
  source 1..75: mol_type = other DNA
atggcgttaacacaccgcgaactctgtcaaattgcgtacaagttccttaagcgcaacgggttcaaggtttgtttt

SEQ ID NO: 692334 - DNA, 75 bp, synthetic construct
  source 1..75: mol_type = other DNA
atggcgttaacacaccgcgaactctgtcagattgcgtataagttccttaagcgtaacgggttcaaggtttgtttt

SEQ ID NO: 692335 - DNA, 75 bp, synthetic construct
  source 1..75: mol_type = other DNA
accacacgttgccagcaagcgggattgactatcgagcgtaatttaattggcgcgtactgcacctcactggatatg

SEQ ID NO: 692336 - DNA, 75 bp, synthetic construct
  source 1..75: mol_type = other DNA
aaagtgaccacagtggtcattgatgacgacgtcgcggtgaaagacagtctttataccgccgggcggcgcggtgtt

SEQ ID NO: 692337 - DNA, 75 bp, synthetic construct
  source 1..75: mol_type = other DNA
atgagccggaaacagcaacgtctggtaatttggatgaacggcatcaaagtcgggtactgggaaaaaagcaaaggg

SEQ ID NO: 692338 - DNA, 75 bp, synthetic construct
  source 1..75: mol_type = other DNA
cgccagaaccagagacgtcttgcctacgcatcagatgtttaccggatttataccgggataaaaagcagtaaggta

SEQ ID NO: 692339 - DNA, 75 bp, synthetic construct
  source 1..75: mol_type = other DNA
taccgggataaaaagcagtaaaggtatccagcttccggtcacgaagaaatcactttcagaaattatcagcgtgca

SEQ ID NO: 692340 - DNA, 75 bp, synthetic construct
  source 1..75: mol_type = other DNA
ttgctttgatcttgcaggtcgggattacaaaatagacccggatttactgagagcgatatcatggaaagaatcccg

SEQ ID NO: 692341 - DNA, 75 bp, synthetic construct
  source 1..75: mol_type = other DNA
ctgtgggtgaaaaatagccagctcgtgccaaatgattacaatcccaataatgtggcaccgccagagaagaaactg

SEQ ID NO: 692342 - DNA, 75 bp, synthetic construct
  source 1..75: mol_type = other DNA
atccctgcatgaacatttataccggtgcttattatctggcaatagcctttaaaaaatggggcgtctcctgggagg

SEQ ID NO: 692343 - DNA, 75 bp, synthetic construct
  source 1..75: mol_type = other DNA
ctggtgattgctttgatctggctggcagggattataaaattgaccctgacttgctgagagcaatatcatggaaag

SEQ ID NO: 692344 - DNA, 75 bp, synthetic construct
  source 1..75: mol_type = other DNA
ttatctggcaatagcatttaaaaaatggggcgtcacctgggaggccgttggtgcatacaatgcgggattcaggaa

SEQ ID NO: 692345 - DNA, 75 bp, synthetic construct
  source 1..75: mol_type = other DNA
ttggcgttgaatcagatgggggccagccagcgcggtgaagttctccttgcacattacggcggcgaactggcaatc

SEQ ID NO: 692346 - DNA, 75 bp, synthetic construct
  source 1..75: mol_type = other DNA
atgggagcaagccagcgcggcgaagttctcctggcacgttatggcggtgaactggcaatcaatgcggactctgac

SEQ ID NO: 692347 - DNA, 75 bp, synthetic construct
  source 1..75: mol_type = other DNA
aaagccccctactcaacacgcattcaggcggtcgtgctggcggtgaacaataacgccatgtcattcagtgaccgc

SEQ ID NO: 692348 - DNA, 75 bp, synthetic construct
  source 1..75: mol_type = other DNA
ttaacgtgggcgcgatccgcgaaagctgtttccgtcccgctgataaatggaccccgccgacgggggatgaactcc

SEQ ID NO: 692349 - DNA, 75 bp, synthetic construct
  source 1..75: mol_type = other DNA
ggccagaccgcacggcagttgctcgacgccagacaatcgctgcgtcgcccgctgaccgaagtcgatgtgaaggcc

SEQ ID NO: 692350 - DNA, 75 bp, synthetic construct
  source 1..75: mol_type = other DNA
gtattcccgcatcttgccggcgggacgtcaccggtgccgggatacagcacgatatttcctttttacagcagaacg

SEQ ID NO: 692351 - DNA, 75 bp, synthetic construct
  source 1..75: mol_type = other DNA
ggatgaagagaatctgcatgttgcttttaatgatgtggacttctgtctgaaagtacgcgaagcggggtatcgtaa

SEQ ID NO: 692352 - DNA, 75 bp, synthetic construct
  source 1..75: mol_type = other DNA
tctatacccatttcgagatcctgattctcgataatggcagcgtggagcaggagactctcgatttctttgcccaga

SEQ ID NO: 692353 - DNA, 75 bp, synthetic construct
  source 1..75: mol_type = other DNA
ggtcgaaggaagtcaggatcaggatctgctgttgcgttgcctgccgcatgtagcggcagaccagatagttcatat

SEQ ID NO: 692354 - DNA, 75 bp, synthetic construct
  source 1..75: mol_type = other DNA
ttgagctgcctgtaaagaaaaaagagcggggaaaaggtgatgatgccacatcactggcgctaaaccagatggggg

SEQ ID NO: 692355 - DNA, 75 bp, synthetic construct
  source 1..75: mol_type = other DNA
cgcaaggcagatcgcgttctggcagcgttatttatggtgctggcgaaccggtacgactggcagttattcattgag

SEQ ID NO: 692356 - DNA, 75 bp, synthetic construct
  source 1..75: mol_type = other DNA
atggcacagattttcattgatgcggagatcagctattcgcagaacgccattaaatcggcggtcgataccatgaag

SEQ ID NO: 692357 - DNA, 75 bp, synthetic construct
  source 1..75: mol_type = other DNA
agataaataatttatcatatggagtttacacatccgggggtaaggaaagtcagtttttttgtattggtataaagc

SEQ ID NO: 692358 - DNA, 75 bp, synthetic construct
  source 1..75: mol_type = other DNA
gtgtataacgcccttcaaaatcattcaagcgaagtaaaaacagagcatgtggttgagccagaatcacaaccacaa

SEQ ID NO: 692359 - DNA, 75 bp, synthetic construct
  source 1..75: mol_type = other DNA
taatcagtgcaggtcgatacgacgagaacgaagccactgtgggtgcagcagttgactacctgatcaacattctgg

SEQ ID NO: 692360 - DNA, 75 bp, synthetic construct
  source 1..75: mol_type = other DNA
tccagcatgtctaaacatattgatggctatgtggacctgtttggcagtgacctgaaaacattcaaggcgcaagtg

SEQ ID NO: 692361 - DNA, 75 bp, synthetic construct
  source 1..75: mol_type = other DNA
tttttaaatttaaaaattaattgtgctgatgatttttttttgatattaataattttactacatgtgatgatttgt

SEQ ID NO: 692362 - DNA, 75 bp, synthetic construct
  source 1..75: mol_type = other DNA
cgaggctggtgattgctttgatctggctggcagagattataaaattgaccctgacttgctgagagcaatatcatg

SEQ ID NO: 692363 - DNA, 75 bp, synthetic construct
  source 1..75: mol_type = other DNA
gccgcaccgaagttgctgtggtatacgatcctatgcgtaacgaactgttcaccgccactcgcggtcagggcgcac

SEQ ID NO: 692364 - DNA, 75 bp, synthetic construct
  source 1..75: mol_type = other DNA
tgcgccagaatgcccagggaattattgaattgcagggcgacagcgatgcggcgattgtgaaagggcttattgcgg

SEQ ID NO: 692365 - DNA, 75 bp, synthetic construct
  source 1..75: mol_type = other DNA
tgccagagtcaggtgtggattgtcatgcgccagaatgcgcagggaattattgaattacagggcgacagcgatgcg

SEQ ID NO: 692366 - DNA, 75 bp, synthetic construct
  source 1..75: mol_type = other DNA
ttacacatccgggggtaaggaaagtcagtttttttgtattggtataaagcgtgataatgtgactcttcccattca

SEQ ID NO: 692367 - DNA, 75 bp, synthetic construct
  source 1..75: mol_type = other DNA
agagattgcaggcgaattggttgcgtccagtatgtcgaaccatattgatggctacgttgatctgtttggaagcga

SEQ ID NO: 692368 - DNA, 75 bp, synthetic construct
  source 1..75: mol_type = other DNA
cctgatcaggctgatccgtattacgaatatgctcgtcacggaatcattacgtatgaccgcaaactgacagatgaa

SEQ ID NO: 692369 - DNA, 75 bp, synthetic construct
  source 1..75: mol_type = other DNA
ctctagaaatgaactgattgcaatcacaacctgcagttcatcagattattgtatggggcctaagtcggcaaaata

SEQ ID NO: 692370 - DNA, 75 bp, synthetic construct
  source 1..75: mol_type = other DNA
tggtttctatgccagtggtctgttccggtccggcgcttactttgatgtgattgccaaatatattcacaatgaaaa

SEQ ID NO: 692371 - DNA, 75 bp, synthetic construct
  source 1..75: mol_type = other DNA
cgaccatcaagccccgcagcgtcgatgaatatgaccgctcaggagaaaacgcacaatttcttgaatgggtatgga

SEQ ID NO: 692372 - DNA, 75 bp, synthetic construct
  source 1..75: mol_type = other DNA
acgccgttgcaggtggcggcgattgcggcgctggagggcgatcaacagtgcgtgcgcgacattgccgaacagtac

SEQ ID NO: 692373 - DNA, 75 bp, synthetic construct
  source 1..75: mol_type = other DNA
ctgatgcacgtaatcttcatctcgctgcgcaaggtctgttaaaaaaatctcgtcgtcgcgcgttgccgcaagata

SEQ ID NO: 692374 - DNA, 75 bp, synthetic construct
  source 1..75: mol_type = other DNA
atgataaggggccggtacgttcagccgattttgagcatcctcgtaaaggtgcaagcggctggtgggaatggaagc

SEQ ID NO: 692375 - DNA, 75 bp, synthetic construct
  source 1..75: mol_type = other DNA
cccattactggcttgctgccgtagatattcccgtggcgagcgataacccagtgcactatgcggatgccattcgtt

SEQ ID NO: 692376 - DNA, 75 bp, synthetic construct
  source 1..75: mol_type = other DNA
ctggtgcctaatcccagctacccgattcatatctacggtgcggtgattgccggggcgcaggtacgttcagtaccg

SEQ ID NO: 692377 - DNA, 75 bp, synthetic construct
  source 1..75: mol_type = other DNA
tggcgtatcggctttatggttggcaacaaaacgctggtcagcgcgttggcacgtattaaaagctatcacgattac

SEQ ID NO: 692378 - DNA, 75 bp, synthetic construct
  source 1..75: mol_type = other DNA
tcaacagtgcgtgcgcgacattgccgaacagtacaaacgccgccgtgatgtactggttaaagggctgcatgaagc

SEQ ID NO: 692379 - DNA, 75 bp, synthetic construct
  source 1..75: mol_type = other DNA
cttcgaaaaggttgtggcgctggcgaaacgctacgatgtgctggtggtccatgacctggcctatgcggacatcgt

SEQ ID NO: 692380 - DNA, 75 bp, synthetic construct
  source 1..75: mol_type = other DNA
atgaactggaacgcgctattcgcgaaagctatccgaaaccgaagatgatgatcctcggcttcccgtcgaacccaa

SEQ ID NO: 692381 - DNA, 75 bp, synthetic construct
  source 1..75: mol_type = other DNA
ctctctggaatttgccaaaaagctgctcaatgaagcgaaggtttgcgtctcgccgggtatcggttttggtgacta

SEQ ID NO: 692382 - DNA, 75 bp, synthetic construct
  source 1..75: mol_type = other DNA
attgaacagttaattcagcacatacaagataacggaccggtacgttcagccgattttgaacatccccgaaaaggg

SEQ ID NO: 692383 - DNA, 75 bp, synthetic construct
  source 1..75: mol_type = other DNA
aagcgttcaaaacactgtgcctgcatgaagggatcatcccggcgctggaatcctcccacgcccttgcccatgcac

SEQ ID NO: 692384 - DNA, 75 bp, synthetic construct
  source 1..75: mol_type = other DNA
ggcgcagtttaacgacctgctgaaaaattatgccgggcgtccgaccgcactcaccaaatgccagaacatcacggc

SEQ ID NO: 692385 - DNA, 75 bp, synthetic construct
  source 1..75: mol_type = other DNA
tcggcccacaacacgcgtatcttaacagcactggacgcgctgattacgtgtctattaccgatgatgaagcccttg

SEQ ID NO: 692386 - DNA, 75 bp, synthetic construct
  source 1..75: mol_type = other DNA
ggctcagttcaacgatctgctgaaaaactatgccggacgtccgaccgcgctgactaaatgccagaacattacggc

SEQ ID NO: 692387 - DNA, 75 bp, synthetic construct
  source 1..75: mol_type = other DNA
aagcgcgaagatttgctgcacggcggcgcgcataaaaccaaccaggtgctggggcaggcgttgctggcgaagcgg

SEQ ID NO: 692388 - DNA, 75 bp, synthetic construct
  source 1..75: mol_type = other DNA
aagccttcaaaacgctttgcctgcatgaagggatcatcccggcgctggaatcctcccacgccctggcccatgcgc

SEQ ID NO: 692389 - DNA, 75 bp, synthetic construct
  source 1..75: mol_type = other DNA
attccacgggcgtcattagtgcgagcgccttgtggggtcttttgctgttatacagcaccagatattccgccagct

SEQ ID NO: 692390 - DNA, 75 bp, synthetic construct
  source 1..75: mol_type = other DNA
accgattttgctggctggcagcaggcaacgcgagtgacattagggcgctgcccacacggtctctttagtgattgc

SEQ ID NO: 692391 - DNA, 75 bp, synthetic construct
  source 1..75: mol_type = other DNA
attatccccgtaaatgtggagaggttaggacaactctggctgcatattgatttgttgcctcttctcgaaacagct

SEQ ID NO: 692392 - DNA, 75 bp, synthetic construct
  source 1..75: mol_type = other DNA
ggaaagagaaggtcgcctgccggatgccgttatcgcctgtgttggcggcggttcgaatgccatcggcatgtttgc

SEQ ID NO: 692393 - DNA, 75 bp, synthetic construct
  source 1..75: mol_type = other DNA
gcggtctgatccgctgtcacggtttgcatatcgacccactggcgcgcgaagttcgcttgtgtggcgagttgatcg

SEQ ID NO: 692394 - DNA, 75 bp, synthetic construct
  source 1..75: mol_type = other DNA
atggctgatatctttaatgttagcttgttggatgttttacctcctaacttagctagagatcccaacgtgatagct

SEQ ID NO: 692395 - DNA, 75 bp, synthetic construct
  source 1..75: mol_type = other DNA
ctccggggattggctttggtgactacggcgacacgcatgtacgctttgcgctgattgaaaaccgtgaccgtattc

SEQ ID NO: 692396 - DNA, 75 bp, synthetic construct
  source 1..75: mol_type = other DNA
ctacccgtgagctacaacgctggcgattgattcttggcgaagcggcagaaacgacccttggtgctctggatggca

SEQ ID NO: 692397 - DNA, 75 bp, synthetic construct
  source 1..75: mol_type = other DNA
ccaggcgctggttaatgtcggcgcacaaatagccgccatgacgccgggcgagctggcatcatggcttgcggagaa

SEQ ID NO: 692398 - DNA, 75 bp, synthetic construct
  source 1..75: mol_type = other DNA
catctgatgaaccccgaagtactggctgccgcccgccggatagtgcgccaggttgttgaagaaattatggctcga

SEQ ID NO: 692399 - DNA, 75 bp, synthetic construct
  source 1..75: mol_type = other DNA
atttaacaaccaaagaaaaatttatagcttggtgtgcgggagatctacctctagagaatgaactaacggatatta

SEQ ID NO: 692400 - DNA, 75 bp, synthetic construct
  source 1..75: mol_type = other DNA
atattcattattctttctttcttgagaaaatgaattacacccttttaaatcggatagacaagagcataactcttg

SEQ ID NO: 692401 - DNA, 75 bp, synthetic construct
  source 1..75: mol_type = other DNA
gcgccaacctgcaacactggcacccgcaacacggcaagttgtatatcgaatccccccgctttaacagccgtatta

SEQ ID NO: 692402 - DNA, 75 bp, synthetic construct
  source 1..75: mol_type = other DNA
aatttcgatttcaaaagtactctgcgcgccaacctgcaacactggcacccgcaacacggcaagttgtatatcgaa

SEQ ID NO: 692403 - DNA, 75 bp, synthetic construct
  source 1..75: mol_type = other DNA
atccacacgctgtttccgcaacaggtgattgagcggctggaaagcgatgccgtactgcgctacggcattgaagat

SEQ ID NO: 692404 - DNA, 75 bp, synthetic construct
  source 1..75: mol_type = other DNA
atgttgctgagcgtgaaatcgctacactggcgggggggtttttccctgcatgaacagaatattcataacctgccg

SEQ ID NO: 692405 - DNA, 75 bp, synthetic construct
  source 1..75: mol_type = other DNA
cagccgctcgcaagatagtgcaccaggttgttgaagaaattatggcgcggctggccaaagaagttcgtcaggctt

SEQ ID NO: 692406 - DNA, 75 bp, synthetic construct
  source 1..75: mol_type = other DNA
caggcgctggtaaatgtcggcgcacaaatagccgccatgacaccgggcgagctggcatcatggcttgcggagaat

SEQ ID NO: 692407 - DNA, 75 bp, synthetic construct
  source 1..75: mol_type = other DNA
gccctgttatgaccgtgatatggcccaggcgctggttaatgtcggtgcacaaattgcggccatgacgccgggcga

SEQ ID NO: 692408 - DNA, 75 bp, synthetic construct
  source 1..75: mol_type = other DNA
aatgctatagatgacggtcctgaatataagattaatgaagacccaatggacaaagttgacaaagcattagcaaca

SEQ ID NO: 692409 - DNA, 75 bp, synthetic construct
  source 1..75: mol_type = other DNA
agaaagcggtgaacttgaaggtactgatcaggatgttcaatgggttatcgatccactggatggcactaccaactt

SEQ ID NO: 692410 - DNA, 75 bp, synthetic construct
  source 1..75: mol_type = other DNA
acgattccggcgtcatggctgcggcggctatcacgcattttttgttcggtcaggcggtgttttcgtacctcaatg

SEQ ID NO: 692411 - DNA, 75 bp, synthetic construct
  source 1..75: mol_type = other DNA
caaacaccgaagttctgcgcgcaaaagcgttagagaaggatctaacgctgcatgatggcgatgggcttttcctga

SEQ ID NO: 692412 - DNA, 75 bp, synthetic construct
  source 1..75: mol_type = other DNA
tatgggtaacccggacggtgcgactccgccgcatatcgtcgaaaaattatgtactgtggcccagcgcccggacac

SEQ ID NO: 692413 - DNA, 75 bp, synthetic construct
  source 1..75: mol_type = other DNA
tatgtggctttaatatgcgccacgacgacaccaccgtcgcgttggaagcggcgcatataaaatggaaacagcaag

SEQ ID NO: 692414 - DNA, 75 bp, synthetic construct
  source 1..75: mol_type = other DNA
gacctggagcatgtgacgattgcgagatacgaatgattattcgtctggcgagggggaaaacaataactgctctca

SEQ ID NO: 692415 - DNA, 75 bp, synthetic construct
  source 1..75: mol_type = other DNA
atctgatagagcgacagagtttgatgcaatggtggagtgattacgttcaagctcaaagatcaaatgctctggtag

SEQ ID NO: 692416 - DNA, 75 bp, synthetic construct
  source 1..75: mol_type = other DNA
gatgctttcctggatgaaattgaacgcaaagcaatccgaaagttcattaacagcattgaacacatcctgcgtgac

SEQ ID NO: 692417 - DNA, 75 bp, synthetic construct
  source 1..75: mol_type = other DNA
gtattgtggtgcaacaggcgcaggggttcgacgcgcaggggctgcacacgtccgatatccggcatacatatcaga

SEQ ID NO: 692418 - DNA, 75 bp, synthetic construct
  source 1..75: mol_type = other DNA
tgggtccgccccggtgaagcggttcgcacaagatggtcagatattgatatagaaaccggcatgtggaacattccg

SEQ ID NO: 692419 - DNA, 75 bp, synthetic construct
  source 1..75: mol_type = other DNA
tgcccactcgaagaaagatgaaataattgcagcctacaatcgtgcagagtatctcactgaacgggtggttctcat

SEQ ID NO: 692420 - DNA, 75 bp, synthetic construct
  source 1..75: mol_type = other DNA
attgcagcttacaatcgtgctgagtatctcgcagaacgggtagttctcatgcaatggtggagtgattatgtttca

SEQ ID NO: 692421 - DNA, 75 bp, synthetic construct
  source 1..75: mol_type = other DNA
tcgataaactcaaaaaatgccgtacacgcaatttccagacggttgcaggaggattaccggtgtcagacacggcgg

SEQ ID NO: 692422 - DNA, 75 bp, synthetic construct
  source 1..75: mol_type = other DNA
acgcaaaataagcacatggagtcggtgattcatctggcaaaaatttatgccaatacccactccccggtgatgatt

SEQ ID NO: 692423 - DNA, 75 bp, synthetic construct
  source 1..75: mol_type = other DNA
gcgagttatgtggtcgttaacactcaggcctctggcggcactgcaaatgcccttatcgatttttccatcacttat

SEQ ID NO: 692424 - DNA, 75 bp, synthetic construct
  source 1..75: mol_type = other DNA
atggcactcactctacgggcagacgcttgcagaccccaaacgcctgatggcgaaacttagaattatctgtaatgg

SEQ ID NO: 692425 - DNA, 75 bp, synthetic construct
  source 1..75: mol_type = other DNA
acccgtacttttccggcactaaagtgaagtggatcctcgaccatgtagagggttcccgcgagcgtgcgcgtcgtg

SEQ ID NO: 692426 - DNA, 75 bp, synthetic construct
  source 1..75: mol_type = other DNA
ccgatattaagatgacaatgatctatgcacatttctccccagatcatttagaagatgcagttaccaaaaacccgt

SEQ ID NO: 692427 - DNA, 75 bp, synthetic construct
  source 1..75: mol_type = other DNA
tgcccagtttggcgctcttgattctctgacgacggtgaataacgcgcaacgcgaggcttacggttatcaggttca

SEQ ID NO: 692428 - DNA, 75 bp, synthetic construct
  source 1..75: mol_type = other DNA
ggggctgctgctcagtcggctgctaaatcatcgatgaccagtactttgttaacggcaccactaaaagcatacggt

SEQ ID NO: 692429 - DNA, 75 bp, synthetic construct
  source 1..75: mol_type = other DNA
tgagatggcgagccgcgcgcaggtgacgctggcaatggagatcatggattacccgttgatgaactccatcagcaa

SEQ ID NO: 692430 - DNA, 75 bp, synthetic construct
  source 1..75: mol_type = other DNA
gcggcgcaacgggtgttgcattgaagatagaggacgataaaggaacgcagcaagttcctaagggctctggtggta

SEQ ID NO: 692431 - DNA, 75 bp, synthetic construct
  source 1..75: mol_type = other DNA
gcaatgtccaaagtcattggaaagctagaaggtattgctgctgatactgggtgttcgattatatttctacaccat

SEQ ID NO: 692432 - DNA, 75 bp, synthetic construct
  source 1..75: mol_type = other DNA
attgaatgtcaattctcaatagaggagtcaatcgaggaggctaaattactattacttgtgatgattcgcaggctt

SEQ ID NO: 692433 - DNA, 75 bp, synthetic construct
  source 1..75: mol_type = other DNA
ccgatataaagatgactatgatttatgcacatttttctccagaccatcttgaagatgctgtgagtaagaaccctt

SEQ ID NO: 692434 - DNA, 75 bp, synthetic construct
  source 1..75: mol_type = other DNA
cggcacaaccgtaacaatcatgatctgatcaaggaagaacgtcttcatctgaaaccgctgccgcttcgtcgcagt

SEQ ID NO: 692435 - DNA, 75 bp, synthetic construct
  source 1..75: mol_type = other DNA
atggaaatctgggccacccaaagctccacgctggttgaggtgctggcgaaagcagacatcagttccgatcaaatt

SEQ ID NO: 692436 - DNA, 75 bp, synthetic construct
  source 1..75: mol_type = other DNA
accgtttatcgagaaagtacaaccgatgtacgcaaacttcgctaaagataaccctgcccttgccccaatgctggc

SEQ ID NO: 692437 - DNA, 75 bp, synthetic construct
  source 1..75: mol_type = other DNA
tacagagcaggtaacgacagagcaaatcctgcaagtacgccgctggttagagttgggcgtcgtggaagcggcggc

SEQ ID NO: 692438 - DNA, 75 bp, synthetic construct
  source 1..75: mol_type = other DNA
ttacacacccagttaacccactcaatgcgagcgggtctggaagcacaacgcaataatcatgaatatgagcgtggg

SEQ ID NO: 692439 - DNA, 75 bp, synthetic construct
  source 1..75: mol_type = other DNA
caacgaacgcaccaagctggaaatcgaactgaaatccgtcagcgaggaaattgccgggattaccgaaatcagcaa

SEQ ID NO: 692440 - DNA, 75 bp, synthetic construct
  source 1..75: mol_type = other DNA
caagcctgatttttatcccgctcaccattttaattgctgtttgtgttccgggtaatcaggtgctgccgtttggcg

SEQ ID NO: 692441 - DNA, 75 bp, synthetic construct
  source 1..75: mol_type = other DNA
aagccccagtctgctgatgattgcaaaaatatgcttggccaccggcgcacgctggagcgaagccgaaaacctaca

SEQ ID NO: 692442 - DNA, 75 bp, synthetic construct
  source 1..75: mol_type = other DNA
gaaaccactgagcgtaattaccgttacgcaggttggaaaaaagcggtgaaacgcgcgatggcatgggaagaacac

SEQ ID NO: 692443 - DNA, 75 bp, synthetic construct
  source 1..75: mol_type = other DNA
gtcgatatggcagaaaacagcgtgatggcgctgactaccatgcgtcacggtgaagtggcaaaatccttcagcctt

SEQ ID NO: 692444 - DNA, 75 bp, synthetic construct
  source 1..75: mol_type = other DNA
atttatcttaccggtattttcatgacctggcgtagagcgcgtggttttattaaacaagagaaagccgttctcgca

SEQ ID NO: 692445 - DNA, 75 bp, synthetic construct
  source 1..75: mol_type = other DNA
accttcaccggcgcgttgctgcatctggcaaccggttcatggatgatagggatggcaggtgtggtaattcacgcg

SEQ ID NO: 692446 - DNA, 75 bp, synthetic construct
  source 1..75: mol_type = other DNA
aactccatcagcaaggcgctgggctacgcgcactatctcaacaacccgtggttccagctctacccggatatcggc

SEQ ID NO: 692447 - DNA, 75 bp, synthetic construct
  source 1..75: mol_type = other DNA
atgctgttacttgttgattacccagagcataacatttattcatcttttgtgtgtgcggatgctgaacttcgagaa

SEQ ID NO: 692448 - DNA, 75 bp, synthetic construct
  source 1..75: mol_type = other DNA
ttatctacttatcacgaatgcaactcgcaatacacctaaacctgatagtgaaggtaacatttcattttcagactt

SEQ ID NO: 692449 - DNA, 75 bp, synthetic construct
  source 1..75: mol_type = other DNA
gaatcagatattaaaaatttagagcattattggttatttgctagacccaaattgattacatcttttaatttgata

SEQ ID NO: 692450 - DNA, 75 bp, synthetic construct
  source 1..75: mol_type = other DNA
gaaaaacggtggagatcattgctggtaaagacatcagcagtggtgaactggtgcaggtgggagatatttttgcag

SEQ ID NO: 692451 - DNA, 75 bp, synthetic construct
  source 1..75: mol_type = other DNA
accttcgcttggttattacatgaagcagccgatggtatggacgaccacgctggcattttttagctataactatat

SEQ ID NO: 692452 - DNA, 75 bp, synthetic construct
  source 1..75: mol_type = other DNA
ttgtccagttcagtggtaaatatgattacgcattctatcttgcaggtgccatagcaatcatttcaagtctgctgg

SEQ ID NO: 692453 - DNA, 75 bp, synthetic construct
  source 1..75: mol_type = other DNA
tgtaatacaggtaaaggacaaaattcatttgctagccaattagctaaagagttacatacaaatgtaataggacct

SEQ ID NO: 692454 - DNA, 75 bp, synthetic construct
  source 1..75: mol_type = other DNA
tacacgccggcgcgaaaaatccacctgtaccactgcgaccatcgcggcctgccgctggcgcttatcagtgcggaa

SEQ ID NO: 692455 - DNA, 75 bp, synthetic construct
  source 1..75: mol_type = other DNA
ggggatggaatttttatcagtatccgttgaatccggtcataaatgtagatccgcaaggtttggttgatataaatt

SEQ ID NO: 692456 - DNA, 75 bp, synthetic construct
  source 1..75: mol_type = other DNA
cttaatattccttaattacttccagaatcagaattctttttattccttttacaaagtacataatcagggtgttct

SEQ ID NO: 692457 - DNA, 75 bp, synthetic construct
  source 1..75: mol_type = other DNA
gcggctatcacatattctgagaccaagtctttacctacatcgggagtcagcaattcagtaggtgtaacggttggc

SEQ ID NO: 692458 - DNA, 75 bp, synthetic construct
  source 1..75: mol_type = other DNA
ggggagtatgatgaatggggcaaccagcttaatgaagagaacccgtattacctgcaccagccataccgtctgccg

SEQ ID NO: 692459 - DNA, 75 bp, synthetic construct
  source 1..75: mol_type = other DNA
ttgtcactggcgctggttatgcgtctggggctgttatcgctgatttcgtggatggttacattgaccaaaccattg

SEQ ID NO: 692460 - DNA, 75 bp, synthetic construct
  source 1..75: mol_type = other DNA
gtcgggcatcacgccagaaaagttcatgcagcaagtggatgcttacatcagatggtataaggggtcagtttggat

SEQ ID NO: 692461 - DNA, 75 bp, synthetic construct
  source 1..75: mol_type = other DNA
tgagcgcgagttccgtcctggcatcgaaaccaccgagcgtaattaccgttacgctggctggaaaaaagcggttaa

SEQ ID NO: 692462 - DNA, 75 bp, synthetic construct
  source 1..75: mol_type = other DNA
tgcaggtaaagtctggctgtcaccggtggtggactgcttcgatggaaaagttgtgagctggtctctcagtacacg

SEQ ID NO: 692463 - DNA, 75 bp, synthetic construct
  source 1..75: mol_type = other DNA
acccggcggcagaagtggcgaaagcgcgtgattgggtgaaagcgcgcatggccaaagcgggcatggtggaggcgg

SEQ ID NO: 692464 - DNA, 75 bp, synthetic construct
  source 1..75: mol_type = other DNA
atcgaagagatttctggtggcaaatatcaagcaagcgaattgcttgaaataagcaaaaagaaccttctggcagca

SEQ ID NO: 692465 - DNA, 75 bp, synthetic construct
  source 1..75: mol_type = other DNA
atggaaatctgggccacccaaagctccacgctggtagaagtactggcgaaagccgatatcagttccgatcaaatt

SEQ ID NO: 692466 - DNA, 75 bp, synthetic construct
  source 1..75: mol_type = other DNA
ttcccgactgggggcaccagaaagaaaggccagtatcattgttgaccagcagtcacagttcaacaccacccagcg

SEQ ID NO: 692467 - DNA, 75 bp, synthetic construct
  source 1..75: mol_type = other DNA
cacattatccgcgcgacgctggagtctattgcttatcagacgcgtgacgtgctggaagcaatgcaggccgactct

SEQ ID NO: 692468 - DNA, 75 bp, synthetic construct
  source 1..75: mol_type = other DNA
gccagactggccgaaacctttttgacaaaacccagccaatcctctcctacggagttctgtcctcagaggctgacc

SEQ ID NO: 692469 - DNA, 75 bp, synthetic construct
  source 1..75: mol_type = other DNA
gccgtaaccgtcgtcgccgctacagctcatattgcggagaaatcggaccggatccggataaccttatcgccagag

SEQ ID NO: 692470 - DNA, 75 bp, synthetic construct
  source 1..75: mol_type = other DNA
gaggagtccggcctgtattacaaccgccaccgctattatgacccgctgctggggcggtatatcactcaggatccg

SEQ ID NO: 692471 - DNA, 75 bp, synthetic construct
  source 1..75: mol_type = other DNA
ggcccggattacctgttatgaacatgaaaaatatgccggctgaaccacttgtattccagtccggtaccaagagtg

SEQ ID NO: 692472 - DNA, 75 bp, synthetic construct
  source 1..75: mol_type = other DNA
gcatggaaagccgctcaggattaccagaaagggaagggcgagcatggagacgatgttccgcctgtggttctggat

SEQ ID NO: 692473 - DNA, 75 bp, synthetic construct
  source 1..75: mol_type = other DNA
tcatggccgaaatagccaccctgctggccggggaggataacgccacgtcggccaccatcgagacgctggaatccc

SEQ ID NO: 692474 - DNA, 75 bp, synthetic construct
  source 1..75: mol_type = other DNA
cgccagccatatgttcctctcgccagacaaaaatggtcagatgaccatctatcagaccagcggcaacccgtatgg

SEQ ID NO: 692475 - DNA, 75 bp, synthetic construct
  source 1..75: mol_type = other DNA
gaatgatagtaggtaatgcagaaatagtgccatttagcccgaggcgatatctgtatcatgcttatttggcttata

SEQ ID NO: 692476 - DNA, 75 bp, synthetic construct
  source 1..75: mol_type = other DNA
gtgaaaccactattgtctgggaaaaagaaaccggcaagcctatctataacgccattgtctggcagtgccgtcgta

SEQ ID NO: 692477 - DNA, 75 bp, synthetic construct
  source 1..75: mol_type = other DNA
ggtaatgccgagatcgtgccattcagcccgcgccgttatctgtatcacgcttatctggcttacatgcgggccaat

SEQ ID NO: 692478 - DNA, 75 bp, synthetic construct
  source 1..75: mol_type = other DNA
ggaggttgtggtgggaatgctactgagcgttatgaggagtcgcgagaagcgttaaaaatactaggctgtaataaa

SEQ ID NO: 692479 - DNA, 75 bp, synthetic construct
  source 1..75: mol_type = other DNA
tgtctgtcatttttacctcaagtttttgaatctgtagatgaggtccattttaataaaaaaaatattagcattaca

SEQ ID NO: 692480 - DNA, 75 bp, synthetic construct
  source 1..75: mol_type = other DNA
tttcctgatgcagttccagtccgatattctcggtacgcgcgttgagcgcccggaagtgcgcgaagtcaccgcatt

SEQ ID NO: 692481 - DNA, 75 bp, synthetic construct
  source 1..75: mol_type = other DNA
gatccatgtttaggctgggaagatactgaacacctggtcgaaaaactcgcctctgcggtggatacccgcttctga

SEQ ID NO: 692482 - DNA, 75 bp, synthetic construct
  source 1..75: mol_type = other DNA
gaccatctaccagaccagcggcaacccgtatggtcacattattatgcgtggcggcaaaaaaccaaactaccacgc

SEQ ID NO: 692483 - DNA, 75 bp, synthetic construct
  source 1..75: mol_type = other DNA
atgaacagaactgacgaactccgtactgcgcgtattgagagcctggtaacgcccgccgaactcgcgctacggtat

SEQ ID NO: 692484 - DNA, 75 bp, synthetic construct
  source 1..75: mol_type = other DNA
ccaggacgaagctaaaagactactttatgagcagcaaaaatcagaagaagcgctgttgataaagcgcgaaggtga

SEQ ID NO: 692485 - DNA, 75 bp, synthetic construct
  source 1..75: mol_type = other DNA
agcagcagaaatctgaagaagcactggcgataaagcgagagggggattcgctggtggacttctgcggctatctca

SEQ ID NO: 692486 - DNA, 75 bp, synthetic construct
  source 1..75: mol_type = other DNA
tgaccgaaatggtgagtcagtgcctacgacctgagattggttgtgttggtgccaaactctattacagcaacgata

SEQ ID NO: 692487 - DNA, 75 bp, synthetic construct
  source 1..75: mol_type = other DNA
gctgtgcgcagtattcttgagaaaagcacctataccaactacgagattcttatcctagataacggcagcgtagaa

SEQ ID NO: 692488 - DNA, 75 bp, synthetic construct
  source 1..75: mol_type = other DNA
tatgaacgcggagaaagtctggttatgagcagcagggaattagcagcaagtaaaaaagtagttgaactgcctgta

SEQ ID NO: 692489 - DNA, 75 bp, synthetic construct
  source 1..75: mol_type = other DNA
atgctggcagaaaaaatagaaggagagctggcggttgtgattcgccatctgcttactcgtttttctgaccaggac

SEQ ID NO: 692490 - DNA, 75 bp, synthetic construct
  source 1..75: mol_type = other DNA
ctggcagttattcattgaggtaacaggtccagggggaagtggtaaaagcgtgatggcggagatttgcaccatgct

SEQ ID NO: 692491 - DNA, 75 bp, synthetic construct
  source 1..75: mol_type = other DNA
ctggatattgaacgcaaaaacatttctgacgggctggttattgagctgcctgtaaagaaaaaagcgcggggacag

SEQ ID NO: 692492 - DNA, 75 bp, synthetic construct
  source 1..75: mol_type = other DNA
ccggacacctcgatcagatgatggtcaaaggcatcggtcagaagctggcagccgcaggtatacaggatgctgatt

SEQ ID NO: 692493 - DNA, 75 bp, synthetic construct
  source 1..75: mol_type = other DNA
ctgatgaacaacttaaggatattggcaatctgaaaattgtgcccgacgggcgcaaatcagcgcgtatatacaagg

SEQ ID NO: 692494 - DNA, 75 bp, synthetic construct
  source 1..75: mol_type = other DNA
tgacaaggtggcaattgacccaaaacacaaagccccctactcaacgcgtattccggcagtagtgctggcggttaa

SEQ ID NO: 692495 - DNA, 75 bp, synthetic construct
  source 1..75: mol_type = other DNA
tggtgctggcgaaccggtacgactggcagttattcattgaggtaacaggtccagggggaagtggtaaaagcgtga

SEQ ID NO: 692496 - DNA, 75 bp, synthetic construct
  source 1..75: mol_type = other DNA
gcgcgaatatctggcccgtgagcgccagaatctttctgatggtctggtgattcagcttcctgttaagaaaaaaac

SEQ ID NO: 692497 - DNA, 75 bp, synthetic construct
  source 1..75: mol_type = other DNA
tgatcgagcggctggaaagcgatgccgtgctgcgctacggcattgaagatgtggtgacgaatctcgacgtgctgg

SEQ ID NO: 692498 - DNA, 75 bp, synthetic construct
  source 1..75: mol_type = other DNA
ggtaaaaagtggtcagaggcagataaggaaacacacgatccaatctatgacatcgagctttatgctgatcaggct

SEQ ID NO: 692499 - DNA, 75 bp, synthetic construct
  source 1..75: mol_type = other DNA
attgaatacgtgcagacgcacagcgcaccacagccggttccggcagatatccgcaaatttgttaccgtaaaaatt

SEQ ID NO: 692500 - DNA, 75 bp, synthetic construct
  source 1..75: mol_type = other DNA
ggaatatttatgggagttagtggaatttataaatcaacaatatcacaacaagggaatatatatttataaatgttt

SEQ ID NO: 692501 - DNA, 75 bp, synthetic construct
  source 1..75: mol_type = other DNA
cctgatgaaagacaaatacgctcagttcacctctctgcaggctgatctggaaaacggcgtaaacctggaacagac

SEQ ID NO: 692502 - DNA, 75 bp, synthetic construct
  source 1..75: mol_type = other DNA
aaggttaccaccgtcgtggtggatgacgacgtggcggtaaaagacagcctctataccgccggacgccgcggcgtc

SEQ ID NO: 692503 - DNA, 75 bp, synthetic construct
  source 1..75: mol_type = other DNA
tgggcgctgaggtatggcgcacgttacgcagctttaaaaaattccgcgaactgtacgatctttcccgtggttcag

SEQ ID NO: 692504 - DNA, 75 bp, synthetic construct
  source 1..75: mol_type = other DNA
attctcggcacccgcgttgagcgcccggaagttcgcgaagtgactgcattgggtgcggcctatcttgctggtctg

SEQ ID NO: 692505 - DNA, 75 bp, synthetic construct
  source 1..75: mol_type = other DNA
aaattcagtccgctgtttaccacgctgtttttcccgaaagtagcgacattcaacacgcaaaacatcatgctggat

SEQ ID NO: 692506 - DNA, 75 bp, synthetic construct
  source 1..75: mol_type = other DNA
ggttgccccgccaacgtcatgattatgggtgctgaggtatggcgcacgttacgcagctttaaaaaattccgcgaa

SEQ ID NO: 692507 - DNA, 75 bp, synthetic construct
  source 1..75: mol_type = other DNA
agaaagacttcaccagcagaatattagatggggatttacatgccaaactctgcttaacaatgtgtattgattata

SEQ ID NO: 692508 - DNA, 75 bp, synthetic construct
  source 1..75: mol_type = other DNA
tgaacacttggcagaattaacaagttatataaacgacaactatcttaacaaaggtatatatatttataaatgctt

SEQ ID NO: 692509 - DNA, 75 bp, synthetic construct
  source 1..75: mol_type = other DNA
cattcaggatcctgagttaatcagaatggggctgactaaagccgaacttgcgccgaaaaattacatcgtaccagg

SEQ ID NO: 692510 - DNA, 75 bp, synthetic construct
  source 1..75: mol_type = other DNA
acgctaaagatggtatctcctacaccttctctatcgttccgaacgcactgggtaaagacgacgaagttcgtaaga

SEQ ID NO: 692511 - DNA, 75 bp, synthetic construct
  source 1..75: mol_type = other DNA
ataatggtgagaattatataaaacaacaaattctcagtatacttaatgagttgggtgaagatgatgagattgtta

SEQ ID NO: 692512 - DNA, 75 bp, synthetic construct
  source 1..75: mol_type = other DNA
cctgggaaactgtgctggatattgatgcactgtgtaaaacggaaggcagggagtggatatttcagggcttgcaac

SEQ ID NO: 692513 - DNA, 75 bp, synthetic construct
  source 1..75: mol_type = other DNA
ggggacgaggcaccggcctggctggagcgcggaggtgtgtatatcgtggccaatatccgtgggggcggtgagtat

SEQ ID NO: 692514 - DNA, 75 bp, synthetic construct
  source 1..75: mol_type = other DNA
caaactggccaacgcactgcaaaacgccggtgaaagccaaagcttcccaccgtacaacattgaaaaaagcgacga

SEQ ID NO: 692515 - DNA, 75 bp, synthetic construct
  source 1..75: mol_type = other DNA
tgacctgattcgtaatgagcctgaacccatcgcagcgcaacgtatcgctatcagcgaacgtcccgcgttaaatag

SEQ ID NO: 692516 - DNA, 75 bp, synthetic construct
  source 1..75: mol_type = other DNA
gaagtggatccttgaccatgtggaaggctctcgcgagcgtgcacgtcgtggcgagttgctgttcggtacggttga

SEQ ID NO: 692517 - DNA, 75 bp, synthetic construct
  source 1..75: mol_type = other DNA
cgagtagcgacaggcaggtgctgatgaatatgacgaaaaaaggcgacaagcatctgcgaacactttttattcatg

SEQ ID NO: 692518 - DNA, 75 bp, synthetic construct
  source 1..75: mol_type = other DNA
acacggcaagttgtatatcgaatccccccgctttaacagccgcattaaacgccaaagcgaacaatggcaactggt

SEQ ID NO: 692519 - DNA, 75 bp, synthetic construct
  source 1..75: mol_type = other DNA
ctgacactgcatcaggatccggtgtatgtcacccgagctgatgcccccgttgcaggaaaagtcgccctgctgtcg

SEQ ID NO: 692520 - DNA, 75 bp, synthetic construct
  source 1..75: mol_type = other DNA
caggtcagccagcattttgttcgctcccgggatggaacccgtgtgtcgtattttcagattgccgctaacaatctc

SEQ ID NO: 692521 - DNA, 75 bp, synthetic construct
  source 1..75: mol_type = other DNA
tgcgtacattttttattcatggtgcccgcgctgtcgtcagagttgatatgaataacaattggctgcttgcatcag

SEQ ID NO: 692522 - DNA, 75 bp, synthetic construct
  source 1..75: mol_type = other DNA
ataacaattggtgcggcagtctcaagagttcgccgtgccgttctgcttatccttgaggatgcagaaaacgggtta

SEQ ID NO: 692523 - DNA, 75 bp, synthetic construct
  source 1..75: mol_type = other DNA
gttcatttgcataataaacaggttgatcttaccccacgcgagtttgatctgctgctctggtttgcacgtcatcct

SEQ ID NO: 692524 - DNA, 75 bp, synthetic construct
  source 1..75: mol_type = other DNA
actggaacgatgtgatttgggcgattactacccgtatggacccagcgcgggatacggtgctggttgaaaacacgc

SEQ ID NO: 692525 - DNA, 75 bp, synthetic construct
  source 1..75: mol_type = other DNA
tatattgagccgggcgagatggcgccggaagggccgtatggcgaccacacgggttactacaatgaagtagaccgc

SEQ ID NO: 692526 - DNA, 75 bp, synthetic construct
  source 1..75: mol_type = other DNA
tggccggaagatgccgcgccgctgattacctgggggttgaccgtgacgcgtggcccgcataaagagcggcagaat

SEQ ID NO: 692527 - DNA, 75 bp, synthetic construct
  source 1..75: mol_type = other DNA
cgcatccaggtgaacgtttcccgatctctgtggcgttgggcgctgatccggcaaccattctcggtgcagtcacac

SEQ ID NO: 692528 - DNA, 75 bp, synthetic construct
  source 1..75: mol_type = other DNA
actggaatgatgtgatttgggcgattactacccgtatggacccggcgcgggataccgttctggtagaaaatacac

SEQ ID NO: 692529 - DNA, 75 bp, synthetic construct
  source 1..75: mol_type = other DNA
tgaagtgcccgccagtgcggagattgtgctggaagggtatatcgaacaaggcgaaactgcgccggaagggccgta

SEQ ID NO: 692530 - DNA, 75 bp, synthetic construct
  source 1..75: mol_type = other DNA
gaagaagaactaaaagttcatagtgacaaagtaatatttgtcaaattatatcgacctaaaacggtaggatatata

SEQ ID NO: 692531 - DNA, 75 bp, synthetic construct
  source 1..75: mol_type = other DNA
aatatataacgaaaaaattcattacggttagtaaagttctttctttctcgaagaatgcattcctctatgtcggcg

SEQ ID NO: 692532 - DNA, 75 bp, synthetic construct
  source 1..75: mol_type = other DNA
atattgatggctttcataatatctaacgttatatttggtaaattgtttttcaatatgaaccctgtaaatgttatt

SEQ ID NO: 692533 - DNA, 75 bp, synthetic construct
  source 1..75: mol_type = other DNA
aatgtcctattggtgtttatatttgcaaatatcattttcagtaggctgtttttcagcattaaccctgttaatgcg

SEQ ID NO: 692534 - DNA, 75 bp, synthetic construct
  source 1..75: mol_type = other DNA
tattcgagacgggtagagttatcattaaaaataattcatggtacagaaaagaaagagattacagttctaattatc

SEQ ID NO: 692535 - DNA, 75 bp, synthetic construct
  source 1..75: mol_type = other DNA
gttcaaatctttcttgataacatagtaacaaagagagatataaacaatgtaaagagagttttatatgataatgat

SEQ ID NO: 692536 - DNA, 75 bp, synthetic construct
  source 1..75: mol_type = other DNA
atacgcctttctcaggaaaaccactttctgtaattggtatcgataaaacaggactggaaataaaaaatataaagt

SEQ ID NO: 692537 - DNA, 75 bp, synthetic construct
  source 1..75: mol_type = other DNA
ggcagcctgagttcacagataaaacactctccaggaaaaccgaggcggttcacagcggcggtattgcgatacgtt

SEQ ID NO: 692538 - DNA, 75 bp, synthetic construct
  source 1..75: mol_type = other DNA
tgtttggctgtttttttgtgctggtctttattggtgtgcccatttcgttctcaatcggtattgcgactgtagctt

SEQ ID NO: 692539 - DNA, 75 bp, synthetic construct
  source 1..75: mol_type = other DNA
gcggcattctgggcggcatttttaccgcaactgaagcgtctgcgattgccgttgtctacacatttattctctcgg

SEQ ID NO: 692540 - DNA, 75 bp, synthetic construct
  source 1..75: mol_type = other DNA
tgattggaaaaattactatcctaaagaatgtgatgaatgcactcagaagtcttcctgtgctggttatttcagttc

SEQ ID NO: 692541 - DNA, 75 bp, synthetic construct
  source 1..75: mol_type = other DNA
tgatgaatgtactcagaagtcttcctgtgctggttatttcagttcatcaaaaggccgttttcatcaaccaccgag

SEQ ID NO: 692542 - DNA, 75 bp, synthetic construct
  source 1..75: mol_type = other DNA
atttattcgccgcaggctgggacttaaaccatcagacgtgattacgcctgatcgtcttgtggaggctctttttca

SEQ ID NO: 692543 - DNA, 75 bp, synthetic construct
  source 1..75: mol_type = other DNA
tttttccatccgctctaagctgagtcaggagtatgggattaacttggacaatggcgtgaaggtctcagcagcaaa

SEQ ID NO: 692544 - DNA, 75 bp, synthetic construct
  source 1..75: mol_type = other DNA
gttgttcttgcagagctcaatttgttcagacaaatcgatcaccttgagaaattgctctatcaggttaacaattta

SEQ ID NO: 692545 - DNA, 75 bp, synthetic construct
  source 1..75: mol_type = other DNA
taatgatatttatactatctaacgttatatttggtaagttgttttttagtatgaatcctgttaacgtaattaaag

SEQ ID NO: 692546 - DNA, 75 bp, synthetic construct
  source 1..75: mol_type = other DNA
tgatgaagatgtcctgcgagttgttaggtttgtcctggggggatgaatcagacctttacccaacgattgcgaatg

SEQ ID NO: 692547 - DNA, 75 bp, synthetic construct
  source 1..75: mol_type = other DNA
gcgcggagatacttggtataagggtgataagaacatgggacgctcgccggtaagcgtgacccgtggcaaaaagtt

SEQ ID NO: 692548 - DNA, 75 bp, synthetic construct
  source 1..75: mol_type = other DNA
tctggtagaaacatctgataaagaagtctatatctcgggtggaaggctcgtgaaggcgtggctaaatgttggtgg

SEQ ID NO: 692549 - DNA, 75 bp, synthetic construct
  source 1..75: mol_type = other DNA
gctgctgaagcagcagaaagagcaactggcactggtggggcagaatacagagctggcgaagctgaaataccagac

SEQ ID NO: 692550 - DNA, 75 bp, synthetic construct
  source 1..75: mol_type = other DNA
tgaacgtaacaactaacggcaaatacagggctatcctggctgactggatgcagttaagcggaagccatgaggaat

SEQ ID NO: 692551 - DNA, 75 bp, synthetic construct
  source 1..75: mol_type = other DNA
gtttaagcagatggttgagcaggcggaggcgttcttgtcgtcgttcgggttctcacgatacctgccctacccgaa

SEQ ID NO: 692552 - DNA, 75 bp, synthetic construct
  source 1..75: mol_type = other DNA
ccaccacgcagaacatcgcatcaagtttatggggagagccggacgcgcagcggctgacctggtacggcacggcgt

SEQ ID NO: 692553 - DNA, 75 bp, synthetic construct
  source 1..75: mol_type = other DNA
aggcgctcggcaaaattggggggaagcagcatgttttttacgtactgatgttccagcctgaggcagaagattacc

SEQ ID NO: 692554 - DNA, 75 bp, synthetic construct
  source 1..75: mol_type = other DNA
gtatcagaaacgaagatgacgagttccgtttttacacgttcccgcatgtgtttgagggtgagatagcacagggat

SEQ ID NO: 692555 - DNA, 75 bp, synthetic construct
  source 1..75: mol_type = other DNA
ccggatggttcggtcattggtgaatcagagaaacccatcctgtttaccggaaaaactgccgctgttaatggctat

SEQ ID NO: 692556 - DNA, 75 bp, synthetic construct
  source 1..75: mol_type = other DNA
cgtgaacggtggcgcaacctaataccggagagctacggcgaacaggttcatcgcgtaggggaacgattcgccata

SEQ ID NO: 692557 - DNA, 75 bp, synthetic construct
  source 1..75: mol_type = other DNA
aacggctgccgttaatggttattccgtagcaggaacgacagagggctggcgcgatacagtggcgcgactggctgg

SEQ ID NO: 692558 - DNA, 75 bp, synthetic construct
  source 1..75: mol_type = other DNA
gctgaggcgtttcttgcggcctatggcctgagcaggttcgcccctgtcaattatgaccctgccagcctgccgatt

SEQ ID NO: 692559 - DNA, 75 bp, synthetic construct
  source 1..75: mol_type = other DNA
gctggctggcggtaatgcctcaatgatgctgggtgtggcaacgtcactggcagcgcctttaattggccttgtggg

SEQ ID NO: 692560 - DNA, 75 bp, synthetic construct
  source 1..75: mol_type = other DNA
tgccataacaatggccgctggtatgaaccaccgatcagcccctacgggcttgcacgcatgttcgacgttgccgcc

SEQ ID NO: 692561 - DNA, 75 bp, synthetic construct
  source 1..75: mol_type = other DNA
aaatcaggacaccacgcctgaaacacctgaaaggggcgcggttaagggtgtacggccttttgctggcacaggacc

SEQ ID NO: 692562 - DNA, 75 bp, synthetic construct
  source 1..75: mol_type = other DNA
tattaccctgaaggaatgcacagccagaaacgggagaactggcgcgaatatctggaacgtgaacgggcagagcag

SEQ ID NO: 692563 - DNA, 75 bp, synthetic construct
  source 1..75: mol_type = other DNA
gggcagcgccataaaagatgacgatgcatttagcgattcacaggcggatcgcggtctataccttaaaggatatgc

SEQ ID NO: 692564 - DNA, 75 bp, synthetic construct
  source 1..75: mol_type = other DNA
agtcatcatttttgcgggtagtgatgcgtgggcacatgcgaatcagtggcaggaacaggacgggcgactggctgg

SEQ ID NO: 692565 - DNA, 75 bp, synthetic construct
  source 1..75: mol_type = other DNA
ctgtcagatgaacacctgaaagatattaccggttatcaaattattgatgatagccgtcagtgtgtgcgtatttac

SEQ ID NO: 692566 - DNA, 75 bp, synthetic construct
  source 1..75: mol_type = other DNA
cacctgagcggcctgttttgttcagcgggcgcagttcagccgctgccgggtataccgtagcaggaacgccggaaa

SEQ ID NO: 692567 - DNA, 75 bp, synthetic construct
  source 1..75: mol_type = other DNA
gcggcctcatcccggctgactacggtgagcaggtacaccgcgtggctgaacgttttgcaatcctcgaagccgcgc

SEQ ID NO: 692568 - DNA, 75 bp, synthetic construct
  source 1..75: mol_type = other DNA
tagcggatgtcagattgatccttatactcacgcgccaaccttgaccagcaccgactggtatgatgttggtatgga

SEQ ID NO: 692569 - DNA, 75 bp, synthetic construct
  source 1..75: mol_type = other DNA
tgagcgtgatttaccaattaaagatcttgccggatacagaaaggggagtatcagaaatgaagatgatgagttccg

SEQ ID NO: 692570 - DNA, 75 bp, synthetic construct
  source 1..75: mol_type = other DNA
cgcgttgaaagccgcgccgatggtgttttctgggtaacgccaaaagtggataagcagtcaggcgaaattatccgg

SEQ ID NO: 692571 - DNA, 75 bp, synthetic construct
  source 1..75: mol_type = other DNA
attaaagagcttgccggatacagaaaagggagcattcgcaacgaagatgacgagatgcgctattacacgttcccg

SEQ ID NO: 692572 - DNA, 75 bp, synthetic construct
  source 1..75: mol_type = other DNA
gagggtgagatagcacagggatttaatccgtctcattttgcccgcgcgttgagtgctgccggaatgctggaagcg

SEQ ID NO: 692573 - DNA, 75 bp, synthetic construct
  source 1..75: mol_type = other DNA
ttaaatggctgtcaggccaccagcaggaggcaaaggatacggtaagggaatgccgcgaacggtggcgcaacctga

SEQ ID NO: 692574 - DNA, 75 bp, synthetic construct
  source 1..75: mol_type = other DNA
gtttaacggttcggggaaattacagggggcgaaggacggcggcaacagggagataaaacactggcgaacagtggc

SEQ ID NO: 692575 - DNA, 75 bp, synthetic construct
  source 1..75: mol_type = other DNA
gatctgttggaagagaagcagggcagggttcataccgctgcgcgattcaggccaacggctgaacgtttaagtgat

SEQ ID NO: 692576 - DNA, 75 bp, synthetic construct
  source 1..75: mol_type = other DNA
caaccggttgcggttctttctaataatcgccccgcaggatatctcttaagtgccagcgcatttgaagcgttaatg

SEQ ID NO: 692577 - DNA, 75 bp, synthetic construct
  source 1..75: mol_type = other DNA
gtcacgacttgctggatacagcaataattaactacctctcaaaggtaggaaaaataaatgaacaagaaatcttgt

SEQ ID NO: 692578 - DNA, 75 bp, synthetic construct
  source 1..75: mol_type = other DNA
aaggtgtggataaactgcgccagaagctggatacctggtttagcgagatgcagcccgtcgaagaaacgcaggacg

SEQ ID NO: 692579 - DNA, 75 bp, synthetic construct
  source 1..75: mol_type = other DNA
gtgcgcctgatattcgccacctaccttccgataccggaattgaagtggcttttgcaggccgtttccaacgcaggt

SEQ ID NO: 692580 - DNA, 75 bp, synthetic construct
  source 1..75: mol_type = other DNA
ccatgctgagtacgctttgttacaacctgatgatgacatgcggtatccattccatggacagccagatgctcaatg

SEQ ID NO: 692581 - DNA, 75 bp, synthetic construct
  source 1..75: mol_type = other DNA
tctaaagactacaaaaaagacctttcctataaagattttgattttatggatatgctcgatgattctctaactaca

SEQ ID NO: 692582 - DNA, 75 bp, synthetic construct
  source 1..75: mol_type = other DNA
cctggaagggaaagacggtaaagaatggaccgtcgaacaggcgcaccagatgattctggaagctgcaaatcgaag

SEQ ID NO: 692583 - DNA, 75 bp, synthetic construct
  source 1..75: mol_type = other DNA
atgagcaaaaacttttttcaatccggggcatttttggggaatggactgtcccgtttcgctttgaactctgatcct

SEQ ID NO: 692584 - DNA, 75 bp, synthetic construct
  source 1..75: mol_type = other DNA
atttttatcgtactaatccggcaacaggattagctatgcatggaggatttgattcagcaggaaatacttttggga

SEQ ID NO: 692585 - DNA, 75 bp, synthetic construct
  source 1..75: mol_type = other DNA
gtaagtgtaagagaatggatgcagtctcaggtaaatgaaaaaactaatgaagatttgcatctggattttgatgat

SEQ ID NO: 692586 - DNA, 75 bp, synthetic construct
  source 1..75: mol_type = other DNA
attaggcggtgcagtactgaccgatggcagtacgttgggtacattaggtggtgcagctgtcggtggtgttattgg

SEQ ID NO: 692587 - DNA, 75 bp, synthetic construct
  source 1..75: mol_type = other DNA
aaggtgtggataagctgcgtcagaagctggatacctggtttagcgaaatgcagcccatcgaagagaatcaggacg

SEQ ID NO: 692588 - DNA, 75 bp, synthetic construct
  source 1..75: mol_type = other DNA
gagcttcacctctatctgtagcccgattttcggcatggtagggtgcctgatcccggcgtggctggtttacaaagt

SEQ ID NO: 692589 - DNA, 75 bp, synthetic construct
  source 1..75: mol_type = other DNA
ggcggtacgctgtttctcgatgaactggcaactgccccgatgttggtacaggaaaaattgctgcgcgttattgaa

SEQ ID NO: 692590 - DNA, 75 bp, synthetic construct
  source 1..75: mol_type = other DNA
gtttccctgcttaacaccattcgcggcaatgccaaaatcggtatcatcactaacggctttagcgccctgcagcaa

SEQ ID NO: 692591 - DNA, 75 bp, synthetic construct
  source 1..75: mol_type = other DNA
gagccgctgtttttcctcgactattacgcaaccggaaaactggatgttgataccgcttcagcggtgatcagcggt

SEQ ID NO: 692592 - DNA, 75 bp, synthetic construct
  source 1..75: mol_type = other DNA
gtcgtccggaagtgatgggcggtctgggcggcttcggtgcgctgtgtgcattgccgcaaaaatatcgtgaacctg

SEQ ID NO: 692593 - DNA, 75 bp, synthetic construct
  source 1..75: mol_type = other DNA
acaaagatgccggtgttgatattgacgcgggtaatgctctggttggaagaatcaaaggcgtagtgaagaaaacgc

SEQ ID NO: 692594 - DNA, 75 bp, synthetic construct
  source 1..75: mol_type = other DNA
caaacgctgctgaaaaatggtaatcagaccaagccgaaacatgtgcctggtacgccgtattgggtgatcaccaac

SEQ ID NO: 692595 - DNA, 75 bp, synthetic construct
  source 1..75: mol_type = other DNA
acgaacactggccgtaaatgcagcatgatcgaacatatcatgcagtcgatgcaattcccggcggaattgattgag

SEQ ID NO: 692596 - DNA, 75 bp, synthetic construct
  source 1..75: mol_type = other DNA
attcgcactggaagttaacccgtgtgaagaaggctatttgctggccaacctttatggattatggatggctgctaa

SEQ ID NO: 692597 - DNA, 75 bp, synthetic construct
  source 1..75: mol_type = other DNA
aatctgtacgccgttgccgggcgcggtttctctgcttaacgccattcgtggcaacgccaaaatcggcatcatcac

SEQ ID NO: 692598 - DNA, 75 bp, synthetic construct
  source 1..75: mol_type = other DNA
gtttctctgcttaacgccattcgtggcaacgccaaaatcggcatcatcaccaacggctttagcgccttgcagcaa

SEQ ID NO: 692599 - DNA, 75 bp, synthetic construct
  source 1..75: mol_type = other DNA
cttcattacagcttcagcacgggcgttttgagagctgggccgaacggctgaaagttgaagcaggcttgcttaacg

SEQ ID NO: 692600 - DNA, 75 bp, synthetic construct
  source 1..75: mol_type = other DNA
cgtcgctttttctccattgttttcctcattgttctattaggttgcattcattcactgataacaactataaaataa

SEQ ID NO: 692601 - DNA, 75 bp, synthetic construct
  source 1..75: mol_type = other DNA
atgagaaaaatatctcttttgttctttctgtttctggcagggggaggaggttctcacgccgctgttcagaaaacc

SEQ ID NO: 692602 - DNA, 75 bp, synthetic construct
  source 1..75: mol_type = other DNA
atgcgaactttctatttctctctgttccttctggtcggggggggggtcaacgcttctgttcagaaaaccgtattc

SEQ ID NO: 692603 - DNA, 75 bp, synthetic construct
  source 1..75: mol_type = other DNA
actgaagccgggcaaagatgtcgtctggttgcaggtgccgttctccgcactgccgggcgataaaaacgccgatac

SEQ ID NO: 692604 - DNA, 75 bp, synthetic construct
  source 1..75: mol_type = other DNA
tgtcgttattgatggtaatggaaccgggcaggggcaacttacattcgacacattcaggaaatcatccggaatgcc

SEQ ID NO: 692605 - DNA, 75 bp, synthetic construct
  source 1..75: mol_type = other DNA
ctattgcaactggctttttcgctctggctgcaaatgcaagtaatatacaacgaaccattattactgctgacgttg

SEQ ID NO: 692606 - DNA, 75 bp, synthetic construct
  source 1..75: mol_type = other DNA
ctgcctgtcatgttgctgttgatgccgatagccccggcaatagtggtcgaatcacattcggtatttaccacaagt

SEQ ID NO: 692607 - DNA, 75 bp, synthetic construct
  source 1..75: mol_type = other DNA
tcaataaacccagcgaagtagattacaacgttggctacacctcgcttgcttccggcgatgcaaccttcaccgccg

SEQ ID NO: 692608 - DNA, 75 bp, synthetic construct
  source 1..75: mol_type = other DNA
atgactctgaggtgtctgttaaacccgtggcgattcatcgagaattcaccagatactgctttgcatgttttaaca

SEQ ID NO: 692609 - DNA, 75 bp, synthetic construct
  source 1..75: mol_type = other DNA
tctttcattttgcttctacagagaacgtgcccacggggttctatcggttatgcaaacaaaaaccagtgaaccctt

SEQ ID NO: 692610 - DNA, 75 bp, synthetic construct
  source 1..75: mol_type = other DNA
gcgctggagaaattaggttataccgtcaataaacccagcgaagtggattacaacgttggctacacctcgcttgct

SEQ ID NO: 692611 - DNA, 75 bp, synthetic construct
  source 1..75: mol_type = other DNA
cagatattaacgcccagaacgccattatgcatgacggcaaagcctcagaagacgatattcagggccacgttgatg

SEQ ID NO: 692612 - DNA, 75 bp, synthetic construct
  source 1..75: mol_type = other DNA
ggcttcccggtcagcaccatgcatatcgttgccaacaaagcctgggccgagaaaaacccggcggcagcgaaactg

SEQ ID NO: 692613 - DNA, 75 bp, synthetic construct
  source 1..75: mol_type = other DNA
gtgcaaaagaaattagtggttaatttttccggggcgttatttttggttgtgttgagtattccgtcatttgctggt

SEQ ID NO: 692614 - DNA, 75 bp, synthetic construct
  source 1..75: mol_type = other DNA
gcagatttactaaaagaagaaaaaataaataataataaaggaggagtgaatggagaaatcgattttagaaaagct

SEQ ID NO: 692615 - DNA, 75 bp, synthetic construct
  source 1..75: mol_type = other DNA
actataatttatcagtaggattgttggataaatataaaaatcagaggcgagctataatattgctaaaaatatcta

SEQ ID NO: 692616 - DNA, 75 bp, synthetic construct
  source 1..75: mol_type = other DNA
tcattaaatctgtaattagaacggatggatacttaaattacgcaaatacaaaatccacgatccttctcacgttag

SEQ ID NO: 692617 - DNA, 75 bp, synthetic construct
  source 1..75: mol_type = other DNA
tgagacaaacattatattaaaaagtgttaatttactttttcgtaaacataaacctaaattaaactctcaactcta

SEQ ID NO: 692618 - DNA, 75 bp, synthetic construct
  source 1..75: mol_type = other DNA
aaacaaaaagttatagatataaaagagtataaaaagatcaatcaagaaaatcttcattatagattgacagtaatt

SEQ ID NO: 692619 - DNA, 75 bp, synthetic construct
  source 1..75: mol_type = other DNA
taagtgcatatcataaggtaattaagcaaataagtagaattgaattcaatggagtatcttttcaaaatttcacag

SEQ ID NO: 692620 - DNA, 75 bp, synthetic construct
  source 1..75: mol_type = other DNA
ttgggatcaggttaaaccggttgttccgctgttaagtgcggttatggtgaaagaaacctgcaccgcaggttgtat

SEQ ID NO: 692621 - DNA, 75 bp, synthetic construct
  source 1..75: mol_type = other DNA
ttgggatcaagttaaacccgttgtaccactattaagcgctgtgatggtgaaagaaacctgcaccgcaggctgcat

SEQ ID NO: 692622 - DNA, 75 bp, synthetic construct
  source 1..75: mol_type = other DNA
tggcaccatcgcgatggcgcgtaccgctgacaaagacagcgccaccagccagttctttatcaacgttgccgataa

SEQ ID NO: 692623 - DNA, 75 bp, synthetic construct
  source 1..75: mol_type = other DNA
gataaactttatgaattaagttatttatcgttgtttttcttcatgttatttttagtaataggtattttattgaat

SEQ ID NO: 692624 - DNA, 75 bp, synthetic construct
  source 1..75: mol_type = other DNA
tattttccttttgttgattattgtattcatggtatgtgtcatttattacttgctgcttataggaagaaaaacaaa

SEQ ID NO: 692625 - DNA, 75 bp, synthetic construct
  source 1..75: mol_type = other DNA
cccgttgtgccgctgttaagtgcggtgatggtaaaagaaacctgcaccgcaggttgtatctatcgcggcgaatga

SEQ ID NO: 692626 - DNA, 75 bp, synthetic construct
  source 1..75: mol_type = other DNA
ttctttcccgcgttctgctggggctggcggtgggtgttgcctcttataccgcgccgctttacctctctgaaattg

SEQ ID NO: 692627 - DNA, 75 bp, synthetic construct
  source 1..75: mol_type = other DNA
caaaagtatgattgaggaagcggcagcgatatctaatcagtccgtcagccaatttatgttgaacagcgcttcgca

SEQ ID NO: 692628 - DNA, 75 bp, synthetic construct
  source 1..75: mol_type = other DNA
catatcatcggatactatacgttatcagcggccagtatattattaactgacttacctgagcatttgagaaaaaag

SEQ ID NO: 692629 - DNA, 75 bp, synthetic construct
  source 1..75: mol_type = other DNA
cacgtttcgctggaacatattgaacgtaatctgatgaaaggtcgtaaactgcgcgaaataggcgctcacgattaa

SEQ ID NO: 692630 - DNA, 75 bp, synthetic construct
  source 1..75: mol_type = other DNA
tcactcatcgtcggcgcagtatttcgctatcgccatgttgctgatgtttattgtcggttttgcgatgagcgccgg

SEQ ID NO: 692631 - DNA, 75 bp, synthetic construct
  source 1..75: mol_type = other DNA
caccaactggattgccaacatgattgtcggtgcaaccttcctgactatgctcaatacgctgggcaacgccaacac

SEQ ID NO: 692632 - DNA, 75 bp, synthetic construct
  source 1..75: mol_type = other DNA
gtccagcatcatttggacgaaaagaatcatatttctgaaatttgtatgaagccacgcagcggaatgactttattg

SEQ ID NO: 692633 - DNA, 75 bp, synthetic construct
  source 1..75: mol_type = other DNA
atgaaagagttgcaaaaaattaattcaataatggaaagattaagtgctcttgagcgtaagctggacgattgtgga

SEQ ID NO: 692634 - DNA, 75 bp, synthetic construct
  source 1..75: mol_type = other DNA
aacttagatgatgggcgaaaacaaattattgttactactgcgaggattattactgatgacatcgatacttcaaaa

SEQ ID NO: 692635 - DNA, 75 bp, synthetic construct
  source 1..75: mol_type = other DNA
tgcgaatacttgacggtgattttgttttaaacactgggcgcgagccgacattgtgtaataaccgcgtcagtatcg

SEQ ID NO: 692636 - DNA, 75 bp, synthetic construct
  source 1..75: mol_type = other DNA
tggtcgcctgctgattagcgcccacaccgaagatttttttgaccacctgacttttacggtatctcttgatgatta

SEQ ID NO: 692637 - DNA, 75 bp, synthetic construct
  source 1..75: mol_type = other DNA
attgccgagcgtagcccgacaatgagagcggatatttttacccgcatggaattactgattgaagatgatgaacgc

SEQ ID NO: 692638 - DNA, 75 bp, synthetic construct
  source 1..75: mol_type = other DNA
gtactgtttatcctgctgacattgtggctggtaccggaaccaaacacgtttcgctggaacatattgaacgtaatc

SEQ ID NO: 692639 - DNA, 75 bp, synthetic construct
  source 1..75: mol_type = other DNA
cgaataccggcggcgctattgatggcgtgagtgccaccgaccgtagcccgtattcaaaagcagaaattttctcgc

SEQ ID NO: 692640 - DNA, 75 bp, synthetic construct
  source 1..75: mol_type = other DNA
tgcgctgggacttcgcgcctctgcaatcactcgaactggaagcgggctacagccgccagggtaacctgtatgcgg

SEQ ID NO: 692641 - DNA, 75 bp, synthetic construct
  source 1..75: mol_type = other DNA
gcagtacgaacacacccgtaactcgcgtattccggaaggtctggcgggcggtaccgaagggaaatttaacgaaaa

SEQ ID NO: 692642 - DNA, 75 bp, synthetic construct
  source 1..75: mol_type = other DNA
aagcggcgaaggtattcaactgcaatgagatcgagccgctgcaggaacgctttaaagaactgaacgactggctgg

SEQ ID NO: 692643 - DNA, 75 bp, synthetic construct
  source 1..75: mol_type = other DNA
ctattatctggtcgatgcgtcgtatcagcaggcggtgaatttgctgccggaagaaaaacgtaaattgctggtgca

SEQ ID NO: 692644 - DNA, 75 bp, synthetic construct
  source 1..75: mol_type = other DNA
tggttgaaggccttgaaggatcgttaaacgtccctgttagcgaaacagtgatgtggactaacaacatcacttata

SEQ ID NO: 692645 - DNA, 75 bp, synthetic construct
  source 1..75: mol_type = other DNA
ggcgaaagataacttctccgatatcaaaagcgtcagccgtgacgaccagctagccgcgcaccgggtaccacctgc

SEQ ID NO: 692646 - DNA, 75 bp, synthetic construct
  source 1..75: mol_type = other DNA
aatcttggaacctcgttatggatgcaattactaatccgccagtaccaaatgaacaactgaaacgagccgctaaac

SEQ ID NO: 692647 - DNA, 75 bp, synthetic construct
  source 1..75: mol_type = other DNA
gtcagtttaggccatgagattgttacattcctttttatcatggagatatgggggaaagcaggagacgattttttc

SEQ ID NO: 692648 - DNA, 75 bp, synthetic construct
  source 1..75: mol_type = other DNA
ataccttcctgattggcgctttgctgggaacctgcggttatctgctgttcttctgggtttccgtctggtcactgc

SEQ ID NO: 692649 - DNA, 75 bp, synthetic construct
  source 1..75: mol_type = other DNA
gttttatccgctcacggataaaaaattcaaagaaatcgttgttgaaattgataatcgtaaaaaagtgcagcagca

SEQ ID NO: 692650 - DNA, 75 bp, synthetic construct
  source 1..75: mol_type = other DNA
gtgcgctatgtgttaaatgataccgggctgttcactgtgctggtactggtgcaaaacctggtcggtactgtggca

SEQ ID NO: 692651 - DNA, 75 bp, synthetic construct
  source 1..75: mol_type = other DNA
cttttcttcattgatgacattgaaggctatcgtgatggtaatgatattgcaggaagcctgaaaactaagttcgaa

SEQ ID NO: 692652 - DNA, 75 bp, synthetic construct
  source 1..75: mol_type = other DNA
atacttgggcttatttaacacttcaacgtatttatcgtgataaacttcaaaaaattaaggccaactcacacttgg

SEQ ID NO: 692653 - DNA, 75 bp, synthetic construct
  source 1..75: mol_type = other DNA
acctcatataacgcggcatacttgggcttatttgacgcttcaacgcatttattgtgaaaaatttcaaaaaattaa

SEQ ID NO: 692654 - DNA, 75 bp, synthetic construct
  source 1..75: mol_type = other DNA
attttcaggctgcgatggagcggcaaattgcccgtaaacgcgtattactggtctgttcaaccggaatcggaactt

SEQ ID NO: 692655 - DNA, 75 bp, synthetic construct
  source 1..75: mol_type = other DNA
atgcacctactttttaatcatccgaaaatcaataataaaaaagaagaaaaaggcttgtcgttgattgaatcagca

SEQ ID NO: 692656 - DNA, 75 bp, synthetic construct
  source 1..75: mol_type = other DNA
attactccatcagaagctgcagaatctggtaagggctgtgctgatggcagtgacaacagtgtaacttattttatg

SEQ ID NO: 692657 - DNA, 75 bp, synthetic construct
  source 1..75: mol_type = other DNA
aaggccacacacaaaaatatcatatgagtgataatgctgactggccgaagccccgcaaagcgggaacccatctta

SEQ ID NO: 692658 - DNA, 75 bp, synthetic construct
  source 1..75: mol_type = other DNA
atgcaaatgattacctcgcgacaaaacagattattacgattccttttaccacgaagggaatatacgactattgtt

SEQ ID NO: 692659 - DNA, 75 bp, synthetic construct
  source 1..75: mol_type = other DNA
gtgtattcactaaaccaattggttatctcagactggaaacggcgatggatcctgatggacatggaaacctctctg

SEQ ID NO: 692660 - DNA, 75 bp, synthetic construct
  source 1..75: mol_type = other DNA
aaacgtttcctgtctgagcaggctaatgctgccaatgtccaacgaattattcaagataatgcagcgggtgatgct

SEQ ID NO: 692661 - DNA, 75 bp, synthetic construct
  source 1..75: mol_type = other DNA
gcctctattgttaatgacctgagagtaattgagtcctggcttgcgccgttggggttatcgttgatccgcagtcca

SEQ ID NO: 692662 - DNA, 75 bp, synthetic construct
  source 1..75: mol_type = other DNA
gcctctattgttaatgacctgagagtgattgagtcctggcttgcgccgttgggggtatcattgatccgcagccca

SEQ ID NO: 692663 - DNA, 75 bp, synthetic construct
  source 1..75: mol_type = other DNA
caatggcgaataaccgttgagaagcgtgctggcgcgggtgtgatgttagactcgaagaatattactgatttgctg

SEQ ID NO: 692664 - DNA, 75 bp, synthetic construct
  source 1..75: mol_type = other DNA
gtcagctattactcctgctgaggcggcaactgtatgtgataagactgattcaaccaataaagttacatattttat

SEQ ID NO: 692665 - DNA, 75 bp, synthetic construct
  source 1..75: mol_type = other DNA
aaataaaaagtgaacgtgagtttttatcccttttcagagcgtttatgctggaagaagcagacagatttaccaaat

SEQ ID NO: 692666 - DNA, 75 bp, synthetic construct
  source 1..75: mol_type = other DNA
atacacttactcacccgattttgcttatgttgtaaaaacagcagaaggtgattatcttaactttatcattgaaac

SEQ ID NO: 692667 - DNA, 75 bp, synthetic construct
  source 1..75: mol_type = other DNA
gagcgcctgatcactattgctgtacctcgtatccgtgacttccgtggcctgtctgctaagtctttcgacggtcgt

SEQ ID NO: 692668 - DNA, 75 bp, synthetic construct
  source 1..75: mol_type = other DNA
agaacttgccgcatcagaaagcaggagtcgatgcggtgatgaatgtttttgtttccgcaacacctcacctgacgg

SEQ ID NO: 692669 - DNA, 75 bp, synthetic construct
  source 1..75: mol_type = other DNA
tacctataccaaaactatttttgacctgaataaatcatttggcattaacaagtttatcatcattgttcccactct

SEQ ID NO: 692670 - DNA, 75 bp, synthetic construct
  source 1..75: mol_type = other DNA
ataatgtaatatcaggaactgtccatcccacgaaattcaccaatgcagacggcggttatcttgctgatgtattgt

SEQ ID NO: 692671 - DNA, 75 bp, synthetic construct
  source 1..75: mol_type = other DNA
ttggtagttcaataaacccctactcttacgatcagacacttgctgataacatgatgcgtaaagctgtcaaagaac

SEQ ID NO: 692672 - DNA, 75 bp, synthetic construct
  source 1..75: mol_type = other DNA
cttgtgttagccttgcaactttaaatttagggacatcagctgccggatatggtattaaccaaactagcccaaata

SEQ ID NO: 692673 - DNA, 75 bp, synthetic construct
  source 1..75: mol_type = other DNA
cagccactagtggtaacgctaaattgtcagctattactcctgctgaggcggcaactgtatgtgcgaagactgatt

SEQ ID NO: 692674 - DNA, 75 bp, synthetic construct
  source 1..75: mol_type = other DNA
atgtcgaaaagcattataagtgatgatgataactttgctaaactcaacacaatgagttatcgagaatttcttgat

SEQ ID NO: 692675 - DNA, 75 bp, synthetic construct
  source 1..75: mol_type = other DNA
aaataaacagcgagcatgagtttttatccattttcaaatcattcatgcttgaagaagcagatagatttactaaat

SEQ ID NO: 692676 - DNA, 75 bp, synthetic construct
  source 1..75: mol_type = other DNA
gatgagcctcataagtttcctactggtaaaaagacatgggaaaatattgaaaaatttaatgctcaatatatcatc

SEQ ID NO: 692677 - DNA, 75 bp, synthetic construct
  source 1..75: mol_type = other DNA
tgcgctgaccggaacatggtcaggtctggcatttatgcgcgccctgatgggtttcagcgaagcgtcggcaattcc

SEQ ID NO: 692678 - DNA, 75 bp, synthetic construct
  source 1..75: mol_type = other DNA
attattggtgccattgcactgtggacgcttatcaaagttaaagatgaagaaccgcacgtacagttagcaacaagc

SEQ ID NO: 692679 - DNA, 75 bp, synthetic construct
  source 1..75: mol_type = other DNA
tatattgaatcagggcaagaacagcatcttaaaacagataagaaagaaaaaacgtcaatcaagcatatcctcagc

SEQ ID NO: 692680 - DNA, 75 bp, synthetic construct
  source 1..75: mol_type = other DNA
tgaacaggcgctgtactacattggcggcgtaatcaaacacgctaaagcgattaacgccctggcaaacccgaccac

SEQ ID NO: 692681 - DNA, 75 bp, synthetic construct
  source 1..75: mol_type = other DNA
ttaacgccctggcaaacccgaccaccaactcttataagcgtctggtcccgggctacgaagcaccggtaatgctgg

SEQ ID NO: 692682 - DNA, 75 bp, synthetic construct
  source 1..75: mol_type = other DNA
tccctgctcatcaggtgaatgctgaattcttcgaagaaggcaaaatgtttgacggctcctcgattggcggctgga

SEQ ID NO: 692683 - DNA, 75 bp, synthetic construct
  source 1..75: mol_type = other DNA
aggccagaaaaaagcagtaaaaacaacaggcagccgcacacgcctgaatatcatgggggcgctgaatctgaaagc

SEQ ID NO: 692684 - DNA, 75 bp, synthetic construct
  source 1..75: mol_type = other DNA
aaacaacaggcaaccgcacacgcctgaatatcatgggggcgctgaatctgaaagcactgacgtcaccgctaatct

SEQ ID NO: 692685 - DNA, 75 bp, synthetic construct
  source 1..75: mol_type = other DNA
tcagtatcattggctttgggccgttctttattgcactggcggtatttgacctgattggtgctgcagccttatgga

SEQ ID NO: 692686 - DNA, 75 bp, synthetic construct
  source 1..75: mol_type = other DNA
attgctgtgttattgattagtattggcgcgttctcgcatcaatgtctttctactgttgcagcaactctgggcggc

SEQ ID NO: 692687 - DNA, 75 bp, synthetic construct
  source 1..75: mol_type = other DNA
ctgacagaacggcattaggtattgcggctccaacgattatggagacaaccggaataactaaagagcaatattcat

SEQ ID NO: 692688 - DNA, 75 bp, synthetic construct
  source 1..75: mol_type = other DNA
ctgtttcctttatggcaacagtgttacttttattgctctttgcttgccatagcaccattgccaacgcagctgtcg

SEQ ID NO: 692689 - DNA, 75 bp, synthetic construct
  source 1..75: mol_type = other DNA
gagttgattaaagcaatgaatcattttcgtgcagtggtgagcttatttcccagacggctaaccatgccgaattaa

SEQ ID NO: 692690 - DNA, 75 bp, synthetic construct
  source 1..75: mol_type = other DNA
gatgagataggccaggccggaaatgcgcgggaagtgtcaacgtctgcttatacgctgtttaacggttcagggaaa

SEQ ID NO: 692691 - DNA, 75 bp, synthetic construct
  source 1..75: mol_type = other DNA
ggggcgaaggacggcggcaacagggagataaaacactggcgaacagtggcaatcagtaccggagaaatggacgtt

SEQ ID NO: 692692 - DNA, 75 bp, synthetic construct
  source 1..75: mol_type = other DNA
catagacccggcgcaattctggtttgttccgcgctacgttgacgatcacgcgttcgaaccaggcagcgtctgcca

SEQ ID NO: 692693 - DNA, 75 bp, synthetic construct
  source 1..75: mol_type = other DNA
aagtcatcacaatggcgatcccgtgcggtggcattggcgaccgtgacggctggcggctgctgaaagaccacggac

SEQ ID NO: 692694 - DNA, 75 bp, synthetic construct
  source 1..75: mol_type = other DNA
cgtgaacggtggcgaaacctgataccggagagctacggcgaacaggttcaccgtgtaggggaacgattcgccata

SEQ ID NO: 692695 - DNA, 75 bp, synthetic construct
  source 1..75: mol_type = other DNA
ggccaagccggaaacgcacgggaggtgtccacgtcggcttatacgctgtttaacggttcgggaaaattacagggg

SEQ ID NO: 692696 - DNA, 75 bp, synthetic construct
  source 1..75: mol_type = other DNA
ccgagaataatcaagaactggcaaatgaagtctcctgcctgaaagcgatgctgacgctgatgctgcaggcgatgg

SEQ ID NO: 692697 - DNA, 75 bp, synthetic construct
  source 1..75: mol_type = other DNA
cctgaatggacttaatcacattgcggagttaagggcgaaagtttttggtctgaatattgagtcagagcttgaacg

SEQ ID NO: 692698 - DNA, 75 bp, synthetic construct
  source 1..75: mol_type = other DNA
agcgaaaataaaataacaattatcattgacgaacttgaccgttgtaaaccaagctttgccatctctatcatcgaa

SEQ ID NO: 692699 - DNA, 75 bp, synthetic construct
  source 1..75: mol_type = other DNA
tatcagcaccggagaggtggacattgaaacattcctcaaaaccgaggggataaaggtaaaagtagggcagcttgt

SEQ ID NO: 692700 - DNA, 75 bp, synthetic construct
  source 1..75: mol_type = other DNA
ccgtcgaagccgctattgcccgtgccaaagcgcgcaaactggaacagcaacaggctaatgcggagccagaagaac

SEQ ID NO: 692701 - DNA, 75 bp, synthetic construct
  source 1..75: mol_type = other DNA
aaacacaactcaactaaaagcatccataaatcatatctatggctcttctgtagactccaaccgttatcttgacaa

SEQ ID NO: 692702 - DNA, 75 bp, synthetic construct
  source 1..75: mol_type = other DNA
gtaagtgtattccagctggcgtacacaataggtcaaccaattatggggttctttattgataatatcggccttaaa

SEQ ID NO: 692703 - DNA, 75 bp, synthetic construct
  source 1..75: mol_type = other DNA
cgtaacggtaagaaaaatattgtgtcgttttacggtaacctgttacgtgtttatttgagttcccctgtctggtgg

SEQ ID NO: 692704 - DNA, 75 bp, synthetic construct
  source 1..75: mol_type = other DNA
tcgcactaagttgtaccaccgaaatcatccatgataattacgcgttatgcctgcaattctggctcaatggcgtta

SEQ ID NO: 692705 - DNA, 75 bp, synthetic construct
  source 1..75: mol_type = other DNA
actttatgcagcatcgccagcgctggtagtgcctgataagttgccgcgtgaatacataagaggttggcctcttgc

SEQ ID NO: 692706 - DNA, 75 bp, synthetic construct
  source 1..75: mol_type = other DNA
gccggattagatctcgatttatggggcgtacatcgctcagcggttgccgccgccattggcgcgcataacgccgcg

SEQ ID NO: 692707 - DNA, 75 bp, synthetic construct
  source 1..75: mol_type = other DNA
gccagttccggctggccgcaagcgcagtggtggagacagtttaatgatccacaactggatgcgctgatccaacgg

SEQ ID NO: 692708 - DNA, 75 bp, synthetic construct
  source 1..75: mol_type = other DNA
cttgccgaagagatgtcattactgatgctggacagctgccgcgtgatggctgtcacgcggtatttcgtttcgtca

SEQ ID NO: 692709 - DNA, 75 bp, synthetic construct
  source 1..75: mol_type = other DNA
gcatcaactttttctgccagttcccctctgcgaaactttccaccagcgcgtgctggaaagctacgcccatacgca

SEQ ID NO: 692710 - DNA, 75 bp, synthetic construct
  source 1..75: mol_type = other DNA
cgaccacctcttcccgttccctctactgtgccaccagccgcgatatgatcaagttctccctgagcgtacggctga

SEQ ID NO: 692711 - DNA, 75 bp, synthetic construct
  source 1..75: mol_type = other DNA
ccatcaactgtttctgcccgttcccctctgcgaaactttccaccagcgcgtgctggaaagccatgtccatacgca

SEQ ID NO: 692712 - DNA, 75 bp, synthetic construct
  source 1..75: mol_type = other DNA
aaggcaaccttcacgcaaattgaccatgaatataatacgttcaccgctatgtattctgacaaagcagaagccaaa

SEQ ID NO: 692713 - DNA, 75 bp, synthetic construct
  source 1..75: mol_type = other DNA
taatcgaagaggccaaattaaaaatagcgattacgaaatgtcaccccaattcagggatggcacggatagagggtg

SEQ ID NO: 692714 - DNA, 75 bp, synthetic construct
  source 1..75: mol_type = other DNA
tttatattcgactgcatcttaaagaatcgccatcattcgcaaaactcgaagctcgtcaacaagttacagaatcac

SEQ ID NO: 692715 - DNA, 75 bp, synthetic construct
  source 1..75: mol_type = other DNA
ccacctggataccttattcaaaaaaaccagtcgccagttcaacttcatcccgggtctgaaattgccgctgtttga

SEQ ID NO: 692716 - DNA, 75 bp, synthetic construct
  source 1..75: mol_type = other DNA
gaatatcctttacttccgaccggaagaaggagagcgactggaggccattctgactgatattgcggagacgataaa

SEQ ID NO: 692717 - DNA, 75 bp, synthetic construct
  source 1..75: mol_type = other DNA
aaaagcagaaaacgcggtgaagattgccagagaagctggctacaccgctgtaatttcagcagatagcatgaatat

SEQ ID NO: 692718 - DNA, 75 bp, synthetic construct
  source 1..75: mol_type = other DNA
gtgccggtggtgccagatgctcgtccgtctttaaataatggcatagtcggctttgatgaaggctggaacgcctgc

SEQ ID NO: 692719 - DNA, 75 bp, synthetic construct
  source 1..75: mol_type = other DNA
gccgctggcgacgacatggcgggtatttgtggtgttaagctgaatgtggtcgacgatccgacatacgagcaccgc

SEQ ID NO: 692720 - DNA, 75 bp, synthetic construct
  source 1..75: mol_type = other DNA
ctgaaaatagagccagtagcgttctatcccgcttattacgaatcgatcgacgatgcagacattaaagacattgcg

SEQ ID NO: 692721 - DNA, 75 bp, synthetic construct
  source 1..75: mol_type = other DNA
tgaattgccaccagcactgccaaagatggcagacgacgagcctgcaacgcttatgaaactggctgttgcagggct

SEQ ID NO: 692722 - DNA, 75 bp, synthetic construct
  source 1..75: mol_type = other DNA
gccggactggatctcgatttgtggggtgtgcatcgctcagcggttgctgccgccattggcgcgcataatgccgcg

SEQ ID NO: 692723 - DNA, 75 bp, synthetic construct
  source 1..75: mol_type = other DNA
aacggcacgcgtctgcaaacgctcaacgacgagcgagagatgcaggctgaacgcgtagaagcaacgcgcttcacc

SEQ ID NO: 692724 - DNA, 75 bp, synthetic construct
  source 1..75: mol_type = other DNA
attactgatgctggacagccgccgggtgatccaaagcattcagttgatgaaatcgctgggcggcgggtatcaggc

SEQ ID NO: 692725 - DNA, 75 bp, synthetic construct
  source 1..75: mol_type = other DNA
ctgctggtttcggcggtaaaacgcctgagcgatcgcctcggtatcactgtgcaacaggccgcccatgcatgggtc

SEQ ID NO: 692726 - DNA, 75 bp, synthetic construct
  source 1..75: mol_type = other DNA
agcacagtcgcaagccgatctgttagatgcaggttcgcaattacaggtggcggcgttagggatgctcaatcgcca

SEQ ID NO: 692727 - DNA, 75 bp, synthetic construct
  source 1..75: mol_type = other DNA
cgccagttcaacttcatcccgggcctgaaattgccgctgtttgacggtggacggttgaatgccaatctcgaaggc

SEQ ID NO: 692728 - DNA, 75 bp, synthetic construct
  source 1..75: mol_type = other DNA
atgggggaggcggtcaatggttatatcaatatccgctatgacaagctttctacgctgacggcgagcagcagccag

SEQ ID NO: 692729 - DNA, 75 bp, synthetic construct
  source 1..75: mol_type = other DNA
agaacaccagaaggtaaagttatttcttgtgttaatggagtatggagcggatcaacaggaagtccagtaataaga

SEQ ID NO: 692730 - DNA, 75 bp, synthetic construct
  source 1..75: mol_type = other DNA
aatggttcaaattaaaggtacgccgggagtccctgctgtccccggaacacgccgtccagatcctgaatcacaaag

SEQ ID NO: 692731 - DNA, 75 bp, synthetic construct
  source 1..75: mol_type = other DNA
gtctcgacgtcggggcgtactggcgacgtcgtgaagccgagggggatgtggtgattgctgatgttccggcagaaa

SEQ ID NO: 692732 - DNA, 75 bp, synthetic construct
  source 1..75: mol_type = other DNA
acgtcgtgaagccgagggggatgtggtgattgctgatgttccggcagaaacatcccgtcctgaaaccaaaaacca

SEQ ID NO: 692733 - DNA, 75 bp, synthetic construct
  source 1..75: mol_type = other DNA
aaacagatcggtgaagcagttaatggctatataaatatccgttatgataaattatcaaccttatccaatgctgcc

SEQ ID NO: 692734 - DNA, 75 bp, synthetic construct
  source 1..75: mol_type = other DNA
gcaacagttgatgtctcaggtcgaacatagccttaatcctgttgcacattttttacccgatcaatttcatattgg

SEQ ID NO: 692735 - DNA, 75 bp, synthetic construct
  source 1..75: mol_type = other DNA
tatgctgaaaaatgcacttgctcacggagagttcagaccttattttcaacccatcatttccgctaaaaaccacca

SEQ ID NO: 692736 - DNA, 75 bp, synthetic construct
  source 1..75: mol_type = other DNA
ctctggtttatactatcccggtaaaaatgcaacttatctatgcttggaaccaagcctggtttatgctccctgttg

SEQ ID NO: 692737 - DNA, 75 bp, synthetic construct
  source 1..75: mol_type = other DNA
ctatttttccactgttatggctgacaatcgtcgggatttttggctgcatcattggcagcttccttaacgtggtaa

SEQ ID NO: 692738 - DNA, 75 bp, synthetic construct
  source 1..75: mol_type = other DNA
tgttcattattctgctgacatttttctggaaaaaagcagagctggtgaatgacagccagatcagagttaatttcg

SEQ ID NO: 692739 - DNA, 75 bp, synthetic construct
  source 1..75: mol_type = other DNA
cgacagcggcatacaaaaagaaagtcattcaaaaaaatatccgttctccctgatttatactatcccggtgaaaat

SEQ ID NO: 692740 - DNA, 75 bp, synthetic construct
  source 1..75: mol_type = other DNA
taatatttatgcttcaggtaatcttaccgcaggcacgataatatctaacgggacaattgaatcaacaggcaggat

SEQ ID NO: 692741 - DNA, 75 bp, synthetic construct
  source 1..75: mol_type = other DNA
aacctatgacttcgaacgtctgatggaaggcgctaaactgctgaaatgttcagagtttggtgatgcgatcatcga

SEQ ID NO: 692742 - DNA, 75 bp, synthetic construct
  source 1..75: mol_type = other DNA
ccgctgagatgatgctgcgccagatgggttggacggaagcggctgacttcattgttaaaggtatggaaggcgcaa

SEQ ID NO: 692743 - DNA, 75 bp, synthetic construct
  source 1..75: mol_type = other DNA
ccgctgagatgatgctgcgccacatgggttggacggaagcggctgacttgattgttaaaggtatggaaggcgcaa

SEQ ID NO: 692744 - DNA, 75 bp, synthetic construct
  source 1..75: mol_type = other DNA
aacctatgacttcgaacgtctgatggagggcgctaatctgctgaaatgttcagagtttggtgacgcgatcatcga

SEQ ID NO: 692745 - DNA, 75 bp, synthetic construct
  source 1..75: mol_type = other DNA
aacctatgacttcgaacgtctgatggacggcgctaatctgctgaaatgttcagagtttggtgaggcgatcatcga

SEQ ID NO: 692746 - DNA, 75 bp, synthetic construct
  source 1..75: mol_type = other DNA
aacctatgacttcgaacgtctgatggatggcgctaaactgctgaaatgttcagagtttggtgaagcgatcatcga

SEQ ID NO: 692747 - DNA, 75 bp, synthetic construct
  source 1..75: mol_type = other DNA
gacatggatgcttacaggaggaaaaaactatggaaatgcttgccaaatttatttaaataattcagggttagcttc

SEQ ID NO: 692748 - DNA, 75 bp, synthetic construct
  source 1..75: mol_type = other DNA
tcgtgtgtcagtggtaaatggcagacagcaagtggtgatggcctgaaaggtatttttataacaataaccgatcaa

SEQ ID NO: 692749 - DNA, 75 bp, synthetic construct
  source 1..75: mol_type = other DNA
atatctggaacccttattgcagaatataatgaggagcgttgtagtggtggtaggaatacacattgttatagtaat

SEQ ID NO: 692750 - DNA, 75 bp, synthetic construct
  source 1..75: mol_type = other DNA
ccgctgagatgatgctgcgccatatgggttggacggaagcggctgacatcattgttaaaggtatggaaggcgcaa

SEQ ID NO: 692751 - DNA, 75 bp, synthetic construct
  source 1..75: mol_type = other DNA
ccgctgagatgatgctgcgccaaatgggttggacggaagcggctgacgttattgttaaaggtatggaaggcgcaa

SEQ ID NO: 692752 - DNA, 75 bp, synthetic construct
  source 1..75: mol_type = other DNA
acatctggatataaatgtgtaatacccaatagtgatacaggtgcatgtgcttgtccggggtcgatgtatgactca

SEQ ID NO: 692753 - DNA, 75 bp, synthetic construct
  source 1..75: mol_type = other DNA
ttggcgctatcgattacgccattaacggcggcatacaaccgtcgcgggtggtggtggtcgatatcgacgacaaac

SEQ ID NO: 692754 - DNA, 75 bp, synthetic construct
  source 1..75: mol_type = other DNA
ccgatcttgataataaaggatgggttaaagggtggggtgttgttcgtaatgccccctggcatttagccggtgttt

SEQ ID NO: 692755 - DNA, 75 bp, synthetic construct
  source 1..75: mol_type = other DNA
aaaccctggcatctggtcggcatttatgcaacggaggatggcgcaaagtctaaacgctctgaattgaatggggag

SEQ ID NO: 692756 - DNA, 75 bp, synthetic construct
  source 1..75: mol_type = other DNA
gatggtcgactggttgctatggttgctggtgttaagtttgggcgtaaacctcaccaaaaatgtaagcgtaaactg

SEQ ID NO: 692757 - DNA, 75 bp, synthetic construct
  source 1..75: mol_type = other DNA
gcgtcagttgtgccaggaaatgcatgatttgtatgcccgtcacaacgtgaaacaactgcaaaaagagatgttccg

SEQ ID NO: 692758 - DNA, 75 bp, synthetic construct
  source 1..75: mol_type = other DNA
cctgtttacctctttctcagggagtttagtctccaggatttccggggcggttcaatccatgtacacgacctgtca

SEQ ID NO: 692759 - DNA, 75 bp, synthetic construct
  source 1..75: mol_type = other DNA
tggctaacattggttatattcgagtttcatcaatccagcagattacagaccgtcaattagaaggggttgcactgg

SEQ ID NO: 692760 - DNA, 75 bp, synthetic construct
  source 1..75: mol_type = other DNA
gcccggctggaaattattaccggtctgttcaaccgtctgcaaaaaacgctccgggccatgccaccggacgaccgt

SEQ ID NO: 692761 - DNA, 75 bp, synthetic construct
  source 1..75: mol_type = other DNA
aactggcagaagagcgtaagggggcgtgcgctcccggaagaggcgatgacgggctggagtgaaggcatggctcgt

SEQ ID NO: 692762 - DNA, 75 bp, synthetic construct
  source 1..75: mol_type = other DNA
attacttgaagaagagaatagaaatttaaagcaacagtttgttgtgtggcagtataatgcatacaaacacaacat

SEQ ID NO: 692763 - DNA, 75 bp, synthetic construct
  source 1..75: mol_type = other DNA
cagaatagcgccactgatgcccgtgctgtgcaggctgccgcacaggcagatgcagatgcgggcagcagcaatacc

SEQ ID NO: 692764 - DNA, 75 bp, synthetic construct
  source 1..75: mol_type = other DNA
atccccgtgttcaggaaatggtggataactggcagaagagcgtaaggagtcgtgcgcttccggaagaggcgatga

SEQ ID NO: 692765 - DNA, 75 bp, synthetic construct
  source 1..75: mol_type = other DNA
aaacagagcagtaaagtggctttaccggaagccatggtgaagggatatatcacccgcctggaaaatcagcctgtg

SEQ ID NO: 692766 - DNA, 75 bp, synthetic construct
  source 1..75: mol_type = other DNA
actacacccgtgaggcgggcgtgcgtggtctggagcgtgaaatctccaaactgtgccgcaaagcggttaagcagt

SEQ ID NO: 692767 - DNA, 75 bp, synthetic construct
  source 1..75: mol_type = other DNA
ctggcggtgaactagcccggttctatttcacaggtattcgtggtccagggattccgaatcagatagaaaaagcac

SEQ ID NO: 692768 - DNA, 75 bp, synthetic construct
  source 1..75: mol_type = other DNA
gcatgagcaacggcaccggtgtagtagaaacgaacaatacagcagccaaagaagaaattgaacatttaatgaatg

SEQ ID NO: 692769 - DNA, 75 bp, synthetic construct
  source 1..75: mol_type = other DNA
ggcgatggaccatgataaaaaaattatgctggtcgcgcagaaagaagcctcaacggatgagccgggtgtaaacga

SEQ ID NO: 692770 - DNA, 75 bp, synthetic construct
  source 1..75: mol_type = other DNA
ctggaaagcggcgttactcggtagtgaacataaacgcgtacccgacgatttagaaaatcatccggtcattaccgg

SEQ ID NO: 692771 - DNA, 75 bp, synthetic construct
  source 1..75: mol_type = other DNA
gtttagatgacccggcctacctggtttggttcggcgaaattggcgtgcatgaattcgcgtatctggtgaaaaact

SEQ ID NO: 692772 - DNA, 75 bp, synthetic construct
  source 1..75: mol_type = other DNA
aaagtgaacttgccctgttctacttcaacggaacgcgtagcgcacagatcccggccctgattgaaaaaccgcttc

SEQ ID NO: 692773 - DNA, 75 bp, synthetic construct
  source 1..75: mol_type = other DNA
aagctgaaaatgatgtctccgatgtcggcagaagcgaccgtagtgcgtggttatatcgactggatggtacaggta

SEQ ID NO: 692774 - DNA, 75 bp, synthetic construct
  source 1..75: mol_type = other DNA
gtgccgtggaatgcgcgtagcaaggtcaaaaaagacctgcgtcaggcgcaggaaatccttgataccgaccattat

SEQ ID NO: 692775 - DNA, 75 bp, synthetic construct
  source 1..75: mol_type = other DNA
gaccggtaacccggttcgtgccgatgtggcaatgaccggtgagatcactctgcgtggtcaggtactgccgatcgg

SEQ ID NO: 692776 - DNA, 75 bp, synthetic construct
  source 1..75: mol_type = other DNA
caatcagccagttcgaaggctacatcaagctaaacaaaaaaatcccaccagaagtgctgacgtcgctgaatagca

SEQ ID NO: 692777 - DNA, 75 bp, synthetic construct
  source 1..75: mol_type = other DNA
caatcagccagttcgaaggctacatcaagctgaataagaaaatcccaccagaagtgctgacgtcgctgaacagca

SEQ ID NO: 692778 - DNA, 75 bp, synthetic construct
  source 1..75: mol_type = other DNA
tgcgtggtcaggtgttgcctatcggcggtttgaaagaaaaactgctggcagcgcatcgcggcggaattaaaacag

SEQ ID NO: 692779 - DNA, 75 bp, synthetic construct
  source 1..75: mol_type = other DNA
aaaaaaagggacggaaacaaataccaatttgacacttgtttatcgttgtaatgacgagacggctgaatgggttgc

SEQ ID NO: 692780 - DNA, 75 bp, synthetic construct
  source 1..75: mol_type = other DNA
tatggagttattgtatgagcggattggtgacaaatctttctcatttggtgattattgtggtatagcatttgtgct

SEQ ID NO: 692781 - DNA, 75 bp, synthetic construct
  source 1..75: mol_type = other DNA
cgtaactcattatggcaatcttgaaggtgtcgatttttatggttacgacgaacttattcgcaatgataaaacagg

SEQ ID NO: 692782 - DNA, 75 bp, synthetic construct
  source 1..75: mol_type = other DNA
agaaatcgcttctcttacaccgggaagaaataaccgcgttgatggagaaaaatgttgcgattgaaaagaataaca

SEQ ID NO: 692783 - DNA, 75 bp, synthetic construct
  source 1..75: mol_type = other DNA
aacagcagagatagaagaaaatgaagggcgattgattgttaatcataaacctgatgcggtatatctcaaggaaag

SEQ ID NO: 692784 - DNA, 75 bp, synthetic construct
  source 1..75: mol_type = other DNA
tagtgcagagatagagagtgggaaaaatcgtctggttattaaccagatccccgatgcagtatatcttaccacaaa

SEQ ID NO: 692785 - DNA, 75 bp, synthetic construct
  source 1..75: mol_type = other DNA
agggcgttggtaactatattagagctcattcacgttcttatgagtttaataacataaatgttatctacggtgaaa

SEQ ID NO: 692786 - DNA, 75 bp, synthetic construct
  source 1..75: mol_type = other DNA
cttcccgatccggtgaaagcgatggggcgtcttctggtggagaacattaataccgaccccaggctggcgctggat

SEQ ID NO: 692787 - DNA, 75 bp, synthetic construct
  source 1..75: mol_type = other DNA
atcaggctgagttcaacatcacgacaatgtgccacgtgctccgggagggccgcagcgactggtatatgtggtgtc

SEQ ID NO: 692788 - DNA, 75 bp, synthetic construct
  source 1..75: mol_type = other DNA
ggcggggaacgatgctgtatggagctgtagaacttgtagatgaggttgaaaagtctctgacgattgttgagtcac

SEQ ID NO: 692789 - DNA, 75 bp, synthetic construct
  source 1..75: mol_type = other DNA
aaacttgaatgatagaacggatttttctgtgtgtattagccgactggctgatgatggtattttggacgcagccac

SEQ ID NO: 692790 - DNA, 75 bp, synthetic construct
  source 1..75: mol_type = other DNA
ggaatctaataaaaaaagattattgcttgagccagattgtcgagaatatcttgaactgaaaaaagaaatagatat

SEQ ID NO: 692791 - DNA, 75 bp, synthetic construct
  source 1..75: mol_type = other DNA
gctatatcaaaacttaatgatcagtaccattttctgacacttgcgacttataaccagattaaggcgctacaggat

SEQ ID NO: 692792 - DNA, 75 bp, synthetic construct
  source 1..75: mol_type = other DNA
aaatgtccgaagacgggaaagtaattatagatggcaggcatagaatactacttattatgcagatttataaagtaa

SEQ ID NO: 692793 - DNA, 75 bp, synthetic construct
  source 1..75: mol_type = other DNA
aagttttccctcctcaagtagagggaggaccaacaattccttctccagatgagcctggacttccattacccgggg

SEQ ID NO: 692794 - DNA, 75 bp, synthetic construct
  source 1..75: mol_type = other DNA
gacgtatatccggaaaagcatatgagggacctgaggagatagctgacggaggcggactttctgtcaggatcagcc

SEQ ID NO: 692795 - DNA, 75 bp, synthetic construct
  source 1..75: mol_type = other DNA
acttagcagtgctgtcgatagcaccagcgaatcactggctgcaactccaaaggcagttaaagctgcgaatgacaa

SEQ ID NO: 692796 - DNA, 75 bp, synthetic construct
  source 1..75: mol_type = other DNA
gctgaatttggccgcgattattgggaagagaaaaacggtatcttaaccgagagtgatttgttgcatatcgcccgc

SEQ ID NO: 692797 - DNA, 75 bp, synthetic construct
  source 1..75: mol_type = other DNA
atgaacataagtgtggaagatttgtttccggagtcatttcaacgaattaaagaagaagaagcgaacaggcctgat

SEQ ID NO: 692798 - DNA, 75 bp, synthetic construct
  source 1..75: mol_type = other DNA
aagaagtaaagcaatcaggcagcagaagaagtttttggatgcaggggctattagtgaagagcaatataataataa

SEQ ID NO: 692799 - DNA, 75 bp, synthetic construct
  source 1..75: mol_type = other DNA
cccttgatcaaaaaatttcagatgttctccgtcaaattgatgaaatagaaaaaatacccgacccggagttttcgg

SEQ ID NO: 692800 - DNA, 75 bp, synthetic construct
  source 1..75: mol_type = other DNA
atctgggccgatttttttcccgcaaacaatcgaatcagcctatttaggctattttttccaccatttctggcgtta

SEQ ID NO: 692801 - DNA, 75 bp, synthetic construct
  source 1..75: mol_type = other DNA
tggatattggccgtgaggcctcccttgatcaaaaaatctcagatgttctccgtcaaattgatgaaatagaaaaaa

SEQ ID NO: 692802 - DNA, 75 bp, synthetic construct
  source 1..75: mol_type = other DNA
tagaacacttatgggaatggttgatcagcgagtgcagggcactctgttaaatatgcgacgtgatggaggaatatt

SEQ ID NO: 692803 - DNA, 75 bp, synthetic construct
  source 1..75: mol_type = other DNA
attgctcaggacgtactaaattcatcaataaacgattacaacaagcgacaacaggaaggaattgaactcagacag

SEQ ID NO: 692804 - DNA, 75 bp, synthetic construct
  source 1..75: mol_type = other DNA
aactcccacctgccacctggatccgcgaaatgattcgccatttccaatacgacggccaggtaatagtgaaccgcc

SEQ ID NO: 692805 - DNA, 75 bp, synthetic construct
  source 1..75: mol_type = other DNA
gaatatgacgccggcaaagggattaattgcgcttctcgtcggtggtgcatatctcataattgataactgggaaac

SEQ ID NO: 692806 - DNA, 75 bp, synthetic construct
  source 1..75: mol_type = other DNA
tgctgaatgccctgttcgggaaagagtctctgggcgcgatagcacctctgctgactaaccttgatttgttgcgta

SEQ ID NO: 692807 - DNA, 75 bp, synthetic construct
  source 1..75: mol_type = other DNA
cgcctgtgcgggttaagcgtctggatcctgattcgtattctgaaagatgagctgattctggcgtactccactgcc

SEQ ID NO: 692808 - DNA, 75 bp, synthetic construct
  source 1..75: mol_type = other DNA
cgatatcagctcgctggacgacttcctgcgtcattacgaaacctttgtggagccgcccggtacgccgccgtttga

SEQ ID NO: 692809 - DNA, 75 bp, synthetic construct
  source 1..75: mol_type = other DNA
cggtgaagccacggtacattgttgatgaggacgtattggctcctcttgatgatttgccggaagaagtagagacat

SEQ ID NO: 692810 - DNA, 75 bp, synthetic construct
  source 1..75: mol_type = other DNA
tggcagccattcgtgcagcaacagtcgcccagaatcaatggacaacggcggcaggaaaaacggcgctgaaattaa

SEQ ID NO: 692811 - DNA, 75 bp, synthetic construct
  source 1..75: mol_type = other DNA
taaaaccgcagttagccagatcaaggcctggacaaaacgtctggaggatgccgttaatcttgctgacagcattcc

SEQ ID NO: 692812 - DNA, 75 bp, synthetic construct
  source 1..75: mol_type = other DNA
ttttgaacgtctgatggaaggtgctaaactgctgaaatgtagcgagtttggcgacgcaatcatcaaaaacatgta

SEQ ID NO: 692813 - DNA, 75 bp, synthetic construct
  source 1..75: mol_type = other DNA
cttcgaacgtctgatggaaggcgctaagctgctgaaatgttcagaatttggtgatgcgatcatcaagaacatgta

SEQ ID NO: 692814 - DNA, 75 bp, synthetic construct
  source 1..75: mol_type = other DNA
gtagagtttatagctgggcttatgaacggggcgtcgtgaagggaaatccctgcaaaggagttcgacagtttaagg

SEQ ID NO: 692815 - DNA, 75 bp, synthetic construct
  source 1..75: mol_type = other DNA
aaaacttcttcctgtttttgggagaatggatcctgatgcactgaaaccacaacacatcaggatgtacatggataa

SEQ ID NO: 692816 - DNA, 75 bp, synthetic construct
  source 1..75: mol_type = other DNA
cagatgcaattcttccaccaagagtatacagaggaaaatcaaagtatgaatttcaccctgctaacggcggttcta

SEQ ID NO: 692817 - DNA, 75 bp, synthetic construct
  source 1..75: mol_type = other DNA
aaccggaaggcacgccggaatttaaggcacacatccgtctgcctggtgcaactgccgccggtgaaaacgccggac

SEQ ID NO: 692818 - DNA, 75 bp, synthetic construct
  source 1..75: mol_type = other DNA
atgtcggaacaaggcctgtgggagagattaaaccgctagagctgctgaacgttctgcgtaaaattgagaaacgtg

SEQ ID NO: 692819 - DNA, 75 bp, synthetic construct
  source 1..75: mol_type = other DNA
tcataccctttctacaatcctgcatgagcaaggttttgagagtgcttggattgaaatccagttggctcatgtaga

SEQ ID NO: 692820 - DNA, 75 bp, synthetic construct
  source 1..75: mol_type = other DNA
agctgatgagatacctgattttctacgtgccttagagggttactccgggagtaagcttgtccagatagccacgaa

SEQ ID NO: 692821 - DNA, 75 bp, synthetic construct
  source 1..75: mol_type = other DNA
cagcttgatggtatccttcgccggcattcccgtcattttgccatgctttacttttctgaccatggtctgtcggtc

SEQ ID NO: 692822 - DNA, 75 bp, synthetic construct
  source 1..75: mol_type = other DNA
ggaggctacagcgttcccctgattattaccgccagtgacatcacgtcgcatcagtccgtcagcagaaaaatcagt

SEQ ID NO: 692823 - DNA, 75 bp, synthetic construct
  source 1..75: mol_type = other DNA
cgctacgcaattgcaacgggtagggcggagtacaatcctgcggctgatctctccagcgctctcgaagtacaccaa

SEQ ID NO: 692824 - DNA, 75 bp, synthetic construct
  source 1..75: mol_type = other DNA
tgctttagatagttatgcaggaagccgacttgttcagattgccacaaaattattgatggttactggggttagaac

SEQ ID NO: 692825 - DNA, 75 bp, synthetic construct
  source 1..75: mol_type = other DNA
gaaaagattgccagagagtggcatcagatgaagtcggcaaaatggtctgctgggtatgcctcagatattattgag

SEQ ID NO: 692826 - DNA, 75 bp, synthetic construct
  source 1..75: mol_type = other DNA
acgcatcccggcgactggagcgacagtgtgctgcgcaccatgctgattaacgccccggcgatctacgttgcctgg

SEQ ID NO: 692827 - DNA, 75 bp, synthetic construct
  source 1..75: mol_type = other DNA
aggttatgcgtcagacatcatggaagcgtttcagaacgacatattcccttatgtaggggctaggccagttggtga

SEQ ID NO: 692828 - DNA, 75 bp, synthetic construct
  source 1..75: mol_type = other DNA
tcactcttgctgatgctcgttcccgtcgtgatgaagctcgaaaacttgtggcagaaggaaagaaccctagtgagg

SEQ ID NO: 692829 - DNA, 75 bp, synthetic construct
  source 1..75: mol_type = other DNA
tttgggaaattcctgcagaaagaatgaaaatgcgtaggtcgcaccttgtccccttatcgacgcaggcgctaggct

SEQ ID NO: 692830 - DNA, 75 bp, synthetic construct
  source 1..75: mol_type = other DNA
gtgaagaaaaagaacgcttgctggttgtgccggatgatgacgttcttctgacgcgcatgtgttttctgaatgaac

SEQ ID NO: 692831 - DNA, 75 bp, synthetic construct
  source 1..75: mol_type = other DNA
aactggaaaagcagcataaatcagcactcgacagcctgctcatatcagagggtgaacaaccttcccgtctggcat

SEQ ID NO: 692832 - DNA, 75 bp, synthetic construct
  source 1..75: mol_type = other DNA
gagttcgtcaacagcctggaagaaacacagtttctgtcccgtaaagataatttcgatcctcttcacctgatcacc

SEQ ID NO: 692833 - DNA, 75 bp, synthetic construct
  source 1..75: mol_type = other DNA
attacggtcagcgccatcgcgcagagatcgacgtcgcgcgcgatctggcgctgaaactgggtgcacgcgcgcata

SEQ ID NO: 692834 - DNA, 75 bp, synthetic construct
  source 1..75: mol_type = other DNA
aacctgggcgctggcagattattacggcaaactggatttagtccgtaacgaaacgttgacctgctataacggcat

SEQ ID NO: 692835 - DNA, 75 bp, synthetic construct
  source 1..75: mol_type = other DNA
cgtgacagcattccggtgcctgattatgaacctgaagccgatggcatcccgaatacgtttgtcccagggcgtaat

SEQ ID NO: 692836 - DNA, 75 bp, synthetic construct
  source 1..75: mol_type = other DNA
cccgcaatgcgcttgcgcgggccgtttttatgcaccggttgggcgaaataagagacagggggctggaaaatcaaa

SEQ ID NO: 692837 - DNA, 75 bp, synthetic construct
  source 1..75: mol_type = other DNA
ctgtgctgaagcaatgacgctgggtgataaagcggtttataccacgttgaatgcgcaccttggcatcaagcataa

SEQ ID NO: 692838 - DNA, 75 bp, synthetic construct
  source 1..75: mol_type = other DNA
ctatatctggcggaacaataagaagctggctgaagggaagtatcgtcctttgcggctagttgatgtcagtcagta

SEQ ID NO: 692839 - DNA, 75 bp, synthetic construct
  source 1..75: mol_type = other DNA
gaatccagagcaacattgactgatgaggttatcgagctacacgaacgcattatgggcggtctgttcagccaggca

SEQ ID NO: 692840 - DNA, 75 bp, synthetic construct
  source 1..75: mol_type = other DNA
ctggtttatctcccgcgtagtccgcccggtttatccccgctggcgcggggaacacgcagtgatgatgtgctccag

SEQ ID NO: 692841 - DNA, 75 bp, synthetic construct
  source 1..75: mol_type = other DNA
gcggcggtttatccccgctggcgcggggaacaccagcggcggcggcggtgaaaaccccgaacccacggtttatcc

SEQ ID NO: 692842 - DNA, 75 bp, synthetic construct
  source 1..75: mol_type = other DNA
tttacgcgtatcaggtgaaagcagaagcggtgattaccggggtctgcgaaacagacttctccggttacccggatt

SEQ ID NO: 692843 - DNA, 75 bp, synthetic construct
  source 1..75: mol_type = other DNA
gcgcggggaactcggtgaatactgcggcaggcgctgcgggaattgcggtttatccccgctggcgcggggaactct

SEQ ID NO: 692844 - DNA, 75 bp, synthetic construct
  source 1..75: mol_type = other DNA
ggtcaaacggatgttccacaatcacggtttatccccgctggcgcggggaacacgcagatttcaaacaggcgcgta

SEQ ID NO: 692845 - DNA, 75 bp, synthetic construct
  source 1..75: mol_type = other DNA
gcggtttatccccgctggcgcggggaacacttaaaaaacgttgggtatccggtctatattcgcggtttatccccg

SEQ ID NO: 692846 - DNA, 75 bp, synthetic construct
  source 1..75: mol_type = other DNA
attgctattcggtttatccccgctggcgcggggaacacgggcgcacggaatacaaagccgtgtatctgctcggtt

SEQ ID NO: 692847 - DNA, 75 bp, synthetic construct
  source 1..75: mol_type = other DNA
cccgctggcgcggggaacacatcattcgcacacccccgcgtaaatgctggaacggtttatccccgctggcgcggg

SEQ ID NO: 692848 - DNA, 75 bp, synthetic construct
  source 1..75: mol_type = other DNA
ttttcctcgtccgccttaatcggtttatccccgctggcgcggggaacaccctgtcattctggcggtaaaatcgat

SEQ ID NO: 692849 - DNA, 75 bp, synthetic construct
  source 1..75: mol_type = other DNA
gtggaggccaggattccaccacatgtctggtgcaggcattacagcaatacgatgaagtccattgcgtgacgtttg

SEQ ID NO: 692850 - DNA, 75 bp, synthetic construct
  source 1..75: mol_type = other DNA
ggcaagctggatttagtccgtaacgaaacgctgacctgctataacggcattaaaggcgacggttgcggtcattgt

SEQ ID NO: 692851 - DNA, 75 bp, synthetic construct
  source 1..75: mol_type = other DNA
cgtgacagcattccagtgccagattatgaacctgaagccgatggcatcccgaatacgtttgtccctgggcgtaat

SEQ ID NO: 692852 - DNA, 75 bp, synthetic construct
  source 1..75: mol_type = other DNA
gctgcatgtaatctgcgcgctaacggattgaatcattatctggccgacaaaccggcggtgatggcagcgatgaag

SEQ ID NO: 692853 - DNA, 75 bp, synthetic construct
  source 1..75: mol_type = other DNA
acggatttctccggttacccggattgtcgcgatgagtttgtgaaagcactgaaccatgccgtcagtctgggcatg

SEQ ID NO: 692854 - DNA, 75 bp, synthetic construct
  source 1..75: mol_type = other DNA
ctgaaactgggcgcgcgcgcgcataaagtgctggatgtgacgctgcttaaccaactggctgtcagcagcctgacg

SEQ ID NO: 692855 - DNA, 75 bp, synthetic construct
  source 1..75: mol_type = other DNA
atcaatctggggctggcaaaaatggcagagtcttgcccgggaaccacacgagcttcgctggaaaacatacaggca

SEQ ID NO: 692856 - DNA, 75 bp, synthetic construct
  source 1..75: mol_type = other DNA
ggtactacatacactgtatataatatctataatgatttgagtggtattagtgaagtattcattagaccgtcagca

SEQ ID NO: 692857 - DNA, 75 bp, synthetic construct
  source 1..75: mol_type = other DNA
tactgaaggactagtagaaagtacagaaacatttctatcagtaaaaactgatgacctatctacttacagtatcgc

SEQ ID NO: 692858 - DNA, 75 bp, synthetic construct
  source 1..75: mol_type = other DNA
tgtttggcaatgcgtttatcgaagagcgtcgcagcctgaccggtaagccgttaaaactggaaacctcaccggcga

SEQ ID NO: 692859 - DNA, 75 bp, synthetic construct
  source 1..75: mol_type = other DNA
caatgcacgatcatttattctgaaaaattatggattagttaaaagaaataataaggtcagacagctatatgataa

SEQ ID NO: 692860 - DNA, 75 bp, synthetic construct
  source 1..75: mol_type = other DNA
cgagcgaagagccaaggagctaagggaaaccctagcccagcagcaaaaacgcttacaggcccttcaggagccgtt

SEQ ID NO: 692861 - DNA, 75 bp, synthetic construct
  source 1..75: mol_type = other DNA
gaaagagaagctgaaaggctcgctgggtgagctgaagcaactttctggcttaagcggcgtggtaatgggctatac

SEQ ID NO: 692862 - DNA, 75 bp, synthetic construct
  source 1..75: mol_type = other DNA
tgcatcagtaacggcaaatggtacgagccgccggtcagtttttccggcctggcgaaaagcctgcgctctgccgtg

SEQ ID NO: 692863 - DNA, 75 bp, synthetic construct
  source 1..75: mol_type = other DNA
ttttatttttatttttatttttatttcttatgcacaagaataaattatatgcatatgataatttctcattcaatg

SEQ ID NO: 692864 - DNA, 75 bp, synthetic construct
  source 1..75: mol_type = other DNA
tttatgggcaagctgagcggcatctctatgggctgtgactgctgctacaccaaccacgctgacgctgaccagaac

SEQ ID NO: 692865 - DNA, 75 bp, synthetic construct
  source 1..75: mol_type = other DNA
gtatccactgcaagagaacggacagatactgctggcatttccgcgtctgtttattgttgcccggcgtatggagta

SEQ ID NO: 692866 - DNA, 75 bp, synthetic construct
  source 1..75: mol_type = other DNA
cgccgcacaaaatcaggaggacgtgaacaacatccgccaggcgatgaaaagtgccaaagggccgggtaacttccg

SEQ ID NO: 692867 - DNA, 75 bp, synthetic construct
  source 1..75: mol_type = other DNA
atgtttctctataacatcccggcccgcactggcaatacgatccagccagaaaccgcgcgtgctctggcgtcgcac

SEQ ID NO: 692868 - DNA, 75 bp, synthetic construct
  source 1..75: mol_type = other DNA
tttgccgttcttctctgttatctgaaaagtattgggtttgccccggataaaaaatcatccccacccgcaaaattg

SEQ ID NO: 692869 - DNA, 75 bp, synthetic construct
  source 1..75: mol_type = other DNA
ctatcggcgccaacaggatttatccctgaaagctggcgaaaactggtactcacgccttcaggaatcgaccgcaag

SEQ ID NO: 692870 - DNA, 75 bp, synthetic construct
  source 1..75: mol_type = other DNA
cggcgtgagcatttaaccgaactgtaccgctatcttggcgtaaaggcgttcaccggcaaaatacagcaggactgt

SEQ ID NO: 692871 - DNA, 75 bp, synthetic construct
  source 1..75: mol_type = other DNA
cgtaaaccggaaaatcagagctaccgcgccagcggactgacgctgctgacggcagctatctcgctgtggaatacc

SEQ ID NO: 692872 - DNA, 75 bp, synthetic construct
  source 1..75: mol_type = other DNA
cctcaacctggtgacggcggctatcgtgctgtggaacacggtgtacctggaacgcgccccccaggggttggtcga

SEQ ID NO: 692873 - DNA, 75 bp, synthetic construct
  source 1..75: mol_type = other DNA
gaggagcactacaccgacacggccggcttcaccgatcacgtctttgccctgatgcacctgctaggcttccgcttc

SEQ ID NO: 692874 - DNA, 75 bp, synthetic construct
  source 1..75: mol_type = other DNA
gcagttccagaagcagggcaaggcgatcaacgacaaggtgcgcctgtactccaggatcggccaggcgctgctgga

SEQ ID NO: 692875 - DNA, 75 bp, synthetic construct
  source 1..75: mol_type = other DNA
aaaataatctttcagacgctaaatgcgcccttaacctctgctcacagggaagctttggatcgtttgcttgaatca

SEQ ID NO: 692876 - DNA, 75 bp, synthetic construct
  source 1..75: mol_type = other DNA
cacattgatcgccttaacgccattgaagctctggcgttgccggatggtgtggagagagccgttcaccagaaccga

SEQ ID NO: 692877 - DNA, 75 bp, synthetic construct
  source 1..75: mol_type = other DNA
ctgccgccggggagcttcctgatgtggaaatttcagataaaggtgtaaagatcaccccactggataacagtgttc

SEQ ID NO: 692878 - DNA, 75 bp, synthetic construct
  source 1..75: mol_type = other DNA
ggcgtgaagtgctacgtctggcgacctcaataaaacagggaacagtgacagcatccctgatgctgagaaaacttg

SEQ ID NO: 692879 - DNA, 75 bp, synthetic construct
  source 1..75: mol_type = other DNA
ttgtccccggattcgggaccttcacgataaaaaacttttcattaaaggtaaggcggatcaatatccggcacttca

SEQ ID NO: 692880 - DNA, 75 bp, synthetic construct
  source 1..75: mol_type = other DNA
ggtattgaccggcagtattatgaattttgtgcgctcagcgagcttaagggagcgttgcgctccggggacatctgg

SEQ ID NO: 692881 - DNA, 75 bp, synthetic construct
  source 1..75: mol_type = other DNA
attccgttcccggcgttaatgccaaagggaatcaggacacctctggtaatgcggctacagcgactaaattgcaga

SEQ ID NO: 692882 - DNA, 75 bp, synthetic construct
  source 1..75: mol_type = other DNA
tatcaatactctggtatctcgcggtcgcgtaacggccctagaggcgaatgcacagggaacatccgggattcagct

SEQ ID NO: 692883 - DNA, 75 bp, synthetic construct
  source 1..75: mol_type = other DNA
agcaattagtgactctgctacgagataatggtgcttttaatgcaaaggtatggatagcgcgttgtgcctgggcgt

SEQ ID NO: 692884 - DNA, 75 bp, synthetic construct
  source 1..75: mol_type = other DNA
cccgttatgtacgtgatatccgacttggtggcgcatcatcatacaaaccagcaaataatggcacaacatggacac

SEQ ID NO: 692885 - DNA, 75 bp, synthetic construct
  source 1..75: mol_type = other DNA
tatccgttcgcgacgggatactgattctgccaactggtctgaatgggcgcaggtctatacgtcaaaagattcaat

SEQ ID NO: 692886 - DNA, 75 bp, synthetic construct
  source 1..75: mol_type = other DNA
acgcgttaccacgccgagcacgtccagcggtggaggaattactaacgctcaattcacttatattaatcatggtga

SEQ ID NO: 692887 - DNA, 75 bp, synthetic construct
  source 1..75: mol_type = other DNA
aggttcagttaacggaaaccgtgatgaattaattgatacaactcaggcaaggccaattcagtattgcattaatgg

SEQ ID NO: 692888 - DNA, 75 bp, synthetic construct
  source 1..75: mol_type = other DNA
ggatcaccggggcgctggcggggaacgccgacaccacgacgaaattaaaaacagccagaaacattaatggcgtca

SEQ ID NO: 692889 - DNA, 75 bp, synthetic construct
  source 1..75: mol_type = other DNA
ccgcgcatatagcgcatggctgaatattggtggcgatagtcaggtctggacaaccgcgcaatttatttcgtggct

SEQ ID NO: 692890 - DNA, 75 bp, synthetic construct
  source 1..75: mol_type = other DNA
ggcgtctgcaacgaaattacaaacggcaagaactattggtggtgtttcatttaatggcaccgcaaacatcgacct

SEQ ID NO: 692891 - DNA, 75 bp, synthetic construct
  source 1..75: mol_type = other DNA
ttcattcgctcccgaagagataacacagatgcggcatggtctgagtgggcacaggtctatacatcgaaagactcc

SEQ ID NO: 692892 - DNA, 75 bp, synthetic construct
  source 1..75: mol_type = other DNA
cttaacccacggtctataggcacaatcaactccacaacaatgtcttttagtggtggtgcaggatggttcaagctg

SEQ ID NO: 692893 - DNA, 75 bp, synthetic construct
  source 1..75: mol_type = other DNA
caacggtgcacctggcacactggatacgcttaaagaaatagctgctgcgatcaataacgacccgaatttcagcac

SEQ ID NO: 692894 - DNA, 75 bp, synthetic construct
  source 1..75: mol_type = other DNA
gaggcgatgacgggctggaatgaaggcatgacccgcttacagcagctggctgaacgcctgaaccgtctggatgaa

SEQ ID NO: 692895 - DNA, 75 bp, synthetic construct
  source 1..75: mol_type = other DNA
cactccggtctgatgctccggatgtgcaggaacatcagaccctgccgtactcccgtctggtgtatgttgtttctg

SEQ ID NO: 692896 - DNA, 75 bp, synthetic construct
  source 1..75: mol_type = other DNA
cacccgtctggaaaatcagccagtgcagggcgaagcgtcgtctccggtaacgcttccggctcaggtactccggtc

SEQ ID NO: 692897 - DNA, 75 bp, synthetic construct
  source 1..75: mol_type = other DNA
tcatgcgtcagagtggataaccctttccggtcagcagataacgcgactgacagaattacccccggcatataacct

SEQ ID NO: 692898 - DNA, 75 bp, synthetic construct
  source 1..75: mol_type = other DNA
ttgtggctgttgtctgtgcggcattgctgactgtcagcgttgccattccgggatggcagtttctgacacagccat

SEQ ID NO: 692899 - DNA, 75 bp, synthetic construct
  source 1..75: mol_type = other DNA
gcccggatgtggactggcgttatgtggaaacactctgcctgcgtctgtatgaacacaatggcgtggaattgcaga

SEQ ID NO: 692900 - DNA, 75 bp, synthetic construct
  source 1..75: mol_type = other DNA
ttactgactctaagaatataacgtcaattcatgtgcgacgtggagattatgtaaataataaacatgctgcaaaat

SEQ ID NO: 692901 - DNA, 75 bp, synthetic construct
  source 1..75: mol_type = other DNA
cataacctacaaatatattccttaattactgactctaagaatataacgtcaattcatgtgcgacgtggagattat

SEQ ID NO: 692902 - DNA, 75 bp, synthetic construct
  source 1..75: mol_type = other DNA
aggcagcgcttttttctcaacaaacacgtcagtgtgccagtgagcaatgctccggccgtattcaggccggcagcc

SEQ ID NO: 692903 - DNA, 75 bp, synthetic construct
  source 1..75: mol_type = other DNA
ctttcagcagaccagatggcacagctcagcagaacaccctcactgttaaatcatgcatcagactggataacactt

SEQ ID NO: 692904 - DNA, 75 bp, synthetic construct
  source 1..75: mol_type = other DNA
tgtgctgtgtgttgttccgggtgaaatctggggtggtgctgttctgcgttacttcagcgctctggaagaagggat

SEQ ID NO: 692905 - DNA, 75 bp, synthetic construct
  source 1..75: mol_type = other DNA
tggcgctgacccggcatcactggtcagtgatgtggccgctgaatacacacgcccggctggaaattattaccggtc

SEQ ID NO: 692906 - DNA, 75 bp, synthetic construct
  source 1..75: mol_type = other DNA
acgggttatcgaccatcaggctgtacaggcctgggcggacagcctcgatactgacaattcgttaccggtgcctcg

SEQ ID NO: 692907 - DNA, 75 bp, synthetic construct
  source 1..75: mol_type = other DNA
gcattattggctggttctggtttagcccgacgctgtacgttgattcctggaatccgcatcatgcaccgttcttca

SEQ ID NO: 692908 - DNA, 75 bp, synthetic construct
  source 1..75: mol_type = other DNA
ggccgttacgctatcgctgctcaagtcatcaaaaactcgcaacgaagagtttttgaaaagtggattgttgaaaat

SEQ ID NO: 692909 - DNA, 75 bp, synthetic construct
  source 1..75: mol_type = other DNA
ccatgcgcgcccacgctgccggtgagtctgtggatacccgcctgctgacggagacccttgaactgaccgccacgg

SEQ ID NO: 692910 - DNA, 75 bp, synthetic construct
  source 1..75: mol_type = other DNA
tgctgacggagacccttgaactgaccgccacggctgacatgcctgatgaagtgcgcgcaaagctgcacaaaatca

SEQ ID NO: 692911 - DNA, 75 bp, synthetic construct
  source 1..75: mol_type = other DNA
gtaaacccaggctctattattctctccgctgagatgatgctgcgccatatgggttggactgaagcggctgacctg

SEQ ID NO: 692912 - DNA, 75 bp, synthetic construct
  source 1..75: mol_type = other DNA
cctgtcggaatacgaccagaacggctggactgtgccgcacctgcacaacaacgacgatatcaacatgctggataa

SEQ ID NO: 692913 - DNA, 75 bp, synthetic construct
  source 1..75: mol_type = other DNA
tatccccgctggcgcggggaacacaacaacattcaatgaccctttggattgtaatccggtttatccccgctggcg

SEQ ID NO: 692914 - DNA, 75 bp, synthetic construct
  source 1..75: mol_type = other DNA
tcggtttatccccgctggcgcggggaacacgggcgcacggaatacaaagccgtgtatctgctcggtttatccccg

SEQ ID NO: 692915 - DNA, 75 bp, synthetic construct
  source 1..75: mol_type = other DNA
atgcggtttatccccgctggcgcggggaacacggccccggaacatctgccgcagtgcgataccccggtttatccc

SEQ ID NO: 692916 - DNA, 75 bp, synthetic construct
  source 1..75: mol_type = other DNA
tacggtttatccccgctggcgcggggaacacatagaccccgaacaacaatacgcgcaaaccgacggtttatcccc

SEQ ID NO: 692917 - DNA, 75 bp, synthetic construct
  source 1..75: mol_type = other DNA
gacggtttatccccgctggcgcggggaacactccgcatcgctcatgccgataatcgggctcggcggtttatcccc

SEQ ID NO: 692918 - DNA, 75 bp, synthetic construct
  source 1..75: mol_type = other DNA
ccgctggcgcggggaactcccgtgccattttttgcgccgccgagcctttatcggtttatccccgctggcgcgggg

SEQ ID NO: 692919 - DNA, 75 bp, synthetic construct
  source 1..75: mol_type = other DNA
gtaaacccaggctctattattctctccgctgagatgatgttacgccatatgggttggactgaagccgcagacctg

SEQ ID NO: 692920 - DNA, 75 bp, synthetic construct
  source 1..75: mol_type = other DNA
cgaagtggttggttttaacggtcaacggctgtttttaatgccgctggaagaagtggaaggtgtcctgcccggcgc

SEQ ID NO: 692921 - DNA, 75 bp, synthetic construct
  source 1..75: mol_type = other DNA
cgacaaagccatcgccctgtggccgcagctggagggctatttgcaacaaggcatttttgaacgcgcggactggga

SEQ ID NO: 692922 - DNA, 75 bp, synthetic construct
  source 1..75: mol_type = other DNA
gttgtcgagttttcagcgtaaccgcgatctggttagcgtcggcgcgtatgccaaaggcagcgatccgatgctcga

SEQ ID NO: 692923 - DNA, 75 bp, synthetic construct
  source 1..75: mol_type = other DNA
tcaaacaggcgctttctgcatggcttgcccaggaggaggagcgtaatcgcctgacgctggaagccctggacgatg

SEQ ID NO: 692924 - DNA, 75 bp, synthetic construct
  source 1..75: mol_type = other DNA
taaccacactggacaactttgaagccaaaatggcgcagttgcctgcggtgcgtcgctacgggcgattaacccgcg

SEQ ID NO: 692925 - DNA, 75 bp, synthetic construct
  source 1..75: mol_type = other DNA
caacgtacgccgattgagcacgtgctggatacgggcgtgcgtccaatcaatgccctgcttaccgtcggacgcggg

SEQ ID NO: 692926 - DNA, 75 bp, synthetic construct
  source 1..75: mol_type = other DNA
caaaagtaattaccgcgcatgtgccattacctatggctgataaagtcgaccagatggccgccagactggaacgtt

SEQ ID NO: 692927 - DNA, 75 bp, synthetic construct
  source 1..75: mol_type = other DNA
acaggttatcgaccatcaggctgtacagtcctggtcggacagcctcagtactgacaatccgttaccggtgccacg

SEQ ID NO: 692928 - DNA, 75 bp, synthetic construct
  source 1..75: mol_type = other DNA
cttcgaacgtctgatggaaggcgctaaactgctgaaatgcagcgagtttggtgacgcgatcatcaaaaatatgta

SEQ ID NO: 692929 - DNA, 75 bp, synthetic construct
  source 1..75: mol_type = other DNA
tggtaaaagtgtgctgctggggatgatggcccgttacacccgcgccgatgtcattgtcgtgggtttgattggtga

SEQ ID NO: 692930 - DNA, 75 bp, synthetic construct
  source 1..75: mol_type = other DNA
aaaccgctcgatggcctgccctcccccgatacgacggaaaccggtgcgctgattaccccaccatttaacccattg

SEQ ID NO: 692931 - DNA, 75 bp, synthetic construct
  source 1..75: mol_type = other DNA
gttgctaattatggattccctcacccgctacgcgatggctcagcgtgaaattgcgctggcgattggcgaaccgcc

SEQ ID NO: 692932 - DNA, 75 bp, synthetic construct
  source 1..75: mol_type = other DNA
ttcaggcgatatcaacattaatacattggtatctcgtggccgagttacggcgttaagcggctctactcaaggcac

SEQ ID NO: 692933 - DNA, 75 bp, synthetic construct
  source 1..75: mol_type = other DNA
cgtggcgtgatgagcaggggatcgtgcgggtagaaaaatcgcagtgcatcggctgcagttattgcattggcgctt

SEQ ID NO: 692934 - DNA, 75 bp, synthetic construct
  source 1..75: mol_type = other DNA
atagcgaaaataaatcatggagtctcgttgaagaccacaggggtaaaacggtctatgacgtggaatcaggggacg

SEQ ID NO: 692935 - DNA, 75 bp, synthetic construct
  source 1..75: mol_type = other DNA
gaagacatatcgggtattgttgaatcgtgttgatacagcggtagcagcggatgttgagtggccagtcgccccaca

SEQ ID NO: 692936 - DNA, 75 bp, synthetic construct
  source 1..75: mol_type = other DNA
atgctgtcaaaaatcatcgtgtttatttgatgccagagtatgccaaagcatggggctatccgatgcccgaggcta

SEQ ID NO: 692937 - DNA, 75 bp, synthetic construct
  source 1..75: mol_type = other DNA
cacttatggttccggaaaatatacaggattaatgatgaaacatgctggcgcagtaaacgtcgccgcttccaccat

SEQ ID NO: 692938 - DNA, 75 bp, synthetic construct
  source 1..75: mol_type = other DNA
ataattataatcatttttgtgactttgttgagtttaaacaccctaatatgatcatgaacacaagtcagtatacat

SEQ ID NO: 692939 - DNA, 75 bp, synthetic construct
  source 1..75: mol_type = other DNA
gaagcgttccgcatgacgcagaaagatattgatgacgcgccgatggtgccgagcatcccgccgctgctggcggaa

SEQ ID NO: 692940 - DNA, 75 bp, synthetic construct
  source 1..75: mol_type = other DNA
gacagatgaacttcagggttccatgcaggctatgggggtgaaaagcagcattgagcgccgttctttgcagaacgc

SEQ ID NO: 692941 - DNA, 75 bp, synthetic construct
  source 1..75: mol_type = other DNA
aatttaaccacgtaatgcatgacgaaaagctgacaggcaatgactgtgttgaaatgcatgaaaagattggtgtgg

SEQ ID NO: 692942 - DNA, 75 bp, synthetic construct
  source 1..75: mol_type = other DNA
gaagacatatcgggtattgttgaatcgtgttgatacaacagtagcagcggatgttgagtggccagtcgccccaca

SEQ ID NO: 692943 - DNA, 75 bp, synthetic construct
  source 1..75: mol_type = other DNA
gaacaagtaattgcatggaatcctcaggtaatttttgtgcaaaatcgctaccctggcgtggtgaatgaaatacgg

SEQ ID NO: 692944 - DNA, 75 bp, synthetic construct
  source 1..75: mol_type = other DNA
attacaacaaagcacagaacctgatcctgacttccgtgattttgatcatcggcgtcagtggtgccaaggtaaaca

SEQ ID NO: 692945 - DNA, 75 bp, synthetic construct
  source 1..75: mol_type = other DNA
tcatctgtaaaggtaaaatcccggcttatctcggctccagctttgcctttatttcaccggtattgttactgttgc

SEQ ID NO: 692946 - DNA, 75 bp, synthetic construct
  source 1..75: mol_type = other DNA
atgttcgggatggtgcttgccatcgggctgctcgtcgatgatgcgatagtggtggtggagaacgtcgagcgcgtg

SEQ ID NO: 692947 - DNA, 75 bp, synthetic construct
  source 1..75: mol_type = other DNA
gtggcgagatatcgtagccaggggcgctgggttatctggctctctttcctcatcgccttgttactacaaattatg

SEQ ID NO: 692948 - DNA, 75 bp, synthetic construct
  source 1..75: mol_type = other DNA
accccagtttcgctgatggatgaccagatggtcgacatggcgtttatcactcaactgaccggcttaaccgataag

SEQ ID NO: 692949 - DNA, 75 bp, synthetic construct
  source 1..75: mol_type = other DNA
ggcttaagcctgatcttcaaactgattagcgtgctgcgccctgaagaagtggtgctggacgcagaagacgcagat

SEQ ID NO: 692950 - DNA, 75 bp, synthetic construct
  source 1..75: mol_type = other DNA
ggaatgtacgcatatcgtttactgcgggaagtatgccggtcttcaccgaaaatactgggaactgtagtggcacac

SEQ ID NO: 692951 - DNA, 75 bp, synthetic construct
  source 1..75: mol_type = other DNA
cagactttccagtacggtgatagtgggaatgtacgcatatcgtttactgcgggaagtatgccggtcttcaccgaa

SEQ ID NO: 692952 - DNA, 75 bp, synthetic construct
  source 1..75: mol_type = other DNA
tatttttaattcagtatttgctgctgcaaaactaccgctctttcgcctcgactcaacggaacaactgaaaggaca

SEQ ID NO: 692953 - DNA, 75 bp, synthetic construct
  source 1..75: mol_type = other DNA
aagaagcgacggaaaaatcaatgtcgcaaattcagggcgcactggtgggtatcgcgatggtgctgtcagcggtat

SEQ ID NO: 692954 - DNA, 75 bp, synthetic construct
  source 1..75: mol_type = other DNA
ctgaccgatcgcgaactgcgtaccaataattcacaactgacggcaggtcaacggttgtaccagcagcttggcctt

SEQ ID NO: 692955 - DNA, 75 bp, synthetic construct
  source 1..75: mol_type = other DNA
cagattttccaggacggtgatggtgggaatgtacgcatactgttcactgcgggaggtgtgccggtcttctccaaa

SEQ ID NO: 692956 - DNA, 75 bp, synthetic construct
  source 1..75: mol_type = other DNA
tttgcctcgagatgcgtgacagagggattgagcggcagatgacggaaggtgagttaaaacgacttgcagaacggc

SEQ ID NO: 692957 - DNA, 75 bp, synthetic construct
  source 1..75: mol_type = other DNA
gttaccggaaaatgttacctggttatcgccggaaggggagtttcagaagtggaacggcacagcctggttgaagga

SEQ ID NO: 692958 - DNA, 75 bp, synthetic construct
  source 1..75: mol_type = other DNA
gtggatctggagatcgcaacggaggaagaaaccttgttgctggaagcctggaaaaagtatcgggtgttgctgaac

SEQ ID NO: 692959 - DNA, 75 bp, synthetic construct
  source 1..75: mol_type = other DNA
ttccagggcgcttatctggtgctgggtctggtggcgctgggcttcaccttaatttccgtgttcacgcttagcggc

SEQ ID NO: 692960 - DNA, 75 bp, synthetic construct
  source 1..75: mol_type = other DNA
tggctggcactattatgtctgtacgtattattggctcatcgttcgccacctcagcgctggaagtggttattctga

SEQ ID NO: 692961 - DNA, 75 bp, synthetic construct
  source 1..75: mol_type = other DNA
ctggtctgtttctgcttctttaagcaactggcgatgatttttatgtctgtactggcgggcaatatgtatgaaagc

SEQ ID NO: 692962 - DNA, 75 bp, synthetic construct
  source 1..75: mol_type = other DNA
cagaagcagaaaaactgttccggatccggaaggcggaagaaacaaaaaacagcctgatgcagatggccagtgagc

SEQ ID NO: 692963 - DNA, 75 bp, synthetic construct
  source 1..75: mol_type = other DNA
aaacgctgcatatgtttgaagtaccgttcctgctggtgggctgctttaaatatattaccagccagtttgaagtgc

SEQ ID NO: 692964 - DNA, 75 bp, synthetic construct
  source 1..75: mol_type = other DNA
cctcgagatgcgttcaaaggggattgagcggcagatgaccgaaggggagttaaaacggcttgcagaacggcagct

SEQ ID NO: 692965 - DNA, 75 bp, synthetic construct
  source 1..75: mol_type = other DNA
cagaagaacggggctgcgccgtcgaagctctggattgctcagattggcgcgatgactgaacagcaaatccggcag

SEQ ID NO: 692966 - DNA, 75 bp, synthetic construct
  source 1..75: mol_type = other DNA
gaaggtggagccgacaagttcgcacaaagcaacgcattcaacaacgcaaacgaaatgatgatggcagtcatcgaa

SEQ ID NO: 692967 - DNA, 75 bp, synthetic construct
  source 1..75: mol_type = other DNA
aagtgataagtacccgtggtctcagcctgtgctgtatcacatttgtctcgagatgcgttcaaaggggatcgagcg

SEQ ID NO: 692968 - DNA, 75 bp, synthetic construct
  source 1..75: mol_type = other DNA
gacaggtctgccgccagtgcatggaccgctgccgggcgggtgaaacatggcctccggacctggctgagtttgtgg

SEQ ID NO: 692969 - DNA, 75 bp, synthetic construct
  source 1..75: mol_type = other DNA
acggatttatcagcaacggaaacggcctggaagctgtgggagcttatgggggaggtgtattcgaaccgctggact

SEQ ID NO: 692970 - DNA, 75 bp, synthetic construct
  source 1..75: mol_type = other DNA
gaccgaaggggagttaaaacgacttgcagaacggcaactgacgaaatgggcaaagcatgttggtatgggcctgag

SEQ ID NO: 692971 - DNA, 75 bp, synthetic construct
  source 1..75: mol_type = other DNA
ggcgacaactggcggcaccaaaacgcccgttgggaccaacgccaattgagttgctgaaacaggaatatgaacgcc

SEQ ID NO: 692972 - DNA, 75 bp, synthetic construct
  source 1..75: mol_type = other DNA
gcttcaggatgctgtggatctggagatcgcaacggaggaagaaaccttgttgctggaagcctggaaaaagtatcg

SEQ ID NO: 692973 - DNA, 75 bp, synthetic construct
  source 1..75: mol_type = other DNA
tgtggcgctgatttctgaaagcggagccaatccattcggtctgacggtggatgccgtgatggaggagtaccgtcg

SEQ ID NO: 692974 - DNA, 75 bp, synthetic construct
  source 1..75: mol_type = other DNA
actggcagcacccaaacgtcctgcgggaccaacgccaattgagttgctgaaacaggaatatgaacgccggaaagc

SEQ ID NO: 692975 - DNA, 75 bp, synthetic construct
  source 1..75: mol_type = other DNA
catggcccccggacctggctgagtttgtggcgctgatttcggaaagcggggccaacccatttggtctgactgtgg

SEQ ID NO: 692976 - DNA, 75 bp, synthetic construct
  source 1..75: mol_type = other DNA
cactgacgctggttttcttgatgcaaccactatcaagcccactaagttaaccgactttattctcgttggatgctc

SEQ ID NO: 692977 - DNA, 75 bp, synthetic construct
  source 1..75: mol_type = other DNA
actagcggcaatactctctgtaaatgatcgtaaatatatcgcatctacaatcagctcgatagagtaccattcatt

SEQ ID NO: 692978 - DNA, 75 bp, synthetic construct
  source 1..75: mol_type = other DNA
cctgcgccaccttcacgggttcgaatatggggtcagtatatatttttgcccccatcgccattgccgcctgtacta

SEQ ID NO: 692979 - DNA, 75 bp, synthetic construct
  source 1..75: mol_type = other DNA
tggagatgaagtaccattttgtcctcattgttatgaaacaagcaatatcaaaagacacatgcaacagtttgctgt

SEQ ID NO: 692980 - DNA, 75 bp, synthetic construct
  source 1..75: mol_type = other DNA
accacctggagttataacagtagcgacagatcatcaggtagcaaaataaatggcagcatatcaatacctggcttg

SEQ ID NO: 692981 - DNA, 75 bp, synthetic construct
  source 1..75: mol_type = other DNA
ttctggcatccgcaatgataattttcatgaggctattttttttggccaaccacttggtttttccagtgttaacaa

SEQ ID NO: 692982 - DNA, 75 bp, synthetic construct
  source 1..75: mol_type = other DNA
gtgctttatgccttatggcggctggatgaaattagcggtatgcaaggcgcgcagatattacaaacgacgttatgc

SEQ ID NO: 692983 - DNA, 75 bp, synthetic construct
  source 1..75: mol_type = other DNA
gtgttacatcggctggcaatactggagatcccagggattgtacgccagcagggaagcacactgacacttgcaggc

SEQ ID NO: 692984 - DNA, 75 bp, synthetic construct
  source 1..75: mol_type = other DNA
gcgggtggaatcggcagtatcaccacatgtcttagccaggcggcgttagcgggtctggcgtccttcagtcaacaa

SEQ ID NO: 692985 - DNA, 75 bp, synthetic construct
  source 1..75: mol_type = other DNA
gaaaaccccaacgtcaccattccgctgctcggttttatgggcgtgccgtcggcaatcgacatcacccgcgtgggt

SEQ ID NO: 692986 - DNA, 75 bp, synthetic construct
  source 1..75: mol_type = other DNA
gcaggcgctggagcgcattatccagtcgcatccggtgctgattggttttgatcaggcgattaacgtggtgcctgg

SEQ ID NO: 692987 - DNA, 75 bp, synthetic construct
  source 1..75: mol_type = other DNA
ttgatgtgaatcgcgcgaatgctgcgttgcaacgtcgatcgggaatgccagtacaaattaactctggctcaaagc

SEQ ID NO: 692988 - DNA, 75 bp, synthetic construct
  source 1..75: mol_type = other DNA
ggcgctggcgaccatcgtcggtatcggcttaagtttgatcttcaaactgatcagtgtgctgcgccctgaagaagt

SEQ ID NO: 692989 - DNA, 75 bp, synthetic construct
  source 1..75: mol_type = other DNA
atggacggacaaatctcaattgttcgaccgggagcatgtgacgattgcgagatacgaatgattattcgtctggcg

SEQ ID NO: 692990 - DNA, 75 bp, synthetic construct
  source 1..75: mol_type = other DNA
caccccaccgctggggccgcaagatcaacccgattacttaaatgccgccgtcgcgctggaaaccactcttgcccc

SEQ ID NO: 692991 - DNA, 75 bp, synthetic construct
  source 1..75: mol_type = other DNA
ctgctgattcaggcgctgacgccggggattattcaggcaggttattccgtcgagcaacagcgcgaagtgtttgag

SEQ ID NO: 692992 - DNA, 75 bp, synthetic construct
  source 1..75: mol_type = other DNA
ttcgagaaagccattctttggctggtgcgaacgttacggcgtctgagttacatgtttatgccggatgcgacatga

SEQ ID NO: 692993 - DNA, 75 bp, synthetic construct
  source 1..75: mol_type = other DNA
cgtgctgtttccaccagcggcaatgggcgcaatcgttgccgtcatcggtctggagctggcgggcgtagctgccgg

SEQ ID NO: 692994 - DNA, 75 bp, synthetic construct
  source 1..75: mol_type = other DNA
ggatggatcaaagtggctggaagttcatgagccgctgtcgcgcaaccgtgcggaatatgagtcagaccgaaaagt

SEQ ID NO: 692995 - DNA, 75 bp, synthetic construct
  source 1..75: mol_type = other DNA
gtaactgggtgacaaccgtggagcgtaaacaagaagcgccaacctggacgccgacacccaatacccgccgcgaat

SEQ ID NO: 692996 - DNA, 75 bp, synthetic construct
  source 1..75: mol_type = other DNA
agcgaatccgggcgctgatgttttcttgccgaagtctggctcgcaactcaccattccgcagcaactgattttgcc

SEQ ID NO: 692997 - DNA, 75 bp, synthetic construct
  source 1..75: mol_type = other DNA
ctgtggccgctgtttgagattgccccggaactcgtgtttcctgatggggagacattacgtgaaatactcacttcg

SEQ ID NO: 692998 - DNA, 75 bp, synthetic construct
  source 1..75: mol_type = other DNA
caccccaccgctggggccgcaagatcaacccgattacttaaacgcagccgtggcgctggaaacctctcttgcacc

SEQ ID NO: 692999 - DNA, 75 bp, synthetic construct
  source 1..75: mol_type = other DNA
tttgcttcgcttagatatggagcaacaagatgagagcgtgattaaaacctatacggggagaatcacaattgagca

SEQ ID NO: 693000 - DNA, 75 bp, synthetic construct
  source 1..75: mol_type = other DNA
caggccggaattgggcatatcgtcgcggtgcatgtgaaagacaccaaacccggtgtcttcaaaaacgtgccgttt

SEQ ID NO: 693001 - DNA, 75 bp, synthetic construct
  source 1..75: mol_type = other DNA
cattatcggtattgttctgctggcgctcggcggcctgaaaccgattcaaaccgccattatcgccggaggatgccc

SEQ ID NO: 693002 - DNA, 75 bp, synthetic construct
  source 1..75: mol_type = other DNA
cgacaacttctatctcgtcgccttgatcttcgcaatgggcaccagcctcggccttgccacaccactggtgactga

SEQ ID NO: 693003 - DNA, 75 bp, synthetic construct
  source 1..75: mol_type = other DNA
tctgctgccgtactgttctggggctctattgagatctactactacatctctaccccgccgtttggcttagaaccg

SEQ ID NO: 693004 - DNA, 75 bp, synthetic construct
  source 1..75: mol_type = other DNA
attatcgccggaggatgtccgctattcttcgtcaacattatggtgacgctctcctttattaaagacgcgaaacag

SEQ ID NO: 693005 - DNA, 75 bp, synthetic construct
  source 1..75: mol_type = other DNA
atccagatgagtatcttcctcgcccgcatctcccgtggtcgtactgtgcgtgaactgtgcttcggcatggtgctg

SEQ ID NO: 693006 - DNA, 75 bp, synthetic construct
  source 1..75: mol_type = other DNA
ctgatcgaacagtacggtgtggcgcgcgccatcatcgaaacctgggccgctctgccactcagcaccgccaccatg

SEQ ID NO: 693007 - DNA, 75 bp, synthetic construct
  source 1..75: mol_type = other DNA
ttgcacaacgtcttacaccgcgtgaagagtggaaattatggattgcctgtggcgctgctgcggggatggctgcgg

SEQ ID NO: 693008 - DNA, 75 bp, synthetic construct
  source 1..75: mol_type = other DNA
tggtagtaaccagcggcagtgcaattggtcgcgaaggtgcgatgattcttttagctgcccttgccgcctcctgtt

SEQ ID NO: 693009 - DNA, 75 bp, synthetic construct
  source 1..75: mol_type = other DNA
atgaccaccccagtttcgctgatggatgaccagatggtcgatatggcgtttatcactcaactgaccggcctgacc

SEQ ID NO: 693010 - DNA, 75 bp, synthetic construct
  source 1..75: mol_type = other DNA
cgtattctactgggcatggtgggtgatttacgccatccagatgagcatcttcctggcgcgtatctcccgtggtcg

SEQ ID NO: 693011 - DNA, 75 bp, synthetic construct
  source 1..75: mol_type = other DNA
cactgattatcagtacaggcgtgctgatgggtttgtgcggtccattgtttttaaagctaatgaacgccagtcatc

SEQ ID NO: 693012 - DNA, 75 bp, synthetic construct
  source 1..75: mol_type = other DNA
atgatgattcaggctcgtgactatgcactgattatcagtacaggcgtgctgatgggtttgtgcggtccattgttt

SEQ ID NO: 693013 - DNA, 75 bp, synthetic construct
  source 1..75: mol_type = other DNA
tgttcattatatttttgattatcaacagatttgtgatttttcttgttccagcttgtttcacgttgtagccctttg

SEQ ID NO: 693014 - DNA, 75 bp, synthetic construct
  source 1..75: mol_type = other DNA
gaagacggtctggctatcgacttcgaaatcgaaggagaatacccgcagtttggtaacaacgatccgcgtgtagat

SEQ ID NO: 693015 - DNA, 75 bp, synthetic construct
  source 1..75: mol_type = other DNA
aaatggctatttttctgaggttggcgagataccgcacctttcaactatccaggacagtggtggtaccttatcctt

SEQ ID NO: 693016 - DNA, 75 bp, synthetic construct
  source 1..75: mol_type = other DNA
acttgttcatgtagcttcgatgagcaaagcacaaatagcaacctatttcggcctgacccaccgtgagacagagga

SEQ ID NO: 693017 - DNA, 75 bp, synthetic construct
  source 1..75: mol_type = other DNA
ctttctgctcatcgtcgtttcccgctgggaagcgaagatgacgcggtgcgggcccaggggctggagattatgcgt

SEQ ID NO: 693018 - DNA, 75 bp, synthetic construct
  source 1..75: mol_type = other DNA
catattaaatccacacttactgaatccttgaagtcatggattgaggaagcgggtaccacttttagggcagatctt

SEQ ID NO: 693019 - DNA, 75 bp, synthetic construct
  source 1..75: mol_type = other DNA
ctctttattatggtttcgctaaggaagttaaacggcatattaaatctacacttactgaatccttgaagtcatgga

SEQ ID NO: 693020 - DNA, 75 bp, synthetic construct
  source 1..75: mol_type = other DNA
atggcgatcgctcctgtttccggggatgtagaaaaatcagcggctgaaaccctgtacggcaatgggggtgagtaa

SEQ ID NO: 693021 - DNA, 75 bp, synthetic construct
  source 1..75: mol_type = other DNA
tgtgcctgtccgcacatcgtcgctttccctttggtagccgtgacgaggcagtgcgcgaacgggcgcgggaaatca

SEQ ID NO: 693022 - DNA, 75 bp, synthetic construct
  source 1..75: mol_type = other DNA
caaactcggccgcagttcccgctggctgaaaagtgaagtggaaacctggttgcaggcgcgtattgcacagtcccg

SEQ ID NO: 693023 - DNA, 75 bp, synthetic construct
  source 1..75: mol_type = other DNA
ctaaaagggcccgtggtgggctgggtgtacccccaggccccgacgaattggctaccagcctgaatgcgcctgaga

SEQ ID NO: 693024 - DNA, 75 bp, synthetic construct
  source 1..75: mol_type = other DNA
tgcagatggagttgcaggccggaatcgggcatatcgtcgcggtacatgtgaaagacaccaaaccaggcgtcttca

SEQ ID NO: 693025 - DNA, 75 bp, synthetic construct
  source 1..75: mol_type = other DNA
cgcaagccgatggacccgtatgtggtggaagaagatccaggcgttaaatcagtacgcaatatctacgactactat

SEQ ID NO: 693026 - DNA, 75 bp, synthetic construct
  source 1..75: mol_type = other DNA
ggctgctcgcctggcgtaacggtatcgacacctttcggttgattattatcggtatcggcgttcgcgccatgctgg

SEQ ID NO: 693027 - DNA, 75 bp, synthetic construct
  source 1..75: mol_type = other DNA
gaaagcgtctttagaaacggcgctaacagcaggtttgtggaatgccggatcgctcaacggcctgacgtgggcaaa

SEQ ID NO: 693028 - DNA, 75 bp, synthetic construct
  source 1..75: mol_type = other DNA
ggtttcgggcgtcacccgcgcgtgggtaaagcggcgtctgaacggggccgggaccgttggcgtgtatatcatgtg

SEQ ID NO: 693029 - DNA, 75 bp, synthetic construct
  source 1..75: mol_type = other DNA
ttatcacctgtctgctgttgctaatagcttgtgtgatggcaagcgtgtggggattacgcagcggtgccgtcacgc

SEQ ID NO: 693030 - DNA, 75 bp, synthetic construct
  source 1..75: mol_type = other DNA
gaaagcgtctttagaaacggcgttaacagcgggtttgtggaatgccggatcgctcaatggcctgacgtgggcaaa

SEQ ID NO: 693031 - DNA, 75 bp, synthetic construct
  source 1..75: mol_type = other DNA
gttgattggtgcggcactgggcgtcagcggcgcgatttttcagtcgctgatgcgtaacccgctcggcagccctga

SEQ ID NO: 693032 - DNA, 75 bp, synthetic construct
  source 1..75: mol_type = other DNA
caagcttaagggatatcaaacggttttaacttcagcttctggctctggtaattgtactgggtataacagacaacg

SEQ ID NO: 693033 - DNA, 75 bp, synthetic construct
  source 1..75: mol_type = other DNA
gcgtgatggacaaacaggcgggatattatatgggtaaattgtcggtcatctttaccccgtcattgccgacaatca

SEQ ID NO: 693034 - DNA, 75 bp, synthetic construct
  source 1..75: mol_type = other DNA
gtaaatacgtatatgtggtatcaatgcgcttataacaatttacagcagacatgtactaactctggcaatgtaacg

SEQ ID NO: 693035 - DNA, 75 bp, synthetic construct
  source 1..75: mol_type = other DNA
aaaagacgcgctgacggcgctgttttttgatgaagctaaccctgatggttccgggaaagtttacctctctgatat

SEQ ID NO: 693036 - DNA, 75 bp, synthetic construct
  source 1..75: mol_type = other DNA
ttcaacatcttgccactgcaaagccggtaaccctgtatcttgaacaagccgaaatgaaaaaattaccaatcggcg

SEQ ID NO: 693037 - DNA, 75 bp, synthetic construct
  source 1..75: mol_type = other DNA
tggaacagcatcaacctgaagcgcgttcgtccggttgtgctgccaggaattcgttacgctgtcatgtgtgtgccg

SEQ ID NO: 693038 - DNA, 75 bp, synthetic construct
  source 1..75: mol_type = other DNA
ggaatatctggcggcgtggggtgcgctgaagggtatcatccgcaaggccgcagaggccgcggcctgtgacgaggt

SEQ ID NO: 693039 - DNA, 75 bp, synthetic construct
  source 1..75: mol_type = other DNA
agggcaactggtcgaagaaagaaaccctgattttcccgcgctttcaccaatggacggcagtgaaccagatgctgg

SEQ ID NO: 693040 - DNA, 75 bp, synthetic construct
  source 1..75: mol_type = other DNA
gttcgtcttgcaggtgtggtttatgcactgattggtcatggtgaaaaagcgttaccggcctggtttgcttcgctg

SEQ ID NO: 693041 - DNA, 75 bp, synthetic construct
  source 1..75: mol_type = other DNA
cgtgagtatttgcgtgagctgcaaaatgcattgctgtggattaactttcgttttatcttgcaccgctgttctggc

SEQ ID NO: 693042 - DNA, 75 bp, synthetic construct
  source 1..75: mol_type = other DNA
tgttcggcatcgtctggctggcagaccgtgccggagcatcacgccccgctctggcagcaggtcagtcaggtggaa

SEQ ID NO: 693043 - DNA, 75 bp, synthetic construct
  source 1..75: mol_type = other DNA
gcgcgtggtaaatcgattctcggccaatcacctgacaaaaagtcacacgcgcacaagaaactgctagctgccaca

SEQ ID NO: 693044 - DNA, 75 bp, synthetic construct
  source 1..75: mol_type = other DNA
gatgcctggcacaaactgaataaactgcatggtgtgaatgccgagcaggtgctgttggagcgtttggaaaaagcc

SEQ ID NO: 693045 - DNA, 75 bp, synthetic construct
  source 1..75: mol_type = other DNA
atatctataagcatacttataatctttttacgcatggtaatgtacttctaaaagatctaacttactcgttgaact

SEQ ID NO: 693046 - DNA, 75 bp, synthetic construct
  source 1..75: mol_type = other DNA
agataaggttaacattacagagtttatcaatttaatggaaaatggttatttattaaagaatgaagtaattagttt

SEQ ID NO: 693047 - DNA, 75 bp, synthetic construct
  source 1..75: mol_type = other DNA
tgccgcactggatatcaacgccaaaatgcatgaaggtgtcagcggtcgtaatatgtggatggattgtgtggtaaa

SEQ ID NO: 693048 - DNA, 75 bp, synthetic construct
  source 1..75: mol_type = other DNA
atgaaaaagattcttgtatcctttattgccatgatggctgtcgcttcatctgccatggcttcagagacaatgaac

SEQ ID NO: 693049 - DNA, 75 bp, synthetic construct
  source 1..75: mol_type = other DNA
tggcaaccgcgtggttggtgtcgatgaaacgacatcttatccaccagaaaccgccaaactgccgcatattggtta

SEQ ID NO: 693050 - DNA, 75 bp, synthetic construct
  source 1..75: mol_type = other DNA
tcgtgccacggttagcctgtatgtttcgctgtacaacatcttcgtcagcctgctgagcattctgggcttcgccag

SEQ ID NO: 693051 - DNA, 75 bp, synthetic construct
  source 1..75: mol_type = other DNA
gtaagctacaacacgacatggtcaagttataaatgcgattttcctgatgtgcagcagacctgtaccgcatcagga

SEQ ID NO: 693052 - DNA, 75 bp, synthetic construct
  source 1..75: mol_type = other DNA
attaacaatgccaatggtgctgttaggatcggtaatggactcaatgttactggcggcatcaatggtagtttgaac

SEQ ID NO: 693053 - DNA, 75 bp, synthetic construct
  source 1..75: mol_type = other DNA
atggtctgcgcattgcctacggaaactacggattctttatccgaaacgatggttcaagcacatacttcatgttga

SEQ ID NO: 693054 - DNA, 75 bp, synthetic construct
  source 1..75: mol_type = other DNA
ttaactacaacggcgttatcggcatgttggttgaggctgtcaaagagctgcgcgaggaagtgcgcgaactgaagg

SEQ ID NO: 693055 - DNA, 75 bp, synthetic construct
  source 1..75: mol_type = other DNA
tggggtgccgatcgcattggcattcgcgtttcgccaatcggtactttccagaatacggataacggcccgaatgaa

SEQ ID NO: 693056 - DNA, 75 bp, synthetic construct
  source 1..75: mol_type = other DNA
ccgaaacactgatcggcaaagggttaattgatgcagtggcgtttggtcgtgactggattgcaaacccggatctgg

SEQ ID NO: 693057 - DNA, 75 bp, synthetic construct
  source 1..75: mol_type = other DNA
ccgaacgaagtggaagagatcgacgcccgccatgatattcagaagaatgcggacggttcctggacggcgaatggt

SEQ ID NO: 693058 - DNA, 75 bp, synthetic construct
  source 1..75: mol_type = other DNA
acttagcagtgctgtcgatagcaccagtgaatcgctggccgcaacgccaaaagcagttaaggccgcatatgataa

SEQ ID NO: 693059 - DNA, 75 bp, synthetic construct
  source 1..75: mol_type = other DNA
taaaggcgataccgtagacagcgtattctatatagaaggtggggcatttcccgtagaggtctttttagaagaagg

SEQ ID NO: 693060 - DNA, 75 bp, synthetic construct
  source 1..75: mol_type = other DNA
gatataaacgcgccaaccgctgccgctggatggttaaatagtggtaacggaacggcatttacgactgctcaattt

SEQ ID NO: 693061 - DNA, 75 bp, synthetic construct
  source 1..75: mol_type = other DNA
ttgctgaggaaggattaaatgtgattgttccaacggctgattatgcagttggtcaaaccacttataagtgggggg

SEQ ID NO: 693062 - DNA, 75 bp, synthetic construct
  source 1..75: mol_type = other DNA
gctacccgaccacgtatggcaacgtattgcacatgaaaggtgcgagtgctgctggtgagggcgagttgcttattg

SEQ ID NO: 693063 - DNA, 75 bp, synthetic construct
  source 1..75: mol_type = other DNA
tgcaaatggtttccgcattgcttacggtagctttgggttctttatccgtaatgatggatcgaacacatatttcat

SEQ ID NO: 693064 - DNA, 75 bp, synthetic construct
  source 1..75: mol_type = other DNA
cgggtgacatccctaccccgttgatggcggaatactatcgccaacgtgccagtgccggtttgattattagcgaag

SEQ ID NO: 693065 - DNA, 75 bp, synthetic construct
  source 1..75: mol_type = other DNA
cgggaaaatcggtgctttaccgtcatcgaacacgcaacaattgacggcaacagttcgtgctcagtcacgcttgca

SEQ ID NO: 693066 - DNA, 75 bp, synthetic construct
  source 1..75: mol_type = other DNA
ctggccattcgcacattacccgtcgcgcaatatcctgatgttgcgccgccgaccatcagaatttcagctacttat

SEQ ID NO: 693067 - DNA, 75 bp, synthetic construct
  source 1..75: mol_type = other DNA
gctgtgcggttctgttctccagcatgttccaccgcataaaaaaggcttctttggcgcatttaaccgtttctaccg

SEQ ID NO: 693068 - DNA, 75 bp, synthetic construct
  source 1..75: mol_type = other DNA
tttgcagatattaccctgaacaccctcgatcccaaccatatcgacgtgttcttcccggagttcgcccacgccacg

SEQ ID NO: 693069 - DNA, 75 bp, synthetic construct
  source 1..75: mol_type = other DNA
aataacgcgtatatgtggtatgaatgttcatatcccaatatccagcaaacttgctcggactctggtaatttctcg

SEQ ID NO: 693070 - DNA, 75 bp, synthetic construct
  source 1..75: mol_type = other DNA
tggtacgggcattattggcggtacgctgaccgctacgttgctggctattttctttgttcctctgttttttgtact

SEQ ID NO: 693071 - DNA, 75 bp, synthetic construct
  source 1..75: mol_type = other DNA
aaagggcgtatcgatgtcttgtttagtgaaggtatggctgacaggatttttaaaaatacgggtggagtgttaatc

SEQ ID NO: 693072 - DNA, 75 bp, synthetic construct
  source 1..75: mol_type = other DNA
tttttgctttcgaaggatgttcagagtccgaagttactgaactattaggaaaaaaaccaacaggttataatgatt

SEQ ID NO: 693073 - DNA, 75 bp, synthetic construct
  source 1..75: mol_type = other DNA
ccgtgttgaaacatccatgccgcgtgcgcttgaactggaagagattcctggtatcgtcaatgatttccgtcaggc

SEQ ID NO: 693074 - DNA, 75 bp, synthetic construct
  source 1..75: mol_type = other DNA
gctattttctttgttcctctgttttttgtactggtgaaacgtttgtttgccggtaaaccgcgccgtcaggagtaa

SEQ ID NO: 693075 - DNA, 75 bp, synthetic construct
  source 1..75: mol_type = other DNA
accggagcctccgccgaaacgctggaaaacagtgtaacgcaggttattgagcaacagctcaccgggctggataat

SEQ ID NO: 693076 - DNA, 75 bp, synthetic construct
  source 1..75: mol_type = other DNA
tccagttcggatatcgccgactggttggttagtaacgttcaggacccgctggcgcgtgttgaaggtgtggggagt

SEQ ID NO: 693077 - DNA, 75 bp, synthetic construct
  source 1..75: mol_type = other DNA
ctttgctgctgaactgacagaagcattgcgtgacgaggggcttaaacagcaggtgctggcccgtatcggtcaacg

SEQ ID NO: 693078 - DNA, 75 bp, synthetic construct
  source 1..75: mol_type = other DNA
gctccccgcaagcacagcagcatttacaacaattgctgcgtaccggactgccgacacgtaaacatgaaaactgga

SEQ ID NO: 693079 - DNA, 75 bp, synthetic construct
  source 1..75: mol_type = other DNA
aaggagaacttcttcgtccggtaccgcaggttcgacagcttcactcatgttaatcaacaactggagcaatggata

SEQ ID NO: 693080 - DNA, 75 bp, synthetic construct
  source 1..75: mol_type = other DNA
atgatggcagcggtagaaggtgacactctcgatcctgaagtagaacgacgttaccgtaatgcgctttcactataa

SEQ ID NO: 693081 - DNA, 75 bp, synthetic construct
  source 1..75: mol_type = other DNA
agcgacttgctccaggcaattatcccgttatttgaactggacagctatgcgccgccgctggtgatgatggcggca

SEQ ID NO: 693082 - DNA, 75 bp, synthetic construct
  source 1..75: mol_type = other DNA
gaagcgcggtcaacgaccggcaaagccattgctgttaatgcatatcacccagggcgtggcaggtgaagaggtgaa

SEQ ID NO: 693083 - DNA, 75 bp, synthetic construct
  source 1..75: mol_type = other DNA
ctggctggcagacagtgccggagcatcacgccccgctctggcagcaggtcagtcaggtggaacatctgtcacgaa

SEQ ID NO: 693084 - DNA, 75 bp, synthetic construct
  source 1..75: mol_type = other DNA
atgcgtccgtcaaaaagaacagttcgcttcgaaactcagcctggataccagctccagcacgactggggcgaagtt

SEQ ID NO: 693085 - DNA, 75 bp, synthetic construct
  source 1..75: mol_type = other DNA
tcgcttccatgtcttcgcggcaccaaagcaggatgctgaacatacctatgagtcactggtccgcgccttccgcta

SEQ ID NO: 693086 - DNA, 75 bp, synthetic construct
  source 1..75: mol_type = other DNA
atggattacatcgacatgcgcctggcagagaatgtctggaatagcgaggttatcttcgcggagattaaggcaatg

SEQ ID NO: 693087 - DNA, 75 bp, synthetic construct
  source 1..75: mol_type = other DNA
gctatatcgaggttggcggtaatcgttacagcattcccgaagcgctgtgtggtcagccggtatcgatacgaatat

SEQ ID NO: 693088 - DNA, 75 bp, synthetic construct
  source 1..75: mol_type = other DNA
gctccagcacgactggggcgaagttgaggtggagattgccgggcaacggtgcaaagttaactttgcggttaatac

SEQ ID NO: 693089 - DNA, 75 bp, synthetic construct
  source 1..75: mol_type = other DNA
atacgctggggttctcccgccgcttccatgtcttcgccgcaccaaaacaggatgctgagcatacctacgaatcac

SEQ ID NO: 693090 - DNA, 75 bp, synthetic construct
  source 1..75: mol_type = other DNA
cgttgaagaccatcgggggaaaacggtttatgacgtagcgtcaggggacgagttatttatttctgaactcggtcc

SEQ ID NO: 693091 - DNA, 75 bp, synthetic construct
  source 1..75: mol_type = other DNA
gctaccagagaatgtcacctggttgtcgccagcaggggagtatcagaagtgggacggcgtatcctgggtgaagga

SEQ ID NO: 693092 - DNA, 75 bp, synthetic construct
  source 1..75: mol_type = other DNA
ccacctcagcgctggaagtggttattctgaaaacgctgcatatgtttgaagtaccgttcctgctggtgggctgct

SEQ ID NO: 693093 - DNA, 75 bp, synthetic construct
  source 1..75: mol_type = other DNA
gaagaagtatcgggtattgctgaaccgtattgatacatcaactgcacctgatattgagtggccgacttcacctgc

SEQ ID NO: 693094 - DNA, 75 bp, synthetic construct
  source 1..75: mol_type = other DNA
cggatacggacttcgataccagttacttcgacatccgccatgtgtcctgggacagctatatcgaggttggtggta

SEQ ID NO: 693095 - DNA, 75 bp, synthetic construct
  source 1..75: mol_type = other DNA
atggcattcagaatgagtgaacaatcacgtactgtaaaaatttataacctgctggccggaactaatgagtttatt

SEQ ID NO: 693096 - DNA, 75 bp, synthetic construct
  source 1..75: mol_type = other DNA
gaagaagtatcgggtgttgctgaaccgtgttgatacatcaactgcacctgatattgagtggccgataattcctgt

SEQ ID NO: 693097 - DNA, 75 bp, synthetic construct
  source 1..75: mol_type = other DNA
tgctgccacgcccagccagactgtatcaatgcggtttcgccaaaatgtggtgcaacaagctggaaggcgattggt

SEQ ID NO: 693098 - DNA, 75 bp, synthetic construct
  source 1..75: mol_type = other DNA
acacgaacagtaactatcggttctaaaagcaaaagtcgtagtcgtggaggaacatcgagatctgaatcagaaagc

SEQ ID NO: 693099 - DNA, 75 bp, synthetic construct
  source 1..75: mol_type = other DNA
agccatgtttatactctctgcaggcggaagcgcgccgcaggttgcgggtaaaggcagcgtcgcggatgccatttt

SEQ ID NO: 693100 - DNA, 75 bp, synthetic construct
  source 1..75: mol_type = other DNA
atccgggaggcggaagagaaaaaggcaagattaatccaggaagcgactgataacataacaattctgcaggatgct

SEQ ID NO: 693101 - DNA, 75 bp, synthetic construct
  source 1..75: mol_type = other DNA
tactgatattgctccgccagatattccagctggcttcgtggctattttcaacagtgatgaggcgtcctggcatct

SEQ ID NO: 693102 - DNA, 75 bp, synthetic construct
  source 1..75: mol_type = other DNA
ccatgaaaaaactgtttacggcagtgttggcacttagctgggcctttagtgcaacggctgccgaacgcattgtgg

SEQ ID NO: 693103 - DNA, 75 bp, synthetic construct
  source 1..75: mol_type = other DNA
taaagcgatgtttattctctctgctggcggcagtgcgccacaggttgccggtaaaggcagcgtcgcagacgccat

SEQ ID NO: 693104 - DNA, 75 bp, synthetic construct
  source 1..75: mol_type = other DNA
cctacgaatcactggttcgcgccttccgctacttcggtggttgtgtgaaaacggtgctggttgataaccagaagg

SEQ ID NO: 693105 - DNA, 75 bp, synthetic construct
  source 1..75: mol_type = other DNA
caggatgctgagcatacctacgaatcactggttcgcgccttccgctacttcggtggttgtgtgaaaacggtgctg

SEQ ID NO: 693106 - DNA, 75 bp, synthetic construct
  source 1..75: mol_type = other DNA
acagttcgcttcgaaactcagcctggataccagctccagcacgactggggcgaagttgaggtggaggttgccggg

SEQ ID NO: 693107 - DNA, 75 bp, synthetic construct
  source 1..75: mol_type = other DNA
atgggttatacgggcggacgttccatgctgcgttactacatccagcccaaacgtaaaatgcgtccgtcaaaaaga

SEQ ID NO: 693108 - DNA, 75 bp, synthetic construct
  source 1..75: mol_type = other DNA
actcatgtcaatcaacaactggagcaatggatagccgatgtggctgacaaacgggaacttcgccagttcaaagaa

SEQ ID NO: 693109 - DNA, 75 bp, synthetic construct
  source 1..75: mol_type = other DNA
tggattacatcgacatgcgcctggcagagaatgtctggaatagtgaggttatctttacggagattaaggcaatgg

SEQ ID NO: 693110 - DNA, 75 bp, synthetic construct
  source 1..75: mol_type = other DNA
tatcgctggatgacgagttgcggatctacagtaatgagaaactggtggcctcacatcgcctctgttcagcatcgt

SEQ ID NO: 693111 - DNA, 75 bp, synthetic construct
  source 1..75: mol_type = other DNA
tagagcgtcgtccgcgtaagcgcaaaaaagcagccagcaaaccggcttctcgtcagtatatgatgatgggcgtcg

SEQ ID NO: 693112 - DNA, 75 bp, synthetic construct
  source 1..75: mol_type = other DNA
ctgaacaatgcgctgacccagccacaaaatcagcaacagttgaacaatgtggcggtcaattccacgttgccgact

SEQ ID NO: 693113 - DNA, 75 bp, synthetic construct
  source 1..75: mol_type = other DNA
ggcggtcaattccacattgccgaccgaacccgcgactgtcgcgcctgttcgcaatggcaatgcatcgcgtgacac

SEQ ID NO: 693114 - DNA, 75 bp, synthetic construct
  source 1..75: mol_type = other DNA
aaactgcgtctggtgagaaaagtattgatcttgcgggtaatactgccgatcagacgaatggcgtgcagccagcgc

SEQ ID NO: 693115 - DNA, 75 bp, synthetic construct
  source 1..75: mol_type = other DNA
gaacccgcgacggtcgcgcctgttcgcaatggcaatgcatcgcgtgacacggcgaaaacgcaaaccgctgaacgt

SEQ ID NO: 693116 - DNA, 75 bp, synthetic construct
  source 1..75: mol_type = other DNA
gatcgccgcccaactcgcgcacaaaaagggcgcgatgaggaaccggaagtcgaacaagaagatgacgaatacgaa

SEQ ID NO: 693117 - DNA, 75 bp, synthetic construct
  source 1..75: mol_type = other DNA
atcgcgtattgctggctgagtaaagtcctgacgattgtcgatatagccagaattgatgcggagggcagcgcatga

SEQ ID NO: 693118 - DNA, 75 bp, synthetic construct
  source 1..75: mol_type = other DNA
tggcggcggagttggggggcattttgcgtatacttatgtagtggatgttgataatccagaatcatcgacagaatc

SEQ ID NO: 693119 - DNA, 75 bp, synthetic construct
  source 1..75: mol_type = other DNA
tacaaccgccaccgctattatgacccgctgcaggggcggtatatcactcaggatccgattggactgaagggggga

SEQ ID NO: 693120 - DNA, 75 bp, synthetic construct
  source 1..75: mol_type = other DNA
ggggcggtgttttatttttttgcaatccttactttctccgcgtattttagagggatgttcttagctcgtatgaaa

SEQ ID NO: 693121 - DNA, 75 bp, synthetic construct
  source 1..75: mol_type = other DNA
ttgtcaatggtccattcgcattatcccttgggaaatattgatagtgctttcttgcttataatgttttccttactt

SEQ ID NO: 693122 - DNA, 75 bp, synthetic construct
  source 1..75: mol_type = other DNA
ttgccaatagatccttatatccaattttaagcaggcatcaagatgataattcagtgatttcgaaaaactatttta

SEQ ID NO: 693123 - DNA, 75 bp, synthetic construct
  source 1..75: mol_type = other DNA
actgatcagtgactgtgcagccagcccggcaacctgccagcagaaatacggtgatgtactgactgacagtctggc

SEQ ID NO: 693124 - DNA, 75 bp, synthetic construct
  source 1..75: mol_type = other DNA
aactatctgagcagtaagcagatagatgcttggtccgctgaaatgaagtcctgtcaggcgaaaggcggtgactgc

SEQ ID NO: 693125 - DNA, 75 bp, synthetic construct
  source 1..75: mol_type = other DNA
ctggcaggtggtgcagcaccgtatattgctgaaattatcaaacagaccaccccggacggtgcgggacgtgtggcc

SEQ ID NO: 693126 - DNA, 75 bp, synthetic construct
  source 1..75: mol_type = other DNA
gtttaatatgtaaggataatagtggcagatatttctcaacagcacctaaccgaggagaaagaaaaggatcatatc

SEQ ID NO: 693127 - DNA, 75 bp, synthetic construct
  source 1..75: mol_type = other DNA
tggtctttgcggcacactatccgctatgataggtccagataaatttgattctatagatagcaccgcatatgacgc

SEQ ID NO: 693128 - DNA, 75 bp, synthetic construct
  source 1..75: mol_type = other DNA
cgagaaagccgtgatgattcagcagatgaaagcggacaatctcccggatcagatgattggtgaaatgctggggga

SEQ ID NO: 693129 - DNA, 75 bp, synthetic construct
  source 1..75: mol_type = other DNA
ttatattaacttctatttcagcatccgcaaaaaccagtgatgttagcttaaatgctggatatgattatatcaatt

SEQ ID NO: 693130 - DNA, 75 bp, synthetic construct
  source 1..75: mol_type = other DNA
agccacgcaagcaccttaaaatcaccatcatacactaaatcagtaagttggcagcattacctcgtgccactaatc

SEQ ID NO: 693131 - DNA, 75 bp, synthetic construct
  source 1..75: mol_type = other DNA
cgtttgtcggtctggcgttgctttcctctttcttatgcatgtttatcgccagcggttccgcaatctggtcgattc

SEQ ID NO: 693132 - DNA, 75 bp, synthetic construct
  source 1..75: mol_type = other DNA
agccagcagttcagccgggtacggcaggcgcatccgtcggtggccccgcagtgggtgacgcggacgaatcatgcg

SEQ ID NO: 693133 - DNA, 75 bp, synthetic construct
  source 1..75: mol_type = other DNA
gggctgggctatggcgaaggcgatgagtcctatggctatgacagttgtggctacctgaaggcgcagtctgcgggc

SEQ ID NO: 693134 - DNA, 75 bp, synthetic construct
  source 1..75: mol_type = other DNA
tggcataaatattgggggtcggctgctcaccatatagtcgccggagcggatcagcgcgctgcaattgcaagggat

SEQ ID NO: 693135 - DNA, 75 bp, synthetic construct
  source 1..75: mol_type = other DNA
ttgctaaactaacagaaaatgtaaaatcagctcttgatgacatcagggatgctttggcatcaggagtgtttaggt

SEQ ID NO: 693136 - DNA, 75 bp, synthetic construct
  source 1..75: mol_type = other DNA
cagattggtaatgaaatcaatggcggaatactctggccggaaggcaaaagctgggggcagggtggcggcgagttt

SEQ ID NO: 693137 - DNA, 75 bp, synthetic construct
  source 1..75: mol_type = other DNA
aatacgcaggtgcgcgctttcacgtatgacgcgcagcacccgggccggatggtggcgcaccgttatgcaggcagg

SEQ ID NO: 693138 - DNA, 75 bp, synthetic construct
  source 1..75: mol_type = other DNA
ataaagagacgctttgctctatcgtttctggcgttcacgataggcctcatgagcatgtttggaattctgaatgga

SEQ ID NO: 693139 - DNA, 75 bp, synthetic construct
  source 1..75: mol_type = other DNA
ccaccacattctgggcaagaaaacttgattgtattcataaccaatttcctctcgagtaacagacccctcagagga

SEQ ID NO: 693140 - DNA, 75 bp, synthetic construct
  source 1..75: mol_type = other DNA
tacagacagtcagtcggcatttcgtaattcaaatgccagttacagtatgtcaaactattaccccagttggggcgg

SEQ ID NO: 693141 - DNA, 75 bp, synthetic construct
  source 1..75: mol_type = other DNA
gcctttttaatatttcattctccatttcaatgcgttgtagctttttcctcagctcacgtatttcgatttgttctg

SEQ ID NO: 693142 - DNA, 75 bp, synthetic construct
  source 1..75: mol_type = other DNA
gatacaggccgcaacggcagcagtacagggactggccggtggtaatctgagtgcagccctggcaggtggtgctgc

SEQ ID NO: 693143 - DNA, 75 bp, synthetic construct
  source 1..75: mol_type = other DNA
ggcagaatatttaattgcggattcgttgggaagttcagggacttttgaaagtgatggtggtgggggaaggattcg

SEQ ID NO: 693144 - DNA, 75 bp, synthetic construct
  source 1..75: mol_type = other DNA
atatcaggtctacttgatacaatatataacaatatgtatcaaataataattggcaagaaatttagtgccgcaaac

SEQ ID NO: 693145 - DNA, 75 bp, synthetic construct
  source 1..75: mol_type = other DNA
tgaatgattttctgggcgcaactaatattgacctgcgtccggaatccctgaagaaattcgaagagctggcgcaac

SEQ ID NO: 693146 - DNA, 75 bp, synthetic construct
  source 1..75: mol_type = other DNA
aaacgcccacgggagaaccgctggacggcgcaaccattacactaacctccatacacaaccgtgcagggattctga

SEQ ID NO: 693147 - DNA, 75 bp, synthetic construct
  source 1..75: mol_type = other DNA
tggcatgaagattccgttcgtaaccgctggttcagcgtaatggcggggccgtctgtgcgcgtgaatgaatggttc

SEQ ID NO: 693148 - DNA, 75 bp, synthetic construct
  source 1..75: mol_type = other DNA
atcagaaaatgatggaaggatcaggatgtatcttgagcaaagattacgtcacagcaatttataaaacgctctggg

SEQ ID NO: 693149 - DNA, 75 bp, synthetic construct
  source 1..75: mol_type = other DNA
aagcgactaacgtactacgttatggaatgcttgaagggactgctgtagttgatgctgaatacgccgtgtatgacc

SEQ ID NO: 693150 - DNA, 75 bp, synthetic construct
  source 1..75: mol_type = other DNA
ctggatgagctgaaaaaatatcgtgatgatattcttaaaggcaaggatgatattacaacgtgtaaagaaaatact

SEQ ID NO: 693151 - DNA, 75 bp, synthetic construct
  source 1..75: mol_type = other DNA
attaatataaattttaactctatgataccccggaatgttattcttacaggtaccgcaggtgatggtaaaacattt

SEQ ID NO: 693152 - DNA, 75 bp, synthetic construct
  source 1..75: mol_type = other DNA
agcaattgatggatagtgtctgggaagacgcgcaggacacttacgatcgcaccgtcgatacccacattaaaacgc

SEQ ID NO: 693153 - DNA, 75 bp, synthetic construct
  source 1..75: mol_type = other DNA
ggtgtgttcgatcttccgctggaatcatatgggtgtatgacacatccgtgactctttacgactggctccccgctt

SEQ ID NO: 693154 - DNA, 75 bp, synthetic construct
  source 1..75: mol_type = other DNA
acgttttgcggagaaagcccgacaggatgcaaccgtcacagctgaggacagaaaggccactgcggaagatgtgac

SEQ ID NO: 693155 - DNA, 75 bp, synthetic construct
  source 1..75: mol_type = other DNA
gaataacaccggataaagcagataccggtcagataatggcagccctgaaaaagctgtttattacgaacagtggtt

SEQ ID NO: 693156 - DNA, 75 bp, synthetic construct
  source 1..75: mol_type = other DNA
gtcaggatgaaattggcctgcgttacaacagccaccggacaaaacgagaagaaaaccttgtgatgagtggcaacg

SEQ ID NO: 693157 - DNA, 75 bp, synthetic construct
  source 1..75: mol_type = other DNA
taacaccgctcagtgcttttgtgcgcggtattctcgggaaaaacacagccggtgaaattatcgaagcactttcat

SEQ ID NO: 693158 - DNA, 75 bp, synthetic construct
  source 1..75: mol_type = other DNA
acttccaggggctgggcggcgatgaagcaaacgcccaggcgcaagggattctggaacgcgcggcgaagcgtgccg

SEQ ID NO: 693159 - DNA, 75 bp, synthetic construct
  source 1..75: mol_type = other DNA
ctgtttgtcggcctcaaacccatcgcggtggtagaggcgaaacgtaacaatatcgacgttcccgccaggctcaat

SEQ ID NO: 693160 - DNA, 75 bp, synthetic construct
  source 1..75: mol_type = other DNA
cggtattctcgggaaaaacacagccggtgaaattatcgacgcgcttttattacgtgacacggtaaataaagctaa

SEQ ID NO: 693161 - DNA, 75 bp, synthetic construct
  source 1..75: mol_type = other DNA
gcattaatccgttacttcattacattatgtatgggaagttcgagcagcgcagttgcctgcctgtcaataagggag

SEQ ID NO: 693162 - DNA, 75 bp, synthetic construct
  source 1..75: mol_type = other DNA
gtgaaataaagcgccagatggtcgctctacaagaaaaccagcaagcagaaacccaggatattatggagcaacagg

SEQ ID NO: 693163 - DNA, 75 bp, synthetic construct
  source 1..75: mol_type = other DNA
gagtgaatctccattgcgggctaatctatatggaaaaattcgacaaatttccaaaccagctataactcctccctc

SEQ ID NO: 693164 - DNA, 75 bp, synthetic construct
  source 1..75: mol_type = other DNA
tcaacatgacgttaactggcagctgtctggcggtgtggtcgggcatgaaaatggcataacgctgagccagccttt

SEQ ID NO: 693165 - DNA, 75 bp, synthetic construct
  source 1..75: mol_type = other DNA
gagcaggatgctgtaaataatcgctcaatgcgtaattatgtcgatgctgcaatcgccggggttgttggtggtttt

SEQ ID NO: 693166 - DNA, 75 bp, synthetic construct
  source 1..75: mol_type = other DNA
ccagaagggtattacgtatgtgatttttcttatagcagatactcttccctgcaactggtaaataatgtcaaggca

SEQ ID NO: 693167 - DNA, 75 bp, synthetic construct
  source 1..75: mol_type = other DNA
actcagttaagcagtgcgaccaacagtgaatccgaaatactggccgcaacaccgaaggctgtgaaggcggcatat

SEQ ID NO: 693168 - DNA, 75 bp, synthetic construct
  source 1..75: mol_type = other DNA
aagtaataaaaccataaatattacggggcgtgttaatccctcggattacggtaactttgattcccgctatgtccg

SEQ ID NO: 693169 - DNA, 75 bp, synthetic construct
  source 1..75: mol_type = other DNA
gattctgaaacgcttgcggcaacgccaaaggcggttaagacagcgtatgaccttgctaacgggaaatacactgca

SEQ ID NO: 693170 - DNA, 75 bp, synthetic construct
  source 1..75: mol_type = other DNA
ttgttgctgtaagtctgataactggcattgatatagatgataaggaatatttattaccggcaaaggatgaaaagt

SEQ ID NO: 693171 - DNA, 75 bp, synthetic construct
  source 1..75: mol_type = other DNA
tggttatcttcaggcgtggaaaagtcgccctattaaacgtgattacgatcacattctcaagacacgacttacaaa

SEQ ID NO: 693172 - DNA, 75 bp, synthetic construct
  source 1..75: mol_type = other DNA
gcagggcacgtaattaccgggcttggtattgtcggtgaagtcgatggtgatgaccccgcagtattcagaccaata

SEQ ID NO: 693173 - DNA, 75 bp, synthetic construct
  source 1..75: mol_type = other DNA
gttgatcgtctgccgagcgcagcgttaaccttcaccccccatgatggacgcggcagccaccttgaagcattagcc

SEQ ID NO: 693174 - DNA, 75 bp, synthetic construct
  source 1..75: mol_type = other DNA
cggtcagtccggaaatatcagcgtcagtggtgaaggcggaacatcgtactggggtggcggtggacgcgcaggcgc

SEQ ID NO: 693175 - DNA, 75 bp, synthetic construct
  source 1..75: mol_type = other DNA
acaccccgacgccaggaacaaaacgaatcagggtcacaataacgggcggcggtggcggtgggggcggctgccagg

SEQ ID NO: 693176 - DNA, 75 bp, synthetic construct
  source 1..75: mol_type = other DNA
gtatatctgaacttgttcttcgtgcgggaaatggaaatccaaaaggtcttactggtgcgttatggcgacggacat

SEQ ID NO: 693177 - DNA, 75 bp, synthetic construct
  source 1..75: mol_type = other DNA
gtcttttagtggtggtgcaggatggttcaggctggcaactgtaaccatgccacaggccagttccgtggtttacat

SEQ ID NO: 693178 - DNA, 75 bp, synthetic construct
  source 1..75: mol_type = other DNA
aacaccaaaagcggtaaaagcagcatatgaccttgctaacgggaaatacactgcacaggacgccaccacagcgcg

SEQ ID NO: 693179 - DNA, 75 bp, synthetic construct
  source 1..75: mol_type = other DNA
acctcctgctgcatcagatggttatgcgtcttgatgatccattctggcagtcattctacccgcctaacggctggg

SEQ ID NO: 693180 - DNA, 75 bp, synthetic construct
  source 1..75: mol_type = other DNA
gaaacaacgcagaagtggcgcgcggaacaagccgttcgccggagatatggccgggacggcgaattgcgctgacgg

SEQ ID NO: 693181 - DNA, 75 bp, synthetic construct
  source 1..75: mol_type = other DNA
aattaatgacatcaaagttaacctgtctcatattcttattgattccttagatgatgcaaaagttaaccttacacc

SEQ ID NO: 693182 - DNA, 75 bp, synthetic construct
  source 1..75: mol_type = other DNA
gacatacagccattatatttccacaatctgattttttgagttttcgttatgaaggtaagtcttttgaaagaaaag

SEQ ID NO: 693183 - DNA, 75 bp, synthetic construct
  source 1..75: mol_type = other DNA
gaactggtagaaatcggcggcgcgtttcgaattcctgacgtgatgcgtcaggccggatgtacgctgcatgaagtg

SEQ ID NO: 693184 - DNA, 75 bp, synthetic construct
  source 1..75: mol_type = other DNA
aagagcgttattttttcgggggggtggtattaccagttgtcagggattcaagaaagtacagctgaaatttcaaga

SEQ ID NO: 693185 - DNA, 75 bp, synthetic construct
  source 1..75: mol_type = other DNA
tgattctcttgtcgttaccagtaaaggtgaaataattaactcagaccgtctttctcgaggaacatacgaggcagt

SEQ ID NO: 693186 - DNA, 75 bp, synthetic construct
  source 1..75: mol_type = other DNA
agggcagcccatggcgtctcgacaccatctttcgcacaaatatgtccgtactctacagcgccggtcgctgggctg

SEQ ID NO: 693187 - DNA, 75 bp, synthetic construct
  source 1..75: mol_type = other DNA
acgggtaagccggtcaccattcagcagggcagtccgtggcggctcgataccatctttcgcaccaatatgtccgta

SEQ ID NO: 693188 - DNA, 75 bp, synthetic construct
  source 1..75: mol_type = other DNA
gcagcgcagaggtcattcaaatccaggcacaacgtttacaggctccccttgccgcacattacggcgcggagtttg

SEQ ID NO: 693189 - DNA, 75 bp, synthetic construct
  source 1..75: mol_type = other DNA
agtctaatgaagagattatgaaaaatcaaccaaaagatgttattgaagaaaaacttaataatgaattaaaactta

SEQ ID NO: 693190 - DNA, 75 bp, synthetic construct
  source 1..75: mol_type = other DNA
acggccctgacacttgcaaccgttgccgcactactgacgggaggtggtgcagccggtgctgccagtgtcgcgctg

SEQ ID NO: 693191 - DNA, 75 bp, synthetic construct
  source 1..75: mol_type = other DNA
tggctgaaagtggaaactggtgggatcgtcagaggcacacagtacggcaacaatggcacgttatcagtcggtgac

SEQ ID NO: 693192 - DNA, 75 bp, synthetic construct
  source 1..75: mol_type = other DNA
actcagttaagcagcgcaaccaacagcacgtctgaaacactggccgcaacgccgaaagcggtaaaggtcgcgtat

SEQ ID NO: 693193 - DNA, 75 bp, synthetic construct
  source 1..75: mol_type = other DNA
ctcttgtagctttacttgcaccagcaaaagggcgtttcaacgttacggccaaaggagggctgataaaaaataagt

SEQ ID NO: 693194 - DNA, 75 bp, synthetic construct
  source 1..75: mol_type = other DNA
tcaattgttgaacagccccttggattttatcaacaaacattattttcaattattatttgtatcgctgctatcttc

SEQ ID NO: 693195 - DNA, 75 bp, synthetic construct
  source 1..75: mol_type = other DNA
gccaggcaagagtttagaagattcgcagatgaatcaggcattcattatgtcgcaagagaaacacatgaacatgct

SEQ ID NO: 693196 - DNA, 75 bp, synthetic construct
  source 1..75: mol_type = other DNA
tatgttttgccttatctatttgttatcgttttaactaactcaagaatacaaggaaaatacaggcattctttctgg

SEQ ID NO: 693197 - DNA, 75 bp, synthetic construct
  source 1..75: mol_type = other DNA
cgcaagagaaacacatgaacatgctaaggccggaaatataaataatgcgcttaaaatagctaatggcgaatttgt

SEQ ID NO: 693198 - DNA, 75 bp, synthetic construct
  source 1..75: mol_type = other DNA
atataacgaaccctttacagtcgttaagaatacagtttatggtgcgttggccttagactggccaacggataaatt

SEQ ID NO: 693199 - DNA, 75 bp, synthetic construct
  source 1..75: mol_type = other DNA
tgcaaaactgcacagaaatttactccgctggtatagcgcaggtcgcctggatatccccgaacttctggattacgc

SEQ ID NO: 693200 - DNA, 75 bp, synthetic construct
  source 1..75: mol_type = other DNA
tattatccgccgcgcttatctggcgctgttaccgtcctttcatccagaaaccgatccgcagggttttaaacaact

SEQ ID NO: 693201 - DNA, 75 bp, synthetic construct
  source 1..75: mol_type = other DNA
ttatggattaatttgtatggtaaggaaaatactgtggaaaaaaaagtaacgccagtgacgcagtggcagataggc

SEQ ID NO: 693202 - DNA, 75 bp, synthetic construct
  source 1..75: mol_type = other DNA
cgctgacccatgcagagtgtgaactgtttgaagacattaataaaaaattactgacgcatattgctgatgtgtgtc

SEQ ID NO: 693203 - DNA, 75 bp, synthetic construct
  source 1..75: mol_type = other DNA
ccgcattgaatatatttgtcccgcaaagaaggggcaaaattattaatatgtgttctgtgttgtcatttcatggag

SEQ ID NO: 693204 - DNA, 75 bp, synthetic construct
  source 1..75: mol_type = other DNA
actgcacagaaatttactccgctggtatagcgcaagccgcctgggaatccccgaacttctggattacgcccggtc

SEQ ID NO: 693205 - DNA, 75 bp, synthetic construct
  source 1..75: mol_type = other DNA
atgttgcaagagaaacgcatgaacatgcgaaagctggaaatataaacaatgcgcttaaaatagctaacggcgaat

SEQ ID NO: 693206 - DNA, 75 bp, synthetic construct
  source 1..75: mol_type = other DNA
ttgataagtcactggtggtcagcgcgtacaggcgagtgaagaccagtgcaggcgcggcgggaattgataagcaat

SEQ ID NO: 693207 - DNA, 75 bp, synthetic construct
  source 1..75: mol_type = other DNA
gcggcgagatgaccgcccaattaagcgccgctgccgaccttgcgggaatcggcctgacgctgttgcccgtgctct

SEQ ID NO: 693208 - DNA, 75 bp, synthetic construct
  source 1..75: mol_type = other DNA
atgaacataaacgaaaaaaaatcttcttttacgcctgaagagttaaccaggaaatatcatgaggaagccacggct

SEQ ID NO: 693209 - DNA, 75 bp, synthetic construct
  source 1..75: mol_type = other DNA
atttggttcaggcggaggtggtgcatacgatgcaggttatagcggaaccagtatgacgggcgggaaaggtgctga

SEQ ID NO: 693210 - DNA, 75 bp, synthetic construct
  source 1..75: mol_type = other DNA
cctgtttgatgaatccggggcattgattgccgtgggaaactgcccggaaagctataagccgcaactggctgaagg

SEQ ID NO: 693211 - DNA, 75 bp, synthetic construct
  source 1..75: mol_type = other DNA
gggaacaggcgacagtaatcactagctggctacaaaaagttacctccctgatagatatcagtttaatcgatgtgg

SEQ ID NO: 693212 - DNA, 75 bp, synthetic construct
  source 1..75: mol_type = other DNA
tatcactggcgctaacatgcgcttcctgtcctggctggctagcatggtccagaatatctccatcatttacctgca

SEQ ID NO: 693213 - DNA, 75 bp, synthetic construct
  source 1..75: mol_type = other DNA
atagttcatgcttacaataataaagttggtctgaagattatgccaatgagttatgaacaaagtgttaattatgta

SEQ ID NO: 693214 - DNA, 75 bp, synthetic construct
  source 1..75: mol_type = other DNA
tcttttttatggtttaatccagaatggcaccgatacatggaatgcttcatttttttgtggttcatgcgcggttat

SEQ ID NO: 693215 - DNA, 75 bp, synthetic construct
  source 1..75: mol_type = other DNA
cttttacgcctgaagagttaaccaggaaatatcatgaggaagccccggttgatttaaaaaataaccatggcgata

SEQ ID NO: 693216 - DNA, 75 bp, synthetic construct
  source 1..75: mol_type = other DNA
ggttagtgagttaaatggtgaagcggcactgttaaaaacgatatgtttaatgtggctggcatataacactattat

SEQ ID NO: 693217 - DNA, 75 bp, synthetic construct
  source 1..75: mol_type = other DNA
gggcgttttaatgtcactgctaaaggtggattgatcgccaataaatatgtggactggcagatttcatacccatac

SEQ ID NO: 693218 - DNA, 75 bp, synthetic construct
  source 1..75: mol_type = other DNA
agttcgtggctgataactttgatttgaaaaaatgtactgaagaattagaggttatctacaatagtataatggaac

SEQ ID NO: 693219 - DNA, 75 bp, synthetic construct
  source 1..75: mol_type = other DNA
tcaggacagaataaaccttatcatcgcatttatggatgaacttattttccctgcacccccactgatgcacagaaa

SEQ ID NO: 693220 - DNA, 75 bp, synthetic construct
  source 1..75: mol_type = other DNA
actttcctgatatcccctgtcaggatatcgaaatttgcagatatgaattaaacaatgcaattcacaaatatgcgc

SEQ ID NO: 693221 - DNA, 75 bp, synthetic construct
  source 1..75: mol_type = other DNA
gatgcatacaacagggttaagtggtctgaatgaagggctggctctgattgctgcgctgacccggcatcactggtc

SEQ ID NO: 693222 - DNA, 75 bp, synthetic construct
  source 1..75: mol_type = other DNA
aaccgtctactcgagatattaccgctgtttccttgggagcccaaacgaccatgcccgcccccgttgtacaaaccg

SEQ ID NO: 693223 - DNA, 75 bp, synthetic construct
  source 1..75: mol_type = other DNA
aaaaaaataagcgtatcatacattgggatcgatacttttagttttaaaaatagtatgactccttttaatgaacgt

SEQ ID NO: 693224 - DNA, 75 bp, synthetic construct
  source 1..75: mol_type = other DNA
aagaacaaacaaaaaattgaaaagattaatgttccattcgcaataatagagcctggaggtgtttctgatatcaat

SEQ ID NO: 693225 - DNA, 75 bp, synthetic construct
  source 1..75: mol_type = other DNA
aacatttatggaaaggctttttctgtcaccaaagtatattcacgcgacgaaatttattaatcaagtatcctctta

SEQ ID NO: 693226 - DNA, 75 bp, synthetic construct
  source 1..75: mol_type = other DNA
tcttagacgcttacgaaaacgcgcctgtcaaagcaaaggataagatattaaaccttcttaattggtttagcggag

SEQ ID NO: 693227 - DNA, 75 bp, synthetic construct
  source 1..75: mol_type = other DNA
actgcaacggttaaagatcagttcgacaatgaggtgaataatcttccggtaacattcagctcagcctcttcatga

SEQ ID NO: 693228 - DNA, 75 bp, synthetic construct
  source 1..75: mol_type = other DNA
gccgaaatgacgaatggcggccaagccgtaacgaacgaacagggtaaggctaccgtcacttataccaatacccgc

SEQ ID NO: 693229 - DNA, 75 bp, synthetic construct
  source 1..75: mol_type = other DNA
aggcgttgcctttggtgagcagacggtcactgcatcactggctaataatggtgccagcgacaacaaaactgtgca

SEQ ID NO: 693230 - DNA, 75 bp, synthetic construct
  source 1..75: mol_type = other DNA
agtgatgtggccgctgaatacccacgcccggctggaaattattaccggtctgttcaatcgtctgcaaaaaacgct

SEQ ID NO: 693231 - DNA, 75 bp, synthetic construct
  source 1..75: mol_type = other DNA
acagtcgcgtcatcaacaaatcggtgttcttggcattgagcatcaatatcgaaggtcagaaagaacagccaggta

SEQ ID NO: 693232 - DNA, 75 bp, synthetic construct
  source 1..75: mol_type = other DNA
tccatgctggggcgtgtggagctgaatcatctgcgcagtggcaacatggatgatgaggactgggcgagggtgtca

SEQ ID NO: 693233 - DNA, 75 bp, synthetic construct
  source 1..75: mol_type = other DNA
ccacgggatttgactgtctggatgagatgacctgtggcctgcagcccggtgacctggtcctgctggctgcccgtc

SEQ ID NO: 693234 - DNA, 75 bp, synthetic construct
  source 1..75: mol_type = other DNA
tcatctggattgataaagcgattctgtacccgattattctgattttcagtattgtcggtgcatttgctatcgata

SEQ ID NO: 693235 - DNA, 75 bp, synthetic construct
  source 1..75: mol_type = other DNA
cggggattaatttattcaagggaatggggcaggtgatttggtcacgaaaattaaatcttggccgaagtagtatta

SEQ ID NO: 693236 - DNA, 75 bp, synthetic construct
  source 1..75: mol_type = other DNA
cgtatattaatttgaatgccattctggccattattgctgctacggcctttgggttatttgtgggggccatccctg

SEQ ID NO: 693237 - DNA, 75 bp, synthetic construct
  source 1..75: mol_type = other DNA
ctccgctgaatccatcattccagttggtcaattctgaaaacgaccagtggaaagactacgacctcaacgctggca

SEQ ID NO: 693238 - DNA, 75 bp, synthetic construct
  source 1..75: mol_type = other DNA
ttcctcacccacaactccgacgcctcattcgacgaaatctaccagatgctgcgcgaggctatccgcgcaccgtcc

SEQ ID NO: 693239 - DNA, 75 bp, synthetic construct
  source 1..75: mol_type = other DNA
caatggcgattttctggacaacaccggatcagtccatcagcctgcgggcacgagcgatcggtattgcggtgatca

SEQ ID NO: 693240 - DNA, 75 bp, synthetic construct
  source 1..75: mol_type = other DNA
tctgtttactcttgcgcagaacaggacgctccgggagcgcacggaagcctctctttcatccgcgctcgataccgt

SEQ ID NO: 693241 - DNA, 75 bp, synthetic construct
  source 1..75: mol_type = other DNA
cggctggtggaacaaagtgaagttcttcatcagcaacgcctcagagatgtccttcgacgacatctaccaggcgct

SEQ ID NO: 693242 - DNA, 75 bp, synthetic construct
  source 1..75: mol_type = other DNA
atcctgctcgacgagcctggcgccggtactcctgatgaaggcgtcggcatgttcgtcaacgctgacgggcaggag

SEQ ID NO: 693243 - DNA, 75 bp, synthetic construct
  source 1..75: mol_type = other DNA
acaccctgaagcgctgagtgaaaaattaccgaccctgcgcctgcttacccgcagcgcagaggtcattcaaatcca

SEQ ID NO: 693244 - DNA, 75 bp, synthetic construct
  source 1..75: mol_type = other DNA
cattacaaaaattgattccacaagagagcttagcgatgaagagaaaatattgttctggttagagtcgcatcttgt

SEQ ID NO: 693245 - DNA, 75 bp, synthetic construct
  source 1..75: mol_type = other DNA
gtatccccacctattttgaatcgcgctggaatctgggcgacgcactttctgatatggcactctttgaacgcgtag

SEQ ID NO: 693246 - DNA, 75 bp, synthetic construct
  source 1..75: mol_type = other DNA
gcggctaccagaataacgactcatggctggaccgctacaacagtgaaaagaccttcttctcgggcattgtcgatg

SEQ ID NO: 693247 - DNA, 75 bp, synthetic construct
  source 1..75: mol_type = other DNA
gattgcaggcgcgtacactgatgatagacatggagcagattactacaccgtgcatcatcagtgaccattatactc

SEQ ID NO: 693248 - DNA, 75 bp, synthetic construct
  source 1..75: mol_type = other DNA
tgaatctgatggactggtttgtcaatcacgccatcacaaaaattgattctacaagagagttgagtgatgaagaaa

SEQ ID NO: 693249 - DNA, 75 bp, synthetic construct
  source 1..75: mol_type = other DNA
attgaaaattatgtattttcatctttattaatgatgcagcctcatccgtatgacaattccagcaaacggaaaagg

SEQ ID NO: 693250 - DNA, 75 bp, synthetic construct
  source 1..75: mol_type = other DNA
gaatcagttatatgatgctctgtataacaaagcgggtgtaaatggactgtttactgatttccctgataaggcagt

SEQ ID NO: 693251 - DNA, 75 bp, synthetic construct
  source 1..75: mol_type = other DNA
catccttataccgtgcggtcagataaactgcctgaatacactcctgatgtgaatcagttatatgatgctctgtat

SEQ ID NO: 693252 - DNA, 75 bp, synthetic construct
  source 1..75: mol_type = other DNA
aagcaggacacgttgatgtcgaactcttccgggcggccagtgaaggtgtgccacagggcggagtgatctcgccgt

SEQ ID NO: 693253 - DNA, 75 bp, synthetic construct
  source 1..75: mol_type = other DNA
atgattttttatctcaataacaattattatatttgttattgggatttattccttaactatatccagtattcagat

SEQ ID NO: 693254 - DNA, 75 bp, synthetic construct
  source 1..75: mol_type = other DNA
tattaccgtttccccttttgcgggcggcggcgatctgatcacccttatctatcttcttgccctgtttcgtttttt

SEQ ID NO: 693255 - DNA, 75 bp, synthetic construct
  source 1..75: mol_type = other DNA
caaatggttgaagatcgccagtttcgcagcgatctcttttatcgcctgaatgtcttcccactggaattgccgccg

SEQ ID NO: 693256 - DNA, 75 bp, synthetic construct
  source 1..75: mol_type = other DNA
aaaatgcttatattggacttggtgttataccatcttacggtgtcgcaccaactacagaacaattggagctggcgt

SEQ ID NO: 693257 - DNA, 75 bp, synthetic construct
  source 1..75: mol_type = other DNA
cctgccgactgaaaggtatcgatccggaagcgtatctgcgccatatcctaagcgtgctgccggaatggccttcca

SEQ ID NO: 693258 - DNA, 75 bp, synthetic construct
  source 1..75: mol_type = other DNA
aatgtgacagtaaactgaatgccagggaacgcagaagaataaaaagagaaaacgaaagaaaatcatcacctgcaa

SEQ ID NO: 693259 - DNA, 75 bp, synthetic construct
  source 1..75: mol_type = other DNA
ggctaaattgaatactaatttgcattatgagctatcataccaagggatgtgttttcttgaaagtatagagttttc

SEQ ID NO: 693260 - DNA, 75 bp, synthetic construct
  source 1..75: mol_type = other DNA
tggtcaggctggtattacgcctcaaattagttatgacggagctgttgatctggatacttttgttaatgggtcagc

SEQ ID NO: 693261 - DNA, 75 bp, synthetic construct
  source 1..75: mol_type = other DNA
aagaattagagatggaaattaacacaagattcgacgaggggaaacctattttcataaggcacatgagccttatgt

SEQ ID NO: 693262 - DNA, 75 bp, synthetic construct
  source 1..75: mol_type = other DNA
ttatcgtggtatcgcttgtatttattactggaaaattcggtctatcaagagagtttactttccccgcagcagcag

SEQ ID NO: 693263 - DNA, 75 bp, synthetic construct
  source 1..75: mol_type = other DNA
caatagggaaaccatgcgtacagtgtacgagtcgttcggctccgcttgaggcttctcttagagagaatcatatag

SEQ ID NO: 693264 - DNA, 75 bp, synthetic construct
  source 1..75: mol_type = other DNA
actacaatatcgaaaccagcgtcacgggcctggcgattattttgattctggcgatggtagtgctgtttgccattg

SEQ ID NO: 693265 - DNA, 75 bp, synthetic construct
  source 1..75: mol_type = other DNA
gaggagcttttggtgttgaaggggataccaaaataacattagacggagttcctgtcatattccatgatgagacag

SEQ ID NO: 693266 - DNA, 75 bp, synthetic construct
  source 1..75: mol_type = other DNA
aatgcaagatggtatcaagaggattaaaacaattcataatcaaatgttcagatatgatgaggatggagtgttcac

SEQ ID NO: 693267 - DNA, 75 bp, synthetic construct
  source 1..75: mol_type = other DNA
ccattcgtcagctcgcgaatgacttgcgtactcttgcgttaagaaaatatcctcaggcaagtgcatggattcttc

SEQ ID NO: 693268 - DNA, 75 bp, synthetic construct
  source 1..75: mol_type = other DNA
tcagatttaactcctgctaaaataatgcagccagaaacgttggttggtgttattagcctatccaataccagtatt

SEQ ID NO: 693269 - DNA, 75 bp, synthetic construct
  source 1..75: mol_type = other DNA
atgagcagagagattaaagcggtctgtgtcgtggcgaaaccgccgaggcataacccacaatctggcggggtgtta

SEQ ID NO: 693270 - DNA, 75 bp, synthetic construct
  source 1..75: mol_type = other DNA
tgaaatcctccacaaagattggacagcgatggacagaaagctaccgacagccctagagcgaatgaagacgaacct

SEQ ID NO: 693271 - DNA, 75 bp, synthetic construct
  source 1..75: mol_type = other DNA
actaaatcagtaagttggcagcatcaccctattttcgctaagggtactattttttccgcgtttcctgtcttaaat

SEQ ID NO: 693272 - DNA, 75 bp, synthetic construct
  source 1..75: mol_type = other DNA
tgaacaaaagcatgcaaatgacgctcttaatgccctgttgaaggaaaaagagaatatccgtagccagcttgctga

SEQ ID NO: 693273 - DNA, 75 bp, synthetic construct
  source 1..75: mol_type = other DNA
cctcccgctaagtccgatacagacatcgataacgatccgcttgttatccggctgcgcgaggttatgcgcgccgcg

SEQ ID NO: 693274 - DNA, 75 bp, synthetic construct
  source 1..75: mol_type = other DNA
ggtgtggaaatgctggtggtgtgggaagacatagcgaagaggcggcactgcgttactgttattcacgcgcttgag

SEQ ID NO: 693275 - DNA, 75 bp, synthetic construct
  source 1..75: mol_type = other DNA
ccgtaatcgcctcacagcaggcaatcaccgccagcccgatatcagccgcaatggcggcgatgattggcctgatgg

SEQ ID NO: 693276 - DNA, 75 bp, synthetic construct
  source 1..75: mol_type = other DNA
gttttttgtatccgcgatggtcagcagtcaggccgcaacaacgcttattttattgccgctggggttggcgttagg

SEQ ID NO: 693277 - DNA, 75 bp, synthetic construct
  source 1..75: mol_type = other DNA
ccgtcatcgcttcgcaacaggcgattaccgccagcccaatttctgcggcaatggcagcgatgattggcctgatgg

SEQ ID NO: 693278 - DNA, 75 bp, synthetic construct
  source 1..75: mol_type = other DNA
atatctaagaatattgatatagcaattaataatgcttttaaatccagcgtgaaatcatttaaattttattgtggt

SEQ ID NO: 693279 - DNA, 75 bp, synthetic construct
  source 1..75: mol_type = other DNA
aaaatatctcgccgagaaatttggtattgaaatccgcggctgcttgacccagatgggcgacattccgctggaaat

SEQ ID NO: 693280 - DNA, 75 bp, synthetic construct
  source 1..75: mol_type = other DNA
cgccgtttccggctggcagtgacgtaactgatgttgatgacggagattccacggtaacggcgggaagtttctggc

SEQ ID NO: 693281 - DNA, 75 bp, synthetic construct
  source 1..75: mol_type = other DNA
ctctgatttctacagaacgatatatgatgagttcggtaaacaagcatccgaacttgctaaggagctggcttctgt

SEQ ID NO: 693282 - DNA, 75 bp, synthetic construct
  source 1..75: mol_type = other DNA
ttatatatacattcaaccgcagtaaaaaaccctgatgacgaaagtttttttacagtaaaatgttttataggctgt

SEQ ID NO: 693283 - DNA, 75 bp, synthetic construct
  source 1..75: mol_type = other DNA
aaaacacttcaatgtcagccctatagaatttagaaaaaatcatgagtggaatatgaatgggattcaagttactcc

SEQ ID NO: 693284 - DNA, 75 bp, synthetic construct
  source 1..75: mol_type = other DNA
aaatcatatgatgaaatgcttgatgggtttggtcagaaagttgctggagcctgttctgctatgtcatcagttttt

SEQ ID NO: 693285 - DNA, 75 bp, synthetic construct
  source 1..75: mol_type = other DNA
gacctgggtaacgctgccccttctgatttttctggtatcaatgttccggtagataaaaccaagcagactttttcg

SEQ ID NO: 693286 - DNA, 75 bp, synthetic construct
  source 1..75: mol_type = other DNA
aaaatcctcgactgggtaaaaaaaggcgtcccgattggccaggtcaaaccgctgctggagcgccctacgtcgcgc

SEQ ID NO: 693287 - DNA, 75 bp, synthetic construct
  source 1..75: mol_type = other DNA
tttggcttaaaaaccgtaaaagaatttgttaaagcaatactttatattatttttttttgcattggcgatcaaatt

SEQ ID NO: 693288 - DNA, 75 bp, synthetic construct
  source 1..75: mol_type = other DNA
attctttctgggggttcatttcctacagatctcagtgatatttctgttggtctatattctcaacctcgaatcgag

SEQ ID NO: 693289 - DNA, 75 bp, synthetic construct
  source 1..75: mol_type = other DNA
tataataaatgcggttaatcaagttagagatatggggataagagttattcctgtcagttcaccaactcgcccatc

SEQ ID NO: 693290 - DNA, 75 bp, synthetic construct
  source 1..75: mol_type = other DNA
ccagaagatatacatctcactgcaaaagacttcgaagcaagtaaagataatatttctaaggatgaatgggaaaac

SEQ ID NO: 693291 - DNA, 75 bp, synthetic construct
  source 1..75: mol_type = other DNA
tacttaaaacgaaaagagcggaattctctgcactcacacagcttgcaccacatgttaaggaaaaaatttcacctt

SEQ ID NO: 693292 - DNA, 75 bp, synthetic construct
  source 1..75: mol_type = other DNA
ccagtaaggataccgggaatgataatagctgggatattggtggtggttgtgaaggctcacgggaacagtgtgctg

SEQ ID NO: 693293 - DNA, 75 bp, synthetic construct
  source 1..75: mol_type = other DNA
accattgcttctggtattgcggggggacttgccggcaacagtacggcgtctgccggtacggggccctggcgagta

SEQ ID NO: 693294 - DNA, 75 bp, synthetic construct
  source 1..75: mol_type = other DNA
cctgaataaaagaatgggtgaattacgtaatcttaactatgatacaggagtctgggccaggattgtaaatggtaa

SEQ ID NO: 693295 - DNA, 75 bp, synthetic construct
  source 1..75: mol_type = other DNA
actgatgttaaaaaatatttgggtaaaacagaagataacgaagttgaaataaaaacgggtaatgaaagaatcacc

SEQ ID NO: 693296 - DNA, 75 bp, synthetic construct
  source 1..75: mol_type = other DNA
ataggtatacccttggttgtaagatcgcgaatgcgatctttgaaaaagtatacaatcgaattgtatttaataagg

SEQ ID NO: 693297 - DNA, 75 bp, synthetic construct
  source 1..75: mol_type = other DNA
atgtttataaagcacagggagtacagtgggttatcgttttttttgggtgatttttatatgataaataatgtctct

SEQ ID NO: 693298 - DNA, 75 bp, synthetic construct
  source 1..75: mol_type = other DNA
ttgatggtgaatgaagaagttttcatgtctctgcctgttccagttgccacgatggtacgtgaagatgcaactaat

SEQ ID NO: 693299 - DNA, 75 bp, synthetic construct
  source 1..75: mol_type = other DNA
tttccttcaaatactttattctcttaaaaataaatattgcattaaactattaagcgctcaggatcgggtgatgct

SEQ ID NO: 693300 - DNA, 75 bp, synthetic construct
  source 1..75: mol_type = other DNA
aaaaataaatattctattaagctattaagcgctcaggatcgggcgtttatatacgagtttgcaagaatgatcttc

SEQ ID NO: 693301 - DNA, 75 bp, synthetic construct
  source 1..75: mol_type = other DNA
tatttttcacaccccgagttagatactccaatatctgactcattttcatatttatatgataattttcagatcgtt

SEQ ID NO: 693302 - DNA, 75 bp, synthetic construct
  source 1..75: mol_type = other DNA
caaatcagctcctttccatttctcgtttgaagcagtatttgttgcatgaggtggaatcaaatcaacacatcatga

SEQ ID NO: 693303 - DNA, 75 bp, synthetic construct
  source 1..75: mol_type = other DNA
atgattatttgtatggctgtttactatctctgtactctatctgtgcaagggatatatataatatgagcgccggga

SEQ ID NO: 693304 - DNA, 75 bp, synthetic construct
  source 1..75: mol_type = other DNA
cgccatgaacgcagttctctgccgctcggcaagtttttggtcaccgaaggcgttatcagccaggaaacgttggat

SEQ ID NO: 693305 - DNA, 75 bp, synthetic construct
  source 1..75: mol_type = other DNA
tgagtatgcgtacatgaccatcggtgagcaggcgaaactggcggagcagtgggaaaaactgttaaccgttggcga

SEQ ID NO: 693306 - DNA, 75 bp, synthetic construct
  source 1..75: mol_type = other DNA
tcccgcatattggacacagacctatagccgatattcagcccctagaactacttgaagtactgaggttgatagaag

SEQ ID NO: 693307 - DNA, 75 bp, synthetic construct
  source 1..75: mol_type = other DNA
aattaaagagacagagttaacaacaaacacaatgaagaaaacgaaatcacaattaaaaacactcagaataataat

SEQ ID NO: 693308 - DNA, 75 bp, synthetic construct
  source 1..75: mol_type = other DNA
ggatgtttataataatgttttacctgcatggaaagtaaagatgaatctgttgcagatggatgtgtcaggtttaca

SEQ ID NO: 693309 - DNA, 75 bp, synthetic construct
  source 1..75: mol_type = other DNA
cacgacactatcggtccgtactatgtggttggccctggtattgcgatgcctcatgctgtactgaccccaaaaagt

SEQ ID NO: 693310 - DNA, 75 bp, synthetic construct
  source 1..75: mol_type = other DNA
tgataaacaaataaatccagacaatataacatggggatatagagggggagtccttgatgttaatggaaataattt

SEQ ID NO: 693311 - DNA, 75 bp, synthetic construct
  source 1..75: mol_type = other DNA
acggacttacgcttcaaacagggcagtcggcggttctcaatgctctttcctgttgtgcgctccgtttcgtggagc

SEQ ID NO: 693312 - DNA, 75 bp, synthetic construct
  source 1..75: mol_type = other DNA
actggtccggtatttatgccagcgataacgccattctcgcccacgaacgtctgtcaattgttgacgttaacgcgg

SEQ ID NO: 693313 - DNA, 75 bp, synthetic construct
  source 1..75: mol_type = other DNA
ccctgtttataggccgaaatggttcacagggtggcgacagcctgaacctgatgacgttgttcgttgatattctgg

SEQ ID NO: 693314 - DNA, 75 bp, synthetic construct
  source 1..75: mol_type = other DNA
gacttaggagctttgctgaagaaggtagcaccgccggtattcagcccagtatggcgaaaagacttcgcatgattt

SEQ ID NO: 693315 - DNA, 75 bp, synthetic construct
  source 1..75: mol_type = other DNA
catttatgtaaaatatttggaatcaggcaaataataattgattttgaacctcattcattatttcataggcttcct

SEQ ID NO: 693316 - DNA, 75 bp, synthetic construct
  source 1..75: mol_type = other DNA
aacagcgatcaggaagaacgcacaacaacaaccagaacaacaacagtccaggcaaacgacataaccagtgttctt

SEQ ID NO: 693317 - DNA, 75 bp, synthetic construct
  source 1..75: mol_type = other DNA
ctgggcgatgttgccgacagtttccgcccacgctacgccgtcgatgtgcaactgcttgatgagaacggcaacgat

SEQ ID NO: 693318 - DNA, 75 bp, synthetic construct
  source 1..75: mol_type = other DNA
acagcggcagcggagcacaactgctcagccaactggggcgagcattcagtatcagcgattacgtctggcacccta

SEQ ID NO: 693319 - DNA, 75 bp, synthetic construct
  source 1..75: mol_type = other DNA
cgtggtgtgaaaactgggcgcaagaagtcgatgcccggttgacgaaagaagcgcagagcgcgctgcgtccggtga

SEQ ID NO: 693320 - DNA, 75 bp, synthetic construct
  source 1..75: mol_type = other DNA
cgagtggatgccaaaactgaaggccgagtttgaggatcagaatatcctcgtcgcccgccatcagaccacgcttga

SEQ ID NO: 693321 - DNA, 75 bp, synthetic construct
  source 1..75: mol_type = other DNA
cgttcgacgccaccggtaacggcggctatctggcagaggccgcactgctggcctttggcccggacatcatcgact

SEQ ID NO: 693322 - DNA, 75 bp, synthetic construct
  source 1..75: mol_type = other DNA
attatttccacgcataacggcgtcgataatctgtttaatcagtacattcaggaagcccgcgaggggcgcaaggat

SEQ ID NO: 693323 - DNA, 75 bp, synthetic construct
  source 1..75: mol_type = other DNA
tatgccggtgtttctggattatcaggcccgctggtttgaggatgaaagtcaggtctgcattgcggaaaaaccccg

SEQ ID NO: 693324 - DNA, 75 bp, synthetic construct
  source 1..75: mol_type = other DNA
atgccatcgctgacgggctgtaccggcgtatctgttatgttacgaatcagccgtggtcaccggaagcggagaaag

SEQ ID NO: 693325 - DNA, 75 bp, synthetic construct
  source 1..75: mol_type = other DNA
aatccgggggcgcttatctgtcacgcgtgctgattgaagccgccatgacgccagcgcgggatatcccgattctgc

SEQ ID NO: 693326 - DNA, 75 bp, synthetic construct
  source 1..75: mol_type = other DNA
atgaagtggttatttttttctgccgtgatttgtccgttatttttcgcccttccggctgaagctaccgccacaaac

SEQ ID NO: 693327 - DNA, 75 bp, synthetic construct
  source 1..75: mol_type = other DNA
caagttttgatgctccggaaacgcttaagggccgtaaaatagaatgggaatacgaaaatctcacccacggcaaca

SEQ ID NO: 693328 - DNA, 75 bp, synthetic construct
  source 1..75: mol_type = other DNA
cggagacctgagaaaggcagtagatcgcacttatgctgaaatgggtatagatggtgtaagcgatgaaatatggcg

SEQ ID NO: 693329 - DNA, 75 bp, synthetic construct
  source 1..75: mol_type = other DNA
ctgcgaggaagtgatcaccgacgaagacaaggacattctgacgttcgtcgtgtacttcgccagcggttttaaggt

SEQ ID NO: 693330 - DNA, 75 bp, synthetic construct
  source 1..75: mol_type = other DNA
ggtgatgaatcagtaacgaccactgttaatttactttgtagcaaggttttcctattaaaagagaaccaacattta

SEQ ID NO: 693331 - DNA, 75 bp, synthetic construct
  source 1..75: mol_type = other DNA
agtttgcatttaagtcgattcagaccgctgttggaggaaaaggacgattgagaactgattttgatgttcttgccg

SEQ ID NO: 693332 - DNA, 75 bp, synthetic construct
  source 1..75: mol_type = other DNA
caatgtgttttatgtggggtcaaagcaggagatggcgctggaatatatttctgcctgtgcactgttctcccgtgc

SEQ ID NO: 693333 - DNA, 75 bp, synthetic construct
  source 1..75: mol_type = other DNA
tgagcaggattgttattgcgttaactgccgccagcggcatgatggtaaataccgctaacgcaacagatgaagcga

SEQ ID NO: 693334 - DNA, 75 bp, synthetic construct
  source 1..75: mol_type = other DNA
caaagttccctgaaaaacttaagttgttcgcaataaattacaagcggatggtggtggggggacgccttgataaag

SEQ ID NO: 693335 - DNA, 75 bp, synthetic construct
  source 1..75: mol_type = other DNA
tttcagaaccgctatctgcagcgcgatcttcccacgctacgctcccagttgattgtcggtgaagcatatactact

SEQ ID NO: 693336 - DNA, 75 bp, synthetic construct
  source 1..75: mol_type = other DNA
atcagcgacccgaacacgccagcagcgtcaaaatggctggcacgccatctgtacagcttgactggtacggcacct

SEQ ID NO: 693337 - DNA, 75 bp, synthetic construct
  source 1..75: mol_type = other DNA
ttgtcgggatatttaccggcgtccttggcgttggcggcctgtttggcatcaaccgcctggcggccaccaccggcg

SEQ ID NO: 693338 - DNA, 75 bp, synthetic construct
  source 1..75: mol_type = other DNA
accgaaaaggccaaaggtgaggcgaaggggttaggcgcggagtttaatgccgtggccgaggccattctgaccatc

SEQ ID NO: 693339 - DNA, 75 bp, synthetic construct
  source 1..75: mol_type = other DNA
tcgcccgccatcagaccacgcttgatgatttgcgccatgtgaaggtggtgaacggtatcccgcaaattgacaagg

SEQ ID NO: 693340 - DNA, 75 bp, synthetic construct
  source 1..75: mol_type = other DNA
ccgtcgtatctgttacgtcaccgatcaggaatggtcaccggaaagcgagcagaaatggcgtgatgatctctacaa

SEQ ID NO: 693341 - DNA, 75 bp, synthetic construct
  source 1..75: mol_type = other DNA
ctttaaccagctggcagatgctgatgtgtatgagcagaccttctgggatcgggataaaaaagaagaaattctgac

SEQ ID NO: 693342 - DNA, 75 bp, synthetic construct
  source 1..75: mol_type = other DNA
cactgggcatcaatacgaaggtcagaaagaactgctgggtatgtggctggccgaaaatgaaggggcgaagttctg

SEQ ID NO: 693343 - DNA, 75 bp, synthetic construct
  source 1..75: mol_type = other DNA
atggataaccagatcctctcgttgtatgccaaagggatgaccacccgtgagatagccgctgcgttcaaagaactg

SEQ ID NO: 693344 - DNA, 75 bp, synthetic construct
  source 1..75: mol_type = other DNA
ttcatgcggacccgctggcgttcgaagaaaagcatggttcccaggttgatttaatttttcgttttcttgatcacg

SEQ ID NO: 693345 - DNA, 75 bp, synthetic construct
  source 1..75: mol_type = other DNA
aaccttagctgaaaggacacctaatgaagaaaaaatagttgtaggatatgcggatcataacggacaactatataa

SEQ ID NO: 693346 - DNA, 75 bp, synthetic construct
  source 1..75: mol_type = other DNA
tttaagaccaccgccgtattaagcggttactcttcaggtactacctggctggtgttctcggcgttggtaatgact

SEQ ID NO: 693347 - DNA, 75 bp, synthetic construct
  source 1..75: mol_type = other DNA
aaagacctggctgaactctcctacaaatcggcgaaagccgcgctggacgctgagaagtttgggcaggtagccccg

SEQ ID NO: 693348 - DNA, 75 bp, synthetic construct
  source 1..75: mol_type = other DNA
ggcagagcagtggcagtatgatgaccacggctggctgacagacatcagccacctgagcgaaggccaccgtgtcgc

SEQ ID NO: 693349 - DNA, 75 bp, synthetic construct
  source 1..75: mol_type = other DNA
tcatcagcatcgctatatcttcatcagcagcccggcatttttgaagcgcctggatacccagctttctccgccgcc

SEQ ID NO: 693350 - DNA, 75 bp, synthetic construct
  source 1..75: mol_type = other DNA
ggagccagttgctattccgcgttactggcgcgttattgatgaaatgccagtaaacagtatgaacaagcgtgtcta

SEQ ID NO: 693351 - DNA, 75 bp, synthetic construct
  source 1..75: mol_type = other DNA
atgaagcagaccttaccgcttgcacgctggctgactgcgccacgccctgatgacacgcccattgcgtggctggac

SEQ ID NO: 693352 - DNA, 75 bp, synthetic construct
  source 1..75: mol_type = other DNA
cggaaacaagaggtaaaacaaatgtagtataccactcttttaatgatcaaatatttagatataaaggtaataaaa

SEQ ID NO: 693353 - DNA, 75 bp, synthetic construct
  source 1..75: mol_type = other DNA
tgcttttttccaccttgctcacctggcgtgaagtggtagtgctggaagatgcctatatctatctccagccagcgt

SEQ ID NO: 693354 - DNA, 75 bp, synthetic construct
  source 1..75: mol_type = other DNA
tcttttcagtatcaatgctcatggcaaacccgcaggaaagatcaaactttctcgcaaccaactgcttaactggtc

SEQ ID NO: 693355 - DNA, 75 bp, synthetic construct
  source 1..75: mol_type = other DNA
ctatcctgataatagcattctctacggtaaggctaaatcaaccggttccacctggctggatatctttacgtttgc

SEQ ID NO: 693356 - DNA, 75 bp, synthetic construct
  source 1..75: mol_type = other DNA
gcttgtctatcaagtggagggcgatacgctctcggtacttcgtgttttgcataccgccctgcaatggccaccagc

SEQ ID NO: 693357 - DNA, 75 bp, synthetic construct
  source 1..75: mol_type = other DNA
ttatctaaagaacaaaatagaaatagctgattatcttaatgcaaccgatgtgttaataatgccatcgataaaaat

SEQ ID NO: 693358 - DNA, 75 bp, synthetic construct
  source 1..75: mol_type = other DNA
gtctcttttcaccgctgatggcggaagataacggcctgttactcgacgatatcttacagtttagcgaagatggtc

SEQ ID NO: 693359 - DNA, 75 bp, synthetic construct
  source 1..75: mol_type = other DNA
ttctatgggtagcgatattagctttcattaaagtactcttttctagttctgatagtttcgaatgggggagcgtat

SEQ ID NO: 693360 - DNA, 75 bp, synthetic construct
  source 1..75: mol_type = other DNA
gcgggggttgactatggatttaaggtggcaggtaatgcaggagtattgacttttaatacatctggattaactgat

SEQ ID NO: 693361 - DNA, 75 bp, synthetic construct
  source 1..75: mol_type = other DNA
caatcggcaatcatgaatattaagcgtaatgacggtaaaaatattccattcgcggcggatatctttgatgaacaa

SEQ ID NO: 693362 - DNA, 75 bp, synthetic construct
  source 1..75: mol_type = other DNA
gtggctgtggtatttggtggctttactctggcgatggcaatcggcgtaccgctgagtacatggttggggggggtg

SEQ ID NO: 693363 - DNA, 75 bp, synthetic construct
  source 1..75: mol_type = other DNA
ggcttaaaaatgtcagaattcgaacatgtaagacaaaaatcatatagctccttcaaaagcatcattcctctaact

SEQ ID NO: 693364 - DNA, 75 bp, synthetic construct
  source 1..75: mol_type = other DNA
ctggctacccctcccaggtatgcagttccaggccgaaggcgatgcctttcgcctcttttcaccgctgatagcgga

SEQ ID NO: 693365 - DNA, 75 bp, synthetic construct
  source 1..75: mol_type = other DNA
acggaaactggcgtcatcgcctggcgctaccgcgaacaagagcaacgccgctggctacccctcccaggtatgcag

SEQ ID NO: 693366 - DNA, 75 bp, synthetic construct
  source 1..75: mol_type = other DNA
tgcatttagaatgaaggtcaatactaataatggtggaccgaatctacctgcaggtgagtatacatcaatcatcaa

SEQ ID NO: 693367 - DNA, 75 bp, synthetic construct
  source 1..75: mol_type = other DNA
taatgctgctactggtcctagtgtaaataatcagaggcttgatgtatcagtaacaagcacacctgtgctcaatgt

SEQ ID NO: 693368 - DNA, 75 bp, synthetic construct
  source 1..75: mol_type = other DNA
ctccggagccagtcattaccaccgctcctccacctccgcgcggtgcggagaaactggtgcgcatggtcgagcaga

SEQ ID NO: 693369 - DNA, 75 bp, synthetic construct
  source 1..75: mol_type = other DNA
cgtcatcggcgggtttttctaacaagtttactgacgctagcgcagcaaccagaacggctgtggaagtatggacta

SEQ ID NO: 693370 - DNA, 75 bp, synthetic construct
  source 1..75: mol_type = other DNA
atcgcaaaatggtggaactggagaggagaccgtccggtgactggtttgccgatctgagtcgccttggtgtggata

SEQ ID NO: 693371 - DNA, 75 bp, synthetic construct
  source 1..75: mol_type = other DNA
cctctctcttaacgcgctttaaaatcctccgcgccacgcttttgccatgctgtctccacacaacaaggagacatt

SEQ ID NO: 693372 - DNA, 75 bp, synthetic construct
  source 1..75: mol_type = other DNA
aacttactacgagccaattatcaaatatgcttttgaaaacgcaggtaatctgtatctacgcacccgcttcggaca

SEQ ID NO: 693373 - DNA, 75 bp, synthetic construct
  source 1..75: mol_type = other DNA
tatcggcttcaattgcaacagtccttttaggctcaacaggagcctttgcggcaaacgatcgcggctttacctccg

SEQ ID NO: 693374 - DNA, 75 bp, synthetic construct
  source 1..75: mol_type = other DNA
gatggaagaacggttaatgatgtattaccgggtagtttcctctctcctacgactttcacaatcacttatcagtaa

SEQ ID NO: 693375 - DNA, 75 bp, synthetic construct
  source 1..75: mol_type = other DNA
aatattcaggcgacagtaatgacagcatctacgcttcgtttaattctggtattaacctcggggcatggcatttac

SEQ ID NO: 693376 - DNA, 75 bp, synthetic construct
  source 1..75: mol_type = other DNA
cggtgggaagtggatgtataacttctttatggccacttatttgaccggcgtttatgcctcagcaatgaccgcgca

SEQ ID NO: 693377 - DNA, 75 bp, synthetic construct
  source 1..75: mol_type = other DNA
tttggccggatggaaactatgctattatggggcaaacagctaggataacaataggcggtaaggacaacggggtgt

SEQ ID NO: 693378 - DNA, 75 bp, synthetic construct
  source 1..75: mol_type = other DNA
gcaaaatggtggaactggagaagagaccttccggtgactggtttgccgatctgagtcgccttggtgtggatattg

SEQ ID NO: 693379 - DNA, 75 bp, synthetic construct
  source 1..75: mol_type = other DNA
ctgccgctggcccttatcagcaaggaaggggcaacagaatggtgcgcagaatacgatgaatggggcaacctgctg

SEQ ID NO: 693380 - DNA, 75 bp, synthetic construct
  source 1..75: mol_type = other DNA
aaaacaaaaatgtagatagtataattctttcccttctaattgtaacttctgcaaatatggttaatctggaaactg

SEQ ID NO: 693381 - DNA, 75 bp, synthetic construct
  source 1..75: mol_type = other DNA
tccacatggggaggtttttccgcttcagcttctgccagtaccgataacagacaacaattctctgcctctaccgat

SEQ ID NO: 693382 - DNA, 75 bp, synthetic construct
  source 1..75: mol_type = other DNA
gccattctatttcaggaaggagtgtccgttaaactcaggctacctcaaagctttcgtgcagcgggcgatgagtta

SEQ ID NO: 693383 - DNA, 75 bp, synthetic construct
  source 1..75: mol_type = other DNA
aacgtcaacggcgaagacatgacagaaattgaggagaacatgctcctgccagtttccggtcaggaactgcccatt

SEQ ID NO: 693384 - DNA, 75 bp, synthetic construct
  source 1..75: mol_type = other DNA
ttgcccgttgttgatgacctcccgccagaaggcgtgtttgatacggaattctgcaaccgttacgaaaaaggcggg

SEQ ID NO: 693385 - DNA, 75 bp, synthetic construct
  source 1..75: mol_type = other DNA
cagcacggctgaacaggatcgcagcattattgagcgtgtagccgaactggccgaacgccatctggtgtcaatgac

SEQ ID NO: 693386 - DNA, 75 bp, synthetic construct
  source 1..75: mol_type = other DNA
gggagaatctcgagttaatttaggattgaaaactatttctttacatgggccgctaagacgatattacttatttag

SEQ ID NO: 693387 - DNA, 75 bp, synthetic construct
  source 1..75: mol_type = other DNA
actaaaaatagaaaaactttaattttatacactataaaagcaattaaggacggaataaataatgaaatggggaaa

SEQ ID NO: 693388 - DNA, 75 bp, synthetic construct
  source 1..75: mol_type = other DNA
atggtgtcgccgcaaaactcccgccgcctgttgtatgaaatggtggaccgcgagatcgccaacgcgcagcaaggg

SEQ ID NO: 693389 - DNA, 75 bp, synthetic construct
  source 1..75: mol_type = other DNA
acgtgacagcgtgttgatctccatttttaaccgcatcccaatggaggataaaatgccaacaaaactatgcccagt

SEQ ID NO: 693390 - DNA, 75 bp, synthetic construct
  source 1..75: mol_type = other DNA
ccagatgactctcaatacttaaacatcagtgatagttttatcatagaactgcataaatgttgggttgaaatcaat

SEQ ID NO: 693391 - DNA, 75 bp, synthetic construct
  source 1..75: mol_type = other DNA
gaactctctccgtcaagtacctctacctccgtgctttctggaggtactgtatgaatatacgcaacaatcatctac

SEQ ID NO: 693392 - DNA, 75 bp, synthetic construct
  source 1..75: mol_type = other DNA
cgcaacgcaacgcaacgcaacgcaacgcaacgcaacgcaacgcaacgcaacgcaacgcaacgcaacgcaacgcaa

SEQ ID NO: 693393 - DNA, 75 bp, synthetic construct
  source 1..75: mol_type = other DNA
tcaacagtcactccgtctgccggggcagcagtatgatgaggagtcggggctgtactacaaccgcaaccggtacta

SEQ ID NO: 693394 - DNA, 75 bp, synthetic construct
  source 1..75: mol_type = other DNA
gaactgaccgcaccgaacttcaaagacctctcggttaacaccgatgatgattcggtagttgcactgttgtcacga

SEQ ID NO: 693395 - DNA, 75 bp, synthetic construct
  source 1..75: mol_type = other DNA
gacaactcagaatactgcctcaattcgattatctgctgacgcaggactcccgcttttacctgaatggattctttt

SEQ ID NO: 693396 - DNA, 75 bp, synthetic construct
  source 1..75: mol_type = other DNA
cctggggacttataatgcgggttttgcaatggataaccaaaaaagagacagcaatatgccccaaaatatatattg

SEQ ID NO: 693397 - DNA, 75 bp, synthetic construct
  source 1..75: mol_type = other DNA
agaatgggaaaagatatttagaggtttacacactaaaattcgaccacttcttgttcaacagacagaaaaaggtga

SEQ ID NO: 693398 - DNA, 75 bp, synthetic construct
  source 1..75: mol_type = other DNA
tcatctctttgcctcaaagaacaattgccccatccctcagtttcttttaattgatcagcctacccaagtttattt

SEQ ID NO: 693399 - DNA, 75 bp, synthetic construct
  source 1..75: mol_type = other DNA
aaagaagtggagcttgctgcggcaatcgcgacaaacgaagttattgagcaattaggcacacgcaataatgctgcg

SEQ ID NO: 693400 - DNA, 75 bp, synthetic construct
  source 1..75: mol_type = other DNA
gaaatctgcaacgttttcagcagtattacctggcgaatgcgcaggttctgcagacggcaaacgcgatttttgatg

SEQ ID NO: 693401 - DNA, 75 bp, synthetic construct
  source 1..75: mol_type = other DNA
tgcaaattaccgaccagcaggcgcgccagtggcaggattttaacgtccagctcgactacagcagccagagcatca

SEQ ID NO: 693402 - DNA, 75 bp, synthetic construct
  source 1..75: mol_type = other DNA
tccaccgccataaactaccagaaagtgctgggcaatccggcggggacgctgggcgctatccgcgattcgcagatg

SEQ ID NO: 693403 - DNA, 75 bp, synthetic construct
  source 1..75: mol_type = other DNA
gctaaccgaggcccgaatttgtcaactgaataaacagatcgcgcagaaaattcgtgattttgtctatccgaatta

SEQ ID NO: 693404 - DNA, 75 bp, synthetic construct
  source 1..75: mol_type = other DNA
catgctcataaacttttggttttcggcattaacggcgggctatttttccgtggtcagtcgcttctgtctgtcacc

SEQ ID NO: 693405 - DNA, 75 bp, synthetic construct
  source 1..75: mol_type = other DNA
agattctaaaacaggtgaaagcgtccgttttttgtttatgcacagggggaaacgggtacacagtagttatattaa

SEQ ID NO: 693406 - DNA, 75 bp, synthetic construct
  source 1..75: mol_type = other DNA
ggctcgatttgaattgcaagaaaactattatcctgaaatttgtattggatttgcacttacgcaatcagtactcct

SEQ ID NO: 693407 - DNA, 75 bp, synthetic construct
  source 1..75: mol_type = other DNA
tcaatgaggtacggagaatgagaagagcactctttagctgtttctgcgggttactgtggatttccagtggatggg

SEQ ID NO: 693408 - DNA, 75 bp, synthetic construct
  source 1..75: mol_type = other DNA
aaacaccggacaaacagcagtttattctgccggtgagcatcttgaactctgctgtggtaaggcaaggctggtgct

SEQ ID NO: 693409 - DNA, 75 bp, synthetic construct
  source 1..75: mol_type = other DNA
ataccttttggatacttgattgtagaaaacccattatggctagaaaatatatacattgccgctccggtaatgact

SEQ ID NO: 693410 - DNA, 75 bp, synthetic construct
  source 1..75: mol_type = other DNA
agatgacaaacatgatctcatatcagggacttgttcgcaccttcccttacgatccgttggttacacctgtttata

SEQ ID NO: 693411 - DNA, 75 bp, synthetic construct
  source 1..75: mol_type = other DNA
tatcctgggctactgtttgtgcaaatagtactggcgtagcagaagatgaacactatgatctctcaaatatcttta

SEQ ID NO: 693412 - DNA, 75 bp, synthetic construct
  source 1..75: mol_type = other DNA
agccaatgtctccaggaaacccggggcggttcacacttcgcgcctggcctatcagtattaccggtcaaaaaccga

SEQ ID NO: 693413 - DNA, 75 bp, synthetic construct
  source 1..75: mol_type = other DNA
gctctaactttcctaatttgaaccgccttcatgtccgtattgggaaaaaagaatctgaatatatggaaatacaga

SEQ ID NO: 693414 - DNA, 75 bp, synthetic construct
  source 1..75: mol_type = other DNA
gctgaacagaaagacagtaaggccagttccggctggagcttcttcggttcccgtaccagtgaaagcaacaagact

SEQ ID NO: 693415 - DNA, 75 bp, synthetic construct
  source 1..75: mol_type = other DNA
ggatcaaaacctggtgctgaaacacttgcctcattaccgctgattgcttatgacgaagagttgccgctgattaga

SEQ ID NO: 693416 - DNA, 75 bp, synthetic construct
  source 1..75: mol_type = other DNA
aaaaccacgtaccgctacaacgccgccggagaactgacggagattatcctgccgggggatgagacgctgatgttc

SEQ ID NO: 693417 - DNA, 75 bp, synthetic construct
  source 1..75: mol_type = other DNA
taatgtgaatggttcaatgatgtccggtgtaatatcagcccgtcttcttaaggatagagagactaaagaacaaca

SEQ ID NO: 693418 - DNA, 75 bp, synthetic construct
  source 1..75: mol_type = other DNA
taaatatgaggtcaacaacggatatctgaacataagtatatccaagctgaattatgcgcatcagatagtaagaca

SEQ ID NO: 693419 - DNA, 75 bp, synthetic construct
  source 1..75: mol_type = other DNA
tacgcaggatctctgcagcatccctctcgtcacctgtgaaaggcactgccagcgtggcagccatatcccacgcaa

SEQ ID NO: 693420 - DNA, 75 bp, synthetic construct
  source 1..75: mol_type = other DNA
agtaagccgttatgatctaactgaacatgaaaccaagctaattctgttttgcgttgcaaagttgaaccctacaat

SEQ ID NO: 693421 - DNA, 75 bp, synthetic construct
  source 1..75: mol_type = other DNA
acgactcatttacatggctgacccaaaaacaacgagccacgctagagaaaattttagctaaatacggacggttct

SEQ ID NO: 693422 - DNA, 75 bp, synthetic construct
  source 1..75: mol_type = other DNA
ggatggattgcacttcattggttactcggggtctgttgtgtggcttggtatggaataaggttaaggcattatttc

SEQ ID NO: 693423 - DNA, 75 bp, synthetic construct
  source 1..75: mol_type = other DNA
ggcttatggcaagtgagtggtcgaagtgatgttgattatgaaacacgagtttatcttgatgcatggtatgtgaaa

SEQ ID NO: 693424 - DNA, 75 bp, synthetic construct
  source 1..75: mol_type = other DNA
gacgctagcaaatttcatcattttatttgatggatttaaggattttaaagatacaatgaaaacaatgaaacttct

SEQ ID NO: 693425 - DNA, 75 bp, synthetic construct
  source 1..75: mol_type = other DNA
ttatggtctgggcgacatgctggaaaaagccaatctgtacgcgcagctctatattcgtcctaacgaacagaacct

SEQ ID NO: 693426 - DNA, 75 bp, synthetic construct
  source 1..75: mol_type = other DNA
cagccagttaacgtcagccaccgggcctgacgggctggaattgcgccgggaatatgatgaatccggccgtctgat

SEQ ID NO: 693427 - DNA, 75 bp, synthetic construct
  source 1..75: mol_type = other DNA
cttaaagcgatttctcttgccccgccactactggagagaacggcggtttttttttgggggggaaaaaaatgggcg

SEQ ID NO: 693428 - DNA, 75 bp, synthetic construct
  source 1..75: mol_type = other DNA
acaattaaacaggcaagactacttttagtagagacctccagctatgtcgattttagtgccgcccgcgcattttat

SEQ ID NO: 693429 - DNA, 75 bp, synthetic construct
  source 1..75: mol_type = other DNA
gcgcgaaactccacgtgatatttcgttctgcgggcacgccattctgcaggaagggccttttatcattcacgatgc

SEQ ID NO: 693430 - DNA, 75 bp, synthetic construct
  source 1..75: mol_type = other DNA
gcgcgaaaccccgcgtaacatctcgttctgcgggcatgccattctgcaggaggggcccttcattgttcacgacgc

SEQ ID NO: 693431 - DNA, 75 bp, synthetic construct
  source 1..75: mol_type = other DNA
tgatgtctgaatgtatatatcaagaaggcaacgcctttgtcattatgggagctggagaacaattaaaacgtatta

SEQ ID NO: 693432 - DNA, 75 bp, synthetic construct
  source 1..75: mol_type = other DNA
ggatggatagcgttacactggttacttggaggatgttgtatagcatggttcggcataagattgcgtcattatttc

SEQ ID NO: 693433 - DNA, 75 bp, synthetic construct
  source 1..75: mol_type = other DNA
tatttagtcatgaagtaatgatttttcgtgttcagcacaatcttgcaaaatggtcatcaagaataatcaaaaggc

SEQ ID NO: 693434 - DNA, 75 bp, synthetic construct
  source 1..75: mol_type = other DNA
ggaagtgcttgaaaacttattggccaccgatgattcagcccgtcatgaatgggaaatgacgttcaaattaaagaa

SEQ ID NO: 693435 - DNA, 75 bp, synthetic construct
  source 1..75: mol_type = other DNA
gtgccgaataacctgatctcggcaattgtcgatgctaaccgcacgcgtaaagattttattgccgatgccattttg

SEQ ID NO: 693436 - DNA, 75 bp, synthetic construct
  source 1..75: mol_type = other DNA
gtgctggcccggggccagcgctttaatggtgacgctgaagtgatgacttatagcgcctcagtgagtcacgcgatt

SEQ ID NO: 693437 - DNA, 75 bp, synthetic construct
  source 1..75: mol_type = other DNA
gataatatattaaaacaaagattaatatgtgctaatttttctaaattagggcgaacacctacaattgatgtaaaa

SEQ ID NO: 693438 - DNA, 75 bp, synthetic construct
  source 1..75: mol_type = other DNA
gttgatgtagatgacaataataatggtttcaaaaatactattgatagtgtccaggtaataagtgttgataaaacc

SEQ ID NO: 693439 - DNA, 75 bp, synthetic construct
  source 1..75: mol_type = other DNA
taatgattttccgtgtgcaacaaaatcttgccaaattatcctctcgtattttaaaacggtcatttgatattattg

SEQ ID NO: 693440 - DNA, 75 bp, synthetic construct
  source 1..75: mol_type = other DNA
atttgttaaataagttaggttattggcaacgtgacacttggatcattggtagtggaaataatgcaatagaggcat

SEQ ID NO: 693441 - DNA, 75 bp, synthetic construct
  source 1..75: mol_type = other DNA
aattggtctatgtggaatgatattgccattctgtttaaaactattggtgttgtcttaaaaaaagatggcgcgtat

SEQ ID NO: 693442 - DNA, 75 bp, synthetic construct
  source 1..75: mol_type = other DNA
atttacaataaagtgaaaaaagatggtgggccagctatatatagtcatgaacgaattggtaaaggaggtaaaatc

SEQ ID NO: 693443 - DNA, 75 bp, synthetic construct
  source 1..75: mol_type = other DNA
gtcatgaagtgatgatttttagggtgcaacaaaacctagctaaatggtcatcacgtgctcttaagcgcgcatttg

SEQ ID NO: 693444 - DNA, 75 bp, synthetic construct
  source 1..75: mol_type = other DNA
agcagattcgccagttagaggagagtctgggtgtgccgctgtttgaccgtagcgggcgaacaatacgtctcaccg

SEQ ID NO: 693445 - DNA, 75 bp, synthetic construct
  source 1..75: mol_type = other DNA
attgcggagttcttcggcaaacgccacgaacgtgtgctggataaaattcgcaatttagactgctcatcaaatttt

SEQ ID NO: 693446 - DNA, 75 bp, synthetic construct
  source 1..75: mol_type = other DNA
tttatgggtaaaaataggtttatggagacctggaagcaacataacttcccaaagaactggattcctatttacatc

SEQ ID NO: 693447 - DNA, 75 bp, synthetic construct
  source 1..75: mol_type = other DNA
attgaacaagaacattgaagaggtagtatctgatacacaaggatacaccaatgatttcaattattcatttttcta

SEQ ID NO: 693448 - DNA, 75 bp, synthetic construct
  source 1..75: mol_type = other DNA
ctctccccttcattcagcttgtctatttcatttcctcggaaaagaaactaactattcacattttgcagatgttgc

SEQ ID NO: 693449 - DNA, 75 bp, synthetic construct
  source 1..75: mol_type = other DNA
atgagcaaagaatctgtaatggcggcattgagaaaggcgcgtgaaggcaatatctttggcggtactggtcaggcc

SEQ ID NO: 693450 - DNA, 75 bp, synthetic construct
  source 1..75: mol_type = other DNA
ccctacccgggggtgcaggatcgctattatcaactcggcgtaacttacaatggcgttgattatgacgccaactag

SEQ ID NO: 693451 - DNA, 75 bp, synthetic construct
  source 1..75: mol_type = other DNA
cggctggtctttgccgtctgctgtgcgctggccgccccgctgctgcgcctgacaggaacgggcggcggaggcttt

SEQ ID NO: 693452 - DNA, 75 bp, synthetic construct
  source 1..75: mol_type = other DNA
gcttgctggaaaccgcgaaacgcaacggtctggagtcgcatgcctggctgacagatgttctgatgcgtctgccgg

SEQ ID NO: 693453 - DNA, 75 bp, synthetic construct
  source 1..75: mol_type = other DNA
acagatgttctgatgcgtctgccggagtggccggaggagcgactggcagagttgctgcctcttgagggatttacc

SEQ ID NO: 693454 - DNA, 75 bp, synthetic construct
  source 1..75: mol_type = other DNA
tagatttactaaataaagcttatgagttagaaccattagttataaaacatcagatggatgcaacagcatggtcta

SEQ ID NO: 693455 - DNA, 75 bp, synthetic construct
  source 1..75: mol_type = other DNA
ttgacttgctaagtaaagcttatgagttattaccgttagttataaaacatcagacagatgaaagtaagtggtcta

SEQ ID NO: 693456 - DNA, 75 bp, synthetic construct
  source 1..75: mol_type = other DNA
ccggcagcgacgggaaataccagtcgcaggttcgcctgccggagatcggcaaagccagagtctaccgcctcacct

SEQ ID NO: 693457 - DNA, 75 bp, synthetic construct
  source 1..75: mol_type = other DNA
actattcacattttgcagatgttgcacttgttatcacatgtattctataatctcaaaaattttttaatgatggct

SEQ ID NO: 693458 - DNA, 75 bp, synthetic construct
  source 1..75: mol_type = other DNA
cgcagggcgggctgacgcgcagtatggagtacgatgctgccggacgtgtcatcagtctgactaacgagaacggca

SEQ ID NO: 693459 - DNA, 75 bp, synthetic construct
  source 1..75: mol_type = other DNA
cgtggtgcgcagaatatgatgaatggggcaacctgctgaatgaagagaacccgcatcagctgcagcagcttatcc

SEQ ID NO: 693460 - DNA, 75 bp, synthetic construct
  source 1..75: mol_type = other DNA
ccgttgagcagaaacaggaagagacgctgacgcggatcgccgtggcggcaaccagcatgctggaacagcccgtca

SEQ ID NO: 693461 - DNA, 75 bp, synthetic construct
  source 1..75: mol_type = other DNA
atgctctctcgacatatcaattactttcttgccgtggctgaacatggcagcttcacccgtgccgccagtgcgttg

SEQ ID NO: 693462 - DNA, 75 bp, synthetic construct
  source 1..75: mol_type = other DNA
cttaaagcgatttctcttgccccgccactactggagagaacggcggtttttttgcggcgggaaaaaaactggcag

SEQ ID NO: 693463 - DNA, 75 bp, synthetic construct
  source 1..75: mol_type = other DNA
gtaatatattcaatataaatgtaaggccatattatttcagcattgtctgtacaaaaggttgttcaattctgataa

SEQ ID NO: 693464 - DNA, 75 bp, synthetic construct
  source 1..75: mol_type = other DNA
aaaactattgccatttgaagaatggattaggccttggctggctgccggtgatgacgtgacatcatatgttgcaat

SEQ ID NO: 693465 - DNA, 75 bp, synthetic construct
  source 1..75: mol_type = other DNA
acctgaggtttacgattttttgggaaaacttgagggatttctaggaaaaaaaattgaatatctcaaccctgaccg

SEQ ID NO: 693466 - DNA, 75 bp, synthetic construct
  source 1..75: mol_type = other DNA
gttctccatttacatggtcacaaggagaatctctttctgaactagaaaaaccagagagaataattcaaatcttta

SEQ ID NO: 693467 - DNA, 75 bp, synthetic construct
  source 1..75: mol_type = other DNA
tcgactgtggcgcgaccaatgtcagggccatcgcggttaatcggcagggaaaaattgttgcccgcgcctcaacgc

SEQ ID NO: 693468 - DNA, 75 bp, synthetic construct
  source 1..75: mol_type = other DNA
actaagtgatgccgattttatcaatgccctgcccgatttacgcgcggcgatggcctggctaccaccacgagaacg

SEQ ID NO: 693469 - DNA, 75 bp, synthetic construct
  source 1..75: mol_type = other DNA
gccgggccccgtggcgcggcgacacgattagggatgaagcgcaccacgctgctgtcacgaatgcagcgtctggga

SEQ ID NO: 693470 - DNA, 75 bp, synthetic construct
  source 1..75: mol_type = other DNA
attcgactggcgaatgtttgacgatcctgaaaaaataatcaccgatattgaatttgaaataaaaccgaccacttg

SEQ ID NO: 693471 - DNA, 75 bp, synthetic construct
  source 1..75: mol_type = other DNA
tcttttggtattgaaacagcagcaggtgttacccgtcgtggcgttaagcaagttaaagggtttggtgatcatctg

SEQ ID NO: 693472 - DNA, 75 bp, synthetic construct
  source 1..75: mol_type = other DNA
tcaggacacaaataatagttcatttagctacggagataaccgattcgagaagtctcaaggtagcaactggacgtt

SEQ ID NO: 693473 - DNA, 75 bp, synthetic construct
  source 1..75: mol_type = other DNA
ataaaagatctgaattaaacaacttgcgtaaaaagtatgaacatgtttcggagtttttgcgagagacaggttatg

SEQ ID NO: 693474 - DNA, 75 bp, synthetic construct
  source 1..75: mol_type = other DNA
gtaattgccctatttgtgataatataattaccattgagaacggtgaaggtggatttatcaaatccaaacctgagt

SEQ ID NO: 693475 - DNA, 75 bp, synthetic construct
  source 1..75: mol_type = other DNA
agaaggttacaaaacccatttgtgatgtcattggatgaaggtagctccgataacacaaaaaaaataaaaagaata

SEQ ID NO: 693476 - DNA, 75 bp, synthetic construct
  source 1..75: mol_type = other DNA
acttattccttaaaacaataatgaataatgctttagtacaaaaagctattgctgcagaagactattggatatttt

SEQ ID NO: 693477 - DNA, 75 bp, synthetic construct
  source 1..75: mol_type = other DNA
ataaaagaaacatttaatgtagaactctttgagacatatagagataaaaacgtaaataataaaaaatcatggaag

SEQ ID NO: 693478 - DNA, 75 bp, synthetic construct
  source 1..75: mol_type = other DNA
ggctcatcggttctatctgttacagcttttggaatgactcaacgatctactggtctaggctttaaacctagcacc

SEQ ID NO: 693479 - DNA, 75 bp, synthetic construct
  source 1..75: mol_type = other DNA
atccggtgtgcttggcggacgcgcagacgccatcatcatgcgcatcatggacattatgctgtcgattccttcgct

SEQ ID NO: 693480 - DNA, 75 bp, synthetic construct
  source 1..75: mol_type = other DNA
tcatgccttgagtggcaacatcctactatcggtctatttccagtctcctgtgtacttaagaagatacaaactttt

SEQ ID NO: 693481 - DNA, 75 bp, synthetic construct
  source 1..75: mol_type = other DNA
ggtgcattattagccacttcaatacaatatggtcttattggtataattttgatatgtttgaattataatcaggaa

SEQ ID NO: 693482 - DNA, 75 bp, synthetic construct
  source 1..75: mol_type = other DNA
tgtgcgcgattaatagtgaattgaaaagaatagtctcttttttaaatgaaaatcaccttacttataaatatattg

SEQ ID NO: 693483 - DNA, 75 bp, synthetic construct
  source 1..75: mol_type = other DNA
taccgctttaaccatgaagaagaatattacccttctcaccgttttatgcttgttgttgatatgaagacagtaatg

SEQ ID NO: 693484 - DNA, 75 bp, synthetic construct
  source 1..75: mol_type = other DNA
tcaacacggattttgacttacattttttgaaaaatgaaatttgtgaggctctgaatcgacatgttcgagttattg

SEQ ID NO: 693485 - DNA, 75 bp, synthetic construct
  source 1..75: mol_type = other DNA
taccttgaaatgcatggtctcgtttccccccccttcatacgcagtgacaccatggctggcgttgagtttatcttc

SEQ ID NO: 693486 - DNA, 75 bp, synthetic construct
  source 1..75: mol_type = other DNA
gttcacgcatctggtatctcaaatatcgtttcaacggaaaagaatccagagtcagtcttggtgcatacccgctgg

SEQ ID NO: 693487 - DNA, 75 bp, synthetic construct
  source 1..75: mol_type = other DNA
atggcggctcttgtagctgcccgctttaccccagtgataaaaaccttttaccagcgtctgcttaatgctggtaaa

SEQ ID NO: 693488 - DNA, 75 bp, synthetic construct
  source 1..75: mol_type = other DNA
ccggtttataaacttttaggcggcgcagtgaaccgccccgggtttcctggagagtgttttatctgtgaactcagg

SEQ ID NO: 693489 - DNA, 75 bp, synthetic construct
  source 1..75: mol_type = other DNA
cgtaaaaataggcagtaatgtaaaaattggagccatgtcttttattatggaggaggttccggataactgtaccta

SEQ ID NO: 693490 - DNA, 75 bp, synthetic construct
  source 1..75: mol_type = other DNA
acagcagggataactatattgttattggcgataatgtcgatattggtgcccatacatgtattattgggttaaatg

SEQ ID NO: 693491 - DNA, 75 bp, synthetic construct
  source 1..75: mol_type = other DNA
gggcgcgcggattggtaaaggcctcgtgttgcctcaccatgcaggaatcgtcattcatggtaatgttaatatcgg

SEQ ID NO: 693492 - DNA, 75 bp, synthetic construct
  source 1..75: mol_type = other DNA
ttagggagtgttgtaaacaggcaataaaagtaacatttgcagcagagctctttgatacacaaaacagtaataaaa

SEQ ID NO: 693493 - DNA, 75 bp, synthetic construct
  source 1..75: mol_type = other DNA
gcagcaactacccatgactatgaagtgtatagctttgctaaaaaattatttccagatgaaagcgatctggtggtt

SEQ ID NO: 693494 - DNA, 75 bp, synthetic construct
  source 1..75: mol_type = other DNA
cgttaacgcagtttatgaagaaaaaaatctacgaagaacaactggccaactttctggacggagaagaatatgtcc

SEQ ID NO: 693495 - DNA, 75 bp, synthetic construct
  source 1..75: mol_type = other DNA
attggagaaaactatgcacttttatcgtttatagaagaaagtggtaatggatttgatacaatcagacaggataaa

SEQ ID NO: 693496 - DNA, 75 bp, synthetic construct
  source 1..75: mol_type = other DNA
cgggtgtggcggcgggagcgtgacctgacggggtggatgtcgctgtcgcgtaaaccggaggagacatggtacggg

SEQ ID NO: 693497 - DNA, 75 bp, synthetic construct
  source 1..75: mol_type = other DNA
ggccagacaggtggagccggaatacacaccggcgcgaaaagctcatctttatcactgcgaccaccggggactgcc

SEQ ID NO: 693498 - DNA, 75 bp, synthetic construct
  source 1..75: mol_type = other DNA
cgtaggaacccttgataaaaggaaaaatctaaaaaatgtccttgaagcatttcagcaatctaagttgaaaggagt

SEQ ID NO: 693499 - DNA, 75 bp, synthetic construct
  source 1..75: mol_type = other DNA
acagcatggcgagccactggtcgagagccgctacctctacgacccgctgggacggcgaatggcgaaacgggtatg

SEQ ID NO: 693500 - DNA, 75 bp, synthetic construct
  source 1..75: mol_type = other DNA
cgtggccggataaccgcatcgcagaagatgcgcactatgtttaccactatgatgaatacggcagactgacggaga

SEQ ID NO: 693501 - DNA, 75 bp, synthetic construct
  source 1..75: mol_type = other DNA
agcatgagacgaaacacgcatacaacgaacaggggctggcaaaccgcgtcacgccggacagcctgccgccggtgg

SEQ ID NO: 693502 - DNA, 75 bp, synthetic construct
  source 1..75: mol_type = other DNA
atccggagttgatagcgcagttttcaactggtaaccaaacacgtataaaacaaggattaatcgcaaaagcgcctc

SEQ ID NO: 693503 - DNA, 75 bp, synthetic construct
  source 1..75: mol_type = other DNA
ctccaaccgtatggcagaagagcttaaggatgtggcagataaggtctacacccgcgatctctttggcagcgacta

SEQ ID NO: 693504 - DNA, 75 bp, synthetic construct
  source 1..75: mol_type = other DNA
gtggtgggtatttatcgtctgattatgaagagcgggtcagataacttccgtgcgtcttctattcaggggattatg

SEQ ID NO: 693505 - DNA, 75 bp, synthetic construct
  source 1..75: mol_type = other DNA
tcgcgccagcgggcgagtccgggctgaatttttcgcgcaccgatctcgaagatattgatatcactctcccgataa

SEQ ID NO: 693506 - DNA, 75 bp, synthetic construct
  source 1..75: mol_type = other DNA
aagtcaaataccctagccgcgctatacaaagcaggtattgcccaagttaaacatattctcggcaaccactttagt

SEQ ID NO: 693507 - DNA, 75 bp, synthetic construct
  source 1..75: mol_type = other DNA
gctgcactgaatcagtttatgagaagctatgcgatcagacagtctacgctgtatccaaatcgcgcttttcttctt

SEQ ID NO: 693508 - DNA, 75 bp, synthetic construct
  source 1..75: mol_type = other DNA
atccaatatgaggagccgctggtcgagagccgatacctttacgacccgctgggtcgccggacagggaaacgggtg

SEQ ID NO: 693509 - DNA, 75 bp, synthetic construct
  source 1..75: mol_type = other DNA
ctatgatatacctatacctcctatcaccgaacaagagcgtattgtttctatactcgataaattcgacaccctgac

SEQ ID NO: 693510 - DNA, 75 bp, synthetic construct
  source 1..75: mol_type = other DNA
gcatctgggcggataaagcaaaatcgtatatctctgttgaattagcgtccaagttaagaaaagcctcatgcggag

SEQ ID NO: 693511 - DNA, 75 bp, synthetic construct
  source 1..75: mol_type = other DNA
cttttgcaaatgagaaaaggaaatactccaagggcactaaagtaattgatgtgtctgcatcggatatggcgaaaa

SEQ ID NO: 693512 - DNA, 75 bp, synthetic construct
  source 1..75: mol_type = other DNA
cgccgttgatgtgacgcactcccgaacagaaattccgtctgataagacgtatcaggggcaaagctatcgggtgac

SEQ ID NO: 693513 - DNA, 75 bp, synthetic construct
  source 1..75: mol_type = other DNA
gtattggttttgtaggatatcaaaaaacgccattctggttaggtcccttgtgctataaaataaaatcattaaata

SEQ ID NO: 693514 - DNA, 75 bp, synthetic construct
  source 1..75: mol_type = other DNA
tgagcaactgcgatggagatactgtaactacaccttctcgggggcagggaggtattggttttgtaggatatcaaa

SEQ ID NO: 693515 - DNA, 75 bp, synthetic construct
  source 1..75: mol_type = other DNA
tgacggcgcctatccttacaggtgctgtaatctctcaaaagactggggactgggagcctgtattaattagtggtt

SEQ ID NO: 693516 - DNA, 75 bp, synthetic construct
  source 1..75: mol_type = other DNA
agtggagatctaatatcattaggtggtcatgcaggacttggcgttgcgtttgctaaaaagaaaggtgaaatgtta

SEQ ID NO: 693517 - DNA, 75 bp, synthetic construct
  source 1..75: mol_type = other DNA
gggtatactagggactgtaattatcacacgagtaattttggggctaatattatggggcgtaatcatattaacaat

SEQ ID NO: 693518 - DNA, 75 bp, synthetic construct
  source 1..75: mol_type = other DNA
tagggctggtaccgctggggtatctgcgcagctacgcatttactgcgatagatgtctggcaggacatgttgctcg

SEQ ID NO: 693519 - DNA, 75 bp, synthetic construct
  source 1..75: mol_type = other DNA
ctgggtagaaggtggcggttgtaaagcccacgcctgcggctgggactatatcgtaacactctataacccaaaaac

SEQ ID NO: 693520 - DNA, 75 bp, synthetic construct
  source 1..75: mol_type = other DNA
ggagtaaatgttcagcgcatcacagcatttctggaggctcacaactggctttatgacgagcgtcctgaatcgcga

SEQ ID NO: 693521 - DNA, 75 bp, synthetic construct
  source 1..75: mol_type = other DNA
tgcaggccgggcaggttatcagcggcgcgattctcatcgtgacaactgagcggctgacgcaggggcagactggcc

SEQ ID NO: 693522 - DNA, 75 bp, synthetic construct
  source 1..75: mol_type = other DNA
gccacaatcatctgtataacgataaaaaaaagaagcagccgcagctttattcgcggcacttgttggttaatggga

SEQ ID NO: 693523 - DNA, 75 bp, synthetic construct
  source 1..75: mol_type = other DNA
ttatttctaatctatagcagctatacggtgtgggaacgacacagcacatgggattattctttcccggggccaggt

SEQ ID NO: 693524 - DNA, 75 bp, synthetic construct
  source 1..75: mol_type = other DNA
tatgatggcattgttagtttcagtatttataggtggaagtattattctttttttacctgatatttttgatctctg

SEQ ID NO: 693525 - DNA, 75 bp, synthetic construct
  source 1..75: mol_type = other DNA
tctatgatatctatatttataactattccagcaatattaaattacttaggtgaggaattgttcgggatttggatg

SEQ ID NO: 693526 - DNA, 75 bp, synthetic construct
  source 1..75: mol_type = other DNA
gtggatccgtacacgtcctacggtgcaggattcgttcaggcacactgcgagctgatggagttcaacggaggtacg

SEQ ID NO: 693527 - DNA, 75 bp, synthetic construct
  source 1..75: mol_type = other DNA
ctagtggctgcaattactcagaaagatgttcaagatgcactaggtcaactagcagcagctaacgttcgtatcgaa

SEQ ID NO: 693528 - DNA, 75 bp, synthetic construct
  source 1..75: mol_type = other DNA
attactggtgtaaaataccaaacaagtgagacggagattcatcagggagatagcgttcgaaaacaagagccacct

SEQ ID NO: 693529 - DNA, 75 bp, synthetic construct
  source 1..75: mol_type = other DNA
gttggataaccataaatatgcagctacagaacatgagatacacatttatgtagagtttttccaaacaccgtcgaa

SEQ ID NO: 693530 - DNA, 75 bp, synthetic construct
  source 1..75: mol_type = other DNA
tcggctgatgcagtactgaatatggcctcctcgcctatatatgtattcaataatgagcttcagagtctgcgcttc

SEQ ID NO: 693531 - DNA, 75 bp, synthetic construct
  source 1..75: mol_type = other DNA
taggtgttaatcttggcatgaattttgatattgctggaagcgtcatcagaccgtacctgataaccgcaatcagcc

SEQ ID NO: 693532 - DNA, 75 bp, synthetic construct
  source 1..75: mol_type = other DNA
gaagctggaaaaatcgtctttggcgatttcagcaatatcgtactggcatcatggggtggactaacaattgaccgt

SEQ ID NO: 693533 - DNA, 75 bp, synthetic construct
  source 1..75: mol_type = other DNA
gaatggagttgtaaataaattatcaaaagcaatatatagtaatagtgtaaatgatataagaaaaatcatcacaaa

SEQ ID NO: 693534 - DNA, 75 bp, synthetic construct
  source 1..75: mol_type = other DNA
ttactctcccaaaagaagagggtggtttatacaatttaggtggattggactttaaggggtgcttcttttctggac

SEQ ID NO: 693535 - DNA, 75 bp, synthetic construct
  source 1..75: mol_type = other DNA
ttcatatatggataaatgccagtcagaatggaaaagttggtcattatattgtacaaaacaatagagaaatcaagc

SEQ ID NO: 693536 - DNA, 75 bp, synthetic construct
  source 1..75: mol_type = other DNA
aaggggtgcttcttttctggacagaacttcagtaactatgatattcaatatgtgaactggggaacgtcattgttt

SEQ ID NO: 693537 - DNA, 75 bp, synthetic construct
  source 1..75: mol_type = other DNA
ccttctcggcagtagtggaatggcggagctacgctttattcgcacccacggcagtcgttttactccccaggattg

SEQ ID NO: 693538 - DNA, 75 bp, synthetic construct
  source 1..75: mol_type = other DNA
gtacgccaggtcgcacgcgaattgggctatcgtcgggattatgttgcctccagtctccgtcgcggcggcaccggg

SEQ ID NO: 693539 - DNA, 75 bp, synthetic construct
  source 1..75: mol_type = other DNA
ctcggcgaccgtcgtcggcatggtcggcgcgggcgggatcggcgtcaccctgtgggaagcgattcgcggtttcca

SEQ ID NO: 693540 - DNA, 75 bp, synthetic construct
  source 1..75: mol_type = other DNA
aaaaatttattcaatgaagcggaaatagctcatgccataaaatatgttgagggattgagagaaaaattcatgatg

SEQ ID NO: 693541 - DNA, 75 bp, synthetic construct
  source 1..75: mol_type = other DNA
gaaagcgatgtccgcgtcaactttggcggcgtcaccttcttctccggcgaccatctctatgccgacaataccggg

SEQ ID NO: 693542 - DNA, 75 bp, synthetic construct
  source 1..75: mol_type = other DNA
acgccaatataacgaccaatggtggggatataactgttgggacgacaaatacttcaaaccgtgtgaatatatcta

SEQ ID NO: 693543 - DNA, 75 bp, synthetic construct
  source 1..75: mol_type = other DNA
agtctgcctgtttatggcgtgctggcaccggacctggcggatcgctttgagctgacagagcgcaacaacctgctg

SEQ ID NO: 693544 - DNA, 75 bp, synthetic construct
  source 1..75: mol_type = other DNA
ccatttacgaagccagatggtcaaggtacgagaagcacctgcatgctggtatggataccacctcaatcatactaa

SEQ ID NO: 693545 - DNA, 75 bp, synthetic construct
  source 1..75: mol_type = other DNA
gcgtgtgaaagtccgtgagcctcgttttgatgtgcgtattggtggcgatggtgcgcattgcacggtaatccgcta

SEQ ID NO: 693546 - DNA, 75 bp, synthetic construct
  source 1..75: mol_type = other DNA
gttcgagcattataacgaatggcatccgcatagtgcgctgggttatcgctcgccacgggaatatctgcggcagtg

SEQ ID NO: 693547 - DNA, 75 bp, synthetic construct
  source 1..75: mol_type = other DNA
cgacatccccagttgagtggctgacagacaacggttcagcctaccgttcttatcagacgcgtcagttcgccagaa

SEQ ID NO: 693548 - DNA, 75 bp, synthetic construct
  source 1..75: mol_type = other DNA
gttcgctctggactgttgcgatcgcgaggcactttactgggcggccagtaacggtggatatgacagtgaaaccgt

SEQ ID NO: 693549 - DNA, 75 bp, synthetic construct
  source 1..75: mol_type = other DNA
aaaccggaaataccgccatcgaagcgggcgcatacagggaaagtggtcgttggagaaagtaaccagcggtggtgc

SEQ ID NO: 693550 - DNA, 75 bp, synthetic construct
  source 1..75: mol_type = other DNA
ggtgagttatggtcaggcggtttcctcatggaatcagtatgctgatgccaataatctcaccccggaacagaagca

SEQ ID NO: 693551 - DNA, 75 bp, synthetic construct
  source 1..75: mol_type = other DNA
gctgcgtcagcaggtaaagttcttggtggcgggcttcttggactggcggccaatagtggttatcaggtctatgat

SEQ ID NO: 693552 - DNA, 75 bp, synthetic construct
  source 1..75: mol_type = other DNA
gggatggcagagagcttcgtgaaaacgatgaagcgcgattacatcagcatcatgccgaaacccgacgggttaaca

SEQ ID NO: 693553 - DNA, 75 bp, synthetic construct
  source 1..75: mol_type = other DNA
acagacacgccctggtatccgccttcaggtgagctggttggtgaaatctcgaaggtgttcgactgtgagatacgg

SEQ ID NO: 693554 - DNA, 75 bp, synthetic construct
  source 1..75: mol_type = other DNA
gaagcctgctggagctggttgtcggattacccggaacaggcgcagccctgtgacatgctgatggtcataccctcc

SEQ ID NO: 693555 - DNA, 75 bp, synthetic construct
  source 1..75: mol_type = other DNA
ttgagcagtacgtcaatgacccgcgcatgtgcaacgttaacgatgagattcgacaaattgcacgtattgcgctgg

SEQ ID NO: 693556 - DNA, 75 bp, synthetic construct
  source 1..75: mol_type = other DNA
tcgacccaatgacaaaaatatataacagaaattttttctttgaaaaaataaacgaacttctctcaacaggagata

SEQ ID NO: 693557 - DNA, 75 bp, synthetic construct
  source 1..75: mol_type = other DNA
catatatcacatatttaaagttctgaaatcaacaaaacaattaagcaacctcgacccaatgacaaaaatatataa

SEQ ID NO: 693558 - DNA, 75 bp, synthetic construct
  source 1..75: mol_type = other DNA
actagtaactctccggtaactccggatagttggataagctgtagtgagcgaatgccgaaaaagaatcagaacgta

SEQ ID NO: 693559 - DNA, 75 bp, synthetic construct
  source 1..75: mol_type = other DNA
ggcaggactggataaaattgccaaaggtgagttacctgaaggagccaatataagcaaagttatagttgatggtta

SEQ ID NO: 693560 - DNA, 75 bp, synthetic construct
  source 1..75: mol_type = other DNA
gaatgcaactctcaccactcttagtggaaaagatgcggcaggattaaggagcgtcctagggcttggaacaacagc

SEQ ID NO: 693561 - DNA, 75 bp, synthetic construct
  source 1..75: mol_type = other DNA
gtgactattaaatccactaaaaaatatcataatcaccttacccgcatcgccacgttttgcgcgctgctgtatagc

SEQ ID NO: 693562 - DNA, 75 bp, synthetic construct
  source 1..75: mol_type = other DNA
acatatatccctggaactgaccgttttaacgtttatacgaatacaagcggcacgtacgctatttattacctggcg

SEQ ID NO: 693563 - DNA, 75 bp, synthetic construct
  source 1..75: mol_type = other DNA
gcggcgtcactttcttctccggcgaccatctctatgccgacaataccggaattattctttccgaagatccgctgg

SEQ ID NO: 693564 - DNA, 75 bp, synthetic construct
  source 1..75: mol_type = other DNA
cattgttcagaagccatacttcccagggttctcctgcagtggatagtttgtacgatttgctcctcaggacattac

SEQ ID NO: 693565 - DNA, 75 bp, synthetic construct
  source 1..75: mol_type = other DNA
cctgtattgcagggcgcgttaatggtgaactggttgatgcttgcgatctgattgaaaacgacgcacaactgtcga

SEQ ID NO: 693566 - DNA, 75 bp, synthetic construct
  source 1..75: mol_type = other DNA
tttcctcagtttgtgatggcgttaccagaagacgttaagcgtgactctagatatttgtccaaatttgcagcagca

SEQ ID NO: 693567 - DNA, 75 bp, synthetic construct
  source 1..75: mol_type = other DNA
attgcgatgggcagtgcattttttactgatggaccgaatgcaggagctattggaggtgctgccgcaggtgcatgg

SEQ ID NO: 693568 - DNA, 75 bp, synthetic construct
  source 1..75: mol_type = other DNA
cagagaaacagacggtctccacgctggcaacggttgctgccggcctggccggtggtctggtgggagactcggggg

SEQ ID NO: 693569 - DNA, 75 bp, synthetic construct
  source 1..75: mol_type = other DNA
agctttattgctgcagctctggcccagtttgtaagtgacaaaacgcaacgggatgtgcttgataatggtgatatg

SEQ ID NO: 693570 - DNA, 75 bp, synthetic construct
  source 1..75: mol_type = other DNA
cgatcaggatgatgtttggcttgatgataaaatttcaagcgcagtgaccatgatgaaggattccgaaggtccagt

SEQ ID NO: 693571 - DNA, 75 bp, synthetic construct
  source 1..75: mol_type = other DNA
ctgattgtaaatggtgatactttggaaaaaactatgaaaaccactgaatttaaagctctagcatcaagtcatata

SEQ ID NO: 693572 - DNA, 75 bp, synthetic construct
  source 1..75: mol_type = other DNA
cgaactggctgcaccgctggccgacatcgtgctcaacaatacgcaggcgtctttctgtaccgaataccgcgtcgt

SEQ ID NO: 693573 - DNA, 75 bp, synthetic construct
  source 1..75: mol_type = other DNA
accttgatgtgattggtgccaattacaacaccacgcgcctgattatcaccccggcagatgattcgactatcccgc

SEQ ID NO: 693574 - DNA, 75 bp, synthetic construct
  source 1..75: mol_type = other DNA
ttgcccacataaaggacgaagagttgtatgaaaaacttctcgaagagttcaaagactggcttggactggcaaaaa

SEQ ID NO: 693575 - DNA, 75 bp, synthetic construct
  source 1..75: mol_type = other DNA
gtactatcaacggcatctcgtttgacggttctaaaaatattgagctaacagcggaaaatttaaatctacaggaaa

SEQ ID NO: 693576 - DNA, 75 bp, synthetic construct
  source 1..75: mol_type = other DNA
ttcgataaacataggtggtgtatcctttgatggttcagccgatatagatttgcctggtgtgaatacaaaaggtaa

SEQ ID NO: 693577 - DNA, 75 bp, synthetic construct
  source 1..75: mol_type = other DNA
atccgcatatgctgagacacggttgcggttacgcgctggcagatctcgggcgcgacacccgtctgatacaggatt

SEQ ID NO: 693578 - DNA, 75 bp, synthetic construct
  source 1..75: mol_type = other DNA
aagatggactgaacaatgtcggtgctcgtggtgtggttttcgtcggcgagaacggcattcaggtgatttttggcg

SEQ ID NO: 693579 - DNA, 75 bp, synthetic construct
  source 1..75: mol_type = other DNA
atggccgggcaaggcggtaaatatgcgatggtggtggggatcccaacgctgcaaatgggcgtcttcggcggcctg

SEQ ID NO: 693580 - DNA, 75 bp, synthetic construct
  source 1..75: mol_type = other DNA
aatcactttctaaactgtcgatgattggtcgcgcgctgatgctgccaatttcgcttctgcctgccgccgggttgt

SEQ ID NO: 693581 - DNA, 75 bp, synthetic construct
  source 1..75: mol_type = other DNA
gtaaacgatcggcctgggaaatccttcccggccttggcgggacgaacaatgagccgccagtcatgaatgaggtta

SEQ ID NO: 693582 - DNA, 75 bp, synthetic construct
  source 1..75: mol_type = other DNA
tctcggttactaactcaatcagcgaagtaaaaaacctcttcctgggaaatgaaatcccgcaagaaggtgaggtgc

SEQ ID NO: 693583 - DNA, 75 bp, synthetic construct
  source 1..75: mol_type = other DNA
tggaggtcttcacggctcatttccggcgtaaggatttccagttgcaggaaatcaacaggactatggtcaccgatt

SEQ ID NO: 693584 - DNA, 75 bp, synthetic construct
  source 1..75: mol_type = other DNA
ggtggacttacttttgaaaacgactcaatccttgcctggattcggaatactgactgggcaaagattggatttaaa

SEQ ID NO: 693585 - DNA, 75 bp, synthetic construct
  source 1..75: mol_type = other DNA
tctctgacgttgatatgtttgttgtcgttataccctctgtctacagctttagtccttacacaaagccgtgtcggc

SEQ ID NO: 693586 - DNA, 75 bp, synthetic construct
  source 1..75: mol_type = other DNA
gtccgttaaactcaggctacctcaactttccgtatggcattttccagcagcgaaatgttcttgcgagctggctgg

SEQ ID NO: 693587 - DNA, 75 bp, synthetic construct
  source 1..75: mol_type = other DNA
cttcaaatccccctcggcagctgctaaatcaaaaacggcgggcgttgctaataagggggcgcagacgcccgctga

SEQ ID NO: 693588 - DNA, 75 bp, synthetic construct
  source 1..75: mol_type = other DNA
cgggattccctgcagtcgagaatgaaactacggttggggtatcgctgacaaaggccacaccatggacccgcgcac

SEQ ID NO: 693589 - DNA, 75 bp, synthetic construct
  source 1..75: mol_type = other DNA
tgccgtcgttgatgcctccggcgcttcggcgatttataccctcaaagcaggcgtgagggtaaacggcatcatgta

SEQ ID NO: 693590 - DNA, 75 bp, synthetic construct
  source 1..75: mol_type = other DNA
aaaaatattttccttggtgactcatcttcatacacgcctctccagaacgccgacggaagttacaatttcaataat

SEQ ID NO: 693591 - DNA, 75 bp, synthetic construct
  source 1..75: mol_type = other DNA
agcaaaccgtagaattagccgcaggagcattacagaaaaaccagaacggcgcagatattccaggaaaagatacct

SEQ ID NO: 693592 - DNA, 75 bp, synthetic construct
  source 1..75: mol_type = other DNA
ttcttacctaagcctggcggtgggatgaacctgttaatcacctcagtggatggtgataaaactgctggcgctgcg

SEQ ID NO: 693593 - DNA, 75 bp, synthetic construct
  source 1..75: mol_type = other DNA
cagcacaaaaaaccagcaacctgcatttgctttagggcaaacaggaagcactgtcggaaatgataaagctgttgg

SEQ ID NO: 693594 - DNA, 75 bp, synthetic construct
  source 1..75: mol_type = other DNA
gtgttaaatgaaaacggtgatgctaatttgacgtttaaacttcgctataaatcaactcaggaaaatgtacatgcc

SEQ ID NO: 693595 - DNA, 75 bp, synthetic construct
  source 1..75: mol_type = other DNA
gctggtgatggcgacagaattccgcctgcaaccttatgacgtggtgtatgtcaccaccgcaccggtttcccgcta

SEQ ID NO: 693596 - DNA, 75 bp, synthetic construct
  source 1..75: mol_type = other DNA
cgcaacgtggtgctaacacacaatggtcgtgaagaacgcatttctttgcaggcgctgatgcaaaacggcgatctc

SEQ ID NO: 693597 - DNA, 75 bp, synthetic construct
  source 1..75: mol_type = other DNA
aatgagcctagaaatacaaaaaaaattaaattctgtcgagtgtaaaatgatgcaggagtataattatacattcaa

SEQ ID NO: 693598 - DNA, 75 bp, synthetic construct
  source 1..75: mol_type = other DNA
aatagcaacgcgagttcaacgtaaaaatgatgctgccgaacatcctattttaacaatatcatctttgtccggatt

SEQ ID NO: 693599 - DNA, 75 bp, synthetic construct
  source 1..75: mol_type = other DNA
agtgtaccgtatctttatatgattggtagctttatgactgatggacacttgacattaaagttatttgactttgac

SEQ ID NO: 693600 - DNA, 75 bp, synthetic construct
  source 1..75: mol_type = other DNA
agtgtgccatatctgtatatggttggtagcttcatgacggatgggcacttaccattaaagttgtttgattttgac

SEQ ID NO: 693601 - DNA, 75 bp, synthetic construct
  source 1..75: mol_type = other DNA
ctcgatcccgaaagattgggattatccagccatcaaggaaatatgtactcaagttagcgagaagaattcagccgc

SEQ ID NO: 693602 - DNA, 75 bp, synthetic construct
  source 1..75: mol_type = other DNA
tggaagtggagacgctgttcagcctgatgtttgtgacccgctacctgcgcacagcggtgaccagcaagtttggcc

SEQ ID NO: 693603 - DNA, 75 bp, synthetic construct
  source 1..75: mol_type = other DNA
gtaagcttgctgatatttcacgtgttacttcagggggaacgcctaatagggccatatctgaatattggcaaaatg

SEQ ID NO: 693604 - DNA, 75 bp, synthetic construct
  source 1..75: mol_type = other DNA
ttggtttttataccgcagcaagatattcatgatgtaaaatcgatacttaatgttatttcacatcttgacataaca

SEQ ID NO: 693605 - DNA, 75 bp, synthetic construct
  source 1..75: mol_type = other DNA
ccgtgcagacgatctgtttctctggcaacgcgacccgttattactcttacttgcatctaacggctgcgaatctgc

SEQ ID NO: 693606 - DNA, 75 bp, synthetic construct
  source 1..75: mol_type = other DNA
gatatcactaatgcagtgctgtcacatcttgatctcgacgatctgatcgctgacgtcgctcgtgagatccatcat

SEQ ID NO: 693607 - DNA, 75 bp, synthetic construct
  source 1..75: mol_type = other DNA
ggttacaaagcgcggggatagagattgaaccagctttaaaattgacggcggggagtgtgataagcgcaatgcctt

SEQ ID NO: 693608 - DNA, 75 bp, synthetic construct
  source 1..75: mol_type = other DNA
ttatctaatcgaaaacccaatggaaaagcttaggcataaaattatgggtatgattactaaaatgcaggattccaa

SEQ ID NO: 693609 - DNA, 75 bp, synthetic construct
  source 1..75: mol_type = other DNA
tttaaaaacagagagctttttatacagaagttaagaaaattgacttctgatgataatttatcaaacatttttagt

SEQ ID NO: 693610 - DNA, 75 bp, synthetic construct
  source 1..75: mol_type = other DNA
ctctgaaatactttaacaagaaagtttatagtgatgacttatctggctaccggttgatccatcgtggttgttttg

SEQ ID NO: 693611 - DNA, 75 bp, synthetic construct
  source 1..75: mol_type = other DNA
gacagccgtggacagttaattgccgtgaaagacacgcagggccatgaaacgcggtatgaatacaacatcgccggt

SEQ ID NO: 693612 - DNA, 75 bp, synthetic construct
  source 1..75: mol_type = other DNA
gtcgatgagatcctccacttttcggaactcggcgtggtattcctgatgtttatcatcggtcttgagttgaatccc

SEQ ID NO: 693613 - DNA, 75 bp, synthetic construct
  source 1..75: mol_type = other DNA
tgctgcattattttctgtacgttaacgcactttggcgcgatcgccatggaacgacagcgtcaaaatgacgttgct

SEQ ID NO: 693614 - DNA, 75 bp, synthetic construct
  source 1..75: mol_type = other DNA
gtatgcgagcggcattcgtttggggcaaacacatgttgttcatgctgaaggtgattgtagtgcatgcttatctga

SEQ ID NO: 693615 - DNA, 75 bp, synthetic construct
  source 1..75: mol_type = other DNA
aacgcaaaatgtgcgtagtattcgccctggttttggtttagctccaaaacatttagagcatgtgttaggaaaaaa

SEQ ID NO: 693616 - DNA, 75 bp, synthetic construct
  source 1..75: mol_type = other DNA
aaaattttgcttctcatcgactttttgaacaaattggtttcaataagatctcttcatgtgaatatattaataggg

SEQ ID NO: 693617 - DNA, 75 bp, synthetic construct
  source 1..75: mol_type = other DNA
tgagcttggcgcagttttagattatatgcagccaaccccttatctagttgattctactgattataatgatagtta

SEQ ID NO: 693618 - DNA, 75 bp, synthetic construct
  source 1..75: mol_type = other DNA
catcaaggaaatatgtactcaagttagcaagaagaattcagccgctgtagatcatccggtactctcatgctccaa

SEQ ID NO: 693619 - DNA, 75 bp, synthetic construct
  source 1..75: mol_type = other DNA
aaaaactcgcctgcctgaaagacgagaaaaaagccctgatgcagcagttactgaccggaaaacgtcgggtgaaaa

SEQ ID NO: 693620 - DNA, 75 bp, synthetic construct
  source 1..75: mol_type = other DNA
tattgttgctccgattgttggtggtgcatttgctgtgctggggactgaacactggaaaatagcaacatatgttgt

SEQ ID NO: 693621 - DNA, 75 bp, synthetic construct
  source 1..75: mol_type = other DNA
tcaaagccagttgctcgtaatacttgcgggatcaagtataaataatttaaaaggttcagatattgaatcaataaa

SEQ ID NO: 693622 - DNA, 75 bp, synthetic construct
  source 1..75: mol_type = other DNA
cggctgttttgtcctgggcttccagagcttcgcacagctggaagaaatttacggcccgaaagcggcggcggcgct

SEQ ID NO: 693623 - DNA, 75 bp, synthetic construct
  source 1..75: mol_type = other DNA
ggtgcgcatcagcggcccgcggcagacgcgggaatacggctacagtgccacgggcaggctggagagtgtgcgcac

SEQ ID NO: 693624 - DNA, 75 bp, synthetic construct
  source 1..75: mol_type = other DNA
gcaccacacagggtggtctgacgcgcagcatggaatacgatgcagcgggacgtgtcatcagcctgaccaacgaga

SEQ ID NO: 693625 - DNA, 75 bp, synthetic construct
  source 1..75: mol_type = other DNA
gaaataacaaaaccgttagaagattcgaaagatgtatataatatatacacaatacatcgcgatgctttttattgc

SEQ ID NO: 693626 - DNA, 75 bp, synthetic construct
  source 1..75: mol_type = other DNA
tatggagaaaccggcgtcgggaatgtcagcatcaccacggggggaatgtgggaggtcaataagaatgtctatacc

SEQ ID NO: 693627 - DNA, 75 bp, synthetic construct
  source 1..75: mol_type = other DNA
ctctgggcagcgcattgcttttaaccggatgcgcaggaacggagactgattttcaatgtaacgcaacaacatcgg

SEQ ID NO: 693628 - DNA, 75 bp, synthetic construct
  source 1..75: mol_type = other DNA
gctcttgtggtggatcacatcatccccatcaatggcggcggtgatgttctcttctggcctgagtggaaccaccag

SEQ ID NO: 693629 - DNA, 75 bp, synthetic construct
  source 1..75: mol_type = other DNA
ttgttatctcccgaacaagatcttaatcgccatgctgatccttttccttttaacgaagagccctcctcgcaggat

SEQ ID NO: 693630 - DNA, 75 bp, synthetic construct
  source 1..75: mol_type = other DNA
atgtcgccattgcccgccacatgtacgagggcgctctgcatattctgcgtcgcaaatatgacgaatggcagccgc

SEQ ID NO: 693631 - DNA, 75 bp, synthetic construct
  source 1..75: mol_type = other DNA
ggtggactgttttatctcactacaaatcgccggtggtggtgatgatctccagggcattaaaaagggactgatgga

SEQ ID NO: 693632 - DNA, 75 bp, synthetic construct
  source 1..75: mol_type = other DNA
gggaaaggccgtcagcaccacacagggtggtctgacgcgcagcatggaatacgatgcagcgggacgtgtcatcag

SEQ ID NO: 693633 - DNA, 75 bp, synthetic construct
  source 1..75: mol_type = other DNA
aggagaacccgcatcatctgttccagccataccgcctgccggggcagcagtacgatgatgaatcggggctgtgct

SEQ ID NO: 693634 - DNA, 75 bp, synthetic construct
  source 1..75: mol_type = other DNA
cagcacctgaacagcctggtgtatgaccgtgactatggctggaatgacaatggcgacctggtgcgcatcagcggc

SEQ ID NO: 693635 - DNA, 75 bp, synthetic construct
  source 1..75: mol_type = other DNA
taataaaaaataatgattcctcaattgaatttcaaattggtaatcaaggaactggggaggcgactattcgcgagg

SEQ ID NO: 693636 - DNA, 75 bp, synthetic construct
  source 1..75: mol_type = other DNA
aggagatggactctagctattattgcagatgaatttaatgtatcagagataacaataaggaagaggcttgagtca

SEQ ID NO: 693637 - DNA, 75 bp, synthetic construct
  source 1..75: mol_type = other DNA
ctaatgaaagaccggttaaaattgttgaagggatatcttgtaagttcactgagtttacgaatgaagattctgtag

SEQ ID NO: 693638 - DNA, 75 bp, synthetic construct
  source 1..75: mol_type = other DNA
gtaacagatgattcagatgcttttattaaagctttaaactctggaaggtcggttataacaattcctgaaggaata

SEQ ID NO: 693639 - DNA, 75 bp, synthetic construct
  source 1..75: mol_type = other DNA
tatactttattttggtttggtagatatatatcaaatatatcatctcaatccaacaaactaattacctctttgctt

SEQ ID NO: 693640 - DNA, 75 bp, synthetic construct
  source 1..75: mol_type = other DNA
aataaaggcggtccatgtgaaataatatgtaatggggtcaatggttttttggctaatgatgtgagtcaatatgca

SEQ ID NO: 693641 - DNA, 75 bp, synthetic construct
  source 1..75: mol_type = other DNA
atgaaattaaaacaaaatatcgaaaaagagattataaaaattaacaatatcagaatacatcagtacactgtacta

SEQ ID NO: 693642 - DNA, 75 bp, synthetic construct
  source 1..75: mol_type = other DNA
ccagccgataatcatggggcggacgtaccatgaggacaaccgttcgccggggagcctgccggggacgaagacgca

SEQ ID NO: 693643 - DNA, 75 bp, synthetic construct
  source 1..75: mol_type = other DNA
tgctgcaacagataaaataaatattcctggcgtttttactattggaggacatggatatcctggttttattacaga

SEQ ID NO: 693644 - DNA, 75 bp, synthetic construct
  source 1..75: mol_type = other DNA
ccgggtcagcagtatgatgaggagtccggcctctattacaaccgccaccgctattatgacccgctgcaggggcgg

SEQ ID NO: 693645 - DNA, 75 bp, synthetic construct
  source 1..75: mol_type = other DNA
tcaacggaaaaataatcctttattccgtccgcttcggctcggcgcgcccttttttttaaatgaaattattcctac

SEQ ID NO: 693646 - DNA, 75 bp, synthetic construct
  source 1..75: mol_type = other DNA
gaagcgaggccggggttcctggcagattgaatttaactacaaggtcatgccattcctggtcggcttaacctccca

SEQ ID NO: 693647 - DNA, 75 bp, synthetic construct
  source 1..75: mol_type = other DNA
gcttcctgaatcgcaaagatcaaacttcgctgaaatgaagagaacgtttatcaatccggcactgaaaaagataaa

SEQ ID NO: 693648 - DNA, 75 bp, synthetic construct
  source 1..75: mol_type = other DNA
cgctcactgccagtggccgtttgcagcaggtacggcagcaacaatcggtggaatggctacgtaagcaaaccgaag

SEQ ID NO: 693649 - DNA, 75 bp, synthetic construct
  source 1..75: mol_type = other DNA
atccgttggatccggtcataaatgtagatccgcaaggtttggttgatataaatttataccccgaaagtgatctta

SEQ ID NO: 693650 - DNA, 75 bp, synthetic construct
  source 1..75: mol_type = other DNA
cgtgcatttattggtgagatagcaggtaagcgtaaagccaatgccgtctgtaacacctgctccttgcagactaaa

SEQ ID NO: 693651 - DNA, 75 bp, synthetic construct
  source 1..75: mol_type = other DNA
gccttatcccaatacagcatatgcctcaacaatgaaggacggaaccacaaccgtatttatatgcaattcgatggt

SEQ ID NO: 693652 - DNA, 75 bp, synthetic construct
  source 1..75: mol_type = other DNA
actgacgcctataagctggtcattcctgatatcaggctggaccagttacgcgcgaaaagtgccgaaacggtaggt

SEQ ID NO: 693653 - DNA, 75 bp, synthetic construct
  source 1..75: mol_type = other DNA
cacttgccgtgctgacgctctcagcctcggcactggccgttgatgtcgacgttaaattcagggccgatattatac

SEQ ID NO: 693654 - DNA, 75 bp, synthetic construct
  source 1..75: mol_type = other DNA
acagaagtctgcgggtgaaatttttattacagataagaaatactgtatcgcaaattattaccttgctgcgtgaat

SEQ ID NO: 693655 - DNA, 75 bp, synthetic construct
  source 1..75: mol_type = other DNA
cgcttaaaacgaccacacgggaagagcgacgaattcgctatatcacgctgaacagaccagaactacctgaaacaa

SEQ ID NO: 693656 - DNA, 75 bp, synthetic construct
  source 1..75: mol_type = other DNA
gacctgcatttcttattgcgaaggatgaagaaaaaatcaatcaactaattacaaacaagctacaagctgattttg

SEQ ID NO: 693657 - DNA, 75 bp, synthetic construct
  source 1..75: mol_type = other DNA
gttactctcgcgcggggagaacccggaagaagtacacctgctgcaccggaacgaccgagtaaacgttatggcagt

SEQ ID NO: 693658 - DNA, 75 bp, synthetic construct
  source 1..75: mol_type = other DNA
cactaatagagccaatgcttgagcaactaaaacaagaaattattgataaagcacaaactgctgctctgcataaag

SEQ ID NO: 693659 - DNA, 75 bp, synthetic construct
  source 1..75: mol_type = other DNA
agatgagataaaagatattttatctttagtcaaacaggccaaagctgaactggaaaatacgctaaaaaatatgac

SEQ ID NO: 693660 - DNA, 75 bp, synthetic construct
  source 1..75: mol_type = other DNA
ggctgatgctgtttgacaagcgctacttccccaaccagaaactggtagcagcgtttaaaaactgtgccacgcaga

SEQ ID NO: 693661 - DNA, 75 bp, synthetic construct
  source 1..75: mol_type = other DNA
aaaagttagccagttaccccaaacagaatggactggccaaagcgctgagagaaataggtcgaatcgaacggacac

SEQ ID NO: 693662 - DNA, 75 bp, synthetic construct
  source 1..75: mol_type = other DNA
cagacccggagttacagctacagcaccaccggcaggctgaccggcgttcacaccaccgcagcgaaccttgatatc

SEQ ID NO: 693663 - DNA, 75 bp, synthetic construct
  source 1..75: mol_type = other DNA
cagggtgacatgacgcagtatggcggtagcattgttcagggttcagccggggtacgtattggtgcccccaccggc

SEQ ID NO: 693664 - DNA, 75 bp, synthetic construct
  source 1..75: mol_type = other DNA
aaaaacgcccgcgccggtggggagcctcggccccggctggaaaatgcctgcggatatccgcttacagctgcgcga

SEQ ID NO: 693665 - DNA, 75 bp, synthetic construct
  source 1..75: mol_type = other DNA
atgccgtactgcggtaacaccctgcgactgggcgttaccggcacccccggcgcggggaaaagtacctttcttgag

SEQ ID NO: 693666 - DNA, 75 bp, synthetic construct
  source 1..75: mol_type = other DNA
aaagacgatggcgataaccataccaatgtcgccattgcccggcatatgtacgagagtgccctgcatattctgcga

SEQ ID NO: 693667 - DNA, 75 bp, synthetic construct
  source 1..75: mol_type = other DNA
cggcgtttattcgcccggtaccatcctccggtcatctgggcggtgccagtcagcgagcgcgggaattaatgctgt

SEQ ID NO: 693668 - DNA, 75 bp, synthetic construct
  source 1..75: mol_type = other DNA
ggcatcactggcatcagtatcggatgaacgggcagcctatgaattatttatggagaagcgtttcggggaatctgt

SEQ ID NO: 693669 - DNA, 75 bp, synthetic construct
  source 1..75: mol_type = other DNA
actatagcaaaaacagtagtttgcatttaaaaacagtgcgttattgttatgtagtgtttgtccattttactaatt

SEQ ID NO: 693670 - DNA, 75 bp, synthetic construct
  source 1..75: mol_type = other DNA
cgaaacagaatggtctggcaaaggctctgagggagattggccgcatcgaaaggtcattgtttatgctggactggt

SEQ ID NO: 693671 - DNA, 75 bp, synthetic construct
  source 1..75: mol_type = other DNA
tttatatccgtatggacggtaaagccctgccggaaatccacgatgaggactaccgatttgtaccaggtgccgtgg

SEQ ID NO: 693672 - DNA, 75 bp, synthetic construct
  source 1..75: mol_type = other DNA
accccatcggcctggcactggcatgggcagcctccctggcctcgatcgcggtggcggtcgtggccgcaggtcacg

SEQ ID NO: 693673 - DNA, 75 bp, synthetic construct
  source 1..75: mol_type = other DNA
tctacaagcgtgatccgcggtcggccacgccgtgggggctgctcatcagcggcggcactgctctcccgctcgctg

SEQ ID NO: 693674 - DNA, 75 bp, synthetic construct
  source 1..75: mol_type = other DNA
agcgaatcagtgaactgtacgccatcgaggatgaaatacggggattaccggagtcagagcgtcttgccgtcaggc

SEQ ID NO: 693675 - DNA, 75 bp, synthetic construct
  source 1..75: mol_type = other DNA
attgatgaacatactaatccgaaaggcctgcttatgccggggcaaaggaaaagcctgcaaactgacagagtaata

SEQ ID NO: 693676 - DNA, 75 bp, synthetic construct
  source 1..75: mol_type = other DNA
aatatgtcggtatttgtggttcagatgtacatggttttgaatcaggtccgtttattccgcctaaagacccaaatc

SEQ ID NO: 693677 - DNA, 75 bp, synthetic construct
  source 1..75: mol_type = other DNA
cacccctctgaaacacatgtttaattcattttttttagaaaacatgattaaacttcaggataatttcttcaacta

SEQ ID NO: 693678 - DNA, 75 bp, synthetic construct
  source 1..75: mol_type = other DNA
ccgcctggctttaaccctgcagaatcggcaaaaaaaccacaggtacggatatcacggcaacgactgacctttgat

SEQ ID NO: 693679 - DNA, 75 bp, synthetic construct
  source 1..75: mol_type = other DNA
tgattttttcgacaatcttattaaagacaaacaaccattagttcaaaagacaataagttattataagttagatct

SEQ ID NO: 693680 - DNA, 75 bp, synthetic construct
  source 1..75: mol_type = other DNA
ttatgacggggatgtctgagccgtatgctgcagcgcaggatgccgcgattgaagaaggaagtcgccgtattgagg

SEQ ID NO: 693681 - DNA, 75 bp, synthetic construct
  source 1..75: mol_type = other DNA
aacggtcggaacagccagctgcaccggaagtgtctgcagtaagttcagtaatgctgaagaggcggcaaaggcggt

SEQ ID NO: 693682 - DNA, 75 bp, synthetic construct
  source 1..75: mol_type = other DNA
tggagcaagacttaacgaggtggcccaacttcaggttaaagatgtcaggaccactgaggctgggaccgtttttat

SEQ ID NO: 693683 - DNA, 75 bp, synthetic construct
  source 1..75: mol_type = other DNA
atgataaatatgccgctatttattattgatgaactgcatctaaccgataaactggctggggaaatgattggtatc

SEQ ID NO: 693684 - DNA, 75 bp, synthetic construct
  source 1..75: mol_type = other DNA
tgatcattgctatcgtgagtggaatgtgtttttacgccagcgtactcatggcgacgactccggcagttgagctgg

SEQ ID NO: 693685 - DNA, 75 bp, synthetic construct
  source 1..75: mol_type = other DNA
atgatgtgggcggcgaataatctctacatgataaatatgccgctatttattattgatgaactgcatctaaccgat

SEQ ID NO: 693686 - DNA, 75 bp, synthetic construct
  source 1..75: mol_type = other DNA
ggttaaaccctgaatcgatcggcgttaatgatgtcacgcccgcagatgaaagtacctggtgtataggaaaaggcc

SEQ ID NO: 693687 - DNA, 75 bp, synthetic construct
  source 1..75: mol_type = other DNA
aactgcgttcgactacagcgaaggtggcctcacccttggcgcggatggtgttcagggctacggtttgtccatcga

SEQ ID NO: 693688 - DNA, 75 bp, synthetic construct
  source 1..75: mol_type = other DNA
aaattaccccgaccaccacgaccggtgatcctaacgttgcagaacaactgatcctgttagacctctccaccaacg

SEQ ID NO: 693689 - DNA, 75 bp, synthetic construct
  source 1..75: mol_type = other DNA
aaccagtacaactaccgctggcgctttacaggcaccagtttgcagttgggtactaacggcgggattgtcaacccg

SEQ ID NO: 693690 - DNA, 75 bp, synthetic construct
  source 1..75: mol_type = other DNA
tggtgaagctaactcgttgggaattataattcataataaactcaactccaaaagcgatactctaaatatacaaaa

SEQ ID NO: 693691 - DNA, 75 bp, synthetic construct
  source 1..75: mol_type = other DNA
gttgaactctctaaagagtcatacagcttaaactggctgggtaagtcctatgcgcggctattggctaacctacca

SEQ ID NO: 693692 - DNA, 75 bp, synthetic construct
  source 1..75: mol_type = other DNA
gatgagtctgaacttacgctttctaatcttagtttctttgacgatgctgtattgacaccagagcagtatgacact

SEQ ID NO: 693693 - DNA, 75 bp, synthetic construct
  source 1..75: mol_type = other DNA
actgatacgtttttctctcagtggtcaaccaaaaccaagaaagatctgcaaaaaaaaatacaagaccttactgta

SEQ ID NO: 693694 - DNA, 75 bp, synthetic construct
  source 1..75: mol_type = other DNA
ttactaaaaataatcatggaggatacctctgttacagaaaatacctttaaaaacatagagatggctatagcagat

SEQ ID NO: 693695 - DNA, 75 bp, synthetic construct
  source 1..75: mol_type = other DNA
atgattgatgctcttgaaattatggagctcgctgttaatgactcaatgaaatcatttcctgaaaagatttcccat

SEQ ID NO: 693696 - DNA, 75 bp, synthetic construct
  source 1..75: mol_type = other DNA
aaaaagaaacgattttttccgaagtagaaacggctaacagcaagcaactggctgtgttgaaagctaatttccctc

SEQ ID NO: 693697 - DNA, 75 bp, synthetic construct
  source 1..75: mol_type = other DNA
tgagtagtggctgggtatcgtttgaattctggaccacaaatgcaattccgggcattttacaacgtgctgaatggc

SEQ ID NO: 693698 - DNA, 75 bp, synthetic construct
  source 1..75: mol_type = other DNA
atccttcgtcgttatcacctatggcctgatggatggaatattcgtgggctcaatggattcatgctatcacataaa

SEQ ID NO: 693699 - DNA, 75 bp, synthetic construct
  source 1..75: mol_type = other DNA
gaggaactacgggagcacctgaagaccattgttgagtgggaacttggtgtcagccgtgatgacctgaacgacccg

SEQ ID NO: 693700 - DNA, 75 bp, synthetic construct
  source 1..75: mol_type = other DNA
catcggggctggctggggggctgccggctcatatcgtcctgcgttcgcgtggtggccagaccttgaaaggtcgcg

SEQ ID NO: 693701 - DNA, 75 bp, synthetic construct
  source 1..75: mol_type = other DNA
gcaccctggcactgcttgccgtcatcattcctttgctggtgctttttatttatgtcggtctgcgatcagggccgc

SEQ ID NO: 693702 - DNA, 75 bp, synthetic construct
  source 1..75: mol_type = other DNA
ttgaattgctgtcatttgaaaatcctcaatctgaacaaccacaaaccgaaatcaatgaacaaaataagccatcta

SEQ ID NO: 693703 - DNA, 75 bp, synthetic construct
  source 1..75: mol_type = other DNA
gagaaaaactatttgaaagtgatagtaaagttaaagatatcgtcgatgatatgtctaatcatgacgtggagagcg

SEQ ID NO: 693704 - DNA, 75 bp, synthetic construct
  source 1..75: mol_type = other DNA
tcctcgtgatgagaaagggatcaccgttagaatagataatattaatggaaagaaaaacaactctaattcatcaga

SEQ ID NO: 693705 - DNA, 75 bp, synthetic construct
  source 1..75: mol_type = other DNA
gctgtgcgtttgggtatgacctgggggtgagggtgccgtggctccgtacaccattgccattctttcatctggaca

SEQ ID NO: 693706 - DNA, 75 bp, synthetic construct
  source 1..75: mol_type = other DNA
gcagtctcatttaaaggcttcgattgttaatggtaaccttggtaacgatccctcaatagttactatgagcgatgg

SEQ ID NO: 693707 - DNA, 75 bp, synthetic construct
  source 1..75: mol_type = other DNA
tattctctaagtgacgcgaacctaaaggctattataaatgaatataaggtattttcacgggacaacgtaatgtcc

SEQ ID NO: 693708 - DNA, 75 bp, synthetic construct
  source 1..75: mol_type = other DNA
atcttattttattaggattttcaataaacattttggcgttacgccgaagcagttttttaattattttaaaggagg

SEQ ID NO: 693709 - DNA, 75 bp, synthetic construct
  source 1..75: mol_type = other DNA
acattttcactcagcgatatttattcccagcataaaacatctgttttatttctctttataaacaaagtgctctat

SEQ ID NO: 693710 - DNA, 75 bp, synthetic construct
  source 1..75: mol_type = other DNA
tttatcactgggagtttgaacgcgaagggaaaccgtttcgggtcagagttgatgggcaactgacgtttaatttgc

SEQ ID NO: 693711 - DNA, 75 bp, synthetic construct
  source 1..75: mol_type = other DNA
tatttcctggaacaagttatttgaaaataccagtacatcattaaatatcgcggcctatcgctactccacccagca

SEQ ID NO: 693712 - DNA, 75 bp, synthetic construct
  source 1..75: mol_type = other DNA
aagttcgttatatcgtgatatggtccgctatgcacaatatcgtttttctaaagttttatccgagtggacgccaga

SEQ ID NO: 693713 - DNA, 75 bp, synthetic construct
  source 1..75: mol_type = other DNA
ctttgactatctgggtcttggtgctgacgccaatacggtaacacgcgctgacgtgcttagagtccgtgatgtcct

SEQ ID NO: 693714 - DNA, 75 bp, synthetic construct
  source 1..75: mol_type = other DNA
tgaccgttacgctaaagaggttgaggtggatagattggttattgtgatgactgatatttataaggagggtgatgc

SEQ ID NO: 693715 - DNA, 75 bp, synthetic construct
  source 1..75: mol_type = other DNA
agtcagccacttatagattatatagatggattttatgctgctggtgcagataatgaccaaacctcagcgtcccta

SEQ ID NO: 693716 - DNA, 75 bp, synthetic construct
  source 1..75: mol_type = other DNA
cgcctgaccgcttcgcttccttctcacaaccggtataaactagcgtcagtatcattacggactaaggacagacgt

SEQ ID NO: 693717 - DNA, 75 bp, synthetic construct
  source 1..75: mol_type = other DNA
ctgccgggtaagagcatcaagaacgcccatagtgaccgctgtgtcccgcttgtcgatggcgcttatggttttgta

SEQ ID NO: 693718 - DNA, 75 bp, synthetic construct
  source 1..75: mol_type = other DNA
gtggcgctggcctggcacaaaaccaacaaaaaatggtcggctgattatgccgcccgcattctcgccagtatggaa

SEQ ID NO: 693719 - DNA, 75 bp, synthetic construct
  source 1..75: mol_type = other DNA
atcctccagcaattgccgaagaatcgtaagcagcgtttcaaagatgttccgttggttgacctgctaggtcgtgag

SEQ ID NO: 693720 - DNA, 75 bp, synthetic construct
  source 1..75: mol_type = other DNA
cagcacttagggcaatccatgcagacagacccaacgcctcctatgaggaaatgagggaacacctgagggacatcg

SEQ ID NO: 693721 - DNA, 75 bp, synthetic construct
  source 1..75: mol_type = other DNA
ttcgcgaatgaagatttcgatcgctattaccgccagacgcttttagcggtcaaaaacaatacgctctcaccgcgc

SEQ ID NO: 693722 - DNA, 75 bp, synthetic construct
  source 1..75: mol_type = other DNA
tactgcgttactcgaaatctttgaccatctgggccttaatgatgatgccaatgcgataacacgtgctgacatact

SEQ ID NO: 693723 - DNA, 75 bp, synthetic construct
  source 1..75: mol_type = other DNA
gggccactgaggcggggaccgtttatattcatattaatgaagacgacagtagcttacccggtaagagcatcaaga

SEQ ID NO: 693724 - DNA, 75 bp, synthetic construct
  source 1..75: mol_type = other DNA
atcagcggaatggcgtcttctatatccgtcttaggatgaaggccgctggtcccttcccggcttcgcttccacaac

SEQ ID NO: 693725 - DNA, 75 bp, synthetic construct
  source 1..75: mol_type = other DNA
gggtataacgctggtcttaaggccgtgaccattgaccggggcaccagtgcggtggcgggcgatacgctgatgatt

SEQ ID NO: 693726 - DNA, 75 bp, synthetic construct
  source 1..75: mol_type = other DNA
gttatgtcagatacagaacgtgaggcaagtaatgtatttgaatatcagaaaaaatatatagctcctatttgtgaa

SEQ ID NO: 693727 - DNA, 75 bp, synthetic construct
  source 1..75: mol_type = other DNA
tgcacgtatcggtcagcatattgcatcaccaggaacgccctgtggcaatggcctaaccgagcaggccgcagaaga

SEQ ID NO: 693728 - DNA, 75 bp, synthetic construct
  source 1..75: mol_type = other DNA
cagcaaatctggcaggccctttgttcaagcattcgggaggcattgtcaaaagcggatgtctctgcacagagtgtc

SEQ ID NO: 693729 - DNA, 75 bp, synthetic construct
  source 1..75: mol_type = other DNA
tccaaatctcaggataaacatgcacttttccccatttttactgcgagttggcgagctactcgtataaagaataaa

SEQ ID NO: 693730 - DNA, 75 bp, synthetic construct
  source 1..75: mol_type = other DNA
tttataaagagtggattcgtagtgatgatgtttcacctatatttatagaaactgaagaaaagttaagaaccttta

SEQ ID NO: 693731 - DNA, 75 bp, synthetic construct
  source 1..75: mol_type = other DNA
tataatgcatttaaaaaattcgtcagtgagatatcggagatcagcgcaaatgatatcaatatgacgattaaaacc

SEQ ID NO: 693732 - DNA, 75 bp, synthetic construct
  source 1..75: mol_type = other DNA
ggcgcggggaacaccgttcctcgcattatttccctttcttcttcgacggtttatccccgctggcgcggggaacac

SEQ ID NO: 693733 - DNA, 75 bp, synthetic construct
  source 1..75: mol_type = other DNA
cacaccctgaacggtttatccccgctggcgcggggaacactgaagcatcaaacatttggtggaccaaacggacgg

SEQ ID NO: 693734 - DNA, 75 bp, synthetic construct
  source 1..75: mol_type = other DNA
tggcagaggcgctatccacttattgaaatgctaatgactaaacagatggcaattcaatgtgtcgaggattatggt

SEQ ID NO: 693735 - DNA, 75 bp, synthetic construct
  source 1..75: mol_type = other DNA
atgcgtggctggactatcaagggcaaacctgccagtggtcgtgccgtattgtctcaggaacaggacggcattaaa

SEQ ID NO: 693736 - DNA, 75 bp, synthetic construct
  source 1..75: mol_type = other DNA
ccccacggacacaccatcaccgttaacgctacgggtaacgaagaaaacaccgtaaaaaacatcgcatttaactat

SEQ ID NO: 693737 - DNA, 75 bp, synthetic construct
  source 1..75: mol_type = other DNA
actacgcaagctagaatcggcgggcgattacactgcgcgtctggcgctactggaagagcagaaatcgttgccgtg

SEQ ID NO: 693738 - DNA, 75 bp, synthetic construct
  source 1..75: mol_type = other DNA
ccattttcgttgccagcgtattgtggttaagttcgttagggaaggtgcgaataagcggggaaattcttctcggct

SEQ ID NO: 693739 - DNA, 75 bp, synthetic construct
  source 1..75: mol_type = other DNA
ccgcattatttctttgcactctcacaggacacgcatttgcagcaaccgagatacacaaaccggacaataatcttg

SEQ ID NO: 693740 - DNA, 75 bp, synthetic construct
  source 1..75: mol_type = other DNA
aaatattttctagccgagttgttatttcaaatttaagcattgacatacaaaataacgattttgttatcataacag

SEQ ID NO: 693741 - DNA, 75 bp, synthetic construct
  source 1..75: mol_type = other DNA
aataacgattttattatcataacaggtgcttccggtgttggtaagagcaccttattgaatatcattggactgata

SEQ ID NO: 693742 - DNA, 75 bp, synthetic construct
  source 1..75: mol_type = other DNA
gcagatgaattttcgccttactggtatgagcttggtcttctgcattttattaatggagagccggtgaaggcagcg

SEQ ID NO: 693743 - DNA, 75 bp, synthetic construct
  source 1..75: mol_type = other DNA
gcgggaaaagacagaccgacaagctggtcatgggtatgggtagcaccactcgcgctaacagcgaagactgccttt

SEQ ID NO: 693744 - DNA, 75 bp, synthetic construct
  source 1..75: mol_type = other DNA
cggaagagttacaagccagcaattactacatcagttctttctccggtaaaaattatatccacgccactgtgattt

SEQ ID NO: 693745 - DNA, 75 bp, synthetic construct
  source 1..75: mol_type = other DNA
cagcgctctatatgtttttttcagttataaatcaagctataggcctttttatacagctaatcttgatgcaaggag

SEQ ID NO: 693746 - DNA, 75 bp, synthetic construct
  source 1..75: mol_type = other DNA
caggtctgtcgggggggcgggatatgtatcagatggaaaaaatatcaacaggcattgcctacggcacctccgccg

SEQ ID NO: 693747 - DNA, 75 bp, synthetic construct
  source 1..75: mol_type = other DNA
attgtcgggatctgcacagccattttcgttgccagcgtattgtggttaagttcgttagccgccagtcgtataacc

SEQ ID NO: 693748 - DNA, 75 bp, synthetic construct
  source 1..75: mol_type = other DNA
cggccctattatctggtggcgaaaaacaacgagttgcacttgcaagagctttaataaaaaaacctaaaatattgc

SEQ ID NO: 693749 - DNA, 75 bp, synthetic construct
  source 1..75: mol_type = other DNA
aacgacgtggatttattgtaatccccatgaccgagttatggggtcttcccccctgcgcagtattggctggcaggg

SEQ ID NO: 693750 - DNA, 75 bp, synthetic construct
  source 1..75: mol_type = other DNA
tttaatatttggtactttaatttcattggcatataaattaagtttggctgtatctgcttttttaattatatctaa

SEQ ID NO: 693751 - DNA, 75 bp, synthetic construct
  source 1..75: mol_type = other DNA
gtcattggcgcaatgactatgggcatgggcgcggcactgatggaggagctggcggtggatgaccgtttgggctac

SEQ ID NO: 693752 - DNA, 75 bp, synthetic construct
  source 1..75: mol_type = other DNA
tctgtagcggatagcctttttggtgaaagttacaagagaaaagagtgcatcgggatgctggttcacctgatgatt

SEQ ID NO: 693753 - DNA, 75 bp, synthetic construct
  source 1..75: mol_type = other DNA
atgactcggagtgaaataaacgtctgggatgagagaagaggtaccaatagtcatcgagtggaggagattcgatct

SEQ ID NO: 693754 - DNA, 75 bp, synthetic construct
  source 1..75: mol_type = other DNA
gcgcagcgcatggcgaagtgcgtgccgcgtacattatgggcgaagatccgctgcaaactgacgcggagctgtcgg

SEQ ID NO: 693755 - DNA, 75 bp, synthetic construct
  source 1..75: mol_type = other DNA
gcaggaacattaccagcgagtgatgtacctcataggccatcgcaatattgatcctacccacgtaatatggacaca

SEQ ID NO: 693756 - DNA, 75 bp, synthetic construct
  source 1..75: mol_type = other DNA
aactctggcaatctaggggcgaaaatgagcgcaccggattcgatgcggagagggttgcagatattgcctgggagc

SEQ ID NO: 693757 - DNA, 75 bp, synthetic construct
  source 1..75: mol_type = other DNA
aattaagcatgaaaatgtacagcagcttgaattcaagggacaaaagttgattgttgagctcttcggtgtgttggc

SEQ ID NO: 693758 - DNA, 75 bp, synthetic construct
  source 1..75: mol_type = other DNA
caacctacgttcagatggggacattacgtaccgatgcggatggtgcacttggcaacacccgggaactgaacatca

SEQ ID NO: 693759 - DNA, 75 bp, synthetic construct
  source 1..75: mol_type = other DNA
catcgcttacacgaccgtctgggtgagccgcaatatacagattcactgcattctcagggttcagcaagcagtatg

SEQ ID NO: 693760 - DNA, 75 bp, synthetic construct
  source 1..75: mol_type = other DNA
gggaactgaacatcagcaacgcggccatcgtcgatcttaatggatcgacgcagacggtagagacattcaccgggc

SEQ ID NO: 693761 - DNA, 75 bp, synthetic construct
  source 1..75: mol_type = other DNA
cacgtccggaattacgcatttttgcttcgtatttgaatgactccgaagatggaaaaccgtttgaagaccagacgg

SEQ ID NO: 693762 - DNA, 75 bp, synthetic construct
  source 1..75: mol_type = other DNA
ttcgtatttgaatgactccgaagatggtaaaccgtttgaagaccagacggcgaataatacctggaatttcggcgt

SEQ ID NO: 693763 - DNA, 75 bp, synthetic construct
  source 1..75: mol_type = other DNA
ctttggaacgcgacaacaccgctgcgcttactcacgcgatgttgcagtctgacagtgaaaataccacatcggtaa

SEQ ID NO: 693764 - DNA, 75 bp, synthetic construct
  source 1..75: mol_type = other DNA
ttgtctaactttcttgagcaatcgcggtttattgccctactgatgtatatcttacgcagcagcgtccgcgacagc

SEQ ID NO: 693765 - DNA, 75 bp, synthetic construct
  source 1..75: mol_type = other DNA
atgaacactctctttgactggtggttcgccacatcatcccatatccgccagttttgctgggcagtctggttgctg

SEQ ID NO: 693766 - DNA, 75 bp, synthetic construct
  source 1..75: mol_type = other DNA
cacaacgtcaggttgtcgccgctctgcgtggtcgccggtttatccccgctgacgcggggaacactgcatggcttt

SEQ ID NO: 693767 - DNA, 75 bp, synthetic construct
  source 1..75: mol_type = other DNA
ataccgtactgaaaagcgatcagaaatctttggctgaacctttcactattcacctgcaggactgcatgctgggtg

SEQ ID NO: 693768 - DNA, 75 bp, synthetic construct
  source 1..75: mol_type = other DNA
ttcaaactcgacgttaagaaagtggcggacccggaaggtggcgaacgtgcggtcatcaccttagatggtaaatat

SEQ ID NO: 693769 - DNA, 75 bp, synthetic construct
  source 1..75: mol_type = other DNA
aagcgttggttcatgagaagtttggcgatggcattatcagcgcgattaacttcaaactcgacgttaagaaggtgg

SEQ ID NO: 693770 - DNA, 75 bp, synthetic construct
  source 1..75: mol_type = other DNA
aaaaactgtgttatctttttaattagagtactcccacgattccttccggtatctgtactttcaattgtatataaa

SEQ ID NO: 693771 - DNA, 75 bp, synthetic construct
  source 1..75: mol_type = other DNA
ttactttattatggttgctagggtggttcctcgattattaccaacaaaattcctctctctattttatcgtatcac

SEQ ID NO: 693772 - DNA, 75 bp, synthetic construct
  source 1..75: mol_type = other DNA
aataaagattctaatttttagagtattgcccagattaatgcctcaatcgttgttatttatgctttataaaaatag

SEQ ID NO: 693773 - DNA, 75 bp, synthetic construct
  source 1..75: mol_type = other DNA
accccaaattaacgaaggtgattcggtattactggagatagagcaagaggtttctggtgtcgcagaaaccgccgc

SEQ ID NO: 693774 - DNA, 75 bp, synthetic construct
  source 1..75: mol_type = other DNA
gccgagtgccgttgctggtgatattcccgtgctggggcatctattccgagctaaaagtgagcatgttgctaaacg

SEQ ID NO: 693775 - DNA, 75 bp, synthetic construct
  source 1..75: mol_type = other DNA
ggcgtagattttcatgttgctcgcacagtgatatagtgagctattctctctttagaaatccattcaaccatatga

SEQ ID NO: 693776 - DNA, 75 bp, synthetic construct
  source 1..75: mol_type = other DNA
atgcgagaaagggtatcgcagcagttaagagaaattgaacggcggtatgatgtgaaagtactgtacgcctgtgaa

SEQ ID NO: 693777 - DNA, 75 bp, synthetic construct
  source 1..75: mol_type = other DNA
gcattaatggtgacagagcagctaatagtcttgataacctgtcttcagcagcagttaaaacagcaggtgcattta

SEQ ID NO: 693778 - DNA, 75 bp, synthetic construct
  source 1..75: mol_type = other DNA
ctggtaagggtcagattatggctgaagagcttaaggggcaattagctgaagctgttcctggtatggttcaggtat

SEQ ID NO: 693779 - DNA, 75 bp, synthetic construct
  source 1..75: mol_type = other DNA
acgcttttaaacagtttaggtggaagcggtaaaagtcttggtgaatctcttggtagtctcatgacttctatgtca

SEQ ID NO: 693780 - DNA, 75 bp, synthetic construct
  source 1..75: mol_type = other DNA
tgctggttatcgtgcgtcaggcatacagggattccctggatggtaaaagtgtgtcttttaccggggtgaatggca

SEQ ID NO: 693781 - DNA, 75 bp, synthetic construct
  source 1..75: mol_type = other DNA
catttagagaagtgatattttgttgctgccaccaattaataattatcctgacccaagaaaaaaaactggcatatg

SEQ ID NO: 693782 - DNA, 75 bp, synthetic construct
  source 1..75: mol_type = other DNA
ttgaatatgcaattacaaatatagattcaaagggcaacagacaaaagttgttatcatcatcttttccatcggatt

SEQ ID NO: 693783 - DNA, 75 bp, synthetic construct
  source 1..75: mol_type = other DNA
actccccggcctgaactgggagaacacatccgtgcacagcctgttgaacggcatatgatttatttcctgcaggct

SEQ ID NO: 693784 - DNA, 75 bp, synthetic construct
  source 1..75: mol_type = other DNA
ggttaaccaggagacgggcagtgctttagttgccaacacgggcgcagggactgatattgaaggatacaacaagct

SEQ ID NO: 693785 - DNA, 75 bp, synthetic construct
  source 1..75: mol_type = other DNA
gaaccaacagttatggtgatgctttctacatcaggaattcagaagctaaaaatgtagtgctggaaaacgcggtaa

SEQ ID NO: 693786 - DNA, 75 bp, synthetic construct
  source 1..75: mol_type = other DNA
atgacttctatgtcacatggtgttgatagcatgaccgatattagttacagggtgagagcgttcttcgatgaggtg

SEQ ID NO: 693787 - DNA, 75 bp, synthetic construct
  source 1..75: mol_type = other DNA
gcagtgaggtctgcttccgctgcgaggacatccgagacgaacgcgaaagcgtcggaaacccgtgcagaatcttca

SEQ ID NO: 693788 - DNA, 75 bp, synthetic construct
  source 1..75: mol_type = other DNA
cgcaaggcgaagactgaaattgatcggggtggcgtgcacacagagaagaccgttgaagcaaccagcgtgtacgaa

SEQ ID NO: 693789 - DNA, 75 bp, synthetic construct
  source 1..75: mol_type = other DNA
gattgagtcagtaacgggcgtattcgccggccaggaaatctgccagaccaactttacggtagcaccgctgcattc

SEQ ID NO: 693790 - DNA, 75 bp, synthetic construct
  source 1..75: mol_type = other DNA
tttacaggtcggcacgtgatgggtatggatttgaggctgactggtcagagttttataccacatcacgaaagccaa

SEQ ID NO: 693791 - DNA, 75 bp, synthetic construct
  source 1..75: mol_type = other DNA
agaatacgctgggcggccattcacttgcgctggggaggggcgacacaggcctgaaacaaaacggcgacggtaatc

SEQ ID NO: 693792 - DNA, 75 bp, synthetic construct
  source 1..75: mol_type = other DNA
gcagtgccacgacggcatccgcgaaggcgacagaggcagctggcagtgcgacagcggcagcacagagcaaaagca

SEQ ID NO: 693793 - DNA, 75 bp, synthetic construct
  source 1..75: mol_type = other DNA
atgcgtaaagaacgatttactaaacaccagatcattgctgtcctgaaatctgtcgaagccagccgttcccgtgaa

SEQ ID NO: 693794 - DNA, 75 bp, synthetic construct
  source 1..75: mol_type = other DNA
gacagtgcgtccggtaatatgaccgatacagtcagaaagtctgtcagctccgctatgaatcaggttacgcaggcg

SEQ ID NO: 693795 - DNA, 75 bp, synthetic construct
  source 1..75: mol_type = other DNA
tttaggttctggcttgattaatagcttaaaagtcttggctggtgttattgctgtaaataaggttgttggtgttac

SEQ ID NO: 693796 - DNA, 75 bp, synthetic construct
  source 1..75: mol_type = other DNA
ccggagatatggccgggacgacgaattgtgctgacggggcatccgcaggcgaacctgaaccgggaatggcaggtg

SEQ ID NO: 693797 - DNA, 75 bp, synthetic construct
  source 1..75: mol_type = other DNA
tatggtatttattataaatataataaaaacaaagaaaattatataaataatgatgaggttatttcaagaatcagt

SEQ ID NO: 693798 - DNA, 75 bp, synthetic construct
  source 1..75: mol_type = other DNA
tatcgttcctggggcaataacactctattttagtattttaagcgtcctctttagaattactgtaacagttcttga

SEQ ID NO: 693799 - DNA, 75 bp, synthetic construct
  source 1..75: mol_type = other DNA
ggcgcgtggagttcgctgttggacattatcccgtcgatggcaaaagctcacgttggtgatgaagaacaccgtgcg

SEQ ID NO: 693800 - DNA, 75 bp, synthetic construct
  source 1..75: mol_type = other DNA
gccaaagccaacctggcaaaagtcatgaagtcattcaatgtgacgccagcgaagcgctcacgcgccagccgtcgc

SEQ ID NO: 693801 - DNA, 75 bp, synthetic construct
  source 1..75: mol_type = other DNA
attggctatgtattgccacatctggaaaggctgtggacggtcgcaccattgaaccgcaatggttgattgatgcgg

SEQ ID NO: 693802 - DNA, 75 bp, synthetic construct
  source 1..75: mol_type = other DNA
ggctggtccctaaccagtacctgattgaagccaacagactggggcagaagctgttcacatccgccgagatagtgg

SEQ ID NO: 693803 - DNA, 75 bp, synthetic construct
  source 1..75: mol_type = other DNA
ttgggaagaaatgacctgcttattcgcaccttccctaatgatgttgcagttactgagtcgtacaaacccatctgg

SEQ ID NO: 693804 - DNA, 75 bp, synthetic construct
  source 1..75: mol_type = other DNA
gacaaagtgatggctgaggatgatttcggcaaaggacacaactgcgctatcgattattgcgctgacgccatccgc

SEQ ID NO: 693805 - DNA, 75 bp, synthetic construct
  source 1..75: mol_type = other DNA
ggtcgggattgttgatgttttctgcatggcgcaagtttacatccatacgtcgattatcacctggcagcattacaa

SEQ ID NO: 693806 - DNA, 75 bp, synthetic construct
  source 1..75: mol_type = other DNA
tatccaggggggacttaatctgcctttctttggcagcgatttcccgctgtcgaaagctgatatcgttttcaacca

SEQ ID NO: 693807 - DNA, 75 bp, synthetic construct
  source 1..75: mol_type = other DNA
cgtaacctgcggatgacagtccttttctggggtgatgattatgatgtgcggctgcaggcgtttctggccgcactg

SEQ ID NO: 693808 - DNA, 75 bp, synthetic construct
  source 1..75: mol_type = other DNA
actaccgtcagccggaaagccgttgccgcaggcgacagcgtaaaccgccagttcgtggcagaacgtcctgaccag

SEQ ID NO: 693809 - DNA, 75 bp, synthetic construct
  source 1..75: mol_type = other DNA
tgctcctatactcattgccagcatttacctactgaatagaatgcgctatcgcattgctgtactcgctatgggtga

SEQ ID NO: 693810 - DNA, 75 bp, synthetic construct
  source 1..75: mol_type = other DNA
cggagcttgacgacgtttatattcaagatcctactgaagatgcacaaccgcgttacaggagctacggatttgccc

SEQ ID NO: 693811 - DNA, 75 bp, synthetic construct
  source 1..75: mol_type = other DNA
gatcggatatccctcaccataaccgaaccgttttgcggtttttcaatgacgcgctggccgcgacgagcgagcacg

SEQ ID NO: 693812 - DNA, 75 bp, synthetic construct
  source 1..75: mol_type = other DNA
ccccagttcgctgacagaacctatttctccaattgttcacctgttgatcccacaagtaccagaccaacctatttt

SEQ ID NO: 693813 - DNA, 75 bp, synthetic construct
  source 1..75: mol_type = other DNA
tgggattgacttcactccctgagaatttgcctccacatctgattgaattttactgcagtaaaaacgtgttgaccg

SEQ ID NO: 693814 - DNA, 75 bp, synthetic construct
  source 1..75: mol_type = other DNA
attatctggctgcctgagctgtcgactaacctgagagtgattaactgttctgaaaacttcttgcaatttttaccg

SEQ ID NO: 693815 - DNA, 75 bp, synthetic construct
  source 1..75: mol_type = other DNA
aataccatcatcacgttggagcgcctgaatccgaatccgcaacataacgagttcatgatggtcgccgaatggtgc

SEQ ID NO: 693816 - DNA, 75 bp, synthetic construct
  source 1..75: mol_type = other DNA
tttgcctccacatctgattgaatttaactgcagtagaaacgtgttgaccgcgttaccggaggtaatgccaaaggg

SEQ ID NO: 693817 - DNA, 75 bp, synthetic construct
  source 1..75: mol_type = other DNA
tttaccgacgctgctcaaagccgtcgagggcctgaaaaaccaggagggtctggaggagcttttggactttttgca

SEQ ID NO: 693818 - DNA, 75 bp, synthetic construct
  source 1..75: mol_type = other DNA
gaacatgaacccgaatctgcatcaagggtgaagcgtgatttatctgaagtcgactccgagtcaacaatgaagcgt

SEQ ID NO: 693819 - DNA, 75 bp, synthetic construct
  source 1..75: mol_type = other DNA
tcagctgtggtatggcattatattttttgtgtggaggcataacagtggcagcagaacttgatgaaaacatgcaag

SEQ ID NO: 693820 - DNA, 75 bp, synthetic construct
  source 1..75: mol_type = other DNA
gccaccatcctgtcgattattatgctggcagtttatatcggctttattttactgatcgccttcgcgcccggctgg

SEQ ID NO: 693821 - DNA, 75 bp, synthetic construct
  source 1..75: mol_type = other DNA
aagagataatgttttagaaagtcttcagccttatttagttattaataaagacgcagtcacgccatgtacgtttct

SEQ ID NO: 693822 - DNA, 75 bp, synthetic construct
  source 1..75: mol_type = other DNA
cctgtgctggcaacaatattaactcaatacctgatgaggtgcttgagaacttgactcgcctgaaggtatttgact

SEQ ID NO: 693823 - DNA, 75 bp, synthetic construct
  source 1..75: mol_type = other DNA
ccgttagatctgttacgaaaatggcacgagaaaattgagacatggatcttaaatgaagcaggtattaccataaaa

SEQ ID NO: 693824 - DNA, 75 bp, synthetic construct
  source 1..75: mol_type = other DNA
atccccaaattctgacgtaaacaaggagggttgggttttcagaagtaacagtaaaagtggcaaaattattgagcc

SEQ ID NO: 693825 - DNA, 75 bp, synthetic construct
  source 1..75: mol_type = other DNA
tggtctgcagcttacaccggcgcagctgcggtgagtctgcgtaatgaccccggccgcccgctacagtcgctcgct

SEQ ID NO: 693826 - DNA, 75 bp, synthetic construct
  source 1..75: mol_type = other DNA
ccaccggtattcgggtacggattatcccatcactctggataagctgctcgataaactgccggatgtggtttaagg

SEQ ID NO: 693827 - DNA, 75 bp, synthetic construct
  source 1..75: mol_type = other DNA
gttacctccgccgctcggcggaaaacatatctaccgcaaggtgcgcgatcgcgcctcctacgcctttgccctggt

SEQ ID NO: 693828 - DNA, 75 bp, synthetic construct
  source 1..75: mol_type = other DNA
gtgcgctggatgcaattgcaccggagacgaacaatctgctcatgcaagctaatgcagccttggttgtatcagatc

SEQ ID NO: 693829 - DNA, 75 bp, synthetic construct
  source 1..75: mol_type = other DNA
ggcaattcttccggacggagatcaaatggaagacttctcggcgtggctacggcgcgatcaaccgggaggtcccat

SEQ ID NO: 693830 - DNA, 75 bp, synthetic construct
  source 1..75: mol_type = other DNA
tgccgaccagagcgggaaaatcactgctatctcacatgaaagctggtccggaaacctgcccggcggcacgccgga

SEQ ID NO: 693831 - DNA, 75 bp, synthetic construct
  source 1..75: mol_type = other DNA
gtggattcgcgctattacgtggaggtggaagttcgtgcgcaaggctaccagctacatttgcttgacgcgacgcac

SEQ ID NO: 693832 - DNA, 75 bp, synthetic construct
  source 1..75: mol_type = other DNA
caaatcaaaacgccagaggaggtggagaaaatccgcctcgcctgtgggattgccgatcgcggagcggagcatatt

SEQ ID NO: 693833 - DNA, 75 bp, synthetic construct
  source 1..75: mol_type = other DNA
ggatcgcctgcaaaaagaagtgcgatttgatgggctgggatcggtgctgatccgcctcaatgaatcgacaggtcc

SEQ ID NO: 693834 - DNA, 75 bp, synthetic construct
  source 1..75: mol_type = other DNA
atgataatttttcaccaatagagagggctcttacacaactgatccggcgtgatttgcgtactctgcgcgataatg

SEQ ID NO: 693835 - DNA, 75 bp, synthetic construct
  source 1..75: mol_type = other DNA
gatccgcgtttttcaccgcgggacaccacgacgctacagccagggatgttactgaccgtggagccggggatttat

SEQ ID NO: 693836 - DNA, 75 bp, synthetic construct
  source 1..75: mol_type = other DNA
gatccgcgcttttcaccgcgggacagcacgatgctcctgccaggtatgttactgaccgtggagccggggatttat

SEQ ID NO: 693837 - DNA, 75 bp, synthetic construct
  source 1..75: mol_type = other DNA
gatatttcggaattgaatacatccaggactgtggggcagagtttcttttcgtatatgaaaagggagaatttagcg

SEQ ID NO: 693838 - DNA, 75 bp, synthetic construct
  source 1..75: mol_type = other DNA
ttgattgctttatatacggccatccctgttgttacaatagtaattttatctggtcagcaatcgcataagttggaa

SEQ ID NO: 693839 - DNA, 75 bp, synthetic construct
  source 1..75: mol_type = other DNA
ttctttctgagtatcgcattcaggatggccaggcagacggcggacagcagcatgaagcaattgcagaacaaaacg

SEQ ID NO: 693840 - DNA, 75 bp, synthetic construct
  source 1..75: mol_type = other DNA
aacatggccgcgtgcgggtgaaatttaactgggaccgttataacccgtcaaaccaggacagttcatgctggatcc

SEQ ID NO: 693841 - DNA, 75 bp, synthetic construct
  source 1..75: mol_type = other DNA
gcgaagaggtggcagccgtctcgttgcaatgcgtcgggccggggcattacgtcgcacaaccacaatcagaatacg

SEQ ID NO: 693842 - DNA, 75 bp, synthetic construct
  source 1..75: mol_type = other DNA
cgttatctggcgacaaacagtccgcaggggccgtggtggctgctcggctggtgtgagcgggtgccggaagcggat

SEQ ID NO: 693843 - DNA, 75 bp, synthetic construct
  source 1..75: mol_type = other DNA
gtgatcccggcagacagaacatggcgaccacagccgttgctgaaaccgctggtcgacggcccgcagagcgctgtc

SEQ ID NO: 693844 - DNA, 75 bp, synthetic construct
  source 1..75: mol_type = other DNA
gggaaatctgcgtttgtggaagtcagcgggcagcccagcaatgatggtgaagggtatctggaatttttccgggaa

SEQ ID NO: 693845 - DNA, 75 bp, synthetic construct
  source 1..75: mol_type = other DNA
ttcagcagatacagcgcgtgcagaaggacacaaatgatgacctggctgcgctgtacatgctgaaggttcaaaaaa

SEQ ID NO: 693846 - DNA, 75 bp, synthetic construct
  source 1..75: mol_type = other DNA
aggcttttgttttaacagatataacaaacaaccaaactcatgatcttgctatcgaaacacttaccattagcatca

SEQ ID NO: 693847 - DNA, 75 bp, synthetic construct
  source 1..75: mol_type = other DNA
gttctgatccagcacggcggcggcactgaacttgctacgctgagaggaaagtcgctgattaccgtagatggtgaa

SEQ ID NO: 693848 - DNA, 75 bp, synthetic construct
  source 1..75: mol_type = other DNA
ggaaaaatcaacaagtattttgagggtataaaaaatagagaaccaactaaatataaagttattaatgtaggacca

SEQ ID NO: 693849 - DNA, 75 bp, synthetic construct
  source 1..75: mol_type = other DNA
tactgaaagaaatggccggagacccggaattacagaaatggcgggagaaatatctggatatttacccgcaggact

SEQ ID NO: 693850 - DNA, 75 bp, synthetic construct
  source 1..75: mol_type = other DNA
gctgccgcacggcaaagccagcgacaagattgttgcagcgggcgagtttgtcactctcgattttggtgcgctgta

SEQ ID NO: 693851 - DNA, 75 bp, synthetic construct
  source 1..75: mol_type = other DNA
caccgggcggcggagggtgatgtggcgggcgcggtgacgggggtgacggacggcgcgggccgccgttttcacctg

SEQ ID NO: 693852 - DNA, 75 bp, synthetic construct
  source 1..75: mol_type = other DNA
tggctggcgaaatcaccggggtgacggacggcgcgggccgccgttttcacctggcactgagcacacaggcgcagc

SEQ ID NO: 693853 - DNA, 75 bp, synthetic construct
  source 1..75: mol_type = other DNA
tttgatattgataaccctgttcttgttttggcgttgcactaccgccagccggaggaaaacctgccggaattcgcc

SEQ ID NO: 693854 - DNA, 75 bp, synthetic construct
  source 1..75: mol_type = other DNA
catgttcaattctacaatgcaacaatgaatagagccaatattaaaaataccttccttgattattcaggtgatgct

SEQ ID NO: 693855 - DNA, 75 bp, synthetic construct
  source 1..75: mol_type = other DNA
tgtttttctctctttgccagattaacgataaccactctttcacaagttcatcacatacaaagaaaacaaaatcat

SEQ ID NO: 693856 - DNA, 75 bp, synthetic construct
  source 1..75: mol_type = other DNA
aacgtgcagggtaatttgatggatgagatgctgattacgattattcaggggcacgctcagcgactcgggatgaaa

SEQ ID NO: 693857 - DNA, 75 bp, synthetic construct
  source 1..75: mol_type = other DNA
atgaaaaataaagaaaccctaaaacagatttatcacctgcaatatgattcattcgctttcaaaagtggtttaata

SEQ ID NO: 693858 - DNA, 75 bp, synthetic construct
  source 1..75: mol_type = other DNA
gatgatttacgccaacgtcatcggcagcgacctggggcctaaaattacccctatcggtagtctggcaaccttgct

SEQ ID NO: 693859 - DNA, 75 bp, synthetic construct
  source 1..75: mol_type = other DNA
atgcagaagctggtggcaatatctctaactcaacggacctgacagaaactcttgctgatttcacccaggcttcgg

SEQ ID NO: 693860 - DNA, 75 bp, synthetic construct
  source 1..75: mol_type = other DNA
ctcaaatgatttacatagtgcgctttgtttatgccggatgcggcgtgaacgccttatccggcctacaaaactgtg

SEQ ID NO: 693861 - DNA, 75 bp, synthetic construct
  source 1..75: mol_type = other DNA
aagattgaattttgtgatcttatcagaggtcaatcagattttatccatgtaaaatattatactggttcgcaaagt

SEQ ID NO: 693862 - DNA, 75 bp, synthetic construct
  source 1..75: mol_type = other DNA
atggcattgaagaaaaatgtctattttgcggatttgctgcgagcagtagagatttcgctccccctcaggcagacg

SEQ ID NO: 693863 - DNA, 75 bp, synthetic construct
  source 1..75: mol_type = other DNA
gtgataccctggtaacactacagaaattctttgaagaagattgtacctctcatactggcatgtcacaaactgagg

SEQ ID NO: 693864 - DNA, 75 bp, synthetic construct
  source 1..75: mol_type = other DNA
ctatacgcatcaagccaaatctcttttttatgataaagtaatatggaaacaagacttcctattcaattctgtata

SEQ ID NO: 693865 - DNA, 75 bp, synthetic construct
  source 1..75: mol_type = other DNA
tctgaggacggagaccagaaacacgtatacatcgcgctttacagaagtggcaatggcgttcgccagcatttaaat

SEQ ID NO: 693866 - DNA, 75 bp, synthetic construct
  source 1..75: mol_type = other DNA
tacatcgcgctttacagaagtggcaatggcgttcgccagcatttaaatggagagccggatgcgctgaaaggtgca

SEQ ID NO: 693867 - DNA, 75 bp, synthetic construct
  source 1..75: mol_type = other DNA
tgccgatcgcggagcggagcatattcgccgctttattcaggcggggatgagcgagcgcgagatagccgctgaact

SEQ ID NO: 693868 - DNA, 75 bp, synthetic construct
  source 1..75: mol_type = other DNA
ggtggtaggctcctgtctggcggggatattgagcgagaatatcgttcgcgcgctgtttattctctatatgctggc

SEQ ID NO: 693869 - DNA, 75 bp, synthetic construct
  source 1..75: mol_type = other DNA
gtctctggctggggggctggcgtgcagtttaacccgaccgaatccgtggccattgatattgcttatgaaggctcc

SEQ ID NO: 693870 - DNA, 75 bp, synthetic construct
  source 1..75: mol_type = other DNA
aggattttccaaatatgctgttagttttgggcgttatagacgcaattcagataaaaatgcaggccctccaatatt

SEQ ID NO: 693871 - DNA, 75 bp, synthetic construct
  source 1..75: mol_type = other DNA
ttcaatccattcccagcaggggattatgtagtagatattttcattaatggtaattatagactcacacactcagtt

SEQ ID NO: 693872 - DNA, 75 bp, synthetic construct
  source 1..75: mol_type = other DNA
acagggaaccctgacaccagagctgtaccaggaaacgctggcgctgtaccagggcaaacttgatgggtacaccga

SEQ ID NO: 693873 - DNA, 75 bp, synthetic construct
  source 1..75: mol_type = other DNA
cttggtattcaggaacaggtggtggtgaagtaatgacatgcaaatatactattttatgtgatgacaaaatatatg

SEQ ID NO: 693874 - DNA, 75 bp, synthetic construct
  source 1..75: mol_type = other DNA
atggggtcgagatatgaaaagctcatgctctgttagctttacaaatatatcaaaaaccgacacgcatcctctcgt

SEQ ID NO: 693875 - DNA, 75 bp, synthetic construct
  source 1..75: mol_type = other DNA
gctggtatttttgagtttgatgatttaccaaacgtgggggacagcggctcttataaagtcacaatatatgagtca

SEQ ID NO: 693876 - DNA, 75 bp, synthetic construct
  source 1..75: mol_type = other DNA
ctggaagctgaaaagctaagggaagcattgctgtctttagaacatgcttttcagtttgggccagattccccttca

SEQ ID NO: 693877 - DNA, 75 bp, synthetic construct
  source 1..75: mol_type = other DNA
actggggaatgccgcggcgtattcgtattgattttaataccacgacagtcggcaactgcgatatttgcggtgagc

SEQ ID NO: 693878 - DNA, 75 bp, synthetic construct
  source 1..75: mol_type = other DNA
cgatctggttttcccctggcttggcccgacgcgcaccagcgaactggccggtgcggtggtaaccgatgatcaggt

SEQ ID NO: 693879 - DNA, 75 bp, synthetic construct
  source 1..75: mol_type = other DNA
ccacctgttttatgagtacgacgctgcggaccggatcatccgctggtccgataacgaccagacgtggagccaggg

SEQ ID NO: 693880 - DNA, 75 bp, synthetic construct
  source 1..75: mol_type = other DNA
acattcaaaccaggcgcccggaggtatggtcgggttgaccgcattggatgcagcccaatacttccgcgaggcaat

SEQ ID NO: 693881 - DNA, 75 bp, synthetic construct
  source 1..75: mol_type = other DNA
tcctggctgctattcagctgttcgttgatggctcaaagcaggagattgacgaggcggtgcgccggacgggtatca

SEQ ID NO: 693882 - DNA, 75 bp, synthetic construct
  source 1..75: mol_type = other DNA
gagcattcactttgagccgctgctgccgggggaggcggtgtacagccgcagcgagtcaatgtggctggtgcgcgg

SEQ ID NO: 693883 - DNA, 75 bp, synthetic construct
  source 1..75: mol_type = other DNA
cgtggccggataaccgcatcgcagaggatgcgcactatgtctaccgctacgatgaatacggcaggctggcggaga

SEQ ID NO: 693884 - DNA, 75 bp, synthetic construct
  source 1..75: mol_type = other DNA
gggaaacgggtgtggcgtcgcgagcgtgacctgacgggatggatgtcgctgtcgcggaaaccggaggtgacgtgg

SEQ ID NO: 693885 - DNA, 75 bp, synthetic construct
  source 1..75: mol_type = other DNA
acttcaattggtggtaaaggttccaccattaacatcgggaaaaaaggcgtaaagatgacaaatggccttcccggc

SEQ ID NO: 693886 - DNA, 75 bp, synthetic construct
  source 1..75: mol_type = other DNA
cgcagcttcggtaataacgcatacgagctgaccagcacctacacccccgccgggcagccggagagtcagcatctg

SEQ ID NO: 693887 - DNA, 75 bp, synthetic construct
  source 1..75: mol_type = other DNA
tcggccagatgacggcggttcaccgcgaggaaggtatcagcctttaccgccgctatgacaaccgtggccggttaa

SEQ ID NO: 693888 - DNA, 75 bp, synthetic construct
  source 1..75: mol_type = other DNA
ggatatcaaagcgccgcccggatataccggtggacggtttcgtggaaactggcaggtttcttttgatgcaccggc

SEQ ID NO: 693889 - DNA, 75 bp, synthetic construct
  source 1..75: mol_type = other DNA
tcttggcgaaggcgtttttgtctttaatcacaccaataacagcgatgccggttaccaggtcgacatgctgattac

SEQ ID NO: 693890 - DNA, 75 bp, synthetic construct
  source 1..75: mol_type = other DNA
gtactgaccgttaacggcaactataccggaaacaatggcctgatgacgttcaacgcgacgctgggcggcgataat

SEQ ID NO: 693891 - DNA, 75 bp, synthetic construct
  source 1..75: mol_type = other DNA
ggatagttaatatttcaacggatagtctttggaatttaaagacgtcttctactaacgcccaattgctacaggtcg

SEQ ID NO: 693892 - DNA, 75 bp, synthetic construct
  source 1..75: mol_type = other DNA
ggaacgcgacaacaccgctgcgcttactcacgcgatgttgcagtctgacagtgaaaataccacatcggtaaaagt

SEQ ID NO: 693893 - DNA, 75 bp, synthetic construct
  source 1..75: mol_type = other DNA
tacttaggtgtttttgaacctgctgtaggaacgctaaacattggtgctgctcacggtgaggcggcggcagatgcc

SEQ ID NO: 693894 - DNA, 75 bp, synthetic construct
  source 1..75: mol_type = other DNA
gggtcgctgacggtaaataaaggtgggatcagtcagggtgaactgacaggtggcggaaacctgaatgttacaggg

SEQ ID NO: 693895 - DNA, 75 bp, synthetic construct
  source 1..75: mol_type = other DNA
acgattatcggtggcaatgccaccggtatcggaaccctgaatgtgcaggatcaagactctgtcatcacggtacgc

SEQ ID NO: 693896 - DNA, 75 bp, synthetic construct
  source 1..75: mol_type = other DNA
atcacttatttaagtgatactggttgtctggagattcagggggccagtctagtagggacatctggtacgggtacg

SEQ ID NO: 693897 - DNA, 75 bp, synthetic construct
  source 1..75: mol_type = other DNA
aaggtgggatcagtcagggcgaactgacaggtggcggaaacctgaatgttacagggggaacgctggctatcgagg

SEQ ID NO: 693898 - DNA, 75 bp, synthetic construct
  source 1..75: mol_type = other DNA
tggaatgatcccatggcgaataaccctctgacgacgctcaatttgctggaacacgatgatagccatgtcggcgtt

SEQ ID NO: 693899 - DNA, 75 bp, synthetic construct
  source 1..75: mol_type = other DNA
tccgtatttattcaggctggcggcagttatcgactcacgccattttacgacatcatttcagcatttccggtcctt

SEQ ID NO: 693900 - DNA, 75 bp, synthetic construct
  source 1..75: mol_type = other DNA
tgacaggctgacgacgatacagaccggcacaacgcgtatccagacggtgtaccagccggggagcttcacgccgct

SEQ ID NO: 693901 - DNA, 75 bp, synthetic construct
  source 1..75: mol_type = other DNA
ccgcacctacagcagctaccggacgaagacgcctgcaccggtggggatttttggccccggctggaaagcgccttc

SEQ ID NO: 693902 - DNA, 75 bp, synthetic construct
  source 1..75: mol_type = other DNA
aaccagctgacggcggtggtgtccccggacgggctggagagccgccgggcatatgatgaaccgggcaggctggta

SEQ ID NO: 693903 - DNA, 75 bp, synthetic construct
  source 1..75: mol_type = other DNA
tccgcatcgaaacagagaacggcgagcgggagaaagcgcagcgccgcagtctggcggagaagttgcagcaggaag

SEQ ID NO: 693904 - DNA, 75 bp, synthetic construct
  source 1..75: mol_type = other DNA
cacggcgtggtatttccggctgaactggtggggctgctggacaggctggagggggaaatccgggcaaactgcgtg

SEQ ID NO: 693905 - DNA, 75 bp, synthetic construct
  source 1..75: mol_type = other DNA
aggagtcggggctgtactataaccgtcaccggtactacgatccgttgcaggggcggtatattactcaggacccga

SEQ ID NO: 693906 - DNA, 75 bp, synthetic construct
  source 1..75: mol_type = other DNA
gagaacggcagccacagcgacttcagctacgatgcgctggaccggctggtacagcagggcggctttgacgggcgg

SEQ ID NO: 693907 - DNA, 75 bp, synthetic construct
  source 1..75: mol_type = other DNA
aacctaacagcaactatacacaatcttagagctacatttgcggtatcactttttaggctccttttgaggcgtgta

SEQ ID NO: 693908 - DNA, 75 bp, synthetic construct
  source 1..75: mol_type = other DNA
acaggtcggggaatcgacggtaatcaggctgtcgaaggatggcatcaccatcgtgggcggttctgttttcatcaa

SEQ ID NO: 693909 - DNA, 75 bp, synthetic construct
  source 1..75: mol_type = other DNA
gagcattgcatttcaattgccagagcttgggttgctcacgtttgcgatgtttataccgatgttgagcggggggct

SEQ ID NO: 693910 - DNA, 75 bp, synthetic construct
  source 1..75: mol_type = other DNA
caccacgcgaatccagacggtctacgagccggggagcttcacgccgctcatccgcatcgaaacagagaacggcga

SEQ ID NO: 693911 - DNA, 75 bp, synthetic construct
  source 1..75: mol_type = other DNA
ggtcaggaggtgattgtagacttcctcaacggcgatccggaccagccgatcattatggggcgcacctaccaccag

SEQ ID NO: 693912 - DNA, 75 bp, synthetic construct
  source 1..75: mol_type = other DNA
cggcgattaaggaaattttgctggctgtggaggaaagcaaaattgcgctgacgccggatggcattcagctacagg

SEQ ID NO: 693913 - DNA, 75 bp, synthetic construct
  source 1..75: mol_type = other DNA
accctcacagtgtggccggataaccgcatcgcgaaggatgcgcactatgtttaccactacgatgaatacggcaga

SEQ ID NO: 693914 - DNA, 75 bp, synthetic construct
  source 1..75: mol_type = other DNA
gacgctgacgtaccggcgtgaggccgccggtgacctggccggggaaatcaccggcgtgacggacggtgccgggcg

SEQ ID NO: 693915 - DNA, 75 bp, synthetic construct
  source 1..75: mol_type = other DNA
cacccttcgatatccgcttacaggttcatgagtgggaactgatactcaacgacagcggcggcaggagcattcact

SEQ ID NO: 693916 - DNA, 75 bp, synthetic construct
  source 1..75: mol_type = other DNA
cccattctgagatgattgaagataataaaaaagacttggctgtaaatgaacatgggttgacatgtccattaacac

SEQ ID NO: 693917 - DNA, 75 bp, synthetic construct
  source 1..75: mol_type = other DNA
ggcgtggtgttcccggctgaactggtacggctgctggacagactggaggaagaaatccgggcagaccgcgtgagc

SEQ ID NO: 693918 - DNA, 75 bp, synthetic construct
  source 1..75: mol_type = other DNA
ccgatcggcgaaagggctgggttatgaaaaagagattagagattacgggttaaatctgttcggtatgtacggcag

SEQ ID NO: 693919 - DNA, 75 bp, synthetic construct
  source 1..75: mol_type = other DNA
atatccgcatcccgtatgccacagacccggcaggtaaccgcctgcccgacccggagctgcacccggacagcaccc

SEQ ID NO: 693920 - DNA, 75 bp, synthetic construct
  source 1..75: mol_type = other DNA
actaccactacgacagccagcaccgcctggtgttcgacacgcggatacagcaaggggagccacgggtcgagagcc

SEQ ID NO: 693921 - DNA, 75 bp, synthetic construct
  source 1..75: mol_type = other DNA
actaccactacgacagccagcaccgtctggtgttccacacgcggatacagcaaggggagccactggtcgagagcc

SEQ ID NO: 693922 - DNA, 75 bp, synthetic construct
  source 1..75: mol_type = other DNA
actaccactacgacagccagcaccgtctggtgttctacacgcggatacagcaaggggagccaccggtcgagagcc

SEQ ID NO: 693923 - DNA, 75 bp, synthetic construct
  source 1..75: mol_type = other DNA
gggaggcatatgaacttgccaccgcctggaataccagcggccagctccggagcaggcacctgaaccttccgcagc

SEQ ID NO: 693924 - DNA, 75 bp, synthetic construct
  source 1..75: mol_type = other DNA
tttagccggacgaacatgatttttgaggcgtgcgggtttagcaacccctctatgaatacaaatgcgcctataagc

SEQ ID NO: 693925 - DNA, 75 bp, synthetic construct
  source 1..75: mol_type = other DNA
actaccactacgacagccagcaccggctggtgttcaacacgcggatacagcaaggggagccacaggtcgagagcc

SEQ ID NO: 693926 - DNA, 75 bp, synthetic construct
  source 1..75: mol_type = other DNA
agaactacgcagacctgaggaaagcagtaaaccgcacttacgcagaaatggggataggagggagatgtaaaaaat

SEQ ID NO: 693927 - DNA, 75 bp, synthetic construct
  source 1..75: mol_type = other DNA
tcgcttaccggaaaaaaacgtcgggcaattctcagcgccttacgtctggcgcaggaactgggcgcggagacggca

SEQ ID NO: 693928 - DNA, 75 bp, synthetic construct
  source 1..75: mol_type = other DNA
agcgaaaccggggctgttgcgccagcatctgaccgcggtaaaagcggctgcggaaatttgtagggcaacggtgga

SEQ ID NO: 693929 - DNA, 75 bp, synthetic construct
  source 1..75: mol_type = other DNA
acagcacaccatcagttcaaatatcaaataataaagcatatcctttaattgttcaaagcaatatatgggatgaaa

SEQ ID NO: 693930 - DNA, 75 bp, synthetic construct
  source 1..75: mol_type = other DNA
tttaattactttggggcttttgtctttagactcatctactgtgatgaatttttatttttttatccagtggtattt

SEQ ID NO: 693931 - DNA, 75 bp, synthetic construct
  source 1..75: mol_type = other DNA
gggatattacttccgtaccggcattgtcatgactgtgccggtgctgtttgtcactctggccgcgctggcgtggcg

SEQ ID NO: 693932 - DNA, 75 bp, synthetic construct
  source 1..75: mol_type = other DNA
caattctcagcgccttacgtctggcgcaggagctgggcgcggagacggctacactttctgatccagcggaagaaa

SEQ ID NO: 693933 - DNA, 75 bp, synthetic construct
  source 1..75: mol_type = other DNA
tccagagcttattcagcaggagcatcatgcggaagttctatttattcctacacctgtcgatttatactggaaaat

SEQ ID NO: 693934 - DNA, 75 bp, synthetic construct
  source 1..75: mol_type = other DNA
tgcgtaactatttcgttgatgctggccttactactggcttcatcgttcagttactggcatgggacgatacaaaga

SEQ ID NO: 693935 - DNA, 75 bp, synthetic construct
  source 1..75: mol_type = other DNA
acgcgatgtacgtcagcgttagcgtacctattgagaatattttaggtggcaaacgtaagtcttctggtttccgca

SEQ ID NO: 693936 - DNA, 75 bp, synthetic construct
  source 1..75: mol_type = other DNA
tgatgttagtgccattttcatctttttcaacagaaaataattttgaaataaataagacacgagtaatttactctg

SEQ ID NO: 693937 - DNA, 75 bp, synthetic construct
  source 1..75: mol_type = other DNA
tcactggccgaccgtcggctttatctcgctaaacaggctgggcgtaatcgggtattcgcgagcgataacgcttaa

SEQ ID NO: 693938 - DNA, 75 bp, synthetic construct
  source 1..75: mol_type = other DNA
cggcagtatcagcattgcattaaccctgctgtgggcgctctttaccaccatgttactcatctcctggtatgtgat

SEQ ID NO: 693939 - DNA, 75 bp, synthetic construct
  source 1..75: mol_type = other DNA
aattgttaatgctggtttttttatttgccgactttttattcgtattatttccggcttgatgagaaaactaggata

SEQ ID NO: 693940 - DNA, 75 bp, synthetic construct
  source 1..75: mol_type = other DNA
ggcaattgttataattcatgacttcattagtcttaagaaaaataaacgaaatcttgctgccatttatgtgaaagt

SEQ ID NO: 693941 - DNA, 75 bp, synthetic construct
  source 1..75: mol_type = other DNA
aaactcagttcacctgggccggttattttccgccagactcgctatggcatggatggcaagccgatcaaagtgtgg

SEQ ID NO: 693942 - DNA, 75 bp, synthetic construct
  source 1..75: mol_type = other DNA
atgcaggacgttgttattgttgccgctacgcgcacaccgattggctgttttcatggcgctctcgccccactttct

SEQ ID NO: 693943 - DNA, 75 bp, synthetic construct
  source 1..75: mol_type = other DNA
gaatcataatataaagccttggattcgcacctctggcgcaattgattggattgtaaataattcattaagtaaaat

SEQ ID NO: 693944 - DNA, 75 bp, synthetic construct
  source 1..75: mol_type = other DNA
atgggtagcattaacctgcgtattgacgatgaacttaaagcgcgttcttacgccgcgcttgaaaaaatgggtgta

SEQ ID NO: 693945 - DNA, 75 bp, synthetic construct
  source 1..75: mol_type = other DNA
ggttaacgacttaattgatgggcgggatacagataaagaaattgaaattattggttttgtttctttagaggaagt

SEQ ID NO: 693946 - DNA, 75 bp, synthetic construct
  source 1..75: mol_type = other DNA
tatatgcttcgtcataaggttaagccaggtatcacgggcttagcacaaattaatggttggcgtggtgaaactgat

SEQ ID NO: 693947 - DNA, 75 bp, synthetic construct
  source 1..75: mol_type = other DNA
tacgcagcacttccttagacgaacttccgcagttctttaatgtactttttggtcagatgtccgttgtaggacctc

SEQ ID NO: 693948 - DNA, 75 bp, synthetic construct
  source 1..75: mol_type = other DNA
atctatgacgatattaaaattgatagttatgaggatgtcccatacggagggacgctctctgaacttgttgaagac

SEQ ID NO: 693949 - DNA, 75 bp, synthetic construct
  source 1..75: mol_type = other DNA
ctgaataccagcgttaacagcgacatgaaaggtagctcgcaatataacgccaatgcctcgggctacagccaggat

SEQ ID NO: 693950 - DNA, 75 bp, synthetic construct
  source 1..75: mol_type = other DNA
tacaggttattgaccaacaaacattgcagaactccaccaattacgcttcttcgccatatatcgacaatcaacggg

SEQ ID NO: 693951 - DNA, 75 bp, synthetic construct
  source 1..75: mol_type = other DNA
gaaaaaatggaaaaacgaatagaatatgacttgttatacatccgaggatggagcatctggttggatctaaagata

SEQ ID NO: 693952 - DNA, 75 bp, synthetic construct
  source 1..75: mol_type = other DNA
tccgctactatcgtgaacagagcatccagttaccacgcgcatccgatccgcgctatctggaaatggcagagcaga

SEQ ID NO: 693953 - DNA, 75 bp, synthetic construct
  source 1..75: mol_type = other DNA
cgtaggtcagttaagctataacttgtatagtctagatccaaatcagaattatgatttccggtgtcgcagggtata

SEQ ID NO: 693954 - DNA, 75 bp, synthetic construct
  source 1..75: mol_type = other DNA
gacttagttgatgttaaaataattatatcagaaagagatggcaaatatataaataataaaggatttaatgttgtt

SEQ ID NO: 693955 - DNA, 75 bp, synthetic construct
  source 1..75: mol_type = other DNA
gatggttctgggttgcaaaataaagtactagaagcgtttgctttagaaattcctgtaatcacaacaaatgttgta

SEQ ID NO: 693956 - DNA, 75 bp, synthetic construct
  source 1..75: mol_type = other DNA
ttgttgtcatcgtcatcattctgagcaaaaccggggtgtccgagagcctcacggccctgacccttgccactgttg

SEQ ID NO: 693957 - DNA, 75 bp, synthetic construct
  source 1..75: mol_type = other DNA
tcggcgcggtaaaagcggtacgtaatcaaaatcaggccggaaaaattgctgttttcggttcggatatgaccactg

SEQ ID NO: 693958 - DNA, 75 bp, synthetic construct
  source 1..75: mol_type = other DNA
ttcaactctttatactaaaagaggtggcatcctttttcagcaaaatgcctgggctccagggaatactactatttc

SEQ ID NO: 693959 - DNA, 75 bp, synthetic construct
  source 1..75: mol_type = other DNA
tcgcccgagctatcatgccgaatctgcgaaagatggctggcagcgaatgttggaatggtttaagcggtatggtgg

SEQ ID NO: 693960 - DNA, 75 bp, synthetic construct
  source 1..75: mol_type = other DNA
cagaacagcctgtcactttactcgccagagaaggagaagaagaggattgtctggatctggcaaagtcatacgata

SEQ ID NO: 693961 - DNA, 75 bp, synthetic construct
  source 1..75: mol_type = other DNA
gatgcgctgataacagtgaagcagccttaccagggggcaatttctctttcgcagcatataaaaaatgcacaagcc

SEQ ID NO: 693962 - DNA, 75 bp, synthetic construct
  source 1..75: mol_type = other DNA
ggttaacaacgccggtggcggtggacctaaaccgtttgatatgccaatggcggattttggtgatgatgccaactt

SEQ ID NO: 693963 - DNA, 75 bp, synthetic construct
  source 1..75: mol_type = other DNA
caaggtcagccagctaaagaaagaatcatggatcttaaaaataacactgtcggtattgcttgtggcgatttttct

SEQ ID NO: 693964 - DNA, 75 bp, synthetic construct
  source 1..75: mol_type = other DNA
gcggagctcataatggggccgccgatgcaatgagacattgttacttgatgtgtcgaatgactaagacatttggat

SEQ ID NO: 693965 - DNA, 75 bp, synthetic construct
  source 1..75: mol_type = other DNA
cttccggcaaccagatgaatattcatcagaacagccagaacatggtggccaactggaacagctttgacattggta

SEQ ID NO: 693966 - DNA, 75 bp, synthetic construct
  source 1..75: mol_type = other DNA
ctgcgtattcgtacagaggacgagcatgatgcgtatttatgccgtgagctttataaggaggggctgaccgttgcg

SEQ ID NO: 693967 - DNA, 75 bp, synthetic construct
  source 1..75: mol_type = other DNA
ttataaggaggggctgaccgttgcgatcatcgcagaaaaaatggaaatgtcccgtcgtcaggtttttaacatcgt

SEQ ID NO: 693968 - DNA, 75 bp, synthetic construct
  source 1..75: mol_type = other DNA
ttacagggagggactgaccatatcggttatcgccgaaaaaatggaaatgtctcgcagtcaggtatttaacattat

SEQ ID NO: 693969 - DNA, 75 bp, synthetic construct
  source 1..75: mol_type = other DNA
caaagtcaacgttgacctcgccgcgtccggcgtcgcttacaaagaacgcctgaacatgccggttgtcgccgaagt

SEQ ID NO: 693970 - DNA, 75 bp, synthetic construct
  source 1..75: mol_type = other DNA
aagcggatggttccaaacgcacctttacgcagcccttctcctccgttgtgcaaatgcagcggcctggcgtaggtc

SEQ ID NO: 693971 - DNA, 75 bp, synthetic construct
  source 1..75: mol_type = other DNA
tctctttcgtcagttcagttttatatctataatctttctggctatttattctaccaatgttaaaaataaaagtat

SEQ ID NO: 693972 - DNA, 75 bp, synthetic construct
  source 1..75: mol_type = other DNA
acttcattaaacgttttaagtctgtaagctgtttatttacggcaagcattcttttcccgatgccaatctctgcgg

SEQ ID NO: 693973 - DNA, 75 bp, synthetic construct
  source 1..75: mol_type = other DNA
tgtctgacggaaatgtgaaagcaatgattattgccgagcataaaaacatgggactcccggcaccggagttttcct

SEQ ID NO: 693974 - DNA, 75 bp, synthetic construct
  source 1..75: mol_type = other DNA
agtgcgagctctggtgtttacctgaaagatgcaagaattacatccaccaatggcaatatcacggctaacggtact

SEQ ID NO: 693975 - DNA, 75 bp, synthetic construct
  source 1..75: mol_type = other DNA
gaactggttgtgcaaaacgtatcaacaattgcctctcatacagcaacaaatcggccctcaccagaagcgattatg

SEQ ID NO: 693976 - DNA, 75 bp, synthetic construct
  source 1..75: mol_type = other DNA
ctcatgcctctacagcaaatcgtccaacgccggaagagatcatggcgaattatcgtctggatgaaaacttacagg

SEQ ID NO: 693977 - DNA, 75 bp, synthetic construct
  source 1..75: mol_type = other DNA
acgttattaccgaatacgaatcactgtcagccgaaggcgaagtccccaactatgcaaaacgttgggtggcttccg

SEQ ID NO: 693978 - DNA, 75 bp, synthetic construct
  source 1..75: mol_type = other DNA
agagagtttggttggttatcagcgtccagaagtacgtaaccatattcgcgaaattcagcgctatattgagagcaa

SEQ ID NO: 693979 - DNA, 75 bp, synthetic construct
  source 1..75: mol_type = other DNA
ttaccaacgatgtggtattactccgacaccggtggcgatgcgtggaggatatgatggcgctgttctttcacaaaa

SEQ ID NO: 693980 - DNA, 75 bp, synthetic construct
  source 1..75: mol_type = other DNA
ccggaagtccgaagccatattaaggaaatccagcgctatattgaaagcgcgaacccgatgatcccaaacccggtg

SEQ ID NO: 693981 - DNA, 75 bp, synthetic construct
  source 1..75: mol_type = other DNA
taaaaagcctcgctattcccgcttgttacatggcgttggtattcttgcacttggcagcttgatggatgaaatcga

SEQ ID NO: 693982 - DNA, 75 bp, synthetic construct
  source 1..75: mol_type = other DNA
tggagtggtggcgtgtggaacttcggtacggatattgatggtcagcctatcgtccgtaaatggaatgaactgcag

SEQ ID NO: 693983 - DNA, 75 bp, synthetic construct
  source 1..75: mol_type = other DNA
ttccttcgctgttggctcaacgactgaacttcggggaaggtccacttgcggggcgcatcaaaacggcaaccaatc

SEQ ID NO: 693984 - DNA, 75 bp, synthetic construct
  source 1..75: mol_type = other DNA
ctgaaatatatgctttataacggttgggctattgtcattgccaatatcattctttttgccttgctgtttcaggta

SEQ ID NO: 693985 - DNA, 75 bp, synthetic construct
  source 1..75: mol_type = other DNA
gccactgttggtctgatcattatgcttggcgccggtgtcggtgaagtggcaacacgtaccggagccgccgttgag

SEQ ID NO: 693986 - DNA, 75 bp, synthetic construct
  source 1..75: mol_type = other DNA
ggtgctgatgacggaaaaaacgacaccattcacattttatgttcgcacggaaggtggtctggtggtgtcggtcat

SEQ ID NO: 693987 - DNA, 75 bp, synthetic construct
  source 1..75: mol_type = other DNA
tccgtccattccgcggcagaaaagccagtacgaagcacaatcagcgctggtgtcttcgcccggtaacggcagcgg

SEQ ID NO: 693988 - DNA, 75 bp, synthetic construct
  source 1..75: mol_type = other DNA
cgagcaagcggcaaatatggcgcgtggatgggcctcttctcaggcttcaggcgcaatgacagactggtgtcacga

SEQ ID NO: 693989 - DNA, 75 bp, synthetic construct
  source 1..75: mol_type = other DNA
aactactatcgcgaccagttgttgagttttgatgaggagcaggaaaaacctatttatctggaaaaattgctggat

SEQ ID NO: 693990 - DNA, 75 bp, synthetic construct
  source 1..75: mol_type = other DNA
cggtgagtccggcatcagcatacgaacccgcgattatcccagaactgactgctgattcgccccgccgcttagggg

SEQ ID NO: 693991 - DNA, 75 bp, synthetic construct
  source 1..75: mol_type = other DNA
tgttgttggggcggcggaatgttatttcagcaacgtgtgtctgtatctttcttttgttaagtgcattctatgctc

SEQ ID NO: 693992 - DNA, 75 bp, synthetic construct
  source 1..75: mol_type = other DNA
cggttgggatgatttacgggaaaataaacaacagttttattgcgtctgtaatgcagacaaatataaatgaggcag

SEQ ID NO: 693993 - DNA, 75 bp, synthetic construct
  source 1..75: mol_type = other DNA
cttttgttaagtgcattctatgctccggttgggatgatttacggaaaaataaacaacagttttattgcgtctgta

SEQ ID NO: 693994 - DNA, 75 bp, synthetic construct
  source 1..75: mol_type = other DNA
tgttgtggttgggaataatgcaacattttacttaatttcattcttgggtatcatcggcactataactttattttt

SEQ ID NO: 693995 - DNA, 75 bp, synthetic construct
  source 1..75: mol_type = other DNA
ggcatttattgattatcacggtcttcgtaatagcgataagacggtcatgatcacacgcgctcatctggaagaatt

SEQ ID NO: 693996 - DNA, 75 bp, synthetic construct
  source 1..75: mol_type = other DNA
gaccaagattgaccgcttaggaagggataacattgacgtacagaagaccgtcacaatgttacttgatatgggtgt

SEQ ID NO: 693997 - DNA, 75 bp, synthetic construct
  source 1..75: mol_type = other DNA
accgtattaaagagcacccatatacccgtgggggtgggcatatcgacaactaaaactttggcattatacagtgat

SEQ ID NO: 693998 - DNA, 75 bp, synthetic construct
  source 1..75: mol_type = other DNA
ttcttgatttacccggaattagcaaagctgagctagttgataaaacttgctataaagacaggcaagggtcttatg

SEQ ID NO: 693999 - DNA, 75 bp, synthetic construct
  source 1..75: mol_type = other DNA
aatggtgaacatgatgtcccgattatgactttaccggaagagcctctacttacaggaaaggcagattcagcgttt

SEQ ID NO: 694000 - DNA, 75 bp, synthetic construct
  source 1..75: mol_type = other DNA
gtgtcttgtattaaagaaaaatcaaaatatgcttttgagagagcaaaacagttttattttatgttgtggtgtaaa

SEQ ID NO: 694001 - DNA, 75 bp, synthetic construct
  source 1..75: mol_type = other DNA
atgacgacgcctttcaacggcacaaaatttcccctctctccactcgcttgtctggtggcgttcagtctgctgccc

SEQ ID NO: 694002 - DNA, 75 bp, synthetic construct
  source 1..75: mol_type = other DNA
acggtgctacaacgtacccatcttactgttggcgtggggatcgcccagaccaaaacgctggctttatacagtgat

SEQ ID NO: 694003 - DNA, 75 bp, synthetic construct
  source 1..75: mol_type = other DNA
cttgctccggcacattcgagcgtaacggaatgcctccttgaagtagcatatgcgctggaaattaataatccggga

SEQ ID NO: 694004 - DNA, 75 bp, synthetic construct
  source 1..75: mol_type = other DNA
aaaactatgcgcaactacgggcgcatgaaaaaccagttcaccgtaagcattaaccaaccgctacgctttgggaag

SEQ ID NO: 694005 - DNA, 75 bp, synthetic construct
  source 1..75: mol_type = other DNA
acgatatttccccttccggctacggcaacgacctgttagtcactatcgaggaagcagatggttcgcgtcgcactt

SEQ ID NO: 694006 - DNA, 75 bp, synthetic construct
  source 1..75: mol_type = other DNA
ggcgcatcggcccagacgctggaaaacaccgtgccccaggttatcgagcaaaatatgaccggcctcgataatctc

SEQ ID NO: 694007 - DNA, 75 bp, synthetic construct
  source 1..75: mol_type = other DNA
cggccgatgaacgtcgtgccgtaactgtcgagtccgtcgtggcgcttgccggttcacaaaacccaagcgagataa

SEQ ID NO: 694008 - DNA, 75 bp, synthetic construct
  source 1..75: mol_type = other DNA
tacgtaaaacggatctgccgggaaaccgcacgttgccgcaaggctgttttttctacgaacgttgcccccttgcaa

SEQ ID NO: 694009 - DNA, 75 bp, synthetic construct
  source 1..75: mol_type = other DNA
atcgccattgccagagcactctcttcgcagcctgacgtgattgtgcttgatgagccaacctctgcgctggatatc

SEQ ID NO: 694010 - DNA, 75 bp, synthetic construct
  source 1..75: mol_type = other DNA
gccttcctcggcaagatgggcatcagttacaacgatcgggagagggcgattgagttgctgtctgagtacgcgtta

SEQ ID NO: 694011 - DNA, 75 bp, synthetic construct
  source 1..75: mol_type = other DNA
gttccggtaaaactaggtgaagttgtaggaaaatcatttattaatagtctatctgggggtagtaggagaaatggc

SEQ ID NO: 694012 - DNA, 75 bp, synthetic construct
  source 1..75: mol_type = other DNA
ccgatgttgatgatgcgctaaaaaataaaattcagcaatcaattaatgccttacatcaacatggcatggtttctg

SEQ ID NO: 694013 - DNA, 75 bp, synthetic construct
  source 1..75: mol_type = other DNA
gaacatggagcgtattaaagcttcaaagcccggaggcgattggcatgattggccgatacacttgagagcaccttg

SEQ ID NO: 694014 - DNA, 75 bp, synthetic construct
  source 1..75: mol_type = other DNA
aaaagatgacaaatgggcattattatattctttttcgcggttaattgatgaaacgcaaccctctatcgtcacgat

SEQ ID NO: 694015 - DNA, 75 bp, synthetic construct
  source 1..75: mol_type = other DNA
caagacataaccgttttgaagggtgaacagatcctcagtcattttaaagattcagatgtaacgattttagctgga

SEQ ID NO: 694016 - DNA, 75 bp, synthetic construct
  source 1..75: mol_type = other DNA
caccacaggaaaagacggtggtcagcattgccgttgatcctgagtctccggaatctttcatgaaacgacctaaaa

SEQ ID NO: 694017 - DNA, 75 bp, synthetic construct
  source 1..75: mol_type = other DNA
attgaatttgccattgattacctgaagaacaataaaaagcaggggctgatgaagtgcattggtcgttgcatggga

SEQ ID NO: 694018 - DNA, 75 bp, synthetic construct
  source 1..75: mol_type = other DNA
tcaggtagctgctgagattgaagcgctggccagtggtgctgacaaggatgcagttgtgcgggagaccgttcttcg

SEQ ID NO: 694019 - DNA, 75 bp, synthetic construct
  source 1..75: mol_type = other DNA
attctgagaacggagctgcatgaagagttaagaaaaactcgaaaaacaattgtatttattttaaaattaataggt

SEQ ID NO: 694020 - DNA, 75 bp, synthetic construct
  source 1..75: mol_type = other DNA
acagccgtagctttcctattttccctgctgtatccggccttacaggcagatctgagttcatgattaacattgaag

SEQ ID NO: 694021 - DNA, 75 bp, synthetic construct
  source 1..75: mol_type = other DNA
agtattagctacgaaggaaaaccgatcagcaaaaacgtaacagtatatgggctggagaacgtccgtatacagctc

SEQ ID NO: 694022 - DNA, 75 bp, synthetic construct
  source 1..75: mol_type = other DNA
ccctttttcaccacgctggatacggtcacgttttacatccttgtcgcgctggtcaacggactggtgctgatcggc

SEQ ID NO: 694023 - DNA, 75 bp, synthetic construct
  source 1..75: mol_type = other DNA
cgctgtaccgtcagtcagaaatctatgcccgccagggcgtggagctgcaccgcaatacgatggggcgctgggttg

SEQ ID NO: 694024 - DNA, 75 bp, synthetic construct
  source 1..75: mol_type = other DNA
gcgcggtctgccgtccggagtcgttcctgccgttcgccagccgctggcggaggataaatcattactgccgttttt

SEQ ID NO: 694025 - DNA, 75 bp, synthetic construct
  source 1..75: mol_type = other DNA
aaaaaaatagccagaaacagtgccgcattcactaccagataccgccctctcccaccatgacgggcaaaactatcg

SEQ ID NO: 694026 - DNA, 75 bp, synthetic construct
  source 1..75: mol_type = other DNA
cactggccgtccaccacagtatcaactggagatagcatcaaagctaatagcagctgataaggccagagctgactt

SEQ ID NO: 694027 - DNA, 75 bp, synthetic construct
  source 1..75: mol_type = other DNA
gcagggcagggagcttatgatgcgcaggttaaaaacgatgagcaggatgttgaactagcagaccatgaattacgg

SEQ ID NO: 694028 - DNA, 75 bp, synthetic construct
  source 1..75: mol_type = other DNA
ctggatgtcagactaaccacggctgaaggtgaaatagtcaccttgcaggctgatgtcagtgctctcgatggtaga

SEQ ID NO: 694029 - DNA, 75 bp, synthetic construct
  source 1..75: mol_type = other DNA
tctcctcgtattatgcaatcacaacagagcggtggactacggcatacactggcccaacagctcatgccacagtat

SEQ ID NO: 694030 - DNA, 75 bp, synthetic construct
  source 1..75: mol_type = other DNA
atactgccgcgtggtctcggaactgttaacctttacctcctacggttgcgataaatcaacggtaacggtttctcc

SEQ ID NO: 694031 - DNA, 75 bp, synthetic construct
  source 1..75: mol_type = other DNA
actttatattactatgttacggtattaacgccaaaagaagtcgcttatggtcaatacaatgcaacacgcgcgggg

SEQ ID NO: 694032 - DNA, 75 bp, synthetic construct
  source 1..75: mol_type = other DNA
ccagtaacgcacgtttcacgcgacgaactccaggcattacacattgctcgggatgaagaactaccagctgttact

SEQ ID NO: 694033 - DNA, 75 bp, synthetic construct
  source 1..75: mol_type = other DNA
atgaacaggcaacggctgaaacaatggaaccggatgcaactgaacatcatcagaacacgcagccgctggatgctc

SEQ ID NO: 694034 - DNA, 75 bp, synthetic construct
  source 1..75: mol_type = other DNA
atgaacaccgataaacaagtttacccactgtattacgaagcaaaaaatgacaaagtaagaaaacgtctcggtatt

SEQ ID NO: 694035 - DNA, 75 bp, synthetic construct
  source 1..75: mol_type = other DNA
ggacaggcagagaccgttgccagcaccgagttcagaagcagtgaggaagccataagtgcaggtgacacgctggct

SEQ ID NO: 694036 - DNA, 75 bp, synthetic construct
  source 1..75: mol_type = other DNA
atggttgctacccgatgggaagacctgcgcgatgcttcgttccggggcgtctccttctatctggtcgataacgaa

SEQ ID NO: 694037 - DNA, 75 bp, synthetic construct
  source 1..75: mol_type = other DNA
ggtgatatgggcgagatcaaggttaataacaacactatttatagtgataatccagaaaagctcgatcttgaaaat

SEQ ID NO: 694038 - DNA, 75 bp, synthetic construct
  source 1..75: mol_type = other DNA
tctccgaacacacaacttggcccgcgcgtgattgtagaacgtaatttacctagtggaacttactcactccgacaa

SEQ ID NO: 694039 - DNA, 75 bp, synthetic construct
  source 1..75: mol_type = other DNA
gatgaacagcccgtgtctgttcgaactccagatggaattatcgctaccggatgcgataaattaggttgttatatc

SEQ ID NO: 694040 - DNA, 75 bp, synthetic construct
  source 1..75: mol_type = other DNA
gaacctctttggtcaatgcgggtttatgatcagatccgcaaccggtggcagggagatcagttttccggttcttca

SEQ ID NO: 694041 - DNA, 75 bp, synthetic construct
  source 1..75: mol_type = other DNA
attctttgtcaacaggtgcatgctattttcggtaaacagtccgatgcgctgcgtcagcttctggatgaacatttt

SEQ ID NO: 694042 - DNA, 75 bp, synthetic construct
  source 1..75: mol_type = other DNA
ggtgatgttcaaaaaattagcctcgtgctctatacgcgaggcggcgacactttaacagcatggagccttgtaaac

SEQ ID NO: 694043 - DNA, 75 bp, synthetic construct
  source 1..75: mol_type = other DNA
atgcgcaactggaacaagcacgcaattcaaaagtattatgctatgtaacaggtgatagaccaaaccaagaagctc

SEQ ID NO: 694044 - DNA, 75 bp, synthetic construct
  source 1..75: mol_type = other DNA
cctgatgcaatcgtaactctgggggtggtattcgcagtagcgtttgttgtgttctcaatttgtcgatggggataa

SEQ ID NO: 694045 - DNA, 75 bp, synthetic construct
  source 1..75: mol_type = other DNA
cgtcgttgccatggactcagccgaagatgtctatcgcaccgcgcttgagcaaagcggcgtggatatctccggcgt

SEQ ID NO: 694046 - DNA, 75 bp, synthetic construct
  source 1..75: mol_type = other DNA
gcgtctcgatgcggagtgtatcgatgatgtgatcctcggctgtgctaatcaggcgggagaagataaccgtaacgt

SEQ ID NO: 694047 - DNA, 75 bp, synthetic construct
  source 1..75: mol_type = other DNA
aaaaagaggagcgccgccacccggactctcctgatgggattgtggttgcagcatcaaagaacaggtcatttgccg

SEQ ID NO: 694048 - DNA, 75 bp, synthetic construct
  source 1..75: mol_type = other DNA
gtgcataccgacacggaagataacccgttcagcggtgggttgttcagccagtttggtctgtcagacacactgtac

SEQ ID NO: 694049 - DNA, 75 bp, synthetic construct
  source 1..75: mol_type = other DNA
aaatctcactctgagagggtgattgatccactctccaaggccagtgaagaaaataccggaggacaaaaaagccag

SEQ ID NO: 694050 - DNA, 75 bp, synthetic construct
  source 1..75: mol_type = other DNA
ttcttgatgcttccttggaggctgttaaaaggctgaaaactaagcttgataaaactgatggttcgttagatttaa

SEQ ID NO: 694051 - DNA, 75 bp, synthetic construct
  source 1..75: mol_type = other DNA
gataaacatcgaatagaaaaagctttctctttacctaagccaaaacttggatttggtaaagatgtaatacctcgt

SEQ ID NO: 694052 - DNA, 75 bp, synthetic construct
  source 1..75: mol_type = other DNA
tgtcgatgattaatgaattgcgtcagggagaattggatttcaccatcaataccattatcagggaccgtacgacca

SEQ ID NO: 694053 - DNA, 75 bp, synthetic construct
  source 1..75: mol_type = other DNA
gacccccacacgtcatccggtaaccgataaagagttacatgatatcgtggtgaaggtgaataccagcagtcggca

SEQ ID NO: 694054 - DNA, 75 bp, synthetic construct
  source 1..75: mol_type = other DNA
aaaacgcaccgaacaggtgaatcagcaactgatggagcgcatcacgctggctaacgaagcgggcgggattggcat

SEQ ID NO: 694055 - DNA, 75 bp, synthetic construct
  source 1..75: mol_type = other DNA
ttttcttttttgtttactattaggttttaaggggaaacatacggacgatgagactggcataattgctaactatat

SEQ ID NO: 694056 - DNA, 75 bp, synthetic construct
  source 1..75: mol_type = other DNA
caggctgaggcccacctcaatgagcaatctcagcaacagttaatagaacttgaaaagattctttttggaaaatga

SEQ ID NO: 694057 - DNA, 75 bp, synthetic construct
  source 1..75: mol_type = other DNA
cgttacaccatagtcagttgacagcaaccatcgatcaatttaaccccgtgtttaattcatcgtcacaaattatgg

SEQ ID NO: 694058 - DNA, 75 bp, synthetic construct
  source 1..75: mol_type = other DNA
ggttttatgcaatttatccgccgtctcggctaccgggtaacaccaccttctgataatatgaaatcgacggtctga

SEQ ID NO: 694059 - DNA, 75 bp, synthetic construct
  source 1..75: mol_type = other DNA
caatttatattaagtttaatcttgatgtcggagatgggtttcctgttgacacgggagataggaaaacttattcag

SEQ ID NO: 694060 - DNA, 75 bp, synthetic construct
  source 1..75: mol_type = other DNA
ttaccgcgaaatatgtccgcgtgaaggaggaagcactacagcctggagaagtccaaagcaaagccatatttgctg

SEQ ID NO: 694061 - DNA, 75 bp, synthetic construct
  source 1..75: mol_type = other DNA
gcaacgttgtctccgacggtcatcacagggccggacggcacggtggagatcagtgtcaccagccagacggcggga

SEQ ID NO: 694062 - DNA, 75 bp, synthetic construct
  source 1..75: mol_type = other DNA
tacacagcaaaacatgcccctgaacttcacgaacatttcattctagctgagacattcaaggattattttaaagag

SEQ ID NO: 694063 - DNA, 75 bp, synthetic construct
  source 1..75: mol_type = other DNA
cggtcgctgaagttgaaacgcaggttatcaccatccctgaaattagggatagcagaatagccgcgccaaccatcc

SEQ ID NO: 694064 - DNA, 75 bp, synthetic construct
  source 1..75: mol_type = other DNA
gccatgtttccattaataccttctcgcagatgacgctgcacagcatgcagcgcggcaaaattatgacctggcctg

SEQ ID NO: 694065 - DNA, 75 bp, synthetic construct
  source 1..75: mol_type = other DNA
gtgtatgaccgtgactatggctggaatgacaatggcgacctggtgcgcatcagcggcccgcggcagacgcgggaa

SEQ ID NO: 694066 - DNA, 75 bp, synthetic construct
  source 1..75: mol_type = other DNA
catcacctgtaccagccgtaccgcctgccggggcagcagtacgatgatgaatcggggctgtgctataaccgtaac

SEQ ID NO: 694067 - DNA, 75 bp, synthetic construct
  source 1..75: mol_type = other DNA
agccgcccactctagcaatggttcagacgagatttccctcaatgaaacactctggttaatcaaagaagcttattt

SEQ ID NO: 694068 - DNA, 75 bp, synthetic construct
  source 1..75: mol_type = other DNA
tggaaattgagcacagcactgggattaaaagcgggttaacccggatgaagaatttttgtgactatgctccacggc

SEQ ID NO: 694069 - DNA, 75 bp, synthetic construct
  source 1..75: mol_type = other DNA
agttattgaaagtttgcttgctcatacacctcaattttattggtgtaaactcgaccgcttagaggttattaatac

SEQ ID NO: 694070 - DNA, 75 bp, synthetic construct
  source 1..75: mol_type = other DNA
tgctgtatctgccgtggccttttactttcattattgtgctgttgatgtggagcgccgtgcgcctgccacgaatgg

SEQ ID NO: 694071 - DNA, 75 bp, synthetic construct
  source 1..75: mol_type = other DNA
atggcgatgttgtctgggcgttgcttgccgtctcactggtgcgccacacggatggcacgccgctctattttatcg

SEQ ID NO: 694072 - DNA, 75 bp, synthetic construct
  source 1..75: mol_type = other DNA
aatattccgccatcggcatggcattagtgggcaccgaggggcaatggctgcaatccaacaaagcgctctgccagt

SEQ ID NO: 694073 - DNA, 75 bp, synthetic construct
  source 1..75: mol_type = other DNA
agatgttgtccatcaatcagttgatatagagacaatcttacctactaaaggaatgacgattgaggaaaaaagacg

SEQ ID NO: 694074 - DNA, 75 bp, synthetic construct
  source 1..75: mol_type = other DNA
gaacaaaagcttagaattgcattattgcaagatccttatttcaatgcttttaaacttaagtttggttattccatt

SEQ ID NO: 694075 - DNA, 75 bp, synthetic construct
  source 1..75: mol_type = other DNA
tgttcgtcaaaaaggtgatagtggtgttttgaacaatgctgccatgttgcgtgacggtttagagcaaaatctttt

SEQ ID NO: 694076 - DNA, 75 bp, synthetic construct
  source 1..75: mol_type = other DNA
tttataactaaaggaattactcagtacctagaaagaattggtcgtgaattcgctattatggccccgacggggaaa

SEQ ID NO: 694077 - DNA, 75 bp, synthetic construct
  source 1..75: mol_type = other DNA
ataaatttttcgttgcagactcttattaagcaattactcgtaatgaaatctgttgaacaaaatgccggtgatgct

SEQ ID NO: 694078 - DNA, 75 bp, synthetic construct
  source 1..75: mol_type = other DNA
taaaatatgaaattactggccaggcggtgctccagatactgcgcatgaagataaatttttcattgcagactctta

SEQ ID NO: 694079 - DNA, 75 bp, synthetic construct
  source 1..75: mol_type = other DNA
atggaactgaaatacagacccgaaattgatgggttgagaacattagctgttttacctgttatcttttttcatgca

SEQ ID NO: 694080 - DNA, 75 bp, synthetic construct
  source 1..75: mol_type = other DNA
attatttttatcccgctttcaaagcgggagggcctattaaaagtctcggaaatatagccaaaactttcaatgaca

SEQ ID NO: 694081 - DNA, 75 bp, synthetic construct
  source 1..75: mol_type = other DNA
aatcgctatcgggacaacggaactgcattaccattccggtgccttacctcgattttttctcaggtgaccagcagg

SEQ ID NO: 694082 - DNA, 75 bp, synthetic construct
  source 1..75: mol_type = other DNA
cagtatcagtacatgcggcctgaaactctgtttgggccgaaaaaatttgagggttatctgcaaagcgggatccgc

SEQ ID NO: 694083 - DNA, 75 bp, synthetic construct
  source 1..75: mol_type = other DNA
gtggtgctgcgccgtatattgctgaaataatcaaaaatcccccggactgtgcgggaagtgtggtagctcatgcag

SEQ ID NO: 694084 - DNA, 75 bp, synthetic construct
  source 1..75: mol_type = other DNA
gtgctgaatggcgacaatacagacgaaaacaaacagccgaatctgggcaaggacgtggcgagcgctacggacaag

SEQ ID NO: 694085 - DNA, 75 bp, synthetic construct
  source 1..75: mol_type = other DNA
tccacgcagggccagaacaaaaggtaaggttgagcggatggtgaaatacctcaaggagaacttcttcgtccggta

SEQ ID NO: 694086 - DNA, 75 bp, synthetic construct
  source 1..75: mol_type = other DNA
agatagccgtattaataaaaatgtcatcgttctggctggaaatcatgaaatcaattttaatggtaactatactgc

SEQ ID NO: 694087 - DNA, 75 bp, synthetic construct
  source 1..75: mol_type = other DNA
tgttttaaaataaaactaagggcatctggtttccggcttatttataaagtcattgatgaagaaatagtcatatgg

SEQ ID NO: 694088 - DNA, 75 bp, synthetic construct
  source 1..75: mol_type = other DNA
catgaaggtgtgcccaccactgtggcgcacagggctgcgccagaacttccgtatcttccagaatgaggacatcga

SEQ ID NO: 694089 - DNA, 75 bp, synthetic construct
  source 1..75: mol_type = other DNA
ttaattaaaacgctcgatgtttgtaattatgactcagaaaggaaagttttaaccagtcatcacggaataataaga

SEQ ID NO: 694090 - DNA, 75 bp, synthetic construct
  source 1..75: mol_type = other DNA
accagacaataactatgtgataaaattatcgtctcccattaccgttacgattgagtgtaaggatggttattattt

SEQ ID NO: 694091 - DNA, 75 bp, synthetic construct
  source 1..75: mol_type = other DNA
ccgttctgactgccgcccactgggggcctatgctggttgaaaccgacggcgaaaccgtgtttagctcgcgtggcg

SEQ ID NO: 694092 - DNA, 75 bp, synthetic construct
  source 1..75: mol_type = other DNA
acacagttgcatatactgggtctgggtatcccatcatgctacatgcaactgacacagctaaaataagcgtcttta

SEQ ID NO: 694093 - DNA, 75 bp, synthetic construct
  source 1..75: mol_type = other DNA
ttcctgtatcgcaaccaatcatcattaacgctgctggttacccggtatataatggacagattgccaagttcgtaa

SEQ ID NO: 694094 - DNA, 75 bp, synthetic construct
  source 1..75: mol_type = other DNA
gaaagctgcagcgttcctgacatttactgtaaccggaagaatagtaaccctgacgagccagggggctggaacttt

SEQ ID NO: 694095 - DNA, 75 bp, synthetic construct
  source 1..75: mol_type = other DNA
gtgtagtttcctacatcagggcgtcaggtagcagcgatgttaaaattgagtcatcagaagatgatttatctgaca

SEQ ID NO: 694096 - DNA, 75 bp, synthetic construct
  source 1..75: mol_type = other DNA
gtagagaacgaagacggctctcacgttcctgtttcgcaaccaatcatcattaacgctgctggatatccggtatat

SEQ ID NO: 694097 - DNA, 75 bp, synthetic construct
  source 1..75: mol_type = other DNA
ttccaaagggaactggttactataattcaactatttttctgaaaaactccgttaggattgttggagagggaactg

SEQ ID NO: 694098 - DNA, 75 bp, synthetic construct
  source 1..75: mol_type = other DNA
gctcaatatccatcttgataacaagagtgatggaagctgtttgacaaatacagaactttttgccgttagacgtca

SEQ ID NO: 694099 - DNA, 75 bp, synthetic construct
  source 1..75: mol_type = other DNA
cccagctgcgtgaacagctcgatagcttaattaattctcatcaatcagcagaaaatgttgccattacggaggcag

SEQ ID NO: 694100 - DNA, 75 bp, synthetic construct
  source 1..75: mol_type = other DNA
gctgatctgcattgatccaatgcgatcggaaaccgtcgatttctttggcgataaaatggaatgggtggctccgca

SEQ ID NO: 694101 - DNA, 75 bp, synthetic construct
  source 1..75: mol_type = other DNA
acaggaacctatcttacaaagcttacgaatgtgtgggccaggaactgtcataatggttttaccaaaggaactggc

SEQ ID NO: 694102 - DNA, 75 bp, synthetic construct
  source 1..75: mol_type = other DNA
catcaacagacggcggcaaggtagcttttaatttctactcaacagtccctaattctactgggctggaaatgtcag

SEQ ID NO: 694103 - DNA, 75 bp, synthetic construct
  source 1..75: mol_type = other DNA
aggtgaaacacatcgtcatgctcgaggagatgaacaagaagggcgacttcatctacgtcgggcgtaaggatgaat

SEQ ID NO: 694104 - DNA, 75 bp, synthetic construct
  source 1..75: mol_type = other DNA
gcagctttacttacgatgataaataccggggccggatggtggcgcaccgtcacacgagccgaccggaaatccgtt

SEQ ID NO: 694105 - DNA, 75 bp, synthetic construct
  source 1..75: mol_type = other DNA
tgcgtagtggtgtttcttactacatcatcaacttaaagatgagtatgttatttactgaacagatagttaccatat

SEQ ID NO: 694106 - DNA, 75 bp, synthetic construct
  source 1..75: mol_type = other DNA
agggctctcttttgctatgactacttatctgaatttgtttgtgaaattgcttatttttctttatattcaaaatac

SEQ ID NO: 694107 - DNA, 75 bp, synthetic construct
  source 1..75: mol_type = other DNA
actgcattcccgtatcgcaaatatccacagggactaccttcacaaagtcacaacgaccgtcagcaaaaaccacgc

SEQ ID NO: 694108 - DNA, 75 bp, synthetic construct
  source 1..75: mol_type = other DNA
cgacgctgaaagagaaaatgagcgcctttcagttccagtttggtaagacggtgaaaagcgaaaaatgcacggtgc

SEQ ID NO: 694109 - DNA, 75 bp, synthetic construct
  source 1..75: mol_type = other DNA
acctgtgggggaatgtgagagttcaagttggtgataaagggtataacgacacctcagccatgctgggtgtgaagt

SEQ ID NO: 694110 - DNA, 75 bp, synthetic construct
  source 1..75: mol_type = other DNA
tggcattatggcggcagttaacaacatgctgatcgatatgctggctactatggcccgtcaggattatgagactcg

SEQ ID NO: 694111 - DNA, 75 bp, synthetic construct
  source 1..75: mol_type = other DNA
atgcttggaggcatttcgttaaaaacgaacgcgtcgatttcatgtctgaactattagttgtcaatcaatcttatg

SEQ ID NO: 694112 - DNA, 75 bp, synthetic construct
  source 1..75: mol_type = other DNA
atttgtacactcgtcagttttatcaaaattgaataaaataatcatgtattcagaatcaaatatctctgtttatta

SEQ ID NO: 694113 - DNA, 75 bp, synthetic construct
  source 1..75: mol_type = other DNA
ttggggtggtcgacttacaactcagtaataacagcggtaaatggcaggtgacgcaggcgaaagcggaagcacggc

SEQ ID NO: 694114 - DNA, 75 bp, synthetic construct
  source 1..75: mol_type = other DNA
catcaacaagatgaacaattagcaatggcatatatagccgctctgccgttcagcaggcctttagtttactgggat

SEQ ID NO: 694115 - DNA, 75 bp, synthetic construct
  source 1..75: mol_type = other DNA
taaataaaggaaacgaagaagttgaaggtacctggcctaacaaattgcaacctggaatatataaaaacatgggga

SEQ ID NO: 694116 - DNA, 75 bp, synthetic construct
  source 1..75: mol_type = other DNA
aacattttagcgacgtggcacgctcaaatggctacaagtaccgcgggacacgcggaaaccgggagtctgtctctg

SEQ ID NO: 694117 - DNA, 75 bp, synthetic construct
  source 1..75: mol_type = other DNA
ctggcgcgccacccgcaaactgcgtttaaaactcttcggcaagatagtaaaaagccgatgcctgaccgcaccggc

SEQ ID NO: 694118 - DNA, 75 bp, synthetic construct
  source 1..75: mol_type = other DNA
ttatcggcaatgcgggcatctgggatcacaatgcctcactggttaatactcccgcagagacgctcgaaaccggct

SEQ ID NO: 694119 - DNA, 75 bp, synthetic construct
  source 1..75: mol_type = other DNA
agtcgccagtctgcgtcagcgatttggcgaacatattctggcggtggaaggtaacgtgacctgttatgccgatta

SEQ ID NO: 694120 - DNA, 75 bp, synthetic construct
  source 1..75: mol_type = other DNA
agttttttagaaacttattatataagttttattacaaagtggtttgtgttaatgaaagtgacttgagtaaatttt

SEQ ID NO: 694121 - DNA, 75 bp, synthetic construct
  source 1..75: mol_type = other DNA
tctctgaaatgtttgaggagaatctatcacaaaatacaaaagacaaaataaaagcgtggaataaatgtttttttg

SEQ ID NO: 694122 - DNA, 75 bp, synthetic construct
  source 1..75: mol_type = other DNA
accatcaactccgaggcagatgatgctaaagggctggtggagaacctggtcaacaacatggatctgacgatctcc

SEQ ID NO: 694123 - DNA, 75 bp, synthetic construct
  source 1..75: mol_type = other DNA
gcgtctgtcgaagtatatctttgacgaagtgcaggcaggccgtcagcctaacctgtgggtgcggttcgactttgc

SEQ ID NO: 694124 - DNA, 75 bp, synthetic construct
  source 1..75: mol_type = other DNA
agccaagcgcaagatcgagaaggccaaggcgcaagtgcgagcgaaggtagagcccccgtttcgcgtgatcaagcg

SEQ ID NO: 694125 - DNA, 75 bp, synthetic construct
  source 1..75: mol_type = other DNA
cgggataccatcgtaacgacaacaccttggacgccaaccggtaaaaaagtaaaattcaagggcgtcgacctaagt

SEQ ID NO: 694126 - DNA, 75 bp, synthetic construct
  source 1..75: mol_type = other DNA
ggggagattttcccgttacacaggcagacgatcccgtcggggcgatggtttacagcctgtggcatatccgtgatg

SEQ ID NO: 694127 - DNA, 75 bp, synthetic construct
  source 1..75: mol_type = other DNA
ctaatattgatttgaaaacatggggtagtcaggcagatattcctgcaggcgaatatactgacaatgtgacaatca

SEQ ID NO: 694128 - DNA, 75 bp, synthetic construct
  source 1..75: mol_type = other DNA
atgtgcaatcccgtaggctggataagacgcggcaagcgtcgcatccggcaattgcaccgcgccactggcggatgc

SEQ ID NO: 694129 - DNA, 75 bp, synthetic construct
  source 1..75: mol_type = other DNA
tccagagtgtttgaaagggttttattcccagtgcgcaaaatatgattttattggctcgcggcgtgatggtggatt

SEQ ID NO: 694130 - DNA, 75 bp, synthetic construct
  source 1..75: mol_type = other DNA
tgttgtggttgggaataatgcaacattttacttaatttcattccttggtatcgtcggcactataactttattttt

SEQ ID NO: 694131 - DNA, 75 bp, synthetic construct
  source 1..75: mol_type = other DNA
gatattctggttaacaatgccggtatttgtaagctgaataaggtgctggacttcggtcgtgccgactgggatccg

SEQ ID NO: 694132 - DNA, 75 bp, synthetic construct
  source 1..75: mol_type = other DNA
tattacgctggcgacacgcagtaatccagaaaccaatcagcgcgttcttgatcaattccggcaaaccgttggggc

SEQ ID NO: 694133 - DNA, 75 bp, synthetic construct
  source 1..75: mol_type = other DNA
ctgggatccgatgattgatgtgaacctgaccgccgcattcgagttaagctatgaagcggcaaaattattaatatc

SEQ ID NO: 694134 - DNA, 75 bp, synthetic construct
  source 1..75: mol_type = other DNA
gcccagcgtcgtatgcgtgcggcgaagaaagtggtacgtaaaaagctgaccagtggcccggcgttgcctggcaaa

SEQ ID NO: 694135 - DNA, 75 bp, synthetic construct
  source 1..75: mol_type = other DNA
aaagatgctttcatcctgtggctgaaccagaacgttcaggcggctgaactgttggcagaaatggcgatttccagc

SEQ ID NO: 694136 - DNA, 75 bp, synthetic construct
  source 1..75: mol_type = other DNA
aaatggcgaaaaggtgcaggatttacaggttgtcggcacttgcggtaaacgcaataccggtaccagcgtgcactt

SEQ ID NO: 694137 - DNA, 75 bp, synthetic construct
  source 1..75: mol_type = other DNA
cgttattagggattatggcgcacagtgccctgtcgctgggcctggtggtcgttagtctgatgtctaacattcgtg

SEQ ID NO: 694138 - DNA, 75 bp, synthetic construct
  source 1..75: mol_type = other DNA
ttgtctggagattcagggggccagtctagttattattttattaattcctctggagataaatcagatataatttat

SEQ ID NO: 694139 - DNA, 75 bp, synthetic construct
  source 1..75: mol_type = other DNA
tcagatgaaagacccaattgatcctgaggaattagcaaatatttttaataaaaaacataaacaacacatggatga

SEQ ID NO: 694140 - DNA, 75 bp, synthetic construct
  source 1..75: mol_type = other DNA
aatcacccaacaatccagtagtaataattttctggaaagccttaagtcttctttaacccaccagcggctttgttg

SEQ ID NO: 694141 - DNA, 75 bp, synthetic construct
  source 1..75: mol_type = other DNA
tgaagtttgtcggcgcgttgattattacttcactgctgattattccagccgccacagcacgtcgcttcgcccgca

SEQ ID NO: 694142 - DNA, 75 bp, synthetic construct
  source 1..75: mol_type = other DNA
attacttggcgtcgcgtttggtttgttgctggacgtgaatccattctatgcggtaattgccgttacgctgctgct

SEQ ID NO: 694143 - DNA, 75 bp, synthetic construct
  source 1..75: mol_type = other DNA
tatgggatgacaccattacactattatgataatgccgtaagtgaaatggctgaaaataaacagaaagcccccttg

SEQ ID NO: 694144 - DNA, 75 bp, synthetic construct
  source 1..75: mol_type = other DNA
gcgagttccagtatccgatttaccgtatgccgccaaaacgtggtcgtctgccgtctcgtgcggagatctacgcag

SEQ ID NO: 694145 - DNA, 75 bp, synthetic construct
  source 1..75: mol_type = other DNA
aaaccttaaccacggatgtcgccgcgggtgtggggattgaaaactgggcacttggtgtagggctgtttgatatgt

SEQ ID NO: 694146 - DNA, 75 bp, synthetic construct
  source 1..75: mol_type = other DNA
tggaacgtatatcaatattctggataacgaattatcgaattttaagtttaatgagaacagcaaagacgagtttat

SEQ ID NO: 694147 - DNA, 75 bp, synthetic construct
  source 1..75: mol_type = other DNA
agggtggaaattcgttgctgctgcatctcgatgactgggaacatctggaccactatttccgccacccgctggcgc

SEQ ID NO: 694148 - DNA, 75 bp, synthetic construct
  source 1..75: mol_type = other DNA
atttcactctctatatcatcttttccattgcatttatgctgatcactctcctggtcatccttattgcaaaaccca

SEQ ID NO: 694149 - DNA, 75 bp, synthetic construct
  source 1..75: mol_type = other DNA
cactatactccgctcgcgttttcatgcaaccttttttttaccccgatcacggatttggcatgattttgaacaaaa

SEQ ID NO: 694150 - DNA, 75 bp, synthetic construct
  source 1..75: mol_type = other DNA
tatgggatgacaccattacactattatgataatgccgtaagtgaaatggctgaaaataaacagcaggacccctta

SEQ ID NO: 694151 - DNA, 75 bp, synthetic construct
  source 1..75: mol_type = other DNA
caggctgcccgaaatgttctgtattgacagacagggatatgtcgttgaagaagatattccgctgtcgctggttta

SEQ ID NO: 694152 - DNA, 75 bp, synthetic construct
  source 1..75: mol_type = other DNA
gtcgaacttgaccataaaacagtattgtcctttctgaatgatgtgaataacaggctgcccgaaatgttctgtatt

SEQ ID NO: 694153 - DNA, 75 bp, synthetic construct
  source 1..75: mol_type = other DNA
taagatccttaacacctgggaagtttcttccgacgaagtactggcctcgcaggaagtgcatgatatttcggtggc

SEQ ID NO: 694154 - DNA, 75 bp, synthetic construct
  source 1..75: mol_type = other DNA
ggtagttaacgccctgtcgaagcgcgtagaagttaacgtacgccgcgatggtcagatctataacatcgcctttga

SEQ ID NO: 694155 - DNA, 75 bp, synthetic construct
  source 1..75: mol_type = other DNA
tgcccgataattgggattccacacaatatagaatagctaaaacaagagttaaacagcagtataatgctgttgttc

SEQ ID NO: 694156 - DNA, 75 bp, synthetic construct
  source 1..75: mol_type = other DNA
catacgaaaagaaaaaaatgggagagctctacgctttattaaatgcaagagacatgatcttgaataagttgcata

SEQ ID NO: 694157 - DNA, 75 bp, synthetic construct
  source 1..75: mol_type = other DNA
tatgatggtcgggaaaatcctctgttatctctatctcagcccggaacggctggcgaatgaggggattttcaccca

SEQ ID NO: 694158 - DNA, 75 bp, synthetic construct
  source 1..75: mol_type = other DNA
ggattatatccatgaaactaccatccgctccttggatgaatatcctgtacactcagaacatcaggatttaaatta

SEQ ID NO: 694159 - DNA, 75 bp, synthetic construct
  source 1..75: mol_type = other DNA
agagttgatgttgtcattgttttacaataaaacagttattgcccggttaacattttcagtcattctgactcaaaa

SEQ ID NO: 694160 - DNA, 75 bp, synthetic construct
  source 1..75: mol_type = other DNA
cacacgatgcgctgttcaaactctttttacgccaaccggacacggctcgtgattttcttgcgtttcatttaccgg

SEQ ID NO: 694161 - DNA, 75 bp, synthetic construct
  source 1..75: mol_type = other DNA
gctggcgaatccgttatttccggcgctggatagcgccctgcgttcaggccgtcatattggcctcgacgaactgga

SEQ ID NO: 694162 - DNA, 75 bp, synthetic construct
  source 1..75: mol_type = other DNA
tgttccgttttggtgcggatgtgcgtgctggtgacgatccgcgcgaagcccaacgtcgcctgattcgcgatggtg

SEQ ID NO: 694163 - DNA, 75 bp, synthetic construct
  source 1..75: mol_type = other DNA
ttggttcgttactcagccgcgttttaattacagcccggaactgtcggctagctttcaacgggctgcaattgaaca

SEQ ID NO: 694164 - DNA, 75 bp, synthetic construct
  source 1..75: mol_type = other DNA
tcctctggacagaacgcggagcagcccgtcacgcaaaaatgctcgaaactgatcaggcatgggaagtgttcgaaa

SEQ ID NO: 694165 - DNA, 75 bp, synthetic construct
  source 1..75: mol_type = other DNA
gacgcggccttttcttttcgtgctggccagtatttgatggtagtgatggatgagcgcgacaaacgcccgttctca

SEQ ID NO: 694166 - DNA, 75 bp, synthetic construct
  source 1..75: mol_type = other DNA
atgttttctataagtaacttatcatttatcggtttccttaaaaggattgttttttcctcagattcactaccgggg

SEQ ID NO: 694167 - DNA, 75 bp, synthetic construct
  source 1..75: mol_type = other DNA
tctggccgtcagcgagcatagccatgtctttcgacaattaagatatcgatatcagaagagcaaaacctttgttgc

SEQ ID NO: 694168 - DNA, 75 bp, synthetic construct
  source 1..75: mol_type = other DNA
tcgcggaggatgcgcactatgtctaccgccacgatgaatacggcaggctggcggagaagacggaccgcatcccgg

SEQ ID NO: 694169 - DNA, 75 bp, synthetic construct
  source 1..75: mol_type = other DNA
ctggagttaattcaaaaacatattcgtcaacgcgacctgggtaatgactccaacttattgatagtgttttatgtt

SEQ ID NO: 694170 - DNA, 75 bp, synthetic construct
  source 1..75: mol_type = other DNA
aggcatcagggaaaagggttggagtttattatgtgaattattaaaacacgaaaacatggcttcatctgcatacaa

SEQ ID NO: 694171 - DNA, 75 bp, synthetic construct
  source 1..75: mol_type = other DNA
ctatttttggtgataaatatatccttactttgctaaattctatgcgaaatatggagggtaataaagatagtcgta

SEQ ID NO: 694172 - DNA, 75 bp, synthetic construct
  source 1..75: mol_type = other DNA
tcgctggaaggtaaatgaacatagtcctcagatggagaaaatatggttttacaatagtgaaccttctatagatat

SEQ ID NO: 694173 - DNA, 75 bp, synthetic construct
  source 1..75: mol_type = other DNA
cgatacagatggaagagtaggcgctatactttatgcattgctcgtttcagggcatataggcatccgggaagaggg

SEQ ID NO: 694174 - DNA, 75 bp, synthetic construct
  source 1..75: mol_type = other DNA
aaaagtttgataactatgttaaatctgtgttttcagaaatagatttttataaacactgtggtgtgattaacccac

SEQ ID NO: 694175 - DNA, 75 bp, synthetic construct
  source 1..75: mol_type = other DNA
gacatgatattgaatgagttgcacaaacatgttttttttaaaggacgatgcgataaccccttgtatcttccttgg

SEQ ID NO: 694176 - DNA, 75 bp, synthetic construct
  source 1..75: mol_type = other DNA
agcgacccacactctggcacaggcggcaggcaggctgaggatcccccggtttatccatatctctacgcctgcggt

SEQ ID NO: 694177 - DNA, 75 bp, synthetic construct
  source 1..75: mol_type = other DNA
tccccgtggtttgtttggcccccatgaccaggtaattgttcctcgtctgatgcagcaattgcaacagggcggcgg

SEQ ID NO: 694178 - DNA, 75 bp, synthetic construct
  source 1..75: mol_type = other DNA
atgactgggattggtaactgggtcattagtgtattaatcggatgtacagctggacctctgtggggggcaactcat

SEQ ID NO: 694179 - DNA, 75 bp, synthetic construct
  source 1..75: mol_type = other DNA
caaatagataacgattttggcctgcatatcatctatttcctgcaacatggtcgctggaaggtaaatgaacatagt

SEQ ID NO: 694180 - DNA, 75 bp, synthetic construct
  source 1..75: mol_type = other DNA
cgttgaaccatcgcagccaacttgatgcatggcaggaagcgttccagcaatccccctacaaagccccgcctaaaa

SEQ ID NO: 694181 - DNA, 75 bp, synthetic construct
  source 1..75: mol_type = other DNA
gtggcgctgaacaaagcggttccgctgatgtacaacgcactggcctccggcgaaatgctgccaaccactgaactt

SEQ ID NO: 694182 - DNA, 75 bp, synthetic construct
  source 1..75: mol_type = other DNA
tggcgaagggcgtaaacctgattggtgcgcttgtaccggatatggttgcaggcggtgtgactaaaaagctgggtg

SEQ ID NO: 694183 - DNA, 75 bp, synthetic construct
  source 1..75: mol_type = other DNA
cgaaaatcaacccgaaaatgccggacggcggttcggggatgaccaacgcggaagcggcggaaatcatgcagcgtg

SEQ ID NO: 694184 - DNA, 75 bp, synthetic construct
  source 1..75: mol_type = other DNA
gatgccggtccgacagcacaggagttaactgagcgtccacgcctgcccgctcccggcgatattcatcccggacag

SEQ ID NO: 694185 - DNA, 75 bp, synthetic construct
  source 1..75: mol_type = other DNA
cctcacgggcaaaggtgcacagtggcagaaggtgtggaaagagtttgttgaggacggaggtaaaaccggctggtt

SEQ ID NO: 694186 - DNA, 75 bp, synthetic construct
  source 1..75: mol_type = other DNA
ttgaatagagcgattaaatcacaccgttcatcggatatttctgtgaccattggacgtacgccgccggtattgcgt

SEQ ID NO: 694187 - DNA, 75 bp, synthetic construct
  source 1..75: mol_type = other DNA
cgtaagggcgtgacccgcacacctgaaggcaatctcatttcggatgttaaccgcagtgcggaagccaaaggcagc

SEQ ID NO: 694188 - DNA, 75 bp, synthetic construct
  source 1..75: mol_type = other DNA
gctgtgggagcaggttatctgcttggctcgcttaaccgcagcgtggcgggtgaggatgatgacggggttaactgg

SEQ ID NO: 694189 - DNA, 75 bp, synthetic construct
  source 1..75: mol_type = other DNA
gtaagatgtcgccgggtgcagttcgtgcgctgaatacgccgatgaccgaaggctatgatgattctgcggtctggg

SEQ ID NO: 694190 - DNA, 75 bp, synthetic construct
  source 1..75: mol_type = other DNA
gccgtatacgccagtctgcgtggtaaaaccctcacgggcaacggtgcgcagtggcagaaggtgtggaaagagttt

SEQ ID NO: 694191 - DNA, 75 bp, synthetic construct
  source 1..75: mol_type = other DNA
acggtaaactgaaagggctggataacttatccgccctggctgtagtcaaagacagccgttctgcaatgtcagccg

SEQ ID NO: 694192 - DNA, 75 bp, synthetic construct
  source 1..75: mol_type = other DNA
cacgcacagcttactgaccgtcagaaaatggacctggcaaaagagcgcgtggcggatgaggtgcgcgcgcagctg

SEQ ID NO: 694193 - DNA, 75 bp, synthetic construct
  source 1..75: mol_type = other DNA
gcaaccgatcctgaattgctggctgtgaatgccatggcggcaaaactgggtgacgcacaactgtttaatctggtg

SEQ ID NO: 694194 - DNA, 75 bp, synthetic construct
  source 1..75: mol_type = other DNA
tactggcaggtcttcactgatgacagacctgataccatgcgtgcgattgcagagcgtgttgatccggaaaccggt

SEQ ID NO: 694195 - DNA, 75 bp, synthetic construct
  source 1..75: mol_type = other DNA
tttggttcatcgacgattgaatatttctccctgactggtgcaaccactgttggtgccgctttgtatgtcgcacag

SEQ ID NO: 694196 - DNA, 75 bp, synthetic construct
  source 1..75: mol_type = other DNA
tggtgccgctttgtatgtcgcacagccatcgctgatggtgcagaaaggtattgccgggacttactgcaaaacgcc

SEQ ID NO: 694197 - DNA, 75 bp, synthetic construct
  source 1..75: mol_type = other DNA
aatgtcggcttcaaattgcgcgttatcacgaagtcacctgtcactctgtctggttgccagataaggattgagtaa

SEQ ID NO: 694198 - DNA, 75 bp, synthetic construct
  source 1..75: mol_type = other DNA
tgaaaggtgtcggcaaagatttccgaaacgccgactatatcgactatctgccagtgaatatgttggctacaccca

SEQ ID NO: 694199 - DNA, 75 bp, synthetic construct
  source 1..75: mol_type = other DNA
gtgaagtcggtgatgttgccggaagtggtcgtgtatcaatggcgcatggtcggacatcacaggcggtaggcgtta

SEQ ID NO: 694200 - DNA, 75 bp, synthetic construct
  source 1..75: mol_type = other DNA
cagcagccagtacgacaagcaacaggaacacctgctgtttactccactgttcaaagcggataacgccagagtgtt

SEQ ID NO: 694201 - DNA, 75 bp, synthetic construct
  source 1..75: mol_type = other DNA
gctgactatcccattactcatctttgccaccgccgcgatggacgcggcttccatgcatttgcccgttgacgggta

SEQ ID NO: 694202 - DNA, 75 bp, synthetic construct
  source 1..75: mol_type = other DNA
acagtgggacttaagcgcggtggtgtgctgctcagcattctcgtattaccgctgactatcccattactcatcttt

SEQ ID NO: 694203 - DNA, 75 bp, synthetic construct
  source 1..75: mol_type = other DNA
gcctaccgttactacgttcccctgaaaggtcaggatgttgacggtgtggtgtcactgccccgtacaggtaagggc

SEQ ID NO: 694204 - DNA, 75 bp, synthetic construct
  source 1..75: mol_type = other DNA
tatgcgttcatcagcaatccggcaacaggtgcgccgtctgtgtatatcatcggctctggtcaggtatcaccaatc

SEQ ID NO: 694205 - DNA, 75 bp, synthetic construct
  source 1..75: mol_type = other DNA
ttacgtgggcgttatgcgtggtcaaaagacggtactgattcatggtttatcactgaccttgaagacgaatcgcat

SEQ ID NO: 694206 - DNA, 75 bp, synthetic construct
  source 1..75: mol_type = other DNA
gtttgctgattcgtatgcgttcatcagcaatccggcaacaggtgcgccgtctgtgtatatcatcggctccggtca

SEQ ID NO: 694207 - DNA, 75 bp, synthetic construct
  source 1..75: mol_type = other DNA
ggtggcagcgggcgacctgaccgcttcacgtgctgccggtaatgttgttggtggtgtgcttggggcattcagtcc

SEQ ID NO: 694208 - DNA, 75 bp, synthetic construct
  source 1..75: mol_type = other DNA
caataaagtagagcagcgaacgctcgaaacgggagaaacatatggtgataaatggctggtgctaaacggcctgca

SEQ ID NO: 694209 - DNA, 75 bp, synthetic construct
  source 1..75: mol_type = other DNA
gcactggtttggttggtaatcaatttgcttaaccggttaagagagaagctggtaagccaaagggatcagcattaa

SEQ ID NO: 694210 - DNA, 75 bp, synthetic construct
  source 1..75: mol_type = other DNA
gacgataaatttgctgaatgcccttgtttggctggcgatcaatctggttaatcgagtaagggaaaaactcgttag

SEQ ID NO: 694211 - DNA, 75 bp, synthetic construct
  source 1..75: mol_type = other DNA
cagatgcagaagcagtatgaggaaatccgtcgtgagctggatgttctgaacaaacagcgcggtgatgaccagcgt

SEQ ID NO: 694212 - DNA, 75 bp, synthetic construct
  source 1..75: mol_type = other DNA
aatgtcgataatctgaccatctataccgagatcaacgggcgtcctgccgatcactggaacaccgccgatttacaa

SEQ ID NO: 694213 - DNA, 75 bp, synthetic construct
  source 1..75: mol_type = other DNA
cattgatgaagaaattgttatatgggtgattgctgtaggtaaacgagagcggagtaacgtttataatatcgccag

SEQ ID NO: 694214 - DNA, 75 bp, synthetic construct
  source 1..75: mol_type = other DNA
attattgcggtcgtcgcagtaggtaaacgtgaacgcagcaacgtttatcatctcgccagtgaacggatgaaataa

SEQ ID NO: 694215 - DNA, 75 bp, synthetic construct
  source 1..75: mol_type = other DNA
cgctgtatggcttgtaaagccacgggttacagcctcgaaacgacccgtactgcttacacgctgaatgcgctgtac

SEQ ID NO: 694216 - DNA, 75 bp, synthetic construct
  source 1..75: mol_type = other DNA
gccgtccgatgcgttttgccgcaccgccaagtaaaaacgtcaccaaagatgttttccatccggtgttcgacgtcg

SEQ ID NO: 694217 - DNA, 75 bp, synthetic construct
  source 1..75: mol_type = other DNA
gatatcccgttatgggataaagccaccttaatggtgagcggtcgttatgtctcagcaaatgaaagcgcatcggaa

SEQ ID NO: 694218 - DNA, 75 bp, synthetic construct
  source 1..75: mol_type = other DNA
gaatggcaatcgataacgctaagattaagtgtattgattcagtaaaaggcaccggggaatatatttaccgtgtta

SEQ ID NO: 694219 - DNA, 75 bp, synthetic construct
  source 1..75: mol_type = other DNA
tgaaaatcaattaattatcgctgttgtagctgtaggaaaacgtgaacatagtgatgtttataatcttgccagcga

SEQ ID NO: 694220 - DNA, 75 bp, synthetic construct
  source 1..75: mol_type = other DNA
tcaagagaataaaaatcctcaacctgaccgcagcacattgaaaactaaactgatcgcaattgtcgaattgttaga

SEQ ID NO: 694221 - DNA, 75 bp, synthetic construct
  source 1..75: mol_type = other DNA
gcgaagtcggtgatgtcgccggaagtggtcgtgtatcaatggcgcatggtcggacatcacaggcggtaggcgtta

SEQ ID NO: 694222 - DNA, 75 bp, synthetic construct
  source 1..75: mol_type = other DNA
ggaacacctgctgtttactccgttgttcaaagcggataacgccagagtgttcgaccttgaggttgagtcgtcaac

SEQ ID NO: 694223 - DNA, 75 bp, synthetic construct
  source 1..75: mol_type = other DNA
cacgcaaaacgcgtggacgtaatcttacatgctgaccagtcgttagaagttattgacgatgggcgcgggatgccg

SEQ ID NO: 694224 - DNA, 75 bp, synthetic construct
  source 1..75: mol_type = other DNA
gaaggacaacagcacgtcgttcagcctgggcgatgtattgccaactatggggaaaggtgtcgcccagtccgtccg

SEQ ID NO: 694225 - DNA, 75 bp, synthetic construct
  source 1..75: mol_type = other DNA
cgcgcggagtcgagtacaacatggcgcagaatgctgtatatcgcgtgtgtggcggcaagctgtataagggcgaaa

SEQ ID NO: 694226 - DNA, 75 bp, synthetic construct
  source 1..75: mol_type = other DNA
attgagaaaatcctccgctcctacactgctgatgaactggctgatggcgtgatggaatcgctgcggtttgatgcg

SEQ ID NO: 694227 - DNA, 75 bp, synthetic construct
  source 1..75: mol_type = other DNA
atcgcttaaatgcagagcccaccgtgtttcgcggatttaccacccatgaaatgtttgccgccgccggtgtcggtt

SEQ ID NO: 694228 - DNA, 75 bp, synthetic construct
  source 1..75: mol_type = other DNA
accgctgcttccgctgaccggctgggtgatgatcccgaccgggatgatggtcacgccgctgctgctgatctggtt

SEQ ID NO: 694229 - DNA, 75 bp, synthetic construct
  source 1..75: mol_type = other DNA
ctgttattcgtcagctatgaaatctgtctggcactttccttaggttatgcggcgacccgtcatcaggcaattgaa

SEQ ID NO: 694230 - DNA, 75 bp, synthetic construct
  source 1..75: mol_type = other DNA
gtcagatttataacatcgcctttgaaaatggcgaaaaggtgcaggatttacaggttgtcggcacttgcggtaaac

SEQ ID NO: 694231 - DNA, 75 bp, synthetic construct
  source 1..75: mol_type = other DNA
gatccgcagtttgccgggcagaccaaagagcgtctctcttcgcgtcaatgcgcggcattcgtttcaggcgtggtg

SEQ ID NO: 694232 - DNA, 75 bp, synthetic construct
  source 1..75: mol_type = other DNA
accagaacgttcaggcggctgaactgctggcggagatggcgatttccagcgcccagcgccgtatgcgtgcggcca

SEQ ID NO: 694233 - DNA, 75 bp, synthetic construct
  source 1..75: mol_type = other DNA
gttcccggaggatgcggaagtgccgcagacggacagtcgtgtggtgccgacgaagggggcagtggtccgggccgg

SEQ ID NO: 694234 - DNA, 75 bp, synthetic construct
  source 1..75: mol_type = other DNA
ttttgttaagtatggcttatttcattataggtggtttatttgcgtatttaaataaattggaactgccaatttatt

SEQ ID NO: 694235 - DNA, 75 bp, synthetic construct
  source 1..75: mol_type = other DNA
atacgtcactgggtcaagctacttttatgtatggtctcccatgggggattacggcatttggtggaattcagatgg

SEQ ID NO: 694236 - DNA, 75 bp, synthetic construct
  source 1..75: mol_type = other DNA
atggtgaattactgtcttatatcattggcgctgacactgaagcgggttatgtggatacgccccgcagacgtaacc

SEQ ID NO: 694237 - DNA, 75 bp, synthetic construct
  source 1..75: mol_type = other DNA
aggaaccacttcccgaactaatggtattgttggtgtgataatgaaggttaataatagctatgactggttagtatc

SEQ ID NO: 694238 - DNA, 75 bp, synthetic construct
  source 1..75: mol_type = other DNA
tttgcctttggcgaatcacttacgcttctgcttgtggtctggacactgaacggattttttcaaggctgggggtgg

SEQ ID NO: 694239 - DNA, 75 bp, synthetic construct
  source 1..75: mol_type = other DNA
cagttatattcgccagatgagtgctggtatatcaggaggtatggtgctccacaatgaaggtatcactcttggtca

SEQ ID NO: 694240 - DNA, 75 bp, synthetic construct
  source 1..75: mol_type = other DNA
actgctcaggtgtttacggtgccttacaccacaccggccattgcgcttcgtgagggatatatgaagtacagcatt

SEQ ID NO: 694241 - DNA, 75 bp, synthetic construct
  source 1..75: mol_type = other DNA
tccacaggccacggaaacataccagtttgcgtcacagcagttgctgctgagtattcctcaggtggccctgcgccc

SEQ ID NO: 694242 - DNA, 75 bp, synthetic construct
  source 1..75: mol_type = other DNA
acacaccatcggatatttttgacagtgtaccatttaggggcgtgatgctaagttctgatgaggatatggtgcctt

SEQ ID NO: 694243 - DNA, 75 bp, synthetic construct
  source 1..75: mol_type = other DNA
gcgtgtcaggaatctgacaacttggaataaatcatcaggtcagtctggaaagtgggaaagctcatatacacgggc

SEQ ID NO: 694244 - DNA, 75 bp, synthetic construct
  source 1..75: mol_type = other DNA
ctctttgaagaaggtggtcaacttccaggtatttatccggtggatatcatcctgaatggttctcatgttgactcc

SEQ ID NO: 694245 - DNA, 75 bp, synthetic construct
  source 1..75: mol_type = other DNA
atggtgaattaccgtcttatatcactggcgctgacaccttcaagttctttcccttcatccatcatcgtgcactgt

SEQ ID NO: 694246 - DNA, 75 bp, synthetic construct
  source 1..75: mol_type = other DNA
gtctggcgggcgtactctgcgcgatgctgctgcggcgtattcgcggcctgtactggccgttaacgctgattctgc

SEQ ID NO: 694247 - DNA, 75 bp, synthetic construct
  source 1..75: mol_type = other DNA
gggttatgtcatggagggcaatcaggttatctgcgtcgcctgcggagtgcatatttttattccgtctatcggcaa

SEQ ID NO: 694248 - DNA, 75 bp, synthetic construct
  source 1..75: mol_type = other DNA
ccctgctggcagtgtgcttttttaccgtgggctttttcgtctttggcccgcaaatgctgattggacttgcggcgg

SEQ ID NO: 694249 - DNA, 75 bp, synthetic construct
  source 1..75: mol_type = other DNA
cggtgcaggcgtcggaaaacctcggcggcgtgctcgatagcgccaatcataactatcggtgttattgcaggcggt

SEQ ID NO: 694250 - DNA, 75 bp, synthetic construct
  source 1..75: mol_type = other DNA
acaggcggttgtaatctcgaatgggctacctttttggcggctattctggctggctgtatcggtattcactggtct

SEQ ID NO: 694251 - DNA, 75 bp, synthetic construct
  source 1..75: mol_type = other DNA
tggatttctttctggccggtattccagcagccggttttgccatggtatttaatgtccccaggagagtattaatac

SEQ ID NO: 694252 - DNA, 75 bp, synthetic construct
  source 1..75: mol_type = other DNA
atgggctgaccatgcgaacagggcactggcgaacgccggttatcaggaagagatagaccatcgttcatacgagcg

SEQ ID NO: 694253 - DNA, 75 bp, synthetic construct
  source 1..75: mol_type = other DNA
cgaggctcccatgcctggtaacggggaaatgacctgttaccttctgcttcacaaccggaacggagaatatacgct

SEQ ID NO: 694254 - DNA, 75 bp, synthetic construct
  source 1..75: mol_type = other DNA
gtggctgaccttctgaatatcgtgcttcctgacaacgcaacttcgtacacactacgtgacatcatcgaagcgttg

SEQ ID NO: 694255 - DNA, 75 bp, synthetic construct
  source 1..75: mol_type = other DNA
ctggataaaggcgacattggcctgctgggttcgctgttttatctcagctacggattgtcgaaatttaccgccgga

SEQ ID NO: 694256 - DNA, 75 bp, synthetic construct
  source 1..75: mol_type = other DNA
gcctgaaaaaatcatcgccgttttcgtccggtttttcccgtattcccctgatgcaatgggttgcaccggaatacg

SEQ ID NO: 694257 - DNA, 75 bp, synthetic construct
  source 1..75: mol_type = other DNA
tttaatcgtacctgggacgaatggcggcgcgaggaagatgcacgaacacacgccaccgagaggagacatgatcgc

SEQ ID NO: 694258 - DNA, 75 bp, synthetic construct
  source 1..75: mol_type = other DNA
cctgataatacagaagtgtcgcaaacggataggcgtgttattccaactaagggagcattagtccaagcagaattt

SEQ ID NO: 694259 - DNA, 75 bp, synthetic construct
  source 1..75: mol_type = other DNA
gttgccccgccgaccttcatcatccagttgatggaatccatgctcccccaggtgggcggggattcggcacagtgg

SEQ ID NO: 694260 - DNA, 75 bp, synthetic construct
  source 1..75: mol_type = other DNA
cgcgtgggggccgccccggaggaatggctcttccgccagaccgcacagacatggggctcggaacgttacctgaag

SEQ ID NO: 694261 - DNA, 75 bp, synthetic construct
  source 1..75: mol_type = other DNA
ttaataaagatcaattaactaaccaagttgcattatattatcaacaacaaaacaaccttctcagtctgagcggac

SEQ ID NO: 694262 - DNA, 75 bp, synthetic construct
  source 1..75: mol_type = other DNA
agattggcgcaggaatgccaaaatatctgatagcaccggaagtctcactgcttctctcctacattgatgatctga

SEQ ID NO: 694263 - DNA, 75 bp, synthetic construct
  source 1..75: mol_type = other DNA
gcctgtgtgggacataacatcgagacagacaccgctgaactggataaacaccgcagtggcacgggcagggcgtga

SEQ ID NO: 694264 - DNA, 75 bp, synthetic construct
  source 1..75: mol_type = other DNA
ccaacagaacgttcattaaccatcatccgtcctaccgttatcttcggtgaacggaaccgcggtaacgtctataac

SEQ ID NO: 694265 - DNA, 75 bp, synthetic construct
  source 1..75: mol_type = other DNA
gcagacggtgaaatccggaacatacagcacgccgtacctgagctacatcaacgactacggcggacgtccggttct

SEQ ID NO: 694266 - DNA, 75 bp, synthetic construct
  source 1..75: mol_type = other DNA
acttttaacatgtctggcattaaaaacattaattatgttaaagttatcagaaaagaattggtatctatacgaaat

SEQ ID NO: 694267 - DNA, 75 bp, synthetic construct
  source 1..75: mol_type = other DNA
ttgatccagcaacacatctggcgcgcgaaatacacttccgtccggagttgttcaaatacaacgatgcgggtgttg

SEQ ID NO: 694268 - DNA, 75 bp, synthetic construct
  source 1..75: mol_type = other DNA
actcaggctgcagattttgataaccgtatctaccagatggaactgcaacggtacgagttacagaaagaactggtt

SEQ ID NO: 694269 - DNA, 75 bp, synthetic construct
  source 1..75: mol_type = other DNA
aactgaaggtgtcgctgcaggcgaggaaaaagaatcctgcactgccagagttctggtacgcccgggcggtgactt

SEQ ID NO: 694270 - DNA, 75 bp, synthetic construct
  source 1..75: mol_type = other DNA
tatggtgcggagcgaaaccgtgccggatctgttcgtcattcccggatcacggattccattacgctgtttgacaag

SEQ ID NO: 694271 - DNA, 75 bp, synthetic construct
  source 1..75: mol_type = other DNA
tgtttatctgattgacatcagtaaaagtacacgcaatggtattgtcactgataatcatcgccgggatatagaaaa

SEQ ID NO: 694272 - DNA, 75 bp, synthetic construct
  source 1..75: mol_type = other DNA
tcccgtggatatggggtggtaggttatgtatcaccataccaggaaaatgtcctcacactggatccgacgactttc

SEQ ID NO: 694273 - DNA, 75 bp, synthetic construct
  source 1..75: mol_type = other DNA
caggcgaggattgaggtgcgtcagaatggttaccttattcgcagtctgacggtggcgccgggggcatttgcactg

SEQ ID NO: 694274 - DNA, 75 bp, synthetic construct
  source 1..75: mol_type = other DNA
ataatgattcaagcaggatgaatgttgtttggtatgatacctatggtcagttccgaggagggtacagttatagtg

SEQ ID NO: 694275 - DNA, 75 bp, synthetic construct
  source 1..75: mol_type = other DNA
tcggggtgtctttaggaggtacatggaaggatatattctggtctgttagcggatcacgtaatcgtaatttagggg

SEQ ID NO: 694276 - DNA, 75 bp, synthetic construct
  source 1..75: mol_type = other DNA
tcgtctttactgggatatcagtgaagaaatggtgccaggtagcgagaacagctctgacaacagtcgcctgaatct

SEQ ID NO: 694277 - DNA, 75 bp, synthetic construct
  source 1..75: mol_type = other DNA
acaagtatttaccgtgccgtttaccacaccagctgttgcattgcgtgaaggatacatgaaatacaatgtgacaat

SEQ ID NO: 694278 - DNA, 75 bp, synthetic construct
  source 1..75: mol_type = other DNA
ttgccttacccactaggaatgttgggtggatattgctttgatatcctgagcaaaattacgggcaaaaatacgctg

SEQ ID NO: 694279 - DNA, 75 bp, synthetic construct
  source 1..75: mol_type = other DNA
tgcgtgcgccggaccataagtccatgcaaccgtggcatttttttgtgattgaaggggaagggcgcgagcgtttca

SEQ ID NO: 694280 - DNA, 75 bp, synthetic construct
  source 1..75: mol_type = other DNA
ggcaaaccgacgctgctggcggtggacgccgggcgtaagctgctgcatctggcatctaaaccgaccttcgccaac

SEQ ID NO: 694281 - DNA, 75 bp, synthetic construct
  source 1..75: mol_type = other DNA
gtattcatccagcgactataatacactttcggatgttcttgatacatatagcaatagcgattatttctacaatga

SEQ ID NO: 694282 - DNA, 75 bp, synthetic construct
  source 1..75: mol_type = other DNA
ctctctctggatccgataacttttcctgaaaatgcagaagtggcgcagacagaacgtagtgttgtaccgacgaaa

SEQ ID NO: 694283 - DNA, 75 bp, synthetic construct
  source 1..75: mol_type = other DNA
gtaaccgtgacatacacacagacagaccgctacgggcgcattcttggacgggtatataccgaagacggcatggaa

SEQ ID NO: 694284 - DNA, 75 bp, synthetic construct
  source 1..75: mol_type = other DNA
aacagtgacatgccgcgtcgttcagcgcttcttgatgaggtgcgctcaaaaccgtactggtcaacggatgttgaa

SEQ ID NO: 694285 - DNA, 75 bp, synthetic construct
  source 1..75: mol_type = other DNA
atccgtgaggccggactggaagagagcggtgtggtggatgcctggcagaacgcctaccgttactacgttcctctg

SEQ ID NO: 694286 - DNA, 75 bp, synthetic construct
  source 1..75: mol_type = other DNA
atcaacccgaaaatgccggacggcggttcggggatgaccaacgcggaagcggcggaaatcatgcagcgtgtgcgt

SEQ ID NO: 694287 - DNA, 75 bp, synthetic construct
  source 1..75: mol_type = other DNA
gtgcgcacacatcgtgacgagctggttaatcaggtgaaggcgctgcgtgaagtctcgcgtgaggagcagcgtaac

SEQ ID NO: 694288 - DNA, 75 bp, synthetic construct
  source 1..75: mol_type = other DNA
acacggcattgcgtgagaccgccggaatggatgtgtcaccgtgggagggcgtggctgacgcaacgatcgaaggtg

SEQ ID NO: 694289 - DNA, 75 bp, synthetic construct
  source 1..75: mol_type = other DNA
gccgtattactcccgcaccagcagtctgacgccggaagagacaattgcatcccgttttgttcgccagatgcagga

SEQ ID NO: 694290 - DNA, 75 bp, synthetic construct
  source 1..75: mol_type = other DNA
gatggtaaaaacgcggttactgatactgtcggtaaaggtctgaaggcaaccggtaaggctgtcagtgatggtgct

SEQ ID NO: 694291 - DNA, 75 bp, synthetic construct
  source 1..75: mol_type = other DNA
atcaacaaggtagcttcggtttacggtacggaaggaggaatgaataaggcaaatagtctggataaagccggatta

SEQ ID NO: 694292 - DNA, 75 bp, synthetic construct
  source 1..75: mol_type = other DNA
ctgcccgtgatgcacatgattatgtgcgcacacatcgtgatgagctggttaatcaggtgaaggcgctgcgtgaag

SEQ ID NO: 694293 - DNA, 75 bp, synthetic construct
  source 1..75: mol_type = other DNA
cgcgttttgtgcgccagatgcaggataaattccaggtgctgaaagctgttcaggagaatatccgtaaaactggcg

SEQ ID NO: 694294 - DNA, 75 bp, synthetic construct
  source 1..75: mol_type = other DNA
gtgaccttgaaggccagcagaaggaaatggatcgccttgtgtcgctggcgaagggcggatggaaaggccagagta

SEQ ID NO: 694295 - DNA, 75 bp, synthetic construct
  source 1..75: mol_type = other DNA
ccaattgcccaaaggggaacattcttatcgcggctctgttgataaaatactctatcctgaagatattcgcaaggg

SEQ ID NO: 694296 - DNA, 75 bp, synthetic construct
  source 1..75: mol_type = other DNA
cctgacaaaaggtaacggaccgggtgcgctggcgcacgaatggttccattcactggataattattttggtcgtta

SEQ ID NO: 694297 - DNA, 75 bp, synthetic construct
  source 1..75: mol_type = other DNA
ccgcgttcatgcgtgacccacgattccgtggtttcacgggggatgatacggaggtacaggcccgccttgcccgtg

SEQ ID NO: 694298 - DNA, 75 bp, synthetic construct
  source 1..75: mol_type = other DNA
gtcccgcaggttgaagcggttgcccgtggcgtgatgagtggcattaaggacagtgacctgaaggtccgcgtggtg

SEQ ID NO: 694299 - DNA, 75 bp, synthetic construct
  source 1..75: mol_type = other DNA
gaacagtatgctgatgcggatatggcacatgagggagacacgtctgccgttcatcgccgggaagccgccagccag

SEQ ID NO: 694300 - DNA, 75 bp, synthetic construct
  source 1..75: mol_type = other DNA
tcactatttactggggcgggcgtgagcagcaacatctgtacgatctttctgagcttgaggcgctttcgcttaagc

SEQ ID NO: 694301 - DNA, 75 bp, synthetic construct
  source 1..75: mol_type = other DNA
ccaaccggactcgcgacacattgctccgcgaagcagcaaaacttgatcccgccaactatatggtgcatagggcca

SEQ ID NO: 694302 - DNA, 75 bp, synthetic construct
  source 1..75: mol_type = other DNA
tctcgcgtgaggagcagcgtaacgccaccaaccgcgatcgtaccggaccagaacgccgcaagggggatgtttcgc

SEQ ID NO: 694303 - DNA, 75 bp, synthetic construct
  source 1..75: mol_type = other DNA
gatgttatcgagagactaccggaactgatgcacgatccggatgcaatttaccactcagcgacagaaagaaatgcg

SEQ ID NO: 694304 - DNA, 75 bp, synthetic construct
  source 1..75: mol_type = other DNA
ggcgatgtgactaaaaagctgggtgaagtcactctgcgaaaagtgctgaccgccgggctggagaaaaaatacatt

SEQ ID NO: 694305 - DNA, 75 bp, synthetic construct
  source 1..75: mol_type = other DNA
tgttgaaatggcggcgcgtgcctttgagcgttatgttcaggataaagcgcgtacggctggcgtggagaatgatta

SEQ ID NO: 694306 - DNA, 75 bp, synthetic construct
  source 1..75: mol_type = other DNA
cgcctgaggcgtacaaggcgtttgcatcctggctgaatgcgttctctggtggcagccagtaccattccggtgcgg

SEQ ID NO: 694307 - DNA, 75 bp, synthetic construct
  source 1..75: mol_type = other DNA
aaaaagaacggcaaaacgtactacatcaaactccatgatccgcgcctgatgcgtgcgatgaagaatatgggaccg

SEQ ID NO: 694308 - DNA, 75 bp, synthetic construct
  source 1..75: mol_type = other DNA
caatgtaccgcagaaaatcgcgcttgcagctgtgggagcgggttatctgcttggctcgcttaaccgcagtgtggc

SEQ ID NO: 694309 - DNA, 75 bp, synthetic construct
  source 1..75: mol_type = other DNA
ggggacaggggaaatggcccgtggactcggtgatgcgatgattcagagcccggtaaaaacaggggcacgtatttt

SEQ ID NO: 694310 - DNA, 75 bp, synthetic construct
  source 1..75: mol_type = other DNA
ggacgaatggcggcgcgaggaagatgcacgaacacacgccaccgagaggagacatgatcgcggttggtcacagtg

SEQ ID NO: 694311 - DNA, 75 bp, synthetic construct
  source 1..75: mol_type = other DNA
atacaatctccactccgtttcgattgtgtgcgccctgcggggctgaaagaaaactacaaaaaggcattacggcag

SEQ ID NO: 694312 - DNA, 75 bp, synthetic construct
  source 1..75: mol_type = other DNA
aggaagcgatgagccatgctgccagcctgaaaaaatcatcgccgttttcgtccggtttttcccgtattcccctga

SEQ ID NO: 694313 - DNA, 75 bp, synthetic construct
  source 1..75: mol_type = other DNA
aatgccggtatatgtaagctgaataaggtgctggacttcgggcgtgccgactgggatccgatgattgacgtgaac

SEQ ID NO: 694314 - DNA, 75 bp, synthetic construct
  source 1..75: mol_type = other DNA
cgcaaatgtctttattccaagtttcgtcaaagataacggcgaaacaaaggaaatgattgaaaaacagggtgttga

SEQ ID NO: 694315 - DNA, 75 bp, synthetic construct
  source 1..75: mol_type = other DNA
acctttgccgaaccgtcgcaggccgagcgtttagcgcaacgtttgcaacagggggggcggggatttcccagacgt

SEQ ID NO: 694316 - DNA, 75 bp, synthetic construct
  source 1..75: mol_type = other DNA
ggcgcagagtacggcgctgatgcagatgctggacaaacgcaccgcgctttccggcggtgcggtggaccgccagtt

SEQ ID NO: 694317 - DNA, 75 bp, synthetic construct
  source 1..75: mol_type = other DNA
atgcaggtcggacttacttcttcgtcactcgccaccggcagcgcgcatagcgctgcggtatcgtcgtcaaccgtt

SEQ ID NO: 694318 - DNA, 75 bp, synthetic construct
  source 1..75: mol_type = other DNA
cacctgggatgaatggcaacgtgatgaatatgcccgaacacacgccaccgagaggagacatgatcgcggttggtc

SEQ ID NO: 694319 - DNA, 75 bp, synthetic construct
  source 1..75: mol_type = other DNA
aagctgcgttttggcgtggtgttcgacgcctgcctgctgtgcggcgatcagggttatgtcatggagggcaatcag

SEQ ID NO: 694320 - DNA, 75 bp, synthetic construct
  source 1..75: mol_type = other DNA
ttagaaagcattaatcagcagcgtgcgcagatggcggtacagcaggaaaaggcgcggcagttgatcgacggcatg

SEQ ID NO: 694321 - DNA, 75 bp, synthetic construct
  source 1..75: mol_type = other DNA
acctcggcacgccgcagttgaaagcatctacgtcgattaacgtcccggacccgacgccgtttgtaacttatttct

SEQ ID NO: 694322 - DNA, 75 bp, synthetic construct
  source 1..75: mol_type = other DNA
ggcggggcttgtgctgtggtatcagtggcgttgtctgtcttcccgtcacgatgccccggataatgccggtgacga

SEQ ID NO: 694323 - DNA, 75 bp, synthetic construct
  source 1..75: mol_type = other DNA
cagaagccggagccattccggcagaggaatggctgcaggcgtgtgatgcagcgtccaggctccggtgcgtcagtg

SEQ ID NO: 694324 - DNA, 75 bp, synthetic construct
  source 1..75: mol_type = other DNA
gattcagcttctcaagttttccctgtagaattaatactgccaggtaaacgggctatgattgataaaccgaacagt

SEQ ID NO: 694325 - DNA, 75 bp, synthetic construct
  source 1..75: mol_type = other DNA
gaagcggcgcggcagaaagtctttatggtcgatcgctttggcctgctgaccgacaagatgccgaacctgctgcct

SEQ ID NO: 694326 - DNA, 75 bp, synthetic construct
  source 1..75: mol_type = other DNA
atcaccgccagtggtaaatacaccgtcagtgtgaaaaccgcaacggatggtagcgagacgccggcggccattctg

SEQ ID NO: 694327 - DNA, 75 bp, synthetic construct
  source 1..75: mol_type = other DNA
ctgcgccggaactgaaaacagcactacgtccgctggccatcttcctgaaagacagcgcccaggcacctttaacca

SEQ ID NO: 694328 - DNA, 75 bp, synthetic construct
  source 1..75: mol_type = other DNA
ccgacatgcttgaagaaagcaaccgagcttacgtcgcaacagcagaagaagctgagcgatatagggttgcaggtg

SEQ ID NO: 694329 - DNA, 75 bp, synthetic construct
  source 1..75: mol_type = other DNA
atgatcttggcattcgcaaaagcatactggaaacagttggttatcatggcgatgcttgctgttctggtcatatca

SEQ ID NO: 694330 - DNA, 75 bp, synthetic construct
  source 1..75: mol_type = other DNA
tgccacacgggtcacccgaaatatgttcctcgcatcagccagggcgctggcatcatttgaatgtaaagctcaggg

SEQ ID NO: 694331 - DNA, 75 bp, synthetic construct
  source 1..75: mol_type = other DNA
gccttcgataaggctctgtatagggcaaggaaagaactgaaaagtagattgcacaattcaacaaaacaggaagat

SEQ ID NO: 694332 - DNA, 75 bp, synthetic construct
  source 1..75: mol_type = other DNA
accggaaacagttgtttatcgtggcgatgcttgttgttctggtcatatccttagttgttgcctggaatgtacatg

SEQ ID NO: 694333 - DNA, 75 bp, synthetic construct
  source 1..75: mol_type = other DNA
gctgagcgatatagggttgcaggtgagtcctgtgagcagcagtatgacgcactgaaaaagcggggcaccattaac

SEQ ID NO: 694334 - DNA, 75 bp, synthetic construct
  source 1..75: mol_type = other DNA
cagatggaggatgcatacatcccggagcggaggctgcatctttaccactgcgaccaccggggactgccgctggcg

SEQ ID NO: 694335 - DNA, 75 bp, synthetic construct
  source 1..75: mol_type = other DNA
gagggggtaaaggaggaaagctaagcaattcaggaggacggcctaaaggtagttttaatattaattcctataact

SEQ ID NO: 694336 - DNA, 75 bp, synthetic construct
  source 1..75: mol_type = other DNA
gctgcggtttggtcctcgcagaagaaagtttggctgggtgtagaggggcaaatactctcacctcgaggtgatgcc

SEQ ID NO: 694337 - DNA, 75 bp, synthetic construct
  source 1..75: mol_type = other DNA
ggatgttttgattttatagtttttgatggtgaatggttcttcttagagatgaatgcaaatggtcaatgggcatgg

SEQ ID NO: 694338 - DNA, 75 bp, synthetic construct
  source 1..75: mol_type = other DNA
caacaggctgtacgtggtctgagaccaaatcatcaatgatgacacagcgtttatctgccaaaggaagacccagcc

SEQ ID NO: 694339 - DNA, 75 bp, synthetic construct
  source 1..75: mol_type = other DNA
ggcagtatgatgaccacggctggctgagagaaatcagccacctgagcgaaggccaccgtgtcgctgtccactacg

SEQ ID NO: 694340 - DNA, 75 bp, synthetic construct
  source 1..75: mol_type = other DNA
tttggccttgcgacgctggcggtattcaacttctcgctttaatgctgctgttacaaactgccctgtactttcacc

SEQ ID NO: 694341 - DNA, 75 bp, synthetic construct
  source 1..75: mol_type = other DNA
gagattataaaaactatgttgtcgtgttccttgagtggcatttaaacacgatttctggtccggcatttcacccgt

SEQ ID NO: 694342 - DNA, 75 bp, synthetic construct
  source 1..75: mol_type = other DNA
atgctccgatgccgtggtcagtgcgccaggagctgttacctgatctcaagtttttttcatcccaggatattccct

SEQ ID NO: 694343 - DNA, 75 bp, synthetic construct
  source 1..75: mol_type = other DNA
gcacagaaagattagatacggaattcctcgctgaatcgttgaaaggggctgctaagtatttccggattgcgggtt

SEQ ID NO: 694344 - DNA, 75 bp, synthetic construct
  source 1..75: mol_type = other DNA
gataaacgctttgacaagattatggatgagatgaatcggcggtttgacaaggttgatgataatacgaagtggcgt

SEQ ID NO: 694345 - DNA, 75 bp, synthetic construct
  source 1..75: mol_type = other DNA
gcagtgaaagccgggcgtggcttgcgcagtgcgggctgacggtggagcaactggccagacaggtggagccggaat

SEQ ID NO: 694346 - DNA, 75 bp, synthetic construct
  source 1..75: mol_type = other DNA
atttcaaatgcgcaggattctttgatttatatgtatgcagagaagagagatcatacatggtttgacttcttcaga

SEQ ID NO: 694347 - DNA, 75 bp, synthetic construct
  source 1..75: mol_type = other DNA
cgcatgaaaatccaggtggcggcaggctcgattttctcagcttccggcaaataccgtaattgtctgcgcatcaac

SEQ ID NO: 694348 - DNA, 75 bp, synthetic construct
  source 1..75: mol_type = other DNA
tagccaaagatcaggcgaccgtcacactttcgccgcaaacaggctgcgatggtgcttccagtacgggtggcggat

SEQ ID NO: 694349 - DNA, 75 bp, synthetic construct
  source 1..75: mol_type = other DNA
caataccgcgctatggttgatgcagtttggcctgcgtgtgcagtgctttaaggtgaaaccatacaaattcaacga

SEQ ID NO: 694350 - DNA, 75 bp, synthetic construct
  source 1..75: mol_type = other DNA
tattaaaggaattgattataaaacagtatcatatcacaaaataagagccctaaggaaggtgcgaataagcgggga

SEQ ID NO: 694351 - DNA, 75 bp, synthetic construct
  source 1..75: mol_type = other DNA
ttcatacacaaaatgtgtattccacacaagaaccacttacccatgatgatatagatatcctgcggttatgtgttt

SEQ ID NO: 694352 - DNA, 75 bp, synthetic construct
  source 1..75: mol_type = other DNA
ttccagacacctgttatcacttaacccattactggcttgctgccgtagatattcccgtggcgagcgataacccag

SEQ ID NO: 694353 - DNA, 75 bp, synthetic construct
  source 1..75: mol_type = other DNA
cggtactggtgctgaactgctgaaaaatggtggtttaatcagttgtcgttttaaagtaccgggcgacctggtggc

SEQ ID NO: 694354 - DNA, 75 bp, synthetic construct
  source 1..75: mol_type = other DNA
agttttaatacacgggattgcctgtgggtaaggccagtatccggtgatccgaacgtggaaattaccggagcgggt

SEQ ID NO: 694355 - DNA, 75 bp, synthetic construct
  source 1..75: mol_type = other DNA
acagtgtaaatattgaaaatggtgcaataattgttaatcgtagtaatcatccggctctacttgaggggttgtctt

SEQ ID NO: 694356 - DNA, 75 bp, synthetic construct
  source 1..75: mol_type = other DNA
actaacaatatttggtatccctgagttaaaatcttattttccgcaatatatgaatggtaatggcttagagcataa

SEQ ID NO: 694357 - DNA, 75 bp, synthetic construct
  source 1..75: mol_type = other DNA
gggttttaaaggatatccaagaagttgaagacgaggctatgaaggtaattcgaaatagcacagaacataacctcg

SEQ ID NO: 694358 - DNA, 75 bp, synthetic construct
  source 1..75: mol_type = other DNA
ggttcagctaagttactacaatttgacgaaagtagtattgaaggggcatatatagcattatgtatccagcaatgg

SEQ ID NO: 694359 - DNA, 75 bp, synthetic construct
  source 1..75: mol_type = other DNA
cacgtcagttcgataacgaggatcgcgaactggaccttccactcctggccgcgatgctgtccagagcgcaacact

SEQ ID NO: 694360 - DNA, 75 bp, synthetic construct
  source 1..75: mol_type = other DNA
aagagcatcagcaagtaacggacacgcaaccgtatcactgccctatcccgaaaaacgtgacaccgtcacctttaa

SEQ ID NO: 694361 - DNA, 75 bp, synthetic construct
  source 1..75: mol_type = other DNA
attgttgaggtcgacagcggtcagcttggcgtggacagcgcaatggcggagttacaacaactgcaaaacgcgctg

SEQ ID NO: 694362 - DNA, 75 bp, synthetic construct
  source 1..75: mol_type = other DNA
gctgagataaaggaatggactgaaccgggaaacggtaatcagaaaattgttcgcgtgtcttatacatggacgttg

SEQ ID NO: 694363 - DNA, 75 bp, synthetic construct
  source 1..75: mol_type = other DNA
acttaacctcacccgcaatgtgaaatacagtgacgccgaccgtgcggaaatccagcaccagttgaccgagcagta

SEQ ID NO: 694364 - DNA, 75 bp, synthetic construct
  source 1..75: mol_type = other DNA
tcccgagcggctttttatctttagctcccagccagagcgccgttttcgtactattccgcgcccgctggcgaaaga

SEQ ID NO: 694365 - DNA, 75 bp, synthetic construct
  source 1..75: mol_type = other DNA
ttacctgtatgccgaaagaggcttaggaaatataaagagtagactatacattggggatggatattttccattaaa

SEQ ID NO: 694366 - DNA, 75 bp, synthetic construct
  source 1..75: mol_type = other DNA
gttattaatatgtcaaagtttgttcctgttgtaggaggaatcgttggtggtagtcttgatgcaataacaaccaac

SEQ ID NO: 694367 - DNA, 75 bp, synthetic construct
  source 1..75: mol_type = other DNA
aaatgataaagttcgtgaatattgcaagaaaaaagaaagtgaatgggatcgaactcataactcacatatgtatcg

SEQ ID NO: 694368 - DNA, 75 bp, synthetic construct
  source 1..75: mol_type = other DNA
aataaacatactgatagcaagctgagtgttcgtacatacaggaatatgactgaacgagcgaagaaaaatactact

SEQ ID NO: 694369 - DNA, 75 bp, synthetic construct
  source 1..75: mol_type = other DNA
gcacgttatctggtttatggcggcatcctgtttgccgcgtgggggaaatcggcccagctaccgatgcaagcgtgg

SEQ ID NO: 694370 - DNA, 75 bp, synthetic construct
  source 1..75: mol_type = other DNA
tttcagcactaaaagcgttacttatcactcatatcggctcgttggggttgtatcttgccgccgccacgctgtttt

SEQ ID NO: 694371 - DNA, 75 bp, synthetic construct
  source 1..75: mol_type = other DNA
attactcagctgctcatccgcatgggcggcaggtaaaggcgggattggacttgcagcaacacgtcttgtttattc

SEQ ID NO: 694372 - DNA, 75 bp, synthetic construct
  source 1..75: mol_type = other DNA
gcgcaaggtccgtctcgcccggcagcaccttcgcacccagcaccgggttcaccgggtggcccttctgctcctcta

SEQ ID NO: 694373 - DNA, 75 bp, synthetic construct
  source 1..75: mol_type = other DNA
tacagttcattgtaattactataagaaagatgtcgcgggaaaaaagttgtatgaacattgcataaaaagaaaata

SEQ ID NO: 694374 - DNA, 75 bp, synthetic construct
  source 1..75: mol_type = other DNA
gtcgcttgcatgatgaaaaactggtcctgctcagcgcggaatttgccaccagagagcaaattgaccactactgcg

SEQ ID NO: 694375 - DNA, 75 bp, synthetic construct
  source 1..75: mol_type = other DNA
atctgtgacatgccaatcggtattgaaagccggatggcgcaaattgttgggctgcaagatcgcaaacagatgcgc

SEQ ID NO: 694376 - DNA, 75 bp, synthetic construct
  source 1..75: mol_type = other DNA
accgtcaccactaccgacgggccgatggaattacgtactccacgtgatcgtgatggttccttcgaaccacaactg

SEQ ID NO: 694377 - DNA, 75 bp, synthetic construct
  source 1..75: mol_type = other DNA
ccggaagggaaatggcaatgctattcaaaaagattttaaaggtgctatacaagatgcctatgatcaaggtgtttc

SEQ ID NO: 694378 - DNA, 75 bp, synthetic construct
  source 1..75: mol_type = other DNA
tgttaagggaaatatgactcaagcaaaacgaccgggtagaaatgaaccatgtttttgtggtagcggtaaaaaata

SEQ ID NO: 694379 - DNA, 75 bp, synthetic construct
  source 1..75: mol_type = other DNA
gcaacgtcgtgttccggttattcatcagacggagaccgctgaatgtggactggcctgcctagcaatgatatgcgg

SEQ ID NO: 694380 - DNA, 75 bp, synthetic construct
  source 1..75: mol_type = other DNA
caccgctacacagcagacgggagacgacgaagaagcggcccgtaaagccctgagaatgcgcattttacgcgccgc

SEQ ID NO: 694381 - DNA, 75 bp, synthetic construct
  source 1..75: mol_type = other DNA
gatccagcagattgaccaatcaaccgctgataaacaggcacaggaagaagcagaccgggccgcattacgcaaacg

SEQ ID NO: 694382 - DNA, 75 bp, synthetic construct
  source 1..75: mol_type = other DNA
cgatgctgagttatcgccaggctttcagggaaagttcacgttgagtgtggaaaatatagacgttaacgaggtggt

SEQ ID NO: 694383 - DNA, 75 bp, synthetic construct
  source 1..75: mol_type = other DNA
tgccgtcgacggtgagttcacggtgaaacgtctgcagttgcaccctattgttatgctcaaacctgaaaatgctgc

SEQ ID NO: 694384 - DNA, 75 bp, synthetic construct
  source 1..75: mol_type = other DNA
ttataagcaaacagcagatcaacaaaaaataacacaaactattattctgaatggaattagttgtcagatacagta

SEQ ID NO: 694385 - DNA, 75 bp, synthetic construct
  source 1..75: mol_type = other DNA
agcaaatagtggcgccagacatgatcgtatgaatatttcaggagcagatttctttgatcttccgataccccaacc

SEQ ID NO: 694386 - DNA, 75 bp, synthetic construct
  source 1..75: mol_type = other DNA
tgccattgataccgagcgcttttcccgtcgggtaaatggtgtcgatatgttgtcgggtctggcggcaaaagttcg

SEQ ID NO: 694387 - DNA, 75 bp, synthetic construct
  source 1..75: mol_type = other DNA
tcaggtggggaatgcgaccagcggacaggtggaaaccctgcaggggatgatcaccagtatcacgccggatgcacg

SEQ ID NO: 694388 - DNA, 75 bp, synthetic construct
  source 1..75: mol_type = other DNA
tggtgaccgagacttagtcaagtatgtcgatgtcggtgctacttactactttaataaaaacatgtccacttttgt

SEQ ID NO: 694389 - DNA, 75 bp, synthetic construct
  source 1..75: mol_type = other DNA
gtacgtcagtgttgtatctgtatgacttttttgtatgaagccggtctggtggattacgacgaaaataacgaaaga

SEQ ID NO: 694390 - DNA, 75 bp, synthetic construct
  source 1..75: mol_type = other DNA
gtaaaaagaaaatggaattagcaaaaatggctcaaggaaactccgtagttcatttatactcgagccaactaaaga

SEQ ID NO: 694391 - DNA, 75 bp, synthetic construct
  source 1..75: mol_type = other DNA
ggcaatgagtatttcaaatggagacaccgcctcgctggcggccgggttaaagacctgatgaatctcaaatgggat

SEQ ID NO: 694392 - DNA, 75 bp, synthetic construct
  source 1..75: mol_type = other DNA
gcggtaatgctgcgtatgattcaggttttcctccggtgaccatgacagcggtctcagcgggaggtataccgccac

SEQ ID NO: 694393 - DNA, 75 bp, synthetic construct
  source 1..75: mol_type = other DNA
ggcaggtattaaagcctcattcagcagtacgttaagcgggcatctcgggatggggtatagccatggtgccggtgt

SEQ ID NO: 694394 - DNA, 75 bp, synthetic construct
  source 1..75: mol_type = other DNA
tgcgtggctggacgttgtttctgcctggtgggatccgtcttcagggggcgcatgaatacacgccgcctgccatta

SEQ ID NO: 694395 - DNA, 75 bp, synthetic construct
  source 1..75: mol_type = other DNA
aagttttttaaggttcagaggttcagaaaatatcgcgattggttcatgtttgatgagattgatcccgaagccgga

SEQ ID NO: 694396 - DNA, 75 bp, synthetic construct
  source 1..75: mol_type = other DNA
gtctcagcgggaggtataccgccacacggcaaggattttaacggtctgatgtacgatattaccgcagcaatacgg

SEQ ID NO: 694397 - DNA, 75 bp, synthetic construct
  source 1..75: mol_type = other DNA
tgtaaatagtatgcattatttgcttggggaagggcagcggtatttatcaagatgtataaaatcctctaatgacga

SEQ ID NO: 694398 - DNA, 75 bp, synthetic construct
  source 1..75: mol_type = other DNA
taaggtcgaccgccaggctatttacatgcgcctactctttgcggtggcaaataaattaggccacggtgccggata

SEQ ID NO: 694399 - DNA, 75 bp, synthetic construct
  source 1..75: mol_type = other DNA
ttaaccagaacgaaaaatcaatcacagttaaagaggtaaacgctatgagctttaaagaaacccattatgatggac

SEQ ID NO: 694400 - DNA, 75 bp, synthetic construct
  source 1..75: mol_type = other DNA
gcggagtttggcatttcaaccaagaaggccgaagaactagcgaaaaacacaggggtaatgctggtacggctaaaa

SEQ ID NO: 694401 - DNA, 75 bp, synthetic construct
  source 1..75: mol_type = other DNA
tcgcctgtctggtggatgtgctttgcgcgttgctgagaaagctggatgcagctaactggcaatatgcgttaaata

SEQ ID NO: 694402 - DNA, 75 bp, synthetic construct
  source 1..75: mol_type = other DNA
gggtggataatacccttgtgctgccctgcacaccgttcggcacttccgttcactacaacgcctatccgctggcag

SEQ ID NO: 694403 - DNA, 75 bp, synthetic construct
  source 1..75: mol_type = other DNA
tcgcttacatgcgatgctcaggcatgagggggttcggctatcagaaaaggttgtacgcagacttattgtggagta

SEQ ID NO: 694404 - DNA, 75 bp, synthetic construct
  source 1..75: mol_type = other DNA
gctttcgcaaaggggtgaatatcgtcagcgatatgggcgggaatgtgctgcaaaaactcaccgaaggcgcgtcga

SEQ ID NO: 694405 - DNA, 75 bp, synthetic construct
  source 1..75: mol_type = other DNA
cttcgatgtgttgcaaatgcagttgatattgaacaattttttctgcggctaccgctgaagataaacaacaagttg

SEQ ID NO: 694406 - DNA, 75 bp, synthetic construct
  source 1..75: mol_type = other DNA
tcaaatatagatccattaggattagaaacactaaaatgcattaagccactgcattcaatgggcggaactggtgaa

SEQ ID NO: 694407 - DNA, 75 bp, synthetic construct
  source 1..75: mol_type = other DNA
aaaagttcagggaagcggcgcgtctggtgctgcgcagcgctaagcgcaaatatggctctgcgtactggttccatc

SEQ ID NO: 694408 - DNA, 75 bp, synthetic construct
  source 1..75: mol_type = other DNA
tagtcgttttgagcaggatgatgacgataaagccattaccgcccaaatcaatgcctgggccttcaacaatcaatc

SEQ ID NO: 694409 - DNA, 75 bp, synthetic construct
  source 1..75: mol_type = other DNA
ataacagggaagagaatattcagaatagtcgttttgagcaggatgatgacgataaagccattaccgcccaaatca

SEQ ID NO: 694410 - DNA, 75 bp, synthetic construct
  source 1..75: mol_type = other DNA
tttttgttttttttcttcttgactatttatcttttcaggccagtgaatttcttagatttgttgtccgttaaaaac

SEQ ID NO: 694411 - DNA, 75 bp, synthetic construct
  source 1..75: mol_type = other DNA
atgtctgcacgtttaaaattattgcctgggttaaagtcaactgagtatgtgtattcagatcttcatgctttactt

SEQ ID NO: 694412 - DNA, 75 bp, synthetic construct
  source 1..75: mol_type = other DNA
cggagccagtaccggagccgtcatcgatggccttcttaacaggctgatagatttggggatccaacaatttcaggt

SEQ ID NO: 694413 - DNA, 75 bp, synthetic construct
  source 1..75: mol_type = other DNA
ttattttaaaagccattactcttactcttgctggcggcggatttgtcatttactgcgcggcctatttattaatgg

SEQ ID NO: 694414 - DNA, 75 bp, synthetic construct
  source 1..75: mol_type = other DNA
ggttttgatcaggctacagttaatggaacaataattcagctgccaaacgtggattcaacgacatttgttcagtca

SEQ ID NO: 694415 - DNA, 75 bp, synthetic construct
  source 1..75: mol_type = other DNA
aacggtgtgactctcagaacaaatattcctatggggttggataatattatcgctcttattcaggatgcgacgaaa

SEQ ID NO: 694416 - DNA, 75 bp, synthetic construct
  source 1..75: mol_type = other DNA
tattcctcatgatgaaatggtaaattattatagccaaattgatgtctatgtctgtccttcaaaaattgagggcac

SEQ ID NO: 694417 - DNA, 75 bp, synthetic construct
  source 1..75: mol_type = other DNA
tttatctggattgtttgtagccttgcataatggatgtgtagaaacaattattgcttatgggaaaatacttcacac

SEQ ID NO: 694418 - DNA, 75 bp, synthetic construct
  source 1..75: mol_type = other DNA
taaaaaatgaaaatattacacctgaagaaatagcagaacacttggacaaaaaaaatggaagtgattttctagaaa

SEQ ID NO: 694419 - DNA, 75 bp, synthetic construct
  source 1..75: mol_type = other DNA
agccggtgcacaggtgatgcgtgagactgaacagcagatttaccgtcagctgactgacgaggtactggccctgcg

SEQ ID NO: 694420 - DNA, 75 bp, synthetic construct
  source 1..75: mol_type = other DNA
attaaatttcttaaataacggcggacaatataagacgttatatggacttccatcattaattcctaatgaccctca

SEQ ID NO: 694421 - DNA, 75 bp, synthetic construct
  source 1..75: mol_type = other DNA
aatgtgtctaattccactgtaacttcaggatcacagactccgctggaagaaagtgatggcttcttcggtaaatct

SEQ ID NO: 694422 - DNA, 75 bp, synthetic construct
  source 1..75: mol_type = other DNA
cggcttgtcatggtctggaattaccgttataaaaaaagataatgtcattgtctttcaggtagttatatggcccgt

SEQ ID NO: 694423 - DNA, 75 bp, synthetic construct
  source 1..75: mol_type = other DNA
cagcgtttatatcaacgaccagcccgtcaccaaccagagtattgcctttgttacggttgagggtaagaaaaacgc

SEQ ID NO: 694424 - DNA, 75 bp, synthetic construct
  source 1..75: mol_type = other DNA
agattgataaccaggctcttaaagcgaagctgattcatcgtttcgaaagccgtatcgactggtctttgctcgata

SEQ ID NO: 694425 - DNA, 75 bp, synthetic construct
  source 1..75: mol_type = other DNA
aggctggtaacgccgtgcaaaagacaggcgataccttgtccggtggacttacttttgaaaacgactcaatccttg

SEQ ID NO: 694426 - DNA, 75 bp, synthetic construct
  source 1..75: mol_type = other DNA
caaaggcgatcagtgctgctgccccgttgcatgcgggtgagattgccgaactgctttcgatgataggtgcttgta

SEQ ID NO: 694427 - DNA, 75 bp, synthetic construct
  source 1..75: mol_type = other DNA
gcaaactgccgaacggtctggtgctggaagtgggtcagaaacgggttcaggtggcaggctggcggaataacgcgg

SEQ ID NO: 694428 - DNA, 75 bp, synthetic construct
  source 1..75: mol_type = other DNA
atcaaagcatggcagaaaccggagatgatcgtcgtttctgaatgctactggaccgcagctgctaaacatgctgga

SEQ ID NO: 694429 - DNA, 75 bp, synthetic construct
  source 1..75: mol_type = other DNA
tttctttatttcattatgtgtatacttaaatagcatttctgagcttagtctatttataatggtaatgtctttata

SEQ ID NO: 694430 - DNA, 75 bp, synthetic construct
  source 1..75: mol_type = other DNA
cgtacaggcagcttagaaagccagcataaaaccgcctttgatattttattggttcactgccgtacaggcagctta

SEQ ID NO: 694431 - DNA, 75 bp, synthetic construct
  source 1..75: mol_type = other DNA
actgccgtacaggcagcttagaaaacgttcgcaccggtcagggtactgcgcagcgtgttcactgccgtacaggca

SEQ ID NO: 694432 - DNA, 75 bp, synthetic construct
  source 1..75: mol_type = other DNA
catttcctgattttgacactttggatcaatatgatacgaaagttgccagctattttattatgaatgatgctgttc

SEQ ID NO: 694433 - DNA, 75 bp, synthetic construct
  source 1..75: mol_type = other DNA
tgctaagcgagcggttcgggttattgcgaatggttttctggcttcccgcgaagcaacacttgccgctgttcgtca

SEQ ID NO: 694434 - DNA, 75 bp, synthetic construct
  source 1..75: mol_type = other DNA
gagctggaaatcaccggcagagcttgtttcttctgagacaggtgcgcttgaagtgatgcgcctgattacgcgtat

SEQ ID NO: 694435 - DNA, 75 bp, synthetic construct
  source 1..75: mol_type = other DNA
tggcgctagcaatgagatttgcggaaaaaaggttcactgccgtacaggcagcttagaaagtgctgcccgccagcg

SEQ ID NO: 694436 - DNA, 75 bp, synthetic construct
  source 1..75: mol_type = other DNA
aattcaccggtggcgggtccccggcgtatcgggcgtatcagtacaaaggagcgtgaacattccggctggctgaag

SEQ ID NO: 694437 - DNA, 75 bp, synthetic construct
  source 1..75: mol_type = other DNA
gatcctgggttatttgtgcaacgcctgagccaggggtatggtaaaagccgggcgttcggctgtggtctgatgctg

SEQ ID NO: 694438 - DNA, 75 bp, synthetic construct
  source 1..75: mol_type = other DNA
cggcgcggagctggccgccgcccttgccccggagctgatgaattattccgggcagcattccgccattcagcgctg

SEQ ID NO: 694439 - DNA, 75 bp, synthetic construct
  source 1..75: mol_type = other DNA
tatttctcaggagagaacgtctcagtaaactatgatgataacaccatctattttgaaagtgttatatctttacca

SEQ ID NO: 694440 - DNA, 75 bp, synthetic construct
  source 1..75: mol_type = other DNA
tgaagctgtataaacagattcgtgacagaagtcctcaagcgcagctagttatgcattttcataatgctttcgagc

SEQ ID NO: 694441 - DNA, 75 bp, synthetic construct
  source 1..75: mol_type = other DNA
tggatttatcaggtcgcaaaaagactttcgattccagtaactatcgcctgtattcgaaacgaaggttacccaacc

SEQ ID NO: 694442 - DNA, 75 bp, synthetic construct
  source 1..75: mol_type = other DNA
tcgattctgaagttaaaacggaagtcgtgacatctgcatctcttgctgcactgctaaaaccaataaagaaaccca

SEQ ID NO: 694443 - DNA, 75 bp, synthetic construct
  source 1..75: mol_type = other DNA
gtggacgccggttatcccggcgtaaacctgctgatcattaaagataatcagattgtgtatcgcaaagcctgggga

SEQ ID NO: 694444 - DNA, 75 bp, synthetic construct
  source 1..75: mol_type = other DNA
aggcgcaggcacactgacggacggctctgacaccctgcttgcccgctacgccaaaaacatgaccgcagacgcccg

SEQ ID NO: 694445 - DNA, 75 bp, synthetic construct
  source 1..75: mol_type = other DNA
tggaattttaaaaaacacccattaatttcaagagaagcttctatagaaaagagttacaaatataatctcattgaa

SEQ ID NO: 694446 - DNA, 75 bp, synthetic construct
  source 1..75: mol_type = other DNA
ttgaccttcacaaaaaagattgggatgaaaaagaaaattcttggaatttttacagaaacgcattgatagataaaa

SEQ ID NO: 694447 - DNA, 75 bp, synthetic construct
  source 1..75: mol_type = other DNA
gtttaaaaacggccactacaaatgattttaagaaaatccctggttctcctatagcttactggatcagtcattctc

SEQ ID NO: 694448 - DNA, 75 bp, synthetic construct
  source 1..75: mol_type = other DNA
tgggtgtatccggtactgacctgacgtttaaaccgaccatgcaggattacaacaaattcgtaaacgaaatgatgc

SEQ ID NO: 694449 - DNA, 75 bp, synthetic construct
  source 1..75: mol_type = other DNA
ttgggaaatgaagagttatttcatatttgcgctggaggaaccccctcaaaatctaaagcagaatactgggataat

SEQ ID NO: 694450 - DNA, 75 bp, synthetic construct
  source 1..75: mol_type = other DNA
gccagattacgacaaccttgtcagtgccagaattaaggtgacagccccgcaggacgtgagtgatatgccggtgaa

SEQ ID NO: 694451 - DNA, 75 bp, synthetic construct
  source 1..75: mol_type = other DNA
cggacttgtaccctgcattgcttgttcagacgccatttgatcacaaaaaggcgcaggggcgaaataccccggcct

SEQ ID NO: 694452 - DNA, 75 bp, synthetic construct
  source 1..75: mol_type = other DNA
acaacaatattctgtctctaccgatggcggttttgtactccacagcggtggtctgaccttcacgaataacagttt

SEQ ID NO: 694453 - DNA, 75 bp, synthetic construct
  source 1..75: mol_type = other DNA
aattgagttgcgccagaaacaatacgaatactaccgtgatttactgttcagtttcccgaaacctgaaactgtcag

SEQ ID NO: 694454 - DNA, 75 bp, synthetic construct
  source 1..75: mol_type = other DNA
tcccaattccctgcccggataatccggaaaaatcccttgccatccagtctgaaatcgttcgaattctggataaat

SEQ ID NO: 694455 - DNA, 75 bp, synthetic construct
  source 1..75: mol_type = other DNA
cgaaggtattggtggattcccgatggcgtttacagatttcgctaacctggatgtactgggactccccgttccgct

SEQ ID NO: 694456 - DNA, 75 bp, synthetic construct
  source 1..75: mol_type = other DNA
tgccgatgccgctggcgattcttctgaccttactgctcggcgcattgtgcgggttgatcaacgccggattaatta

SEQ ID NO: 694457 - DNA, 75 bp, synthetic construct
  source 1..75: mol_type = other DNA
atgacaaagttgcgattgtcggattcagtacgccaaacgtgatgcgtccatatgtggaacgcggcacggtgaaag

SEQ ID NO: 694458 - DNA, 75 bp, synthetic construct
  source 1..75: mol_type = other DNA
acaaccattcattctttattctttacggtaatggcgttttacgcaaaaattgtcccattaaatccattgatactg

SEQ ID NO: 694459 - DNA, 75 bp, synthetic construct
  source 1..75: mol_type = other DNA
actgtacttattagaaaaaacggcaagatagattatagcgtattcgcaacatcgctaaaaaaaccattttttgtc

SEQ ID NO: 694460 - DNA, 75 bp, synthetic construct
  source 1..75: mol_type = other DNA
tttattccccgaaacacataaatcagataatgagttggttatagttcaatcaaattataaactgttagataaaaa

SEQ ID NO: 694461 - DNA, 75 bp, synthetic construct
  source 1..75: mol_type = other DNA
ctgtttttactacaaatgtgcacagaacaattagtggagagtggaaaatttgatatgagacaggatggcgcatga

SEQ ID NO: 694462 - DNA, 75 bp, synthetic construct
  source 1..75: mol_type = other DNA
aatgtgtttatgtgtgtatacacattacacacaactagcacaaaaaacaacgccccgcagtgatgggaacacata

SEQ ID NO: 694463 - DNA, 75 bp, synthetic construct
  source 1..75: mol_type = other DNA
ggggtggggtatagccatggtgccggtgtggaatccccgtggaacgcggtagctggtgtgaactggtcgttctga

SEQ ID NO: 694464 - DNA, 75 bp, synthetic construct
  source 1..75: mol_type = other DNA
tgccgctgcaatgaaaggcggttatatcaacgcactggtaccgatcaggacacagcagcggcgattttacgtagt

SEQ ID NO: 694465 - DNA, 75 bp, synthetic construct
  source 1..75: mol_type = other DNA
tgtaccgcaaggacaaggctcgcaagtctcgccgtatcagccttgagttcatgcttgagcaagccaataagtttg

SEQ ID NO: 694466 - DNA, 75 bp, synthetic construct
  source 1..75: mol_type = other DNA
gtgcgctggctggcatctctccgatgttccaaccttgcgtagttcctcctaagccgtggactggcattactggtg

SEQ ID NO: 694467 - DNA, 75 bp, synthetic construct
  source 1..75: mol_type = other DNA
tctaaccatgtgaaagttaatgacgatggcaaatttaataatgatgtggctggaacccgtggcgtttatcaggct

SEQ ID NO: 694468 - DNA, 75 bp, synthetic construct
  source 1..75: mol_type = other DNA
aacaagaattacgtagtgcaggaacagttagtaacttctctgaactggtcagatcgatatcaacatcgatcagag

SEQ ID NO: 694469 - DNA, 75 bp, synthetic construct
  source 1..75: mol_type = other DNA
agatgtttatgttgataaagcggattggttagaagaatgggtagatgcaacagaaaaacatggacatatgaatta

SEQ ID NO: 694470 - DNA, 75 bp, synthetic construct
  source 1..75: mol_type = other DNA
aaagctatcaacagaaaattctttcgaagcaatatgtcgagaatggtataccaacaaagctgatcgctggactgt

SEQ ID NO: 694471 - DNA, 75 bp, synthetic construct
  source 1..75: mol_type = other DNA
ttgggcggggtatatatcggcggcctgcgcaataatattgaagcggtgacgaaactgcttaaattaccgcagcat

SEQ ID NO: 694472 - DNA, 75 bp, synthetic construct
  source 1..75: mol_type = other DNA
caaaagtacgacggcagaagaagccctgaaacgcatcagtgaactgtatgccatcgagaatgaaatacggggctt

SEQ ID NO: 694473 - DNA, 75 bp, synthetic construct
  source 1..75: mol_type = other DNA
gaatctccagcaaatgcacaaaatttcaatcagtaacgatagattggagtacggggtaaatatcgataaccactt

SEQ ID NO: 694474 - DNA, 75 bp, synthetic construct
  source 1..75: mol_type = other DNA
ggctgatttctacgaccagttcgctgaccagttgcacgagtctcaattggacaaaatgccagcacttccggctaa

SEQ ID NO: 694475 - DNA, 75 bp, synthetic construct
  source 1..75: mol_type = other DNA
gaactactaactgacacagccaaaacccttgtcgaagccctaatcgaaggccaactgaccgagcaacaattaatc

SEQ ID NO: 694476 - DNA, 75 bp, synthetic construct
  source 1..75: mol_type = other DNA
ttggaacagatgcgcttgaccgaacagtagctatttatgttgatactggctatgagccagtaccgtcggctacag

SEQ ID NO: 694477 - DNA, 75 bp, synthetic construct
  source 1..75: mol_type = other DNA
caaaattgatgaagcaattaacccaatgcgagcactgatccgttcgacaaacaaggctgttcgtattacaggatt

SEQ ID NO: 694478 - DNA, 75 bp, synthetic construct
  source 1..75: mol_type = other DNA
aaaaacagcactattacagtagaagagttaatgggggaaccgttgattattagtaaagggcgctatgaattaagc

SEQ ID NO: 694479 - DNA, 75 bp, synthetic construct
  source 1..75: mol_type = other DNA
gcgtttattgtttccttcctgccgccggataacatccagggtgactctaccgatatgtatgttgaattactggtc

SEQ ID NO: 694480 - DNA, 75 bp, synthetic construct
  source 1..75: mol_type = other DNA
gggcggtatatcactcaggatccgattgggctgaaggggggatggaacctgtatacatatccgctgagcccggtg

SEQ ID NO: 694481 - DNA, 75 bp, synthetic construct
  source 1..75: mol_type = other DNA
gttgaatccgatctcaaatatagatccattaggattagaaacactaaaatgcattaagccactgcattcaatggg

SEQ ID NO: 694482 - DNA, 75 bp, synthetic construct
  source 1..75: mol_type = other DNA
aacttatcttcgggtacacctgttccaattttgtatgatgatatattatatctcagccgctcagcagaaatttct

SEQ ID NO: 694483 - DNA, 75 bp, synthetic construct
  source 1..75: mol_type = other DNA
taattattgatgtgtatacggctgtttatttctcattaatgggtttttcttcagctgtagtagattcgaatatag

SEQ ID NO: 694484 - DNA, 75 bp, synthetic construct
  source 1..75: mol_type = other DNA
tcacattgttcagaaaagatcccactggagagccatccttccccatgccattgctaacaagttggcagcatctgc

SEQ ID NO: 694485 - DNA, 75 bp, synthetic construct
  source 1..75: mol_type = other DNA
cagatgaacttttggcctatatagaccgggtttctggcggtaatcggtcagagtatctgcgtcgctgccttgaag

SEQ ID NO: 694486 - DNA, 75 bp, synthetic construct
  source 1..75: mol_type = other DNA
agaggcgccggtagaaggcagcccattgtttttattgcaaatgtgtatggaaaccctggtggtcaaaggcatatt

SEQ ID NO: 694487 - DNA, 75 bp, synthetic construct
  source 1..75: mol_type = other DNA
aacccttgtcagccagcgcgatacttaaagcgcttgagcgtatcgggtacaagtcgatagccacaggccacggct

SEQ ID NO: 694488 - DNA, 75 bp, synthetic construct
  source 1..75: mol_type = other DNA
gagtctattgacgaatcgacactgtatgaacaatgtgatgagtttaaacttaagttagatactattattcggaaa

SEQ ID NO: 694489 - DNA, 75 bp, synthetic construct
  source 1..75: mol_type = other DNA
tgatttccgcaatcttttatcatcattgcatagagaggattatgcaaatattttggtttttgtaacccatcatac

SEQ ID NO: 694490 - DNA, 75 bp, synthetic construct
  source 1..75: mol_type = other DNA
tttgaggaccgcagaactgcgtttaatgcgctgggagtgggtagatctggagtcgaaaagcatcaccctacccgc

SEQ ID NO: 694491 - DNA, 75 bp, synthetic construct
  source 1..75: mol_type = other DNA
ctgaagcaacgacgagcaatgatgcaatcgtacgcggacgccattgattcaatactggctggtgacggcaatccg

SEQ ID NO: 694492 - DNA, 75 bp, synthetic construct
  source 1..75: mol_type = other DNA
atgcgctgggagtgggtagatctggaatcggcaaccatcaccctacccgctgaagtcatgaaggcccgccgcccg

SEQ ID NO: 694493 - DNA, 75 bp, synthetic construct
  source 1..75: mol_type = other DNA
gctcaatcaggtccagcctcttacgcccttaaaagccggggataacacactcaaatatcaacttcgttataagtc

SEQ ID NO: 694494 - DNA, 75 bp, synthetic construct
  source 1..75: mol_type = other DNA
ggcgctaaatatgaatcaggagatgatatctatgttgttatgagtgaatttttaacggctggagaaaacaagcct

SEQ ID NO: 694495 - DNA, 75 bp, synthetic construct
  source 1..75: mol_type = other DNA
gctcccgcagtcccctgaagaagacgaaaaagcgtcccattcacgcccgatacgcaaacccttaccggctcatct

SEQ ID NO: 694496 - DNA, 75 bp, synthetic construct
  source 1..75: mol_type = other DNA
atagcctcgtcaataggttccagagaggcttcagaaatttattcatcacttaaatataagaacactgaatctcct

SEQ ID NO: 694497 - DNA, 75 bp, synthetic construct
  source 1..75: mol_type = other DNA
ggtgagatctttaaattcgccgttatcaccgagctggtggcgaggaatccggttgcagatcttgacacggcactt

SEQ ID NO: 694498 - DNA, 75 bp, synthetic construct
  source 1..75: mol_type = other DNA
cagcgccgccagatgattcaggactacgccaacgcgattgattcgatacttgctgatggcatcaacccgcttgag

SEQ ID NO: 694499 - DNA, 75 bp, synthetic construct
  source 1..75: mol_type = other DNA
gccgggagcgtccagattcagacggcaatacgtttgcttatattaacggcattaaggaccgcagaactgcgtttg

SEQ ID NO: 694500 - DNA, 75 bp, synthetic construct
  source 1..75: mol_type = other DNA
tcagagtattacagccagcgaattacgatggatttatcgcaacaaagacaacgaccagatactgaaaaacataaa

SEQ ID NO: 694501 - DNA, 75 bp, synthetic construct
  source 1..75: mol_type = other DNA
tttatgatcacagatatcctataagaggaaacattagtgataaaacattctatatatctggtcctccggcattgg

SEQ ID NO: 694502 - DNA, 75 bp, synthetic construct
  source 1..75: mol_type = other DNA
atgagcaaaactatcgttttaatggagccacgccgcgcggctgattgcgggcaacaactgaaattcattgccgaa

SEQ ID NO: 694503 - DNA, 75 bp, synthetic construct
  source 1..75: mol_type = other DNA
caccactttgtgatgcaataagaaacgaaacattaaaatcaaaacaaactatattcaatatatatattcatgaaa

SEQ ID NO: 694504 - DNA, 75 bp, synthetic construct
  source 1..75: mol_type = other DNA
ccccgtttcctcaatacaaaagaaaataagtataaggcattggtaagcgcttttatttggaagcgtttctatctc

SEQ ID NO: 694505 - DNA, 75 bp, synthetic construct
  source 1..75: mol_type = other DNA
tgcgatacttggggaagttatacaggctgcttggaacgatttcaacaatcctgacttgtttaccaagaacaagga

SEQ ID NO: 694506 - DNA, 75 bp, synthetic construct
  source 1..75: mol_type = other DNA
ggatatatccgctaatcagcctcaaggaagcccgtaaacgagccacagagagccgatctctgattgctaatggaa

SEQ ID NO: 694507 - DNA, 75 bp, synthetic construct
  source 1..75: mol_type = other DNA
tcgtcgatataaccgcccgtgatgttctggcattgcttcagaagaaagagcgcaccgcgccggaggcggcccata

SEQ ID NO: 694508 - DNA, 75 bp, synthetic construct
  source 1..75: mol_type = other DNA
aaaaggagcgcaccgcaccggaacaggccaggaaattacgccagcgtatcggggagatcttcaaatttgccgtta

SEQ ID NO: 694509 - DNA, 75 bp, synthetic construct
  source 1..75: mol_type = other DNA
gtgaaaacctacctgaacagccatcaccagcgtgacgatggtaaacagcgtgagttccagccttacattgaagcg

SEQ ID NO: 694510 - DNA, 75 bp, synthetic construct
  source 1..75: mol_type = other DNA
caaaccaaaaatggtcggaagatcatgctaatcgtggaaaaaagagcctggaggacaatatcttcccaacaattg

SEQ ID NO: 694511 - DNA, 75 bp, synthetic construct
  source 1..75: mol_type = other DNA
caacggcgggcaatgatgcaggattatagcgacgccattgattcaatactggctggtgacggtaatccgctggaa

SEQ ID NO: 694512 - DNA, 75 bp, synthetic construct
  source 1..75: mol_type = other DNA
cgaaaaatcagaatggtgcagatatccaggataaatcagcttttctggacaatgttggcgttaccagtctgacgt

SEQ ID NO: 694513 - DNA, 75 bp, synthetic construct
  source 1..75: mol_type = other DNA
ttttcatcggggagataaaaaggcagaagcaaatttggtcgtgtcgggggtgaagcatgccgctaataaaaagaa

SEQ ID NO: 694514 - DNA, 75 bp, synthetic construct
  source 1..75: mol_type = other DNA
gctggaatattcgtgcaaataataattttcttgccacacataaaggaagtaaagtaactgatttcgtaataaaca

SEQ ID NO: 694515 - DNA, 75 bp, synthetic construct
  source 1..75: mol_type = other DNA
atgtttaaaggacaaaaaacattagctgcactggctgtatctctgttgttcacagcacctgttcatgctgctgat

SEQ ID NO: 694516 - DNA, 75 bp, synthetic construct
  source 1..75: mol_type = other DNA
aacaaggaaaaaccatcaagatcactcttgatcaggctgctaccggcgatgcccctatccagtggaaagcatctc

SEQ ID NO: 694517 - DNA, 75 bp, synthetic construct
  source 1..75: mol_type = other DNA
cgcccggtggagtccattcattacctgccagtcacgctgacaccagatacgttgcgtgcagcgttcgaaaaagtg

SEQ ID NO: 694518 - DNA, 75 bp, synthetic construct
  source 1..75: mol_type = other DNA
atgttcggtcccccaaaaacaaatgccgggatccggacggtagcattactgcagccggctcttgaagcactgaag

SEQ ID NO: 694519 - DNA, 75 bp, synthetic construct
  source 1..75: mol_type = other DNA
ttatgtggggcaggctaataatacaaccattaacgggggcagacagtcaattcatgacggagggatttccacagg

SEQ ID NO: 694520 - DNA, 75 bp, synthetic construct
  source 1..75: mol_type = other DNA
accactctgactctgataatggcgaccgggacagtatctacggagccttcaacactggcctcaatttcggagcct

SEQ ID NO: 694521 - DNA, 75 bp, synthetic construct
  source 1..75: mol_type = other DNA
agcgaattggtcattactattgaagaagcggatggctctaaacgctcattcacccagcctttctcttctgtcgtg

SEQ ID NO: 694522 - DNA, 75 bp, synthetic construct
  source 1..75: mol_type = other DNA
aacgtatgaatgaaatgataagggaaattattccgcatcatattaaatggtatgccggcacgagtaatatttgtg

SEQ ID NO: 694523 - DNA, 75 bp, synthetic construct
  source 1..75: mol_type = other DNA
cggcgaatcgcgcgtctggaaacgggcatggcctgggcggaagagccgccgtcgcgcacccgtcacttaatcagc

SEQ ID NO: 694524 - DNA, 75 bp, synthetic construct
  source 1..75: mol_type = other DNA
caaacgcgcgaccgccgcaaaggcgttcagccaccgacaacctggatttttaatgacaccaaagaccagctggag

SEQ ID NO: 694525 - DNA, 75 bp, synthetic construct
  source 1..75: mol_type = other DNA
ttgttgtgccatatctgtctgaacacgcagaaacactacagctagccagaaaagcatcaacacataacagtattt

SEQ ID NO: 694526 - DNA, 75 bp, synthetic construct
  source 1..75: mol_type = other DNA
tggtatataaaaaatgctgaaagaaaagggtttggggaaaataacaatcaaaactttcaatttgcaagaaataaa

SEQ ID NO: 694527 - DNA, 75 bp, synthetic construct
  source 1..75: mol_type = other DNA
ccgaaaccatgaacgttttgttattggtaaacattattttttgctggaaagtgcagaattgcgtgagtttaagca

SEQ ID NO: 694528 - DNA, 75 bp, synthetic construct
  source 1..75: mol_type = other DNA
gaatgaggatttaaatttaacgtgttttttccattataaagatgggcagtggcgggttatttcttattttttttg

SEQ ID NO: 694529 - DNA, 75 bp, synthetic construct
  source 1..75: mol_type = other DNA
tgacgccacgctgacagaaaaaggttttactcagttaagcagtgcaacaaacagcaccagtgagtcattggcggc

SEQ ID NO: 694530 - DNA, 75 bp, synthetic construct
  source 1..75: mol_type = other DNA
cagcatgataactgtcaggctttcagatatgaccaatattcccgatgggatggaatggggcgtcattgatactaa

SEQ ID NO: 694531 - DNA, 75 bp, synthetic construct
  source 1..75: mol_type = other DNA
tcagcccaatgaagagcatatacaggaacagaattacaagcttgaacttgaactgagaaaattgaaacgatgtct

SEQ ID NO: 694532 - DNA, 75 bp, synthetic construct
  source 1..75: mol_type = other DNA
tctaattatgcgttcgaagttctggatcatttcaacatttgaaagtccctatgtttgttttgtccgccatcatag

SEQ ID NO: 694533 - DNA, 75 bp, synthetic construct
  source 1..75: mol_type = other DNA
gcagcaaaccggttaaaccggaagaggtaatcaaaagcacccttctctatcgcaacggctcactgctggcgcgca

SEQ ID NO: 694534 - DNA, 75 bp, synthetic construct
  source 1..75: mol_type = other DNA
atgatagataaaaactatcataaggttgtttttgatcgttttaaacgatatgacgagcctcaaaaagaattgaat

SEQ ID NO: 694535 - DNA, 75 bp, synthetic construct
  source 1..75: mol_type = other DNA
gcgtatgaatttataaaacctcgttataaatttgtcggtgaatattatatagaaattgaaaatacctatcgctca

SEQ ID NO: 694536 - DNA, 75 bp, synthetic construct
  source 1..75: mol_type = other DNA
gttgggatattagtgcggggcaagtaattgatgacaacttgcgtcatgaacccaacctggcacaggcctcttttt

SEQ ID NO: 694537 - DNA, 75 bp, synthetic construct
  source 1..75: mol_type = other DNA
tggtattccgctgttaagatcaagaaaaacaactgaacttttgaataaaattagatattatatacaacagcataa

SEQ ID NO: 694538 - DNA, 75 bp, synthetic construct
  source 1..75: mol_type = other DNA
tccgtctggatgcagctgcggcagccaatgtcacacttcgcgcctggcctatcagtattaccggtcaaaaaccga

SEQ ID NO: 694539 - DNA, 75 bp, synthetic construct
  source 1..75: mol_type = other DNA
ggcaacgggtttaccattttctttttgatcagcacacaacaagcggacgacgcagcgagattatttttgggcttc

SEQ ID NO: 694540 - DNA, 75 bp, synthetic construct
  source 1..75: mol_type = other DNA
ggccgaatccggtaagttatgtttttagcttttggggaattatcgatctgaccaccattttgccgctgtatgtta

SEQ ID NO: 694541 - DNA, 75 bp, synthetic construct
  source 1..75: mol_type = other DNA
gtgacaggacaactttcaggctatcgtcagcggttttatcattttctttttgatcggcatacaaaaaccggtaga

SEQ ID NO: 694542 - DNA, 75 bp, synthetic construct
  source 1..75: mol_type = other DNA
aaccgactgattcttggcaacgtttgacgattggaatcctttatggcggaattgccgaggaaataatggctcgtt

SEQ ID NO: 694543 - DNA, 75 bp, synthetic construct
  source 1..75: mol_type = other DNA
cgcctttagcccgccgggttctgccgttattgggcctaggaagtttgggcgttgctgccgtgatgatgcaaccaa

SEQ ID NO: 694544 - DNA, 75 bp, synthetic construct
  source 1..75: mol_type = other DNA
tcatgccgaagcagctttaggatattgtgatttatttttgactgaaaaacctttgaaagttctagtgagtcaaga

SEQ ID NO: 694545 - DNA, 75 bp, synthetic construct
  source 1..75: mol_type = other DNA
ctatgccgccattcaccagctcggcggtgaagtgaagcgtaaaggccgcaaagtctactttaagcagggtgagaa

SEQ ID NO: 694546 - DNA, 75 bp, synthetic construct
  source 1..75: mol_type = other DNA
atgcgttacagcacgcgctgaagagcctggagatcggctgtaaagatttaaccccggcgatgcgcaaaattgccg

SEQ ID NO: 694547 - DNA, 75 bp, synthetic construct
  source 1..75: mol_type = other DNA
ctgattataaagttaatgtccgcaccaggagtcggttatgtttcttataattaccagggatacgatgttcttcac

SEQ ID NO: 694548 - DNA, 75 bp, synthetic construct
  source 1..75: mol_type = other DNA
aaaatgattacctctgcttagatgaatggtatttcaatggcaacgattattcatacagaaaatcgagaccaaacc

SEQ ID NO: 694549 - DNA, 75 bp, synthetic construct
  source 1..75: mol_type = other DNA
aagttaacggacaacgattttcttatggaattactggtaatgactccaacttattgatagtgttttatgttcaga

SEQ ID NO: 694550 - DNA, 75 bp, synthetic construct
  source 1..75: mol_type = other DNA
ccacgtacctgacaattgctttaatgcaacttacttatcccggtagccatccaaggaatccaggtgaacccgtca

SEQ ID NO: 694551 - DNA, 75 bp, synthetic construct
  source 1..75: mol_type = other DNA
gcccaaatatttattttaggagaatttgcaggtggaatgatggggtccgaactcataaaatgggttaaatcgcat

SEQ ID NO: 694552 - DNA, 75 bp, synthetic construct
  source 1..75: mol_type = other DNA
taatcgtgctaatttcagaagtttggcggcggatcaaattgatcagctcaaatcattttttttacatctatttta

SEQ ID NO: 694553 - DNA, 75 bp, synthetic construct
  source 1..75: mol_type = other DNA
caaatgcctgatttcaacaatactattctggcactggaacaaagcggagaattacttacccgcgttaccagcgtc

SEQ ID NO: 694554 - DNA, 75 bp, synthetic construct
  source 1..75: mol_type = other DNA
tctgggtaccagtatgttaatagtggtggcagtgtcaccagtaccactattaacactggcgggcagcagtatatc

SEQ ID NO: 694555 - DNA, 75 bp, synthetic construct
  source 1..75: mol_type = other DNA
ttcgaataggtcttcagatgatggacgtgatccgccatcatcaaccaataagtcgtcgggaagccagagctaaag

SEQ ID NO: 694556 - DNA, 75 bp, synthetic construct
  source 1..75: mol_type = other DNA
ttcaatcctccaaagaaaatatcgaatgctaaaggcttggcttttcattatgaaaagattgttgactctgattta

SEQ ID NO: 694557 - DNA, 75 bp, synthetic construct
  source 1..75: mol_type = other DNA
gaaaatcctagttattcaatgaatattgatcctaaatcatcatcaggtggttctgaggtcggttctgttgacagt

SEQ ID NO: 694558 - DNA, 75 bp, synthetic construct
  source 1..75: mol_type = other DNA
tcctgcaagccctgggcggggtcggcaatatctccagcattaacaattgcgcgacgcgtctacgcattgcactgc

SEQ ID NO: 694559 - DNA, 75 bp, synthetic construct
  source 1..75: mol_type = other DNA
tgtcacggaaaccgcaagtgacctggtacggctgggacggcgaccggctgaccacgatacagaacgacaggagcc

SEQ ID NO: 694560 - DNA, 75 bp, synthetic construct
  source 1..75: mol_type = other DNA
agaaaaactgttgaaacacacaggttaaatattatgaaaaaacttgatgtgcacagtggcattgagctgataaaa

SEQ ID NO: 694561 - DNA, 75 bp, synthetic construct
  source 1..75: mol_type = other DNA
tggagaatggtggtaatctctctgttctcaacggacatcaggcaacgaatactaccattaacagtggtgggttac

SEQ ID NO: 694562 - DNA, 75 bp, synthetic construct
  source 1..75: mol_type = other DNA
caacaacaccaatggtgatttcgatcagtcctttaacggcgataccgttaacggcacgatagactggccccctga

SEQ ID NO: 694563 - DNA, 75 bp, synthetic construct
  source 1..75: mol_type = other DNA
agacacagactacccggacccgcgcggggagcgggacgcggaagccgaccccggcctgctgtatgcaggacagtg

SEQ ID NO: 694564 - DNA, 75 bp, synthetic construct
  source 1..75: mol_type = other DNA
atctaatcaaagacttcttattgatgcatttcaagaattagcaaatgctgataaatgccaagtattgattaccac

SEQ ID NO: 694565 - DNA, 75 bp, synthetic construct
  source 1..75: mol_type = other DNA
tgtactgagacacccgcagaaagtattgacacgcagcttcttaaagccctggctgaggttgcgcccgtcgtggag

SEQ ID NO: 694566 - DNA, 75 bp, synthetic construct
  source 1..75: mol_type = other DNA
ccagcagtttgaccgtattcttgtgtgtactgagacacccgcagaaagtattgacacgcagcttcttaaagccct

SEQ ID NO: 694567 - DNA, 75 bp, synthetic construct
  source 1..75: mol_type = other DNA
cttgctgtctgaaatgcgcgcaagagtagagaatttcaataaactcttcgaagaaatgcttaaagcacgtaaaaa

SEQ ID NO: 694568 - DNA, 75 bp, synthetic construct
  source 1..75: mol_type = other DNA
gaataccggagtagcgctgtttttccgcacgactcgcagcgtgacgttgacagcggctggcgagcatctactttc

SEQ ID NO: 694569 - DNA, 75 bp, synthetic construct
  source 1..75: mol_type = other DNA
ttaaaacaacattatttaaaagatgattctgtcgatgtaatatcatcggggagaaatgatggttatgcagcagga

SEQ ID NO: 694570 - DNA, 75 bp, synthetic construct
  source 1..75: mol_type = other DNA
tggcgcgaactcagccacaacacgctcaaatgaagtcagtataggcacaaaaaatggagaaactcgcataattgg

SEQ ID NO: 694571 - DNA, 75 bp, synthetic construct
  source 1..75: mol_type = other DNA
aggtagcggtgctggccggtgaatgccataagttggcctgtgagctggacataggcgatgaacgaatagagatgt

SEQ ID NO: 694572 - DNA, 75 bp, synthetic construct
  source 1..75: mol_type = other DNA
tcgctatccctcctccgggcctacccgtgaagggctgcttgacttcttatccaatgagaaggagaaggatgaact

SEQ ID NO: 694573 - DNA, 75 bp, synthetic construct
  source 1..75: mol_type = other DNA
tcattcagcgggagatcggcactggtcaaggagctaacttcgttatccgccgcgcctttactgccaccttcacag

SEQ ID NO: 694574 - DNA, 75 bp, synthetic construct
  source 1..75: mol_type = other DNA
tcatctcaccgcttccggtcaactacgacaaaaaagcggaagaactgcgccagtcatatcttaatcaggcatatg

SEQ ID NO: 694575 - DNA, 75 bp, synthetic construct
  source 1..75: mol_type = other DNA
gcctggctgaaagaaaagggggcatttgaccagccttactggatgatgaaggcatcactgcttgcggaatttaat

SEQ ID NO: 694576 - DNA, 75 bp, synthetic construct
  source 1..75: mol_type = other DNA
tcccagccgtttttataacctgtttagccgttgctggccgctggaaaaactgccttttccgtccttaaatgagga

SEQ ID NO: 694577 - DNA, 75 bp, synthetic construct
  source 1..75: mol_type = other DNA
cagagaaggcgaagaaggcgattgtagattcaatctgtcaatgcaacacccctttcaattatctctttcggtgtt

SEQ ID NO: 694578 - DNA, 75 bp, synthetic construct
  source 1..75: mol_type = other DNA
gattacctttccaaatgaatcaaaactggaaaatatttatattgatcacaacaatctggaaaatttggatttaaa

SEQ ID NO: 694579 - DNA, 75 bp, synthetic construct
  source 1..75: mol_type = other DNA
aaaccaaaattcattggttaatctggaagcacaaaataacaacctgacaaaaattaatatttctgacagttataa

SEQ ID NO: 694580 - DNA, 75 bp, synthetic construct
  source 1..75: mol_type = other DNA
tagaaataagcaaaaatactgaaggtgataataaagaaaacaatgattcaatgtcgattcgttaccgttcaaaac

SEQ ID NO: 694581 - DNA, 75 bp, synthetic construct
  source 1..75: mol_type = other DNA
acacattatggccgctgatgaagcggtaaaagccaccaacactgaagttattagcattgaacttcctcgggattg

SEQ ID NO: 694582 - DNA, 75 bp, synthetic construct
  source 1..75: mol_type = other DNA
agatcatggcgcaggtcatcgctcgcgtagcgacgccagagcatgaggttctcccggaaaccactcatcaaacac

SEQ ID NO: 694583 - DNA, 75 bp, synthetic construct
  source 1..75: mol_type = other DNA
ttacaaatgatgcatggttaaaaggaaatgagccgtttgaaaaaatgaaactcatttctatgggaacaatgctga

SEQ ID NO: 694584 - DNA, 75 bp, synthetic construct
  source 1..75: mol_type = other DNA
cggaacacaccaaagaagttaaaaaatggttggatatcaatacctatcgaggatttgaagatctgactctcatac

SEQ ID NO: 694585 - DNA, 75 bp, synthetic construct
  source 1..75: mol_type = other DNA
catgttcgagattgatttggcaagtggcacagacgaagagattgcagagtcgcttaaagctgcattaccgcagtg

SEQ ID NO: 694586 - DNA, 75 bp, synthetic construct
  source 1..75: mol_type = other DNA
ctggcgcaacttcacattaagcaacctgaacagcctgtcactttactcgccagagaaggtgaagaagaggattgt

SEQ ID NO: 694587 - DNA, 75 bp, synthetic construct
  source 1..75: mol_type = other DNA
gttttattcgcgtgaatgactgggcagaaattcaggcgagagagtcttactatcccaaattagagttaaatgatc

SEQ ID NO: 694588 - DNA, 75 bp, synthetic construct
  source 1..75: mol_type = other DNA
gaaaaccaagctgcaatggaatatttcgaaaaaattttcagcggtaaccctttcttgattgaagaagaaaggttg

SEQ ID NO: 694589 - DNA, 75 bp, synthetic construct
  source 1..75: mol_type = other DNA
tttctttttgaccacgacagaacggctggctcagctcagcatcgttggattacggaattcattatttttctggga

SEQ ID NO: 694590 - DNA, 75 bp, synthetic construct
  source 1..75: mol_type = other DNA
catatcagttgcccgcctgcttaaactgcgtgggcagcatcaaagccagtcagtatcaccggcaggctgtctgca

SEQ ID NO: 694591 - DNA, 75 bp, synthetic construct
  source 1..75: mol_type = other DNA
acggcggctataaaggcgcgatgggcttgtttcatgaagttgacgagcaacgtaccgctgaaaatcaacgcgaac

SEQ ID NO: 694592 - DNA, 75 bp, synthetic construct
  source 1..75: mol_type = other DNA
aggtggatggaatatgtatcagtatccgttgaatcccatacaagtgatagacccaatggggttagatgcgattga

SEQ ID NO: 694593 - DNA, 75 bp, synthetic construct
  source 1..75: mol_type = other DNA
agcccggtccactgacgccgtcggctatttctgagcgtgtcaccgccgagtttcccccgcagcaaccggagaata

SEQ ID NO: 694594 - DNA, 75 bp, synthetic construct
  source 1..75: mol_type = other DNA
atataccatgtttgtgattattttgatggtaagaaaactgaagtaactgttgatgaactgaaaaaaattatctgc

SEQ ID NO: 694595 - DNA, 75 bp, synthetic construct
  source 1..75: mol_type = other DNA
gaattttgtatcgactattgatgatgaaatgaaaaaaataattcattatgaggagtcggacaaattccctgtata

SEQ ID NO: 694596 - DNA, 75 bp, synthetic construct
  source 1..75: mol_type = other DNA
ttctgcctatggacttcaaccacttcgagatcccgggcagcattcttcgtcgcgctaaagaaatcgtgaccaaaa

SEQ ID NO: 694597 - DNA, 75 bp, synthetic construct
  source 1..75: mol_type = other DNA
aacagataccctgaacccggctgaggtgctctccgccgcggcgccggagctggcgaacgccactacgcaggaatt

SEQ ID NO: 694598 - DNA, 75 bp, synthetic construct
  source 1..75: mol_type = other DNA
gttcaccacaacggcaacaatccgcgcgtttatcgatgagtacaacgccagcctgccagcgcaattgagcgccga

SEQ ID NO: 694599 - DNA, 75 bp, synthetic construct
  source 1..75: mol_type = other DNA
aagtgctggttacccaccagcaacttgccaccgcgcaggcaattcagtcagcactgctctcgcacccgaccgcag

SEQ ID NO: 694600 - DNA, 75 bp, synthetic construct
  source 1..75: mol_type = other DNA
accagttgcagcacaaaccgagccagaagcgcaatctgacgaaccagctgttgtttatcccgcttatttcgagcc

SEQ ID NO: 694601 - DNA, 75 bp, synthetic construct
  source 1..75: mol_type = other DNA
gctgaacccgcagcacaggaaattccccaacctgaaggtaaggagtctccgcgcaaatccttctgcactcacgaa

SEQ ID NO: 694602 - DNA, 75 bp, synthetic construct
  source 1..75: mol_type = other DNA
ggatggcggcggaggaaggcatcttcttttatgaggagcacgcgcaaaaaagtaccgaccagagcctggtgctgt

SEQ ID NO: 694603 - DNA, 75 bp, synthetic construct
  source 1..75: mol_type = other DNA
gggattggctgggcttcaggaggaacagccaggtacatcggaacaatgaaagcatatttctgctcaatatccgga

SEQ ID NO: 694604 - DNA, 75 bp, synthetic construct
  source 1..75: mol_type = other DNA
atgaacaacaagatacctttgaattatctcaatccgaaagggaatcctctttcgaagaaaaatcaaatgaatttg

SEQ ID NO: 694605 - DNA, 75 bp, synthetic construct
  source 1..75: mol_type = other DNA
gtgctggtcgcgccgtggatcgccaacgcgccgcaggggctgtatagctggatgaaacagctcaacggcatttac

SEQ ID NO: 694606 - DNA, 75 bp, synthetic construct
  source 1..75: mol_type = other DNA
aattccccacacagcaggggaaacaggagagcagcatggctgaactggagaaaggctatttgcgcctggccaacc

SEQ ID NO: 694607 - DNA, 75 bp, synthetic construct
  source 1..75: mol_type = other DNA
cagagcaactggagcttatcagcagcgcctttaaggttatcgaaacacaacgtccgaaactggcctgttaccggt

SEQ ID NO: 694608 - DNA, 75 bp, synthetic construct
  source 1..75: mol_type = other DNA
tccgcaaactttattattattgatgacggtaaaattgaactctcaggggtaagaactggtgtcggtgcgaatgac

SEQ ID NO: 694609 - DNA, 75 bp, synthetic construct
  source 1..75: mol_type = other DNA
tcgcgaaaccgtaaaaaatgaccagacggtcacgatacaggaaggtaatcgccttcttacggtggaaaaaggcca

SEQ ID NO: 694610 - DNA, 75 bp, synthetic construct
  source 1..75: mol_type = other DNA
caccaggaaaaccgcacacccggcagcctgccggggacaaagacgcagatgaccatccgttcgaagacgtatatg

SEQ ID NO: 694611 - DNA, 75 bp, synthetic construct
  source 1..75: mol_type = other DNA
cagatgaccatccgttccaaaacgtatatgggcagcgggtttaatgagctgaagtttgacgatgcgacagggaaa

SEQ ID NO: 694612 - DNA, 75 bp, synthetic construct
  source 1..75: mol_type = other DNA
tttccgcaatttaaatactcagctcaataccgatttcgatggttcacatcagttgaatgttaacagttccggtaa

SEQ ID NO: 694613 - DNA, 75 bp, synthetic construct
  source 1..75: mol_type = other DNA
aacccaaacgaagaagaaaaactttataggctttggtatgaagcgtcttcccaagtcgtagactttgatcgagag

SEQ ID NO: 694614 - DNA, 75 bp, synthetic construct
  source 1..75: mol_type = other DNA
ggaacccgaacacccgtaccgaggtgagcaccctctgcatcagccagtttcgctacagcgcacaaatccgccctt

SEQ ID NO: 694615 - DNA, 75 bp, synthetic construct
  source 1..75: mol_type = other DNA
agttgggaaaatgagtttaatgagcaggtcgctgcagagcagaaaacagctgctaaacagccacaaatcgccaac

SEQ ID NO: 694616 - DNA, 75 bp, synthetic construct
  source 1..75: mol_type = other DNA
aacaaaaaattgcgcagcagcggttaacacgccgcgaatggctggcgctatgtaccagctactttggtcattcca

SEQ ID NO: 694617 - DNA, 75 bp, synthetic construct
  source 1..75: mol_type = other DNA
aaacccgtttgctgccctatcgggagcagaacgtgcagccgacggtaagtcatgcttttcactatcttcagcgcg

SEQ ID NO: 694618 - DNA, 75 bp, synthetic construct
  source 1..75: mol_type = other DNA
tctgccgtgctgaatattactgccgccaatggcaaatccattccgtttgctgcggaggtttaccagggtgaggtg

SEQ ID NO: 694619 - DNA, 75 bp, synthetic construct
  source 1..75: mol_type = other DNA
atgctcattgctatcgtgagtggaatgtgtttttacgccagcgtactcatggcgacgactccggcagttgagctg

SEQ ID NO: 694620 - DNA, 75 bp, synthetic construct
  source 1..75: mol_type = other DNA
caatgcgtcaaagaccgtgagtcggccagagcctgcatcgttgcctgaacatgaagtcagtgatgcaaagtcaga

SEQ ID NO: 694621 - DNA, 75 bp, synthetic construct
  source 1..75: mol_type = other DNA
ttatcgcgcaacttgagaggaaggtagatgctcgtgcagtgcagatggttccccctctggagaaacgccgtcagg

SEQ ID NO: 694622 - DNA, 75 bp, synthetic construct
  source 1..75: mol_type = other DNA
aattaaccacaataagcgaattgattaaaaatatttattgttcattatccgttatcatcattggttgtgcgtcag

SEQ ID NO: 694623 - DNA, 75 bp, synthetic construct
  source 1..75: mol_type = other DNA
atggcagacgagtttgtcgccggccatgttattttcggcgttggtatgattgccgcctgtgtatcgacagtgggt

SEQ ID NO: 694624 - DNA, 75 bp, synthetic construct
  source 1..75: mol_type = other DNA
ttccccattattggctatgcggggtcaattatcaccatgatatggggttgggcactgttagcaggtaatgatgtg

SEQ ID NO: 694625 - DNA, 75 bp, synthetic construct
  source 1..75: mol_type = other DNA
tctgcgttagccagctacgccccgaccattcgtggtgtggcaaactctaacgccaaagttaccgtgacgcagaac

SEQ ID NO: 694626 - DNA, 75 bp, synthetic construct
  source 1..75: mol_type = other DNA
tggtgtagatggcaacacttataattcagataaagacttcgttaaaattgctgtgcaatttaccgacgtaaatgt

SEQ ID NO: 694627 - DNA, 75 bp, synthetic construct
  source 1..75: mol_type = other DNA
acattattaggctttactgatgagattattgaagtggctcagcaaaacctgatcgatggttgttaccctatcgaa

SEQ ID NO: 694628 - DNA, 75 bp, synthetic construct
  source 1..75: mol_type = other DNA
agcacaagatcgcctttttcagatggaaatggcacgtcgcagtactcaagggactgtcgcggaagtgcttggcaa

SEQ ID NO: 694629 - DNA, 75 bp, synthetic construct
  source 1..75: mol_type = other DNA
aacgccaccctgccgccgcaggtgaaaaccagcggtagccgtgacgcgctgctcgagcagctggcaatcatcaat

SEQ ID NO: 694630 - DNA, 75 bp, synthetic construct
  source 1..75: mol_type = other DNA
accgtggcatcctggcgcgcgaatggaccgccggtaaccgcatcagcaatgttcagcgcaccgattccggtacca

SEQ ID NO: 694631 - DNA, 75 bp, synthetic construct
  source 1..75: mol_type = other DNA
acagcatgaagattcttaccagaactcttctgagcagtcgacttgcagtattactgataccaaagacacaaagat

SEQ ID NO: 694632 - DNA, 75 bp, synthetic construct
  source 1..75: mol_type = other DNA
accgaggctcgcgccaacctgcaactggacgttgcactggaagatgctggcatcgaaatgggtcgcggtaaggac

SEQ ID NO: 694633 - DNA, 75 bp, synthetic construct
  source 1..75: mol_type = other DNA
ttaaccagaccatgacagctgagttcaattcagcaactgagttgctgccgttgccagtagctggcgcgcaggaac

SEQ ID NO: 694634 - DNA, 75 bp, synthetic construct
  source 1..75: mol_type = other DNA
cggtaccaaatcagacctgattcaggccgtgaagtctgttaatccggaagccgtattcgccgacgagttgttgga

SEQ ID NO: 694635 - DNA, 75 bp, synthetic construct
  source 1..75: mol_type = other DNA
tcccagttgtcgacggtctgccgaaagaaggtgaagttgattttacctggtgtgatcgctacgagcttcaggacg

SEQ ID NO: 694636 - DNA, 75 bp, synthetic construct
  source 1..75: mol_type = other DNA
atggaattctttaatgtggttaaagccactcagaaatccggaaagcaagatgcagtggtctggttcactgctaaa

SEQ ID NO: 694637 - DNA, 75 bp, synthetic construct
  source 1..75: mol_type = other DNA
gcagacgctgacgtaccggcgtgaggccgccggtgacctggccggggaaatcaccggcgtgacggacggtgccgg

SEQ ID NO: 694638 - DNA, 75 bp, synthetic construct
  source 1..75: mol_type = other DNA
gaggcatccgctgaactactggagctgggtatgctcgagtaccgcaaagcgatgcgcaatatcgcaaccggattc

SEQ ID NO: 694639 - DNA, 75 bp, synthetic construct
  source 1..75: mol_type = other DNA
ctgccagcgctggtgccgctgggcgctagcctggatgaaacggcgcagaactatatggcgctgccagctgaattc

SEQ ID NO: 694640 - DNA, 75 bp, synthetic construct
  source 1..75: mol_type = other DNA
aggtgatcgcaatcaactggttgaagactggcgcagtggaaggtttcctctgctcaaaactgaaaccaccagcgt

SEQ ID NO: 694641 - DNA, 75 bp, synthetic construct
  source 1..75: mol_type = other DNA
gacgactggtcgtggtttacgtcggatgatgggtgctgcatggaggtgacccactggatgccgctaccagaaccg

SEQ ID NO: 694642 - DNA, 75 bp, synthetic construct
  source 1..75: mol_type = other DNA
tacgtcttcgtatagtgcgttctatgcctccggcattgaaaaaagcaagactattgagatctcgcttgaaaatcc

SEQ ID NO: 694643 - DNA, 75 bp, synthetic construct
  source 1..75: mol_type = other DNA
atgaaattatttgagtgggataccagaggattatgttatttattattcagtaactttatccacaatgatgggcgt

SEQ ID NO: 694644 - DNA, 75 bp, synthetic construct
  source 1..75: mol_type = other DNA
gcagacagccattccacaagttccggtgactccggatggttggataagctgtagtgagcgaatgcctgtaattgg

SEQ ID NO: 694645 - DNA, 75 bp, synthetic construct
  source 1..75: mol_type = other DNA
gcaagttccggtaactccggatggttggataagctgtagtgagcgaatgcctgatgataatcagcacgtaattat

SEQ ID NO: 694646 - DNA, 75 bp, synthetic construct
  source 1..75: mol_type = other DNA
acttcaccatatagcgaaaatcttagggaactggcacgaattgcactggcatcactggaagcagagccagttgct

SEQ ID NO: 694647 - DNA, 75 bp, synthetic construct
  source 1..75: mol_type = other DNA
ggcgctcatcagcgaagacggcaatactgcgtggagcggggagtatgatgaatggggcaaccagcttaatgagga

SEQ ID NO: 694648 - DNA, 75 bp, synthetic construct
  source 1..75: mol_type = other DNA
aggtgcaaaaagagatgaaagggcgttatcccaaacatgtctggccggacgacccggcaaatactgcaccgacgc

SEQ ID NO: 694649 - DNA, 75 bp, synthetic construct
  source 1..75: mol_type = other DNA
atgcagcaacgtctggatagtgaattgcctgcgcattacactgtgccgacgggaagccggatcgccattcgttat

SEQ ID NO: 694650 - DNA, 75 bp, synthetic construct
  source 1..75: mol_type = other DNA
ctctccttttcattcagcgtgtctatttcatttcctctgaaaagaaactaactattcacattgtgcagatgtttc

SEQ ID NO: 694651 - DNA, 75 bp, synthetic construct
  source 1..75: mol_type = other DNA
catagtgataatactaacataattgggcaattactaagtaacccaaattattccccagcaatgaaactgacatct

SEQ ID NO: 694652 - DNA, 75 bp, synthetic construct
  source 1..75: mol_type = other DNA
gtggtgctactcggaccgcaggtaaagtatatgttaaacatgctcgcagaaaaggccgcccccctgggaataccc

SEQ ID NO: 694653 - DNA, 75 bp, synthetic construct
  source 1..75: mol_type = other DNA
gtttgaaaccttaactggtatatggcatggagtaacccactggatgccgctaccagaaccgccgcaggagacaaa

SEQ ID NO: 694654 - DNA, 75 bp, synthetic construct
  source 1..75: mol_type = other DNA
aagcgcaagggcgtgaaatcaacgccacgctagcgatgcgtaataacgcgccgtggctggcgaatatcaaatatc

SEQ ID NO: 694655 - DNA, 75 bp, synthetic construct
  source 1..75: mol_type = other DNA
aacctgaaactggagggcagcagcggtaaagcgttgcgtcagtgtattgcggcggtcaggcgtggcggcattgtt

SEQ ID NO: 694656 - DNA, 75 bp, synthetic construct
  source 1..75: mol_type = other DNA
ctcgaatgcaaaggctaatgtcgaaaggtttaatgaagaacatatttcaaaaaaatggttgattaagttaaaaca

SEQ ID NO: 694657 - DNA, 75 bp, synthetic construct
  source 1..75: mol_type = other DNA
tgggtggttcacgaaatggtaaagacagtcgagagataaaaattatttccatcaccccaagaattattgacgtta

SEQ ID NO: 694658 - DNA, 75 bp, synthetic construct
  source 1..75: mol_type = other DNA
tgcaaaaggggccgggctgatgggggaagccggacctgaagccattatgcccctgacccgggcggcggatggctc

SEQ ID NO: 694659 - DNA, 75 bp, synthetic construct
  source 1..75: mol_type = other DNA
aagtggaatggcgcagctgggctgcatcaatcctgcaggaaatatcaaaagttcttatgaatgccgcgattgtca

SEQ ID NO: 694660 - DNA, 75 bp, synthetic construct
  source 1..75: mol_type = other DNA
catgatgattcatatggaacatcatcaattgatattactggcagtggagatctaatatcattaggtggtcatgca

SEQ ID NO: 694661 - DNA, 75 bp, synthetic construct
  source 1..75: mol_type = other DNA
atgcgctataatggtttaaataatatgtttttctctctttgccagattaacgataaccactcattcacaagttca

SEQ ID NO: 694662 - DNA, 75 bp, synthetic construct
  source 1..75: mol_type = other DNA
attttcaaacatccggctggaaaattattctgggctttaacggatgaaagcaataaagagcaagcggacgttatt

SEQ ID NO: 694663 - DNA, 75 bp, synthetic construct
  source 1..75: mol_type = other DNA
atgttcggattctttaaaaagaaaaaacctgacgctgcgcccgggcagggttcccgactgacggcgcaacagttt

SEQ ID NO: 694664 - DNA, 75 bp, synthetic construct
  source 1..75: mol_type = other DNA
aggctggagagcgtgcgcaccctcgcaccggacctggacatccgcatcccgtatgccaccgacccggcgggaaac

SEQ ID NO: 694665 - DNA, 75 bp, synthetic construct
  source 1..75: mol_type = other DNA
cggctgaactggtgcggctgctggacagactggaggaagaaatccgggcagaccgcgtgagcagtgaaagccgtc

SEQ ID NO: 694666 - DNA, 75 bp, synthetic construct
  source 1..75: mol_type = other DNA
cagtgcgcatcaatgccaccgataaaaccatacgggttacgtgctgtttccagataaaccggtgttgcaccagcc

SEQ ID NO: 694667 - DNA, 75 bp, synthetic construct
  source 1..75: mol_type = other DNA
actgcgtgacacgcaggcttacaggaatgaaatggcgaagtatggtaccggcagtgaaattcagcggggtatcca

SEQ ID NO: 694668 - DNA, 75 bp, synthetic construct
  source 1..75: mol_type = other DNA
ccaagttggggttggagtgcaactgaaattaaaggcgttgacgttaatggcacttcaacaagtgaggtttatcga

SEQ ID NO: 694669 - DNA, 75 bp, synthetic construct
  source 1..75: mol_type = other DNA
atggctgcaggccataatctggatgtcacggcatcctctgtttctgccgggcacagcgccctgctttctgcaggt

SEQ ID NO: 694670 - DNA, 75 bp, synthetic construct
  source 1..75: mol_type = other DNA
tgatgccttaacgaagcgtcaacagcaacaggttgctaaggaaggtattgagtcacagattgctttgcagcgtaa

SEQ ID NO: 694671 - DNA, 75 bp, synthetic construct
  source 1..75: mol_type = other DNA
ctggcgctattggttctgctcttcttggtgctcattcagcaaaggcttctgctgaccgtgccaataagattacga

SEQ ID NO: 694672 - DNA, 75 bp, synthetic construct
  source 1..75: mol_type = other DNA
gattgccggaatgctgtatcctggcgtgaagcagtcagacctcagtgaagagcagaagcagacgataagtacgct

SEQ ID NO: 694673 - DNA, 75 bp, synthetic construct
  source 1..75: mol_type = other DNA
ggggcaacctgctgaatgaagagaacccgcatcagctgcagcagcttatccgcctgccggggcagcagtatgatg

SEQ ID NO: 694674 - DNA, 75 bp, synthetic construct
  source 1..75: mol_type = other DNA
gcccttataactcgaaatacagccagcaatacgctgatgcgtatggtcagatagtcaatctcctcgatatcacca

SEQ ID NO: 694675 - DNA, 75 bp, synthetic construct
  source 1..75: mol_type = other DNA
aattgagccggatcctagagacgcacctggctacttaagatatgaaggtgcaggtcttgaaatgatctataaccc

SEQ ID NO: 694676 - DNA, 75 bp, synthetic construct
  source 1..75: mol_type = other DNA
aacgtgaaaatgcgttgctgaaacagcgttatgagaaacagcgtatagcctgggctgagcagtacgcagaatggc

SEQ ID NO: 694677 - DNA, 75 bp, synthetic construct
  source 1..75: mol_type = other DNA
aagttattatctatcaacaacagaatgagcaattatatccagcacaggaacatcttcttttacaactttgtatgc

SEQ ID NO: 694678 - DNA, 75 bp, synthetic construct
  source 1..75: mol_type = other DNA
tctagttcgaaaatggcagattatttgttatttaataacgatgttattttagagcaaaaattacttacaaatgac

SEQ ID NO: 694679 - DNA, 75 bp, synthetic construct
  source 1..75: mol_type = other DNA
tgataaagcaatcattgttcttggggcgttaattgcgttgctggaactgatccgcttcctgcttcagcttctgaa

SEQ ID NO: 694680 - DNA, 75 bp, synthetic construct
  source 1..75: mol_type = other DNA
gagaagcattagaggtaaaaaatagttataagttaagtaaatttacatgggaaacgtatggtgatatcgtggtat

SEQ ID NO: 694681 - DNA, 75 bp, synthetic construct
  source 1..75: mol_type = other DNA
gttcagcgcagcaggtaacgaatcaactgccaacccgggcaacctggcactgatgggggccagcggtgaaatgaa

SEQ ID NO: 694682 - DNA, 75 bp, synthetic construct
  source 1..75: mol_type = other DNA
aggagattaaccaaacggttggcttcgcgcctttcggcttaaaccggctgaatatcaattttactgattacgtac

SEQ ID NO: 694683 - DNA, 75 bp, synthetic construct
  source 1..75: mol_type = other DNA
tctgccggaaacggttttcgaactctccggtacgtcagcgtttacaggcaatgacgaagatgccggggattccgt

SEQ ID NO: 694684 - DNA, 75 bp, synthetic construct
  source 1..75: mol_type = other DNA
atgtggcgttcaccacaggtaacgcggggctgcattttgagctgcgcccgggaactgctgccggtgtgatgcaga

SEQ ID NO: 694685 - DNA, 75 bp, synthetic construct
  source 1..75: mol_type = other DNA
gaagtggcacactgaatttggccacctgaacagaggtgatatgctcacctcagaacaacacaggtgctccaatga

SEQ ID NO: 694686 - DNA, 75 bp, synthetic construct
  source 1..75: mol_type = other DNA
gggaagtgttttcagaagagataaagttctttcagatagactggaaaaattctgatgggcttttttttgagcatg

SEQ ID NO: 694687 - DNA, 75 bp, synthetic construct
  source 1..75: mol_type = other DNA
accccgtttcgtgggctggcgcggttatccgtcagtgaagagatagagcggtttgtcagtcagtgtcgggatact

SEQ ID NO: 694688 - DNA, 75 bp, synthetic construct
  source 1..75: mol_type = other DNA
taaaaaactagtgctggcgagtacaaaaggctatttccaaatgccaccaaaagttaaaagtgatttcgtttttta

SEQ ID NO: 694689 - DNA, 75 bp, synthetic construct
  source 1..75: mol_type = other DNA
aatttagcatggtccaggttgggcatgatgtacgccaatggtcagtatgtcgaggtggattgtagtaaagcgaaa

SEQ ID NO: 694690 - DNA, 75 bp, synthetic construct
  source 1..75: mol_type = other DNA
aaccggaatttgagcgaaaatcttgtgcaactgtaaggaccacaatcgttgccgcaacggcaaccattaacggca

SEQ ID NO: 694691 - DNA, 60 bp, synthetic construct
  source 1..60: mol_type = other DNA
gctgggctgacattcaggaagcctttaacggcggtatcgcgggaactggtaagctgctga

SEQ ID NO: 694692 - DNA, 75 bp, synthetic construct
  source 1..75: mol_type = other DNA
tacgcattgcaatggagatttcctatctctgtgcggcaaggctcggtgatgtgcttgagttgaaatggcaggata

SEQ ID NO: 694693 - DNA, 75 bp, synthetic construct
  source 1..75: mol_type = other DNA
acggtggttatgtcgacccctcactgtgggagtcagggattaacgctgccacactggcatataccctgaacgcgt

SEQ ID NO: 694694 - DNA, 75 bp, synthetic construct
  source 1..75: mol_type = other DNA
ctatgacaggaaggttaaagtttcaccaacacttgatgtcccgttacctgaaaatattccaagaaaatattccaa

SEQ ID NO: 694695 - DNA, 75 bp, synthetic construct
  source 1..75: mol_type = other DNA
tttgtaaataacaattgttcttttaattgtctggatagtattcaaataggggagaatacaatatttggcgaaggt

SEQ ID NO: 694696 - DNA, 75 bp, synthetic construct
  source 1..75: mol_type = other DNA
ttgttcaaatttatcaaattatattatatgtttttaaatatttccctgctttatataatcagcaaaacatcaaaa

SEQ ID NO: 694697 - DNA, 75 bp, synthetic construct
  source 1..75: mol_type = other DNA
atcatggtttatatatagttttgttcgtactcatggtgtgaaatttatagatttaatacaaacaaacttattaat

SEQ ID NO: 694698 - DNA, 75 bp, synthetic construct
  source 1..75: mol_type = other DNA
acgagtggatgccaaagggcgttttctttcgcccttctggttattactggaaaccaggtggaacaacagaaaaac

SEQ ID NO: 694699 - DNA, 75 bp, synthetic construct
  source 1..75: mol_type = other DNA
cagtgggagcacagagcgggaagaatgctgttgagaataactacttgagcaataagcagatagatgcctggtccg

SEQ ID NO: 694700 - DNA, 75 bp, synthetic construct
  source 1..75: mol_type = other DNA
agttgaaggggtacgctgcttctacgtcagcaaatctaaaactaaagcgggtgtaaggcacgtccccatacactc

SEQ ID NO: 694701 - DNA, 75 bp, synthetic construct
  source 1..75: mol_type = other DNA
tctctgaaatgggaacagatcggaaacgacgggatctttatccagcaaggtaaaacaggaaagaaacagataaaa

SEQ ID NO: 694702 - DNA, 75 bp, synthetic construct
  source 1..75: mol_type = other DNA
gtgggtattaatcagcagcatgctggtgctggcgatggccctaccactatttattaccgtttcccttttgcgggc

SEQ ID NO: 694703 - DNA, 75 bp, synthetic construct
  source 1..75: mol_type = other DNA
tttatcgctgggggtatcaacgtggcttcgttcctggtaatccatgtgtaggagtggacaagtttccaaaaccaa

SEQ ID NO: 694704 - DNA, 75 bp, synthetic construct
  source 1..75: mol_type = other DNA
attattggtgctaattcacttgtaaataaatcaatttcggaagcaggggtttatgtaagtaaaaacggagtttta

SEQ ID NO: 694705 - DNA, 75 bp, synthetic construct
  source 1..75: mol_type = other DNA
tgatgcatcccctgatgcaatctcaacgctggatatttgcctgcctgaaacattgcaggcattacctgaagatga

SEQ ID NO: 694706 - DNA, 75 bp, synthetic construct
  source 1..75: mol_type = other DNA
ctggtgggccatcgtaaagccgtaaatcagaaacgtgcagcaagtcatatccgcaaaattcgtgaaatgctggtc

SEQ ID NO: 694707 - DNA, 75 bp, synthetic construct
  source 1..75: mol_type = other DNA
ctgccagcggtaaaactcgtcctaaattcatgcacggcgatatttaccgcgataaatacggcagcacggtaatga

SEQ ID NO: 694708 - DNA, 75 bp, synthetic construct
  source 1..75: mol_type = other DNA
taatgatggcaaatctctgcccttccacctttttggataaaaatagaaatgtcgctgctgagcttgatattaaaa

SEQ ID NO: 694709 - DNA, 75 bp, synthetic construct
  source 1..75: mol_type = other DNA
tcatgcgagcctgtgatgagctgagtgtacctgctgcgctggaaatatcccgctcacgtcagggagcgcatgtct

SEQ ID NO: 694710 - DNA, 75 bp, synthetic construct
  source 1..75: mol_type = other DNA
acggttaaaagtgccggagaggaaggcaataaacgttattttattgcgtctgcaccggataaagaccaggaatgg

SEQ ID NO: 694711 - DNA, 75 bp, synthetic construct
  source 1..75: mol_type = other DNA
agatccagtatctgtgggaagcagttctcctgccgtcgatactcatccccctgaagcttctgccagtaagaaaaa

SEQ ID NO: 694712 - DNA, 75 bp, synthetic construct
  source 1..75: mol_type = other DNA
ttacataaactatatggcaataccagaaaatgatggagtttttacatggctcccagatttttttccgcacgtagc

SEQ ID NO: 694713 - DNA, 75 bp, synthetic construct
  source 1..75: mol_type = other DNA
caaggaagtgttgtttactaacggtggaacggcaacttgcgtatatgggcctttaggtgatttagtgtccgttaa

SEQ ID NO: 694714 - DNA, 75 bp, synthetic construct
  source 1..75: mol_type = other DNA
tcctatgtcgcgtttgccaaaccatttgctgaaggttttaacctcggacgcgaagcgcatttcaataacgccaaa

SEQ ID NO: 694715 - DNA, 75 bp, synthetic construct
  source 1..75: mol_type = other DNA
ggtggatatatcaatatacacaaatgtagaagatgattattttttttcttatttttccctaacaaatgatgatgg

SEQ ID NO: 694716 - DNA, 75 bp, synthetic construct
  source 1..75: mol_type = other DNA
agacaaaatgcgaaaacgatccggtattccgcgaacgttacctacgcgcccaggttaagccgctggctgaagttc

SEQ ID NO: 694717 - DNA, 75 bp, synthetic construct
  source 1..75: mol_type = other DNA
aacagcggggagtacctgctcccccaatccaacaaaattaaacgtgcggatagtaagcgtgggccgtggtattcg

SEQ ID NO: 694718 - DNA, 75 bp, synthetic construct
  source 1..75: mol_type = other DNA
agttaattattcctattggacgccttcataataataatatgtcattatctgttttagcaggtagaagtctatcta

SEQ ID NO: 694719 - DNA, 75 bp, synthetic construct
  source 1..75: mol_type = other DNA
catgccgggatgcagtggatcccactggtaccagaacagaacaatattttgccttactccgctcgtctgaagtca

SEQ ID NO: 694720 - DNA, 75 bp, synthetic construct
  source 1..75: mol_type = other DNA
gcgtccggtgaaactgaatgatcttcatgccgggatgcagtggatcccactggtaccagaacagaacaatatttt

SEQ ID NO: 694721 - DNA, 75 bp, synthetic construct
  source 1..75: mol_type = other DNA
tcattcctgaatatgttatcagggagtgcgacgcgcttatacttcctcctccaccggcaaatgacgatgcgctgg

SEQ ID NO: 694722 - DNA, 75 bp, synthetic construct
  source 1..75: mol_type = other DNA
acgtcgggcttgaagaattcatcacgcacctgggggaactcagcgccgcatttaagctgagtagtaccgggattg

SEQ ID NO: 694723 - DNA, 75 bp, synthetic construct
  source 1..75: mol_type = other DNA
tcagacttatgcagctggttttggcgagtctagtaagatttatgagtataggtttgtatttgatcctgtattgca

SEQ ID NO: 694724 - DNA, 75 bp, synthetic construct
  source 1..75: mol_type = other DNA
tgaacccggtgcaacggctggatccgctgggattaagtgcggcgttgggcgcaggagcattaactgccatgggaa

SEQ ID NO: 694725 - DNA, 75 bp, synthetic construct
  source 1..75: mol_type = other DNA
cgccggacacgctgaatcatcaatttactgggaagatccggaaacaggaattttgtgtcggtgccgtccggacaa

SEQ ID NO: 694726 - DNA, 75 bp, synthetic construct
  source 1..75: mol_type = other DNA
ttcggggatccctcttaaacttggaaacattattgacctgttacagcgttcaactggaatatctgttgtaaaaaa

SEQ ID NO: 694727 - DNA, 75 bp, synthetic construct
  source 1..75: mol_type = other DNA
atcatgaatcagatccgccctttcataccccttgtacagaatggaacgatgagcctcgaagagttcaaacacaaa

SEQ ID NO: 694728 - DNA, 75 bp, synthetic construct
  source 1..75: mol_type = other DNA
tgtcacacaagctgtcacacacaatgattcgtgggcgcacatactacactaactttagactaaatgattcaacaa

SEQ ID NO: 694729 - DNA, 75 bp, synthetic construct
  source 1..75: mol_type = other DNA
actgcctgggtggtggcagtacgggaagcccgggaggatggggaccagaagatgagaatagcgcaagagatcgta

SEQ ID NO: 694730 - DNA, 75 bp, synthetic construct
  source 1..75: mol_type = other DNA
cacattcccgacggtttggaatcttataagccgtacatccaaagtaaaagcagcgtagagtggatcgagtggcag

SEQ ID NO: 694731 - DNA, 75 bp, synthetic construct
  source 1..75: mol_type = other DNA
gtttgaatacggaagagaaagatggtcgcgtctatagcgcctttattcgtctgaccgcccgtgaccgtgtgcatc

SEQ ID NO: 694732 - DNA, 75 bp, synthetic construct
  source 1..75: mol_type = other DNA
ggtggatgccgatcctagtgaaacccttatggattttgaggaactagggctgcttgagttgattattgaacgcgg

SEQ ID NO: 694733 - DNA, 75 bp, synthetic construct
  source 1..75: mol_type = other DNA
agggaaaattattcgtgtttgtggatgagtgccaccgaacccaatccggcaaactgcattcggcaatgacaagca

SEQ ID NO: 694734 - DNA, 75 bp, synthetic construct
  source 1..75: mol_type = other DNA
tccctgcgtggtcactttattacttgcttagacagagcaggagtaccagaacagcgcataggggcaataaccggg

SEQ ID NO: 694735 - DNA, 75 bp, synthetic construct
  source 1..75: mol_type = other DNA
ttgctcattatggaataaaggttgtaaatgtaaatcatcagtattccttatattggcacctttatttcatttctc

SEQ ID NO: 694736 - DNA, 75 bp, synthetic construct
  source 1..75: mol_type = other DNA
aaaaccgaagtggtgaactactgtaccgaagcgccgtttattcaaacgttatgcccgacgctggtgttggggcct

SEQ ID NO: 694737 - DNA, 75 bp, synthetic construct
  source 1..75: mol_type = other DNA
gcgatggggtaagttcaaaccctggatcctgatcggtacgttggcaaactctgtaatcttagagcctgttcagga

SEQ ID NO: 694738 - DNA, 75 bp, synthetic construct
  source 1..75: mol_type = other DNA
gcgatggggtaagttcaaaccctggatcctgatcggtacgttggcaaactctgtaatcttagagcctgtacatag

SEQ ID NO: 694739 - DNA, 75 bp, synthetic construct
  source 1..75: mol_type = other DNA
gaagggaattgatcctcgtgaagtcaaaatactgcgggagcgcattgaaacgcttaaaaaggatattcaggcggt

SEQ ID NO: 694740 - DNA, 75 bp, synthetic construct
  source 1..75: mol_type = other DNA
gcccggatttggtgctgtatgttaacggtattgcgcttggtgtcattgagctaaaacgttctacagtgtcagtct

SEQ ID NO: 694741 - DNA, 75 bp, synthetic construct
  source 1..75: mol_type = other DNA
gcatttgaaagagggctgatagatacacacgttataaatgaaatggtttcagaagaaggttatgagaaaataaaa

SEQ ID NO: 694742 - DNA, 75 bp, synthetic construct
  source 1..75: mol_type = other DNA
atatggtcacgaattccacatatatatagttccttttaccgatattgatgttacacgaaaaaaattaattcatga

SEQ ID NO: 694743 - DNA, 75 bp, synthetic construct
  source 1..75: mol_type = other DNA
aagggcgggactcgcacaacctgaataaattcacctggcgctttatgcagtgcctgacaggcagcattgcaatat

SEQ ID NO: 694744 - DNA, 75 bp, synthetic construct
  source 1..75: mol_type = other DNA
cacagcgctgtccgacagcctgacggcataccagcgtgaacaccgggcggtcattatcgtggccccggcggtggt

SEQ ID NO: 694745 - DNA, 75 bp, synthetic construct
  source 1..75: mol_type = other DNA
gtgcatttcctgcaggaagcatatcgtatcagttttattcgggagtgtctggcgatccatgccggaaagtcgctg

SEQ ID NO: 694746 - DNA, 75 bp, synthetic construct
  source 1..75: mol_type = other DNA
gatcattttggctgaaatgaagctcgaaatgggagaacgcttgttagtccagcccgcagaagatatttacaacgc

SEQ ID NO: 694747 - DNA, 75 bp, synthetic construct
  source 1..75: mol_type = other DNA
gcatccgcaaatactaccactgtagcagtcacgcaagataagccaaatataggctttgttacttgcggaaaacgg

SEQ ID NO: 694748 - DNA, 75 bp, synthetic construct
  source 1..75: mol_type = other DNA
atgagtctgcacaatgagcgcattgcagatattgcattacatgaaaaggaggaaaagaaacctgaaattgaaatc

SEQ ID NO: 694749 - DNA, 75 bp, synthetic construct
  source 1..75: mol_type = other DNA
tggcatccttgttaggtgaatatgatgatcgaggtcagcagggatatgttttgacagatttattttttgattggt

SEQ ID NO: 694750 - DNA, 75 bp, synthetic construct
  source 1..75: mol_type = other DNA
ggcgactaaaaaaattactaaaatctcgacaagtgctttatatgaagcatatggcagtttattcaaagatatatc

SEQ ID NO: 694751 - DNA, 75 bp, synthetic construct
  source 1..75: mol_type = other DNA
aatttgaacgcgctatgcttcgtgaacggacaaagagtggacttgcagcggcacgccaggacgggttggtggacg

SEQ ID NO: 694752 - DNA, 75 bp, synthetic construct
  source 1..75: mol_type = other DNA
cagggaatacaatcatgagagaacgcattcatcattaaataacatgactccggctgaatttatccgaagtctccg

SEQ ID NO: 694753 - DNA, 75 bp, synthetic construct
  source 1..75: mol_type = other DNA
aaccaatctagtgatggttatgggtatcaaaaatgctcatgatattattaaacagcaactaaggcgttttgaaaa

SEQ ID NO: 694754 - DNA, 75 bp, synthetic construct
  source 1..75: mol_type = other DNA
gggtcgattacttgaagtcaaaagcaacatagacgttgtcgctattaatgatctcacttcccccataaattctcg

SEQ ID NO: 694755 - DNA, 75 bp, synthetic construct
  source 1..75: mol_type = other DNA
tagttgtgatattgaaattcatgttgaatcgcacttgaatcataaaattgatggcggtcaattatatgcgcttgt

SEQ ID NO: 694756 - DNA, 75 bp, synthetic construct
  source 1..75: mol_type = other DNA
acagaccggcgaggcccgcaaaacggcagagctggatcgtgaacggttgtttgcgtgctttaaatttatgacaac

SEQ ID NO: 694757 - DNA, 75 bp, synthetic construct
  source 1..75: mol_type = other DNA
tttgcggtcggcgtggcggtaggactgagtgacgatcaggggattgccgggttgtcggcgatcgccggttttctg

SEQ ID NO: 694758 - DNA, 75 bp, synthetic construct
  source 1..75: mol_type = other DNA
gatcgtccttacggcggcgggccggggatgttaatgatggtgcaacctttacgggacgccatccatgcagcaaaa

SEQ ID NO: 694759 - DNA, 75 bp, synthetic construct
  source 1..75: mol_type = other DNA
ttgttgctcagtatcagttcgactttggcctgcgcccgtccatcgcttacctgcaatctaaaggtaaggatttag

SEQ ID NO: 694760 - DNA, 75 bp, synthetic construct
  source 1..75: mol_type = other DNA
ttatcttgatgtcgaacgtgatggctggccgttgttccttgtctctccgtcaaatctggcccgtctgaataatgc

SEQ ID NO: 694761 - DNA, 75 bp, synthetic construct
  source 1..75: mol_type = other DNA
ggcgatgatctgcaatttctgtgggtcaatcaggcggttgcgattggcgataatctcgaggcggatttaggccaa

SEQ ID NO: 694762 - DNA, 75 bp, synthetic construct
  source 1..75: mol_type = other DNA
gccggttatcgttggtggcaatgtacttatggtacatcttgtaaggggccatttattgtaggttctgttactggg

SEQ ID NO: 694763 - DNA, 75 bp, synthetic construct
  source 1..75: mol_type = other DNA
tttggtcagtatcgagatttggaagtgcgtccatcagggctttctgcttcatgtcctgtggctaaatttaatgtg

SEQ ID NO: 694764 - DNA, 75 bp, synthetic construct
  source 1..75: mol_type = other DNA
tgcgtgaggcggcagaagcaataaaaatagcagccacaccacaaaaattgctggcatttcgtatgaaagccacac

SEQ ID NO: 694765 - DNA, 75 bp, synthetic construct
  source 1..75: mol_type = other DNA
gctgttgatccagttgtctccacaggagctcggatatcagcgctcgcgttggagttccgaactgatggcgcttga

SEQ ID NO: 694766 - DNA, 75 bp, synthetic construct
  source 1..75: mol_type = other DNA
taaattcggtgagtatgatccagcggttgttattgacagccttaaagcgaaaacatcaggaattcgtcgtgccgc

SEQ ID NO: 694767 - DNA, 75 bp, synthetic construct
  source 1..75: mol_type = other DNA
acagcttaacatcctgcaaaaccagactggcatcacatttaaaggtcaggatgctgcttatctgaaaggattgaa

SEQ ID NO: 694768 - DNA, 75 bp, synthetic construct
  source 1..75: mol_type = other DNA
ataacaaagtatggtgaaaatgacttcctgtttgaatttcatattccgataagaaaccccagcgctatcagttaa

SEQ ID NO: 694769 - DNA, 75 bp, synthetic construct
  source 1..75: mol_type = other DNA
aggtgaaggtcaccgatgctaacggtaatacgcttgccggacagacggtcagcgtgttggcaggcaacagcgcaa

SEQ ID NO: 694770 - DNA, 75 bp, synthetic construct
  source 1..75: mol_type = other DNA
aaatacggattataattggacggctgggatttatggaattaatgttgacagtaatggagaagtaacattatctgt

SEQ ID NO: 694771 - DNA, 75 bp, synthetic construct
  source 1..75: mol_type = other DNA
accgatgcgttcggtaatgcgcttgccgggcagacggtcagcgtgttggcgggcaacagcgcaacggttgctccg

SEQ ID NO: 694772 - DNA, 75 bp, synthetic construct
  source 1..75: mol_type = other DNA
tcctcaacgagtaagcttgaataatacacctattaacaatccggtgctgagatctattaccaatgaaatgattgt

SEQ ID NO: 694773 - DNA, 75 bp, synthetic construct
  source 1..75: mol_type = other DNA
tgtcggataacagcggtcacgtttgcggcgtttgtccggcctgtgaacagggtgatttttctgtgttgtacagaa

SEQ ID NO: 694774 - DNA, 75 bp, synthetic construct
  source 1..75: mol_type = other DNA
tatcgccgatgtcaggacggcgaagatcgcggatctggtggtcacccgggataactcagtggctgacggcgcaat

SEQ ID NO: 694775 - DNA, 75 bp, synthetic construct
  source 1..75: mol_type = other DNA
gcaggcaaattctgctatcaggacagataaatcggcatatatcgccggggagccattaaccgtcacaataacgtt

SEQ ID NO: 694776 - DNA, 75 bp, synthetic construct
  source 1..75: mol_type = other DNA
tattataaatgcatcatgcaatagctatggacaagtggcgtcatctttagaattagcgcagcgaccaagtagtgg

SEQ ID NO: 694777 - DNA, 75 bp, synthetic construct
  source 1..75: mol_type = other DNA
ctggcactgacccgtcagaaacgggaagctgggttgaatcaggtggcgtgtataccacaacccgaatggcgacga

SEQ ID NO: 694778 - DNA, 75 bp, synthetic construct
  source 1..75: mol_type = other DNA
agccagacggcgggcaccagtacagtcaccgccagcatcaacaacagcagccagagccagaacgtcacctttgta

SEQ ID NO: 694779 - DNA, 75 bp, synthetic construct
  source 1..75: mol_type = other DNA
gctgataagaagtgaagttactattaccgggaaacccaagaatggtaaagggaatgatgttgtatttaaattcaa

SEQ ID NO: 694780 - DNA, 75 bp, synthetic construct
  source 1..75: mol_type = other DNA
cttgccggacaggcggtcagcgtgttggcaggcaacagcgcaacggttgcttcgacggtcaccacgcagccggat

SEQ ID NO: 694781 - DNA, 75 bp, synthetic construct
  source 1..75: mol_type = other DNA
ccaaaacaccgattaccgcggcagacttactgaatgatcgtgtactgccgttttatgcgtctcagagcctgccga

SEQ ID NO: 694782 - DNA, 75 bp, synthetic construct
  source 1..75: mol_type = other DNA
gtggcgtgtataccacaacccgaatggcgacgattgccagtaccaatcagcacgccaacctgcaattgcagtcgt

SEQ ID NO: 694783 - DNA, 75 bp, synthetic construct
  source 1..75: mol_type = other DNA
cgatagtaaaacggtgaactttgttgctgatgttagcacggcgcaggtcgcggagctggtggtcattaaggacgg

SEQ ID NO: 694784 - DNA, 75 bp, synthetic construct
  source 1..75: mol_type = other DNA
ctattctccgcgccgccagcgctggtagtgcctgataagttgccgcgtgaatacagaaacggttggcctcttgcg

SEQ ID NO: 694785 - DNA, 75 bp, synthetic construct
  source 1..75: mol_type = other DNA
gcctgatggatatcgcccgtatcgcccagaccgggcagtcgtatctttatactaacgtcagcaacgccagcaact

SEQ ID NO: 694786 - DNA, 75 bp, synthetic construct
  source 1..75: mol_type = other DNA
aatgaggaaaacgtacaagtcaggaatgcggatcctatccagggcaataattgggtttacaacggcaatgggcaa

SEQ ID NO: 694787 - DNA, 75 bp, synthetic construct
  source 1..75: mol_type = other DNA
agccggacggcacggtggagatcagtgtcaccagtcagacggcgggagtcagtactgtcactgccagcattaaca

SEQ ID NO: 694788 - DNA, 75 bp, synthetic construct
  source 1..75: mol_type = other DNA
gttctctcccaggcacaggcgcaaaacagccagtacacgctggcacgtactttcgccactcaaaaagtgtcactg

SEQ ID NO: 694789 - DNA, 75 bp, synthetic construct
  source 1..75: mol_type = other DNA
ctcgatagaagtaatgatatagccgttcagatgatggcaaatgaggcgagagcttggaccatgtcttgcaagagt

SEQ ID NO: 694790 - DNA, 75 bp, synthetic construct
  source 1..75: mol_type = other DNA
tactatttaatggtgacgactttattctgattgatcacgaaactgcaatccctcctggattatctccagaccaaa

SEQ ID NO: 694791 - DNA, 75 bp, synthetic construct
  source 1..75: mol_type = other DNA
tggtgttcccggcagaactggtgaggatgctggacaggctggaggaagaaatccgggcagaccgcgtgagcagtg

SEQ ID NO: 694792 - DNA, 75 bp, synthetic construct
  source 1..75: mol_type = other DNA
gaagcttcacgccgctcatccgggtcgagacagagaacggcgagcgggaaaaagcgcagcggcgcagcctggcag

SEQ ID NO: 694793 - DNA, 75 bp, synthetic construct
  source 1..75: mol_type = other DNA
gaatacggcaggctgacggagaagacggaccgcattccggaaggggttatccggatgcacgacgagcggacccac

SEQ ID NO: 694794 - DNA, 75 bp, synthetic construct
  source 1..75: mol_type = other DNA
atgatcaaacagcaggcgttcaaatttgcattgaagctcaacgagcagcagaaggctaacatgctgcttttcgct

SEQ ID NO: 694795 - DNA, 75 bp, synthetic construct
  source 1..75: mol_type = other DNA
taagccagcaacattaaccgttgcatttaaaaaagcccgggattctgtggattacaactggcgtgctaatggcac

SEQ ID NO: 694796 - DNA, 75 bp, synthetic construct
  source 1..75: mol_type = other DNA
ctgcgttgcgataaattaaatctcaccctggatgatgtggtgtcatcctgccgcgattgcgttcttagtccgtgg

SEQ ID NO: 694797 - DNA, 75 bp, synthetic construct
  source 1..75: mol_type = other DNA
gtgaaagcccttgtggaagacgccctgcaaagcgggcagacgttcagcgagttccgggagatgctgcaaccgctg

SEQ ID NO: 694798 - DNA, 75 bp, synthetic construct
  source 1..75: mol_type = other DNA
ccatgcgcgcccatgcagccggtgaaccggtcgtcatcagccagctgctcgacacgctggcgctgaccgccgccg

SEQ ID NO: 694799 - DNA, 75 bp, synthetic construct
  source 1..75: mol_type = other DNA
gcgagctgctgccgttctatgcgccgtgggtcgccggtgtgctggctgatggccgtggtgcgcaggatgacattg

SEQ ID NO: 694800 - DNA, 75 bp, synthetic construct
  source 1..75: mol_type = other DNA
ttctggtcgaaacaaagataatggatgagagttctgaaaaaacatcatcaaaatatattgccacaccacctttgt

SEQ ID NO: 694801 - DNA, 75 bp, synthetic construct
  source 1..75: mol_type = other DNA
atgcttaaaaaaataacgttaattataacagcggcattttcagttatatcttatgccacacaattagaaacaaac

SEQ ID NO: 694802 - DNA, 75 bp, synthetic construct
  source 1..75: mol_type = other DNA
tggcagggcgatgacgtacagcgccgggtgaaaggtgtggtgacctggtttgaactgggggagaacgacaaaaac

SEQ ID NO: 694803 - DNA, 75 bp, synthetic construct
  source 1..75: mol_type = other DNA
tgacttatgaatttgttagacagttaatgtataagcaagaatggttgggtggtaaggtaattcggttgggcgatt

SEQ ID NO: 694804 - DNA, 75 bp, synthetic construct
  source 1..75: mol_type = other DNA
atgtattcacagtatgcgccgtttcggttctgcagagcagctacgtaaaacggcagagagcaccctggaaacggg

SEQ ID NO: 694805 - DNA, 75 bp, synthetic construct
  source 1..75: mol_type = other DNA
acgaccatcaagatgggcactggctcagctactgccgtcctgcctgtagtcaaacgcctgaagttcaccaagacc

SEQ ID NO: 694806 - DNA, 75 bp, synthetic construct
  source 1..75: mol_type = other DNA
gcgcacactgaaagcgatttattcaaaagagctgaaggccgcgaaaaagcgcgaactgctgccgttctggttgcc

SEQ ID NO: 694807 - DNA, 75 bp, synthetic construct
  source 1..75: mol_type = other DNA
tgattacggtttttgttgccgcctttatgttggctcgttttgctgtatatcattttttggtttggcttaaaccaa

SEQ ID NO: 694808 - DNA, 75 bp, synthetic construct
  source 1..75: mol_type = other DNA
ccattgagctttatttcaaatatagcaaaaagcttgcccctgccatacgcgatctgttgtcccgaaaagttaatc

SEQ ID NO: 694809 - DNA, 75 bp, synthetic construct
  source 1..75: mol_type = other DNA
caacaggacgtaaacgccgccgtacagaagcgcaatcaggtggcagaagagaacaaagtggctgagtctggattg

SEQ ID NO: 694810 - DNA, 75 bp, synthetic construct
  source 1..75: mol_type = other DNA
gttcggcaatacgaatgttggcgtcgcacgcttcccgatggatgcggttattaagctgttcgacgggcagcaccg

SEQ ID NO: 694811 - DNA, 75 bp, synthetic construct
  source 1..75: mol_type = other DNA
agattcctttacggagagtaacatcaggtatttttgttggtaatattatagaaaactctactttaagtaatgatg

SEQ ID NO: 694812 - DNA, 75 bp, synthetic construct
  source 1..75: mol_type = other DNA
tacatgaaaacaactatatacatcgtgatttaaaaccaggaaacatactttattatgccgatggaaagtataaaa

SEQ ID NO: 694813 - DNA, 75 bp, synthetic construct
  source 1..75: mol_type = other DNA
acagcattattccccaggaagcactggcctggctgaaggcgaaaaagctgaagccgggatttgattaccgcgatg

SEQ ID NO: 694814 - DNA, 75 bp, synthetic construct
  source 1..75: mol_type = other DNA
gccacccgcgccccgcgtaagacccggagtgtgacaccggcaaaacgtggacgcccgaaaaagaaagccagttaa

SEQ ID NO: 694815 - DNA, 75 bp, synthetic construct
  source 1..75: mol_type = other DNA
gccacccgtgccacgcgtaagacccggagcgtgacaccggcaaaacgtggacgcccgaaaaagaaagccagttaa

SEQ ID NO: 694816 - DNA, 75 bp, synthetic construct
  source 1..75: mol_type = other DNA
attgcagtctctgaaagaagctgggtttaggctggtttttctgcttttgaagatgagtaaattcatctacaattc

SEQ ID NO: 694817 - DNA, 75 bp, synthetic construct
  source 1..75: mol_type = other DNA
acaggctatgatacttgtgaaatttgtgggactccctgtgaagcaatgggcgagacaatgaggtatacgggctgc

SEQ ID NO: 694818 - DNA, 75 bp, synthetic construct
  source 1..75: mol_type = other DNA
acaccgcctgtgggcggtgttgtgctttctgcggcaggcttttttccgccagaccggaaacgccatttccgcctg

SEQ ID NO: 694819 - DNA, 75 bp, synthetic construct
  source 1..75: mol_type = other DNA
ctcacccagtcactctcttcacttttttccctcgacctttctctggtcagtcagcagtttctttcccttgaacga

SEQ ID NO: 694820 - DNA, 75 bp, synthetic construct
  source 1..75: mol_type = other DNA
atgatgcgctgtccattctgccgcacggcggcccacgttcgcaccagccgctatatgtcggagagcgtcaaagaa

SEQ ID NO: 694821 - DNA, 75 bp, synthetic construct
  source 1..75: mol_type = other DNA
agttgaagagagcgacatggtgggcgaagaaggaatgggtttcctcaatgtgatgtacaactttgagatggagcg

SEQ ID NO: 694822 - DNA, 75 bp, synthetic construct
  source 1..75: mol_type = other DNA
aaattaaagaatcattcctttgacaaaaattgtatttataaatcggtttatagaccgtttaacaaatcaaatcta

SEQ ID NO: 694823 - DNA, 75 bp, synthetic construct
  source 1..75: mol_type = other DNA
gatgatgttttttctgagtattgtttagatgatgaaaatatgagtatccagccagaatggataaatacgccggga

SEQ ID NO: 694824 - DNA, 75 bp, synthetic construct
  source 1..75: mol_type = other DNA
tctggtgcgttggagatatgacgcctttactctcatggtggcgaaatcgacagattccggttttacccggagatc

SEQ ID NO: 694825 - DNA, 75 bp, synthetic construct
  source 1..75: mol_type = other DNA
atgaacgatgtgttcctgaagcgactgtttgcggtgagtattacctcatcaggtgagcctccgacgttctccctg

SEQ ID NO: 694826 - DNA, 75 bp, synthetic construct
  source 1..75: mol_type = other DNA
tatccgatgaatcaagattacttatcaatatagatctattaacaaacaaaaagaacatccttttaaacttgagac

SEQ ID NO: 694827 - DNA, 75 bp, synthetic construct
  source 1..75: mol_type = other DNA
cttaacaacgcctccgcaaaaaacgagccaaaaagaaaacttgatgttaatctgaaagatatttcaggactggat

SEQ ID NO: 694828 - DNA, 75 bp, synthetic construct
  source 1..75: mol_type = other DNA
aatctttcttcacttacatattcaccgcatgacggttatttatatgcaacagtgaataaaccagcaaaagtatta

SEQ ID NO: 694829 - DNA, 75 bp, synthetic construct
  source 1..75: mol_type = other DNA
cccgataagcataatgactggctgaaccagcgtgacgagagatttaattattttatcgagatgggaaataaaaaa

SEQ ID NO: 694830 - DNA, 75 bp, synthetic construct
  source 1..75: mol_type = other DNA
agcaaagaagatgttttcaattatgtatacggattgcttcattctgaagattatcgtggacgttatgctgataac

SEQ ID NO: 694831 - DNA, 75 bp, synthetic construct
  source 1..75: mol_type = other DNA
tgtctcacttgtcttgactttactgacaatgccagcctcgtcaatatcaacctcagctttaataaaattaaaacg

SEQ ID NO: 694832 - DNA, 75 bp, synthetic construct
  source 1..75: mol_type = other DNA
gccagaatggataaatacgccgggaatatctgatttagatactggtattgatttgtctggtatatcttttattca

SEQ ID NO: 694833 - DNA, 75 bp, synthetic construct
  source 1..75: mol_type = other DNA
ttgaaggaaaaataagcagaaaaaaatacaatgagatttttaactataaacaagaacaagccagacaatatttca

SEQ ID NO: 694834 - DNA, 75 bp, synthetic construct
  source 1..75: mol_type = other DNA
gtaaagacttattcactcccaatagaaaaggatgacaatggatattacgatttcagcggtctatatctagcacac

SEQ ID NO: 694835 - DNA, 75 bp, synthetic construct
  source 1..75: mol_type = other DNA
cagctggacgccgggggcgtggtcacccgcggtgccggtgatggtattcgcgtggatgtacgggcggtggataca

SEQ ID NO: 694836 - DNA, 75 bp, synthetic construct
  source 1..75: mol_type = other DNA
gaaacgtgattcttatgagcatacagacaagaagtttgctgaagcaggaaaagctatccgctcggctgctgcaca

SEQ ID NO: 694837 - DNA, 75 bp, synthetic construct
  source 1..75: mol_type = other DNA
cagtttgaaaactcgccagagaagcgaaccgctttattcatgcactactacaacacatgtatttttccagtacag

SEQ ID NO: 694838 - DNA, 75 bp, synthetic construct
  source 1..75: mol_type = other DNA
gggtagcgtgaaggctaacggcaagccaatcgatgatacgcacactcatggcggtgttcagcgcggtggaagcaa

SEQ ID NO: 694839 - DNA, 75 bp, synthetic construct
  source 1..75: mol_type = other DNA
gccagaacagataaatacgccgggaatatctgatttagatactggtattgatttgtctggcatatcttttattca

SEQ ID NO: 694840 - DNA, 75 bp, synthetic construct
  source 1..75: mol_type = other DNA
gacgttatttggcgttgatctacaatctgacaacaaaattcaggggcagggtagtcttatgtcatggagctttct

SEQ ID NO: 694841 - DNA, 75 bp, synthetic construct
  source 1..75: mol_type = other DNA
aaaaggaagtatacgaagagtttattaaaattgttgataaacaaacgatcgaggctcttgttgatgcggcattct

SEQ ID NO: 694842 - DNA, 75 bp, synthetic construct
  source 1..75: mol_type = other DNA
ctgatgtcgtcgcttcggcttgtcatgtcgttattgatggtaatggaaccgggcaggggcaacttacattcgaca

SEQ ID NO: 694843 - DNA, 75 bp, synthetic construct
  source 1..75: mol_type = other DNA
gtttacctccctcctgaactttttgctcaggcttacaagttaaacaataaggaaatgaatgcgcaactcgactat

SEQ ID NO: 694844 - DNA, 75 bp, synthetic construct
  source 1..75: mol_type = other DNA
tttctgagtattgtttagatgataatgaaaatatgagtatccagccagcgcggataaatacgccgggaatatctg

SEQ ID NO: 694845 - DNA, 75 bp, synthetic construct
  source 1..75: mol_type = other DNA
acttgctgttcgtggggagtggcaggagcggaagattgcgcaggtcagtaagcctgcttccgcaatcaacatcac

SEQ ID NO: 694846 - DNA, 75 bp, synthetic construct
  source 1..75: mol_type = other DNA
ctgatagcaggcggtgcgctgctggcaatgactgcaacggttggctcgttgtcgctggttattggtgtgcttcac

SEQ ID NO: 694847 - DNA, 75 bp, synthetic construct
  source 1..75: mol_type = other DNA
tggctccgttgcgcgaaacctttgaacggttcggtcctgtttttgatgtcgtgcgcgatgggattattcaggtct

SEQ ID NO: 694848 - DNA, 75 bp, synthetic construct
  source 1..75: mol_type = other DNA
gtgctggctatactgacaagaaatatgttaccaacatgggggccggggatgacattatgatgattggccttggta

SEQ ID NO: 694849 - DNA, 75 bp, synthetic construct
  source 1..75: mol_type = other DNA
ctgttgcctccggatttggcggtgaaattcatgttcatctgcataacgttgttacgcagaatccccgcgaactgg

SEQ ID NO: 694850 - DNA, 75 bp, synthetic construct
  source 1..75: mol_type = other DNA
gatttggagatacgcggcccaggtgagctactaggtacgcgtcagacagggaatgccgaatttaaagtggcagat

SEQ ID NO: 694851 - DNA, 75 bp, synthetic construct
  source 1..75: mol_type = other DNA
cagtccggttggtcttatcgtggctgcgcttgccggagctgccgttcttatctggaaatactgggatcccatcag

SEQ ID NO: 694852 - DNA, 75 bp, synthetic construct
  source 1..75: mol_type = other DNA
aacaacactggcacgctgcgcaggctcagcaaaattgcagataacacaggcaagctggttgatgagacgaaaaag

SEQ ID NO: 694853 - DNA, 75 bp, synthetic construct
  source 1..75: mol_type = other DNA
ccgccctgccgaaaacgcccgccgcctgatggggcagtttggtgactccatccagcgaacgcagggggcgatcaa

SEQ ID NO: 694854 - DNA, 75 bp, synthetic construct
  source 1..75: mol_type = other DNA
ttatggccctcgttgatgcggcaggtgacggttccttacccaaactgagaaaagaacttgaaggcgcacgcggtg

SEQ ID NO: 694855 - DNA, 75 bp, synthetic construct
  source 1..75: mol_type = other DNA
ggctgcgtatccgcattgccgatctgattgacggtccgctgcgttctgtcacgcagtggctgacgaaggtggtct

SEQ ID NO: 694856 - DNA, 75 bp, synthetic construct
  source 1..75: mol_type = other DNA
aaaatcaatccgccgaagcctgtggaaaatggcaatggcaccggaggtgataaccccaaagacaataaaccgctc

SEQ ID NO: 694857 - DNA, 75 bp, synthetic construct
  source 1..75: mol_type = other DNA
gtagattttggcgatataccaataaatgatgtatcttcaaaaaaaatagtgaaaagtgttagtgttcattgccca

SEQ ID NO: 694858 - DNA, 75 bp, synthetic construct
  source 1..75: mol_type = other DNA
cgtccaacatcagcccgtgctgcttgaagcccagcaggcttaccttggacaagggatggattgcttggcctcacg

SEQ ID NO: 694859 - DNA, 75 bp, synthetic construct
  source 1..75: mol_type = other DNA
tcttaattttatttggcagttttgccgtcatgctggcaataggtgtgccaattacttttgcgattggtctttctt

SEQ ID NO: 694860 - DNA, 75 bp, synthetic construct
  source 1..75: mol_type = other DNA
attattaaacttttatacgacgcacaggagcacgacacctatgacccaaaagacgaccacacaaacaaccacatc

SEQ ID NO: 694861 - DNA, 75 bp, synthetic construct
  source 1..75: mol_type = other DNA
aaggttagaacttattattataatgttccagttgtaacagattgggtgtttacaactgaaaaaccacagtcacct

SEQ ID NO: 694862 - DNA, 75 bp, synthetic construct
  source 1..75: mol_type = other DNA
acgacagccagcaccgtctggtgttctacacgcggatacagcacggtgagccgcaggtggagagccgctacctct

SEQ ID NO: 694863 - DNA, 75 bp, synthetic construct
  source 1..75: mol_type = other DNA
cacgggtttacccccgttcaggttgtgctgcaactcgacccggcatggaccaccgactggatgacccccgatgcc

SEQ ID NO: 694864 - DNA, 75 bp, synthetic construct
  source 1..75: mol_type = other DNA
ctgtatttctaaaatagaaagatttgaatttaagtattctaaatatagcaaattattaaactcctattccgaaat

SEQ ID NO: 694865 - DNA, 75 bp, synthetic construct
  source 1..75: mol_type = other DNA
tcatctgtcttatataggaatgtaataaatgctatattgagatttttgcctgaattcgaaagcattaatctggtt

SEQ ID NO: 694866 - DNA, 75 bp, synthetic construct
  source 1..75: mol_type = other DNA
ttgcctttgatggcatattattctattgcgcgttcttatataggcggtggggttgataggaaaagaaaaaatgct

SEQ ID NO: 694867 - DNA, 75 bp, synthetic construct
  source 1..75: mol_type = other DNA
attgctctgcgctcctggtgggatgttagcgaaaacattgccagtggtcatttagtacaagtgctaccggaatat

SEQ ID NO: 694868 - DNA, 75 bp, synthetic construct
  source 1..75: mol_type = other DNA
ccgcttaatttctattatattttcctgattttaatgacagtaattacctgtactggatttattactatagcaaga

SEQ ID NO: 694869 - DNA, 75 bp, synthetic construct
  source 1..75: mol_type = other DNA
atgcctatacgtgaattcagcgatgaagaatatcaaggtcgatttataactgaatccagaattaacaataatgca

SEQ ID NO: 694870 - DNA, 75 bp, synthetic construct
  source 1..75: mol_type = other DNA
gaaggtgtgccggagcagccgctgacgccgcctccgggtattgtgacggtgaatatcgatcgcagcaccgggcag

SEQ ID NO: 694871 - DNA, 75 bp, synthetic construct
  source 1..75: mol_type = other DNA
atgacagtcagagagcatgaacgaagcactgtccggcagcgacggctggcacgaaacctcgtcgtcgatattgac

SEQ ID NO: 694872 - DNA, 75 bp, synthetic construct
  source 1..75: mol_type = other DNA
cggggaatccctgcctgtcaccacctggtcaacggatgatgcctttatcaaccagttcgaagcggaaaatcgtaa

SEQ ID NO: 694873 - DNA, 75 bp, synthetic construct
  source 1..75: mol_type = other DNA
ccgtgggcgaattatcggcagcggcgatcgtgagcgtattggtgaattgcacgaaggtgcattgctggtactttc

SEQ ID NO: 694874 - DNA, 75 bp, synthetic construct
  source 1..75: mol_type = other DNA
caaaatggagcctgtacatagatttgtgtaattgcctgattttgatatgttcaattcaacatcaaatgaaggtta

SEQ ID NO: 694875 - DNA, 75 bp, synthetic construct
  source 1..75: mol_type = other DNA
ctgcctgccattatcggcatggcggcgttcaccatgaacccgaatctggaaaacagcaactacgccttcttgttc

SEQ ID NO: 694876 - DNA, 75 bp, synthetic construct
  source 1..75: mol_type = other DNA
acgacgaagggtgcgtgaagcggaaatcgatatttacgaagccatgctgaaccgtatagaggattttgtttttcc

SEQ ID NO: 694877 - DNA, 75 bp, synthetic construct
  source 1..75: mol_type = other DNA
cagaacatcagcgcacagaatgctgctctttcccgagaaatacaaagagcagaattacaagaaaaggctctggac

SEQ ID NO: 694878 - DNA, 75 bp, synthetic construct
  source 1..75: mol_type = other DNA
ccatattttatagttggcgccttaggtgcatatatattcaataaatcttatgttaacattgatgataaatattgg

SEQ ID NO: 694879 - DNA, 75 bp, synthetic construct
  source 1..75: mol_type = other DNA
tttcttttgcattacaggatttttgttctttgataaattaataaaaggaaataatacatttgactggaataaatt

SEQ ID NO: 694880 - DNA, 75 bp, synthetic construct
  source 1..75: mol_type = other DNA
gccccacgagcatggtggatgctgcgcacctttggtgtagagaaagtgtcgattctgggggtggacttgcaggct

SEQ ID NO: 694881 - DNA, 75 bp, synthetic construct
  source 1..75: mol_type = other DNA
cgaccaggcgctggatctgctcgacacctgcgccattgaagaactcctgccgccggaactgtcacaaggaatgat

SEQ ID NO: 694882 - DNA, 75 bp, synthetic construct
  source 1..75: mol_type = other DNA
agcttagcgatctggaaaccgggcagcatccggcgcaacgtcgtctgattctggaagaactgctggcgcacaacc

SEQ ID NO: 694883 - DNA, 75 bp, synthetic construct
  source 1..75: mol_type = other DNA
aattattgattttttaagtcagtcacaatctaccaacttaacagaaacacacaaacaacacatccattatgttaa

SEQ ID NO: 694884 - DNA, 75 bp, synthetic construct
  source 1..75: mol_type = other DNA
aacgcagtatgcctatgacaaatccggcaggctgacgggtatcttcagcccggacggcatatcacagcgcaccgg

SEQ ID NO: 694885 - DNA, 75 bp, synthetic construct
  source 1..75: mol_type = other DNA
gctgatgctctttaacagtgaaggtaaaaccgtctggcgaccgggcagaccagcctgtgggggctggcactcagc

SEQ ID NO: 694886 - DNA, 75 bp, synthetic construct
  source 1..75: mol_type = other DNA
cgggtatcttcagcccggacggcatatcacagcgcaccggctatgacgaacgcgggcgggtgaatgtcaccactc

SEQ ID NO: 694887 - DNA, 75 bp, synthetic construct
  source 1..75: mol_type = other DNA
gatggttggggctgcttgttgcagctccagctatatttataggtgctagagtggctatacgtagcctgctcgatc

SEQ ID NO: 694888 - DNA, 75 bp, synthetic construct
  source 1..75: mol_type = other DNA
accaatgcctaacgctctaagtatgcttgaaagagagatcacacaactgattggtgatgcgcaggaagccactgt

SEQ ID NO: 694889 - DNA, 75 bp, synthetic construct
  source 1..75: mol_type = other DNA
gcttatattttcaaacatccggccgggaaattattctgggctttaacggatgaaagcaataaagatcaatcggac

SEQ ID NO: 694890 - DNA, 75 bp, synthetic construct
  source 1..75: mol_type = other DNA
ggaaaataaaatactcagtaagctaggtgatatctcttactctctgtatttatcccatgcgatagtaatgctatt

SEQ ID NO: 694891 - DNA, 75 bp, synthetic construct
  source 1..75: mol_type = other DNA
ataaaattaattttgtttgtcgcgatggacggttggacaatgttatcaaaaggactcattttacaatattttgac

SEQ ID NO: 694892 - DNA, 75 bp, synthetic construct
  source 1..75: mol_type = other DNA
caggcgttttttcaggatttaccctgtatttttcatttgcacaatcttattctttttattgaacccagtcttcac

SEQ ID NO: 694893 - DNA, 75 bp, synthetic construct
  source 1..75: mol_type = other DNA
acagcggtcacgacctgccggtgaagatgcgcggccccggcggtcagtcagtgcggttacagtggcagcagcacc

SEQ ID NO: 694894 - DNA, 75 bp, synthetic construct
  source 1..75: mol_type = other DNA
aaaagcggtgggcctgccgttgccgaacaaacgcagtggatagagaaatttgcaggtaaaaccggcgctcagggt

SEQ ID NO: 694895 - DNA, 75 bp, synthetic construct
  source 1..75: mol_type = other DNA
taaagcgttacaactggcgttaaatgatttatggctcagcattggcttacaacttatgccggcgattggcgagct

SEQ ID NO: 694896 - DNA, 75 bp, synthetic construct
  source 1..75: mol_type = other DNA
atcgcccgattgcttacaatccggcttttgcaaagctgaaagcaggaaaagtgcgatcggggccggttgcggctg

SEQ ID NO: 694897 - DNA, 75 bp, synthetic construct
  source 1..75: mol_type = other DNA
cgacagcgacagatagatatcctgtctggtcttggtgccatgtctgacgaattcggtaaatccagtgacaactta

SEQ ID NO: 694898 - DNA, 75 bp, synthetic construct
  source 1..75: mol_type = other DNA
caggcagcgacgttctttggacccgatcgtcacttcgaagacttctggcaacagccagccgctcccggaggtggg

SEQ ID NO: 694899 - DNA, 75 bp, synthetic construct
  source 1..75: mol_type = other DNA
cgtaacgattcatacatcaccatcttatacagcggataaaccaacaggcctgacagatggaactgtatatgtcat

SEQ ID NO: 694900 - DNA, 75 bp, synthetic construct
  source 1..75: mol_type = other DNA
gcgtacaacaatagctacccgaccgcgtatggcaacgtattgcacatgaaaggtgcgagtgctgctggtgagggc

SEQ ID NO: 694901 - DNA, 75 bp, synthetic construct
  source 1..75: mol_type = other DNA
cgacagatagatatcctgtctggtcttggtgccatgtctgacgaattcggtaaatccagtgacaacttaacattc

SEQ ID NO: 694902 - DNA, 75 bp, synthetic construct
  source 1..75: mol_type = other DNA
cgccattgatacagagcgtttcgcccgccgggtgaatggcgtggatgtgctttctggcctggctgccaaagtgcg

SEQ ID NO: 694903 - DNA, 75 bp, synthetic construct
  source 1..75: mol_type = other DNA
catggtctatgcagcctttgaggctatccttgagatgcctgaagttgccacggtcgttgctaataagatggtcga

SEQ ID NO: 694904 - DNA, 75 bp, synthetic construct
  source 1..75: mol_type = other DNA
gaaattttttacaatcgttacgtaatacaacagtgttgttactcgacattgctttaattgaatcacttaagacta

SEQ ID NO: 694905 - DNA, 75 bp, synthetic construct
  source 1..75: mol_type = other DNA
tatggtgggcaccagtacagtgactatgtgctcttagggaaagatggcaaaccacttgctgtagtcgaagctaag

SEQ ID NO: 694906 - DNA, 75 bp, synthetic construct
  source 1..75: mol_type = other DNA
gtttccgcgccggtctttggtgccatcatgggcggcgtattgcgtaccatgaacatcgagccggatgcgctgaca

SEQ ID NO: 694907 - DNA, 75 bp, synthetic construct
  source 1..75: mol_type = other DNA
agacgggggtattgagcactgctgaacgctggcgttcatacaaaagcgcatctgctgtcgaacaggactgggggg

SEQ ID NO: 694908 - DNA, 75 bp, synthetic construct
  source 1..75: mol_type = other DNA
aaggccgcttattattaacaacgccaatggtactgttacgatcggtaatggactcaatgttactggcggcatcaa

SEQ ID NO: 694909 - DNA, 75 bp, synthetic construct
  source 1..75: mol_type = other DNA
caggataactcagtggcagacggcgcaatggcgaacacgttgcgggtgaaggtcaccgatgcgttcgggaatgcg

SEQ ID NO: 694910 - DNA, 75 bp, synthetic construct
  source 1..75: mol_type = other DNA
agacggcaggcaccagtacagtcactgccagcatcaacagcagcagcctgagccggaacgtgacgtttgtcgccg

SEQ ID NO: 694911 - DNA, 75 bp, synthetic construct
  source 1..75: mol_type = other DNA
agatatctgtaaccagccagacggcgggaatcagtgcagtcactgccagcatcaacagcagcagtcagagccgga

SEQ ID NO: 694912 - DNA, 75 bp, synthetic construct
  source 1..75: mol_type = other DNA
atctggttgccagtctgaaattaaaaacatgggcagaggagattaagtcctcgttatacggaatacaaccaggtg

SEQ ID NO: 694913 - DNA, 75 bp, synthetic construct
  source 1..75: mol_type = other DNA
atgggcaatatcaaagacagtatatggcacattttgcggaagcgaatttgaatgcgcaactgaagatggcgggtt

SEQ ID NO: 694914 - DNA, 75 bp, synthetic construct
  source 1..75: mol_type = other DNA
cgctggggatagcataacggtgaccgttgttcttaaagatgcccagggtaactttattactgatggtgttgttca

SEQ ID NO: 694915 - DNA, 75 bp, synthetic construct
  source 1..75: mol_type = other DNA
ctccgacggtcaccacgcagccggacggcacggtggagatctctgccaccagccagacggcggggatcagtacag

SEQ ID NO: 694916 - DNA, 75 bp, synthetic construct
  source 1..75: mol_type = other DNA
tagtgagtatgccttcgcaactcttcactatggctcgttcttttaaagcggttgccaatggcaaaatttatatcg

SEQ ID NO: 694917 - DNA, 75 bp, synthetic construct
  source 1..75: mol_type = other DNA
tccgtttcccggtttattccgggcgtactgggtcacgaagcatcagcaacggaagattcctttgctgaaggattg

SEQ ID NO: 694918 - DNA, 75 bp, synthetic construct
  source 1..75: mol_type = other DNA
tacgctgcaggtgaaggtcaccgatgctaacggtaatacgcttgccggacagacggtcagcgtgttggcaggcaa

SEQ ID NO: 694919 - DNA, 75 bp, synthetic construct
  source 1..75: mol_type = other DNA
gtacggtggagatctctgttaccagccagacggcggggatcagtgcggtcacagccagcatcaacaacagcagtc

SEQ ID NO: 694920 - DNA, 75 bp, synthetic construct
  source 1..75: mol_type = other DNA
gcggatgtcaggacggcgcagatcgctgatctggtggtcattaaggacggctcagtggcagacggttcgacggcg

SEQ ID NO: 694921 - DNA, 75 bp, synthetic construct
  source 1..75: mol_type = other DNA
aggtgcatatggcatttgtcatctatatatcctgaaaaaactgcgcaaaactaaaaaagttccagaaaatatatg

SEQ ID NO: 694922 - DNA, 75 bp, synthetic construct
  source 1..75: mol_type = other DNA
tagctggcatacctgcaatttcatatgcacaaaatgatggttgcgctacggttggagcctcaatagagttgtcgt

SEQ ID NO: 694923 - DNA, 75 bp, synthetic construct
  source 1..75: mol_type = other DNA
atggctgacaaaaggacagcagacagtggcacgtgccacggcgaaattcattgttccgtcgcaggatattgctct

SEQ ID NO: 694924 - DNA, 75 bp, synthetic construct
  source 1..75: mol_type = other DNA
gtgtgaaagtactggcatctgataactctatgaccattcaggttggcgctaatgatggagaagctattactatag

SEQ ID NO: 694925 - DNA, 75 bp, synthetic construct
  source 1..75: mol_type = other DNA
ccagcgagagccgccggacgttgctggctgaagcggccatggcggtgcgggcgctgctgggccgaccgcgtgcat

SEQ ID NO: 694926 - DNA, 75 bp, synthetic construct
  source 1..75: mol_type = other DNA
atcacggaaatcaatgccgagctggaaagccggaaggaaaattatcagcgtcaggggtaccagtccgccgaagac

SEQ ID NO: 694927 - DNA, 75 bp, synthetic construct
  source 1..75: mol_type = other DNA
gcatccggccttattaatgaaaatgagtgttccgtaagattcaatggctatattattctatccagagaattttga

SEQ ID NO: 694928 - DNA, 75 bp, synthetic construct
  source 1..75: mol_type = other DNA
tttaaatttgcagctatgtacatggttgcgatagcgaagtctcacgcttttaatgacgccaataagcgaacggct

SEQ ID NO: 694929 - DNA, 75 bp, synthetic construct
  source 1..75: mol_type = other DNA
acccggacagtaccctcacggcgtggccggataaccgcatcgcagaggatgcgcactatgtttaccactatgatg

SEQ ID NO: 694930 - DNA, 75 bp, synthetic construct
  source 1..75: mol_type = other DNA
taacgctgctggatatccggtatataacggacagattgctaagttcgtaactgtgcaaggccattctatggctat

SEQ ID NO: 694931 - DNA, 75 bp, synthetic construct
  source 1..75: mol_type = other DNA
gcctatcgctgttgactcaaaataacctgaataaatcacagtcttctctgagttcggctattgagcgtctgtcct

SEQ ID NO: 694932 - DNA, 75 bp, synthetic construct
  source 1..75: mol_type = other DNA
cgcagcaaaagcagctgatgtattagccacagctaaaaaagacagcactgtagatttcgcaggaactaatactgg

SEQ ID NO: 694933 - DNA, 75 bp, synthetic construct
  source 1..75: mol_type = other DNA
cacagatcctgcaacaagcaggtacttctgttctggcacaggctaaccagacgactcagaacgtactgtctctac

SEQ ID NO: 694934 - DNA, 75 bp, synthetic construct
  source 1..75: mol_type = other DNA
atgattgaaagaggtgataacagcggtgttcatcagtatggtccagctgaacatttcactcacattatatctgac

SEQ ID NO: 694935 - DNA, 75 bp, synthetic construct
  source 1..75: mol_type = other DNA
agaggtgcgtaaacgtaaaacacctcaggaaaaatcgcaattattcaagctaccgtgtttagtcaagaaaattat

SEQ ID NO: 694936 - DNA, 75 bp, synthetic construct
  source 1..75: mol_type = other DNA
cgcaagaaacccgatgcgccagaaaatgtatcaggtacagatttaccaaatgatgataatggtgaatcaggtaca

SEQ ID NO: 694937 - DNA, 75 bp, synthetic construct
  source 1..75: mol_type = other DNA
cgggcgttgagtccctgtttccgggacttgacggacatctggtcagttcgcttctgggtgggccgggtgattctc

SEQ ID NO: 694938 - DNA, 75 bp, synthetic construct
  source 1..75: mol_type = other DNA
aaagtatcgaggtagctatgataaatcataccacacacccgcaagggcgggactcgcacaacctgaataaataca

SEQ ID NO: 694939 - DNA, 75 bp, synthetic construct
  source 1..75: mol_type = other DNA
aaaccgcgataccgttaatgaacatgtcgaagccagggatttagctcctgctcgcagtctggaattcacgaatat

SEQ ID NO: 694940 - DNA, 75 bp, synthetic construct
  source 1..75: mol_type = other DNA
ccgagctggagcgtcgttttgaatgccagtacccgcacggctcatggcacagtgaaaattttacgctgttccggc

SEQ ID NO: 694941 - DNA, 75 bp, synthetic construct
  source 1..75: mol_type = other DNA
acatctcactgcaaaagacttcgaagaaagtaaagataatatttctaaggatgaatgggaaaacctccatgcatt

SEQ ID NO: 694942 - DNA, 75 bp, synthetic construct
  source 1..75: mol_type = other DNA
atgacaaacatgatctcatatcagggacttgttcgcaccttccctaaaaaatttggtatcgatatcattcctgat

SEQ ID NO: 694943 - DNA, 75 bp, synthetic construct
  source 1..75: mol_type = other DNA
tcgtgaaatgcgaaaatatggcgtacgaggtttacgttatgatgcggcaaaacactcaaaacatgaacaaataga

SEQ ID NO: 694944 - DNA, 75 bp, synthetic construct
  source 1..75: mol_type = other DNA
cgggcgttgagtccttgtttccgggacttgacggacatctggtcagttcacttctgggtgggtcgggtgaatccc

SEQ ID NO: 694945 - DNA, 75 bp, synthetic construct
  source 1..75: mol_type = other DNA
accgcatcgcagaggatgcgcactatgtttaccactatgatgaatacggcagactgacggagaagacggacctta

SEQ ID NO: 694946 - DNA, 75 bp, synthetic construct
  source 1..75: mol_type = other DNA
aatgtcatcactgctttatgagagagatgatttaagtgccattgatttttctttactcatgaaaacgataaaagc

SEQ ID NO: 694947 - DNA, 75 bp, synthetic construct
  source 1..75: mol_type = other DNA
gccaatgtctctgcccagaaggctgctgcatcacgattgatggatgccatcgtgaataaaaacttatctgtaact

SEQ ID NO: 694948 - DNA, 75 bp, synthetic construct
  source 1..75: mol_type = other DNA
cagcaggaagggagcgaggacggtcacggtgtggtgttcccggctgaactggtggggctgctggacaggctggag

SEQ ID NO: 694949 - DNA, 75 bp, synthetic construct
  source 1..75: mol_type = other DNA
ggtgttagccgatcagcgaaagggctgggttatgaaaaagagattagagattacgggttaaatatgttcggtatg

SEQ ID NO: 694950 - DNA, 75 bp, synthetic construct
  source 1..75: mol_type = other DNA
gatgactttgatgatagttcctctgaggatgatcccgttgagaatagtcctgttgtgactagtcccgttgtatca

SEQ ID NO: 694951 - DNA, 75 bp, synthetic construct
  source 1..75: mol_type = other DNA
atcgaaacagagaattgcgaacaggcgaaggcgcggcaccgtagcctggcggaggtgttgcaggaggacacgggg

SEQ ID NO: 694952 - DNA, 75 bp, synthetic construct
  source 1..75: mol_type = other DNA
gtaataccgttcttcttatctatcaaagaaaaaggtgaattgcccattacagataatcgtatgacccgctttatg

SEQ ID NO: 694953 - DNA, 75 bp, synthetic construct
  source 1..75: mol_type = other DNA
taaatttaaactgattaaattcttattcagtaactttgtaacccgtaaaattatttaccatttaagaaactatat

SEQ ID NO: 694954 - DNA, 75 bp, synthetic construct
  source 1..75: mol_type = other DNA
gtgtaattgacagaccaacgcatagcgatgattcgttcgcttttgccaaagatgaaataccagcacatcactggg

SEQ ID NO: 694955 - DNA, 75 bp, synthetic construct
  source 1..75: mol_type = other DNA
acgcttccacaaattctcaaaaaatcaggcattaactatattgcatcgcaaaagctctcacaaaacaagattaat

SEQ ID NO: 694956 - DNA, 75 bp, synthetic construct
  source 1..75: mol_type = other DNA
atccttcccggctcatgtatttcaagagtttatcatgaaactgaaaaggaatatcttaaactagaagcaaaaacc

SEQ ID NO: 694957 - DNA, 75 bp, synthetic construct
  source 1..75: mol_type = other DNA
ttgttacggttagtcaggggattacctgttctacccccgcaaaaacgactgaacaaatagttgctgatgccgatg

SEQ ID NO: 694958 - DNA, 75 bp, synthetic construct
  source 1..75: mol_type = other DNA
agaccgcgtgagcagtgaaagccgggcgtggcttgcgcagtgcgggctgacggtggagcaactggccagacaggt

SEQ ID NO: 694959 - DNA, 75 bp, synthetic construct
  source 1..75: mol_type = other DNA
gaaaatatgcacagtgagatccgtgcataccacgaagatgcaggttttcgcggcctgggattttgcttcaaatta

SEQ ID NO: 694960 - DNA, 75 bp, synthetic construct
  source 1..75: mol_type = other DNA
cgcgcagatggaggcggaatacatcccggagaggaaacttcatctttaccactgtgaccaccggggactgccgca

SEQ ID NO: 694961 - DNA, 75 bp, synthetic construct
  source 1..75: mol_type = other DNA
ggagctaatcaatataattacaatggtcatacaggttctgatgttatctcaattaccgattctttcggaggatta

SEQ ID NO: 694962 - DNA, 75 bp, synthetic construct
  source 1..75: mol_type = other DNA
gcgcacgctttgcaaggccgctgatctcttgcgagatcggtacaggtacctctttcattaaccaggacaaagtga

SEQ ID NO: 694963 - DNA, 75 bp, synthetic construct
  source 1..75: mol_type = other DNA
ttagccatagtattaaggaaggtgcgaataagcggggaaattcttctcggctgactcagtcatttcatttcttca

SEQ ID NO: 694964 - DNA, 75 bp, synthetic construct
  source 1..75: mol_type = other DNA
accctgcggctgaaatccttttagcggttttattcttctataaggatttaatgaagataaaccctcgcaagaaag

SEQ ID NO: 694965 - DNA, 75 bp, synthetic construct
  source 1..75: mol_type = other DNA
gtggtggtagcaaacgtatcccgcgtaaaaatattaaaatgttttgcgggaaaccaatgattgcttggtcgattg

SEQ ID NO: 694966 - DNA, 75 bp, synthetic construct
  source 1..75: mol_type = other DNA
atatcgatactcctgaggattggatcatggctgaatggttatataaaaccatggagtttaaaaatgaaagtgttt

SEQ ID NO: 694967 - DNA, 75 bp, synthetic construct
  source 1..75: mol_type = other DNA
cagctgctgaaaacctgccaggcagaggccaccgttatctcgcctgagcagctgagagcactgttacgaaaacag

SEQ ID NO: 694968 - DNA, 75 bp, synthetic construct
  source 1..75: mol_type = other DNA
acgataattttgagtttggtggtgcatttaaatacagcgggtgggtcaggggatctgataatgatgagcattatg

SEQ ID NO: 694969 - DNA, 75 bp, synthetic construct
  source 1..75: mol_type = other DNA
ggttccaatgatcctaatgactggataccaatctttattcaagaaaatgcacgtaaccataagttacgtaaggct

SEQ ID NO: 694970 - DNA, 66 bp, synthetic construct
  source 1..66: mol_type = other DNA
cacagcgtcagcggcagcagcgctgaaggttataacggtcaggccacgctgaatgtgactttctga

SEQ ID NO: 694971 - DNA, 75 bp, synthetic construct
  source 1..75: mol_type = other DNA
acattaaaggcatggcgctaacgcagacggcgttgtccggtgagtacgcaggcacgccgattatgctggatagcg

SEQ ID NO: 694972 - DNA, 75 bp, synthetic construct
  source 1..75: mol_type = other DNA
ctcagcccgcaccatgactggcttaagacgggatccctgcggcaaaatgcgcctttacgcatttggttttacccg

SEQ ID NO: 694973 - DNA, 75 bp, synthetic construct
  source 1..75: mol_type = other DNA
tgtcaaacatttacatttatgcttatcaagaattagtttcatatttaagggagcttttcattgattataacgaaa

SEQ ID NO: 694974 - DNA, 75 bp, synthetic construct
  source 1..75: mol_type = other DNA
ctttccagcaggaagttgcggagtctattcttgcggggattaaagcgtattttgccgatggggcgacgctggcga

SEQ ID NO: 694975 - DNA, 75 bp, synthetic construct
  source 1..75: mol_type = other DNA
acaaagaatgtgaattaatcctttcaaatgaggacgttcaggatttaagtgacccttattctgaatcagaatggc

SEQ ID NO: 694976 - DNA, 75 bp, synthetic construct
  source 1..75: mol_type = other DNA
ataccgaacaacttaacttgcttaaaaaatcacagcgagcctggctggattttagggacaaagaatgtgaattaa

SEQ ID NO: 694977 - DNA, 75 bp, synthetic construct
  source 1..75: mol_type = other DNA
attattatttgcagttggggtttgtttttatgatcttcctatggttaataaaattgttttgttgctgtgtttgtc

SEQ ID NO: 694978 - DNA, 75 bp, synthetic construct
  source 1..75: mol_type = other DNA
gcagctacagaatgctcttcagagagtgtctgaccttatagaggcagcacaccgttccctgtgccaggaggtgga

SEQ ID NO: 694979 - DNA, 75 bp, synthetic construct
  source 1..75: mol_type = other DNA
caaacccagaacgcctcggacttgattggtggcgtgagcaaaagcggtgaccgctatgtcgaccacaccatgttc

SEQ ID NO: 694980 - DNA, 75 bp, synthetic construct
  source 1..75: mol_type = other DNA
taaatttcatatctgtattagtcaaagttataactggtttatttctaaataaaatcatggccctttatgtagggc

SEQ ID NO: 694981 - DNA, 75 bp, synthetic construct
  source 1..75: mol_type = other DNA
cagccggggagcttcacgccactcatcagggttgaaaccgccaccggtgagctggcgaaaacgcagcgccgcagc

SEQ ID NO: 694982 - DNA, 75 bp, synthetic construct
  source 1..75: mol_type = other DNA
ggagtcggggctgtactacaaccggaaccggtactacgatccgttgcaggggcggtatatcactcaggacccgat

SEQ ID NO: 694983 - DNA, 75 bp, synthetic construct
  source 1..75: mol_type = other DNA
gtgtttaaatttattgtattaacattgggcattatctcttgccaggcttacgcagaagatacggttatagtcaat

SEQ ID NO: 694984 - DNA, 75 bp, synthetic construct
  source 1..75: mol_type = other DNA
taggcattatctcttgccaggtttacgcagaagatacgcttatagtaaacgaccatgacatttcagccatcaaag

SEQ ID NO: 694985 - DNA, 75 bp, synthetic construct
  source 1..75: mol_type = other DNA
tcgccagttgcagctataccgtaactctgaagattttttatccaagccctttgacaagaggataattcacatatt

SEQ ID NO: 694986 - DNA, 75 bp, synthetic construct
  source 1..75: mol_type = other DNA
gttggattttttgcgaaaaatttgtacgaatagccgtaggctttatattatttgcattaatttcaagagttttga

SEQ ID NO: 694987 - DNA, 75 bp, synthetic construct
  source 1..75: mol_type = other DNA
gaattgttatcacccgagacggtccgcaggtaaaaaaactgcaccagacaaagcggatgtgggtcgtcggaaaaa

SEQ ID NO: 694988 - DNA, 75 bp, synthetic construct
  source 1..75: mol_type = other DNA
tcgctgtggaaatacggcagaaagcagaagcgattgcagagcatgtaaagaatgctgaagaactggctgcagaaa

SEQ ID NO: 694989 - DNA, 75 bp, synthetic construct
  source 1..75: mol_type = other DNA
ataaaaatggcaacggatgataacggtacagttgatcacacctttgccgaacaaattaaggaacgtatacgccag

SEQ ID NO: 694990 - DNA, 75 bp, synthetic construct
  source 1..75: mol_type = other DNA
gacaaacttgatataattgacccatccgatctatttaaatatggcgatatggttaagtggcccgccactggggaa

SEQ ID NO: 694991 - DNA, 75 bp, synthetic construct
  source 1..75: mol_type = other DNA
ttgggttaatgcttgggaatggattcactattgacctccttagcaaaatggacaaacttgatataattgacccat

SEQ ID NO: 694992 - DNA, 75 bp, synthetic construct
  source 1..75: mol_type = other DNA
gtggaggtggttaaacgcgtcccctcacaagttcgcggcaccgcactgggcggttacgccgcgtttcaggatatc

SEQ ID NO: 694993 - DNA, 75 bp, synthetic construct
  source 1..75: mol_type = other DNA
gctacgcacccgccagccgccttatctcgatatcccgttggttgataccagcgcggctggcgagctgggcgaggc

SEQ ID NO: 694994 - DNA, 75 bp, synthetic construct
  source 1..75: mol_type = other DNA
acccggtagttgccggagcggcaatggcgctctcgtcgattaccgtagtgagtaacgccaaccggttgctgcggt

SEQ ID NO: 694995 - DNA, 75 bp, synthetic construct
  source 1..75: mol_type = other DNA
agatctttgcaagttggttaagcaatagccttaataaaaaaacgattgaatgcttcagaatacagtcaatgacag

SEQ ID NO: 694996 - DNA, 75 bp, synthetic construct
  source 1..75: mol_type = other DNA
tgctaatcaccacacaaaattactggaacagggaactaaggcttttggtcgttaccagaccggaacgctgaatca

SEQ ID NO: 694997 - DNA, 75 bp, synthetic construct
  source 1..75: mol_type = other DNA
aaaaacgtcagaaggggaaagcaacggcctttctggcaatttgcgcagtagccctgattggcctgacatggggcg

SEQ ID NO: 694998 - DNA, 75 bp, synthetic construct
  source 1..75: mol_type = other DNA
ctcaacaaagccagcttccttattcgccgtgatggttcggccaccacacagaaccaggtaaaaacccggcagcag

SEQ ID NO: 694999 - DNA, 75 bp, synthetic construct
  source 1..75: mol_type = other DNA
gcctgtaaaaattgagtttgttcttggtaagaaaataatgaatctatatgaaatagacgagctctgtgcaaaaag

SEQ ID NO: 695000 - DNA, 75 bp, synthetic construct
  source 1..75: mol_type = other DNA
ttcccttaatttcttctgagctcgctgggatggctttaatgccagaaacggaaaggttaataggggaatggctca

SEQ ID NO: 695001 - DNA, 75 bp, synthetic construct
  source 1..75: mol_type = other DNA
atgaaggcaaattcgaaaacgatcagaaggatgaaagttaatgttcggtctgaggaaagtaaatcgaaacactct

SEQ ID NO: 695002 - DNA, 75 bp, synthetic construct
  source 1..75: mol_type = other DNA
tttacgcgaacgctggcggggtctatcggtacgtccataacgacgacgatgtggactaaccgcgagtcgatgcac

SEQ ID NO: 695003 - DNA, 75 bp, synthetic construct
  source 1..75: mol_type = other DNA
gaacttgttgaagtggatgataaattgggcgtagagattcattcttggttatcagggcataataatgtcaaatag

SEQ ID NO: 695004 - DNA, 75 bp, synthetic construct
  source 1..75: mol_type = other DNA
tttatccagaggagttaaaaatggctgatcattttcagtacgaggaagattttgaaacagatgactttgatatca

SEQ ID NO: 695005 - DNA, 75 bp, synthetic construct
  source 1..75: mol_type = other DNA
atgcgtaacaaaaaacgcatactattcttgctaacagtcattctttgcttaacaggtctttattcctgcaacaaa

SEQ ID NO: 695006 - DNA, 75 bp, synthetic construct
  source 1..75: mol_type = other DNA
tctggatgtcagcaaagctgaagccttaccgggcgttgttcacgttattactcacctgaattgcccggatatcta

SEQ ID NO: 695007 - DNA, 75 bp, synthetic construct
  source 1..75: mol_type = other DNA
cggaaccgtcaccgcttgaccgccgtatgttcggcaagaaaatgcgtcacgtcggcgatcgtgttgctgcggtgg

SEQ ID NO: 695008 - DNA, 75 bp, synthetic construct
  source 1..75: mol_type = other DNA
aatttagcgccaaatggctaccgatagcagaagagagcggcagctggtctggatgggtgttacttcgagagttat

SEQ ID NO: 695009 - DNA, 75 bp, synthetic construct
  source 1..75: mol_type = other DNA
atgcgctacaaagtcacactgttcttgccgatcatgattctctgtttaacagctctctattcctgcaacaaaaat

SEQ ID NO: 695010 - DNA, 75 bp, synthetic construct
  source 1..75: mol_type = other DNA
aatgatatgcgtcagcagtttacttcaaattatcagcatagttcggttcacccctgcaaggcgattaacggagaa

SEQ ID NO: 695011 - DNA, 75 bp, synthetic construct
  source 1..75: mol_type = other DNA
atggctgcggggcttttttccctggttctgctgcccgcgtcacctgcggatatcaatattatctggccgatgatc

SEQ ID NO: 695012 - DNA, 75 bp, synthetic construct
  source 1..75: mol_type = other DNA
aaaactctctgaagctacagctctcggtagccctgagcgtcgccattttatttaccgcagttatttcctgtggtc

SEQ ID NO: 695013 - DNA, 75 bp, synthetic construct
  source 1..75: mol_type = other DNA
cagaccgatgttgatgtcagtgtgggggaattgcgcgatgaagatggatttacccctgacgtccttcaggcgcag

SEQ ID NO: 695014 - DNA, 75 bp, synthetic construct
  source 1..75: mol_type = other DNA
ttaaaacagatagcttacgtcacgaagtcccccggacataacgcgctgcccgaaataaaggggcaaaagagggcc

SEQ ID NO: 695015 - DNA, 75 bp, synthetic construct
  source 1..75: mol_type = other DNA
agttattatgaaaacggcgaacagagtcgctgtacaaaagggatggcattcgttaagcacagaggaactcgttaa

SEQ ID NO: 695016 - DNA, 75 bp, synthetic construct
  source 1..75: mol_type = other DNA
tacgacgataatgagagtggtcaatcgtatcgttttctctattccaaacgttttgaagacaccaataccaccttt

SEQ ID NO: 695017 - DNA, 75 bp, synthetic construct
  source 1..75: mol_type = other DNA
aattacattcagcgcgacatcatggcattacgtagccagattatgattggcgatacctggacggcaagcgatgta

SEQ ID NO: 695018 - DNA, 75 bp, synthetic construct
  source 1..75: mol_type = other DNA
gggcatatcgccgtattcacactggatgaaatccatctgattcagcccctgcaggagacttttcgccgcaatgac

SEQ ID NO: 695019 - DNA, 75 bp, synthetic construct
  source 1..75: mol_type = other DNA
gtgtgtcagtccgtaccctgcgacgggattttcgcgaacggctgatgtatctggacctggagtatcgacgagggc

SEQ ID NO: 695020 - DNA, 75 bp, synthetic construct
  source 1..75: mol_type = other DNA
ttttacgttttttgctcggtgccgccgatggtgcactactccccgccgtacagacactgttggtttacaactcga

SEQ ID NO: 695021 - DNA, 75 bp, synthetic construct
  source 1..75: mol_type = other DNA
cctggtgcgcctgattatgtatcgctgaaacaggagattgatacgctgcgaaacgaactgtcgtcccttcggaga

SEQ ID NO: 695022 - DNA, 75 bp, synthetic construct
  source 1..75: mol_type = other DNA
taaagatacaatttgagttgtattgtgtaaaccgcaaacgtggtattttgtggggtgtgaatactactttattga

SEQ ID NO: 695023 - DNA, 75 bp, synthetic construct
  source 1..75: mol_type = other DNA
gataatcagccgtctggtggcaggggaaacgctgagtgtgcgtaagctggccgctgagtttggtgtgtcggtgcg

SEQ ID NO: 695024 - DNA, 75 bp, synthetic construct
  source 1..75: mol_type = other DNA
atgtttcactgtccgttctgcaaaaagaccgcgcacgtccgtaccagccgttatctgtcggaaaacgtcaaacag

SEQ ID NO: 695025 - DNA, 75 bp, synthetic construct
  source 1..75: mol_type = other DNA
aaactgtgtggggaaaatcttgaaacggtattcaaatataaaaatggcgatgatgtccgggagatagccaaaatt

SEQ ID NO: 695026 - DNA, 75 bp, synthetic construct
  source 1..75: mol_type = other DNA
ttaacactagcgcattttttgctagcaggaattgtaatggaaacaattcttccaaccccatggagctactagctc

SEQ ID NO: 695027 - DNA, 75 bp, synthetic construct
  source 1..75: mol_type = other DNA
agagttatgaaaaatcattaaaacctgtaagcgaaaacggtttaaatggagtcttatctgatcgtaataaaaaaa

SEQ ID NO: 695028 - DNA, 75 bp, synthetic construct
  source 1..75: mol_type = other DNA
atgtctgtatggaatcacgtaattcatatgaaaaaaatagatgagatttcatctttgtcagagtcaaaggaacac

SEQ ID NO: 695029 - DNA, 75 bp, synthetic construct
  source 1..75: mol_type = other DNA
aaaatgcggtttctgaagttcataaatcagcgaataaaggtgaggtcgagcaattagttgaatgttctgaaagaa

SEQ ID NO: 695030 - DNA, 75 bp, synthetic construct
  source 1..75: mol_type = other DNA
ttgtcattatgggagctggaaaacaatgaaaatgtgttttctgaaactaaaaaattatcgaataaaaataatgcc

SEQ ID NO: 695031 - DNA, 75 bp, synthetic construct
  source 1..75: mol_type = other DNA
ataatcaattggattgaaaataaaaatattaatctgcaagttctatccgaagaagatatagataattttgatagg

SEQ ID NO: 695032 - DNA, 75 bp, synthetic construct
  source 1..75: mol_type = other DNA
gatatccgcaacatggaaaactcatggttccggtaattatgtggatggcagatgctctgtgaatgttttgagaag

SEQ ID NO: 695033 - DNA, 75 bp, synthetic construct
  source 1..75: mol_type = other DNA
atggacgatgagctgctgaagaatccgcctgtcggttcttctgtcctcgaacgcatccgcgatattcgcaccagc

SEQ ID NO: 695034 - DNA, 75 bp, synthetic construct
  source 1..75: mol_type = other DNA
attcgatgatattttatttatggatgacgactttgatgatagttaccctgaggatgatcccgttgagaatattcc

SEQ ID NO: 695035 - DNA, 75 bp, synthetic construct
  source 1..75: mol_type = other DNA
atcagcgaataaaggtgagattgagcaattagttgaatggtctaaaagaaatgaacaaacccttttcgataatat

SEQ ID NO: 695036 - DNA, 75 bp, synthetic construct
  source 1..75: mol_type = other DNA
aggatgtacgagatcgagctatgcgtattcatcagcagaataagtcccgtacactatatcgcagcgtcaacacga

SEQ ID NO: 695037 - DNA, 75 bp, synthetic construct
  source 1..75: mol_type = other DNA
ggcagttcgccagagagctgaatctgaagccctgcacaacggcaatcagtagccctcagagtaatggaatggcag

SEQ ID NO: 695038 - DNA, 75 bp, synthetic construct
  source 1..75: mol_type = other DNA
ctgtggcagcctctgctgtggtgtccggttctgcgatggctgctggctgggaacagaacggcaatggtggccctg

SEQ ID NO: 695039 - DNA, 75 bp, synthetic construct
  source 1..75: mol_type = other DNA
ggggaagtgactgtttattctgctgatgttaaaagagaagaattaccacagttttttgtttctgtacttcgtgca

SEQ ID NO: 695040 - DNA, 75 bp, synthetic construct
  source 1..75: mol_type = other DNA
ccgaatttgattcctggataagagacgcaaaaccggggcgttatctggtttatgcaaaccccgacatagtgatac

SEQ ID NO: 695041 - DNA, 75 bp, synthetic construct
  source 1..75: mol_type = other DNA
gcaaccggaaatctgtataattataaagttgagcttcctactgttaaccttataaaacttcatggttcgctctct

SEQ ID NO: 695042 - DNA, 75 bp, synthetic construct
  source 1..75: mol_type = other DNA
cagcttattaatgatgaacaggaagatgaatacttaaggatggcagctgactttttgtcagatgtttggctacct

SEQ ID NO: 695043 - DNA, 75 bp, synthetic construct
  source 1..75: mol_type = other DNA
ctttcggcagagcaaatgcaggcattagatcagcccttgcctgaaagcaagcgtgatccatggatcgagtactaa

SEQ ID NO: 695044 - DNA, 75 bp, synthetic construct
  source 1..75: mol_type = other DNA
tttgaagcgcagacaggaaaatatgccgttcatataaaacaaaagaacggcccgaaatgttgcgtggggaatatt

SEQ ID NO: 695045 - DNA, 75 bp, synthetic construct
  source 1..75: mol_type = other DNA
gggagcctatgtctctctgggcaacagcactcaggcgaccagcgattttattttcggtctgtttgtgagagtttc

SEQ ID NO: 695046 - DNA, 75 bp, synthetic construct
  source 1..75: mol_type = other DNA
attgtgggcggcgtgccggaaacggatattcacggcaggctgatggcgggatctctggacagccagagcagttgc

SEQ ID NO: 695047 - DNA, 75 bp, synthetic construct
  source 1..75: mol_type = other DNA
gcaggtacaactaacggcgtaaaaaagatttattttttttacggtgttaatggagaggtttattacgcccgtggc

SEQ ID NO: 695048 - DNA, 75 bp, synthetic construct
  source 1..75: mol_type = other DNA
cagtggtggttatctggttggttgggagaacctgaaggtcaacgaggcttcactcagggcactgattgaaacccg

SEQ ID NO: 695049 - DNA, 75 bp, synthetic construct
  source 1..75: mol_type = other DNA
acgggttgaggataccgccgcggaggtcaggcaggatgctgaagccgcgaaaaaggccgcatccggtgcagagca

SEQ ID NO: 695050 - DNA, 75 bp, synthetic construct
  source 1..75: mol_type = other DNA
gttaccgtcgatggcagtgagcacgtctacccgatgcagattcgcgggggcggaatggatgaaatgtggttaagc

SEQ ID NO: 695051 - DNA, 75 bp, synthetic construct
  source 1..75: mol_type = other DNA
aattatggtaaggcgatcaataccgatatcgtctctggcctacaacaaattatggcaaacgggacagcggaaggt

SEQ ID NO: 695052 - DNA, 75 bp, synthetic construct
  source 1..75: mol_type = other DNA
cggtcagtggcgcgacaggaagcctgtcgttaatgacgccacgggataatgttacgccagttaaactcgaagggg

SEQ ID NO: 695053 - DNA, 75 bp, synthetic construct
  source 1..75: mol_type = other DNA
accattaatggaggcagacagtcaattgagtacggaggaatttctactggcacgataatcgaaagtggcaatcaa

SEQ ID NO: 695054 - DNA, 75 bp, synthetic construct
  source 1..75: mol_type = other DNA
caataagactggctcagtaaaaattcacaaagaggatgggaagtttcaggaagagcgcacttaccctcgtaaagc

SEQ ID NO: 695055 - DNA, 75 bp, synthetic construct
  source 1..75: mol_type = other DNA
accgtggtttgcgtcactggcgacggcagtattcagatgaacattcaggaactgtctaccgcgttgcaatacgag

SEQ ID NO: 695056 - DNA, 75 bp, synthetic construct
  source 1..75: mol_type = other DNA
aaagaatttgtcgatgataaccgggtgaaagtgaatagtgacggtaatttcgtcaattatttgtcgggcagacgt

SEQ ID NO: 695057 - DNA, 75 bp, synthetic construct
  source 1..75: mol_type = other DNA
gcctcggtgatggtgccggtggatatcgccgcgattgttgccacgctggtgatgctacatctctattttcgcaaa

SEQ ID NO: 695058 - DNA, 75 bp, synthetic construct
  source 1..75: mol_type = other DNA
gcactacgctggcgttcgtgatggcggccggattcattgccgataccgccagcctgccacttattgtctccaacc

SEQ ID NO: 695059 - DNA, 75 bp, synthetic construct
  source 1..75: mol_type = other DNA
tgcaattttaaaaacaaacactaacggtacgacggtgagcggtacgaatagtgaaggtgcattctccatccacaa

SEQ ID NO: 695060 - DNA, 75 bp, synthetic construct
  source 1..75: mol_type = other DNA
tcgagggtgtggcgaatgagacaacaattaacgacggcggaatacaaacagtttcagctaacggagaggcaataa

SEQ ID NO: 695061 - DNA, 75 bp, synthetic construct
  source 1..75: mol_type = other DNA
ggaagtcttattgaatctggtggatatcaagatataggaagtcataacaattttgtggggcaggctaataataca

SEQ ID NO: 695062 - DNA, 75 bp, synthetic construct
  source 1..75: mol_type = other DNA
cagaataatttactctatggaattgaaaatttggaagggtcggaaccactttggtataaagagaattatcgctgg

SEQ ID NO: 695063 - DNA, 75 bp, synthetic construct
  source 1..75: mol_type = other DNA
ctgctctcgaaagttgccagataacggtcagtgagcgtgcaatcaaggagatcatcactacgcatcagaacacca

SEQ ID NO: 695064 - DNA, 75 bp, synthetic construct
  source 1..75: mol_type = other DNA
cgccgccaacacgccggacatcctgaaagcgggtaaagcgtatatcgactacgactacaccccggtgccgccgct

SEQ ID NO: 695065 - DNA, 75 bp, synthetic construct
  source 1..75: mol_type = other DNA
ggcggataccatcgccgacgcccacttctgggcggtagataaaccgcaacacgcttctctgttccgcgacattat

SEQ ID NO: 695066 - DNA, 75 bp, synthetic construct
  source 1..75: mol_type = other DNA
taatgttccagcaataaagcgattcttatcagacgtgcaggatggtatcgttccaacaacatggtggacgtatca

SEQ ID NO: 695067 - DNA, 75 bp, synthetic construct
  source 1..75: mol_type = other DNA
aaggttagcgaaactgagcaaaggtatattgaagctgtccaacttttggttgatacaatctttaataaacatcag

SEQ ID NO: 695068 - DNA, 75 bp, synthetic construct
  source 1..75: mol_type = other DNA
tgtccatatacattcaggaatataaacaaacagtctgcattaatataccctggagcttgactgaaatggaattat

SEQ ID NO: 695069 - DNA, 75 bp, synthetic construct
  source 1..75: mol_type = other DNA
aaaattctgggcgcatttttcaagaacagagtttatattatagcaaagttaacaccagtcagtaaaaatgatgct

SEQ ID NO: 695070 - DNA, 75 bp, synthetic construct
  source 1..75: mol_type = other DNA
gtaacagcgacaaacgtactgacaaagaaacaccgtacgttccaatcccggaaggcggcgtgaagatctcttcgc

SEQ ID NO: 695071 - DNA, 75 bp, synthetic construct
  source 1..75: mol_type = other DNA
ttacagcggacaggaaggactcctggaaggtgtggaagcaagtgtcactgtgtatcgtaatgaaattgatgacat

SEQ ID NO: 695072 - DNA, 75 bp, synthetic construct
  source 1..75: mol_type = other DNA
ccctttaaaacctcagaaatatcagataaattcggcatagatttgcatatcatttctaggtatggacgctgttac

SEQ ID NO: 695073 - DNA, 75 bp, synthetic construct
  source 1..75: mol_type = other DNA
ggctgggcgtcactttgatacccggttatatgaataattttaataccggacaggttgtttttcgtcccattgccg

SEQ ID NO: 695074 - DNA, 75 bp, synthetic construct
  source 1..75: mol_type = other DNA
aaaattctgggcgcgttttttaagaacagagtttatatgatagcaaagttaacaccagtcagtaaaaatgatgct

SEQ ID NO: 695075 - DNA, 75 bp, synthetic construct
  source 1..75: mol_type = other DNA
caacctttctgacctactggctgtcagtggtgctggcgtatttcggtacgcagacgccggaacggctcgcgcttt

SEQ ID NO: 695076 - DNA, 75 bp, synthetic construct
  source 1..75: mol_type = other DNA
atgacaggtgcacagggtgtaccgggacccaggggtgagcggggcgaaaaaggggaaaaaggtgaccccggcggc

SEQ ID NO: 695077 - DNA, 75 bp, synthetic construct
  source 1..75: mol_type = other DNA
aagaagcagcccgacgggcagaaaatgcacgggggccgaagggggacaaagggaatacgggaccgcaggggcagc

SEQ ID NO: 695078 - DNA, 75 bp, synthetic construct
  source 1..75: mol_type = other DNA
ctgggctaatttactattctaccaaatggttccctttaaagtatcgtccacgtattgtcggctttttagtcaccg

SEQ ID NO: 695079 - DNA, 75 bp, synthetic construct
  source 1..75: mol_type = other DNA
tggcgcggctatgcggtgatgccgtatgccacggtttatcggtataaccgtatcgcgcttgataccaatacgatg

SEQ ID NO: 695080 - DNA, 75 bp, synthetic construct
  source 1..75: mol_type = other DNA
aataaagtgaatgaatatatatatataaatgcgaaggagtatattatttccgaggacgaaaccaaaataactcgt

SEQ ID NO: 695081 - DNA, 75 bp, synthetic construct
  source 1..75: mol_type = other DNA
gcatattatgaatgcagacatgaccaagacattaaaatcggctatagcaatgcaatatttcagaacaaaagatat

SEQ ID NO: 695082 - DNA, 75 bp, synthetic construct
  source 1..75: mol_type = other DNA
cgcgaatatatgcatgagcagggattcccacgaaagagagccaggcaacatggtcgtaaaccaaatgttgcaaac

SEQ ID NO: 695083 - DNA, 75 bp, synthetic construct
  source 1..75: mol_type = other DNA
tcgtccctggcaatatgcagaatcagtttcgcagcgcatgtttcagcaaaagattatcgaatggctggatgatga

SEQ ID NO: 695084 - DNA, 75 bp, synthetic construct
  source 1..75: mol_type = other DNA
ttggggcaattaaagcgggtcagaaatggcttctttgggatgatactacctatcgcagcactatgcagcgaatta

SEQ ID NO: 695085 - DNA, 75 bp, synthetic construct
  source 1..75: mol_type = other DNA
ggccggcgcaggtagtccagataaccttgcgcgccgtccgatccgtgttctgctggcagatgaggtggataaata

SEQ ID NO: 695086 - DNA, 75 bp, synthetic construct
  source 1..75: mol_type = other DNA
atgtccacaaacatatctcagtcctcggagaaccagaatttaacccagcagaagattgaacgccttcaactgagt

SEQ ID NO: 695087 - DNA, 75 bp, synthetic construct
  source 1..75: mol_type = other DNA
ttggaaacgacgggatctttatccagcaagggaaaacaggaaaaaaacagataaaagcatggagtccacgattac

SEQ ID NO: 695088 - DNA, 75 bp, synthetic construct
  source 1..75: mol_type = other DNA
cgatctgccgcatctgctggcaagctggaagcattaccgtactttacgcgggctaccggttgataactttatggg

SEQ ID NO: 695089 - DNA, 75 bp, synthetic construct
  source 1..75: mol_type = other DNA
atctagatattcttccgcatatttcccctgagcattggaatggtgaacttgaggaaagtaggttctacatttgct

SEQ ID NO: 695090 - DNA, 75 bp, synthetic construct
  source 1..75: mol_type = other DNA
ggcaatcccacttgggatgacggtgatggcgaagacctgtatctcaaagaggtaacccactggatgcagctacca

SEQ ID NO: 695091 - DNA, 75 bp, synthetic construct
  source 1..75: mol_type = other DNA
tagcgaccaatatgttgctggaaaatggcggtaatttattggtattagcaggtaccgaagcccgtgattccacgg

SEQ ID NO: 695092 - DNA, 75 bp, synthetic construct
  source 1..75: mol_type = other DNA
attgaattactcaaagaaataactaaatttaactattttttatcctgtcactctggatatttaaactgtagcgaa

SEQ ID NO: 695093 - DNA, 75 bp, synthetic construct
  source 1..75: mol_type = other DNA
gtggtactttgaaattattaaagacaaagaaaacagagaagcatcggagagaaaaagagactctgacgttaagtt

SEQ ID NO: 695094 - DNA, 75 bp, synthetic construct
  source 1..75: mol_type = other DNA
atttttaatcgttacgcgggcgaagttcggtgggcggataaggcgttcacgccgcatccggcaattgtgcgccaa

SEQ ID NO: 695095 - DNA, 75 bp, synthetic construct
  source 1..75: mol_type = other DNA
ataccttctggtggcactacccattctacaaacatactaagcctgaatataaagagtacgactgggaacaaattc

SEQ ID NO: 695096 - DNA, 75 bp, synthetic construct
  source 1..75: mol_type = other DNA
ttctgagcatcgttctttttttacctatcgttattttatgttttggctctgttttattctttatatatgacatta

SEQ ID NO: 695097 - DNA, 75 bp, synthetic construct
  source 1..75: mol_type = other DNA
gcagtctattgaagtgcatccgcgcttgattgaacgccgctccgtggctgacggcccgttccgcgactatcgtcg

SEQ ID NO: 695098 - DNA, 75 bp, synthetic construct
  source 1..75: mol_type = other DNA
gttcactttttgcagggctatttgtactccccgccagttccgggtaataaatttatctctgaatgggtaatgaaa

SEQ ID NO: 695099 - DNA, 75 bp, synthetic construct
  source 1..75: mol_type = other DNA
atcgtggcggaaggggtagaaacccaggagcaggcggatttaatgatcggtaaaggcgttcactttttgcagggc

SEQ ID NO: 695100 - DNA, 75 bp, synthetic construct
  source 1..75: mol_type = other DNA
aaaggctatcatgcgattgaaaaaacttacaaggaatgcaagggttgtttctcggttaataaaagcaggggaaat

SEQ ID NO: 695101 - DNA, 75 bp, synthetic construct
  source 1..75: mol_type = other DNA
gcaacgaaagagcaatacagcaaccccgttggttgaacgggtgggttaactttattcgttgttacgagcagatgc

SEQ ID NO: 695102 - DNA, 75 bp, synthetic construct
  source 1..75: mol_type = other DNA
ttacctatgtgtcaaaaggtcggttctccaatcaacacaatattgaagaagcccaagcagttgctgaggccgtac

SEQ ID NO: 695103 - DNA, 75 bp, synthetic construct
  source 1..75: mol_type = other DNA
atggttacgttttggggaaattatgaggggatctctcagaaccaggcatatttgggcgcacaagtacgtaccagt

SEQ ID NO: 695104 - DNA, 75 bp, synthetic construct
  source 1..75: mol_type = other DNA
ctgctgattaatatcgtcttattaattgtcggcatctttatggacatgacaccggctgtactaatcttcacacca

SEQ ID NO: 695105 - DNA, 75 bp, synthetic construct
  source 1..75: mol_type = other DNA
tgatattcccccgaggaacgcttatttatgctgttgctgatggcatattagttcagcccccatatccattttacg

SEQ ID NO: 695106 - DNA, 75 bp, synthetic construct
  source 1..75: mol_type = other DNA
tgttgctgagactggtgatggattctgtttcccattccctgcacttcctgcgagatcgtggacaaacggcggtcg

SEQ ID NO: 695107 - DNA, 75 bp, synthetic construct
  source 1..75: mol_type = other DNA
atgctggtgttggcgcgcgatccgcaaccgaaagatcccaaaaaagccttcaccctgtggtgggtcgactccagt

SEQ ID NO: 695108 - DNA, 75 bp, synthetic construct
  source 1..75: mol_type = other DNA
aaaagaacctacacgagacaaaccaacacgatatagtgcactggtggattcgtccgccacttattccttcgcagt

SEQ ID NO: 695109 - DNA, 75 bp, synthetic construct
  source 1..75: mol_type = other DNA
ttctgccgtttctgataagttgcttgatttggttggacttggtggcaagtctgccgcttatcaacagaaggagtc

SEQ ID NO: 695110 - DNA, 75 bp, synthetic construct
  source 1..75: mol_type = other DNA
ttcgccaaacacgcaacttggcccgcgcgttattgtagaacgcaatttacctaccggaaattattcactccggca

SEQ ID NO: 695111 - DNA, 75 bp, synthetic construct
  source 1..75: mol_type = other DNA
cgattacggggtaactggccgggcagttaaaaatggcctgctgagcatccagagctggagtcctcgcgacttcac

SEQ ID NO: 695112 - DNA, 75 bp, synthetic construct
  source 1..75: mol_type = other DNA
tggctgtatctcgctggcgtcaaagatgtttatacgtgcgaaattgtcggttacgccatgggagagcgcatgacg

SEQ ID NO: 695113 - DNA, 75 bp, synthetic construct
  source 1..75: mol_type = other DNA
tggtgcttgaggagaaggggaggcagcagttttatttgcagggagagagactctcatccggtgatgctgtgattg

SEQ ID NO: 695114 - DNA, 75 bp, synthetic construct
  source 1..75: mol_type = other DNA
caccactaccactacgacagccagcaccgcctggtgttccacacgcggatacagcatggcgagccactggtcgag

SEQ ID NO: 695115 - DNA, 75 bp, synthetic construct
  source 1..75: mol_type = other DNA
catccgcatcccgtatgccacggacccggcgggcaaccggctgccggacccggagctgcacccggacagtaccct

SEQ ID NO: 695116 - DNA, 75 bp, synthetic construct
  source 1..75: mol_type = other DNA
cacaatggctatcattatccacgcagcatcttgacagcgttacgctctcgtatctctttccctcgttttgttaca

SEQ ID NO: 695117 - DNA, 75 bp, synthetic construct
  source 1..75: mol_type = other DNA
gaagctgggcgggacgccgctggtcgagtatacgcgggacaggctgcaccgtgagacggtgcgcagcttcggcag

SEQ ID NO: 695118 - DNA, 75 bp, synthetic construct
  source 1..75: mol_type = other DNA
aacacgcctacaacgaacaggggctggcaaaccgcgtcacgccggacagcctgccgccggtggagtggctgacct

SEQ ID NO: 695119 - DNA, 75 bp, synthetic construct
  source 1..75: mol_type = other DNA
tatcaccccggacggcaaccggagcgagacacagtacgatgcgtggggaaaggcggtcagcaccacgcagggcgg

SEQ ID NO: 695120 - DNA, 75 bp, synthetic construct
  source 1..75: mol_type = other DNA
cctgctcagtgtagaaggattacactggtttttacccaatgtgattaaaaactttagcggttttgctccacttgg

SEQ ID NO: 695121 - DNA, 75 bp, synthetic construct
  source 1..75: mol_type = other DNA
tgaaacaccttcggtggaaactccatcggaaggctctaaatttttggttttgatatggataacgaattcatcagt

SEQ ID NO: 695122 - DNA, 75 bp, synthetic construct
  source 1..75: mol_type = other DNA
atgatctggcagcctgagttcacagataaaacactctccaggaaaaccggggcggttcatactgatatttcagat

SEQ ID NO: 695123 - DNA, 75 bp, synthetic construct
  source 1..75: mol_type = other DNA
atcaatatcgttcgtggtcagccagtatctggtggacgtatgggggtgaagatttaccccataatgcatgaagag

SEQ ID NO: 695124 - DNA, 75 bp, synthetic construct
  source 1..75: mol_type = other DNA
aatggacgatgagcagtttgatgaaatcaatatcgttcgtggtcagccagtatctggtggacgtatgggggtgaa

SEQ ID NO: 695125 - DNA, 75 bp, synthetic construct
  source 1..75: mol_type = other DNA
tcattgaagtgcgtcacgccgttgacgcggttccataccctaaatttgccgagttaatcggtaagaagcccgcca

SEQ ID NO: 695126 - DNA, 75 bp, synthetic construct
  source 1..75: mol_type = other DNA
gaggtcaccatgacgcccgaaagaaacggttcgtatatggtgaaagcatccctggcgaatggagcctcaattgag

SEQ ID NO: 695127 - DNA, 75 bp, synthetic construct
  source 1..75: mol_type = other DNA
gatgattcctctattcgtcaggtcggtgctggaggacaactcacctacaatcaggcaatgcagttggcgaacgat

SEQ ID NO: 695128 - DNA, 75 bp, synthetic construct
  source 1..75: mol_type = other DNA
acaaaaatgacactgaaaatgtcaaaaaagcgctgatgataataaatcctgatgcatattattggggcctaataa

SEQ ID NO: 695129 - DNA, 75 bp, synthetic construct
  source 1..75: mol_type = other DNA
gagtacgaccggtacggtcaacaaatcgccgttcaccgggaggaaggcatcagcacttacagcagttataacccg

SEQ ID NO: 695130 - DNA, 75 bp, synthetic construct
  source 1..75: mol_type = other DNA
cggttatcttgcggggatgaagctgggcggaacaccgctggtcgagtacacgcgggaccggctgcaccgtgagac

SEQ ID NO: 695131 - DNA, 75 bp, synthetic construct
  source 1..75: mol_type = other DNA
atgacgttcacagtaaaaaccattcctgacatgctcgttgaggcatatgaaaatcagaccgaggtagccagaata

SEQ ID NO: 695132 - DNA, 75 bp, synthetic construct
  source 1..75: mol_type = other DNA
tatccgacctacagttcagtgcacctcgtaggcctgataagtcgcgtcagcgacgcatcaggcatcggctgtcga

SEQ ID NO: 695133 - DNA, 75 bp, synthetic construct
  source 1..75: mol_type = other DNA
tcagcggcgcatcaggcatcggttgtcggatgcgacgctatgcgtcttatccgacctacagttcagtgcacctcg

SEQ ID NO: 695134 - DNA, 75 bp, synthetic construct
  source 1..75: mol_type = other DNA
caaagatacggtctgctatttccttgatgacgcatttgaaaataacgttgctaaaacaaatctttgcgccattct

SEQ ID NO: 695135 - DNA, 75 bp, synthetic construct
  source 1..75: mol_type = other DNA
attacagaaaaacacgccacgcaatgatatttgggcgaagttttttctgaggcaggaaaacagctcccgtgcgca

SEQ ID NO: 695136 - DNA, 75 bp, synthetic construct
  source 1..75: mol_type = other DNA
aagaaacagaacgtgggtatgctaaagtattttgcgtaacgaaccagtctgcaaagtccaatattcgttcagagg

SEQ ID NO: 695137 - DNA, 75 bp, synthetic construct
  source 1..75: mol_type = other DNA
agtgcacctcgtaggcctgataagtcgcgtcagcgacgcatcaggcatcggctgtcgaatacaatcaacgggcgt

SEQ ID NO: 695138 - DNA, 75 bp, synthetic construct
  source 1..75: mol_type = other DNA
cctgcccggcgggagttgcataccgggcgatgtaacttcctgcatcgggagtgggggccgttagaaccgtttgac

SEQ ID NO: 695139 - DNA, 75 bp, synthetic construct
  source 1..75: mol_type = other DNA
gctttgctgaaaacaaaacctcgcaaaacagcgtttatggttacggcgtctgctcgatccggcgaatgcttacag

SEQ ID NO: 695140 - DNA, 75 bp, synthetic construct
  source 1..75: mol_type = other DNA
atgtgcgcttcacacctgctcaaccgctggcttcacggtgccagcaataccggagaacaggagatggtccaggtc

SEQ ID NO: 695141 - DNA, 75 bp, synthetic construct
  source 1..75: mol_type = other DNA
gtttatggtgaccgcatggggaataacagtcagggtgatggctggaaatatcgcggtcgtggcctgctgcaaatc

SEQ ID NO: 695142 - DNA, 75 bp, synthetic construct
  source 1..75: mol_type = other DNA
cataaagcagaacatctggaagaacggcgactgatgctacagtggtgggcagattttctggatgcgaacagagaa

SEQ ID NO: 695143 - DNA, 75 bp, synthetic construct
  source 1..75: mol_type = other DNA
ggatttcatcgatttatttgcagcccaagcaataaaacctaacaataaagtaaaattgagcatagactcagaaaa

SEQ ID NO: 695144 - DNA, 75 bp, synthetic construct
  source 1..75: mol_type = other DNA
aaactgccgggaaaaccggtctgcaatgtgactaaagccttcagacgcattatccggcgggcaggtatctatgat

SEQ ID NO: 695145 - DNA, 75 bp, synthetic construct
  source 1..75: mol_type = other DNA
ttactatgaaggactgggtgggattactgtaaataaatataaagcaatagaactgttaagaaagtcagccacaca

SEQ ID NO: 695146 - DNA, 75 bp, synthetic construct
  source 1..75: mol_type = other DNA
agttataaagatgcagtatattggtactcgcttgcagcaaaacaggggctgacagaggctcagtataacctcggt

SEQ ID NO: 695147 - DNA, 75 bp, synthetic construct
  source 1..75: mol_type = other DNA
tcgattttatcgccggacgcagtaagatatatggtgtaaagaatcaggaggactttctcgaggcaaattatatat

SEQ ID NO: 695148 - DNA, 75 bp, synthetic construct
  source 1..75: mol_type = other DNA
ccagggcgttatgcggtaacgcagtacggtgggtctggtagttcgtataagcccatcattgcgtatgacgggggg

SEQ ID NO: 695149 - DNA, 75 bp, synthetic construct
  source 1..75: mol_type = other DNA
taaagtcccacaggatgcctgtatccagattgccacacgaatcagtaaaactggtttaactaacggcattaccct

SEQ ID NO: 695150 - DNA, 75 bp, synthetic construct
  source 1..75: mol_type = other DNA
tggctcggcgctgggtattctggggcagaatgcggtggaagcctggctgcgtaagcggggttttacagggatttt

SEQ ID NO: 695151 - DNA, 75 bp, synthetic construct
  source 1..75: mol_type = other DNA
gagtactggtattatcgcctgagcgttttacttctgattattcttatttcttttatcatggggatgatgatagga

SEQ ID NO: 695152 - DNA, 75 bp, synthetic construct
  source 1..75: mol_type = other DNA
gatcttgtgctactgattttcaccgtgcagaaaggaaatgaaggagaaaatcagtttggccctgaccctaaacag

SEQ ID NO: 695153 - DNA, 75 bp, synthetic construct
  source 1..75: mol_type = other DNA
gcttatccgcctgccggggcagcagtatgatgaggagtccggcctgtattacaaccgccaccgctattatgaccc

SEQ ID NO: 695154 - DNA, 75 bp, synthetic construct
  source 1..75: mol_type = other DNA
aggatttactcttacaccttcctctgcgctacgaagatcgcacacatctctaccccatcggtgaactactgccgg

SEQ ID NO: 695155 - DNA, 75 bp, synthetic construct
  source 1..75: mol_type = other DNA
tcagtttggccctgatcctaaacaggatgaagtatctttaatcaataccagagatgacagagcgcagactgattt

SEQ ID NO: 695156 - DNA, 75 bp, synthetic construct
  source 1..75: mol_type = other DNA
ccgctactaaagccgtatcaagtaagagatggtgcatccgggaggattactcgccttgcggctcgcccttcgggc

SEQ ID NO: 695157 - DNA, 75 bp, synthetic construct
  source 1..75: mol_type = other DNA
tttatgttagtggtaatgctaaagaagctgtaatttcaagatatttttattttttacttgaagataatgtatcat

SEQ ID NO: 695158 - DNA, 75 bp, synthetic construct
  source 1..75: mol_type = other DNA
cggtgccggtgatggtattcgcgtggatgtgcgggcggtggatacacaggctgattatcgcggacgtctgactca

SEQ ID NO: 695159 - DNA, 75 bp, synthetic construct
  source 1..75: mol_type = other DNA
aagaaagtggatatcccggcaggcctacgcgacctgaacgtgaaagaagaagatttcgcggttctggcgactaat

SEQ ID NO: 695160 - DNA, 75 bp, synthetic construct
  source 1..75: mol_type = other DNA
gactgaataaccccttactccctgtgtactcacaaacagcggcagagaaagcgatctcagaactatccccatcag

SEQ ID NO: 695161 - DNA, 75 bp, synthetic construct
  source 1..75: mol_type = other DNA
tggcccacacgccaccactgcttattacggacacctgaaaggttataacaccattccggatgcctccgcagaccc

SEQ ID NO: 695162 - DNA, 75 bp, synthetic construct
  source 1..75: mol_type = other DNA
aagaaaatagatatcagcaacagaataataaaaaaaatcaaatgggctatgattgatgatgctggcgcaaaaaca

SEQ ID NO: 695163 - DNA, 75 bp, synthetic construct
  source 1..75: mol_type = other DNA
gcgcaacggccgatatgtcggcaaaaatcggtggtgaaggggatctggcaatcaatacggtgcgacaggtttcgc

SEQ ID NO: 695164 - DNA, 75 bp, synthetic construct
  source 1..75: mol_type = other DNA
gcggcagttatcgactcacgccattttacgacatcatttcagcatttccggtccttggcggtacgggaatacaca

SEQ ID NO: 695165 - DNA, 75 bp, synthetic construct
  source 1..75: mol_type = other DNA
agatggttaattattgtaaatgtgcttatggggatctctttattaagttttactgtaaccgccttatttaatagg

SEQ ID NO: 695166 - DNA, 75 bp, synthetic construct
  source 1..75: mol_type = other DNA
agttaatgaagaatagttctgttgagttaatttttcgtagtagtcacgaacttgacttgatgaaccaagatgctg

SEQ ID NO: 695167 - DNA, 75 bp, synthetic construct
  source 1..75: mol_type = other DNA
acgatggcaggcaagctagtccgccccttcgaggagatcgtgtgggacgtgagccggatgctcatcatcatgatt

SEQ ID NO: 695168 - DNA, 75 bp, synthetic construct
  source 1..75: mol_type = other DNA
gtgactattgaccttgcttatgaaggctccggcagtggtgactggcgcactgacggtttcatcgtgggtgtcggt

SEQ ID NO: 695169 - DNA, 75 bp, synthetic construct
  source 1..75: mol_type = other DNA
atgcgaactttctatttctctctgttccttctggtcggggggggcacccgcggtgccggtgatggtattcgcgtg

SEQ ID NO: 695170 - DNA, 75 bp, synthetic construct
  source 1..75: mol_type = other DNA
caccgtcgatctggcggcggtggcgatttccattaacaccgtctccggcgatgatgtgattaacgccgccgaaaa

SEQ ID NO: 695171 - DNA, 75 bp, synthetic construct
  source 1..75: mol_type = other DNA
ggctggcaacagcgatgacgccagccgcacggtcaccgtaaatctcgccgcgccaaccattggcatcaacaccat

SEQ ID NO: 695172 - DNA, 75 bp, synthetic construct
  source 1..75: mol_type = other DNA
agcaatctgaccgccagccagtacacggtcagcgcctcggtaagtgataaagcaggcaacccagcgtccaccact

SEQ ID NO: 695173 - DNA, 75 bp, synthetic construct
  source 1..75: mol_type = other DNA
tgaccgtcagcctcagcgcgccagtgattagcatcaacaccatcgcgggcgatgatgtgatcaacgcgacggaaa

SEQ ID NO: 695174 - DNA, 75 bp, synthetic construct
  source 1..75: mol_type = other DNA
ccgccagcctgagcgatcgcgcgggcaacagcgacagcacgactcacgatgtgaccgttgatcttagcggcccga

SEQ ID NO: 695175 - DNA, 75 bp, synthetic construct
  source 1..75: mol_type = other DNA
agctacacggttagcgcctccgcccaggacagcgcaggaaacagcgccacggcctcacgcagcgtggcggtagat

SEQ ID NO: 695176 - DNA, 75 bp, synthetic construct
  source 1..75: mol_type = other DNA
gacaacaacggcaactggcaggtaggcgtacctgcggcagacttacaggcgctgacgccgggtacgatagtggtt

SEQ ID NO: 695177 - DNA, 75 bp, synthetic construct
  source 1..75: mol_type = other DNA
cattaacaccattgccgtcgatgacatcatcaacgccacggagaaaggcgcggatctggcgattaccggcaccag

SEQ ID NO: 695178 - DNA, 75 bp, synthetic construct
  source 1..75: mol_type = other DNA
aactggagcgtcaccgttccggcatcggcggtaaccgcactgggccaggccaactacacggtaacggcggcggta

SEQ ID NO: 695179 - DNA, 75 bp, synthetic construct
  source 1..75: mol_type = other DNA
gaaaacctacacggctaccgtgcaagggaatttaagctggagcgtggacgttccggcggcggatattcaggccat

SEQ ID NO: 695180 - DNA, 75 bp, synthetic construct
  source 1..75: mol_type = other DNA
cagcacgcgtgatatcaccatcgatgccagtctgcccggtctgcgggtagataccgtcgcgggcgatgatgtggt

SEQ ID NO: 695181 - DNA, 75 bp, synthetic construct
  source 1..75: mol_type = other DNA
gagcgttggcgtgccggcagcagacgtgggcaactggcctgcgggtacagtgaatatcattgtaagcggcactaa

SEQ ID NO: 695182 - DNA, 75 bp, synthetic construct
  source 1..75: mol_type = other DNA
gcacaacacctggtatgtgcaactgccggataccgacgcgctggcggcgtctgcgaccgcctataacgtcaccgc

SEQ ID NO: 695183 - DNA, 75 bp, synthetic construct
  source 1..75: mol_type = other DNA
agtggcgcagattagcttgatagcggcgcgacctggacaacgctcaccaccaacggtacacagtggacttacacc

SEQ ID NO: 695184 - DNA, 75 bp, synthetic construct
  source 1..75: mol_type = other DNA
gcgggcgatgatgtgatcaacgcgacggaaaaaggatctgatctggcgctttccggcaccagcgatcagccagcg

SEQ ID NO: 695185 - DNA, 75 bp, synthetic construct
  source 1..75: mol_type = other DNA
actgccaccgttcccgccgccgatctggcagcattacccgagggcagcgcctccgcgcaggccagcgtcagcaat

SEQ ID NO: 695186 - DNA, 75 bp, synthetic construct
  source 1..75: mol_type = other DNA
caacggaatgaagatcagttgattaagagagttaagcacgggaatgaaatgctggaggtgactcttaaagctgtt

SEQ ID NO: 695187 - DNA, 75 bp, synthetic construct
  source 1..75: mol_type = other DNA
ttataaaagagacatctgagcataatatacagaaacgtgtcaatcgccttatatcttccacgatttcggggcgaa

SEQ ID NO: 695188 - DNA, 75 bp, synthetic construct
  source 1..75: mol_type = other DNA
cggggtggaggcagggctatatagtctgccatcataagcgaagtaatcaaatctcatcattgtcattaccgatgt

SEQ ID NO: 695189 - DNA, 75 bp, synthetic construct
  source 1..75: mol_type = other DNA
cgtcctgaacgccgatgaaaaaggccagccgttgaccattagcggtagcagtacggggctggcgacaggcgcaca

SEQ ID NO: 695190 - DNA, 75 bp, synthetic construct
  source 1..75: mol_type = other DNA
catggacgtggtcgatttccgtctctcaacggtgggcgtcaccgctaacttaagcgttaccaccgcacaggccac

SEQ ID NO: 695191 - DNA, 75 bp, synthetic construct
  source 1..75: mol_type = other DNA
caaattatgcaatccaccgatccgctcacctggtcgaaaaccgccctgacgctggtgcaaagtggcaacaactat

SEQ ID NO: 695192 - DNA, 75 bp, synthetic construct
  source 1..75: mol_type = other DNA
caccgacgacactacgccgttgctgaacggcgtgctctccggcccgcttgccagcggtgaagtggtttacctcta

SEQ ID NO: 695193 - DNA, 75 bp, synthetic construct
  source 1..75: mol_type = other DNA
agcgtcggcgttccggcaagcgtcgtctcggcactggcgaacggcacggtgaccattaacgccagcgtcaccgat

SEQ ID NO: 695194 - DNA, 75 bp, synthetic construct
  source 1..75: mol_type = other DNA
tggcgctataacgacagccgcacgctgaccgatggcaactatctctatcaggtgcgggtgattgacgcagcgggc

SEQ ID NO: 695195 - DNA, 75 bp, synthetic construct
  source 1..75: mol_type = other DNA
gaacgtaatgagttgaaaggtatttatatgtcttcttgtcattcattagataattgtgcacaataccatatatac

SEQ ID NO: 695196 - DNA, 75 bp, synthetic construct
  source 1..75: mol_type = other DNA
ggctgcagggaaatatactctggaagccatcgcaaaaggagcggcggctaaggggcataatattctcgaaaaaac

SEQ ID NO: 695197 - DNA, 75 bp, synthetic construct
  source 1..75: mol_type = other DNA
ttataattccatcggcgctagaattaaagagacttggatagaaaatggagaaagagtatttcaagagacatcaaa

SEQ ID NO: 695198 - DNA, 75 bp, synthetic construct
  source 1..75: mol_type = other DNA
ataattgagtttatgggcgttgagcatttctcgcagattatggatgccactgaacttattgataatcaaagtgtg

SEQ ID NO: 695199 - DNA, 75 bp, synthetic construct
  source 1..75: mol_type = other DNA
tgagcaacagcgtttaagttttgacgaattgctgtcggtattaaaagccaactttgcaacgccagaaggcgaaaa

SEQ ID NO: 695200 - DNA, 75 bp, synthetic construct
  source 1..75: mol_type = other DNA
aaatctgcctgcatgaaaatgaaggcaatgctgcgctgacttatgaaggtttactggagcagatccgcgccaaga

SEQ ID NO: 695201 - DNA, 75 bp, synthetic construct
  source 1..75: mol_type = other DNA
ttaagtgaaatactccattctttagataaattgaggaaagacggtcttttacttacgccagacaagcgttcgttc

SEQ ID NO: 695202 - DNA, 75 bp, synthetic construct
  source 1..75: mol_type = other DNA
gataaacatttcattcaatctggattggtatcatttaatcacaacgcaaagcatgtctgtgaaaacagtgataac

SEQ ID NO: 695203 - DNA, 75 bp, synthetic construct
  source 1..75: mol_type = other DNA
ggattcagcttttgtttataaaatgttaaaaggatttgctagagtcaacgatggtaaagttcgcgtttctaattc

SEQ ID NO: 695204 - DNA, 75 bp, synthetic construct
  source 1..75: mol_type = other DNA
atgaaggatatgaatccagggccgacattatttctgttccaggcagataaactctatgccgtatttatcttgttt

SEQ ID NO: 695205 - DNA, 75 bp, synthetic construct
  source 1..75: mol_type = other DNA
gcaacaatgcacgcactgtttaacgaaccactgcaaggcgagtccgccaataccagtaatattgtggagattttt

SEQ ID NO: 695206 - DNA, 75 bp, synthetic construct
  source 1..75: mol_type = other DNA
gcgcgaagtgtggatcggttatgacccggcgaaaggtacgcagaacggcgacagtgccggatgcgtggtggtggc

SEQ ID NO: 695207 - DNA, 75 bp, synthetic construct
  source 1..75: mol_type = other DNA
ccagcacatacacaatgctgtatttctcggatgcagtaatcttgataaagatttccaaggtaaatggcggcagta

SEQ ID NO: 695208 - DNA, 75 bp, synthetic construct
  source 1..75: mol_type = other DNA
atatcacaattgatttatctgcactggaaaaagaagccctggcatctttaaaatattgtaactttaaaaatgtga

SEQ ID NO: 695209 - DNA, 75 bp, synthetic construct
  source 1..75: mol_type = other DNA
ataatcgagtgcaaaccagtctctctgaccacttttcaagcgcctttgtgaatgggcttcaggattacgccacca

SEQ ID NO: 695210 - DNA, 75 bp, synthetic construct
  source 1..75: mol_type = other DNA
tccatgacgataagatcgcagggctggttgataccaagataagggagaacaaccacgcgcagaataacctcatcc

SEQ ID NO: 695211 - DNA, 75 bp, synthetic construct
  source 1..75: mol_type = other DNA
aacaggtacagtttaacggtctggcgctggtgatcatcgacgaacagcatcgtttcggtgtgcatcagcgtctgg

SEQ ID NO: 695212 - DNA, 75 bp, synthetic construct
  source 1..75: mol_type = other DNA
gccaaactgcgatcgattcagatgccattttgcagtatgaccgtcacggcagactgacagagaaaaccgacctca

SEQ ID NO: 695213 - DNA, 75 bp, synthetic construct
  source 1..75: mol_type = other DNA
atgaaacaagttcttcacgataccagatcacgcattccgcgtaacaccgccacaggtccaagactggcacttcgg

SEQ ID NO: 695214 - DNA, 75 bp, synthetic construct
  source 1..75: mol_type = other DNA
attggcgagcttcagaaattggacatggggaccttcgttacctatgtgcggcagttgggtaaacaattcggctgg

SEQ ID NO: 695215 - DNA, 75 bp, synthetic construct
  source 1..75: mol_type = other DNA
cagccatatcgaaggtgccagcctggctgacaaaatgaaagcggtgcaggcaatcaaagaggctaccaagggata

SEQ ID NO: 695216 - DNA, 75 bp, synthetic construct
  source 1..75: mol_type = other DNA
aaagaagtacaggaacacaaatccaaaggattgacccaaagacaaacggctgaactaatgaagaaagggatcgcc

SEQ ID NO: 695217 - DNA, 75 bp, synthetic construct
  source 1..75: mol_type = other DNA
aggcacgtattaaccgccagattgttaaagataaagcgaaagccaagcgagcagggcgcatcaatgctcaacgtc

SEQ ID NO: 695218 - DNA, 75 bp, synthetic construct
  source 1..75: mol_type = other DNA
cgattggattaaggaaaagaccggctttgatccacgtagcatcggtcagacgcttaagcagatttacccgtggct

SEQ ID NO: 695219 - DNA, 75 bp, synthetic construct
  source 1..75: mol_type = other DNA
ccctaacaaaccgagtggtctgggatgtcgatcagacaagttacggcaaagccttaaaggctgttaaatccatca

SEQ ID NO: 695220 - DNA, 75 bp, synthetic construct
  source 1..75: mol_type = other DNA
ggcctccgagttcgatgccattgttgcgcaaacggagcagttccttgccgacaatggtcgtcgcccgcgcattct

SEQ ID NO: 695221 - DNA, 75 bp, synthetic construct
  source 1..75: mol_type = other DNA
cttctaatgagccttatttatgggctgattatattgagatattggccttaactaatatcgacaggtcattcagtc

SEQ ID NO: 695222 - DNA, 75 bp, synthetic construct
  source 1..75: mol_type = other DNA
gcaaaagagaaacacccttgacttggaaataatatctatagatgttcatggatacagatatttcgagtactatct

SEQ ID NO: 695223 - DNA, 75 bp, synthetic construct
  source 1..75: mol_type = other DNA
tagatagcaccgcatatgacgccttaaataaaataaatagccaatctatttgcgaagataaagagttcgctggtt

SEQ ID NO: 695224 - DNA, 75 bp, synthetic construct
  source 1..75: mol_type = other DNA
ttgctacccgttttttacagcgaggggtgtctcatgtgccattgaaactgccggagacgcgccggccagcaagct

SEQ ID NO: 695225 - DNA, 75 bp, synthetic construct
  source 1..75: mol_type = other DNA
aagatgccatatcgtcgcttatctggaagatgaacgctacgctcgtttattagaggttcattgtcaacgtattga

SEQ ID NO: 695226 - DNA, 75 bp, synthetic construct
  source 1..75: mol_type = other DNA
aattttaatgatccgcatgaacatacccgcatgggactggcaaattgccaaagtgtcatcatcttttcgcaaaca

SEQ ID NO: 695227 - DNA, 75 bp, synthetic construct
  source 1..75: mol_type = other DNA
accagtccgataactctcaggttaaactctataacgactccgcctataccgctatcgacggtgaaggcaaggctg

SEQ ID NO: 695228 - DNA, 75 bp, synthetic construct
  source 1..75: mol_type = other DNA
catcatcccgatgttgtaaacatcaccctatcattgagattaatcgtatattaagcaaaacttggaaatacatcc

SEQ ID NO: 695229 - DNA, 75 bp, synthetic construct
  source 1..75: mol_type = other DNA
ttaaaaatgccatttgtgatgataaatatgctaatattgctgttgggctttttgaacagttaagattgctctata

SEQ ID NO: 695230 - DNA, 75 bp, synthetic construct
  source 1..75: mol_type = other DNA
cctgccgctggcgctcatcagcacggaaggggcaacagcgtggtgcgcagaatatgatgaatggggcaacctgct

SEQ ID NO: 695231 - DNA, 75 bp, synthetic construct
  source 1..75: mol_type = other DNA
tcaaacaacacaatgcaaggaagtaggagaaaaaacgagttcatcataaactcaataatatggaaaaaaaatgaa

SEQ ID NO: 695232 - DNA, 75 bp, synthetic construct
  source 1..75: mol_type = other DNA
gtttaaaaaaaaatccggctatacaccattacagtacagaaaatataaggtatggacatttaaatatcaaacagg

SEQ ID NO: 695233 - DNA, 75 bp, synthetic construct
  source 1..75: mol_type = other DNA
tgcccgtggtgtgctaatccggagtcgatctccggcaaaatccagacagtacgcagagaggcgaaatgtctgcac

SEQ ID NO: 695234 - DNA, 75 bp, synthetic construct
  source 1..75: mol_type = other DNA
taataagtacagaaaaagctaatcttcctgaaattgaagcctataaggagtatttttcggagccatttgatgtct

SEQ ID NO: 695235 - DNA, 75 bp, synthetic construct
  source 1..75: mol_type = other DNA
gtctcttttggccacaatctctatgaaggtattgaggttgccgaaacgcatgaactgatgaccgcgcaggaaaag

SEQ ID NO: 695236 - DNA, 75 bp, synthetic construct
  source 1..75: mol_type = other DNA
ggcgcagcgcatcgatttggttgccccacaattcaagtacatcgcggcgggcggcggcgtggtgcaaagcatcat

SEQ ID NO: 695237 - DNA, 75 bp, synthetic construct
  source 1..75: mol_type = other DNA
ctgtgcagaaaccagcgcagcaaaaggtcgtgttgagcgggcgcatctaacccttcaggacagactggtcaagga

SEQ ID NO: 695238 - DNA, 75 bp, synthetic construct
  source 1..75: mol_type = other DNA
atgcagcttcgtttcgtaaaatctgaatcgactttcacctattttgaagcgacacggggctatattgaaatgcat

SEQ ID NO: 695239 - DNA, 75 bp, synthetic construct
  source 1..75: mol_type = other DNA
ggtcaatgatccgcaacggatcgtgaaacccatgaaacgcaccggaccgcgcggcagcggtgagtggcaggtgat

SEQ ID NO: 695240 - DNA, 75 bp, synthetic construct
  source 1..75: mol_type = other DNA
ttcttgatgcgcaaagtcagcaagaaatcccgctcaatcagatccagcctcttacgcccttaaaagccggggata

SEQ ID NO: 695241 - DNA, 75 bp, synthetic construct
  source 1..75: mol_type = other DNA
cgctggatgcggcttataagctggcgcagttcacgcaccataaaaaggggatgccggtaaaaaatcggcaaaagg

SEQ ID NO: 695242 - DNA, 75 bp, synthetic construct
  source 1..75: mol_type = other DNA
actataaccgtcaccggtactacgatccgttgcaggggcggtatatcaccccggacccgattgggttgagaggtg

SEQ ID NO: 695243 - DNA, 75 bp, synthetic construct
  source 1..75: mol_type = other DNA
caacatggcaacaccacgctggagcagttgctggacaaggctgagtccgaagggcgcatcttcaaaagcgaacgc

SEQ ID NO: 695244 - DNA, 75 bp, synthetic construct
  source 1..75: mol_type = other DNA
tactgcgaccaaaatcgatagcggtaattggcgcgtcgatgaaacccaatcgcgcaggttacctgatgatgcgta

SEQ ID NO: 695245 - DNA, 75 bp, synthetic construct
  source 1..75: mol_type = other DNA
gtggtatggcaacggggattgccgtgcattcttgatgcgcaaagtcagcaagaaatcccgctcaatcaggtccag

SEQ ID NO: 695246 - DNA, 75 bp, synthetic construct
  source 1..75: mol_type = other DNA
ttagtggttgccgccattgccatgtggtgcagacgtaatgtcaaaatgatgattgtaaaatgcgtgaaaaaattg

SEQ ID NO: 695247 - DNA, 75 bp, synthetic construct
  source 1..75: mol_type = other DNA
agaataaacttccggcgtggttgggcgtggtgttttgcctgaatagtatcgcgcatttattactcgatacgctgg

SEQ ID NO: 695248 - DNA, 75 bp, synthetic construct
  source 1..75: mol_type = other DNA
ctgtttttccgctccggttccgtcttctgcctttccgaaagtatgaaaaaaatccgtttcagcagtctctggctg

SEQ ID NO: 695249 - DNA, 75 bp, synthetic construct
  source 1..75: mol_type = other DNA
tggaagaaatgacggattctcatttctcatgcctaactttagataagaattacagaagctcacaaagaatcatag

SEQ ID NO: 695250 - DNA, 75 bp, synthetic construct
  source 1..75: mol_type = other DNA
tcaatatgtcattgttgctaaaataattaaatctagcaagggtgctattgatgcttttgtagttggagatcctaa

SEQ ID NO: 695251 - DNA, 75 bp, synthetic construct
  source 1..75: mol_type = other DNA
cgaatggctactaaaaccatattctatctatcatgaaaatctaaaggatggatttaagatactcaatagctatga

SEQ ID NO: 695252 - DNA, 75 bp, synthetic construct
  source 1..75: mol_type = other DNA
ctgaacattattggctcgacagcggtatgatattttatccaggagatggtcatctctcgattgcgccacgttcat

SEQ ID NO: 695253 - DNA, 75 bp, synthetic construct
  source 1..75: mol_type = other DNA
cagtggctgacggcgcaatggcgaacatgctgcaggtaaaggttaccgatgctaacggcaatgtgcttgccgggc

SEQ ID NO: 695254 - DNA, 75 bp, synthetic construct
  source 1..75: mol_type = other DNA
cttctcaaacaaaccgttaaagtagacaacacgaaggctgatgctgttagtgcctggacggaagaaagtgaggga

SEQ ID NO: 695255 - DNA, 75 bp, synthetic construct
  source 1..75: mol_type = other DNA
aatggttggttcggggcaccgggaacgcgcttcagtcagaccttgctgaaaacacaggaacgcgttaaaacgcat

SEQ ID NO: 695256 - DNA, 75 bp, synthetic construct
  source 1..75: mol_type = other DNA
tctggtggtcattaaggacggttcagaggcggacggtgcgacggcgaacacgctgcgggcgagggtgaccgatgc

SEQ ID NO: 695257 - DNA, 75 bp, synthetic construct
  source 1..75: mol_type = other DNA
acggtgcaatggcgaatatgctgcgggcgagggtcaccgatgcgttcggtaatacgcttgccgggcagacggtca

SEQ ID NO: 695258 - DNA, 75 bp, synthetic construct
  source 1..75: mol_type = other DNA
gagctgaagggttacaagagccttataacgtataatcaaataattaataaggtagatttagttgatcatataagc

SEQ ID NO: 695259 - DNA, 75 bp, synthetic construct
  source 1..75: mol_type = other DNA
tgtacaacatatttcagctgggggctatgtaactaatacaactgtaaattccggaggttttcagcgtatcagttc

SEQ ID NO: 695260 - DNA, 75 bp, synthetic construct
  source 1..75: mol_type = other DNA
tggaaaaaccactgctacaaccgttaatagctctggagctcaaaacgtggggagctcagggacaacaataagcac

SEQ ID NO: 695261 - DNA, 75 bp, synthetic construct
  source 1..75: mol_type = other DNA
gcactggctaattcactgtttctcatggggttgaatgagcgtaagcaattcagtgccgggaatgataatacacag

SEQ ID NO: 695262 - DNA, 75 bp, synthetic construct
  source 1..75: mol_type = other DNA
ccacctgattgacagcgtattcagcgaaaaccagctcatgcaggtagaagatggtcgcaagcccaaaagactgca

SEQ ID NO: 695263 - DNA, 75 bp, synthetic construct
  source 1..75: mol_type = other DNA
tcctccgatgccagtatcaatgtcatggtgatcaacgtgcaagcgtttaacgccaccggcaaagataaccgccgt

SEQ ID NO: 695264 - DNA, 75 bp, synthetic construct
  source 1..75: mol_type = other DNA
gagggattcagagtgttttgtccggtggggaaacaagcaacagtttgattaataatggtggacgggaaaatgtct

SEQ ID NO: 695265 - DNA, 75 bp, synthetic construct
  source 1..75: mol_type = other DNA
gaatttggtgttaaaatgagtggtgacagccagttgttgtcaggtagccgaaatcagggagagataaagacaggt

SEQ ID NO: 695266 - DNA, 75 bp, synthetic construct
  source 1..75: mol_type = other DNA
agttttcagcggcgcattcgacaccatcctgccgaatctggcggtgttgagcggtgttctggttctggtcagtgg

SEQ ID NO: 695267 - DNA, 75 bp, synthetic construct
  source 1..75: mol_type = other DNA
tctaaagacaatcaagaccgcctatcgtcgactggcccgcaaataccatcctgatgtcagcaaagaaccggatgc

SEQ ID NO: 695268 - DNA, 75 bp, synthetic construct
  source 1..75: mol_type = other DNA
aaaggtgaattctggttacagcctcatctgcaggctatctggatgggggttactccggatacacatcaggaagtt

SEQ ID NO: 695269 - DNA, 75 bp, synthetic construct
  source 1..75: mol_type = other DNA
gctgagagctccattattaatagtggaggagcacagaatgttctctctgatggctatgccaagggaactcagctt

SEQ ID NO: 695270 - DNA, 75 bp, synthetic construct
  source 1..75: mol_type = other DNA
tgtcagtaaatggtggagtcgcatatcaggcaggaggtcacgggagcaatgccatctccggagcgctggggataa

SEQ ID NO: 695271 - DNA, 75 bp, synthetic construct
  source 1..75: mol_type = other DNA
ttattggctcgacagcgggatgatattttatccaggagatggtcatctctcgattgcgtcacgttcatccccact

SEQ ID NO: 695272 - DNA, 75 bp, synthetic construct
  source 1..75: mol_type = other DNA
atgagacgaggtatatgtttattcgcagaactatttgtcatcttattacaatggctattctggcgtgttcattta

SEQ ID NO: 695273 - DNA, 75 bp, synthetic construct
  source 1..75: mol_type = other DNA
gaacctcaccgacctctttgttcaaaagggaaaagggagttagttaaaaaagcgatagtcaaagttcataaaaga

SEQ ID NO: 695274 - DNA, 75 bp, synthetic construct
  source 1..75: mol_type = other DNA
gaggaagacaggaagtatagatttgcctggtatattaaaaagtttctaataaatagatcgttgagaatatttcct

SEQ ID NO: 695275 - DNA, 75 bp, synthetic construct
  source 1..75: mol_type = other DNA
tggtggcaggaaaacaatgttcatctgcattccggtgtaaccatcaaaacgctgggtcgcgacacacgagagtta

SEQ ID NO: 695276 - DNA, 75 bp, synthetic construct
  source 1..75: mol_type = other DNA
gcttgatgcactgggagaacgctgctttaccctacgccatgccggtgatgccgccagactgcgagaagttctgca

SEQ ID NO: 695277 - DNA, 75 bp, synthetic construct
  source 1..75: mol_type = other DNA
aaaaatatcaaattgtagttgatgttcgcgatatctggcctgaagcttttccgttggctgggatgaaaggccgga

SEQ ID NO: 695278 - DNA, 75 bp, synthetic construct
  source 1..75: mol_type = other DNA
aataaccttcgatcgcagacccaaatgcgtcttgatgaaggatttcttggttacgagacaagtccactcagagaa

SEQ ID NO: 695279 - DNA, 75 bp, synthetic construct
  source 1..75: mol_type = other DNA
cacggtggtcgaaacgatttcgttgtttaaagaaccggagtaccacaagcgtaactatgcggccttccagcatct

SEQ ID NO: 695280 - DNA, 75 bp, synthetic construct
  source 1..75: mol_type = other DNA
cttgatagccgtgagattctggtcgaagagttgatccgccgttacagcatctggatgggggaagattcttctctg

SEQ ID NO: 695281 - DNA, 75 bp, synthetic construct
  source 1..75: mol_type = other DNA
ctaccctggctcgtccaggcatgggttgaagatattaatgaagaacgcactgatgcatttacgtctgtgcccctg

SEQ ID NO: 695282 - DNA, 75 bp, synthetic construct
  source 1..75: mol_type = other DNA
atgcttaaattctcttctgcttttattcttgctggagtgctattctgctcatgtgcaggggctgcctcattcggc

SEQ ID NO: 695283 - DNA, 75 bp, synthetic construct
  source 1..75: mol_type = other DNA
aacgcctgcatacctggattgaaaaccatgtagccaccagcgttgatcccgtcaccggaaagcgttttgtttcgg

SEQ ID NO: 695284 - DNA, 75 bp, synthetic construct
  source 1..75: mol_type = other DNA
ttcaaaaaagtaaaaaaatggtcatgggaaaccatgtggtcagtcggtgggattgtttcgtggattattctgccg

SEQ ID NO: 695285 - DNA, 75 bp, synthetic construct
  source 1..75: mol_type = other DNA
tgttatcagtgagataaaaaacaaagcattttgtttttttgaatactttgattcattgaataaaatattcgatgc

SEQ ID NO: 695286 - DNA, 75 bp, synthetic construct
  source 1..75: mol_type = other DNA
tatacaggcactgcgtcccgatggttcgccattaacctttggctatgacgtactggatctccaggaaaacaatat

SEQ ID NO: 695287 - DNA, 75 bp, synthetic construct
  source 1..75: mol_type = other DNA
tggagcgcgacggcaaagatccgcaaatgcaggtcgcggaagtggcgcagcaaagcggaacacttttagctcgcg

SEQ ID NO: 695288 - DNA, 75 bp, synthetic construct
  source 1..75: mol_type = other DNA
atttttctaaagagcaagtgtcaaaggttcctctgcttggcgatattcctttagtggggcaactcttccgctata

SEQ ID NO: 695289 - DNA, 75 bp, synthetic construct
  source 1..75: mol_type = other DNA
ttattcttcccggagcacaggcttatttgccgaaggagtacgccgccgattacggactggcgatggacgcgcagc

SEQ ID NO: 695290 - DNA, 75 bp, synthetic construct
  source 1..75: mol_type = other DNA
attcgtaatggcggatgtattacagggattgtaaacaaggtgactgacgaagtgcaaaacaatgtatctgagtta

SEQ ID NO: 695291 - DNA, 75 bp, synthetic construct
  source 1..75: mol_type = other DNA
atggtagggttttatgtgaaaaaatgattttaaatggtgaattgtatggtgaatgctgttgctccacgttagatg

SEQ ID NO: 695292 - DNA, 75 bp, synthetic construct
  source 1..75: mol_type = other DNA
agattactacgagtacaacttgatgaaattaaagcaacaatattattttgccaaaatagaaaatttatcaaaata

SEQ ID NO: 695293 - DNA, 75 bp, synthetic construct
  source 1..75: mol_type = other DNA
cagcaacaacaaaataatgatacctcgcttggtacgaatttaagctggagaactcccatcgccataatagatggc

SEQ ID NO: 695294 - DNA, 75 bp, synthetic construct
  source 1..75: mol_type = other DNA
tgccagctatagcaaacctgatgatatgaaaggcaaatggcaaagtaatactctttacctggaacgtggctggtc

SEQ ID NO: 695295 - DNA, 75 bp, synthetic construct
  source 1..75: mol_type = other DNA
gaagtattagtagtggattagttgtctggcccggtggtattaatatcactaaccagctatccgatacatttgcaa

SEQ ID NO: 695296 - DNA, 75 bp, synthetic construct
  source 1..75: mol_type = other DNA
cagatattcaggcgctgggaaatggcgatttaacggttaatgcctcagtcaccaatcaaaacggcaacaccggca

SEQ ID NO: 695297 - DNA, 75 bp, synthetic construct
  source 1..75: mol_type = other DNA
agcgccagccataatctggcggtagacaccaccgcgccggttctcaccattaacaccgtggcgggcgatgacatc

SEQ ID NO: 695298 - DNA, 75 bp, synthetic construct
  source 1..75: mol_type = other DNA
ggtggtgtcgaaaacggtggtggtcgatacgattaaccccaccgccacaccaacgattgtgtcgtataccgatga

SEQ ID NO: 695299 - DNA, 75 bp, synthetic construct
  source 1..75: mol_type = other DNA
cccggtcaaaccacgcacgccctgaccgtcgataccgttgcgccaacggtcaccatcgccacggtggcgggtgac

SEQ ID NO: 695300 - DNA, 75 bp, synthetic construct
  source 1..75: mol_type = other DNA
aactggagcgtgacggttccggcattggcggtaaccgcactgggtcaggccaactacacggtaacagcggcggtg

SEQ ID NO: 695301 - DNA, 75 bp, synthetic construct
  source 1..75: mol_type = other DNA
agcgggcaaaccgttaccgtcacttttggcggtaaaacctacactgcaagcgtcgccgccaacggtagctggagt

SEQ ID NO: 695302 - DNA, 75 bp, synthetic construct
  source 1..75: mol_type = other DNA
tggcggcaaacggtagctggagcaccaccgttccggcggcggatttggcggccctgcgtgatggcgatgccagcg

SEQ ID NO: 695303 - DNA, 75 bp, synthetic construct
  source 1..75: mol_type = other DNA
catcgccagcgatgacatccttaacgccgcagaggccggaagcccgctcaccatcagcggtaccagcaccgccga

SEQ ID NO: 695304 - DNA, 75 bp, synthetic construct
  source 1..75: mol_type = other DNA
ggaagctaacggtagctggacggtgaatgtgccgcctgccgatctcgctgcgctaccggacggcgcgggcaacgt

SEQ ID NO: 695305 - DNA, 75 bp, synthetic construct
  source 1..75: mol_type = other DNA
ggctcgtcgctggtgatcagcggcaccaccaccgcgcccgtcgggcagacgctgaccctgaccttaaacggcaaa

SEQ ID NO: 695306 - DNA, 75 bp, synthetic construct
  source 1..75: mol_type = other DNA
agcgacggcagctacaccattagcgcgacggttagcgatcaggccggaaaccccggcagcgccagccgtggcgtg

SEQ ID NO: 695307 - DNA, 75 bp, synthetic construct
  source 1..75: mol_type = other DNA
ggcaaaggctacagcgccaccattcagagcaacgggagctggagcgtgaacgtgcctgcggcggatgttgcggca

SEQ ID NO: 695308 - DNA, 75 bp, synthetic construct
  source 1..75: mol_type = other DNA
gcaggcgctggtgatttccggttccagcactggcggagaagcgggggatgtcgtcaccgtcacgctaaacagtaa

SEQ ID NO: 695309 - DNA, 75 bp, synthetic construct
  source 1..75: mol_type = other DNA
ggtcaatactggccttccgtcaattacctttaacgccatcagcggcgataacgtcctgaacgccgatgaaaaagg

SEQ ID NO: 695310 - DNA, 75 bp, synthetic construct
  source 1..75: mol_type = other DNA
acgatattattaacgctgccgaagcgggcgcgggccagagcatcagcgggcaggtgacgggcgcggcagcgggcg

SEQ ID NO: 695311 - DNA, 75 bp, synthetic construct
  source 1..75: mol_type = other DNA
cgttgggcaatggcgatttgaccattaacgcttcggtcaccaacgcgaatggcaatacgggcagcggtacgcggg

SEQ ID NO: 695312 - DNA, 75 bp, synthetic construct
  source 1..75: mol_type = other DNA
cgatcaccatcaacaccatcgccacggacgatgtgattaacgccgcagaaaaaggcgctgatttaaccctttccg

SEQ ID NO: 695313 - DNA, 75 bp, synthetic construct
  source 1..75: mol_type = other DNA
ggcacctggagcgtgaccgttcccgccaccaatgttgacgcactggctgacggcaacgccacggtcaccgccagc

SEQ ID NO: 695314 - DNA, 75 bp, synthetic construct
  source 1..75: mol_type = other DNA
ctaccgtagcgggcgatggcagctggacaaccaccgtacccgccgccgatctcagcgcgttacgtgacggcgacg

SEQ ID NO: 695315 - DNA, 75 bp, synthetic construct
  source 1..75: mol_type = other DNA
ttctgaacgccgccgaggcgggcaatccgctaaccatcagcggcagtagcaccgccgaagcggggcagacggtaa

SEQ ID NO: 695316 - DNA, 75 bp, synthetic construct
  source 1..75: mol_type = other DNA
ctggagcaccacggttccggcggcggatatggcagccctgcgtgatggcgatgccagcgcacaggccagcgtcag

SEQ ID NO: 695317 - DNA, 75 bp, synthetic construct
  source 1..75: mol_type = other DNA
ttgcggcggtactggcggatggctcatggagcgtcggcattccggcggcagatgtcagcgcctggcctgcgggga

SEQ ID NO: 695318 - DNA, 75 bp, synthetic construct
  source 1..75: mol_type = other DNA
gcgggtacgcagataaccgttacgctcaacgggcaaaattacaccaccactgccgatgcatccggtaactggagc

SEQ ID NO: 695319 - DNA, 75 bp, synthetic construct
  source 1..75: mol_type = other DNA
ggaaacagcggcagcgctacccatcaggtgacggtcaataccgggctgccgaccattacctttaacgccatcagc

SEQ ID NO: 695320 - DNA, 75 bp, synthetic construct
  source 1..75: mol_type = other DNA
accgacgcggcaggcaacagcgatgatgccagccgcacggtcaccgtgaatctgaccgcgccaaccattggcatt

SEQ ID NO: 695321 - DNA, 75 bp, synthetic construct
  source 1..75: mol_type = other DNA
acccatcaggtgacggtcaataccgggctgccgaccattacctttaacgccatcagcggcgataacatcctgaac

SEQ ID NO: 695322 - DNA, 75 bp, synthetic construct
  source 1..75: mol_type = other DNA
ttgatgaaatatatgatttttatggatcaatttatttaggtcagtggaggggaaagccgttaatagatagggtag

SEQ ID NO: 695323 - DNA, 75 bp, synthetic construct
  source 1..75: mol_type = other DNA
ttccatcatgaaatagccaccgccattgcgcttggcctgttcggttctgtcgacgccaaccgtggcgatgcgcaa

SEQ ID NO: 695324 - DNA, 75 bp, synthetic construct
  source 1..75: mol_type = other DNA
ccgcaccctccgtaggccggataaggcgtttacgccgcatccggcaacagtgccagatgcctgatgcgacgctcg

SEQ ID NO: 695325 - DNA, 75 bp, synthetic construct
  source 1..75: mol_type = other DNA
ccgacttgaaaacgaaaaagccgctatccaagcccagcatgaagtagttctgaaccggattagagaaatgcaaaa

SEQ ID NO: 695326 - DNA, 75 bp, synthetic construct
  source 1..75: mol_type = other DNA
tgaacgtgcggtaaaacgagctggcatcgagctaccagaagggcaatgcacacacgtattacgacatacatttgc

SEQ ID NO: 695327 - DNA, 75 bp, synthetic construct
  source 1..75: mol_type = other DNA
ttaaacgtctgctggatgcctgtgctgattctcaaagccccagtctgctgatgattgcaaaaatatgcttggcca

SEQ ID NO: 695328 - DNA, 75 bp, synthetic construct
  source 1..75: mol_type = other DNA
gacaattaaagcgcaccttgaaaaagaaaaaacactttttaaccagggtataaaggttctctctctcttttttat

SEQ ID NO: 695329 - DNA, 75 bp, synthetic construct
  source 1..75: mol_type = other DNA
gcggttgataccggttttaaaaatgctgagctaaccctcagtgaggtttccttgcttaaaaacatccaacaggcg

SEQ ID NO: 695330 - DNA, 75 bp, synthetic construct
  source 1..75: mol_type = other DNA
acgctagaggacaagtttgatctggatatctttaccacaggtcaaagcaaacaggacttgagtaaggccgggaat

SEQ ID NO: 695331 - DNA, 75 bp, synthetic construct
  source 1..75: mol_type = other DNA
gcgacggtcagagttttaacgccgaagattttgacgatatcttctcgtcaattttcggtcagcatgcccgccaga

SEQ ID NO: 695332 - DNA, 75 bp, synthetic construct
  source 1..75: mol_type = other DNA
caacagaattgaaaatcttcgtcttgtgaaaaaatcagcaaaccaaaggaatagaatcaaactatctaaaaataa

SEQ ID NO: 695333 - DNA, 75 bp, synthetic construct
  source 1..75: mol_type = other DNA
ttctgcttttgcctggccgtgaagaaaaacagcgatggttaaacgctaagaaaaaacaagaggacgcagaaaaat

SEQ ID NO: 695334 - DNA, 75 bp, synthetic construct
  source 1..75: mol_type = other DNA
aagagatataaataatattagaaaatctctcattacgtatcattataaagttaacggagatacgataaagaaaac

SEQ ID NO: 695335 - DNA, 75 bp, synthetic construct
  source 1..75: mol_type = other DNA
ggcaacattacaccaccacagccgatgcttccgggaactggagcgtgaccgttccggcgtctgcggttggtacgc

SEQ ID NO: 695336 - DNA, 75 bp, synthetic construct
  source 1..75: mol_type = other DNA
gacgtgattaaagccacggaaaaaggcgcggacctgcaaatcaccggcaccagtaatcagcctgcgggcaccacc

SEQ ID NO: 695337 - DNA, 75 bp, synthetic construct
  source 1..75: mol_type = other DNA
gcaaataatactggcaccgcaacgcacgacatcgtaatagacgccaacctgcctggtctgcgcgtcgaaaccgtg

SEQ ID NO: 695338 - DNA, 75 bp, synthetic construct
  source 1..75: mol_type = other DNA
atcaacgccgctgaaatcgttgtggcgcagaccatcagcggtcaggtcacgggaacggcggttgccgggaatacg

SEQ ID NO: 695339 - DNA, 75 bp, synthetic construct
  source 1..75: mol_type = other DNA
tgcgtgatggcgatgccagcgcgcaggccagcgtcagcaatgttaacggcaacagcgccaccactactcacgctt

SEQ ID NO: 695340 - DNA, 75 bp, synthetic construct
  source 1..75: mol_type = other DNA
caatatcgaccagacagtcaataccacctggggcggtttacaggcgacagatgccacccacgcttacgacctcag

SEQ ID NO: 695341 - DNA, 75 bp, synthetic construct
  source 1..75: mol_type = other DNA
tgattaccttgaagcaattaaacaggctaagtgttctctatggtacaggcagacaccaaaccgtgtgaattccat

SEQ ID NO: 695342 - DNA, 75 bp, synthetic construct
  source 1..75: mol_type = other DNA
agattacccggaagccatcagacaggctaaagattcattatggtataaacaaacacctaatcgtgttgatgcaat

SEQ ID NO: 695343 - DNA, 75 bp, synthetic construct
  source 1..75: mol_type = other DNA
atgtgatcctgaaattgcatcaggtgtcagagtatttggaagaaccacttgtgaagcaagaatagatgacaattg

SEQ ID NO: 695344 - DNA, 75 bp, synthetic construct
  source 1..75: mol_type = other DNA
atggttagtgtgacgagttatacatatccaacaaaaacagagaatgataatagccagtctcaaaatcagagtcta

SEQ ID NO: 695345 - DNA, 75 bp, synthetic construct
  source 1..75: mol_type = other DNA
ctgaaaatgcaatcattgcaggatgggtcaatgtaatcaccatggggcagggctggaaaggaactgttggatgga

SEQ ID NO: 695346 - DNA, 75 bp, synthetic construct
  source 1..75: mol_type = other DNA
gactggtcaatagtagcaaagatagacacaagttaccagtttgatatattgaatgataatcaaactattctcagt

SEQ ID NO: 695347 - DNA, 75 bp, synthetic construct
  source 1..75: mol_type = other DNA
ggtagccgcaagcagatgacgtggagccgctacgggcagttacagaccttcaccgactgctcaggatatgaaacg

SEQ ID NO: 695348 - DNA, 75 bp, synthetic construct
  source 1..75: mol_type = other DNA
tgggcgaaaagctgcttcagcggggccgtaccccgaatactgaaagctctgctgtggtgttgccagtgaatgaaa

SEQ ID NO: 695349 - DNA, 75 bp, synthetic construct
  source 1..75: mol_type = other DNA
aaacgactgcatttcaggaacgctatgattttaatatcgatgaatggcgggcaaaattcaggcagttatgtttag

SEQ ID NO: 695350 - DNA, 75 bp, synthetic construct
  source 1..75: mol_type = other DNA
gcggtctgtaccagattgcgacctactacggcaagctcggtgcggttgagccagtgtacaaagaaaccctgtcct

SEQ ID NO: 695351 - DNA, 75 bp, synthetic construct
  source 1..75: mol_type = other DNA
tacctagcgcttgaatccgtcttgatcgttccaaaacggcttataaactgcccattgaataaacttgaagccgtt

SEQ ID NO: 695352 - DNA, 75 bp, synthetic construct
  source 1..75: mol_type = other DNA
agctttattcgagccagacgctcgcatattgtgcttaaggaagagcacaaagcgatgttgaaattatgggaaaac

SEQ ID NO: 695353 - DNA, 75 bp, synthetic construct
  source 1..75: mol_type = other DNA
tggccccggctggaaaacgcctgcggatatccgcttacagctgcgcgataacacactgatactcagtgataacgg

SEQ ID NO: 695354 - DNA, 75 bp, synthetic construct
  source 1..75: mol_type = other DNA
atatattttccgaccagcagcgtgatcaaataatcatatgtggtgtttatgcacaaataggtattttaaccacag

SEQ ID NO: 695355 - DNA, 75 bp, synthetic construct
  source 1..75: mol_type = other DNA
tttaatctagcattctccatgattttttattactcaatttttacttatttgaaaacggtcggcatatctgctact

SEQ ID NO: 695356 - DNA, 75 bp, synthetic construct
  source 1..75: mol_type = other DNA
ctttgtcttgtcgggggggctgatggcgataactcagcggtatgcaggccggtgcaaaaatacataaacggcaca

SEQ ID NO: 695357 - DNA, 75 bp, synthetic construct
  source 1..75: mol_type = other DNA
agcacggaaaatgagcctcaacccgtagagcaaccagagccggtccagcccggaactgacggtactatgatgtaa

SEQ ID NO: 695358 - DNA, 75 bp, synthetic construct
  source 1..75: mol_type = other DNA
ccgaaagttctgtgatgtatgttgccgcaccgattatggacggctcgcggcttattggcgttttgagcgtaggca

SEQ ID NO: 695359 - DNA, 75 bp, synthetic construct
  source 1..75: mol_type = other DNA
tggacacggacgagcaggtttatatcggcgattccggtctgaacgttaaaggcctgctgaacctgacgcaggtaa

SEQ ID NO: 695360 - DNA, 75 bp, synthetic construct
  source 1..75: mol_type = other DNA
tagggcatatgcggatcagtcaaccattggtttgggaggcactggagcctgagatatcgccggaccttagtgtga

SEQ ID NO: 695361 - DNA, 66 bp, synthetic construct
  source 1..66: mol_type = other DNA
atgttacttcctgtaattatggctggcggtaccggcagtcgtctctggccgatgtctcgcgagctt

SEQ ID NO: 695362 - DNA, 75 bp, synthetic construct
  source 1..75: mol_type = other DNA
cggtgtatgaccgcagcgggacgcaggttcgcgggtttacttatgatgcggagcacgccgggcggatggtggcgc

SEQ ID NO: 695363 - DNA, 75 bp, synthetic construct
  source 1..75: mol_type = other DNA
ttcacggactgctcggggtacacgacgcggtatgagtatgaccggtacggtcaacaaatcgccgttcaccgggaa

SEQ ID NO: 695364 - DNA, 75 bp, synthetic construct
  source 1..75: mol_type = other DNA
cagggcagcttgtccacagtgaagacgagggacttatcaccctctggcattacgatgcgtcggaccgcatcacgc

SEQ ID NO: 695365 - DNA, 75 bp, synthetic construct
  source 1..75: mol_type = other DNA
cctgtataagccgatgcaggagaaagaacacacgttatcgaaaaaatgccgtctgaaagtaagcggctcgccaga

SEQ ID NO: 695366 - DNA, 75 bp, synthetic construct
  source 1..75: mol_type = other DNA
agtggacatagagccagctagacaagaagttaatatctttcgtggtttatatcagacagggaaatacagtgatat

SEQ ID NO: 695367 - DNA, 75 bp, synthetic construct
  source 1..75: mol_type = other DNA
tcgtaatgctctgcgttattcccatacgaagattgaagtgggctttgcggtagataaagacggtatcaccattac

SEQ ID NO: 695368 - DNA, 75 bp, synthetic construct
  source 1..75: mol_type = other DNA
tgaatgtgcagattctgcggaacaagttgaacccagctcaacctcatttattaaccgcaccagaaatctggctgc

SEQ ID NO: 695369 - DNA, 75 bp, synthetic construct
  source 1..75: mol_type = other DNA
cgacgactatgtcgcggcccttcatgcattgcttctgcattttggaaagccagtagagccctccatttttaaagc

SEQ ID NO: 695370 - DNA, 75 bp, synthetic construct
  source 1..75: mol_type = other DNA
cgtcaggatatggaacaaacggcgttaatggggctgcttaacgccatccgccgctatgggctgccggacgaaggt

SEQ ID NO: 695371 - DNA, 75 bp, synthetic construct
  source 1..75: mol_type = other DNA
acgctggaagattttggcaccatgagtgcgccaattattccgtggtcggctgctgggttatatatggcaacaaca

SEQ ID NO: 695372 - DNA, 75 bp, synthetic construct
  source 1..75: mol_type = other DNA
tgccgtactgtgtgttctgtttctgctcgatgatatttgcgttgatttatgcttctacaggtttccgtttactgc

SEQ ID NO: 695373 - DNA, 75 bp, synthetic construct
  source 1..75: mol_type = other DNA
attacgggacgtgttaatccctcggattacggtaactttgattcccgctatgtgagagatgtcagacttggcaca

SEQ ID NO: 695374 - DNA, 75 bp, synthetic construct
  source 1..75: mol_type = other DNA
ggtacggtggagatcagtgccaccagtcagacggcggggatcagtacagtcactgcaaccatcaacaacagcacc

SEQ ID NO: 695375 - DNA, 75 bp, synthetic construct
  source 1..75: mol_type = other DNA
caatggcgaacacgctgcgggtgagggtcacggatgcgttcggtaatgcgcttgccgggcagacggtcagcgtgt

SEQ ID NO: 695376 - DNA, 75 bp, synthetic construct
  source 1..75: mol_type = other DNA
aacggtcactccgacggtcactacagagccggacggcacggtggagatcagtgtcaccagtcagacggcgggagt

SEQ ID NO: 695377 - DNA, 75 bp, synthetic construct
  source 1..75: mol_type = other DNA
ggttgctcgttacggacaggaatacgtcgactggctcaatggcccccacgaaatgaccaactaccgccgggaaga

SEQ ID NO: 695378 - DNA, 75 bp, synthetic construct
  source 1..75: mol_type = other DNA
ctcagcaggcgttcaacgcctacatccgagcgcgtgacgctgatttgccatgcatcagctgcggagagaccaatc

SEQ ID NO: 695379 - DNA, 75 bp, synthetic construct
  source 1..75: mol_type = other DNA
aaatgaccaactaccgccgtgaagacttcattcggatccgcgatgaataccgcgccaagctcaaagcactgaaac

SEQ ID NO: 695380 - DNA, 75 bp, synthetic construct
  source 1..75: mol_type = other DNA
ccgggatgtgacgtttatcgccgatgtcaggacggcgcagatcgctgatctggtggtcattaaggacggctcagt

SEQ ID NO: 695381 - DNA, 75 bp, synthetic construct
  source 1..75: mol_type = other DNA
cgggcagacggtcagcgtgatggcaggcaacggcgcaacggttgccccaacggtgattacagagccggacggcac

SEQ ID NO: 695382 - DNA, 75 bp, synthetic construct
  source 1..75: mol_type = other DNA
ttggtctgcgttacaacagtcaccggacaaaacggggaagaatacctggtgatgagtggtgatgagtttatggaa

SEQ ID NO: 695383 - DNA, 75 bp, synthetic construct
  source 1..75: mol_type = other DNA
gaaatggtttttaccccaaggggattttcaggaagcatggagtgtaattaattcatattgtagtgataggggcta

SEQ ID NO: 695384 - DNA, 75 bp, synthetic construct
  source 1..75: mol_type = other DNA
gcaacggtcactccgacggtcaccacacagccggacggcacggtggagatctttgtcaccagtcagacggcgggc

SEQ ID NO: 695385 - DNA, 75 bp, synthetic construct
  source 1..75: mol_type = other DNA
agacggtacgacggcgaatacgctgcaggtgagggtcaccgatgcgttcgggaatgcacttgccggacagacggt

SEQ ID NO: 695386 - DNA, 75 bp, synthetic construct
  source 1..75: mol_type = other DNA
cacctgacaattacgacatcaatctggcgctgccttgttcaccggggaaacttgtttttcgcgaaagtacgaatc

SEQ ID NO: 695387 - DNA, 75 bp, synthetic construct
  source 1..75: mol_type = other DNA
tcctatcagataacatcctatccaacagaaaatacatcatgtggttccggggtattttcagtatttggatatcaa

SEQ ID NO: 695388 - DNA, 75 bp, synthetic construct
  source 1..75: mol_type = other DNA
cgtcattaacagcggtgaccgatcaaaacggaatcgcgacaacaagcgtgaaaggagcgatgacaggtagcgtca

SEQ ID NO: 695389 - DNA, 75 bp, synthetic construct
  source 1..75: mol_type = other DNA
aataaagtcggtacatatacggtgactgcatcgttccataacggcgtaacaatacagacacagacaaccgtgaaa

SEQ ID NO: 695390 - DNA, 75 bp, synthetic construct
  source 1..75: mol_type = other DNA
gcgcagttacaccagcttcgcgggcgtgtaggtcgtggcgcggtggcttctcactgcgtgctgctctacaaaacg

SEQ ID NO: 695391 - DNA, 75 bp, synthetic construct
  source 1..75: mol_type = other DNA
ctcctcaactagttgaatggacgggctcagtcgcgaatgctgagaaatgggatcgacttatccattttcttgctc

SEQ ID NO: 695392 - DNA, 75 bp, synthetic construct
  source 1..75: mol_type = other DNA
ccgctctccaaaacggcgcaaatccgcctgcaagtgctgcgcgacagcaacgatggatttgtgattgcgcagaaa

SEQ ID NO: 695393 - DNA, 75 bp, synthetic construct
  source 1..75: mol_type = other DNA
cctataacaagtcaaaaaaaatcatgacccagccaacccgctttaataaaaattccggttttatgcgcaaattgc

SEQ ID NO: 695394 - DNA, 75 bp, synthetic construct
  source 1..75: mol_type = other DNA
tgcctgtggtgcgaatactgtgctgtgtgcaaatgaagttagtatctgggttgcggaaatggtcgctggcgatgc

SEQ ID NO: 695395 - DNA, 75 bp, synthetic construct
  source 1..75: mol_type = other DNA
ctgatggggaaaaacctttcaaatttaaattcaggatgggaggggaaattttatttgcccgtgttccgttcaatc

SEQ ID NO: 695396 - DNA, 75 bp, synthetic construct
  source 1..75: mol_type = other DNA
ggcgaatggagcctcacttgagaaacaactggaggctattgatgaaaaactgacactctcggcgtccagcccgct

SEQ ID NO: 695397 - DNA, 75 bp, synthetic construct
  source 1..75: mol_type = other DNA
tccagacttaccggtgctgataaagatgcaatgaacgaagtgacggctcgctatatggatgttcaaacccaggcg

SEQ ID NO: 695398 - DNA, 75 bp, synthetic construct
  source 1..75: mol_type = other DNA
gttgtcgatgcttggccttggcggtagtaatcatgaggatattctattaattcaggattatcttaaatctcctga

SEQ ID NO: 695399 - DNA, 75 bp, synthetic construct
  source 1..75: mol_type = other DNA
attttgaagtttcgcagcccgctgaagtccgtgatggccggagatacagagttgctgaccgtggggaaatcacat

SEQ ID NO: 695400 - DNA, 75 bp, synthetic construct
  source 1..75: mol_type = other DNA
tcagcatgttagccttacgtgccggagcacagcgttttcatgcccagccgctgagcgccaatgacgcgctgaaaa

SEQ ID NO: 695401 - DNA, 75 bp, synthetic construct
  source 1..75: mol_type = other DNA
gacctcggtgctgaccctgaaacagtacgcgcaaaaaaacctggcactgacagcagcaacaattgtcagcgccag

SEQ ID NO: 695402 - DNA, 75 bp, synthetic construct
  source 1..75: mol_type = other DNA
attgtctccacatctgagcaagaccctgaaagtctgattgtaactgtgggggatattgaaggaaagtatgctaca

SEQ ID NO: 695403 - DNA, 75 bp, synthetic construct
  source 1..75: mol_type = other DNA
taataacagatatttgctccgagtgtgtaggaataaccccttatctccctcgggaacaagcccatttattaagtg

SEQ ID NO: 695404 - DNA, 75 bp, synthetic construct
  source 1..75: mol_type = other DNA
ctctggctgaaaatattcaaaattgtggttggtgaaaatgaaaattaccttaaagatgtgatgatgcagctggaa

SEQ ID NO: 695405 - DNA, 75 bp, synthetic construct
  source 1..75: mol_type = other DNA
tggcatcgttggaagcagatccagttaaacgagttaactcagatcagatgcaccgagtctgcttagaagctaatc

SEQ ID NO: 695406 - DNA, 75 bp, synthetic construct
  source 1..75: mol_type = other DNA
agatcagcgacggttccggcattctcaccatgcgctttttcaacttcagcgcggcaatgaaaaatagcctggcga

SEQ ID NO: 695407 - DNA, 75 bp, synthetic construct
  source 1..75: mol_type = other DNA
tgacaaaaacagtccgcagtttaaggcgctgcgcgaacaggccattaagctgggctctgaaacgcagtttaccgc

SEQ ID NO: 695408 - DNA, 75 bp, synthetic construct
  source 1..75: mol_type = other DNA
aagcaggaaacggcagaacgcctgctgaagaccggacttgtcagctacgaaagcgacgtgtctcgcctggttaaa

SEQ ID NO: 695409 - DNA, 75 bp, synthetic construct
  source 1..75: mol_type = other DNA
taccccatcggcgaactactgccgggtatctatgccacggtagaaggcgaggtgttgaactgcaatatcaccttc

SEQ ID NO: 695410 - DNA, 75 bp, synthetic construct
  source 1..75: mol_type = other DNA
gtcaggcgtactgggtttgtacgttgattgaagagtcggaattactggaagcgcaggcggcggaagctacctggg

SEQ ID NO: 695411 - DNA, 75 bp, synthetic construct
  source 1..75: mol_type = other DNA
ttgtcaaagcatggttgttggcgatagatgactttgagaaagaatttgaggtaaataaaaatgaaatgcttctta

SEQ ID NO: 695412 - DNA, 75 bp, synthetic construct
  source 1..75: mol_type = other DNA
tcgttgaagcgctagagtctattgaagcagatgaagacgatatgccttcttatcacgatatggaaatcggtaaca

SEQ ID NO: 695413 - DNA, 75 bp, synthetic construct
  source 1..75: mol_type = other DNA
aatacagttaaagaacaagctcactcaaaaggcgatcgccaaagagtgtgcaaactggatcagaaagaaagcgac

SEQ ID NO: 695414 - DNA, 75 bp, synthetic construct
  source 1..75: mol_type = other DNA
gagttcatcttcacatcacctacttttgtcgcagatgaagttaccgataaattcaaaaaagaaaaacgagagttc

SEQ ID NO: 695415 - DNA, 75 bp, synthetic construct
  source 1..75: mol_type = other DNA
gcgccatggggctggcactgctggggaatcaactgagtgctgaacaggcgcacgaatgggggatgatctggcagg

SEQ ID NO: 695416 - DNA, 75 bp, synthetic construct
  source 1..75: mol_type = other DNA
gtactcgacctgctgatacaggaaaccggctttgacggccgcacacagcgttatcaccacgacctgaccggcaaa

SEQ ID NO: 695417 - DNA, 75 bp, synthetic construct
  source 1..75: mol_type = other DNA
ggtctaaacgaatttcgaatggacctgctaaatctaatgaaactctacggcgaaccaagaaatgcaccaagcggc

SEQ ID NO: 695418 - DNA, 75 bp, synthetic construct
  source 1..75: mol_type = other DNA
gataaaaacacgtttaacttgcagaaagtatcacgtagtacatcacctatttttgaacgtcttgatacattacct

SEQ ID NO: 695419 - DNA, 75 bp, synthetic construct
  source 1..75: mol_type = other DNA
gttgatgaaattcgagtcctggagaaaaccgccgattccgcccgcattcatgttcgttttacgctgaccaatggc

SEQ ID NO: 695420 - DNA, 75 bp, synthetic construct
  source 1..75: mol_type = other DNA
tctcatggaatagacgtttatggcgggacttaccaccgcagagatgacatgagaaaagagctaagcgacgctgga

SEQ ID NO: 695421 - DNA, 75 bp, synthetic construct
  source 1..75: mol_type = other DNA
ttgatgactttgaattgctggcatttattgtgatccagcaaaagcacctgatggaaaatagtgctcaggatgagg

SEQ ID NO: 695422 - DNA, 75 bp, synthetic construct
  source 1..75: mol_type = other DNA
tttattgcaaaatattgacaatctacctgaagaaacaatattgattgctgcaagtaatcatgaaaatcttctaga

SEQ ID NO: 695423 - DNA, 75 bp, synthetic construct
  source 1..75: mol_type = other DNA
tgaaattcaactcccattgttgaaagatagcactctgaaaaaaattaaagaatttttgactttcactgaacgagc

SEQ ID NO: 695424 - DNA, 75 bp, synthetic construct
  source 1..75: mol_type = other DNA
cttaaaacggtcggacttacggcggttggtacggcggcggcaggcggctatgcggccggacgtttcctgcaaccg

SEQ ID NO: 695425 - DNA, 75 bp, synthetic construct
  source 1..75: mol_type = other DNA
ggagcgatatccatatccgctcaatgataatgtactccgaaagtttgaaagactcaaacaaataggggtggaatt

SEQ ID NO: 695426 - DNA, 75 bp, synthetic construct
  source 1..75: mol_type = other DNA
cttatgatgaaagtgaagaagaacaaaaaagtaagattcataaagatatagtatttgatccaaacgaaaacatta

SEQ ID NO: 695427 - DNA, 75 bp, synthetic construct
  source 1..75: mol_type = other DNA
ttaatataatcaacagccgtatctatggtaacggagccggtggagttttacttacgccagcttacgctgagggcg

SEQ ID NO: 695428 - DNA, 75 bp, synthetic construct
  source 1..75: mol_type = other DNA
taaagttactagaagattcattaacattattgacggatattgagtataaacacctgggtgggaactcttttgtta

SEQ ID NO: 695429 - DNA, 75 bp, synthetic construct
  source 1..75: mol_type = other DNA
tttctgtaaatactactgatccaaaaaataataaagaatttctttggcttagttatagtataaataatttaactt

SEQ ID NO: 695430 - DNA, 75 bp, synthetic construct
  source 1..75: mol_type = other DNA
tgtaaatttattacaggggtatttatactcgccaccaattcctccagagatttttgttcaaaagtattttacagg

SEQ ID NO: 695431 - DNA, 75 bp, synthetic construct
  source 1..75: mol_type = other DNA
agtggagtggctgacggataatggttcatgctaccgggcgaatgaaacacgtcagttcgccagagagctgaatct

SEQ ID NO: 695432 - DNA, 75 bp, synthetic construct
  source 1..75: mol_type = other DNA
agggaaagtggccgttggagaaagtaaccagcggtggtgctctgacggcttcgagttcagctgtgataacggtga

SEQ ID NO: 695433 - DNA, 75 bp, synthetic construct
  source 1..75: mol_type = other DNA
ggaagagaagaactgcctgggtggtggcagtacgggaagcccgggaggatggggaccagaagatgagaatagcgc

SEQ ID NO: 695434 - DNA, 75 bp, synthetic construct
  source 1..75: mol_type = other DNA
atgtttgcaatgaagagtacattccggcttttcaacagctgttgcagtggtttcgtgcagggtgtggtacaggct

SEQ ID NO: 695435 - DNA, 75 bp, synthetic construct
  source 1..75: mol_type = other DNA
ggcgatcgagcactacaatgaaaaccatccgcataatgcgttgggttatcgctctccgcgagaatatcgacgtca

SEQ ID NO: 695436 - DNA, 75 bp, synthetic construct
  source 1..75: mol_type = other DNA
gtaatggaatggcagaacggttcgtgaaaacgatgaaggaagactacatcgcgttcatgccgaaaccgaatgtaa

SEQ ID NO: 695437 - DNA, 75 bp, synthetic construct
  source 1..75: mol_type = other DNA
atggaaaatataaccatttacgattatgtaattgtaaataacggtctatttaataaagatgctgtaattgttttt

SEQ ID NO: 695438 - DNA, 75 bp, synthetic construct
  source 1..75: mol_type = other DNA
tcgtcccgcagctggttggtcctccaggatattttatcggcaatatggtttattcccagcagggggcgattggca

SEQ ID NO: 695439 - DNA, 75 bp, synthetic construct
  source 1..75: mol_type = other DNA
ccttttacctgcatgtcaaattcccacaccgttctaagctccccctcaagcggatcggcgctactgcgatagaag

SEQ ID NO: 695440 - DNA, 75 bp, synthetic construct
  source 1..75: mol_type = other DNA
atggacgacagccgcaataacggtgagttttctacgcaagaaattcgcgcctatttgccgctgacgctcggcaac

SEQ ID NO: 695441 - DNA, 75 bp, synthetic construct
  source 1..75: mol_type = other DNA
agcggatcggccccggcgatattgtgtttaaaaatctgccccgcgcattagccgtccacggcgcatggcaggaag

SEQ ID NO: 695442 - DNA, 75 bp, synthetic construct
  source 1..75: mol_type = other DNA
caagttaatgcaggcaaccgacaatattcctgatgacattacttttaaagcatattaccttccctacaaaaaaaa

SEQ ID NO: 695443 - DNA, 75 bp, synthetic construct
  source 1..75: mol_type = other DNA
tgctggttgcgcgttttggcttgaacaccgccaaagaggtgagtttgtcaatgcagcgtctggaacaggcaggcg

SEQ ID NO: 695444 - DNA, 75 bp, synthetic construct
  source 1..75: mol_type = other DNA
gatggtgttcgataaaattaagtctgaaatcgaaaagacctggatggaaaatattcactatagctttaacggccg

SEQ ID NO: 695445 - DNA, 75 bp, synthetic construct
  source 1..75: mol_type = other DNA
gcaaagaattatctaatcagccttatctgttaccaactcctggatatgcagccacatcagcgtggccagtaaacg

SEQ ID NO: 695446 - DNA, 75 bp, synthetic construct
  source 1..75: mol_type = other DNA
cgcactctgtatcgggtactgctgcaagcgcaggtgcacacgcacatactgtcggtattggtgctcatacgcact

SEQ ID NO: 695447 - DNA, 75 bp, synthetic construct
  source 1..75: mol_type = other DNA
ggggtggttagctaataccagtacagatggtaatcatagccactcactgtccggcacagcagcatctgcaggtgc

SEQ ID NO: 695448 - DNA, 75 bp, synthetic construct
  source 1..75: mol_type = other DNA
cagatgtcactgtgattggcagcggcgcacaaaccatcaccgcgaccattaccgatgcggcaggcaacagcgacg

SEQ ID NO: 695449 - DNA, 75 bp, synthetic construct
  source 1..75: mol_type = other DNA
tccggcgtggagctggggcaaacggtcaccgttacctttggcggcaaaacctacaccgccaccgtagcgggcgat

SEQ ID NO: 695450 - DNA, 75 bp, synthetic construct
  source 1..75: mol_type = other DNA
ttacgctgcgacagtattagccgatggcacatggagccttggcgttccggcggcagatgtgggcaactggcctgc

SEQ ID NO: 695451 - DNA, 75 bp, synthetic construct
  source 1..75: mol_type = other DNA
cagcagtttgccggattaagcgacggcagctacaccatcagcgcaacggtcgccgatcaggccggaaatacgggc

SEQ ID NO: 695452 - DNA, 75 bp, synthetic construct
  source 1..75: mol_type = other DNA
caccaattttgcgacaggcacagtggtgaccgtgttgcttaacggtaaaggttacagcgccaccattcaaagcaa

SEQ ID NO: 695453 - DNA, 75 bp, synthetic construct
  source 1..75: mol_type = other DNA
tgggtggcgagacttacacggcgacagtgcaggccaatttaagctggagtattaatgttccggcagccgcgctac

SEQ ID NO: 695454 - DNA, 75 bp, synthetic construct
  source 1..75: mol_type = other DNA
tataccgatgatgtcgggcagcggcagggaacgttaagcagttcgcaggccactgacgataccacgccgctgtta

SEQ ID NO: 695455 - DNA, 75 bp, synthetic construct
  source 1..75: mol_type = other DNA
ataacggctacaccctgaccgccacggtcagcgatctggcgggtaaccctggcagcgccagcaaaggtgtgaccg

SEQ ID NO: 695456 - DNA, 75 bp, synthetic construct
  source 1..75: mol_type = other DNA
ctgcgggaacgctgaatattaccgttagcggggcgaacagtgccggaacgcaaaccagcattacccatccgctga

SEQ ID NO: 695457 - DNA, 75 bp, synthetic construct
  source 1..75: mol_type = other DNA
ggcaactggagtctgggcgttccggcttccgtcgtcagcggactggtggacggcagttatccgatcaacgtttca

SEQ ID NO: 695458 - DNA, 75 bp, synthetic construct
  source 1..75: mol_type = other DNA
caacgcacgacatcgtaatagacgccaacctgccaggtctgcgcgtcgataccgtggcaggcgatgatgtgatta

SEQ ID NO: 695459 - DNA, 75 bp, synthetic construct
  source 1..75: mol_type = other DNA
accattaacacggtttccggcgatgacattatcagtggtgcagaaaaaaatgcgccactgaccctcaccggcagc

SEQ ID NO: 695460 - DNA, 75 bp, synthetic construct
  source 1..75: mol_type = other DNA
caatctgcctggcctgcgggtcgataccgtggcgggcgatgatgtgattaacagccttgagcacagtcaggcgct

SEQ ID NO: 695461 - DNA, 75 bp, synthetic construct
  source 1..75: mol_type = other DNA
cgcttggtggcaaccagtacaccgctaccgtgcaaccagatttaagctggagtgtcagcgtgcctgcggcagatt

SEQ ID NO: 695462 - DNA, 75 bp, synthetic construct
  source 1..75: mol_type = other DNA
ccgctgaaaaaggcgcggcgttaacgctctccggcagcacctctggcgtcgaagccggacaaacggtcaccgtca

SEQ ID NO: 695463 - DNA, 75 bp, synthetic construct
  source 1..75: mol_type = other DNA
cgtcgcggcgaatggttcctggagtaccacggttccggcgacagatatggcagccctgcgtgatggcgatgccag

SEQ ID NO: 695464 - DNA, 75 bp, synthetic construct
  source 1..75: mol_type = other DNA
taacggttgtgatcaacaacgtcacttacgccgcgacggtgttagccgacggcacgtggagcctcggtattccgg

SEQ ID NO: 695465 - DNA, 75 bp, synthetic construct
  source 1..75: mol_type = other DNA
accgccagcattaccgacgcggcaggcaatagcgatgatgccagccgcacggttacagtgaatctgaccacgccg

SEQ ID NO: 695466 - DNA, 75 bp, synthetic construct
  source 1..75: mol_type = other DNA
cacggtcaataccgccgcgccccttatcggcattaacagcattgcgggcgatgatgtgattaacgccagcgaaaa

SEQ ID NO: 695467 - DNA, 75 bp, synthetic construct
  source 1..75: mol_type = other DNA
ggtcagcaccatcagcggcgataaccttattaacgccgccgaagcaggcagtgcgctgaccctgagcggcaccgg

SEQ ID NO: 695468 - DNA, 75 bp, synthetic construct
  source 1..75: mol_type = other DNA
gcacggcggaagccgggcagacggtgaccgtcacgctcaatggcgcaaactatactggcacggtacaaacggacg

SEQ ID NO: 695469 - DNA, 75 bp, synthetic construct
  source 1..75: mol_type = other DNA
tccgggcgcggtgcttatcaccatcaataccgtctctggtgatgacattatcaatgccgcagaaaaaggcgcgcc

SEQ ID NO: 695470 - DNA, 75 bp, synthetic construct
  source 1..75: mol_type = other DNA
gggacatgggaaggcaccgccgacaccgatcgcattgatattcgtgaactgttacagggcagcggctacaccgga

SEQ ID NO: 695471 - DNA, 75 bp, synthetic construct
  source 1..75: mol_type = other DNA
gcggctgcggggaacacggtgacggtcactattggtggcaaccaatacaccgccaccgtacagccagatttaagc

SEQ ID NO: 695472 - DNA, 75 bp, synthetic construct
  source 1..75: mol_type = other DNA
ttgtgacccgtgacactacgctgaccgtgcgcgggacgctcggcgcggcgctggcggcagatgaacgggcgcaaa

SEQ ID NO: 695473 - DNA, 75 bp, synthetic construct
  source 1..75: mol_type = other DNA
caccatcagcggcaccagcaccgccgaaaccgggcagacggtgaccgtcacccttaacggcgcaacctacaccgg

SEQ ID NO: 695474 - DNA, 75 bp, synthetic construct
  source 1..75: mol_type = other DNA
cacgcgtggcgctggtcgatgccacgccacccgtagtaaccattaatccggtggcgaccgataatgtcatcaaca

SEQ ID NO: 695475 - DNA, 75 bp, synthetic construct
  source 1..75: mol_type = other DNA
aaggttctggcgtcgatctgaacaatgacggcaggatcgacctggttcagcacacctacaacctgaacaactatt

SEQ ID NO: 695476 - DNA, 75 bp, synthetic construct
  source 1..75: mol_type = other DNA
agccagttacacggtgacggcgaacgtcaccgatagcgcgggcaacagcaattccgccagccataacgtgcaggt

SEQ ID NO: 695477 - DNA, 75 bp, synthetic construct
  source 1..75: mol_type = other DNA
tcaccgtgacgcttggcgggaaaacctacacggctaccgtgcaggggaatctaagctggagcgtggatgttccgg

SEQ ID NO: 695478 - DNA, 75 bp, synthetic construct
  source 1..75: mol_type = other DNA
acgacgggtaacacggtttccgtgacgattggcacgaccacttacaccaccgtgctggacgccaacggcaactgg

SEQ ID NO: 695479 - DNA, 75 bp, synthetic construct
  source 1..75: mol_type = other DNA
accgtagcaggcgatgatgtggtcaatattatcgagcacggtcaggcgttggtagtcaccggtagcagtaccgga

SEQ ID NO: 695480 - DNA, 75 bp, synthetic construct
  source 1..75: mol_type = other DNA
cacctttggcggtaaaacctacaccgccaccgtagcgggcgatggtagctggacaaccaccgtacccgccgccga

SEQ ID NO: 695481 - DNA, 75 bp, synthetic construct
  source 1..75: mol_type = other DNA
ccctgcgtaatggcgatgccagcgcacaggccagcgtcagcaatgttaacggcaacaacgccactactacccacg

SEQ ID NO: 695482 - DNA, 75 bp, synthetic construct
  source 1..75: mol_type = other DNA
tcagccaccgggcctgacggactggaaatgcgccggaaatatgatgagtacgggcgtctgacgcaggaaacagca

SEQ ID NO: 695483 - DNA, 75 bp, synthetic construct
  source 1..75: mol_type = other DNA
gcggcacgcgcgatatcaccatcgatgccagtctacccggcctgcgggtggataccgtcgcgggtgatgatgtgg

SEQ ID NO: 695484 - DNA, 75 bp, synthetic construct
  source 1..75: mol_type = other DNA
acatcattaacgccgccgaaagtgggcaggatctgcaaatcaccggcaccaccgatgcccagccggggcaaacgg

SEQ ID NO: 695485 - DNA, 75 bp, synthetic construct
  source 1..75: mol_type = other DNA
aagggcgcggcggcaacgacacgctcaacatcggcaacggcggtcacgacaccttgctctataaactgctcaacg

SEQ ID NO: 695486 - DNA, 75 bp, synthetic construct
  source 1..75: mol_type = other DNA
catttcggcttcggtaacgaacagcgtaggcaataccggtaacggcacgcgtgaaatcaccatcgacgcgaatct

SEQ ID NO: 695487 - DNA, 75 bp, synthetic construct
  source 1..75: mol_type = other DNA
cagcggacaggttacggggacggcggttgcggggaatacggtgattgtcactattggtggtaatcaatacattgc

SEQ ID NO: 695488 - DNA, 75 bp, synthetic construct
  source 1..75: mol_type = other DNA
tcaccagcgataccacgctcacgctgacgggttcactgggggcggggcttgccagcggcgaagtggcgcagatta

SEQ ID NO: 695489 - DNA, 75 bp, synthetic construct
  source 1..75: mol_type = other DNA
tgccaatctgccaggtctgcgcgttgataccgtggcgggcgatgatgtggttaacagcatcgagcacggtcaggc

SEQ ID NO: 695490 - DNA, 75 bp, synthetic construct
  source 1..75: mol_type = other DNA
gcgctggtcaacttctacggacttaacgcgggagaaacctacaacgcggtgctgatcaaatccaccggtactacc

SEQ ID NO: 695491 - DNA, 75 bp, synthetic construct
  source 1..75: mol_type = other DNA
caaaccacgcacgccctgactgttgacaccgttgcgccgacggtcaccatcgccaccgttgcgggtgacgatatt

SEQ ID NO: 695492 - DNA, 75 bp, synthetic construct
  source 1..75: mol_type = other DNA
cgtcaacgcctcggtaagcgacaaagccggaaatccggcctcggcaacgcataacctgacggtagaccttgccgc

SEQ ID NO: 695493 - DNA, 75 bp, synthetic construct
  source 1..75: mol_type = other DNA
agcatcggcgtacctgccagcgtgatttccgcactggcgcagggtgatgtaaccattactgccacggttaccgac

SEQ ID NO: 695494 - DNA, 75 bp, synthetic construct
  source 1..75: mol_type = other DNA
cgcggccgtggcgatcaccatcaacaccctttccactgacgatgtgattaacgccgccgagaaaggctctgattt

SEQ ID NO: 695495 - DNA, 75 bp, synthetic construct
  source 1..75: mol_type = other DNA
ggggatacggttaccgttacgctgggcggcaacacctacaccgccacggtgcaggccaacttaagctggagtgtt

SEQ ID NO: 695496 - DNA, 75 bp, synthetic construct
  source 1..75: mol_type = other DNA
cccactcacctggtcgaagaccgcgctgacgctgtatcagagcggcaacaactacgccaccagctccatcgccga

SEQ ID NO: 695497 - DNA, 75 bp, synthetic construct
  source 1..75: mol_type = other DNA
aggcgctggtgatcaccggcggcagtagcgacctgaatgcaggcgtgccgttgacgatcaccatcaacaacgtag

SEQ ID NO: 695498 - DNA, 75 bp, synthetic construct
  source 1..75: mol_type = other DNA
cagttccggttttgccgcaggtacggcgttgacggtggtgattaataaccaaacttacgccgccacggtgctggc

SEQ ID NO: 695499 - DNA, 75 bp, synthetic construct
  source 1..75: mol_type = other DNA
atatacttcttacacgaattaggcatgcccagtcgaaaacatactttcttgatgccgttaaggcctacaaagcgg

SEQ ID NO: 695500 - DNA, 75 bp, synthetic construct
  source 1..75: mol_type = other DNA
catttttggttgtttatatcatttggcacccggatttcgccgctggtgctggactggccgaaatattgcgtggac

SEQ ID NO: 695501 - DNA, 75 bp, synthetic construct
  source 1..75: mol_type = other DNA
tttctgcctgaagacaaagctgcagcacgagattttctccttgcaatcaaggcactgtttccgcgaatagagatc

SEQ ID NO: 695502 - DNA, 75 bp, synthetic construct
  source 1..75: mol_type = other DNA
atgcaccgtcagtcagacatctatcaggctttccgcgagtcggtattgcgcaactccaaaggctaccagtatctg

SEQ ID NO: 695503 - DNA, 75 bp, synthetic construct
  source 1..75: mol_type = other DNA
gaaaatacatggttgatgttcggcctgcggggcgttccgggaagcgcgtcaggcgttcattctccactaaatcag

SEQ ID NO: 695504 - DNA, 75 bp, synthetic construct
  source 1..75: mol_type = other DNA
aaccttctcatgagttagtgcgacttcatttagtaaatgctgtggaattcgtcctatcgcaagaacctttacagg

SEQ ID NO: 695505 - DNA, 75 bp, synthetic construct
  source 1..75: mol_type = other DNA
atgaccaaaaaagaagcccacagcagtattaaaatcccacctatggaatactttaagctcgacagggcagctagt

SEQ ID NO: 695506 - DNA, 75 bp, synthetic construct
  source 1..75: mol_type = other DNA
ggctgagcatttgttaaaaaaatcctgcatgatgaatccccctgagcggaggggcataatgacagatgtttggtt

SEQ ID NO: 695507 - DNA, 75 bp, synthetic construct
  source 1..75: mol_type = other DNA
atatcctggatttcgaagcgcaactggttcccgatttcgtgcaggatcaacccgccccggtgatcaccgcaggcg

SEQ ID NO: 695508 - DNA, 75 bp, synthetic construct
  source 1..75: mol_type = other DNA
taatccgatgcgtacctgagctgggtgaagatgtaataaccgcaaatcccaataaacgctatgaaattctaataa

SEQ ID NO: 695509 - DNA, 75 bp, synthetic construct
  source 1..75: mol_type = other DNA
caagggtgatagatacgacaattttcaggccgttcggatgggatactttccgcgagaagactggcctttcgtgtc

SEQ ID NO: 695510 - DNA, 75 bp, synthetic construct
  source 1..75: mol_type = other DNA
aatttctggaggataagcagagagaaggcaagctcgccggcatgggtatgccttcctctgcaaccattgagaaat

SEQ ID NO: 695511 - DNA, 75 bp, synthetic construct
  source 1..75: mol_type = other DNA
ttcgccggcgtggcatccatttttccgaggtggaggcgaactcctggatcgcacgcgagcaaacgtatttcgtcg

SEQ ID NO: 695512 - DNA, 75 bp, synthetic construct
  source 1..75: mol_type = other DNA
gcaggccgcagcatttcaggtcactagtaatgaaataaaaacaggagagcaacttacaacgtctcatgtattttc

SEQ ID NO: 695513 - DNA, 75 bp, synthetic construct
  source 1..75: mol_type = other DNA
aacttacaacgtctcatgtattttctggatttgggtgtgaggggggtaatacatcgccggtgatgctgccaactt

SEQ ID NO: 695514 - DNA, 75 bp, synthetic construct
  source 1..75: mol_type = other DNA
cacacgggataaccccgtggcatttgtacgtccgggagaagtgtttcgtgtatctgccgtggtggcagccagcat

SEQ ID NO: 695515 - DNA, 75 bp, synthetic construct
  source 1..75: mol_type = other DNA
atgttgttgagtatctggaagatgaagaagatattcaggcgtatctgaatgcagccattgaagagggagatacta

SEQ ID NO: 695516 - DNA, 75 bp, synthetic construct
  source 1..75: mol_type = other DNA
gcgcaggcggcggaagctacctgggaagagttgaaactggcgctaccagagttgaatgttggcctggtacacgga

SEQ ID NO: 695517 - DNA, 75 bp, synthetic construct
  source 1..75: mol_type = other DNA
aacagacccaaaaacggaactcttagctgcatgaaccgccccgggtttcctggagagtgttttatctgtgaactc

SEQ ID NO: 695518 - DNA, 75 bp, synthetic construct
  source 1..75: mol_type = other DNA
gcacgcgagcaaacgtatttcgtcgacaagacggcagatcatagagaaaaccggctgtggatgatggccaacatg

SEQ ID NO: 695519 - DNA, 75 bp, synthetic construct
  source 1..75: mol_type = other DNA
gcacgcgagcaaacgtatttcgtcgacaacacggcggatcatagagaaaaccgactgtggatgatggccaacatg

SEQ ID NO: 695520 - DNA, 75 bp, synthetic construct
  source 1..75: mol_type = other DNA
gcacgcgagcaaacgtatttcgtcgacaaaacggcggatcatagagaaaaccgcctgtggatgatggccaacatg

SEQ ID NO: 695521 - DNA, 75 bp, synthetic construct
  source 1..75: mol_type = other DNA
tcgtttaaatcaaaggagaaagctatcgactcagacagaaacgaaaggccggggatgtggctggccgaaaatgaa

SEQ ID NO: 695522 - DNA, 75 bp, synthetic construct
  source 1..75: mol_type = other DNA
aggagtgaagttctggctcaatgtgctgactgaactgaaaaaccgcggtctgaacgatatccttatcgcctgtgt

SEQ ID NO: 695523 - DNA, 75 bp, synthetic construct
  source 1..75: mol_type = other DNA
gcacgcgagcagacgtatttcgtcgataagacgccggaccatagcgaaaacaggctgtggatgatggccaacatg

SEQ ID NO: 695524 - DNA, 75 bp, synthetic construct
  source 1..75: mol_type = other DNA
aaaatccgtcatgagctgcgcatgctggagcagggtattcccgcagagcccggtcgtccgcaggaaagcacgtcc

SEQ ID NO: 695525 - DNA, 75 bp, synthetic construct
  source 1..75: mol_type = other DNA
acaggcggacggaagctggagcgtcggcattccagcggcaaacgtcagcgcctggcctgcgggggcgttaaccat

SEQ ID NO: 695526 - DNA, 75 bp, synthetic construct
  source 1..75: mol_type = other DNA
cgacgcggcgggcaactggaccttaaccgtgccggtgagcgatctggcggctctaggccaggccaactataccgt

SEQ ID NO: 695527 - DNA, 75 bp, synthetic construct
  source 1..75: mol_type = other DNA
cgccttgcctggcgttaccattaacgcggtggcgaccgacgatattatcaacgctgccgaagcgggcaatgcgca

SEQ ID NO: 695528 - DNA, 75 bp, synthetic construct
  source 1..75: mol_type = other DNA
gatgacgtgatcaacgccactgaaaaaggatcgaatctggcgctttccggcaccagcgatcaacctgcgggcacg

SEQ ID NO: 695529 - DNA, 75 bp, synthetic construct
  source 1..75: mol_type = other DNA
gacgtggtgagcgttgtgctcaacggcaaaacgtataccaccacgctggacgcctccggtaactggagcgtcggt

SEQ ID NO: 695530 - DNA, 75 bp, synthetic construct
  source 1..75: mol_type = other DNA
acaacatcatcagtgctgcggaacataacgccgcgctggtactgagcggcacgtcgaatgcagaagcggggcaaa

SEQ ID NO: 695531 - DNA, 75 bp, synthetic construct
  source 1..75: mol_type = other DNA
tgaaaaaggcgcggcgttaacgctctccggcagcacctctggcgtcgaagccgggcaaacggtcaccgtgacctt

SEQ ID NO: 695532 - DNA, 75 bp, synthetic construct
  source 1..75: mol_type = other DNA
ccggcgcagcagtttgccggattaagcgacggcagctacaccattagcgcgacggtcagcgatcaggccggaaac

SEQ ID NO: 695533 - DNA, 75 bp, synthetic construct
  source 1..75: mol_type = other DNA
tggaagccgggcagacggtgaccgtcacctttggcggtaaaaattacaccactactgtggaagccaacggtagct

SEQ ID NO: 695534 - DNA, 75 bp, synthetic construct
  source 1..75: mol_type = other DNA
ccgccactcacgggctggcggtggatctcaccgtgccggtgctgaccatcaacaccgtctccggcgatgacatta

SEQ ID NO: 695535 - DNA, 75 bp, synthetic construct
  source 1..75: mol_type = other DNA
cttaatccggtagcgagcgacgatattatcaacgctgccgaatcgggcgtggcgcagactatcagcggccaggtg

SEQ ID NO: 695536 - DNA, 75 bp, synthetic construct
  source 1..75: mol_type = other DNA
ttacaccacggtggtggatggttccggcaactggagtctgggagttccggcttctgttgtcagcggactggtgga

SEQ ID NO: 695537 - DNA, 75 bp, synthetic construct
  source 1..75: mol_type = other DNA
tataccgatgatgtcgggcagcgtcaggggacgttaagcagttcgcaggccaccgacgacaccacgccgctgctg

SEQ ID NO: 695538 - DNA, 75 bp, synthetic construct
  source 1..75: mol_type = other DNA
ggtcatgtggcgttaaatctccccgccgccgataaaccgagccgttatttgttaaccgtctccgccagtgacggc

SEQ ID NO: 695539 - DNA, 75 bp, synthetic construct
  source 1..75: mol_type = other DNA
taacctggctgtgggataactggtacggcaaatctcgccgcgtgatgcagcgtactttctcttctcagtcacggc

SEQ ID NO: 695540 - DNA, 75 bp, synthetic construct
  source 1..75: mol_type = other DNA
aagtgaaatctacaacacccgcttgtatatctttaccgatcgcccgctatatcgcgcaggcgatcgtgtcgatgt

SEQ ID NO: 695541 - DNA, 75 bp, synthetic construct
  source 1..75: mol_type = other DNA
ttatcacgtggaaaaaatcacgccggacagtgtggtgctggaacagtctggcaccagaaaaatcctgcgaccatg

SEQ ID NO: 695542 - DNA, 75 bp, synthetic construct
  source 1..75: mol_type = other DNA
acctgttcgagctggggcgtatgcaaccgggtgaaagcgtgctgattcacggcgcggccagtggtgtgggtacgt

SEQ ID NO: 695543 - DNA, 75 bp, synthetic construct
  source 1..75: mol_type = other DNA
caacgcaacggcatgccgctgccgccaggcatcaccgatgtgctggggctggaggtctccggcaccgttgtggcg

SEQ ID NO: 695544 - DNA, 75 bp, synthetic construct
  source 1..75: mol_type = other DNA
gccaaccttaccgccagcccctatacggtgagcgcggcggtcagcgacaaagcgggcaacccgacctcggtaacg

SEQ ID NO: 695545 - DNA, 75 bp, synthetic construct
  source 1..75: mol_type = other DNA
agcgccagccgtggcgtgacgctgaacggcgacgtgcccaccgtcaccatcaacacctttgcgggcgatgatgtg

SEQ ID NO: 695546 - DNA, 75 bp, synthetic construct
  source 1..75: mol_type = other DNA
ctggtaggcaactccaccaccgccaacaacggcgggagcgccacggtcggcgggttggtaaacggctatctttca

SEQ ID NO: 695547 - DNA, 75 bp, synthetic construct
  source 1..75: mol_type = other DNA
agcaggtagaaagctttcgatacaataatcggggagtacggaagattgaagaaatcctggacgcggagaacaaag

SEQ ID NO: 695548 - DNA, 75 bp, synthetic construct
  source 1..75: mol_type = other DNA
acctgcgctattgaagaactgttgccgccggaactgtcacaggggatgatgacgctgccggaagccttgagaact

SEQ ID NO: 695549 - DNA, 75 bp, synthetic construct
  source 1..75: mol_type = other DNA
ataaactccttgccgccttaccgttcaaaccaacgggtgctcaggcacgtgtggtggcggaaatcgagcgcgata

SEQ ID NO: 695550 - DNA, 75 bp, synthetic construct
  source 1..75: mol_type = other DNA
taaaaacgcggatggaacagtgcgcatggggataagtctggacatacgttcaaccgggataaagcagaaaggtga

SEQ ID NO: 695551 - DNA, 75 bp, synthetic construct
  source 1..75: mol_type = other DNA
tcctcactgtatcgttcatgcctgcatgaacgggttattcttcctgactacagaattacatcgctccttcagttc

SEQ ID NO: 695552 - DNA, 75 bp, synthetic construct
  source 1..75: mol_type = other DNA
tctaggagtactgaatttgcgttaaaaataattcacggtataaaacagaacgcaataattcttgttgttattata

SEQ ID NO: 695553 - DNA, 75 bp, synthetic construct
  source 1..75: mol_type = other DNA
ccagcaaccatccacaaatggtgtcatggctacaacaatagaggcattaacatcccgccaagagccaactgccgt

SEQ ID NO: 695554 - DNA, 75 bp, synthetic construct
  source 1..75: mol_type = other DNA
agctggagttctatttactggatcgccagcgcgacgctgaaggatatctgcaaccgccctgcgcgcccggcaccg

SEQ ID NO: 695555 - DNA, 75 bp, synthetic construct
  source 1..75: mol_type = other DNA
acttgtgatcatcatgattttttcattgagctgtctaaaatcttatcggataagcatttatctaccttaaagggt

SEQ ID NO: 695556 - DNA, 75 bp, synthetic construct
  source 1..75: mol_type = other DNA
atctaatatacaaaaagtatctgagcattataaagatagctctggcctgaacatagtatctgtttacgatgccga

SEQ ID NO: 695557 - DNA, 75 bp, synthetic construct
  source 1..75: mol_type = other DNA
gataaagtcagaactctccattttgtggatgagatagaagtctacctggccttccagaccatgctcgcagagaaa

SEQ ID NO: 695558 - DNA, 75 bp, synthetic construct
  source 1..75: mol_type = other DNA
agatttaccgtcagctgactgacgaggtactggccctgcgattgtctgaaaacggctcacaactgcaccattcat

SEQ ID NO: 695559 - DNA, 75 bp, synthetic construct
  source 1..75: mol_type = other DNA
gattaatttcaaattcgttctccacttattcaatcgacactagctgtgcatatgaaaattatctaacccattgga

SEQ ID NO: 695560 - DNA, 75 bp, synthetic construct
  source 1..75: mol_type = other DNA
caaacgattttatccatgcctcagaatacgccaaaagcggctttttctggctggatgaagcggtggatttgcagg

SEQ ID NO: 695561 - DNA, 75 bp, synthetic construct
  source 1..75: mol_type = other DNA
tgaccggctgaaagcatcaggtctgagcggtgatgcggatgcggagagggaagccggtgcacaggtgatgcgtga

SEQ ID NO: 695562 - DNA, 75 bp, synthetic construct
  source 1..75: mol_type = other DNA
acaccttttccgcgttccttgaccgcctttccgataccatctctgcacgcaatacctccggattccgtgaacagg

SEQ ID NO: 695563 - DNA, 75 bp, synthetic construct
  source 1..75: mol_type = other DNA
atgatcgcaacactcaaagccaggtctattctgtcgataacctcaaccacttcgctgatgtacttaatgatattg

SEQ ID NO: 695564 - DNA, 75 bp, synthetic construct
  source 1..75: mol_type = other DNA
cttcacagtttgattccggcagacaggctgcggtagctcatcagggcgacgcgatgtttttaaccgtaacgacga

SEQ ID NO: 695565 - DNA, 75 bp, synthetic construct
  source 1..75: mol_type = other DNA
atgaagcgtatccttcgggaaccattgaaacggcacagggctggccgctcgataagtcaacattgccaagaccgt

SEQ ID NO: 695566 - DNA, 75 bp, synthetic construct
  source 1..75: mol_type = other DNA
gtatgactgggcctgacggtacgacgacatttacgctatatcagccctatgatgggaagggcacacgtattccgt

SEQ ID NO: 695567 - DNA, 75 bp, synthetic construct
  source 1..75: mol_type = other DNA
tgcggcggaaaactgggatagttcgttgctggccggaaaagcgcataaaggctcaccgctgccgctgacgattac

SEQ ID NO: 695568 - DNA, 75 bp, synthetic construct
  source 1..75: mol_type = other DNA
aatgcgaccaacaacggcaagattaccaatcagtcacggctgatttatgtgcaagacagttacaataattccaac

SEQ ID NO: 695569 - DNA, 75 bp, synthetic construct
  source 1..75: mol_type = other DNA
ccattttcaccgtggttaccagtccggataccgataaagcgaatatgtggggccacatgccggaaacgttgagcg

SEQ ID NO: 695570 - DNA, 75 bp, synthetic construct
  source 1..75: mol_type = other DNA
agaactttgttcagcagtcagaagagaggcggggtagcgcctttacgcaggaagtgaaacgctacctggaacgct

SEQ ID NO: 695571 - DNA, 75 bp, synthetic construct
  source 1..75: mol_type = other DNA
ccatgtgtatcacgcttgcaaaaacgatgagttattgcaatttgagcgtctcatcacagaaacagaaattgagtg

SEQ ID NO: 695572 - DNA, 75 bp, synthetic construct
  source 1..75: mol_type = other DNA
cacgcgggcagcgggatgcatatccatattagtatgcaaaataatcgtggagagaacgtgctagctgacgcggaa

SEQ ID NO: 695573 - DNA, 75 bp, synthetic construct
  source 1..75: mol_type = other DNA
tcatggtatcacactgccgcgtaacccgaattcgatcagcatggataaccagtcacggttgttacatgtagagga

SEQ ID NO: 695574 - DNA, 75 bp, synthetic construct
  source 1..75: mol_type = other DNA
tatgatggtaacgatgcggtaaaagtcagaacggattacaacaaagtcggggatcaaatcactatggtagtgacg

SEQ ID NO: 695575 - DNA, 75 bp, synthetic construct
  source 1..75: mol_type = other DNA
taacccgggcgataccgaaggtgacatgttcagcactccgccgctgctgcgctggcaaaaccaaacgctacctga

SEQ ID NO: 695576 - DNA, 75 bp, synthetic construct
  source 1..75: mol_type = other DNA
atgccactgaaagctgtgaggaccgtgtcgcgctcacatggaacaatctccggaaaaccctcctggtccatcagg

SEQ ID NO: 695577 - DNA, 75 bp, synthetic construct
  source 1..75: mol_type = other DNA
tgtatacccgtaacggtcagtacagttttcagaacgccgggatcaaagttgccgttccccagctggatatccggg

SEQ ID NO: 695578 - DNA, 75 bp, synthetic construct
  source 1..75: mol_type = other DNA
ggggcaacctgctgaatgaagagaacccgcaccagctgcagcagctcatccgcctgccggggcagcagtatgatg

SEQ ID NO: 695579 - DNA, 75 bp, synthetic construct
  source 1..75: mol_type = other DNA
agatatcttggaaaggtcgagaaacatgtctgtgagaatgagcgtggcagtgatgaagactgtagtagctatacc

SEQ ID NO: 695580 - DNA, 75 bp, synthetic construct
  source 1..75: mol_type = other DNA
gtgttccgttatgccgcgctggaatcttcaaaacaggttcctgttacgtatgaatggttgcgtctcgaagcccgc

SEQ ID NO: 695581 - DNA, 75 bp, synthetic construct
  source 1..75: mol_type = other DNA
cggcgagtaaaaatgcttgaacgtccacggcgtgaagaggtggataccgcggcatggatgccgtcactcacaacc

SEQ ID NO: 695582 - DNA, 75 bp, synthetic construct
  source 1..75: mol_type = other DNA
ccagtgacggcgcggcgtatcgcgtcaccaccaccaaagagatcctcattgaacgcggtctggcgcattactcat

SEQ ID NO: 695583 - DNA, 75 bp, synthetic construct
  source 1..75: mol_type = other DNA
atataagtatcccacaggctcatttaaaaggaacgacacaattaaaatcgatgccagataaatgggaacatggtg

SEQ ID NO: 695584 - DNA, 75 bp, synthetic construct
  source 1..75: mol_type = other DNA
aagataaaacatgtgatatgtcttttaacctgaaaaataatattaaagaaaatcagatgataaccgagtttgatg

SEQ ID NO: 695585 - DNA, 75 bp, synthetic construct
  source 1..75: mol_type = other DNA
cggttgctctcttgataataccgatgttaattggtgcagtattgtttatttacttaataatatgacagtaaatga

SEQ ID NO: 695586 - DNA, 75 bp, synthetic construct
  source 1..75: mol_type = other DNA
cattcagtcagtacgtgggcgttacaatggaaaatgaggtttttgctataggtagtggttttgaagggcttgaag

SEQ ID NO: 695587 - DNA, 75 bp, synthetic construct
  source 1..75: mol_type = other DNA
tcttcccaaggaaataataaatattttagtatttatgccagtattcctgtagatacactttttggggggcataat

SEQ ID NO: 695588 - DNA, 75 bp, synthetic construct
  source 1..75: mol_type = other DNA
gtgcttcaatttataataatgatgaaatgttgaatgataacttaagaagttatactccaacaatccgaggaattg

SEQ ID NO: 695589 - DNA, 75 bp, synthetic construct
  source 1..75: mol_type = other DNA
gatcctcgatacaccggaatctccactggcagatgcggtggcaaacgtcttaaccatgactttgctgaaaaaagc

SEQ ID NO: 695590 - DNA, 75 bp, synthetic construct
  source 1..75: mol_type = other DNA
caattcgtgataaccaaccggaaaaagtcaccatttcaggcacagcggtgattttgtttcatgccgaatgggcaa

SEQ ID NO: 695591 - DNA, 75 bp, synthetic construct
  source 1..75: mol_type = other DNA
agttaggagattatattgactctaacttaggtaaaatgcttgatcaaaataaaaacaagggagattttcatcctt

SEQ ID NO: 695592 - DNA, 75 bp, synthetic construct
  source 1..75: mol_type = other DNA
accgcgaatggggaattaccagcgaaaacgaacatcggtttatggtctttggaaaggtcttaatcagtcagtcac

SEQ ID NO: 695593 - DNA, 75 bp, synthetic construct
  source 1..75: mol_type = other DNA
atgaaaaatcctttactaattggctgggtcgatgataaagacctggccatctttttatacggaaatgatttatgt

SEQ ID NO: 695594 - DNA, 75 bp, synthetic construct
  source 1..75: mol_type = other DNA
gtatgaaacggatgagcagtacactcgccgcattaatactgatatctcgttgatcaccaacaaaattaagtctgt

SEQ ID NO: 695595 - DNA, 75 bp, synthetic construct
  source 1..75: mol_type = other DNA
ttcttggtgttgggttatcacgatgttgaggatggcgcagcggatcaacgctatctttctgtacgtaccagtgcg

SEQ ID NO: 695596 - DNA, 75 bp, synthetic construct
  source 1..75: mol_type = other DNA
cgtttttactggctgattgtgggaagtggatgcagaatagatgaagagcggcttcaggcaaaaattaaatatttg

SEQ ID NO: 695597 - DNA, 75 bp, synthetic construct
  source 1..75: mol_type = other DNA
caggctttggctcagatgaggaccctgataaatgccggacatcaggttattctggcttgcagaaagaacagcaga

SEQ ID NO: 695598 - DNA, 75 bp, synthetic construct
  source 1..75: mol_type = other DNA
attgcctgtgaagccgcaagtctcggtatccggaccacgtatgtccccttcaccaacagtctgcatattccttcg

SEQ ID NO: 695599 - DNA, 75 bp, synthetic construct
  source 1..75: mol_type = other DNA
gagcactatcaccaatggcggcaccggcactcagatcaacggtaacgacgccaccgcgaataacagtggaaaaac

SEQ ID NO: 695600 - DNA, 75 bp, synthetic construct
  source 1..75: mol_type = other DNA
actatgggaaagaggtcaactttaaggccagcagggaatgtgggaaacaggtcaacttagagggcagcccaaact

SEQ ID NO: 695601 - DNA, 75 bp, synthetic construct
  source 1..75: mol_type = other DNA
gtgaagatgctgaacgtgaagcggctgaacgccaggaacttgaagccaaacgtcagcaggccattgaatacatca

SEQ ID NO: 695602 - DNA, 75 bp, synthetic construct
  source 1..75: mol_type = other DNA
ccggtgcggcggagaatgaacgcagtacgttcggtctctccctgccacaggtgaatgacagtgccatcgggtacg

SEQ ID NO: 695603 - DNA, 75 bp, synthetic construct
  source 1..75: mol_type = other DNA
gtggtaacacaggtactgggcagcaaatcggtccgcacctgcaccaatccggcggattgtcagagcggcggtgag

SEQ ID NO: 695604 - DNA, 75 bp, synthetic construct
  source 1..75: mol_type = other DNA
ggtgttatgcagtgtaccggcattctctgcccgggcagcgctggatttttccgccggcgcgaatgatatcggcta

SEQ ID NO: 695605 - DNA, 75 bp, synthetic construct
  source 1..75: mol_type = other DNA
ggcgagcaccaccagcaatagtgggccgcgtagcacacagcggaatgaaaccagtaactacgaagtcgatcgcac

SEQ ID NO: 695606 - DNA, 75 bp, synthetic construct
  source 1..75: mol_type = other DNA
atgctgaagaggcggcaaaggcggtggtgaaagtgctgggtgatcgcactatgcgaacctgtagtaaagcaaatg

SEQ ID NO: 695607 - DNA, 75 bp, synthetic construct
  source 1..75: mol_type = other DNA
aacggccggagtgattaaggcgctgcaacgggatccggataatgctgcactgaccggacgtctggccggcgaact

SEQ ID NO: 695608 - DNA, 75 bp, synthetic construct
  source 1..75: mol_type = other DNA
cctcaaaaccacaattggcaaccagttaaacggcgtaaccgatggctttaaaaacctgatgggcgacgttattca

SEQ ID NO: 695609 - DNA, 75 bp, synthetic construct
  source 1..75: mol_type = other DNA
ggcagaagcatggcgacgggctgccggtgttgcaccccggacagactggcagcagtttgcccgaaaaagggctga

SEQ ID NO: 695610 - DNA, 75 bp, synthetic construct
  source 1..75: mol_type = other DNA
agctggcgctgacgatgcgccggatgctgatcaccggccagggggagccgaatgccggtaattttccgaaagccc

SEQ ID NO: 695611 - DNA, 75 bp, synthetic construct
  source 1..75: mol_type = other DNA
ttgcacaggccggctttaatatcatgaacggtctgccggcaaccagtacggccccggtgccggccggccagtgta

SEQ ID NO: 695612 - DNA, 75 bp, synthetic construct
  source 1..75: mol_type = other DNA
tgtatgacatgctgaccaacggtgtactgcaggcgaatgtggcattcgacaaagcgcagctcaattgtcagaaca

SEQ ID NO: 695613 - DNA, 75 bp, synthetic construct
  source 1..75: mol_type = other DNA
tcagggcaaactgcctgcgggtgtgagctctgaaatcggcccggacgccacgggagtgggctggatatttgaata

SEQ ID NO: 695614 - DNA, 75 bp, synthetic construct
  source 1..75: mol_type = other DNA
accacgacgggtgtcgaaatggtcgaaaagcagtcgcgtctgccaaccacggaaaaccgtcagtacctgcatata

SEQ ID NO: 695615 - DNA, 75 bp, synthetic construct
  source 1..75: mol_type = other DNA
atggaaatgcccgatttacccgagacaccgacatctgatattcccaccggggcgaacaaccagccgtgggactgc

SEQ ID NO: 695616 - DNA, 75 bp, synthetic construct
  source 1..75: mol_type = other DNA
tcgaataagcatgaccaataccggcgtattgtcagatacctcaaacgttggagaaatttcacatttggcgatgat

SEQ ID NO: 695617 - DNA, 75 bp, synthetic construct
  source 1..75: mol_type = other DNA
ttattgagccttctaataatggaaagcctgatacgctaccggggaaagcagaactgttgatccctgtgttaccac

SEQ ID NO: 695618 - DNA, 75 bp, synthetic construct
  source 1..75: mol_type = other DNA
ggaagattataaattaagtaacgacgagactcttttatatacaccagaagctttaaaagccgcggaagaacaaga

SEQ ID NO: 695619 - DNA, 75 bp, synthetic construct
  source 1..75: mol_type = other DNA
atttatggagaaacaaatgctaaagggaagtacagtcatcgtccatataatacggataaagcaggcggtcctatt

SEQ ID NO: 695620 - DNA, 75 bp, synthetic construct
  source 1..75: mol_type = other DNA
aaccagaagaaaaactagtaaagagcaccccaaatacagggggagaaacgtgtacgatttaactaatctggtgga

SEQ ID NO: 695621 - DNA, 75 bp, synthetic construct
  source 1..75: mol_type = other DNA
tgctgacgggactatatctctgcaagatagcaatggtcgtaaggcaacgattaatctttggcagattgatgaagc

SEQ ID NO: 695622 - DNA, 75 bp, synthetic construct
  source 1..75: mol_type = other DNA
aataacgaaggcgagagcaccatcaccaacggcggcaccggcacgcagattaacggtgacgacgccacggcgaat

SEQ ID NO: 695623 - DNA, 75 bp, synthetic construct
  source 1..75: mol_type = other DNA
acagaagatgtgcggtcacttcttgaggtagcggctaggggaaatcacgctgccgcgcacggcttagggacgtcc

SEQ ID NO: 695624 - DNA, 75 bp, synthetic construct
  source 1..75: mol_type = other DNA
aatttacagcttgatgccgaagataaaaaagcgatcgccgcactggattgcaacgaccgcctggttagcccggaa

SEQ ID NO: 695625 - DNA, 75 bp, synthetic construct
  source 1..75: mol_type = other DNA
tatttacaacaatttcttattacaacagttatattcatgagtgttgtatacctaattaaacaattactgacaaaa

SEQ ID NO: 695626 - DNA, 75 bp, synthetic construct
  source 1..75: mol_type = other DNA
cattgccgtataagcacggcaagcatagttgagatttctggagagtgcggctcaagccctatgaatgtggtatct

SEQ ID NO: 695627 - DNA, 75 bp, synthetic construct
  source 1..75: mol_type = other DNA
tgcttctacattgggtgccacattggctttactgatgagccgattcctgctacgtggatggatacagcagcgttt

SEQ ID NO: 695628 - DNA, 75 bp, synthetic construct
  source 1..75: mol_type = other DNA
tccttcggggatctgatcggtaactttatgcgcggaaatggcctcgtggcgctgatggataaagacgtggccaca

SEQ ID NO: 695629 - DNA, 75 bp, synthetic construct
  source 1..75: mol_type = other DNA
aaaaaggatccacacgcacgctgaccgtgcgaaacatgccttttgatgtggataacgaaatcacggaacaggcga

SEQ ID NO: 695630 - DNA, 75 bp, synthetic construct
  source 1..75: mol_type = other DNA
cgtcttggcgtgggagacgttaaaacactggaacggcaactgcagcatgactgggacgttattttactgcgcatt

SEQ ID NO: 695631 - DNA, 75 bp, synthetic construct
  source 1..75: mol_type = other DNA
ttgaattgctggagcggcaggacggactcgactgggacgtgattgttgttcgggtgacaaacagccagattgcgg

SEQ ID NO: 695632 - DNA, 75 bp, synthetic construct
  source 1..75: mol_type = other DNA
gtttacccaacgctgagtgaagcaaataagtatgtagccggagagtggaagcgcaatcatgcacctcaacgcgtg

SEQ ID NO: 695633 - DNA, 75 bp, synthetic construct
  source 1..75: mol_type = other DNA
ctgcaggtcaatatctcccagcaattaggcgagtacggttcgttttatttaagtggtagccagcaaacttactgg

SEQ ID NO: 695634 - DNA, 75 bp, synthetic construct
  source 1..75: mol_type = other DNA
ttgcggcggcagcctggcgcattcgtcgctacgccctgcgtatgggggaagttcaggggcaagggtacattggtc

SEQ ID NO: 695635 - DNA, 75 bp, synthetic construct
  source 1..75: mol_type = other DNA
gctcaccgctgccgctgacgattacggtgacccgaccagatggctctcctgcggcatttgagtcggtggggattt

SEQ ID NO: 695636 - DNA, 75 bp, synthetic construct
  source 1..75: mol_type = other DNA
tcgctactggctggcagaacaccacaatatgactggcattgccagtgctgccacgtcggtattgattggctatct

SEQ ID NO: 695637 - DNA, 75 bp, synthetic construct
  source 1..75: mol_type = other DNA
tgccgccatcgaccatgttaataccgagggtgaggaaggtatcaactttacagcagagcgtcagcctgagcgcga

SEQ ID NO: 695638 - DNA, 75 bp, synthetic construct
  source 1..75: mol_type = other DNA
aaatactgcattcgaagatatcaactggacgctcagctatagcctgacgaaaaacgcctggcaaaaaggacggga

SEQ ID NO: 695639 - DNA, 75 bp, synthetic construct
  source 1..75: mol_type = other DNA
ttttgcggacattggcgagcaggtcgagcgcattggtcagcaatgtcagactgcgtttgctgcagatggccgttg

SEQ ID NO: 695640 - DNA, 75 bp, synthetic construct
  source 1..75: mol_type = other DNA
tcgcccacgctgatatctaaagtcaccgacgccgtcaaagagccggtcaacgagtggcaaaaccggcaattggat

SEQ ID NO: 695641 - DNA, 75 bp, synthetic construct
  source 1..75: mol_type = other DNA
gaaattgctttgcagcatggcggatgtgggactcacattaagcactgaaagtcgtgaggtttatcatgagtggca

SEQ ID NO: 695642 - DNA, 75 bp, synthetic construct
  source 1..75: mol_type = other DNA
tcaacgcaggctcgttttacaggggcggttattgccatgctttcagctatcagtggaggggagcaggtcagctat

SEQ ID NO: 695643 - DNA, 75 bp, synthetic construct
  source 1..75: mol_type = other DNA
gctgtctattattctgcccggcaaccgtgttctgccatttgtcgacctggcttcattgatgttcctgttggcgat

SEQ ID NO: 695644 - DNA, 75 bp, synthetic construct
  source 1..75: mol_type = other DNA
cctacgtaccctttggtattgcctgtaattacattattgataaaattccgcttatcaataaaattaattttgatc

SEQ ID NO: 695645 - DNA, 75 bp, synthetic construct
  source 1..75: mol_type = other DNA
gctatggagatggtccttccactgcggcgggtggctttatgtatctcggcttaagtgaagttacctttgatattg

SEQ ID NO: 695646 - DNA, 75 bp, synthetic construct
  source 1..75: mol_type = other DNA
atgctggatctccccgcctggggcaccacccacgccgattatttttacggtgccatcccctgcacgcgacagatg

SEQ ID NO: 695647 - DNA, 75 bp, synthetic construct
  source 1..75: mol_type = other DNA
atgaagagtggctgcggcagaattgttcagggtgtcgatgtgcgtacctatgatgatgacccgaccaaatatcag

SEQ ID NO: 695648 - DNA, 75 bp, synthetic construct
  source 1..75: mol_type = other DNA
tttattcaacaaagcccgtttaaggcattgaacctgcgaacctcgccaacacactggtactgcgcagcggaatac

SEQ ID NO: 695649 - DNA, 75 bp, synthetic construct
  source 1..75: mol_type = other DNA
acagtgacagacaccgcgaagaagctgatggctgacggggatgaaagatggcgtgcatggtcgacatctcttggt

SEQ ID NO: 695650 - DNA, 75 bp, synthetic construct
  source 1..75: mol_type = other DNA
actgataaaagcttttttcgaagcatacctggcaactgattacaccgatcgcggtctgttgacaaaagaatggtg

SEQ ID NO: 695651 - DNA, 75 bp, synthetic construct
  source 1..75: mol_type = other DNA
cgtggcaggccaggtgccggacaagctgaaaaacaccgatatcatgacccttgacttgggcgcattgcaggccgg

SEQ ID NO: 695652 - DNA, 75 bp, synthetic construct
  source 1..75: mol_type = other DNA
agcagcaccagacgacgctcaccatcaggagaatgcccaggaaaccgaagaactgacgggagggcaggaagaaaa

SEQ ID NO: 695653 - DNA, 75 bp, synthetic construct
  source 1..75: mol_type = other DNA
cgcaacaaaacgagccagaaacgaaacagcctgagccagtagtgcaacaacaggaaacggagaaagtttgcaccg

SEQ ID NO: 695654 - DNA, 75 bp, synthetic construct
  source 1..75: mol_type = other DNA
ttcggtggagggatttatcaacatctttgaacggctgggcatcgggtatgtggagttactggagcgccagccaga

SEQ ID NO: 695655 - DNA, 75 bp, synthetic construct
  source 1..75: mol_type = other DNA
tcagtttgcatctgtatctcaagagatgagtacaaaggcaagtaaggcatctgtgaacgccagctatacattgtc

SEQ ID NO: 695656 - DNA, 75 bp, synthetic construct
  source 1..75: mol_type = other DNA
cgtcggtatggcccccagtacagcctccgtcctgggtgtgccgtttattcatgccatgcgggcacattacgccga

SEQ ID NO: 695657 - DNA, 75 bp, synthetic construct
  source 1..75: mol_type = other DNA
ctgacaggttgcatgacgcgcgatacatgggcagcagttatcgggaaagacagactctggcccgcagacgcactc

SEQ ID NO: 695658 - DNA, 75 bp, synthetic construct
  source 1..75: mol_type = other DNA
ggctatggggatcgggatgccgtggagatttacccgcgggattatgatgtggtgaacgtggcgaacatgcgccac

SEQ ID NO: 695659 - DNA, 75 bp, synthetic construct
  source 1..75: mol_type = other DNA
tataagcacgtttattcgtccggtttcggacagtttggcggtgaacccatcgctgccgtgctgggcgcttatgag

SEQ ID NO: 695660 - DNA, 75 bp, synthetic construct
  source 1..75: mol_type = other DNA
gcaacgagtaacagaagaaggaaaacaggacgatgaagaaaaaccacaaccatctggcgcaatggcagatgaaca

SEQ ID NO: 695661 - DNA, 75 bp, synthetic construct
  source 1..75: mol_type = other DNA
cgttatgatttcagggtatgacaatccactttatgcagaagtacttagtagttggcgttgtatcaaatttaacgc

SEQ ID NO: 695662 - DNA, 75 bp, synthetic construct
  source 1..75: mol_type = other DNA
gagttgatttacgttgatccaccatacgttcatagcacccggaaacgcagccgaatatatcggcatgaatatacg

SEQ ID NO: 695663 - DNA, 75 bp, synthetic construct
  source 1..75: mol_type = other DNA
gatgatccggcattacgtaagctgcattatcacattgcagaagttcagcgaatgcaggcattgatcaggctgaaa

SEQ ID NO: 695664 - DNA, 75 bp, synthetic construct
  source 1..75: mol_type = other DNA
gtttcgtgttttttacttattcctgagtttgtctctaatattaaatttttaggacaaaaaagaataatattatcg

SEQ ID NO: 695665 - DNA, 75 bp, synthetic construct
  source 1..75: mol_type = other DNA
tggcaggagcctacgcaaaccgtgaaacagtggaggcgactatcgataacgtgctgacggccctcccgctgtcag

SEQ ID NO: 695666 - DNA, 75 bp, synthetic construct
  source 1..75: mol_type = other DNA
tcaaagttcatcttgattcggcaagatttagaatgaataagataaaattggcacacgcagcagaatttcatactt

SEQ ID NO: 695667 - DNA, 75 bp, synthetic construct
  source 1..75: mol_type = other DNA
agagaattggatgggcaccacagaaacacctacataaaggcaggcacatactcgcaagcatgtagtgaaccagaa

SEQ ID NO: 695668 - DNA, 75 bp, synthetic construct
  source 1..75: mol_type = other DNA
cagacggtcagtatcacctcccagggaaagatcatcagaagtacactttttgtactaaataattcgcattttatg

SEQ ID NO: 695669 - DNA, 75 bp, synthetic construct
  source 1..75: mol_type = other DNA
ccattatccgcttcagtgaagaccggcttccggtgtgtgaaattgacccggagggcggcgcgacgtttttcctct

SEQ ID NO: 695670 - DNA, 75 bp, synthetic construct
  source 1..75: mol_type = other DNA
atgagatttcagccgcaatgaatattagcatcaagaccgtgtatgcacataaagttcgtgctatcaataagctgg

SEQ ID NO: 695671 - DNA, 75 bp, synthetic construct
  source 1..75: mol_type = other DNA
accggtgatctcgaggcccgtttgcagaagaacgggagtgttcgtttccgtgaccgtcggacgggagagtttgtc

SEQ ID NO: 695672 - DNA, 75 bp, synthetic construct
  source 1..75: mol_type = other DNA
gtgctttgtgaaccgggcggaacgccggtatacggtaataccggtgatctcgaggcccgtctgcagaagaacggg

SEQ ID NO: 695673 - DNA, 75 bp, synthetic construct
  source 1..75: mol_type = other DNA
ttgtatgattcactttcggtaagaatcgacacaatacaacaggataatcgccaacttgcttttcactgctttgag

SEQ ID NO: 695674 - DNA, 75 bp, synthetic construct
  source 1..75: mol_type = other DNA
atgcaaggatctcgacgctcaagcaagttgatggctttggtatccaacgtcaggtaaacacaattaaccagtttt

SEQ ID NO: 695675 - DNA, 75 bp, synthetic construct
  source 1..75: mol_type = other DNA
atgctcaatatattttcgggtatgtcacggtgtccagtatgcaatcaatcaattatagtgaagcgtaacagccac

SEQ ID NO: 695676 - DNA, 75 bp, synthetic construct
  source 1..75: mol_type = other DNA
tggttaagcccttgtcatccctttatgatgttgttacatgggattcggagaataacagatttaaaaatcatgaat

SEQ ID NO: 695677 - DNA, 75 bp, synthetic construct
  source 1..75: mol_type = other DNA
gcagcagatgcccacgtgatgaagaataccatctggctggatattactgttcacgcagccagttattcagcttcg

SEQ ID NO: 695678 - DNA, 75 bp, synthetic construct
  source 1..75: mol_type = other DNA
tcgaaccgctggagattcgggatttgtacaaactggtgcgagacactgacaaagttttccccgcccccgtaaatt

SEQ ID NO: 695679 - DNA, 75 bp, synthetic construct
  source 1..75: mol_type = other DNA
gcagactacaccgatcgcggtctgctgacaaaagagtggatgaaaggaaaccgtgtttcacgcatcacgcgcacg

SEQ ID NO: 695680 - DNA, 75 bp, synthetic construct
  source 1..75: mol_type = other DNA
ggcagtaaccacaatagagacagccattattggtgtggtgggaaccgcgccgcaggctgccggagctgtggcagc

SEQ ID NO: 695681 - DNA, 75 bp, synthetic construct
  source 1..75: mol_type = other DNA
caaaagtagggggacggagcggaaataccattaccgttattgctgaacaggctttacaggcagcaaaagaaaaaa

SEQ ID NO: 695682 - DNA, 75 bp, synthetic construct
  source 1..75: mol_type = other DNA
aaaagggtggtggtggagcaaatcaaaccaggaggtttacaacatcctcggtgttgagcaggtggatgaatttat

SEQ ID NO: 695683 - DNA, 75 bp, synthetic construct
  source 1..75: mol_type = other DNA
gtgcagaaaatcatgtggtgtcgccgttcagtctgacgttatccggcggagaagacgaagcgtttccggtcaata

SEQ ID NO: 695684 - DNA, 75 bp, synthetic construct
  source 1..75: mol_type = other DNA
caggaggccatgctgccttatgtcgatcgtccgcttgatcgggatgtggcagacgacattcttggcagcattaat

SEQ ID NO: 695685 - DNA, 75 bp, synthetic construct
  source 1..75: mol_type = other DNA
ggcaacgccgcaggatgtggttcagcgtcgcgcatcctttggcggtcgcgtggagctgctgcgtccgcgagtgtc

SEQ ID NO: 695686 - DNA, 75 bp, synthetic construct
  source 1..75: mol_type = other DNA
ttggcgttgacacatccggcacacgctaaacgcattgaggaaattatcgctgaaaataaaccgcccttttctgtt

SEQ ID NO: 695687 - DNA, 75 bp, synthetic construct
  source 1..75: mol_type = other DNA
aatggaagccctgacagagagtaaggggaaaacgggttaccagccacgcattcttgtcgccactggcttcagtga

SEQ ID NO: 695688 - DNA, 75 bp, synthetic construct
  source 1..75: mol_type = other DNA
agtaaaacaaaggcgaaagaggccgaacagcgtgcggcggtgattcaggccatggaggcgctgacagaaagtaag

SEQ ID NO: 695689 - DNA, 75 bp, synthetic construct
  source 1..75: mol_type = other DNA
gaaaagcaaatcggttaccacctttcagccgcgtattgtcattgccacgggatttagtgaggacgatgctgttgg

SEQ ID NO: 695690 - DNA, 75 bp, synthetic construct
  source 1..75: mol_type = other DNA
gaaaactattatggagagcattctgaagacaaaaaccgcatgttctacaaacttggtataaacaaaacattttaa

SEQ ID NO: 695691 - DNA, 75 bp, synthetic construct
  source 1..75: mol_type = other DNA
taatggggtatatggtttctggttataatccatatcagattgctgaagttctggatatggatatccgtagcatct

SEQ ID NO: 695692 - DNA, 75 bp, synthetic construct
  source 1..75: mol_type = other DNA
taatccatatcagattgctgaagttctggatatggatatccgtagcatctacgcggctttgttgaataaatcgaa

SEQ ID NO: 695693 - DNA, 75 bp, synthetic construct
  source 1..75: mol_type = other DNA
ttttgagaaaataaatgaaataggagagagtctgaaagataaatactctactttatatatttttggttttaactg

SEQ ID NO: 695694 - DNA, 75 bp, synthetic construct
  source 1..75: mol_type = other DNA
tgataataaaaacatgatagcagttcaagttactacgaatgcaagtccagcaaaaattaaaaaactatcgaatct

SEQ ID NO: 695695 - DNA, 75 bp, synthetic construct
  source 1..75: mol_type = other DNA
accggggaaattgctgaacacggcgcggcggttctgggctgaggtttacggctgggttacctggccaatgaacca

SEQ ID NO: 695696 - DNA, 75 bp, synthetic construct
  source 1..75: mol_type = other DNA
ggtatggtggcaagattattgagagagaagggcgtatgtgaatttgttgaagcggctaaaataataaagaaaaaa

SEQ ID NO: 695697 - DNA, 75 bp, synthetic construct
  source 1..75: mol_type = other DNA
aacgttacgctttattggaagggttgggtttttgtttcacacaaaataaagataaagactcgtttaaaaaaatag

SEQ ID NO: 695698 - DNA, 75 bp, synthetic construct
  source 1..75: mol_type = other DNA
tgatttttttaatactttttttttggcaaggaaaataaaagagattaatcctgattctgttctttgctttttccc

SEQ ID NO: 695699 - DNA, 75 bp, synthetic construct
  source 1..75: mol_type = other DNA
ctgaactggtgcggctgctggacagactggaggaagaaatccgggcagaccgcgtgagcagtgaaagccgggcgt

SEQ ID NO: 695700 - DNA, 75 bp, synthetic construct
  source 1..75: mol_type = other DNA
attttcagaaaaaacgtcaacgaatggcaaaaatttacgatgatgcgttaaaagaattgccacttgaattgcctg

SEQ ID NO: 695701 - DNA, 75 bp, synthetic construct
  source 1..75: mol_type = other DNA
agtattacgaaggtgttatctcggatgggagtaaacgtattgctgaactggagaaaaagcgaagagcaactcatt

SEQ ID NO: 695702 - DNA, 75 bp, synthetic construct
  source 1..75: mol_type = other DNA
cgtgcgacgtaacgcgcgtgaagtggcacaggcaatagggcaactggagcaggaacttggccgcaacgccacgga

SEQ ID NO: 695703 - DNA, 75 bp, synthetic construct
  source 1..75: mol_type = other DNA
gattaagcgtgaaatgttcgccaaactgcgcaccaatcgctttatgaaagccaaaggcagcgacagtgcggcggt

SEQ ID NO: 695704 - DNA, 75 bp, synthetic construct
  source 1..75: mol_type = other DNA
acgccgtatgtaccgagaaaaaaacagccagtgcgaaataagaaagggcggataaagcgggaaatgtttgcgaaa

SEQ ID NO: 695705 - DNA, 75 bp, synthetic construct
  source 1..75: mol_type = other DNA
gtaaacagttacggcggaaacggcgacaaaacttatgcccgtcttggttttaaaggggaaacacaaatcaattcc

SEQ ID NO: 695706 - DNA, 75 bp, synthetic construct
  source 1..75: mol_type = other DNA
acatggtatcgaatcccatggatctaacggtattagtacccgctgctactattcttgttattagttttacatcat

SEQ ID NO: 695707 - DNA, 75 bp, synthetic construct
  source 1..75: mol_type = other DNA
aggcttcatggcgcggtaaaatgcttgacctgacgcctgcggaatttcgtctgctgaaaacgctctctcacgaac

SEQ ID NO: 695708 - DNA, 75 bp, synthetic construct
  source 1..75: mol_type = other DNA
cagctggcggtgaaaaaacgcatcgagatggatgaaccagaacagcagttcctactgtggtttcctcatgatgcg

SEQ ID NO: 695709 - DNA, 75 bp, synthetic construct
  source 1..75: mol_type = other DNA
catcgatggtttccactaccaggacagcgccaccttctggaaagcctactgcgaagaactgttccgcttcgacca

SEQ ID NO: 695710 - DNA, 75 bp, synthetic construct
  source 1..75: mol_type = other DNA
agcggagaatgcgatattgttattgccggtggcagtgaagcgccgattacaccactggttgtttcgtctttcacg

SEQ ID NO: 695711 - DNA, 75 bp, synthetic construct
  source 1..75: mol_type = other DNA
gaaacaaagattcgatagacaaaaaattataaatataaaatcagcaagtaataagtttattgcgaagagaacctt

SEQ ID NO: 695712 - DNA, 75 bp, synthetic construct
  source 1..75: mol_type = other DNA
gcaggagaacccttaagcatttcagcttatgagaaggtgatatcaacactgaaacgagcaagtccaaagctatat

SEQ ID NO: 695713 - DNA, 75 bp, synthetic construct
  source 1..75: mol_type = other DNA
caacactttaagtgtagtcagaagacatgattcaaaagaagatggaagatcttatcaaccattagtaaagactgg

SEQ ID NO: 695714 - DNA, 75 bp, synthetic construct
  source 1..75: mol_type = other DNA
caggctggcggagaagacggaccgcatcccggaaggggtgatacggatgcacgacgagcggacccaccactacca

SEQ ID NO: 695715 - DNA, 75 bp, synthetic construct
  source 1..75: mol_type = other DNA
gcggtgacggggccggacggcaggacggtgcggtatggctataacagccagcggcaggtgacgtcggtgacgtac

SEQ ID NO: 695716 - DNA, 75 bp, synthetic construct
  source 1..75: mol_type = other DNA
cgggcgcggtgacgggggtgacggacggcgcgggccgccgttttcacctggcgctgaccacgcaggcacagcggg

SEQ ID NO: 695717 - DNA, 75 bp, synthetic construct
  source 1..75: mol_type = other DNA
cgggagacccgttatgagtacagtgccgcaggcgacctcaccgctatcattgccccggacggtagccgcagtgag

SEQ ID NO: 695718 - DNA, 75 bp, synthetic construct
  source 1..75: mol_type = other DNA
caaaggtgctgccgggcgagacggaccttgcgctgcccggcccgttgccgtttattctttcccgcgcctacagca

SEQ ID NO: 695719 - DNA, 75 bp, synthetic construct
  source 1..75: mol_type = other DNA
ggggtgctgataggcgcgccgacgggagtggcctgttcggtatgtcccaacagcccgatagaggagcagaagggt

SEQ ID NO: 695720 - DNA, 75 bp, synthetic construct
  source 1..75: mol_type = other DNA
caggcgcagcgggcggaagccttccgtaaacagcgcgccacgtctttatcttcccctgccggtccccgttctgct

SEQ ID NO: 695721 - DNA, 75 bp, synthetic construct
  source 1..75: mol_type = other DNA
ctgccggggcagcagtatgatgaggagtcggggctgtactataaccggaaccggtactacgatccgttgcaggga

SEQ ID NO: 695722 - DNA, 75 bp, synthetic construct
  source 1..75: mol_type = other DNA
gcgcgctctggcaggtgctgccggaagatgttcgcctgagtccgcatgcgtacctggcagcaaacagccttcagg

SEQ ID NO: 695723 - DNA, 75 bp, synthetic construct
  source 1..75: mol_type = other DNA
tgggagcatgagacggggcatgcgtacagcgaacaggggctggcgacccgtcaggagccggacggtctgccgccg

SEQ ID NO: 695724 - DNA, 75 bp, synthetic construct
  source 1..75: mol_type = other DNA
ccggagctgcacccggacagtaccctcacggcgtggccggataaccgcatcgcagaggatgcgcactatgtttac

SEQ ID NO: 695725 - DNA, 75 bp, synthetic construct
  source 1..75: mol_type = other DNA
cggcgacttttgatgcagtcacgacggctatggcgtctgctgcccctgctcttggagcaatggctgtggtcgctg

SEQ ID NO: 695726 - DNA, 75 bp, synthetic construct
  source 1..75: mol_type = other DNA
tgcgtatccgctgaacccggtgcagcggggggatcctcttgggttgtctggtgagacactggttcttggttctgc

SEQ ID NO: 695727 - DNA, 75 bp, synthetic construct
  source 1..75: mol_type = other DNA
acatcaacaccactgaatgattaccttgagggaaatactttatctgcaatattccctgatcatccttgggtgaca

SEQ ID NO: 695728 - DNA, 75 bp, synthetic construct
  source 1..75: mol_type = other DNA
ttcaaacggcaaattcttgaggcgtcagagctcactgaagaagaggcacagaaagggtttggcttccttcagaaa

SEQ ID NO: 695729 - DNA, 75 bp, synthetic construct
  source 1..75: mol_type = other DNA
gatccgttgctgaagcctgttcacctcgtgccgatgagcgtcaaagactcaagaacgggtaaaagcgaatggcgc

SEQ ID NO: 695730 - DNA, 75 bp, synthetic construct
  source 1..75: mol_type = other DNA
tgctttttgaccccgatttttgcgacttcaatttgtgggtaacacgccgtgtgcaaacggtggatgaggacggaa

SEQ ID NO: 695731 - DNA, 75 bp, synthetic construct
  source 1..75: mol_type = other DNA
tattatggtgttcagacacttcgtggaaaagataatttccatatcactgaaatgccaatgagtcaggagcccttc

SEQ ID NO: 695732 - DNA, 75 bp, synthetic construct
  source 1..75: mol_type = other DNA
cgtggaaaagataatttccatatcactgaaatgccaatgagtcaggagcctttcttcatcattgccttcggttat

SEQ ID NO: 695733 - DNA, 75 bp, synthetic construct
  source 1..75: mol_type = other DNA
cgccgttaccagtttgaagtaatcgacaccctgccactgaatatcaatattggctggtatcagggggaatatatt

SEQ ID NO: 695734 - DNA, 75 bp, synthetic construct
  source 1..75: mol_type = other DNA
gaagtgacctccggtgcgcagcagcgtttcgaacaggccgactggcatgctgtccagcaggcgatgaaaaccgta

SEQ ID NO: 695735 - DNA, 75 bp, synthetic construct
  source 1..75: mol_type = other DNA
tattaatagcaacatttcctgttttttggcaattgagcgcaagcgcatttaaacaatgcattgcaatatctttta

SEQ ID NO: 695736 - DNA, 75 bp, synthetic construct
  source 1..75: mol_type = other DNA
tttatatgttaagttctatagggatcgcgttattaaatcctttgatttttatgtactataattcaatgtttattt

SEQ ID NO: 695737 - DNA, 75 bp, synthetic construct
  source 1..75: mol_type = other DNA
ggctgacggtactggatttcgatgagataaaaatagaccgtatttttattgccaatattgatgacccggtgaagc

SEQ ID NO: 695738 - DNA, 75 bp, synthetic construct
  source 1..75: mol_type = other DNA
ccataacgaggttgatgaatgaaaacgagacgttacgccgctggtacagcgataagctgcctgatgctgtgcgtc

SEQ ID NO: 695739 - DNA, 75 bp, synthetic construct
  source 1..75: mol_type = other DNA
ctcagccagagcgccgctttcgtaccattccccgcccgctggcgaaagactttcaccccgatcacggctgggaat

SEQ ID NO: 695740 - DNA, 75 bp, synthetic construct
  source 1..75: mol_type = other DNA
ggtgtattgtgggaaaggaactggatgatatctgcaccaactgtcagtatatcgatgctgtaaaacggcacaaac

SEQ ID NO: 695741 - DNA, 75 bp, synthetic construct
  source 1..75: mol_type = other DNA
ttcctgttacccaaaggagtacagcgtttccacttcgtagggggtgctcgtttcgttcatggcggagccatgctg

SEQ ID NO: 695742 - DNA, 75 bp, synthetic construct
  source 1..75: mol_type = other DNA
cgatgatcctgcatgaactggataaattcatcgaagagttatacagcaattggtatctgactgaactaagtcgcg

SEQ ID NO: 695743 - DNA, 75 bp, synthetic construct
  source 1..75: mol_type = other DNA
attcttcgccttgagttgggataccagtctgaatctccttcaatggaaaatctgcttctgaaactgttctgtacc

SEQ ID NO: 695744 - DNA, 75 bp, synthetic construct
  source 1..75: mol_type = other DNA
gcatggggattatctcctctgcagggcacacaccggaagagtgccatttgactctattgaagggaaaaggaatga

SEQ ID NO: 695745 - DNA, 75 bp, synthetic construct
  source 1..75: mol_type = other DNA
cgcgcacgctgaatatctttatcgtcgatgaaaacaaccaggtcgtctccggcacggaaacagtatgcttcgaca

SEQ ID NO: 695746 - DNA, 75 bp, synthetic construct
  source 1..75: mol_type = other DNA
ggctgagaagcaaccccagcggcagcccgtgcccgtcgttgcgcgggatcaggtgatcaaactggttaacagcat

SEQ ID NO: 695747 - DNA, 75 bp, synthetic construct
  source 1..75: mol_type = other DNA
tcatcaaccgtctaaacggaagccgagttgtgatcactgctgaccatggcttcctcttccaacagaaagcacttg

SEQ ID NO: 695748 - DNA, 75 bp, synthetic construct
  source 1..75: mol_type = other DNA
atgcagattagcgaactggcacaaggtgtcgctgccaagctcgaacaaagccgcattgtgttttggtacgaccca

SEQ ID NO: 695749 - DNA, 75 bp, synthetic construct
  source 1..75: mol_type = other DNA
tccttaatagagaaaatatcttttatatatttacagtcggtttttctttgggtttaattccctatataatcgctg

SEQ ID NO: 695750 - DNA, 75 bp, synthetic construct
  source 1..75: mol_type = other DNA
gcgacgaaatttatcgcttcgatcagacctaccgcctgttcaatgaatatgccgcgccggtgcacagtaaagggg

SEQ ID NO: 695751 - DNA, 75 bp, synthetic construct
  source 1..75: mol_type = other DNA
ttgcgaatgagcttggcgctaccattaacaacgagaagcgatttaaggctgaggtgtctacgcagttgggcgttt

SEQ ID NO: 695752 - DNA, 75 bp, synthetic construct
  source 1..75: mol_type = other DNA
tttgtgcacggcggagcgatgctacaggaagtctgcgtaccggtactacatgtgcgagagctacaaaaagaacaa

SEQ ID NO: 695753 - DNA, 75 bp, synthetic construct
  source 1..75: mol_type = other DNA
agatcatggcgcaggtcatcgctcgcgtagcgacgcagagcatgaggttctcccggaaaccactcatcaaacacg

SEQ ID NO: 695754 - DNA, 75 bp, synthetic construct
  source 1..75: mol_type = other DNA
tgcagggaaatcattatcccgtttctggcccggagattttttcccgactttctatgcctgccatctggctgtgct

SEQ ID NO: 695755 - DNA, 75 bp, synthetic construct
  source 1..75: mol_type = other DNA
ataccatcaaaacggtggcactggtgctgatggtgctggaccatgcaaaccgcattctgcatctggagcagacgt

SEQ ID NO: 695756 - DNA, 75 bp, synthetic construct
  source 1..75: mol_type = other DNA
aaatttcatgagtgctttattaactggatgcgtgactgccattcttcagatgataaagacgtcattgcaattgat

SEQ ID NO: 695757 - DNA, 75 bp, synthetic construct
  source 1..75: mol_type = other DNA
gctgttacagattacctcgatacatgcaagcagttgggtaaatctcctgataaaccaatgagtggtacttttaac

SEQ ID NO: 695758 - DNA, 75 bp, synthetic construct
  source 1..75: mol_type = other DNA
aagcgccccctgcacaaataccgcaatccgaattacctaatggatgcgaagcgggatttgttgttcatattccag

SEQ ID NO: 695759 - DNA, 75 bp, synthetic construct
  source 1..75: mol_type = other DNA
tcttataaagacgctaatggcaacaaacagcagatcaaccgcactgacgtgaaagagatggtcgagctggatcag

SEQ ID NO: 695760 - DNA, 75 bp, synthetic construct
  source 1..75: mol_type = other DNA
ttatcggatattctactgttgactatttgtgcagttatttctggtgcagagggttgggaagatatagaggatttt

SEQ ID NO: 695761 - DNA, 75 bp, synthetic construct
  source 1..75: mol_type = other DNA
ggtatgtggaaaaattacatttagataaatactctgttaaaaatacggtaaaaactgaaacaatggcgatacaat

SEQ ID NO: 695762 - DNA, 75 bp, synthetic construct
  source 1..75: mol_type = other DNA
acacaagagaatattccggctatatttgataataacaggactttttatgtgtcattagttggtgagcgcaattct

SEQ ID NO: 695763 - DNA, 75 bp, synthetic construct
  source 1..75: mol_type = other DNA
ggctggcctgaccgcgcgtgaagcgaaagttctgcgtatgcgtttcggtatcgatatgaacaccgaccacacgct

SEQ ID NO: 695764 - DNA, 75 bp, synthetic construct
  source 1..75: mol_type = other DNA
gaggcaaggattacaaagtcgtgtccccggctgattacatggattatggattctgcgccgtcatagctgaggaaa

SEQ ID NO: 695765 - DNA, 75 bp, synthetic construct
  source 1..75: mol_type = other DNA
tgtgagcagacaagaatggttttcgtgggacgattgacaaaaaaatctaatttggattttcttattaactctatg

SEQ ID NO: 695766 - DNA, 75 bp, synthetic construct
  source 1..75: mol_type = other DNA
gaaatatattcaagaataacggttctaaaaaatattatcgaggaatcattaagagaggcattacgctattcagaa

SEQ ID NO: 695767 - DNA, 75 bp, synthetic construct
  source 1..75: mol_type = other DNA
ggctgatgatgggcatctacgatgattacaactggctttccgggcacgccgggggaaggaccgttgaagggagag

SEQ ID NO: 695768 - DNA, 75 bp, synthetic construct
  source 1..75: mol_type = other DNA
ggacagatcaggacggatgagaaatccaatgaaattacagctatccctgaacttcttaacatgctggatattaaa

SEQ ID NO: 695769 - DNA, 75 bp, synthetic construct
  source 1..75: mol_type = other DNA
ggagtatttgaggttaggagattttggcataacacaattgaatgtcacaatataaccagcccagatttcaggggg

SEQ ID NO: 695770 - DNA, 75 bp, synthetic construct
  source 1..75: mol_type = other DNA
aagagaaacaatccttattagatgcattcatggctagtgtgactctgactgcggagttagacggggtcgaaaaaa

SEQ ID NO: 695771 - DNA, 75 bp, synthetic construct
  source 1..75: mol_type = other DNA
caaatcgaaccctggcaggcccgttgtttctcattacaggtagcggaaagtcgccacgaggtggtgctggataag

SEQ ID NO: 695772 - DNA, 75 bp, synthetic construct
  source 1..75: mol_type = other DNA
aaaaacgatcgcccctttgttgactatcccccccggaaaactgccgtctggacgcgaattacgcaggatgaaaca

SEQ ID NO: 695773 - DNA, 75 bp, synthetic construct
  source 1..75: mol_type = other DNA
agaacattagctgctcattatcttcatcaatttagttctcgcaaagaaagacctttaattgaacgcacactcagc

SEQ ID NO: 695774 - DNA, 75 bp, synthetic construct
  source 1..75: mol_type = other DNA
cgttgaagcggtaaaaaagggagcgtgggatttcctgcaaaaaccggtcaatccggaacaatttctatcacttat

SEQ ID NO: 695775 - DNA, 75 bp, synthetic construct
  source 1..75: mol_type = other DNA
cttttacggcgaacctggcacaggaagaacattagccgcccactatcttcatcaatttagttctcgcaaggaaag

SEQ ID NO: 695776 - DNA, 75 bp, synthetic construct
  source 1..75: mol_type = other DNA
cggtgaagcttgcagaattcctcaacaatccagaaaacacgggaaatatcgtagacagtggagataaatactaca

SEQ ID NO: 695777 - DNA, 75 bp, synthetic construct
  source 1..75: mol_type = other DNA
aagcactctgccagtttctcggttacagtcaggaagagctgcgcggactcacctttcagcaactgacctggccgg

SEQ ID NO: 695778 - DNA, 75 bp, synthetic construct
  source 1..75: mol_type = other DNA
gtgttaaaaaaggtgttcaccctgttctgttcttatcatatatactagccaataaagatacaatggcattatata

SEQ ID NO: 695779 - DNA, 75 bp, synthetic construct
  source 1..75: mol_type = other DNA
gaaggaaaagttattaatatcattgttttttgttcctcttctaactttaggtatttcttttactgatataggcac

SEQ ID NO: 695780 - DNA, 75 bp, synthetic construct
  source 1..75: mol_type = other DNA
atcatttcaggcccttggaaacgcctggtgtacgatgctgaaggtcggatacagcgagcgggttactcgttgtgt

SEQ ID NO: 695781 - DNA, 75 bp, synthetic construct
  source 1..75: mol_type = other DNA
gcggtgttatgtcaacgcacgctaactctgcgcgcgatgcttttaaccgtattgggctgcttatcaaggcgaccc

SEQ ID NO: 695782 - DNA, 75 bp, synthetic construct
  source 1..75: mol_type = other DNA
cagcagcgaaaaatggcccgcattcctgcaaaccgccgttgagaagaaacgcactatcgtgatctgcggtgaaac

SEQ ID NO: 695783 - DNA, 75 bp, synthetic construct
  source 1..75: mol_type = other DNA
acggcatgcgttttgtcacaccagtgaagactatcaactcaggatctaacagaaaatattttggttctggacgag

SEQ ID NO: 695784 - DNA, 75 bp, synthetic construct
  source 1..75: mol_type = other DNA
cgagtcaggtgcccgcgcgcaggatctgcatataagcctgtgtgcggtgatgctggctgaggcctgcaatatcgg

SEQ ID NO: 695785 - DNA, 75 bp, synthetic construct
  source 1..75: mol_type = other DNA
atgcagacaataatccagatcgagccaaacgaatgggtttcagaggacttgctgatggcagtcacagggatgaaa

SEQ ID NO: 695786 - DNA, 75 bp, synthetic construct
  source 1..75: mol_type = other DNA
tatcgttttcgacccggttacaggtcgagaagttccggcagaacggacttgtatcaatgaacttgttgaagctct

SEQ ID NO: 695787 - DNA, 75 bp, synthetic construct
  source 1..75: mol_type = other DNA
ggtttagctctcgacaaaaaagagttcaaaactggcgaagcggtcagcggcaaactgcaactgctctacccggat

SEQ ID NO: 695788 - DNA, 75 bp, synthetic construct
  source 1..75: mol_type = other DNA
gttaatagctttaattttgacgatttgtttatggagaaaattgacaccggaaataaatttaaaactattttactt

SEQ ID NO: 695789 - DNA, 75 bp, synthetic construct
  source 1..75: mol_type = other DNA
agttaatcaaaattattataaagttcattaccataatattattctttgaacatcattgcataggtatccagtttg

SEQ ID NO: 695790 - DNA, 75 bp, synthetic construct
  source 1..75: mol_type = other DNA
actcttgaagaggattacagattatgcgaaaaaaaatagaaatgaacttatcgaaatatccattaaatggggtct

SEQ ID NO: 695791 - DNA, 75 bp, synthetic construct
  source 1..75: mol_type = other DNA
aaacataacccgcgaccgcttcatccgctcggttaatccgattgtggcagagaagatgcgcgccatcctggaaga

SEQ ID NO: 695792 - DNA, 75 bp, synthetic construct
  source 1..75: mol_type = other DNA
caactggtgaaggcgcaaacggttattgggtcgggtggctcattaacgttacgtgatttacagggcgacgaggtg

SEQ ID NO: 695793 - DNA, 75 bp, synthetic construct
  source 1..75: mol_type = other DNA
acaaaatgtttggctttacccatgcagcagggactgaattcgccggtgttgcccaactgaaagccagtaccttcg

SEQ ID NO: 695794 - DNA, 75 bp, synthetic construct
  source 1..75: mol_type = other DNA
agacaacgatgtttacccgtcagataaagcaaatcgccacggatgatgagatcaaagagcttcagaaagagctta

SEQ ID NO: 695795 - DNA, 75 bp, synthetic construct
  source 1..75: mol_type = other DNA
aaattcacaccaagcggggcgagactcttaattcgcgtcgggtcactacgccttaatgaaaatcatgccatcaaa

SEQ ID NO: 695796 - DNA, 75 bp, synthetic construct
  source 1..75: mol_type = other DNA
acgcctgacggatgaacagtgtgctcagggttaccactttaacgtaaaaccgtggcggcaagcctgcgccgtcag

SEQ ID NO: 695797 - DNA, 75 bp, synthetic construct
  source 1..75: mol_type = other DNA
aaggcaatttctttatcgtcgggaagaactccagggggggggggcgcttttttgtcctgtcgcaggaacgcccgg

SEQ ID NO: 695798 - DNA, 75 bp, synthetic construct
  source 1..75: mol_type = other DNA
accttttttcaggcttgcttactgtcgtcatttccaggtatagtttttccgctgtcgcaaaatcggcagccggaa

SEQ ID NO: 695799 - DNA, 75 bp, synthetic construct
  source 1..75: mol_type = other DNA
agctgaaaaatatcatttaaaaaagcttcctcctcataattctcctgtcttcgaccagattgtcttattggatgg

SEQ ID NO: 695800 - DNA, 75 bp, synthetic construct
  source 1..75: mol_type = other DNA
cgttactggctacattccattctaatgtagaagagtatcataagcttttcaataatgtcgtatcaaaaggttcta

SEQ ID NO: 695801 - DNA, 75 bp, synthetic construct
  source 1..75: mol_type = other DNA
tatatgatccaattagttatattcatcctcaacgagtaagtttgaataatgcacgtattagcaatccggtactta

SEQ ID NO: 695802 - DNA, 75 bp, synthetic construct
  source 1..75: mol_type = other DNA
ggttcctgctgtgctaagggattatttatcagctataccggtgaaaataaatgaaaaggcacgatacaaacccgg

SEQ ID NO: 695803 - DNA, 75 bp, synthetic construct
  source 1..75: mol_type = other DNA
tttgaggcttatggtggttatggttattgggtttcagaggttgcgagaccacatttcagggccatttgtgagcac

SEQ ID NO: 695804 - DNA, 75 bp, synthetic construct
  source 1..75: mol_type = other DNA
gcgctgaatgcgacagtggccggctctgaaatcagcaataccacgctgacggccaccaacaacatcaacctggcg

SEQ ID NO: 695805 - DNA, 75 bp, synthetic construct
  source 1..75: mol_type = other DNA
tgattgaagtaaacatccttaatacagagaaaactattcaacaatctattgcagccggtgttaagaaatttttct

SEQ ID NO: 695806 - DNA, 75 bp, synthetic construct
  source 1..75: mol_type = other DNA
catcacgtaataccaatatacgcctcaacatctcctgggactcatctcataacaccgcgattggtgcaggggttg

SEQ ID NO: 695807 - DNA, 75 bp, synthetic construct
  source 1..75: mol_type = other DNA
cttaattattctgatctgaatgaaaaacagggagttggtcctaaaaaatataaagatgaaagaaacttatttctt

SEQ ID NO: 695808 - DNA, 75 bp, synthetic construct
  source 1..75: mol_type = other DNA
caaagatgtactgcatcaaactgccagcctgaccgggctggtggaggtgttaaaacgccagggaaaaacggtcac

SEQ ID NO: 695809 - DNA, 75 bp, synthetic construct
  source 1..75: mol_type = other DNA
ccgtgttcagattaaacactccaacatcaccgcgggcaactttgcgctgaatgcgacagtggccggctctgaaat

SEQ ID NO: 695810 - DNA, 75 bp, synthetic construct
  source 1..75: mol_type = other DNA
acgaatggcttactttacatactgtacctgccagatcagcagtcaaaggtgttaatgacgaagtgagacatacgc

SEQ ID NO: 695811 - DNA, 75 bp, synthetic construct
  source 1..75: mol_type = other DNA
taatttcacgtttatagagtgtatgctttatgatacatatattgctgatgctaaggtatggagtagattaagaga

SEQ ID NO: 695812 - DNA, 75 bp, synthetic construct
  source 1..75: mol_type = other DNA
attggaacacgtattgaagttcttgctacggatgatgttcgattagcattacgtatgactcgtgagttcttagaa

SEQ ID NO: 695813 - DNA, 75 bp, synthetic construct
  source 1..75: mol_type = other DNA
acaaaagaacactggtcagtgcgaatacctatgctgaccagaaagaaaccgacatcaataaccgtactgacggat

SEQ ID NO: 695814 - DNA, 75 bp, synthetic construct
  source 1..75: mol_type = other DNA
tttattggtgagatagcggaacgcgcaccacaagaaaaggagaaactgatgaccattgctgacagattacgtgaa

SEQ ID NO: 695815 - DNA, 75 bp, synthetic construct
  source 1..75: mol_type = other DNA
ttgcgcaggtgccggagcggacgcttatcgagctcaccagtgaagagatggacttcgactcgcctgcaacagtga

SEQ ID NO: 695816 - DNA, 75 bp, synthetic construct
  source 1..75: mol_type = other DNA
tgcgggtgcttccctgctgcattgcgctggcaatgtcagggtgttatgtcaatgcctgggctgaagatgaaattc

SEQ ID NO: 695817 - DNA, 75 bp, synthetic construct
  source 1..75: mol_type = other DNA
atgcgatccaggctaaaagtatccagcttaatattctctctcaacagtgggaaattaatatgaaatcatcagaac

SEQ ID NO: 695818 - DNA, 75 bp, synthetic construct
  source 1..75: mol_type = other DNA
tttgcaaacaggagacagtaaacaaagcctgggcgatagaacaaacagcagacgtacaggagaaaataagtgatg

SEQ ID NO: 695819 - DNA, 75 bp, synthetic construct
  source 1..75: mol_type = other DNA
cattacaaaaaccagttacaggcttataaagatcaactggcaacggctacaggtcttagagatatacaaggttta

SEQ ID NO: 695820 - DNA, 75 bp, synthetic construct
  source 1..75: mol_type = other DNA
caaacgcggatgcccggataacccgggcatttgctgaagaggtacctgcatatctgtttcttcagggaggagaaa

SEQ ID NO: 695821 - DNA, 75 bp, synthetic construct
  source 1..75: mol_type = other DNA
ggtggcggagaaatcagcaatcacgccccggcattcagtgcgatgacgacggatattgtcggactgtccaggcat

SEQ ID NO: 695822 - DNA, 75 bp, synthetic construct
  source 1..75: mol_type = other DNA
aaacggtaaaacaacacaggcgaaatccttcctgccgccagaaaaaatttatcctgttagtgcaactgcaagaaa

SEQ ID NO: 695823 - DNA, 75 bp, synthetic construct
  source 1..75: mol_type = other DNA
ggtgtctcgctcatgtgggccgtggcgctttcttgcattgttacctggtttttaatccgtatttatggtcgttat

SEQ ID NO: 695824 - DNA, 75 bp, synthetic construct
  source 1..75: mol_type = other DNA
ataaaagttattgatcctcgaggtatgaatcaactcggtgagttaactatatttggcgatcaaaaatacgatctt

SEQ ID NO: 695825 - DNA, 75 bp, synthetic construct
  source 1..75: mol_type = other DNA
aattggaaaaattcataaggattctgaattgctttattatgataaaacaatctctagattagaaaattactgtaa

SEQ ID NO: 695826 - DNA, 75 bp, synthetic construct
  source 1..75: mol_type = other DNA
tggtatcagagatattcaggggcttgttgcacaaggtaagagtctgaagaatgacataacgaatcttcaaaagca

SEQ ID NO: 695827 - DNA, 75 bp, synthetic construct
  source 1..75: mol_type = other DNA
gtatgaaaccaaaaagctgggatgatctagggcatttaaatacttattttatttctcgatctaacattactactc

SEQ ID NO: 695828 - DNA, 75 bp, synthetic construct
  source 1..75: mol_type = other DNA
atgtttattgccataagcgtatttacgctaatcatgggctatatggcaatgagcggcttaatcgaaagtctgatg

SEQ ID NO: 695829 - DNA, 75 bp, synthetic construct
  source 1..75: mol_type = other DNA
agtactttcattgaggcagtctacatttatcaaacataaaaactcacctgctatagatgctttcgattttgaagt

SEQ ID NO: 695830 - DNA, 75 bp, synthetic construct
  source 1..75: mol_type = other DNA
tgttcaagtggctgcgcgataagtttctggagctcaaggacaacctcggcggctggaaaaatacgctcaccatcc

SEQ ID NO: 695831 - DNA, 75 bp, synthetic construct
  source 1..75: mol_type = other DNA
tcgcctgtatgctgacttttgcccttagcgcctgttccggttcaaactatgttatgcacaccaacgatgggcgta

SEQ ID NO: 695832 - DNA, 75 bp, synthetic construct
  source 1..75: mol_type = other DNA
gcattgatgagcagtattatccagcatgaaaatggaagaaatatctattctcgagagctgattaataaggctgcc

SEQ ID NO: 695833 - DNA, 75 bp, synthetic construct
  source 1..75: mol_type = other DNA
ttttcgcatgatgcgctattccattgcggcaatgcaaaaccatcttgatgcgggctataaagagcttccattggt

SEQ ID NO: 695834 - DNA, 75 bp, synthetic construct
  source 1..75: mol_type = other DNA
tcaggaggcggctaatctgatcgctgacaagcagggggctgtaaatgccagggcggtacagcaattaaaaggacc

SEQ ID NO: 695835 - DNA, 75 bp, synthetic construct
  source 1..75: mol_type = other DNA
ttttcactgatgagcaaatccagcgaaaaattcaggagatgggactggagccggagcagcgagcgcagtcggtta

SEQ ID NO: 695836 - DNA, 75 bp, synthetic construct
  source 1..75: mol_type = other DNA
aataaaatgtacctaaattacaagctaatgcggatgtggttcgcattgccattgatgctcatagcttctccattc

SEQ ID NO: 695837 - DNA, 75 bp, synthetic construct
  source 1..75: mol_type = other DNA
gctggattgcggcctttaacaaggcgcagaacgccgctgaacgcctgcttttactggcaccgggtaagcgccagg

SEQ ID NO: 695838 - DNA, 75 bp, synthetic construct
  source 1..75: mol_type = other DNA
tttagaaaaattgacattttaatacaaaaattttgtgataagaataaaattacttatacacgatatgcagatgat

SEQ ID NO: 695839 - DNA, 75 bp, synthetic construct
  source 1..75: mol_type = other DNA
aaacgcatccgggaatgcaatctggacagccagggcgtgatttatctccgcgagtcagccagggccggagccgtg

SEQ ID NO: 695840 - DNA, 75 bp, synthetic construct
  source 1..75: mol_type = other DNA
gtgaaatggactgaatctctcgatacatttctgaatatgccaaccccggtagctttccttgaaataagtaataag

SEQ ID NO: 695841 - DNA, 75 bp, synthetic construct
  source 1..75: mol_type = other DNA
gcgattatcttgccggactggatatcgcttcgccagagcatcaggttctgatgaacgtaacagcaaaaagcgagg

SEQ ID NO: 695842 - DNA, 75 bp, synthetic construct
  source 1..75: mol_type = other DNA
ggcgatgcgccggggtgtgggggggttctccgggcagtacagcgcaatggcgaaagctatcggcttcaatgctga

SEQ ID NO: 695843 - DNA, 75 bp, synthetic construct
  source 1..75: mol_type = other DNA
ctggcatatgctgaccatgattaatacccaaaccgaggaggtctggcgatggacagagagaaccggacagtttcc

SEQ ID NO: 695844 - DNA, 75 bp, synthetic construct
  source 1..75: mol_type = other DNA
taccgggttaatgccatcggtattaatccggtaacgggatatggcagcggactgatgcaggtagattcccagaat

SEQ ID NO: 695845 - DNA, 75 bp, synthetic construct
  source 1..75: mol_type = other DNA
ttggttgaaacgtgctgaacaagatggtttggtaaaaaaactaaaccgtcctacaagatatcaattaaatgagta

SEQ ID NO: 695846 - DNA, 75 bp, synthetic construct
  source 1..75: mol_type = other DNA
ctggaaagcgaaaaacgggtggtgaatatcgacgatgaaagtcagacgcgcgggcatagtagcggtacatggctg

SEQ ID NO: 695847 - DNA, 75 bp, synthetic construct
  source 1..75: mol_type = other DNA
tatgcccccggcgccgtcccccataagaccggcgttttcgcctcttcccggatgagtacctaccccggtcgctaa

SEQ ID NO: 695848 - DNA, 75 bp, synthetic construct
  source 1..75: mol_type = other DNA
ggcaacctgctgaatgaggagaacccgcatcagctgcaccagcttatccggctgccggggcagcagtatgatgag

SEQ ID NO: 695849 - DNA, 75 bp, synthetic construct
  source 1..75: mol_type = other DNA
taaccgagtcaggtggtaaccagttcgccatgtccggcgcgggtgcaaaggggctgttccagttcatggatggca

SEQ ID NO: 695850 - DNA, 75 bp, synthetic construct
  source 1..75: mol_type = other DNA
ctcgctgtttggcgcactgacgattgcgctgcgcattctgaacagtacgttctggatgtcgccggttggcctcat

SEQ ID NO: 695851 - DNA, 75 bp, synthetic construct
  source 1..75: mol_type = other DNA
gcgctgcgcattctgaacagtacgttctcgatgtcgccggttggcctcattaccgcgctggcggcggggattgcc

SEQ ID NO: 695852 - DNA, 75 bp, synthetic construct
  source 1..75: mol_type = other DNA
ccagctgacttgttggactctgatcctcaaaccttactgaatggctggtacgactcccgtatcagtacggatcgg

SEQ ID NO: 695853 - DNA, 75 bp, synthetic construct
  source 1..75: mol_type = other DNA
caacttcatttcgcaaatgggtgagttcggcaagatgctgaacatgatcgctgatttgctgaatgccataaaaga

SEQ ID NO: 695854 - DNA, 75 bp, synthetic construct
  source 1..75: mol_type = other DNA
tcagctcaggcagccgctaagtaccttagccagctgttgcggcagaacggcggagaccttagcaaagcactggca

SEQ ID NO: 695855 - DNA, 75 bp, synthetic construct
  source 1..75: mol_type = other DNA
ctctacgaaacatatctcaataaaatagaaccaattagaaaaagtaatctcgacttaacaactatcaaagaatta

SEQ ID NO: 695856 - DNA, 75 bp, synthetic construct
  source 1..75: mol_type = other DNA
ttgagatcttatacaggccaacggctcatagaaaaaggagtttatggttccactggccagctgaatctatcaagt

SEQ ID NO: 695857 - DNA, 75 bp, synthetic construct
  source 1..75: mol_type = other DNA
gaatcaaacaaattagtttcatatctggagaggatttttacttcctaacatatttgattctgatttgtttgaagg

SEQ ID NO: 695858 - DNA, 75 bp, synthetic construct
  source 1..75: mol_type = other DNA
gggactttcttttctgccggaaattatgggacagaaatcaggggaggagacaaaaacggatttagttgtactgct

SEQ ID NO: 695859 - DNA, 75 bp, synthetic construct
  source 1..75: mol_type = other DNA
acgggactttcttttctgccggatataatgggacagaaatcaggggaggagacaaaaacggatttagtggtcctg

SEQ ID NO: 695860 - DNA, 75 bp, synthetic construct
  source 1..75: mol_type = other DNA
gcttgagcaaaagccacgcttaactgctgatcaggcatgggatgttattcgccaaaccagtcgtcaggatcttaa

SEQ ID NO: 695861 - DNA, 75 bp, synthetic construct
  source 1..75: mol_type = other DNA
tcaccatgttgatccagagtggagaatttcatagtaaaaatcctgttcgttctgttcccgctatgaaacgaaaga

SEQ ID NO: 695862 - DNA, 75 bp, synthetic construct
  source 1..75: mol_type = other DNA
aatgggagatccgcgagcagaacaaataaatgcgcggtttatggctatgtatcgcagcgagagattgggagcagg

SEQ ID NO: 695863 - DNA, 75 bp, synthetic construct
  source 1..75: mol_type = other DNA
caatgggactggcatcaaaatatggacacttaaataatggcggatatggagcgagacccaacaaaccgcctacgc

SEQ ID NO: 695864 - DNA, 75 bp, synthetic construct
  source 1..75: mol_type = other DNA
gcagggggggcggatatcgttatcgcgccggatatgcattttcgttcctcgtcggagatcaactcgcgcaagctc

SEQ ID NO: 695865 - DNA, 75 bp, synthetic construct
  source 1..75: mol_type = other DNA
accgatatccagcgctggatgcctcacctgcatctactgatgccgagagagccgggggcgctcaaaacgctaaga

SEQ ID NO: 695866 - DNA, 75 bp, synthetic construct
  source 1..75: mol_type = other DNA
ccatgctgaaagaagacgagatcagccgctgggatcataagaagttccgggagcgggtctacaagatgataaaaa

SEQ ID NO: 695867 - DNA, 75 bp, synthetic construct
  source 1..75: mol_type = other DNA
gtttggtcgtcaggaggcgcaacagctgctggatcgcgtcgcccaggagatgccaaagctgacggaagatctcgt

SEQ ID NO: 695868 - DNA, 75 bp, synthetic construct
  source 1..75: mol_type = other DNA
gaccggtaacctcaatacagaagataattgtattttactggataaagcggttcatggtggacaatatcaggggat

SEQ ID NO: 695869 - DNA, 75 bp, synthetic construct
  source 1..75: mol_type = other DNA
tatctaaaagaaaatatcaatgagatcctttatcttgatcaggatgctttaaatgctattctctacgatgaatgg

SEQ ID NO: 695870 - DNA, 75 bp, synthetic construct
  source 1..75: mol_type = other DNA
tgcaaatgcagtaagcggtaagtggtatcctatagtctttcgccgatctagaggcagtaccgatgaattagcctc

SEQ ID NO: 695871 - DNA, 75 bp, synthetic construct
  source 1..75: mol_type = other DNA
caccaccagttctatatgcgcattcaaaaaacgggctatcccgtcagcgaactgacttatcagcccgttagcgaa

SEQ ID NO: 695872 - DNA, 75 bp, synthetic construct
  source 1..75: mol_type = other DNA
ggtaccagcactggagaaagaattgcttaagtgcctgaatgatcactatgacaattgcaggctcacaatccgccg

SEQ ID NO: 695873 - DNA, 75 bp, synthetic construct
  source 1..75: mol_type = other DNA
gaccggtaacctcaatacagaagataattgtattttactggataaagcggttcatggtggacaatatcagtggga

SEQ ID NO: 695874 - DNA, 75 bp, synthetic construct
  source 1..75: mol_type = other DNA
tatctggtcaaacttccaggccgatccgcaagagatccgcgtgctgtgggagatgaaaaaagatcgtctgaagta

SEQ ID NO: 695875 - DNA, 75 bp, synthetic construct
  source 1..75: mol_type = other DNA
aaaattaaaaatatttcaggaagactgtatattgttgggtacaataactctgtgggatacagagacggagttaat

SEQ ID NO: 695876 - DNA, 75 bp, synthetic construct
  source 1..75: mol_type = other DNA
tgtagcggtagggcatttatcagtgggtgatggtgtgatgctaatggccggaatgtatggtgcagcatggcacga

SEQ ID NO: 695877 - DNA, 75 bp, synthetic construct
  source 1..75: mol_type = other DNA
cttgaaagtatccaaaatgaaccgaaattatcagcaacagcaagatatctatatgaaatagataaagaaaataca

SEQ ID NO: 695878 - DNA, 75 bp, synthetic construct
  source 1..75: mol_type = other DNA
ggcagcggttattgaaagttgcacgaaccattgctgatattgatcagtctgacattatcacacgtcagcatttgc

SEQ ID NO: 695879 - DNA, 75 bp, synthetic construct
  source 1..75: mol_type = other DNA
tgaaaccaaactactctaactattatgcgaagcacggtaacgaacatcagatcgacgtggctttaggttcatacg

SEQ ID NO: 695880 - DNA, 75 bp, synthetic construct
  source 1..75: mol_type = other DNA
ctataacgacgggaaccagctgacggcggtggtgtacccggacgggctggagagccgccgggaatatgatgaacc

SEQ ID NO: 695881 - DNA, 75 bp, synthetic construct
  source 1..75: mol_type = other DNA
cggcccgtccctttgcctcttttacgctggaaaattcagaaaccgtggcagatgcgctgacccgtgcagcccggc

SEQ ID NO: 695882 - DNA, 75 bp, synthetic construct
  source 1..75: mol_type = other DNA
gtgagcagcagggttgaactgtatctgggcggtgagattttttccggctggctgacggtcagcgtccgtcgctcg

SEQ ID NO: 695883 - DNA, 75 bp, synthetic construct
  source 1..75: mol_type = other DNA
gagttatattgtcacgtttaaccagtatcttgaatcattgagattaaatacatacgtaagtctggctcgtaatac

SEQ ID NO: 695884 - DNA, 75 bp, synthetic construct
  source 1..75: mol_type = other DNA
gtgattatcaatctctggctgccggcgttggttttaaccttaactcattaggttcattatcttttgatgtcacac

SEQ ID NO: 695885 - DNA, 75 bp, synthetic construct
  source 1..75: mol_type = other DNA
aatcttggggcctggcgcctgcgtactgattaccagtacgatcagtcatttaacaatggcaaaagccaggcgaac

SEQ ID NO: 695886 - DNA, 75 bp, synthetic construct
  source 1..75: mol_type = other DNA
agaaataaacagatatatttcaacaaagaaagataaccacaaaaataaagtttatgcagatcctgaattgacaaa

SEQ ID NO: 695887 - DNA, 75 bp, synthetic construct
  source 1..75: mol_type = other DNA
tcaaataaatttaactatataaaattcaattatggttttctaaatattctttgttttttattccctccgactaga

SEQ ID NO: 695888 - DNA, 75 bp, synthetic construct
  source 1..75: mol_type = other DNA
cagcatgatgaggaatcagggctgtactataaccgtcaccggtactacgatccgttgcaggggcggtatattact

SEQ ID NO: 695889 - DNA, 75 bp, synthetic construct
  source 1..75: mol_type = other DNA
ggttccgggatgatggccggttatgggatgtcaatctgctgaccggtgtttcggccctgcgtttcggtatcgaac

SEQ ID NO: 695890 - DNA, 75 bp, synthetic construct
  source 1..75: mol_type = other DNA
acattttaacaatatttggttgccgcaatatgccccgaaatacttcgctgaccgggacaaaaaggctctcgcctt

SEQ ID NO: 695891 - DNA, 75 bp, synthetic construct
  source 1..75: mol_type = other DNA
ttcctcacacgcacttttctattcttaatgaactgacattcaacttggttgcacctcttgaacaagcagggtaca

SEQ ID NO: 695892 - DNA, 75 bp, synthetic construct
  source 1..75: mol_type = other DNA
aatttattcaatacattacaggggcaactggacgtcaaggttgaagaagaggacgggcgcgtcacgcaatggcaa

SEQ ID NO: 695893 - DNA, 75 bp, synthetic construct
  source 1..75: mol_type = other DNA
ggaaagaatattaatttttttatataggtatcacattagatttttcacaaagattataattcatagcaatgttaa

SEQ ID NO: 695894 - DNA, 75 bp, synthetic construct
  source 1..75: mol_type = other DNA
gaagcagtaagcagaacattattgttattcaatcaatttttaaagctaaaggatataaacataattgaaagagta

SEQ ID NO: 695895 - DNA, 75 bp, synthetic construct
  source 1..75: mol_type = other DNA
aactgcaaaatacatccttacatttacattgcaacaaatgatagcatgagcgggttttatgctttcacctgtagt

SEQ ID NO: 695896 - DNA, 75 bp, synthetic construct
  source 1..75: mol_type = other DNA
ttaccgggatggcggaccgcttcgggcggacgctggcgtaccggcgtgaggccgccggtgacctggccggggaaa

SEQ ID NO: 695897 - DNA, 75 bp, synthetic construct
  source 1..75: mol_type = other DNA
aaaaaaaatagagttaagaatcagttatgattccaatggaaggacagtacaaacaacggtaacggatgatgaacg

SEQ ID NO: 695898 - DNA, 75 bp, synthetic construct
  source 1..75: mol_type = other DNA
atacaaaaaagatttctaagcttgaacggcatacatacatggacgagagcggagagattaaacaagactctaaga

SEQ ID NO: 695899 - DNA, 75 bp, synthetic construct
  source 1..75: mol_type = other DNA
cgccactcatcagagttgaaaccgccaccggtgagctggcgaaaacgcagcgccgcagcctggcggatgcgcttc

SEQ ID NO: 695900 - DNA, 75 bp, synthetic construct
  source 1..75: mol_type = other DNA
tagaaatgaatacagaatactgcaggacttgagtaatttagagtctcttgaaggagaagaacgaaaaaaggcaat

SEQ ID NO: 695901 - DNA, 75 bp, synthetic construct
  source 1..75: mol_type = other DNA
tttcgcggtatgaatctggtgggctatgacgcgatggcgatcggtaatcatgaatttgataatccgctcaccgta

SEQ ID NO: 695902 - DNA, 75 bp, synthetic construct
  source 1..75: mol_type = other DNA
atgataagacgttcttttcgtgaaatcagctcagcgacgatatttaatgatgttatcagaacggtgccccgtaaa

SEQ ID NO: 695903 - DNA, 75 bp, synthetic construct
  source 1..75: mol_type = other DNA
aatcaattctttgaaaaagtctggagcgatagcagtgccgatgtcgcaaccaacactttatatcaaaatatatcg

SEQ ID NO: 695904 - DNA, 75 bp, synthetic construct
  source 1..75: mol_type = other DNA
acttcatacattcttgacaccactaaaaacaaagtaaccattgcatatatttttaccctgattttgtttttttga

SEQ ID NO: 695905 - DNA, 75 bp, synthetic construct
  source 1..75: mol_type = other DNA
cagggggagagagcgtaacgtacacgctgcggaatattccggctgaacttgaccgggtgatctccgatctggcga

SEQ ID NO: 695906 - DNA, 75 bp, synthetic construct
  source 1..75: mol_type = other DNA
acagctgggataaggccttctgttttgtggacgggatttgtgagctgcacctttacagcaatggcgtggcagaag

SEQ ID NO: 695907 - DNA, 75 bp, synthetic construct
  source 1..75: mol_type = other DNA
atggtttcatcattcacatctgccccacgcagcggtttttactattttgcgcaaggctggaagctcgtctcgcaa

SEQ ID NO: 695908 - DNA, 75 bp, synthetic construct
  source 1..75: mol_type = other DNA
gttatttaaaaataattgagcaaaaaaaggagtttttgcataaaaataatttggtaatcattcgttgccatgatg

SEQ ID NO: 695909 - DNA, 75 bp, synthetic construct
  source 1..75: mol_type = other DNA
aacctgacagtgccattaatattaccaaacgttttgccaaaaatttgaaaatttataatcttcctggtattcaat

SEQ ID NO: 695910 - DNA, 75 bp, synthetic construct
  source 1..75: mol_type = other DNA
aaataattgagcaaaaaaaggagtttttgcataaaaataatttggtaatcattcgttgccatgatgtcatggatc

SEQ ID NO: 695911 - DNA, 75 bp, synthetic construct
  source 1..75: mol_type = other DNA
attttctattcttccgggcggctctatttgtgacgccttcagtgttgaattagaaaaatactggaatagcggtgc

SEQ ID NO: 695912 - DNA, 75 bp, synthetic construct
  source 1..75: mol_type = other DNA
ccgctattcgacacaaggtttttatacccttgatgatgttgcgtatcgtcgaatggaggggtacgaatatgatta

SEQ ID NO: 695913 - DNA, 75 bp, synthetic construct
  source 1..75: mol_type = other DNA
tcagcagaattacactattccgtattcaacagtgccaattttacaacgcgaagggcgtttcaaaattgacctgac

SEQ ID NO: 695914 - DNA, 75 bp, synthetic construct
  source 1..75: mol_type = other DNA
aattatataaaaattgctgatgcaactacacctggaagtgtgaaggctattgcaactattactttctcatatcaa

SEQ ID NO: 695915 - DNA, 75 bp, synthetic construct
  source 1..75: mol_type = other DNA
gtgcgttgtaaagaaacaggaattcaattttcaattcttccaggcggttcgatttgcgaattattctccgcagaa

SEQ ID NO: 695916 - DNA, 75 bp, synthetic construct
  source 1..75: mol_type = other DNA
tgaatgcccgccaaagcgtcaacgcttcccggcaggacggaacccgcacaccgtcccgcagtggttatagcccca

SEQ ID NO: 695917 - DNA, 75 bp, synthetic construct
  source 1..75: mol_type = other DNA
ttatttctgtattatctttcccctcttttagtcagtcaactgaatcacttgactcttcaaaagagaaaattacat

SEQ ID NO: 695918 - DNA, 75 bp, synthetic construct
  source 1..75: mol_type = other DNA
cgctaggcaagcaagagccgggactgtacctcgtcgaggcgatggttggtgggtatcgggcgacgacggtggtgt

SEQ ID NO: 695919 - DNA, 75 bp, synthetic construct
  source 1..75: mol_type = other DNA
tacagttttcagaacgccgggatcaaagttgccgttcctcagctggatatccgggtgaaaacggacaaaacccat

SEQ ID NO: 695920 - DNA, 75 bp, synthetic construct
  source 1..75: mol_type = other DNA
taatgcaaaacgctgtaaatgcagaatcatatgaagcaggagttaattttactcaaaatgctgcgcgtaataata

SEQ ID NO: 695921 - DNA, 75 bp, synthetic construct
  source 1..75: mol_type = other DNA
atggatacccaacgattccaatcccaatttcattggcatttatcgtttaaattttctggcgcgatagcagcgtgc

SEQ ID NO: 695922 - DNA, 75 bp, synthetic construct
  source 1..75: mol_type = other DNA
gaagagatgagctttactctgcaaccggtgaccagcaatgagattgacagcgatgcgctgtatctcgatgaaatt

SEQ ID NO: 695923 - DNA, 75 bp, synthetic construct
  source 1..75: mol_type = other DNA
ttgtccctgtctcttgtgggaacagggcttgctaatgctgatgattcgcttccttccagtaactatgcgccgccc

SEQ ID NO: 695924 - DNA, 75 bp, synthetic construct
  source 1..75: mol_type = other DNA
gtgaaacagcacggcttgccggagtatcaaaaatgacggtaatacgcgtctgtagttctgctccacagacaacct

SEQ ID NO: 695925 - DNA, 75 bp, synthetic construct
  source 1..75: mol_type = other DNA
cttcaaccgctgaacaggatgcacttcgttcaaaaaacaggctaaaagaattcgctgcacttcatggccatcgaa

SEQ ID NO: 695926 - DNA, 75 bp, synthetic construct
  source 1..75: mol_type = other DNA
gccacgctgccgcactatgacgctggcggtaagttgatgctacccaccactcgcgacatgcatattcatctcgac

SEQ ID NO: 695927 - DNA, 75 bp, synthetic construct
  source 1..75: mol_type = other DNA
aaaaatagaacgcaaacaagctaatgatgaaccatttatcatgcagcaatcaccgataaatgattatgcgcaaat

SEQ ID NO: 695928 - DNA, 75 bp, synthetic construct
  source 1..75: mol_type = other DNA
catcggaagcgacgggggatggcagtattgcgctgggcagcagaacttttgctaaaggcgaattgtcagtatcgc

SEQ ID NO: 695929 - DNA, 75 bp, synthetic construct
  source 1..75: mol_type = other DNA
gcttcatggccaccgaattgctggctggtatgtagaaaatgcttcaggcgcatccctgaatcgtccggagctcgc

SEQ ID NO: 695930 - DNA, 75 bp, synthetic construct
  source 1..75: mol_type = other DNA
aaccggagaagtgattgatcagggtacgctggaccacctgaccgggcaattgaccgcatttggtgagtttattca

SEQ ID NO: 695931 - DNA, 75 bp, synthetic construct
  source 1..75: mol_type = other DNA
gcgaaatacattacatcggtcattatttggttttcccccagcaccagcacatgcattctgcgcttgatgtgttca

SEQ ID NO: 695932 - DNA, 75 bp, synthetic construct
  source 1..75: mol_type = other DNA
ttgcggcacttgcagctttttctatgacaactgcaagtgctgtaaccttaagtggcacccctgtagatgttgatg

SEQ ID NO: 695933 - DNA, 75 bp, synthetic construct
  source 1..75: mol_type = other DNA
tttagaccgttgcaaaacggaaggtttgatgattgataagtgctacatagttagcagtaataatttaattaaccg

SEQ ID NO: 695934 - DNA, 75 bp, synthetic construct
  source 1..75: mol_type = other DNA
gcacgtgggaattaaaaaccctgctgctgggtgcgctaacccgcaggctcaaggaagacgaggcgggcgaggctc

SEQ ID NO: 695935 - DNA, 75 bp, synthetic construct
  source 1..75: mol_type = other DNA
gacatctggtacaatttgagtcaatgggcctgcgttttggtcgcgatgttaatgcctataccagctatgacgaaa

SEQ ID NO: 695936 - DNA, 75 bp, synthetic construct
  source 1..75: mol_type = other DNA
caggagatactaaagacgccatattgccgcagagtcagggagatgtgagccagctcaccataaaaaagccgtatg

SEQ ID NO: 695937 - DNA, 75 bp, synthetic construct
  source 1..75: mol_type = other DNA
cccgttctgtagttgctcgacaatacccatgttacgtggattgttgtcagcgaaagccgggttttgtcagcgcca

SEQ ID NO: 695938 - DNA, 75 bp, synthetic construct
  source 1..75: mol_type = other DNA
gctgggttggggggggcggcgcatcacaatttcttccccgtttagtcgggtacggtcagtcgatgcgtttactgt

SEQ ID NO: 695939 - DNA, 75 bp, synthetic construct
  source 1..75: mol_type = other DNA
gcgcccacgttatttggttgagttggctcgcgctctaaagtgcaaaccagaatggcttttgtttggggatgaccc

SEQ ID NO: 695940 - DNA, 75 bp, synthetic construct
  source 1..75: mol_type = other DNA
aggaattactcgagtacatgtcaatgcttcgagacgacatgaatgctctcacggttgcattttcatatctggctt

SEQ ID NO: 695941 - DNA, 75 bp, synthetic construct
  source 1..75: mol_type = other DNA
gtttgattggaactttagggttaccaaaagaatacgatattgtacaagcgcagatagaaagaatagaattctgcc

SEQ ID NO: 695942 - DNA, 75 bp, synthetic construct
  source 1..75: mol_type = other DNA
aaacgatggcactggaaaatacgacattcaagtgtttcataactatattgccgcaggcaaaaatgccaatggaca

SEQ ID NO: 695943 - DNA, 75 bp, synthetic construct
  source 1..75: mol_type = other DNA
ataaatggttgctggtgcttagcggaggtttatgtgccgttgctgcttcgatgtcctttagtttactggctgagg

SEQ ID NO: 695944 - DNA, 75 bp, synthetic construct
  source 1..75: mol_type = other DNA
tgcctacgggttatggcaagaccgccgccttcgcttatccattgatttatgagtcccgcgctggcgttggcctgt

SEQ ID NO: 695945 - DNA, 75 bp, synthetic construct
  source 1..75: mol_type = other DNA
gggcagaatgcttttctcaaagcctgccgcgagtttctgatttgtgatgagaagaccatgcaccgcatcaacagg

SEQ ID NO: 695946 - DNA, 75 bp, synthetic construct
  source 1..75: mol_type = other DNA
cggtgtgacggcctctgttgagggtgggtatacctttgaagcgggaacatttagcggcagcgaagggacgctgaa

SEQ ID NO: 695947 - DNA, 75 bp, synthetic construct
  source 1..75: mol_type = other DNA
gaacctacgttcggaatgtccaaggctttggctcatcagttagaattggatgttacaaatattgttgcttctgat

SEQ ID NO: 695948 - DNA, 75 bp, synthetic construct
  source 1..75: mol_type = other DNA
acttgttcttacaggctctaaaacggtactattcttaagtttattgtttttatgtgttacttttacaaaaattag

SEQ ID NO: 695949 - DNA, 75 bp, synthetic construct
  source 1..75: mol_type = other DNA
ggcagcgaagggacgctgaatacctggtacgtccagccacaggcgcaaatcacctggatgggtgtgaaagattcc

SEQ ID NO: 695950 - DNA, 75 bp, synthetic construct
  source 1..75: mol_type = other DNA
ccgggctgccgttggtctggtcaatgcgctgccggagaatgaaaagacattggtgatggtggacagcataaagat

SEQ ID NO: 695951 - DNA, 75 bp, synthetic construct
  source 1..75: mol_type = other DNA
ttcatcctttttaatacctttagagtttgataaaaatatagatctcaaaaatagaaccttagcaccatttaccaa

SEQ ID NO: 695952 - DNA, 75 bp, synthetic construct
  source 1..75: mol_type = other DNA
gcgataaaccatcctaacttccctagcaatatggatttttccttacgaacagtttttacaattgaacaatctaac

SEQ ID NO: 695953 - DNA, 75 bp, synthetic construct
  source 1..75: mol_type = other DNA
ggtatgggccaactggaagctatgcgccatgctgattttacgcgactgggtgaaagcccggctttccgtcagcta

SEQ ID NO: 695954 - DNA, 75 bp, synthetic construct
  source 1..75: mol_type = other DNA
gtaacgcagatttcaaacgctacggagactccggggagtttcgtcaattgtggtgtggagagtcgaagccaacgg

SEQ ID NO: 695955 - DNA, 75 bp, synthetic construct
  source 1..75: mol_type = other DNA
ctgacgttgagcgactgagccgcgatcagcggcacgccaacgcagagtggttctccagcacgcccggcgctgttc

SEQ ID NO: 695956 - DNA, 75 bp, synthetic construct
  source 1..75: mol_type = other DNA
gaaacagacaacggcgagcgggagaaagcgcagcgccgcagcctggcggagaagctgcagcaggaagggagcgag

SEQ ID NO: 695957 - DNA, 75 bp, synthetic construct
  source 1..75: mol_type = other DNA
ggccaaaacgttactggcggcggcaccggttgctggttctgcaagtgtcggcgatcagattatggcgctgccgga

SEQ ID NO: 695958 - DNA, 75 bp, synthetic construct
  source 1..75: mol_type = other DNA
atgccatcagtgtgatggctgcggcgctgaacacacatgatacaggaggcactatgccgcaattaactgcaacgg

SEQ ID NO: 695959 - DNA, 75 bp, synthetic construct
  source 1..75: mol_type = other DNA
ggatgagcggcgtgaagcttcccggctcgtataccgtctggatacgtgtggtgtcagtctgcaccgtcgtcagcc

SEQ ID NO: 695960 - DNA, 75 bp, synthetic construct
  source 1..75: mol_type = other DNA
tcatcgtggcggtagacatagtgcgcatcctccgcgatgcggttaccggggaatatcagaaaaatgtcatggtta

SEQ ID NO: 695961 - DNA, 75 bp, synthetic construct
  source 1..75: mol_type = other DNA
gcgcggggagtatgatgaatggggcaaccagcttaatgaagagaacccgtattacctgcaccagccataccgtct

SEQ ID NO: 695962 - DNA, 75 bp, synthetic construct
  source 1..75: mol_type = other DNA
cacgctgcattgcgcactatgtattgccgaagcaaagcttacagcaagccgtcactgttatttcggcagtttgca

SEQ ID NO: 695963 - DNA, 75 bp, synthetic construct
  source 1..75: mol_type = other DNA
gttcagtggggagacggcgcgaactcacgctgcattgcgcactatgtattgccgaagcaaagcttacagcaagcc

SEQ ID NO: 695964 - DNA, 75 bp, synthetic construct
  source 1..75: mol_type = other DNA
gaacacggcgacaatacagcgccagttatgggtatgaaaatcctcaccagcgcaaagctatatcaacctgtagtg

SEQ ID NO: 695965 - DNA, 75 bp, synthetic construct
  source 1..75: mol_type = other DNA
ccattacgctctctggtttgccgccggaacgactggcggcggcgtcgagtctctccaactttacgcgaacgctgg

SEQ ID NO: 695966 - DNA, 75 bp, synthetic construct
  source 1..75: mol_type = other DNA
tcttgttgctctaaaacgtgcggggaaaatcaccaagcaagaagttgcgaagttgtcagtcaattacctgcgaga

SEQ ID NO: 695967 - DNA, 75 bp, synthetic construct
  source 1..75: mol_type = other DNA
tcatacaccacgtcagcggtgggacgggatactggttactgcagctgctggacaaagtctctccgtcccagtggg

SEQ ID NO: 695968 - DNA, 75 bp, synthetic construct
  source 1..75: mol_type = other DNA
ggtaatatcagatcacaccgctggaatcctctggactgcgttaatcgttctgatattcagcgttctggagatttg

SEQ ID NO: 695969 - DNA, 75 bp, synthetic construct
  source 1..75: mol_type = other DNA
tattaaggtcgttgctgaaggtatcgaaactatagagcaggcaaaagccatgaaaaataaaggaatagaatattt

SEQ ID NO: 695970 - DNA, 75 bp, synthetic construct
  source 1..75: mol_type = other DNA
tcattcttcagaatgaaggacaagggcaaaaaagcgatatgtacggtcaggaaggatggaccacattcactgaaa

SEQ ID NO: 695971 - DNA, 75 bp, synthetic construct
  source 1..75: mol_type = other DNA
aaggagcgttttcacctggaacagaaagccaaaggtcataatgtaccggacgttcttgtttccatcagcgccata

SEQ ID NO: 695972 - DNA, 75 bp, synthetic construct
  source 1..75: mol_type = other DNA
tgcaggtgctcagattgattataacttttccactatttttattttgtatgacaatgggaatgattgagggattgg

SEQ ID NO: 695973 - DNA, 75 bp, synthetic construct
  source 1..75: mol_type = other DNA
acagaaagatacaaaagtaggtattttcaagttgtttttcgtttagatatattaaaaaaactatatccagttgaa

SEQ ID NO: 695974 - DNA, 75 bp, synthetic construct
  source 1..75: mol_type = other DNA
aacttctatctgctaaatcgccacaatcatttaaagttcacggattatgtattgaggatgatgcgccacgattta

SEQ ID NO: 695975 - DNA, 75 bp, synthetic construct
  source 1..75: mol_type = other DNA
gtgaaaaaatgccagcaggcaggccaccactacaaagcagactccatcagagactcatgggcatcggcattgaga

SEQ ID NO: 695976 - DNA, 75 bp, synthetic construct
  source 1..75: mol_type = other DNA
agttatttatggcaatgctcgtcttgctactgatatggacctggctaaatcaacctttttcccaacagataaaga

SEQ ID NO: 695977 - DNA, 75 bp, synthetic construct
  source 1..75: mol_type = other DNA
ttactgccagaagagattgtcgagcttcgggattataaaaataaaatgggtaatatggctgttcgtgaaatcgta

SEQ ID NO: 695978 - DNA, 75 bp, synthetic construct
  source 1..75: mol_type = other DNA
cgaaacccgtacagaaaggcggcgaattgatgccgtggggctggcgctgctggtgattggtatcggtagcctgca

SEQ ID NO: 695979 - DNA, 75 bp, synthetic construct
  source 1..75: mol_type = other DNA
tgctgaatcagaagctggcagattatgtcccaatgatgtcccatagtcaccaaagtgacacaagaggtctattaa

SEQ ID NO: 695980 - DNA, 75 bp, synthetic construct
  source 1..75: mol_type = other DNA
tagttacagttaattactacatgacgacaattgcaggtatgtttcaatttgcagctgacaacggatacacagaat

SEQ ID NO: 695981 - DNA, 75 bp, synthetic construct
  source 1..75: mol_type = other DNA
acggctcctggtgctatcgtgtcctcccgcgtttatcacgttcatctcttgttcacgaagcaagaacgaaccagc

SEQ ID NO: 695982 - DNA, 75 bp, synthetic construct
  source 1..75: mol_type = other DNA
tttgaagctgaactggttgaaatggatggcgaaccagatcacgtccatttgttaattaactatcctcccaaactg

SEQ ID NO: 695983 - DNA, 75 bp, synthetic construct
  source 1..75: mol_type = other DNA
tgatcgagtgggcagcccgaaagatggcattcaattgttcggcatctggcgcttccggctgcaaaaccagcagat

SEQ ID NO: 695984 - DNA, 75 bp, synthetic construct
  source 1..75: mol_type = other DNA
atcatgggggcggcgctggatactttcgacgatgagccgttacctgacgacagcgcgttttatttactgaataac

SEQ ID NO: 695985 - DNA, 75 bp, synthetic construct
  source 1..75: mol_type = other DNA
caaactgttaacaagcttggctaaacttcatgcaaaaaatccgttgagctctaccttaacacaaatatggaaaga

SEQ ID NO: 695986 - DNA, 75 bp, synthetic construct
  source 1..75: mol_type = other DNA
atgatgatgccataaagaatatattggatattaaagtatttgacagtgtaagtaaaaagaaagtgttagtcagcc

SEQ ID NO: 695987 - DNA, 75 bp, synthetic construct
  source 1..75: mol_type = other DNA
gtgttcttcccggagttcgcccacgccacgccaagggggcagttagacttgcatccaacaggaagcgttaacggc

SEQ ID NO: 695988 - DNA, 75 bp, synthetic construct
  source 1..75: mol_type = other DNA
gttcaatcgatcgcatcgcagccttgggcggcggtattgcggtccagcaccgtatggcctatcagggggaatatt

SEQ ID NO: 695989 - DNA, 75 bp, synthetic construct
  source 1..75: mol_type = other DNA
gaaatgctggtattttcagcggcagactttgaagactttcgccagccacggccggatatgcctcctgaaatggaa

SEQ ID NO: 695990 - DNA, 75 bp, synthetic construct
  source 1..75: mol_type = other DNA
gccagacaggtggtcgatcgatggcacctgctaaaaaatattggcgatgcgcttgaacgaatgagctactctcgg

SEQ ID NO: 695991 - DNA, 75 bp, synthetic construct
  source 1..75: mol_type = other DNA
tcagggtggccagatgcactgtggcacgtctcatggcagttatgggacttgccggtgttctccggggtaaaaagg

SEQ ID NO: 695992 - DNA, 75 bp, synthetic construct
  source 1..75: mol_type = other DNA
ccgtgcgtctggcctacaatctcttcactcagaagcccaaagaagagaaagaagacttccttaattggactcgtt

SEQ ID NO: 695993 - DNA, 75 bp, synthetic construct
  source 1..75: mol_type = other DNA
gagataacccgtgatgctaaaggccacccaaccggtttattgctggcaaaacccaatgcggggattctctatgca

SEQ ID NO: 695994 - DNA, 75 bp, synthetic construct
  source 1..75: mol_type = other DNA
tcattcatacaattcgtgattattatttcatgtgcattaagggaaatttaaatcacacgggatgtagcaatactc

SEQ ID NO: 695995 - DNA, 75 bp, synthetic construct
  source 1..75: mol_type = other DNA
ctgcaaacacacctacttatactctcgctgctaatgctggcaactggtttattcagaagcgcgattatgataatg

SEQ ID NO: 695996 - DNA, 75 bp, synthetic construct
  source 1..75: mol_type = other DNA
taagttaggcgttatgtatggcggcactggtgctggaaacgcagcagaagccagaaaaaacctaatggttatgca

SEQ ID NO: 695997 - DNA, 75 bp, synthetic construct
  source 1..75: mol_type = other DNA
gaaggcaacgaaagtaagctgacgctcatcggcaccagcggcaacgcgccgcgcagtatcagcttcagcgggccg

SEQ ID NO: 695998 - DNA, 75 bp, synthetic construct
  source 1..75: mol_type = other DNA
cagtacctacaaaccttgaacaaactaaaaccaatatgcaaatcccgtttgcaggtattgcgcattgggttgatt

SEQ ID NO: 695999 - DNA, 75 bp, synthetic construct
  source 1..75: mol_type = other DNA
agatcaggggcgacggtaaggcgtgggcgacaactcacctacagcgtaatgatataaacgtatatgcaggattga

SEQ ID NO: 696000 - DNA, 75 bp, synthetic construct
  source 1..75: mol_type = other DNA
gtggtgacggttctgttattaacggctgtttcgttggtactgtcacccgttcactgtatacctacgcctataaca

SEQ ID NO: 696001 - DNA, 75 bp, synthetic construct
  source 1..75: mol_type = other DNA
acacttcaggcggatgaggatgaccggcaactggctggtcgtttattgccattgttggctgataaagccggacgc

SEQ ID NO: 696002 - DNA, 75 bp, synthetic construct
  source 1..75: mol_type = other DNA
acgcggcatatccaggcgatcctcgggcatgagaagctggagacgacgcaggtctacacgcgggttgccatcggt

SEQ ID NO: 696003 - DNA, 75 bp, synthetic construct
  source 1..75: mol_type = other DNA
ttgccggcaaaggtgataatatttatataaatcaacttaaaaaaatgtacccctcagttaaatttattggacatg

SEQ ID NO: 696004 - DNA, 75 bp, synthetic construct
  source 1..75: mol_type = other DNA
tcggcgtctgtttaacttacgatgattttaaaaaattcaagacagtacttatttcatctttacaaaacctctatg

SEQ ID NO: 696005 - DNA, 75 bp, synthetic construct
  source 1..75: mol_type = other DNA
cgtgttactcgcatcattaacggcggtctgaacggtattgaggatcgtaaggtccgatacaacaaggcgcgggcg

SEQ ID NO: 696006 - DNA, 75 bp, synthetic construct
  source 1..75: mol_type = other DNA
cacagccgataccggtttttgccgaaatgtcggctctcaatccctttttcattctgccgcaggcgctatcagtac

SEQ ID NO: 696007 - DNA, 75 bp, synthetic construct
  source 1..75: mol_type = other DNA
ttgtggcgatgaataatccccgttttccagttgatgtattaaaggcgaggctgaaacgtgatcctttgctggcgt

SEQ ID NO: 696008 - DNA, 75 bp, synthetic construct
  source 1..75: mol_type = other DNA
cattattgatggctatatccgcagtgatgattcctctattcgtcaggtcggtgctggaggacaactcacctacaa

SEQ ID NO: 696009 - DNA, 75 bp, synthetic construct
  source 1..75: mol_type = other DNA
acactgaaaatgtcaaaaaagcgctgatgataataaatcctgatgcatattattggggtctaataaatgatgaag

SEQ ID NO: 696010 - DNA, 75 bp, synthetic construct
  source 1..75: mol_type = other DNA
cttcaactcgaccaggaaatatctcgcctgttacctgagtggtctctgtgcaatctggtctgccagttacaggct

SEQ ID NO: 696011 - DNA, 75 bp, synthetic construct
  source 1..75: mol_type = other DNA
acggggcggctgtacagtgcaggcaacctgctgcttgacgctcaggacttcagtggtcaggggcaggtggtggcc

SEQ ID NO: 696012 - DNA, 75 bp, synthetic construct
  source 1..75: mol_type = other DNA
cctcagctttagacgaaatatatggtggtatatgtaaaaaggcgcatgctgccacagagttagcaaaaggattac

SEQ ID NO: 696013 - DNA, 75 bp, synthetic construct
  source 1..75: mol_type = other DNA
gtaagcgcacgcttgttaacggttatttcatcgctgaactgaccggccggggtcaggatgtggcggaaggccgcg

SEQ ID NO: 696014 - DNA, 75 bp, synthetic construct
  source 1..75: mol_type = other DNA
cggccttgtttgggacctggcttattccgcgctattccgataaaaccggcgaacggcgtaatgtcgcagcgctga

SEQ ID NO: 696015 - DNA, 75 bp, synthetic construct
  source 1..75: mol_type = other DNA
gtcatcctgtttacctctttctcagggagtttagtctccaggatttccggggcggttcatcccggctggttctgg

SEQ ID NO: 696016 - DNA, 75 bp, synthetic construct
  source 1..75: mol_type = other DNA
cattcgagaaggcatgaaaccgagcaatgttcctggaactgctggagatattggcggttctataggatccgagct

SEQ ID NO: 696017 - DNA, 75 bp, synthetic construct
  source 1..75: mol_type = other DNA
gtgccccaggcgcaatcggcccttatgttcagggcgttgatttaggcagcatggtcttcacctccgggcaaatac

SEQ ID NO: 696018 - DNA, 75 bp, synthetic construct
  source 1..75: mol_type = other DNA
agcgtcttgtcattctgcggtcgctggcggattacaacggcgaactgggcgaatccgtgcttcaggactgcctcg

SEQ ID NO: 696019 - DNA, 75 bp, synthetic construct
  source 1..75: mol_type = other DNA
aggtcattacataagacacgtaataattcagtgtttgtatttttacattctggtgaatactggacggccatttat

SEQ ID NO: 696020 - DNA, 75 bp, synthetic construct
  source 1..75: mol_type = other DNA
tggcgtgcttgatgttagtggtggtacggcaacaaatgttacccagcacgatggtgcaattttaaaaactaacac

SEQ ID NO: 696021 - DNA, 75 bp, synthetic construct
  source 1..75: mol_type = other DNA
tgggtcaggacttcgccacaaaggttaattccggtgggcaatataccctcggtcggtcaaaagatgagtttcagg

SEQ ID NO: 696022 - DNA, 75 bp, synthetic construct
  source 1..75: mol_type = other DNA
tgacaaccagtgaactttccggcagcggtaatttctacctgcataccaacgttgcaggctcccggggcgatcaac

SEQ ID NO: 696023 - DNA, 75 bp, synthetic construct
  source 1..75: mol_type = other DNA
gcggtacgaatagtgaaggggcattctccatccacaatcacgtggcagacaatgtgttgctggaaaacggtggtc

SEQ ID NO: 696024 - DNA, 75 bp, synthetic construct
  source 1..75: mol_type = other DNA
atggcacgttaatcgagagtggcaatcagtacatttataaggatggtaccagcaatggcacgataattaagaatg

SEQ ID NO: 696025 - DNA, 75 bp, synthetic construct
  source 1..75: mol_type = other DNA
ttcgccgttcagtactttccttattgatatctgccttgatatatgcccagcctggagaggctgctttcacatcaa

SEQ ID NO: 696026 - DNA, 75 bp, synthetic construct
  source 1..75: mol_type = other DNA
gacggtaatttcgtcaatgatttgtcgggcagacgtggaatataccaggcaggtattaaagcctcattcagcagt

SEQ ID NO: 696027 - DNA, 75 bp, synthetic construct
  source 1..75: mol_type = other DNA
acgattgaaggcggaactcagtctctgaatagtaagtcaacggcaaaaaatactcagatctattctggtggtacg

SEQ ID NO: 696028 - DNA, 75 bp, synthetic construct
  source 1..75: mol_type = other DNA
gattattaaagataaaggaacaatgtcagttttaaccaatgctaaagctgatgcgacccgaatagataatggcgg

SEQ ID NO: 696029 - DNA, 75 bp, synthetic construct
  source 1..75: mol_type = other DNA
tgagcaggatgcggcgaacaatatcctgctggcaaatggcggcgtgttaaccgtggagtcagacaccacttccgc

SEQ ID NO: 696030 - DNA, 75 bp, synthetic construct
  source 1..75: mol_type = other DNA
tcaagcagtgtagaaaatactaccattaagaatggaggcgagcaaagaacagttaagagccatgcgctgaacacc

SEQ ID NO: 696031 - DNA, 75 bp, synthetic construct
  source 1..75: mol_type = other DNA
gaaccaacagttatggtgatgttttctacatcaggaattcagaagctaaaaatgtagtgctggaaaacgctggct

SEQ ID NO: 696032 - DNA, 75 bp, synthetic construct
  source 1..75: mol_type = other DNA
cggcgctgacattgctgtccgcgggcattggtattggcctttccgggctactttcgccagtactggcaatcgttg

SEQ ID NO: 696033 - DNA, 75 bp, synthetic construct
  source 1..75: mol_type = other DNA
ctggtcattgccaggcaggataaaacgtcaatcaacgctggcatgctctactttttatcgcccacgccggatcgg

SEQ ID NO: 696034 - DNA, 75 bp, synthetic construct
  source 1..75: mol_type = other DNA
ctgtctgtggtattacggaagtgcgtgacgggcgatgatatgcgtccgatgcttgagcagatggtgaaggaggcg

SEQ ID NO: 696035 - DNA, 75 bp, synthetic construct
  source 1..75: mol_type = other DNA
cgcggggttaacccgagggaaacggccagcgtcatcagtaagcgtcttgatgtgagcatgtcgaaggccaagacc

SEQ ID NO: 696036 - DNA, 75 bp, synthetic construct
  source 1..75: mol_type = other DNA
tatattgatattgactccaatgatacagaccatattactattggtatcgacaaccaagaaccaatagaattacct

SEQ ID NO: 696037 - DNA, 75 bp, synthetic construct
  source 1..75: mol_type = other DNA
aataagcacctgtattaaacatctacttgagcttataaaaaacgccatacgaggaaacgacaatcctgatagatt

SEQ ID NO: 696038 - DNA, 75 bp, synthetic construct
  source 1..75: mol_type = other DNA
gatggttgccctgctggtgatggacaacgctttttggttcatcgtgctgtttgaaatgatgtcgctgtcttcctg

SEQ ID NO: 696039 - DNA, 75 bp, synthetic construct
  source 1..75: mol_type = other DNA
cccaaacttccagtgccattttactgatccactttatatgtgttgctgggatgaagaatctccttttggtagcga

SEQ ID NO: 696040 - DNA, 75 bp, synthetic construct
  source 1..75: mol_type = other DNA
aaagatattagtcagaatatagcttcttctttgcctgatggggatttccctttaggggagctttcgcattacttg

SEQ ID NO: 696041 - DNA, 75 bp, synthetic construct
  source 1..75: mol_type = other DNA
gggcagtggtggttcaggttcaggctccggtggttcatccggtagcggtggctccggctcgggctccggcggttc

SEQ ID NO: 696042 - DNA, 75 bp, synthetic construct
  source 1..75: mol_type = other DNA
accagattgcctccgccaggctgacaacgttcagcgactggaaggctattagcgatgccgcccgggcagacctga

SEQ ID NO: 696043 - DNA, 75 bp, synthetic construct
  source 1..75: mol_type = other DNA
aatgatgtcgctgtcttcctggtttctggtcattgccaggcaggataaaacgtcgatcaacgctggcatgctcta

SEQ ID NO: 696044 - DNA, 75 bp, synthetic construct
  source 1..75: mol_type = other DNA
cgattttgccagtttccgcacgctttcactttctccggggctggcgtcggcggtgttcctgctggccttttcggt

SEQ ID NO: 696045 - DNA, 75 bp, synthetic construct
  source 1..75: mol_type = other DNA
gcaaaatttagacgcgataatgtaaaagaaataatttctactttagtcgataacgaagttgaccgttctcaaaat

SEQ ID NO: 696046 - DNA, 75 bp, synthetic construct
  source 1..75: mol_type = other DNA
ataacgattattacaatcaggcaataagagaggaaccgatagaccttctggacagatcgttttcctccagttcat

SEQ ID NO: 696047 - DNA, 75 bp, synthetic construct
  source 1..75: mol_type = other DNA
ctgatttatttccagaggacatgggggctggtgctttatttcctctgtgtgatgagcctgtttttttaaataatt

SEQ ID NO: 696048 - DNA, 75 bp, synthetic construct
  source 1..75: mol_type = other DNA
cctgccgctctgattctgactactgcagtgttgtcctgtctgccgggcgcaccttcggctcccggctgcctggcg

SEQ ID NO: 696049 - DNA, 75 bp, synthetic construct
  source 1..75: mol_type = other DNA
gtggcgcacgtcttcggggaacgcactctggccacactggagcgtgttctgagcctgctgtcggcctttgaggtc

SEQ ID NO: 696050 - DNA, 75 bp, synthetic construct
  source 1..75: mol_type = other DNA
tatggaaacgatactaacatttatgctgaaagtgacgttgatgtagtcatatgtcttgatgatgtctactacagt

SEQ ID NO: 696051 - DNA, 75 bp, synthetic construct
  source 1..75: mol_type = other DNA
aaaaggcttcaaaatcgccagacggaatatcaaggtaatgactccaacttattgatagtgttttatgttcagata

SEQ ID NO: 696052 - DNA, 75 bp, synthetic construct
  source 1..75: mol_type = other DNA
tacggtaacggaattcgatgagagcgggaaaagcgaaccaacgggcttatttacctggtacggtaaagataaaaa

SEQ ID NO: 696053 - DNA, 75 bp, synthetic construct
  source 1..75: mol_type = other DNA
agcgtgcgtttaatcgtgcggcaccggctcctgtccccactccggcggcctccggtagttcaccacagaccaccg

SEQ ID NO: 696054 - DNA, 75 bp, synthetic construct
  source 1..75: mol_type = other DNA
actgcacctgctaacgctatacgtggaacattactggactgtggccgcgccgcagaatatggcgcataaaaaacg

SEQ ID NO: 696055 - DNA, 75 bp, synthetic construct
  source 1..75: mol_type = other DNA
gaccgactgctcaaccgaagtgaaaaaaggcgaagtggtggtggtttgcggcccgtctggttccggcaaatcaac

SEQ ID NO: 696056 - DNA, 75 bp, synthetic construct
  source 1..75: mol_type = other DNA
tggaagatcaacgtttattggcatctgcagctctttttcgtcaattacatgaaaataagaaagatatatacgatg

SEQ ID NO: 696057 - DNA, 75 bp, synthetic construct
  source 1..75: mol_type = other DNA
taaataaaaaaagagagttggttgtagtatctgaactttctggtggggttaaaaaatcagctcgaaataagctat

SEQ ID NO: 696058 - DNA, 75 bp, synthetic construct
  source 1..75: mol_type = other DNA
catgcggtgactagtcagtcagtagcaaatactctcaaaaaactaggagatgactcagtattaacacaaccagta

SEQ ID NO: 696059 - DNA, 75 bp, synthetic construct
  source 1..75: mol_type = other DNA
tgacgccggacgcgctgctcgccagtaacgatgttcacgctaacagccgcgcctattttctcgctgagaagcgtg

SEQ ID NO: 696060 - DNA, 75 bp, synthetic construct
  source 1..75: mol_type = other DNA
gagcagcatgacgattaccgctggctgacgccggacgcgctgctcgccagtaacgatgttcacgctaacagccgc

SEQ ID NO: 696061 - DNA, 75 bp, synthetic construct
  source 1..75: mol_type = other DNA
gtggtgctggctgccgcaggtatcttcctgatgatgtgcggtgtctggttagggttcggtggtgtactcgatccc

SEQ ID NO: 696062 - DNA, 75 bp, synthetic construct
  source 1..75: mol_type = other DNA
attttaccagccctgcgaatcctgctgaaagcacacagctttttccatcactgtcatcactctgtcatctttcca

SEQ ID NO: 696063 - DNA, 75 bp, synthetic construct
  source 1..75: mol_type = other DNA
ccaggatacatctattgtctgattgaacatcaaagcacctcaaacaaactgatcgcatttcgcatgatgcgttaa

SEQ ID NO: 696064 - DNA, 75 bp, synthetic construct
  source 1..75: mol_type = other DNA
gagctgcggctccctttttatttgctcattctgcaaacggttgttttatacactcattcggtgtatcttttcgcc

SEQ ID NO: 696065 - DNA, 75 bp, synthetic construct
  source 1..75: mol_type = other DNA
cagcataaggcgatgattgtcgccctgatcgtcatctgtatcaccgccgtagtggcggcgctggtaacgagaaaa

SEQ ID NO: 696066 - DNA, 75 bp, synthetic construct
  source 1..75: mol_type = other DNA
ccgttgagtggctggagttagcggtagagcagggttttcaggagtttcgacttcgaatgagtgaaaccaatatca

SEQ ID NO: 696067 - DNA, 75 bp, synthetic construct
  source 1..75: mol_type = other DNA
cgaagattttttgtacaagtgtgataaaaacattatagcttcaaatatcgccaacatactggaaaatcctctgac

SEQ ID NO: 696068 - DNA, 75 bp, synthetic construct
  source 1..75: mol_type = other DNA
gacgatgacaatcaccaccataataactccccagttccggatgatggcggtgatacgcctgttccgccagacgac

SEQ ID NO: 696069 - DNA, 75 bp, synthetic construct
  source 1..75: mol_type = other DNA
tactaacacgttatatcagaacatatccattatcagacgcggatttcgcgctgttggtgatactacccactcgct

SEQ ID NO: 696070 - DNA, 75 bp, synthetic construct
  source 1..75: mol_type = other DNA
gcactgctgacaggtaatggtcagtaccgtagagggattaactggacgacttttcacttcgcctgtgaactgtca

SEQ ID NO: 696071 - DNA, 75 bp, synthetic construct
  source 1..75: mol_type = other DNA
aagattggcggaaaagcattacctgatgccacatatgttgctcctatgagtagtgcgacatttcaaattccagcc

SEQ ID NO: 696072 - DNA, 75 bp, synthetic construct
  source 1..75: mol_type = other DNA
tagtaaacaggcccggcaactcgctcctggggaccatggtcagcgcctgaataccgaagcattacctgacgaatt

SEQ ID NO: 696073 - DNA, 75 bp, synthetic construct
  source 1..75: mol_type = other DNA
cctgtgttgaagtgtcaaacccgggcgatccaatagcaccagagcacttacaccggcttttcgagcggttctatc

SEQ ID NO: 696074 - DNA, 75 bp, synthetic construct
  source 1..75: mol_type = other DNA
cgatttctttctcttcaccttcaatgaatttatcttctgaagagagctgttcatctggaacaggttgtccagcat

SEQ ID NO: 696075 - DNA, 75 bp, synthetic construct
  source 1..75: mol_type = other DNA
caacgtggaaaccaagccgggccagggcttcccgactgactgggaaaaccaggaaaaatacaaaggcggctggat

SEQ ID NO: 696076 - DNA, 75 bp, synthetic construct
  source 1..75: mol_type = other DNA
ttcccaccgccacagagtatttggatgtgctggtatggcgctacatcgccgatttaattagttggggggcgattg

SEQ ID NO: 696077 - DNA, 75 bp, synthetic construct
  source 1..75: mol_type = other DNA
gttgtacaacatcatccaaactggaaagtcatgatttcgactgaccacaaattgatgcgcattgatacggggcac

SEQ ID NO: 696078 - DNA, 75 bp, synthetic construct
  source 1..75: mol_type = other DNA
tgcgcccggtgtttgatccgttgcgttatccggatatcggtcgccagctttctccggacgcgtgggatgatgttt

SEQ ID NO: 696079 - DNA, 75 bp, synthetic construct
  source 1..75: mol_type = other DNA
tgaccgccattttactgctctcgcctgtggttcataccattgccagtgattatctacgccagcgtaaactcggcg

SEQ ID NO: 696080 - DNA, 75 bp, synthetic construct
  source 1..75: mol_type = other DNA
aaaaactctctgatgtcgccctgcagggcgggcagtatctcgccggcagcgcgtttctgattggcaagggcacgt

SEQ ID NO: 696081 - DNA, 75 bp, synthetic construct
  source 1..75: mol_type = other DNA
tcttctcttatatcaatgctgtacttcagaagagagtaaccgtaacattactattttttataatgataattgttt

SEQ ID NO: 696082 - DNA, 75 bp, synthetic construct
  source 1..75: mol_type = other DNA
ggtctatgggggccaggtaaagcaagtaatgatacaaaagaagctgctggccgttgtgacctcgttgaaaccgat

SEQ ID NO: 696083 - DNA, 75 bp, synthetic construct
  source 1..75: mol_type = other DNA
cgataaaggcgagagaggagcgcaggggcctgcgggtccggcagggaagtctgccagcctggatgatattgccga

SEQ ID NO: 696084 - DNA, 75 bp, synthetic construct
  source 1..75: mol_type = other DNA
cgcgccgtcatatgtgggtgacattctggtgaaggcggactctgcaccgggaacgctgaataaatttctgatgga

SEQ ID NO: 696085 - DNA, 75 bp, synthetic construct
  source 1..75: mol_type = other DNA
aaggttttaaaagctttgactgtaatgggcaaaatataagacttgattcatttacaagtcttattggaggtaatg

SEQ ID NO: 696086 - DNA, 75 bp, synthetic construct
  source 1..75: mol_type = other DNA
tgaacacatgcaggagcataaagacttaatccagcgcaaagacttaagcgagcaaatagccgaactggttaccaa

SEQ ID NO: 696087 - DNA, 75 bp, synthetic construct
  source 1..75: mol_type = other DNA
aacacgcggacacaatatgcagagccgctggtcgaaagtcgctatctttacgacccgctgggccgcagggtggca

SEQ ID NO: 696088 - DNA, 75 bp, synthetic construct
  source 1..75: mol_type = other DNA
tttttaaggatgttgaaaaacaacaaattgaagcgctaaaaatccaattggaaaatataaaaaatttcaaagcat

SEQ ID NO: 696089 - DNA, 75 bp, synthetic construct
  source 1..75: mol_type = other DNA
aagaagtacagggtgaagtagaggtgttaaataataagattgctgactgtgacaatgagatacgttctaagctta

SEQ ID NO: 696090 - DNA, 75 bp, synthetic construct
  source 1..75: mol_type = other DNA
ccggcagccggaaaaccatgacgtggagccgttacggtcagttgctgagcttcactgactgttccggttatgtaa

SEQ ID NO: 696091 - DNA, 75 bp, synthetic construct
  source 1..75: mol_type = other DNA
cagacgcccctcaacagcgaaactggatgtgaacggatgggagcgggatgaggcaacaggaagaatacggcaatg

SEQ ID NO: 696092 - DNA, 75 bp, synthetic construct
  source 1..75: mol_type = other DNA
gtttgttgtgtcattttatgcaaatttaattataataaaaaaatatatatatctcgtgaaaccttcttggacttc

SEQ ID NO: 696093 - DNA, 75 bp, synthetic construct
  source 1..75: mol_type = other DNA
acatagcgaaacaattaagactgccatatcctattgaccaggccagtagtgcgcctaatgttttcaaaacattct

SEQ ID NO: 696094 - DNA, 75 bp, synthetic construct
  source 1..75: mol_type = other DNA
cacctgatacacaacctctatctacagatagacttagtgatgggatgaaatctctattttatttatctctcgtaa

SEQ ID NO: 696095 - DNA, 75 bp, synthetic construct
  source 1..75: mol_type = other DNA
tcgcgccagactataccgatgatgaactttatgagtggatgcgcgggaagatacgcgccattaatgacctgaagc

SEQ ID NO: 696096 - DNA, 75 bp, synthetic construct
  source 1..75: mol_type = other DNA
aattcgctaaaagtaactttcaccatttacgacgctgaaggctcagtggatgtctcttacgaaggcattttgccg

SEQ ID NO: 696097 - DNA, 75 bp, synthetic construct
  source 1..75: mol_type = other DNA
tcgatcttttttatacgccgggggagattctctacggcaaacgtgaaacccaacagatgccggaagtcgggcagc

SEQ ID NO: 696098 - DNA, 75 bp, synthetic construct
  source 1..75: mol_type = other DNA
gtccaataccagcgggcgcgatcttaatgacgctcagttgaaatatgccagcgatgtcgaaggccgtattcagca

SEQ ID NO: 696099 - DNA, 75 bp, synthetic construct
  source 1..75: mol_type = other DNA
cgttcatgctttgctacagctgcttctgccaggctgcgtcttttttatggctgtgtcgcttagccggctggttgg

SEQ ID NO: 696100 - DNA, 75 bp, synthetic construct
  source 1..75: mol_type = other DNA
aggctcgttggccgatggggatcctcatgctattggtctgggtatcatactggcgctgaaagagagctggtttct

SEQ ID NO: 696101 - DNA, 75 bp, synthetic construct
  source 1..75: mol_type = other DNA
tgcccaacaactgaagcaaacagccggaaccatcatgcaccgtttgataaatgcagtcgaatggtctgaacaaat

SEQ ID NO: 696102 - DNA, 75 bp, synthetic construct
  source 1..75: mol_type = other DNA
ccaagaaatgcatgaatggggagaagatgaaaatattgaaaaatcttggataaagtttttcgaagactataatgt

SEQ ID NO: 696103 - DNA, 75 bp, synthetic construct
  source 1..75: mol_type = other DNA
cgtggctacgccacgtgatcagagtcatcaacacctggcctgccaaccgcgtgaaagagttgttgccctggaacg

SEQ ID NO: 696104 - DNA, 75 bp, synthetic construct
  source 1..75: mol_type = other DNA
atacgccgccagaagttgagaaagcgatggaagctaaccaccgtcgcccggcgagtgtttataaggacccagcat

SEQ ID NO: 696105 - DNA, 75 bp, synthetic construct
  source 1..75: mol_type = other DNA
acacgccgccagaagttgagaaagcgatggaagctaatcaccgtcgcccggcgagtgtttataaggacccagcat

SEQ ID NO: 696106 - DNA, 75 bp, synthetic construct
  source 1..75: mol_type = other DNA
gccgggtagcgtgcagcgcgatcccaattcgctgaaagtaacgttcaccatttacgacgctgaaggttcagtaga

SEQ ID NO: 696107 - DNA, 75 bp, synthetic construct
  source 1..75: mol_type = other DNA
gaaaaggatgagattaatatacaagaacgtattgatggattcaatgccgacggatttattggattttactcaaca

SEQ ID NO: 696108 - DNA, 75 bp, synthetic construct
  source 1..75: mol_type = other DNA
gcgctatctcaaattgttatgagagaaatgacagaaaaagaaagagaaagagtgatggctttgaattcactacct

SEQ ID NO: 696109 - DNA, 75 bp, synthetic construct
  source 1..75: mol_type = other DNA
gaatcatggcgtacacaaccttttatgcgacgaggatacaatcttgcgttggaatgggacgaggtatgtaggtta

SEQ ID NO: 696110 - DNA, 75 bp, synthetic construct
  source 1..75: mol_type = other DNA
gccagtagtgccagatgattggcaactcgtacctaagaaaataacactggaaatggaatgtgctctatcaaaagc

SEQ ID NO: 696111 - DNA, 75 bp, synthetic construct
  source 1..75: mol_type = other DNA
ggagatggcaaacgtgattttagtcaccgatgacgaaagttgcgggtattcggctatggaaggattgactggcaa

SEQ ID NO: 696112 - DNA, 75 bp, synthetic construct
  source 1..75: mol_type = other DNA
tggccgactggttttatcagaaagcgccgacacccgagttgcaggcgctgttccttgaggaatacctgtccaaat

SEQ ID NO: 696113 - DNA, 75 bp, synthetic construct
  source 1..75: mol_type = other DNA
aggcgttcagcttaatgagaaagaacgcaatgtatacagcattgttgctactcactttatcggtctcttctatcc

SEQ ID NO: 696114 - DNA, 75 bp, synthetic construct
  source 1..75: mol_type = other DNA
atgcttctgtttcacttgttcagcaaacatgcgatgaatctgagtttaacaattatcgttccgctgtgggtgaaa

SEQ ID NO: 696115 - DNA, 75 bp, synthetic construct
  source 1..75: mol_type = other DNA
atggggcgcatgctaatcgacatcatgaaccccatctataaacagcatcccgaacttaaaccaaaagaacttaac

SEQ ID NO: 696116 - DNA, 75 bp, synthetic construct
  source 1..75: mol_type = other DNA
acgttacttgctgcaatgaccagagcagcaaaatttattgatgacccggacttaagaaaggctctggaagccaaa

SEQ ID NO: 696117 - DNA, 75 bp, synthetic construct
  source 1..75: mol_type = other DNA
cgcaggatgaggaagtacaaaccggctttgatttatctatgctacaggtcaatgatgatggtgtgtgtgagtctg

SEQ ID NO: 696118 - DNA, 75 bp, synthetic construct
  source 1..75: mol_type = other DNA
gttttttctgtaccgggtgtgatttcaaactctggtcagaaattgctggtaaaaaaataaccagcactcaggttg

SEQ ID NO: 696119 - DNA, 75 bp, synthetic construct
  source 1..75: mol_type = other DNA
gagagcatggctgaacgtaacgccaaagttgactatgacggtgagccgaacggctggacaccagaattttcggtc

SEQ ID NO: 696120 - DNA, 75 bp, synthetic construct
  source 1..75: mol_type = other DNA
gtccagaacagcggtgccgctctccagacgagcacggctaacggtattgaaatcagcggtactcaccagtacggc

SEQ ID NO: 696121 - DNA, 75 bp, synthetic construct
  source 1..75: mol_type = other DNA
cgaatgagacaacgattaacgacggcggaatacaaacagtttcagctaacggagaggcaataaaaacaaagatca

SEQ ID NO: 696122 - DNA, 75 bp, synthetic construct
  source 1..75: mol_type = other DNA
atcgtgcgtgagcaggtacaggtcggtcgggtcattacatttggtggcctgttaaccgacagtcaacgcattctc

SEQ ID NO: 696123 - DNA, 75 bp, synthetic construct
  source 1..75: mol_type = other DNA
acatcgagagtgtgacgacggataccacagccaatgtcggctcatccacctccctgaatgcggccaccatcacca

SEQ ID NO: 696124 - DNA, 75 bp, synthetic construct
  source 1..75: mol_type = other DNA
aaaactttactctatcatttgatggaaccaatatctcattcataccattatcatttgcaaacaatactcggcatt

SEQ ID NO: 696125 - DNA, 75 bp, synthetic construct
  source 1..75: mol_type = other DNA
ttgtcgaagagggaaaagaaagtatccaggacaggatcaggcagctaatcggcagcagaagtatgcggcaagcag

SEQ ID NO: 696126 - DNA, 75 bp, synthetic construct
  source 1..75: mol_type = other DNA
tgaatataaaaataatcatatcctcatattatgtaagatttttatggtcggagtgattcttaattttacatttaa

SEQ ID NO: 696127 - DNA, 75 bp, synthetic construct
  source 1..75: mol_type = other DNA
aatttactcaatcaaataaatttattaggcttcggcattactgcaacccattctgaaaatggagttaatacttta

SEQ ID NO: 696128 - DNA, 75 bp, synthetic construct
  source 1..75: mol_type = other DNA
tgatatactcgatgaacttctaaaaatagcaactgacgtcaataattctaatgttggtatcttctctgtaccttt

SEQ ID NO: 696129 - DNA, 75 bp, synthetic construct
  source 1..75: mol_type = other DNA
agattatcatcttcgcaatcatttgatgaggatataatctatgaaataatgcaatatttctcacagagtgaatta

SEQ ID NO: 696130 - DNA, 75 bp, synthetic construct
  source 1..75: mol_type = other DNA
cagaaacaatatacctgcgaccctctccggaaattccggtatcactgactacgtaccgcccgggagtgattatga

SEQ ID NO: 696131 - DNA, 75 bp, synthetic construct
  source 1..75: mol_type = other DNA
ttattcttattatcattttgtgtttatatttttttaggccaaataagacaaggcatttcactttcgttaggctta

SEQ ID NO: 696132 - DNA, 75 bp, synthetic construct
  source 1..75: mol_type = other DNA
ttccgccgtcggtgaaattatggggcgcatgttaatcgacatcatgaaccccatctataaacagcactccgaact

SEQ ID NO: 696133 - DNA, 75 bp, synthetic construct
  source 1..75: mol_type = other DNA
gtcagctggcatcagaaggtagctaacggacagactattgagccttacgctcacgttcaggacaacggctatcgt

SEQ ID NO: 696134 - DNA, 75 bp, synthetic construct
  source 1..75: mol_type = other DNA
tatctggaccggcgagacgcactacgacgcctggccgcacaaagtcagtctcggcgtcgagtatcaacatacctt

SEQ ID NO: 696135 - DNA, 75 bp, synthetic construct
  source 1..75: mol_type = other DNA
tcttggtcggtgataccactggtgttaacgcctgccaggtagggataaaaagatcaaatggtaaccatatgcaaa

SEQ ID NO: 696136 - DNA, 75 bp, synthetic construct
  source 1..75: mol_type = other DNA
gacggtgaacggcgacccggcagagcagtggcagtatgatgagcacgggtggttaaccaccctcagccataccag

SEQ ID NO: 696137 - DNA, 75 bp, synthetic construct
  source 1..75: mol_type = other DNA
tcagaaggatgcgcaggggcgtgaaacccgttatgagtacagcgccgcaggagacctgacagcaacggtatcacc

SEQ ID NO: 696138 - DNA, 75 bp, synthetic construct
  source 1..75: mol_type = other DNA
caacatgctgttcaggttatttccgtggaaacaccggagcagattgtgtcgcatattctgtctgatagacacctc

SEQ ID NO: 696139 - DNA, 75 bp, synthetic construct
  source 1..75: mol_type = other DNA
ggaaaaccgtcgcatcccgctttgaaggaaatgcggaggttcatatttgccatgacggtaaacatccttccctga

SEQ ID NO: 696140 - DNA, 75 bp, synthetic construct
  source 1..75: mol_type = other DNA
ttgatgatgaagattatcgtcggcggctcctgacgcagctcaatcgaggagaaggccgccacgctgtggctcgtg

SEQ ID NO: 696141 - DNA, 75 bp, synthetic construct
  source 1..75: mol_type = other DNA
aaagatatcgcttcgaagatcaaagataaaaaagcagattatcttctggcagtaaaaggcaatcaggggaaatta

SEQ ID NO: 696142 - DNA, 75 bp, synthetic construct
  source 1..75: mol_type = other DNA
ttttagcatctgatgaagccaagggaaacaacagagttgaagtaaaacttgagtctatcgcatcactcgaagagt

SEQ ID NO: 696143 - DNA, 75 bp, synthetic construct
  source 1..75: mol_type = other DNA
gtgaagcggaagtgtggcctcgtgattattctatgcttgctcgcaggatacaatttcttcgcttcaatgattatc

SEQ ID NO: 696144 - DNA, 75 bp, synthetic construct
  source 1..75: mol_type = other DNA
tcacaacgaacttcatgcggatccgctggcgttcgaagaaaagcatggttcccaggttgatttaatttttcgttt

SEQ ID NO: 696145 - DNA, 75 bp, synthetic construct
  source 1..75: mol_type = other DNA
gagacactggatcccagaagtcaggacattatccgcgcgcgctggctggatgacgataataaagcgacattgcat

SEQ ID NO: 696146 - DNA, 75 bp, synthetic construct
  source 1..75: mol_type = other DNA
agcggatattcagcaggctacagctacgaatattttggcggtaacgccaccttatatgattattcccgaaatcgc

SEQ ID NO: 696147 - DNA, 75 bp, synthetic construct
  source 1..75: mol_type = other DNA
ggggatgactatcaggagattttccgccagcagctacgggaaactcaggagcgacaggctgccggtcttccgcgt

SEQ ID NO: 696148 - DNA, 75 bp, synthetic construct
  source 1..75: mol_type = other DNA
ggcgctgctaccctccattcaactgggaaacgcccgcgcggatgatctggtccgcaataacggtattgcttcgaa

SEQ ID NO: 696149 - DNA, 75 bp, synthetic construct
  source 1..75: mol_type = other DNA
gaactcaaacaacatcgtaatacgttgttaagtactgctaaggatatctggctgaaaagagcagatttgtttcct

SEQ ID NO: 696150 - DNA, 75 bp, synthetic construct
  source 1..75: mol_type = other DNA
tgactgacacgccctggtatccgccttcaggtgagctggttggtgaaatctcgaaggtgttcgactgtgagatac

SEQ ID NO: 696151 - DNA, 75 bp, synthetic construct
  source 1..75: mol_type = other DNA
tgcgaattgtaaaccagaatgccaggaaaaaacaaaacccgccgaagcgggttaagtgcgggtgcgttgaggatg

SEQ ID NO: 696152 - DNA, 75 bp, synthetic construct
  source 1..75: mol_type = other DNA
aatatcaggagctggatacgttattttcggccctggtggaatctgacccggcgtataaatgggcggaggcgctgg

SEQ ID NO: 696153 - DNA, 75 bp, synthetic construct
  source 1..75: mol_type = other DNA
gggaaaagcgaaccaacggacttatttacctggtacggtaaagataaaaaaggcgactctctcgctattgtaatt

SEQ ID NO: 696154 - DNA, 75 bp, synthetic construct
  source 1..75: mol_type = other DNA
cggaaatgattacttatctctcggttactacgatcaggacgactaccacattcaaagaggaattcgggtaatggt

SEQ ID NO: 696155 - DNA, 75 bp, synthetic construct
  source 1..75: mol_type = other DNA
cctttcagcttaccctggcttttcagcgggtgaatgatgccgtgcgggctgtttttctggcaagtgcacagaagg

SEQ ID NO: 696156 - DNA, 75 bp, synthetic construct
  source 1..75: mol_type = other DNA
cgtacgggagacggaacagcagctgcaccactgctggataaagttaacagcacactgaatgccgatgaaatccgt

SEQ ID NO: 696157 - DNA, 75 bp, synthetic construct
  source 1..75: mol_type = other DNA
cttcaatgttaaacgccaggttatcagaccgggtgatccggatgccgttccccccgtcgaagtggaactggaaga

SEQ ID NO: 696158 - DNA, 75 bp, synthetic construct
  source 1..75: mol_type = other DNA
gcggtacggcaatcgtctacgcaggtacgctggcggatgcatcggtcagtggcgcgacaggaagcctgtcgttaa

SEQ ID NO: 696159 - DNA, 75 bp, synthetic construct
  source 1..75: mol_type = other DNA
ttcgggtggtgccgccagcgctctatctggcgctggcaatgaccgaaaagcatgaaaaggcagaacggatgcgga

SEQ ID NO: 696160 - DNA, 75 bp, synthetic construct
  source 1..75: mol_type = other DNA
tccgccaggccatcatcgcggcggcgcacgcctgctatgcggaaaagcgccagaccttgacccaggacatccgtg

SEQ ID NO: 696161 - DNA, 75 bp, synthetic construct
  source 1..75: mol_type = other DNA
ttgttgggtgccggtagcgcttacatgagcagccagattgaaggccaggacagtaccgcatcagtagtgggtagc

SEQ ID NO: 696162 - DNA, 75 bp, synthetic construct
  source 1..75: mol_type = other DNA
gaagactcgccggaagaggcgctgaacaccgtttgcgaacggatggtctccgcactggcgggcgcgggtattcac

SEQ ID NO: 696163 - DNA, 75 bp, synthetic construct
  source 1..75: mol_type = other DNA
gtatgaggcgcagatggcgctgacgatggtgtcaatgaccaatatgattaacaacatcgctgaacgtgaccagta

SEQ ID NO: 696164 - DNA, 75 bp, synthetic construct
  source 1..75: mol_type = other DNA
agggcggcagatgctgccggaagatttgcaggtggcactccgggaaatctcctgtgatgcgggacgtaacgaggt

SEQ ID NO: 696165 - DNA, 75 bp, synthetic construct
  source 1..75: mol_type = other DNA
ttataatgagtgtttataagaacgatgatgtaaatgctttcgaaaaagcagtttatagtattataaagcaaactt

SEQ ID NO: 696166 - DNA, 75 bp, synthetic construct
  source 1..75: mol_type = other DNA
ttggtgcagacttttgtcttgaggaaaaacaccttcctgttaaacactctgatttgcttaatttcagtattgcaa

SEQ ID NO: 696167 - DNA, 75 bp, synthetic construct
  source 1..75: mol_type = other DNA
tcagaggtgaataactatattatggacttgagtgtaagatataatataaatgtcacctacagtaagaaaaatgta

SEQ ID NO: 696168 - DNA, 75 bp, synthetic construct
  source 1..75: mol_type = other DNA
atgacggcctgtcgtaaagcgggtggagactgtggcgatattcagaataaatatgctgtaataagcgcagagcac

SEQ ID NO: 696169 - DNA, 75 bp, synthetic construct
  source 1..75: mol_type = other DNA
tgtttggaatgttacaatgatatttgctcgtataatatttcatttaatgccaaattttttagttaagttggcata

SEQ ID NO: 696170 - DNA, 75 bp, synthetic construct
  source 1..75: mol_type = other DNA
ctctaaaagaaaaacacttgcctactagtcatgatgaattaaaagactttagcattactcgttgcccctttattc

SEQ ID NO: 696171 - DNA, 75 bp, synthetic construct
  source 1..75: mol_type = other DNA
tctggctgtggctggcaacgcagaacctgagtgacttcccggacgatgcgaagaagctgctcaatatgatcgaat

SEQ ID NO: 696172 - DNA, 75 bp, synthetic construct
  source 1..75: mol_type = other DNA
gttcactcaggccgggagctttgaagcggagctgttcaaccgcgaaggggagctatggccggaagcggacgtgac

SEQ ID NO: 696173 - DNA, 75 bp, synthetic construct
  source 1..75: mol_type = other DNA
ccgcgcgcatgatgatcaccggcggcgacccgaaagaagaggctgaccttaagcgcgccgacagggcgatgatac

SEQ ID NO: 696174 - DNA, 75 bp, synthetic construct
  source 1..75: mol_type = other DNA
gcgctggcttccttgcgtctacgaccccggcaaggacaaacggcagtggtacacccagctcatgtttgcccagca

SEQ ID NO: 696175 - DNA, 75 bp, synthetic construct
  source 1..75: mol_type = other DNA
tgccaggcattattgaaaataacattatttctacaaaacaacatttctttagcagtaagctgtttaagtatgtaa

SEQ ID NO: 696176 - DNA, 75 bp, synthetic construct
  source 1..75: mol_type = other DNA
gctgtaaaagaaaaaaatgaagtttggcagtattcattgccaggcattattgaaaataacattatttctacaaaa

SEQ ID NO: 696177 - DNA, 75 bp, synthetic construct
  source 1..75: mol_type = other DNA
acacaaatgaagcggaaattaaaataaaagaggggggggcagtgagttttatttttaatgaggaaacattgtatt

SEQ ID NO: 696178 - DNA, 75 bp, synthetic construct
  source 1..75: mol_type = other DNA
gatgttcactcaggaaggcagctttgaggcggagctgttcaaccgcgagggggaattgtggcctgaagcggatgt

SEQ ID NO: 696179 - DNA, 75 bp, synthetic construct
  source 1..75: mol_type = other DNA
cacccgtctgacctgggtacaacaccttgcggggttgctgccggttaccgggcgggaaaccggtaccggcaaccc

SEQ ID NO: 696180 - DNA, 75 bp, synthetic construct
  source 1..75: mol_type = other DNA
ggcgtatggtggatagataataaaccccattgtgcgctgccagttgagagactgcgtactccaccagagccgggt

SEQ ID NO: 696181 - DNA, 75 bp, synthetic construct
  source 1..75: mol_type = other DNA
gggtagtgcagttgtatgcacaggatgatgccaactggaaccgctatctctccagtctggagaactaccttcagc

SEQ ID NO: 696182 - DNA, 75 bp, synthetic construct
  source 1..75: mol_type = other DNA
ttctgggggaaatggaaatctccgcccgcatgatgatcaccggcggggatgtgcgggaagaagcggagctgaagc

SEQ ID NO: 696183 - DNA, 75 bp, synthetic construct
  source 1..75: mol_type = other DNA
cggtgacaaaaatatcaatgcgctgatggacctgtttccggaagggacgatgctgtcgatgaccatcgtcacaca

SEQ ID NO: 696184 - DNA, 75 bp, synthetic construct
  source 1..75: mol_type = other DNA
gatgaatggggcaaccagcttaatgaggagaacccgcatcacctgcaccagccgtaccgtctgccagggcagcag

SEQ ID NO: 696185 - DNA, 75 bp, synthetic construct
  source 1..75: mol_type = other DNA
accactcaatcaattagtctgggtgaggttacactaactcaattagaaaatggaagtactccatcgcatactttt

SEQ ID NO: 696186 - DNA, 75 bp, synthetic construct
  source 1..75: mol_type = other DNA
ttgtatttactggaatgttttgtagttctgcttttgccgatgatgctgcaaatgatgcaagcattgcaactctta

SEQ ID NO: 696187 - DNA, 75 bp, synthetic construct
  source 1..75: mol_type = other DNA
tgcgtcgtgggcgtgtggtgtctccagcagcctgaatatgctgatcttcttccgcgtgattcaggggattgtcgc

SEQ ID NO: 696188 - DNA, 75 bp, synthetic construct
  source 1..75: mol_type = other DNA
cgtgaatttaaggtccgtctggctaagcaggcattacagcctggtgctgttgttgcccggatcgccagagaacac

SEQ ID NO: 696189 - DNA, 75 bp, synthetic construct
  source 1..75: mol_type = other DNA
tgctggaggcaagcctgccttcccgtgtggttttcattgaactgaaacaaaatggtgtgatgtgggagggggcat

SEQ ID NO: 696190 - DNA, 75 bp, synthetic construct
  source 1..75: mol_type = other DNA
cattacagcgtattgcgtccatgcgtaatgatttacatattattcgttttgtatctgatcctctttttcttctac

SEQ ID NO: 696191 - DNA, 75 bp, synthetic construct
  source 1..75: mol_type = other DNA
acgtaggcgaggaatacaacttaacgaaccaacaagcctacgaattcatccgggcgctgaataaggccgcgacaa

SEQ ID NO: 696192 - DNA, 75 bp, synthetic construct
  source 1..75: mol_type = other DNA
ggcaacaggccaggcattgaatccggcggcacaagtagaaatgcaggaacagcagaagaaagcggcgttggataa

SEQ ID NO: 696193 - DNA, 75 bp, synthetic construct
  source 1..75: mol_type = other DNA
gagctgaccgagaagccgtggcgctcgctaaacaccaggccgcagaagctgcgcgtaaagcaaaacaggaagaag

SEQ ID NO: 696194 - DNA, 75 bp, synthetic construct
  source 1..75: mol_type = other DNA
atgaagcgcgtagctatgggcgtctgcagacaggaatcaaccaggccggggggaatgttggccccgcgccggaag

SEQ ID NO: 696195 - DNA, 75 bp, synthetic construct
  source 1..75: mol_type = other DNA
aattctatcgtgtcggcgaatccaacaagcctgagctgtttcaatcaggcgggcggcagtacatgattccgggtg

SEQ ID NO: 696196 - DNA, 75 bp, synthetic construct
  source 1..75: mol_type = other DNA
aggttgggaagctggcttgagaatgcagatgaaagcgcaaggctataccgaggagcagatcgacgaagtggtaaa

SEQ ID NO: 696197 - DNA, 75 bp, synthetic construct
  source 1..75: mol_type = other DNA
gtggtaaaactgtttgcccccctcactccggaacttcttagggtgctcattcgcgaaatgaaaggggggatccga

SEQ ID NO: 696198 - DNA, 75 bp, synthetic construct
  source 1..75: mol_type = other DNA
agagccgccgggcatatgatgaaccgggcaggctggtaacggagacatcgcgcagcggggagacagtacgctacc

SEQ ID NO: 696199 - DNA, 75 bp, synthetic construct
  source 1..75: mol_type = other DNA
acgagccggggagcttctcaccgctcatccgcatcgagacagagaacggcgagcgggaaaaagcgcagcggcgca

SEQ ID NO: 696200 - DNA, 75 bp, synthetic construct
  source 1..75: mol_type = other DNA
gaacggcagccacagcgacttcagctacgatgcgctggaccggctggtacagcagggcggctttgacgggcggac

SEQ ID NO: 696201 - DNA, 75 bp, synthetic construct
  source 1..75: mol_type = other DNA
gtgccggtctgcgccagaacttccgtatcttccagaacttccgtaccgggtgctgaggacgtactgccagcgccg

SEQ ID NO: 696202 - DNA, 75 bp, synthetic construct
  source 1..75: mol_type = other DNA
tgcgcctataagcctacaagtgctcggtgagttttatggatatcaaagatatattatgcctaaaggtcctttcac

SEQ ID NO: 696203 - DNA, 75 bp, synthetic construct
  source 1..75: mol_type = other DNA
agcggcccgcgacagacgcgggaatacggctacagcgccacgggcaggctggcgagtgtgcgcaccctcgcaccg

SEQ ID NO: 696204 - DNA, 75 bp, synthetic construct
  source 1..75: mol_type = other DNA
ccagaaaagttcatgcagcaagtggatgcttacatcagatggtataacgagcggcgtataaaattatcgctgggt

SEQ ID NO: 696205 - DNA, 75 bp, synthetic construct
  source 1..75: mol_type = other DNA
gggctgatccagattacgcagttacgcctctggctggaagacggaacacttattgatgctcaaaggagcgatttg

SEQ ID NO: 696206 - DNA, 75 bp, synthetic construct
  source 1..75: mol_type = other DNA
ccagtctgccatcccgggtcattgctctggaaatgtcccggccggatggacagacctggaaggccagccttcacg

SEQ ID NO: 696207 - DNA, 75 bp, synthetic construct
  source 1..75: mol_type = other DNA
atgcattgaacgtgccgcccgtcgtagccgcctgattgcacagggcctctacatcgacgaaatggagtccatcct

SEQ ID NO: 696208 - DNA, 75 bp, synthetic construct
  source 1..75: mol_type = other DNA
ggcccgggcgaaccgggcaattctccggcctccgtgagcgcgttatctggatgattcagacgcgcggccgcccgg

SEQ ID NO: 696209 - DNA, 75 bp, synthetic construct
  source 1..75: mol_type = other DNA
cgtcatgcatggattcggattgctcattttcatactatctgttgtttttttaagcgatcagataaaagggcgctg

SEQ ID NO: 696210 - DNA, 75 bp, synthetic construct
  source 1..75: mol_type = other DNA
aataaatgcaggtggtacatctaccggaactggatcaccaggcggaggaaccaacacaggaatttctttgaccgc

SEQ ID NO: 696211 - DNA, 75 bp, synthetic construct
  source 1..75: mol_type = other DNA
gccgattatccggtaatggtttttatcaaaactactgatacggcgcagccgacacccgtcatgtcatatcgcatc

SEQ ID NO: 696212 - DNA, 75 bp, synthetic construct
  source 1..75: mol_type = other DNA
actgcattaatcccaatgattatgacaaacctgttcagcaggtgctggtcgaaatgaccaaatggggtgtggatc

SEQ ID NO: 696213 - DNA, 75 bp, synthetic construct
  source 1..75: mol_type = other DNA
aaagacaaaggctggcagctaaaagccgaaaaaacattgatcagcagctacgacgctatgaaccgccccggaaat

SEQ ID NO: 696214 - DNA, 75 bp, synthetic construct
  source 1..75: mol_type = other DNA
aaagtgaaatcctggctgaccgggtgagtgaggaaagccgccgctggctggcatcgtgcggcctgacggtggagc

SEQ ID NO: 696215 - DNA, 75 bp, synthetic construct
  source 1..75: mol_type = other DNA
cagatactcaacttagtcagagcacaagcaatactaacgacagtggtgttgctgaagttacccttaagggcacgg

SEQ ID NO: 696216 - DNA, 75 bp, synthetic construct
  source 1..75: mol_type = other DNA
gacctgaccggcaaacttatccgcagcgaggatgaggggctggtcacccactggcactatgacgaagcagaccgc

SEQ ID NO: 696217 - DNA, 75 bp, synthetic construct
  source 1..75: mol_type = other DNA
aaatcttcaacagtaaggacgacgcttctccggaagcggtcgtgaggtttatgaaagagactgacaaacaggaaa

SEQ ID NO: 696218 - DNA, 75 bp, synthetic construct
  source 1..75: mol_type = other DNA
cgtggatgccgttcttggtgtatcgaccaagacggcggtaaatgcgcctgaataccgtaaacatcagggggcgct

SEQ ID NO: 696219 - DNA, 75 bp, synthetic construct
  source 1..75: mol_type = other DNA
ggaaaaaacccgacagatgtgacgtacttcaggaactaattgattgtggtgatattagtgctaaagatgcaaaaa

SEQ ID NO: 696220 - DNA, 75 bp, synthetic construct
  source 1..75: mol_type = other DNA
gcttaccggctggctggcaaagcgcgtcggggaagtgaaactgttcctctggtcaaccatcgcctttgctattgc

SEQ ID NO: 696221 - DNA, 75 bp, synthetic construct
  source 1..75: mol_type = other DNA
cggaagcgccgacaggtagtcagccaggagcagtgagtccccccatccgacactccccgtcactccgtacgctgc

SEQ ID NO: 696222 - DNA, 75 bp, synthetic construct
  source 1..75: mol_type = other DNA
tgactggcttgtcgcatggctaatgtctgccagagtgtcacaaagaagtatcgctgaatttatgaatgttaatgt

SEQ ID NO: 696223 - DNA, 75 bp, synthetic construct
  source 1..75: mol_type = other DNA
gctgccagcaccctgaatgcaggaggcgctgaaaataaagtggtgtcgccgttcagcctgacgttatccggcggg

SEQ ID NO: 696224 - DNA, 75 bp, synthetic construct
  source 1..75: mol_type = other DNA
aatggcaacaccacaggatgtggtccagcgtcgggcatcctttggtgggcgcgtcgaactgctgcgcccacgcgt

SEQ ID NO: 696225 - DNA, 75 bp, synthetic construct
  source 1..75: mol_type = other DNA
accgttacgaaaaaggcggggaagatggcatcacaatggtatttatcgcgccctcatcctctgcgcaggacaagc

SEQ ID NO: 696226 - DNA, 75 bp, synthetic construct
  source 1..75: mol_type = other DNA
gccacagaacaaagtgcgcagactacggccgcgctggaaggtataaccctgacgataacgctggggacggacgaa

SEQ ID NO: 696227 - DNA, 75 bp, synthetic construct
  source 1..75: mol_type = other DNA
taagatttcggtggttgccgtcgcggccacagaacaaagcgcgcagacagtggtctcgctgaaaggtacgaccct

SEQ ID NO: 696228 - DNA, 75 bp, synthetic construct
  source 1..75: mol_type = other DNA
tcctcattgccacggggtacagtgaggatgatggcgtggcaaaggcgctggaaacgtatgccgcgaagttgcggg

SEQ ID NO: 696229 - DNA, 75 bp, synthetic construct
  source 1..75: mol_type = other DNA
tctgccgccatgctgccctttttacaaaaccgcgatgcgcaggccgttcagcgccagcgcgtggccgataacttt

SEQ ID NO: 696230 - DNA, 75 bp, synthetic construct
  source 1..75: mol_type = other DNA
atgaatgtgttgcgtagtggaatcgtgacgatgctgctgctggctgcctttagtgttcaggcagcctgtacctgg

SEQ ID NO: 696231 - DNA, 75 bp, synthetic construct
  source 1..75: mol_type = other DNA
tatctgttggatctcaagatctttcctctcttttttatcaatatcaccgcctggagggtggtatctggtatgtca

SEQ ID NO: 696232 - DNA, 75 bp, synthetic construct
  source 1..75: mol_type = other DNA
ccagatgatctccagtcgtatccgctttggcgttaaaggagcggcgctaccgttactgatggtgattattatgta

SEQ ID NO: 696233 - DNA, 75 bp, synthetic construct
  source 1..75: mol_type = other DNA
gaatcggcaatccttgatattgaaacagcaggcattggcgcagtggtggaatcggtagattcagcactggtaggc

SEQ ID NO: 696234 - DNA, 75 bp, synthetic construct
  source 1..75: mol_type = other DNA
acggtatgttctttgccctggcggctaacgaccgtgtagctttcgataatattctcgactggacgcagaacaatc

SEQ ID NO: 696235 - DNA, 75 bp, synthetic construct
  source 1..75: mol_type = other DNA
agctaccggaccaggacgcccgcgccagtgggcgtgtttggtcccggctggaaagcgcccttcgatatccgctta

SEQ ID NO: 696236 - DNA, 75 bp, synthetic construct
  source 1..75: mol_type = other DNA
acaggggctggcaaaccgcgtcacgccggacagcctgccgccggtggagtggctgacctacggcagcggttacct

SEQ ID NO: 696237 - DNA, 75 bp, synthetic construct
  source 1..75: mol_type = other DNA
taatccggtaagttggattgacccattaggattgacgcagtgcgattccgaagggtgtaataatgatatattatt

SEQ ID NO: 696238 - DNA, 75 bp, synthetic construct
  source 1..75: mol_type = other DNA
gttgagaaaatagctttgaaaatgggattgtcatttttaagtaagggaggggattttaaatctggtgtttatgct

SEQ ID NO: 696239 - DNA, 75 bp, synthetic construct
  source 1..75: mol_type = other DNA
cgggtttacttatgatgcggagcacgccgggcggatggtggcgcaccattatgcgggtaggccggagagccgcta

SEQ ID NO: 696240 - DNA, 75 bp, synthetic construct
  source 1..75: mol_type = other DNA
gtgctgataggtgcgccgacgggagtggcctgctcggtgtgtccgggagggattacctatgctaacccggtgaac

SEQ ID NO: 696241 - DNA, 75 bp, synthetic construct
  source 1..75: mol_type = other DNA
cggcttcgggcggacgctggctttccaccgcgaggccgcaggcgaactggctggcgaaatcaccagggtgacgga

SEQ ID NO: 696242 - DNA, 75 bp, synthetic construct
  source 1..75: mol_type = other DNA
acggggaagtcaagctgcaggataccggtgacaggatagaaatcgcggatccttacagtcaggatggccagcata

SEQ ID NO: 696243 - DNA, 75 bp, synthetic construct
  source 1..75: mol_type = other DNA
aaaaagggtgatcgcagcgccttcaaaacgctgccggcaaaaggctataaaaacggacttaccgggctgctcatc

SEQ ID NO: 696244 - DNA, 75 bp, synthetic construct
  source 1..75: mol_type = other DNA
gcaactcgattttcaccaataccgcgtcgttttcaccagcgcagggcgtcggcgtacagttgacgcgcaacggta

SEQ ID NO: 696245 - DNA, 75 bp, synthetic construct
  source 1..75: mol_type = other DNA
ggagatgccattaataatccgccacctcctggtaattgttctaatgattattatgaacatctgaaaaatcaaaaa

SEQ ID NO: 696246 - DNA, 75 bp, synthetic construct
  source 1..75: mol_type = other DNA
gcggagggtgacgtggcgggcgcggtgacgggggtgacggacggcgcgggccgctgttttcacctggtgctgacc

SEQ ID NO: 696247 - DNA, 75 bp, synthetic construct
  source 1..75: mol_type = other DNA
atcgaccagcccgcagaaggatgagccggaaattgcctgggagtcgttgcgctggctgatggaaggtgcgccaaa

SEQ ID NO: 696248 - DNA, 75 bp, synthetic construct
  source 1..75: mol_type = other DNA
cagtatgatgaggagtcggggctgtactacaaccgcaaccggtactatgatccgttgcaggggagatatatcacc

SEQ ID NO: 696249 - DNA, 75 bp, synthetic construct
  source 1..75: mol_type = other DNA
ccggtgaacccggtgctgggtgcgaaggtgctgccgggcgagacggaccttgcgctgcccggcccgttgccgttt

SEQ ID NO: 696250 - DNA, 75 bp, synthetic construct
  source 1..75: mol_type = other DNA
agcggacccaccactaccactacgacagccagcaccgcctggtgttctacacgcggatacagcacggcgaaccac

SEQ ID NO: 696251 - DNA, 75 bp, synthetic construct
  source 1..75: mol_type = other DNA
ggacgggagcatcacccgcagcgagtatgatgaggcggggaggctgaaggcgcagacggatgcggcggggcggcg

SEQ ID NO: 696252 - DNA, 75 bp, synthetic construct
  source 1..75: mol_type = other DNA
ggcatcagcacttacagcagttataacccgcgcggtcaactggtcagtcagagggatgcgcaggggcgtgaaacc

SEQ ID NO: 696253 - DNA, 75 bp, synthetic construct
  source 1..75: mol_type = other DNA
cagcacagctcgcagccgttaagcgcgctctggcaggtgctgccggaagatgttcgcctgagtccgcatgcgtac

SEQ ID NO: 696254 - DNA, 75 bp, synthetic construct
  source 1..75: mol_type = other DNA
atgcgtcagaccgtatcacccggcgcacggtgaacggcgacccggcggaacagtggcagtatgatgaacacgggt

SEQ ID NO: 696255 - DNA, 75 bp, synthetic construct
  source 1..75: mol_type = other DNA
agaaacacggatgatataaaagaaaaattaattcaaagacacgctgtttttcagaaaaacataaagcttataaat

SEQ ID NO: 696256 - DNA, 75 bp, synthetic construct
  source 1..75: mol_type = other DNA
caccaaataactctgttgctattgatcccaaagtgtttggtttgaaatataataatatatataacgggcctgaac

SEQ ID NO: 696257 - DNA, 75 bp, synthetic construct
  source 1..75: mol_type = other DNA
ggatgtcgctgtcgcgtaaaccggaggtgacatggtacgggtgggacggtgacaggctgacgacggtacagaccg

SEQ ID NO: 696258 - DNA, 75 bp, synthetic construct
  source 1..75: mol_type = other DNA
tgggagctgaccgacgataacccgatagtcgatctgtcgttgtttaagtcgcgcaacttcaccatcggctgtttg

SEQ ID NO: 696259 - DNA, 75 bp, synthetic construct
  source 1..75: mol_type = other DNA
acgttcgggctggataacgttgatccggcggtttttattgatgctgaggtggataccttcgaccggctgatggac

SEQ ID NO: 696260 - DNA, 75 bp, synthetic construct
  source 1..75: mol_type = other DNA
tggcgcggggaactcctgcaactgattttacgcgagcgcaggccgcgcggtttatccccgctggcgcggggaact

SEQ ID NO: 696261 - DNA, 75 bp, synthetic construct
  source 1..75: mol_type = other DNA
tggtctggtgcccagacagactggctcaggaggaaaaatccgcctgctgggaataagcaaacgtggtgataaata

SEQ ID NO: 696262 - DNA, 75 bp, synthetic construct
  source 1..75: mol_type = other DNA
cactgggcggcaacaaaaactcggcgttctattccgggattgacgtgaaattccacatcctggtggtgtttatca

SEQ ID NO: 696263 - DNA, 75 bp, synthetic construct
  source 1..75: mol_type = other DNA
agtcactggtgggctggcagtaatgtgcttcgtaaaaatgtacggtattactttctgtggtgcgccgcgcagtac

SEQ ID NO: 696264 - DNA, 75 bp, synthetic construct
  source 1..75: mol_type = other DNA
tgggaattaccgaaccgctggaatttaccttcctgttcatttcaccgttgctgtttgcggtacacgccgtgctgg

SEQ ID NO: 696265 - DNA, 75 bp, synthetic construct
  source 1..75: mol_type = other DNA
cgtgagtctccgtaaacaacgcaatgtaactatagattatcatctatggggaggtgatacccactctgagtctgc

SEQ ID NO: 696266 - DNA, 75 bp, synthetic construct
  source 1..75: mol_type = other DNA
agctggcgcgaacggtgtgggcaatagccgctcacggacgtaaatacgacaaaaatcatgtcagtatcaggcctt

SEQ ID NO: 696267 - DNA, 75 bp, synthetic construct
  source 1..75: mol_type = other DNA
gtgaacggtgtcatgtcgccagtaatggtgacctggtgcaaatcgccagctttggcgcaaacgccagaattgcca

SEQ ID NO: 696268 - DNA, 75 bp, synthetic construct
  source 1..75: mol_type = other DNA
gtcactcactttctcgatcaggtctatcaggtcagcgatcggatcaccgtcttacgcaacggcagtttcgtaggc

SEQ ID NO: 696269 - DNA, 75 bp, synthetic construct
  source 1..75: mol_type = other DNA
taaaaatatcaataagaatggtgcccagttaatctttacaactcatgagacgtctattttaaatcaagatgtttt

SEQ ID NO: 696270 - DNA, 75 bp, synthetic construct
  source 1..75: mol_type = other DNA
gtcgctgttctcactaagtcgtgtggaagccgtagcgctacaacttgcgggtcctattgctatggtaatgctggc

SEQ ID NO: 696271 - DNA, 75 bp, synthetic construct
  source 1..75: mol_type = other DNA
ttccgcgcattccgtgtagatccacaggcaaacccgttgaaaacaccttcgggaaaaatcgaaatttattctgaa

SEQ ID NO: 696272 - DNA, 75 bp, synthetic construct
  source 1..75: mol_type = other DNA
cgccgacacgctgcccgggctgcctggaagacgaactgaattttctgaaggatgaaaaggttcgctgggataagc

SEQ ID NO: 696273 - DNA, 75 bp, synthetic construct
  source 1..75: mol_type = other DNA
cacggtaactcaaaaatctttggtgccgtgggcatttctttagcgatgtacttcactgccgcaccggaaaatcgg

SEQ ID NO: 696274 - DNA, 75 bp, synthetic construct
  source 1..75: mol_type = other DNA
ttattgttcttttaatttcatatgtatatatatactccgtttctgcatctaacttaaccttactcagttcttcaa

SEQ ID NO: 696275 - DNA, 75 bp, synthetic construct
  source 1..75: mol_type = other DNA
aatcattgcaacgttatagacgactatataacaaatctttacctacggtacttgttgctgaagaagcacatacat

SEQ ID NO: 696276 - DNA, 75 bp, synthetic construct
  source 1..75: mol_type = other DNA
agaatgaaacctataaccaatgactcagagcaccgagttgacttagccaattggttagaaacttatattggaaag

SEQ ID NO: 696277 - DNA, 75 bp, synthetic construct
  source 1..75: mol_type = other DNA
acacaactgcttgattttgcagaagtgaagctaccagaccacccaggttatgtgcgccagacgtgcgcgacgcca

SEQ ID NO: 696278 - DNA, 75 bp, synthetic construct
  source 1..75: mol_type = other DNA
tcatctatcgggcgattaaatctcactatccgcagcttttactgcgcaaccccccccatcagcgacgcggaaaac

SEQ ID NO: 696279 - DNA, 75 bp, synthetic construct
  source 1..75: mol_type = other DNA
atataaccacactgcagaatgacgtgaataatatcagcagtggctccgtggggctggtacgtcaggatccgacat

SEQ ID NO: 696280 - DNA, 75 bp, synthetic construct
  source 1..75: mol_type = other DNA
tcgctaccaggtcagcaggttatttatgctaatttctggcgttctgcaactgtgggaggcattcatgcattgacg

SEQ ID NO: 696281 - DNA, 75 bp, synthetic construct
  source 1..75: mol_type = other DNA
gatacctggcggcagaattttgtgccttcaggcccagcggcgccagaattatcagcagagtatgtggcaagttta

SEQ ID NO: 696282 - DNA, 75 bp, synthetic construct
  source 1..75: mol_type = other DNA
gtgagactgaacagcagatttaccgtcagctgactgacgaggtactggccctgcgattgtctgaaaacggctcac

SEQ ID NO: 696283 - DNA, 75 bp, synthetic construct
  source 1..75: mol_type = other DNA
ttaaacggtatcgtgatgactctgaaaatcaggatgtcgcagctgtttgctgccaagtgtttgagaaaattgcac

SEQ ID NO: 696284 - DNA, 75 bp, synthetic construct
  source 1..75: mol_type = other DNA
taatagatctatctctagttccaagcgaaattactcacattgttactgctgtgatttcaaggattatttttgaat

SEQ ID NO: 696285 - DNA, 75 bp, synthetic construct
  source 1..75: mol_type = other DNA
ccaccggtgagctggcgaaaacgcagcgccgcagcctggcggatgcgcttcagcagtccggcggcgaagacggtg

SEQ ID NO: 696286 - DNA, 75 bp, synthetic construct
  source 1..75: mol_type = other DNA
aaatcagtcaggtgaacgggaaaatatatatgtctcattttatgatatcaatgataatgaaaagaaaatcgcggg

SEQ ID NO: 696287 - DNA, 75 bp, synthetic construct
  source 1..75: mol_type = other DNA
aaatctttggtgccgtgggcatttctttagcgatgtacttcactgccgcaccggaaaatcgggtaaaagtggcgg

SEQ ID NO: 696288 - DNA, 75 bp, synthetic construct
  source 1..75: mol_type = other DNA
gcggggtcggcaatatctccagcatcaacaattgcgcgacgcgtctacgtattgcactgcatgacatgtcacaaa

SEQ ID NO: 696289 - DNA, 75 bp, synthetic construct
  source 1..75: mol_type = other DNA
agagaaagggcgggaagttctgcataccgtgcgagaactggaaaagcaggcgatcaaactgcatgaaggctggga

SEQ ID NO: 696290 - DNA, 75 bp, synthetic construct
  source 1..75: mol_type = other DNA
ttgaaatcaggggcagtgattgctgctgatgccgtagtcgtcactttcccaaatggagagaagagaactttagct

SEQ ID NO: 696291 - DNA, 75 bp, synthetic construct
  source 1..75: mol_type = other DNA
tcgaacgatggggaaagaatattcattaacacaacagaaggaaatctatctgatccaaacagcaatggtgccggg

SEQ ID NO: 696292 - DNA, 75 bp, synthetic construct
  source 1..75: mol_type = other DNA
cgccgtgctggcggcctcaatgtcgaccgtaatgtatctctttggtgtggtgggcaacatgggcggaggtctgat

SEQ ID NO: 696293 - DNA, 75 bp, synthetic construct
  source 1..75: mol_type = other DNA
atcaaaactgcctgcaggttttaaccgtatgaatgagtattccaaaggtaaagtactatgggtgcgtatagagaa

SEQ ID NO: 696294 - DNA, 75 bp, synthetic construct
  source 1..75: mol_type = other DNA
gtgcttgatgttagtggtggtacggcaacaaatgttacccagcacgatggtgcaattttaaaaactaacactaac

SEQ ID NO: 696295 - DNA, 75 bp, synthetic construct
  source 1..75: mol_type = other DNA
aagcgagtccacacaacaataatgtctggggggcgacgtataacacccgtaataatgaaccgccccgggtttcct

SEQ ID NO: 696296 - DNA, 75 bp, synthetic construct
  source 1..75: mol_type = other DNA
aaagatgtcttctacatcgtcaaacacgctacagagctttcaaaagtacaggttaagtattatcttaccttaacc

SEQ ID NO: 696297 - DNA, 75 bp, synthetic construct
  source 1..75: mol_type = other DNA
tgcaacaggcaataaaggtctttggggctcaggagggctactatgaagcgctgctattatcatggcttcgtcgtg

SEQ ID NO: 696298 - DNA, 75 bp, synthetic construct
  source 1..75: mol_type = other DNA
atggcccacaaacggcggatgagctggcactgatgttcgggattacctcccgccgggcgaattcatcgctggcca

SEQ ID NO: 696299 - DNA, 75 bp, synthetic construct
  source 1..75: mol_type = other DNA
ttattttgattgatttgggagaggaccgaacgggttcggatatgcttgtagttttcactgaggtagttgcgacag

SEQ ID NO: 696300 - DNA, 75 bp, synthetic construct
  source 1..75: mol_type = other DNA
ctgagcacacatcagcgcggcctatcctccgacctgcaatgaacggcgtagataatgacgtgattaatgtttttt

SEQ ID NO: 696301 - DNA, 75 bp, synthetic construct
  source 1..75: mol_type = other DNA
gccgatgtgattaacgtttttgctttggagctggaaaagtccattgatcgggctgtgcgacgggcggctaaaaaa

SEQ ID NO: 696302 - DNA, 75 bp, synthetic construct
  source 1..75: mol_type = other DNA
gaaactggatgccgtctcacaggtcactcgcgataaatccggtcgtgcagcgctgcgtaaagcggcaaacgtgat

SEQ ID NO: 696303 - DNA, 75 bp, synthetic construct
  source 1..75: mol_type = other DNA
atctatgtctcattttatgatattaatgataatgaaaagaaaattgcgggtgatgattttttgataaatgatgct

SEQ ID NO: 696304 - DNA, 75 bp, synthetic construct
  source 1..75: mol_type = other DNA
tatattgtcgaatcatcaatatgatttacgtggagaaaatctattctttaatacggaagagattaatgcaattcg

SEQ ID NO: 696305 - DNA, 75 bp, synthetic construct
  source 1..75: mol_type = other DNA
gattggtaatgcgttacctccagaatttatcaagcgtcatgcagaggtaataaaaaaacatcttattgaattagg

SEQ ID NO: 696306 - DNA, 75 bp, synthetic construct
  source 1..75: mol_type = other DNA
gtaccctacgcggcacaacgatttattgataatctgcctgcgattttcgccggaacgtttaatcatgcattattg

SEQ ID NO: 696307 - DNA, 75 bp, synthetic construct
  source 1..75: mol_type = other DNA
gaagcatcacttgggtagatcatgttaaaaatctttctgacattatgatagacgatagattctacattgcactga

SEQ ID NO: 696308 - DNA, 75 bp, synthetic construct
  source 1..75: mol_type = other DNA
ggttcgatgcagatgctgcgaggcatgggcgtgaaagtgattgaaatcccaaccgatccagaaactggcatcagc

SEQ ID NO: 696309 - DNA, 75 bp, synthetic construct
  source 1..75: mol_type = other DNA
gctgcatcagtggatgctggcccatcgccagaaagtgccggatggctccggcacggccaaagccctggattacag

SEQ ID NO: 696310 - DNA, 75 bp, synthetic construct
  source 1..75: mol_type = other DNA
tgctttcggtggcggtagcccaattgataccgcaaaagccgtgaaaatccttaccgctaatccaggcccttctac

SEQ ID NO: 696311 - DNA, 75 bp, synthetic construct
  source 1..75: mol_type = other DNA
ccgcccgaatgccatcgcacgctttgcccgtatcgcccaggcgatgggtgtcgatacgcgcgggatgagtgatga

SEQ ID NO: 696312 - DNA, 75 bp, synthetic construct
  source 1..75: mol_type = other DNA
cgaaagtgatcttatccattctgtagctgatgagattaatatcccaggcgttttcacaatcggggggcatggtac

SEQ ID NO: 696313 - DNA, 75 bp, synthetic construct
  source 1..75: mol_type = other DNA
tcagcatgtggccggataaccgtatcgcccgtgacgcgcactatctttaccggtatgaccgtcacggcaggctga

SEQ ID NO: 696314 - DNA, 75 bp, synthetic construct
  source 1..75: mol_type = other DNA
ccagacatgcgtacaacgcgcaggggctggcgaaccgctgtataccggacagcctgcccgccgtggaatggctga

SEQ ID NO: 696315 - DNA, 75 bp, synthetic construct
  source 1..75: mol_type = other DNA
gcgtggttatttcaaagacaggacgatgatctgcgtccgtcacaaggacctgccacaggagataaagccatggcg

SEQ ID NO: 696316 - DNA, 75 bp, synthetic construct
  source 1..75: mol_type = other DNA
acaaaggtctgatccgttcgtccaccgggcatatcgttattggcgcggcaggtagcgtaaataatggttcaacca

SEQ ID NO: 696317 - DNA, 75 bp, synthetic construct
  source 1..75: mol_type = other DNA
tacccgcgcgcttcttagcagtggggctgatgccatcatccgtgcggcagggacgttctacaacaactatgccac

SEQ ID NO: 696318 - DNA, 75 bp, synthetic construct
  source 1..75: mol_type = other DNA
ggctgaagcgggtggtgaaaaaggaacacgcggacggcagcgtcacgcagagtcagtttgatgcggtgggcaggc

SEQ ID NO: 696319 - DNA, 75 bp, synthetic construct
  source 1..75: mol_type = other DNA
gtgttcccggcagaacttgtgaggatgctggacaggctggagggggaaatccgggcagaccgcgtgagcagtgaa

SEQ ID NO: 696320 - DNA, 75 bp, synthetic construct
  source 1..75: mol_type = other DNA
cggtggagcaactggccagacaggtggagccggaatacacaccggcgcgaaaagttcatttttaccactgcgacc

SEQ ID NO: 696321 - DNA, 75 bp, synthetic construct
  source 1..75: mol_type = other DNA
cagccatatcagcgaagggcaccgggtggcggtgcactatggttatgacagtaaaggccgcctcgccagtgaaca

SEQ ID NO: 696322 - DNA, 75 bp, synthetic construct
  source 1..75: mol_type = other DNA
gtaaccgcctgcccgacccggagctgcacccggacagcaccctcagcatgtggccggataaccgtatcgcccgtg

SEQ ID NO: 696323 - DNA, 75 bp, synthetic construct
  source 1..75: mol_type = other DNA
cggctgaccggtgagcgtcagacggtgcatcacccgcagacggaagcactgctctggcagcatgagaccagacat

SEQ ID NO: 696324 - DNA, 75 bp, synthetic construct
  source 1..75: mol_type = other DNA
gtaaaccggaggtgacatggtacgggtgggacggtgacaggctgacgacgatacagaccggcaccacgcgtatcc

SEQ ID NO: 696325 - DNA, 75 bp, synthetic construct
  source 1..75: mol_type = other DNA
gaaaaaatagaacgaaaaaatattcaggaaaaattgatttgtttcttgatgatgtggataagtattcagttactc

SEQ ID NO: 696326 - DNA, 75 bp, synthetic construct
  source 1..75: mol_type = other DNA
acggacattatgggcgaaattgcttctgcttctgatgagcagagccgtggtatcgatcaggttggcttagcggtt

SEQ ID NO: 696327 - DNA, 75 bp, synthetic construct
  source 1..75: mol_type = other DNA
tgccgccgccgccgccgcgctggaagaacaggccagtcgcctgaccgaagcagtggcagtgttccggattcagca

SEQ ID NO: 696328 - DNA, 75 bp, synthetic construct
  source 1..75: mol_type = other DNA
gcccgcaaggcaaaacaggaagaagctgaagcacaacgcaaggccaaacagttagccgcgcagaaggagcaggct

SEQ ID NO: 696329 - DNA, 75 bp, synthetic construct
  source 1..75: mol_type = other DNA
atgagtggaaatctcgggaccatatactacgaggtcgatgcccggacagggaaactccttgccgcgcaacagcag

SEQ ID NO: 696330 - DNA, 75 bp, synthetic construct
  source 1..75: mol_type = other DNA
cagatagttttgcgggccagacgtttgattcggggtttcagggccagattgttgcactcaatgcgccgagtaaaa

SEQ ID NO: 696331 - DNA, 75 bp, synthetic construct
  source 1..75: mol_type = other DNA
cttgataaggaaaatttcatggctcttttaagccgaacagataagaaatatgagaataaagaagaggcaagggtt

SEQ ID NO: 696332 - DNA, 75 bp, synthetic construct
  source 1..75: mol_type = other DNA
tgactaatgagaacggcagccagtccacgttcctgtatgacccggtggacaggctgacggagcagcgcggctttg

SEQ ID NO: 696333 - DNA, 75 bp, synthetic construct
  source 1..75: mol_type = other DNA
atggcggcgggagcgtgacctgacggggtggatgtcgctgtcgcgtaaaccggaggagacatggtacgggtggga

SEQ ID NO: 696334 - DNA, 75 bp, synthetic construct
  source 1..75: mol_type = other DNA
atgggactgcaaaaagtggttggttttcggactctcttgatagggggagctatgatagttagcaatgctatagca

SEQ ID NO: 696335 - DNA, 75 bp, synthetic construct
  source 1..75: mol_type = other DNA
tcgacaatccactaaatatcagggcgaatttgccggtgacaagttccacatcagtgtgcagagggaaatagtgcc

SEQ ID NO: 696336 - DNA, 75 bp, synthetic construct
  source 1..75: mol_type = other DNA
agagggtattgcggttgatccacgcactttacgcgcagcgtgggaagccgaagtttttgccgggatcaacgaagc

SEQ ID NO: 696337 - DNA, 75 bp, synthetic construct
  source 1..75: mol_type = other DNA
acgggtgtggcggcgggtacgtgacctgacggggtggatgtcgctgtcgcgtaaaccggaggtaacgtggtacgg

SEQ ID NO: 696338 - DNA, 75 bp, synthetic construct
  source 1..75: mol_type = other DNA
cacggtgaacggcgacccggcagagcagtggcagtatgacggccacggctggctgagagaaatcagccacctgag

SEQ ID NO: 696339 - DNA, 75 bp, synthetic construct
  source 1..75: mol_type = other DNA
tgatgaggaatcagggctgtactataaccgtcaccggtactacgatccgttgcaggggcggtatattactcagga

SEQ ID NO: 696340 - DNA, 75 bp, synthetic construct
  source 1..75: mol_type = other DNA
gtgaaagccgggcgtggcttgcgcagtgcgggctgacggtggagcaactggccagacaggtggagccggaataca

SEQ ID NO: 696341 - DNA, 75 bp, synthetic construct
  source 1..75: mol_type = other DNA
tacggatgggacggcgaccggctgacgacggtacagaccgacaccacgcgtatccagacggtataccagccgggg

SEQ ID NO: 696342 - DNA, 75 bp, synthetic construct
  source 1..75: mol_type = other DNA
ctgccgggcgcatcaccgtgctgaccaacgagaacggcagccagtccacgttccggtatgacccggtcgacaggc

SEQ ID NO: 696343 - DNA, 75 bp, synthetic construct
  source 1..75: mol_type = other DNA
atggcatggagccgttacggtcagctgctggccttcacggactgctcggggtacacgacgcggtatgagtatgac

SEQ ID NO: 696344 - DNA, 75 bp, synthetic construct
  source 1..75: mol_type = other DNA
ttgagatccggggtcgcacaaagcgacatcgatcgtttgatcgaaaaaggttttgttactcaagctggaaacaaa

SEQ ID NO: 696345 - DNA, 75 bp, synthetic construct
  source 1..75: mol_type = other DNA
tatgggtgatcaagtcatagtaatggttaccagaataataaaaaaatccatcaggaaagaggatatattagggcg

SEQ ID NO: 696346 - DNA, 75 bp, synthetic construct
  source 1..75: mol_type = other DNA
accggcacgcgcgggcgatctggcgttaatccccggttccatgggtgattattcctggcttgcggttggttgcgg

SEQ ID NO: 696347 - DNA, 75 bp, synthetic construct
  source 1..75: mol_type = other DNA
cttagggagttaatcagaaatccgcaagcgcagaccagtgatttttggaatatcttcaactcagaacccgtccac

SEQ ID NO: 696348 - DNA, 75 bp, synthetic construct
  source 1..75: mol_type = other DNA
agcgagccattggtgacctacccgattatccgagtgtctttatgaccaacatccgaggaatcgtcgatcgtgtct

SEQ ID NO: 696349 - DNA, 75 bp, synthetic construct
  source 1..75: mol_type = other DNA
tgaaggcaatgcattaatgcgcctctttggcacccctgataactatctctctaacatgaaatcggtatttgagcg

SEQ ID NO: 696350 - DNA, 75 bp, synthetic construct
  source 1..75: mol_type = other DNA
ggatgtggtgacgggcctcatcacgcgcatcaccacgccggatggcagggcatcggcgttttactataaccacca

SEQ ID NO: 696351 - DNA, 75 bp, synthetic construct
  source 1..75: mol_type = other DNA
acaactaatccgcatcaacggcccgcaggagagccgggagtaccgttacagcgacacgggaaggctgacgggcgt

SEQ ID NO: 696352 - DNA, 75 bp, synthetic construct
  source 1..75: mol_type = other DNA
gggctggcgacccgtcaggagccggacggtctgccgccggtggagtggctgacgtatggcagcggttatcttgcg

SEQ ID NO: 696353 - DNA, 75 bp, synthetic construct
  source 1..75: mol_type = other DNA
gactgtgactatacgtggaacgataacggacaactggtgcgcatcagcggcccgcaggagtgccgggagtaccgt

SEQ ID NO: 696354 - DNA, 75 bp, synthetic construct
  source 1..75: mol_type = other DNA
ggtaaacgcagcaccatcgaatatgataaacgcgggcgtccggtgagtgtgacggaaggcggtcttacgcgcagc

SEQ ID NO: 696355 - DNA, 75 bp, synthetic construct
  source 1..75: mol_type = other DNA
catgcggacgggagcattacccgcagcgagtatgatgaggcggggaggctgaaggcacagacggatgcggcgggg

SEQ ID NO: 696356 - DNA, 75 bp, synthetic construct
  source 1..75: mol_type = other DNA
acgatgaatcggaccgtatcactcaccgcacggtgaacggcgaaccggcagagcagtggcagtatgatgaccacg

SEQ ID NO: 696357 - DNA, 75 bp, synthetic construct
  source 1..75: mol_type = other DNA
gaaggcgcggcaccgtagcctggcggaggtgttgcaggaggacacgggtgtgacgctaccggcggagctggcggt

SEQ ID NO: 696358 - DNA, 75 bp, synthetic construct
  source 1..75: mol_type = other DNA
ggacggcggacggagtaccggctgcatatggcgtctggaaagctgacttcagtgatactgccggacggcaggacg

SEQ ID NO: 696359 - DNA, 75 bp, synthetic construct
  source 1..75: mol_type = other DNA
atgcggagaataacgcgaaaccggtacggtcagcttcaggcgtttacggactgctcggggtacacgacgcggtat

SEQ ID NO: 696360 - DNA, 75 bp, synthetic construct
  source 1..75: mol_type = other DNA
ctcttttaagccgaacagataagaaatatgagaataaagaagaggcaaggattattacaataattgaatcgcgtg

SEQ ID NO: 696361 - DNA, 75 bp, synthetic construct
  source 1..75: mol_type = other DNA
gcaggtcaacccggaggggctggactatcgctttgagtacgggcaggaccgtgtgaccatcacggacagcctgaa

SEQ ID NO: 696362 - DNA, 75 bp, synthetic construct
  source 1..75: mol_type = other DNA
tgctggggaggctggagcgggaactgcggcagggcagcgtgagtgaagaaagccagcagtggcttgcgcagtgcg

SEQ ID NO: 696363 - DNA, 75 bp, synthetic construct
  source 1..75: mol_type = other DNA
atggtcaactggtcgagtatcgctatgatggcacggttaaaaccgtctcaaactggcctacagacagtggattca

SEQ ID NO: 696364 - DNA, 75 bp, synthetic construct
  source 1..75: mol_type = other DNA
agtcgctggagcagggcgcaatgcagccgagcttcaaatcggtgaccggcaaaggcggcatcaaagtgattgatg

SEQ ID NO: 696365 - DNA, 75 bp, synthetic construct
  source 1..75: mol_type = other DNA
gacgaaatcgacatggtgctggaaggggagctgcatgttcgccacgaaggcgaaaccatgatcgccaaagcaggc

SEQ ID NO: 696366 - DNA, 75 bp, synthetic construct
  source 1..75: mol_type = other DNA
cctacgttttacccaactcctttaaatccgcattagtgcctttcttcgcagggattccacatcgcaccggctggc

SEQ ID NO: 696367 - DNA, 75 bp, synthetic construct
  source 1..75: mol_type = other DNA
atgtctacgatcaatttatccccggtatttcctgcaaacgagcagcgagtcatccagcgagcattacgtctgctg

SEQ ID NO: 696368 - DNA, 75 bp, synthetic construct
  source 1..75: mol_type = other DNA
gaaggcattaagcgtgcggagaaatacgagcagcgctggtttgatcccagcatccgactgaccgaagacctgaag

SEQ ID NO: 696369 - DNA, 75 bp, synthetic construct
  source 1..75: mol_type = other DNA
aggacaaaggtgacaccgcaaaagcgaaagccgtataccagcaggttatcagtaaataccctggtactgatggcg

SEQ ID NO: 696370 - DNA, 75 bp, synthetic construct
  source 1..75: mol_type = other DNA
caacgatgtgcgtgtgctggataaagaagcctggccgctgatggtggaacgctatgtggcgctggcctatgacaa

SEQ ID NO: 696371 - DNA, 75 bp, synthetic construct
  source 1..75: mol_type = other DNA
aggaagcggaaaaccaactttttcacagcaccgtcgctgacgagatcgcatttggtttgaaactgcaaaaatgcc

SEQ ID NO: 696372 - DNA, 75 bp, synthetic construct
  source 1..75: mol_type = other DNA
gcaaagattgtcgatcacatcatccctatcgacggcggtgatgatgttctgttctggcctgagtggaatcaccag

SEQ ID NO: 696373 - DNA, 75 bp, synthetic construct
  source 1..75: mol_type = other DNA
gcgcgctatccccaggcgataatcgatgtgatggcaccggcatggtgccgtccattattatcgcggatgccggaa

SEQ ID NO: 696374 - DNA, 75 bp, synthetic construct
  source 1..75: mol_type = other DNA
acgtgatggcacctgcctggtgccgtccgttattgtcgcggatgccggaagtcaacgaagccattcccatgcccc

SEQ ID NO: 696375 - DNA, 75 bp, synthetic construct
  source 1..75: mol_type = other DNA
atgaaaatactggtgatcggcccgtcttgggttggcgacatgatgatgtcgcaaagtctctatcgtacgctccag

SEQ ID NO: 696376 - DNA, 75 bp, synthetic construct
  source 1..75: mol_type = other DNA
gcacaccttgagcgtgaagctttcatcgtgatgtatctcgacaatcagcactgtttgctggaacgcgaaatactg

SEQ ID NO: 696377 - DNA, 75 bp, synthetic construct
  source 1..75: mol_type = other DNA
tcagtatgagagcgattttcaaatgttattctctaatgattttatttgcagtatcaggctgttcaatggcaaaaa

SEQ ID NO: 696378 - DNA, 75 bp, synthetic construct
  source 1..75: mol_type = other DNA
ttattctctaatgattttatttgcagtatcaggctgttcaatggcgagaaatagcggtgattacactgctggaga

SEQ ID NO: 696379 - DNA, 75 bp, synthetic construct
  source 1..75: mol_type = other DNA
gatcagataaaagtgacaaccgtctgcgagggttatggcacaccgaattatcccatcaaagaaccccgtgagatg

SEQ ID NO: 696380 - DNA, 75 bp, synthetic construct
  source 1..75: mol_type = other DNA
gaaattggtggtcttatcgcttccggttttggtcctatcctggcgggtattttctgcaccatgacggaatcctgg

SEQ ID NO: 696381 - DNA, 75 bp, synthetic construct
  source 1..75: mol_type = other DNA
ctttccttgcaggctatttagtgcagacgttattgtttaacaaagcaattccaacagatgcattgatgatcagtt

SEQ ID NO: 696382 - DNA, 75 bp, synthetic construct
  source 1..75: mol_type = other DNA
agttgattgttgcctgtctgataatagatgtgctacaaaatttctgcatggtgaatccccctgagcggcggggca

SEQ ID NO: 696383 - DNA, 75 bp, synthetic construct
  source 1..75: mol_type = other DNA
tggtaaagaaccgattcatatgatctatagcccgcggcacatcgtcgccagagttaccctcactgtgcgtgggat

SEQ ID NO: 696384 - DNA, 75 bp, synthetic construct
  source 1..75: mol_type = other DNA
gcagcatccggaatgcagcgccattatgcgcatcatcgactgaatggagagaagtacaatgcaacagctttcctt

SEQ ID NO: 696385 - DNA, 75 bp, synthetic construct
  source 1..75: mol_type = other DNA
attgctgtcaaagtatgtgcagaagcgctatggacagttaaaagagactatagaacgggattatgcagaagcggc

SEQ ID NO: 696386 - DNA, 75 bp, synthetic construct
  source 1..75: mol_type = other DNA
gataaaagtgacaaccgtctgcgagggttatggcacaccgaattatcccatcaaagaaccccgcgagatgaagga

SEQ ID NO: 696387 - DNA, 75 bp, synthetic construct
  source 1..75: mol_type = other DNA
gtgatgtccgtgactcatttcgaagaccgcttccgttttgtcagccgtgcacagttaggagtggtgaatgggtag

SEQ ID NO: 696388 - DNA, 75 bp, synthetic construct
  source 1..75: mol_type = other DNA
gacaaacttgcctttatggctgcgacagctgacgcgcagttgttgaattatgtcgcctggccgcagcggtggacg

SEQ ID NO: 696389 - DNA, 75 bp, synthetic construct
  source 1..75: mol_type = other DNA
agttatgagtcaaggacgaattgcggtggtataccgccgccatcatgatatttcccacacagaattaaaacaacg

SEQ ID NO: 696390 - DNA, 75 bp, synthetic construct
  source 1..75: mol_type = other DNA
atgcagtttaaggtttatgcctataaaagagagagttgctatcgtctgttcgtggatgtacagagtgacatcatc

SEQ ID NO: 696391 - DNA, 75 bp, synthetic construct
  source 1..75: mol_type = other DNA
tatggaacacagcaactggcggatgattaacttgccggttggcccgttggtggacggcaaaccgatttatacgct

SEQ ID NO: 696392 - DNA, 75 bp, synthetic construct
  source 1..75: mol_type = other DNA
agttggcagcatcaccagtctcctcatagattgcacatcgatagcgacataccaacaccttcatcagagcctatt

SEQ ID NO: 696393 - DNA, 75 bp, synthetic construct
  source 1..75: mol_type = other DNA
atgatcgagcgtattgaggatgtctttacccgccagtccaatttctcagcggatatcgctcacgaaattcgcacg

SEQ ID NO: 696394 - DNA, 75 bp, synthetic construct
  source 1..75: mol_type = other DNA
aaatgctcaacctggcggatgaagtcggcaaagtgttcgattttttcgaggcgttagcagaagatcgcggcgtgg

SEQ ID NO: 696395 - DNA, 75 bp, synthetic construct
  source 1..75: mol_type = other DNA
agtttgcacgtgatgccatacccgataaagacgctcggggcggcgaggtgtatctcctttccggcccgacaatga

SEQ ID NO: 696396 - DNA, 75 bp, synthetic construct
  source 1..75: mol_type = other DNA
ggactggatgcctacgctggcgaaaatgatgaacttcaaattaccgacagaccgcacttttgatggcgaatcgtt

SEQ ID NO: 696397 - DNA, 75 bp, synthetic construct
  source 1..75: mol_type = other DNA
aaaggttctctgggggtggcgaatgggctagatgctttgattctttcattaagagcttggcgtgaaatggggaaa

SEQ ID NO: 696398 - DNA, 75 bp, synthetic construct
  source 1..75: mol_type = other DNA
gcaaaaacgagaagcattacagttatggcttgagagacataagattcagtcattaattcactatccaatcccccc

SEQ ID NO: 696399 - DNA, 75 bp, synthetic construct
  source 1..75: mol_type = other DNA
gaacagttaactgccgaagatcgtaaccattgtatgaaactgtctaaaaaaatccatagagaaaaactatacaac

SEQ ID NO: 696400 - DNA, 75 bp, synthetic construct
  source 1..75: mol_type = other DNA
actacatcttatccgctctacgggataaacgctgcgatatccgcgatcgcggataaaaaggaggatttaagatgg

SEQ ID NO: 696401 - DNA, 75 bp, synthetic construct
  source 1..75: mol_type = other DNA
atagtgttcaaacattgatccattatccaattcctatacataagcagttagcgtataataatctgaatacatatt

SEQ ID NO: 696402 - DNA, 75 bp, synthetic construct
  source 1..75: mol_type = other DNA
ctaggacgctacgcaatgcgcctggcgcacggcaatggcgaatatctcattcatggcaccagtgcgccggacagc

SEQ ID NO: 696403 - DNA, 75 bp, synthetic construct
  source 1..75: mol_type = other DNA
cattggcgctgccggtacgttctggctctacactgcgctgaacattgcgtttgtgggcatcactttctggctcat

SEQ ID NO: 696404 - DNA, 75 bp, synthetic construct
  source 1..75: mol_type = other DNA
atgattgcgactctggtcgtgggactgacctttatgttcgcgaccttcattgcggtctttacggtagataaagca

SEQ ID NO: 696405 - DNA, 75 bp, synthetic construct
  source 1..75: mol_type = other DNA
tttgctgtttatgctcactaccgcgcaatttattctgctggcgggagtcgggcatgcgacgctgaatgaaggggt

SEQ ID NO: 696406 - DNA, 75 bp, synthetic construct
  source 1..75: mol_type = other DNA
gctggcgtggggatggcgtataccgttcctggcgagcgttgtcgtgatggtctttgctatctggttgcgtatgaa

SEQ ID NO: 696407 - DNA, 75 bp, synthetic construct
  source 1..75: mol_type = other DNA
cttgaatttatggacttccagttatattcgctcggcgcagcgttagtgtttcatgaaatattttttcctgaatca

SEQ ID NO: 696408 - DNA, 75 bp, synthetic construct
  source 1..75: mol_type = other DNA
ggctgaagcacaaaaagataatggtgatttcgagtttatcagaggttttgattatgcttacgaagacgaccttaa

SEQ ID NO: 696409 - DNA, 75 bp, synthetic construct
  source 1..75: mol_type = other DNA
ttacacactgccagcaggcttcacgcaatttaaagataataaggctgtagaccagaagttagtcgataaagcgtt

SEQ ID NO: 696410 - DNA, 75 bp, synthetic construct
  source 1..75: mol_type = other DNA
aggtaaacggcagacaaaaaaaatggcgcacaatgtgcgccatttttcacttcacaggtactattacttgcggta

SEQ ID NO: 696411 - DNA, 75 bp, synthetic construct
  source 1..75: mol_type = other DNA
tcgctcttatcggcgcttttagcgctatccacgcagcctgggcggttgattatccgctcccaccaaccggaagcc

SEQ ID NO: 696412 - DNA, 75 bp, synthetic construct
  source 1..75: mol_type = other DNA
gtgcgggcattttgcggtgatcggcgtactggcaagcggcgtgcttaatgcattgttgattaccggatttccccc

SEQ ID NO: 696413 - DNA, 75 bp, synthetic construct
  source 1..75: mol_type = other DNA
ttccttcgcaactgttattacctgatgcaccgcgccaggggataattgtgaaccttgcggaactgcgtctttatt

SEQ ID NO: 696414 - DNA, 75 bp, synthetic construct
  source 1..75: mol_type = other DNA
gtacatcgaccactatcggcagaagaacagcagaacgttcagacaatgccatacacactgccagcaggctttacg

SEQ ID NO: 696415 - DNA, 75 bp, synthetic construct
  source 1..75: mol_type = other DNA
gagcaggcctgtttgccgacgcactggagaaatacgccgccggcctggcaagcgcactcagccgttctcctcaaa

SEQ ID NO: 696416 - DNA, 75 bp, synthetic construct
  source 1..75: mol_type = other DNA
accttgattggtgcgattatcggcatcggtttaaccaacgcgctgttaaccggctcatcggtgatggatgcgtta

SEQ ID NO: 696417 - DNA, 75 bp, synthetic construct
  source 1..75: mol_type = other DNA
tctacgaagcaatcaatggttttcatgacacggcgaatgcggtggcaaccgttatttatactcgtgccatgcaac

SEQ ID NO: 696418 - DNA, 75 bp, synthetic construct
  source 1..75: mol_type = other DNA
cgttcgcaaacagtgattcgccagagccgtgaccttcttcacgcctgggacgctacctggaactcggcgcaggca

SEQ ID NO: 696419 - DNA, 75 bp, synthetic construct
  source 1..75: mol_type = other DNA
cgctgcgtacctatatacaaattcgtattggtctgcatgcagcgattaatgcctgtgaagagatgtgtcaacgtg

SEQ ID NO: 696420 - DNA, 75 bp, synthetic construct
  source 1..75: mol_type = other DNA
cgccatcaatggccgccgatgcttttaccaatccagactatatgcgctacgcggtaaaaacgctgctcgcctgtt

SEQ ID NO: 696421 - DNA, 75 bp, synthetic construct
  source 1..75: mol_type = other DNA
tatgaagatgctgacaaagaactggagatggtagaaatgttatacgaaatgagagaaaaagcggggttaacaaag

SEQ ID NO: 696422 - DNA, 75 bp, synthetic construct
  source 1..75: mol_type = other DNA
ggcccgccggtggcgggcaggctcctgtcgcaccggtgatgaccccggttcagcgtccgggaatgatggacagtc

SEQ ID NO: 696423 - DNA, 75 bp, synthetic construct
  source 1..75: mol_type = other DNA
ttgtgaaggatattagacatattttatctgtcgctgtgtgtctttacagcagtttggctacgggagggagtgcaa

SEQ ID NO: 696424 - DNA, 75 bp, synthetic construct
  source 1..75: mol_type = other DNA
aggtggaaaacaatgctgcgaccgataaagcgccatccactcatacttcaccggtcgtgcccgtcaccacgccgg

SEQ ID NO: 696425 - DNA, 75 bp, synthetic construct
  source 1..75: mol_type = other DNA
gtgttggttcttgctgggcgcgtcactggaaagcaaaggggttagcaacagaatttggagaaagagtagactgtg

SEQ ID NO: 696426 - DNA, 75 bp, synthetic construct
  source 1..75: mol_type = other DNA
acgtgcttcctggtggtacagaagatgctaatcgtctgatagaagctttcaaaaaatcagagctagaaaataaac

SEQ ID NO: 696427 - DNA, 75 bp, synthetic construct
  source 1..75: mol_type = other DNA
tgggactggttttctttgccgttgccattgtcgctatttacggacaaacatttcccggaatgctcgactacccgg

SEQ ID NO: 696428 - DNA, 75 bp, synthetic construct
  source 1..75: mol_type = other DNA
catgggcgggcgcactttcaaaggccgtgaagccgaaagtaaaaaactgctgacctggggattccgtttcttcga

SEQ ID NO: 696429 - DNA, 75 bp, synthetic construct
  source 1..75: mol_type = other DNA
cggtgttcaaaggttcttcactgatgttcctcaaacctggtatgcaggtgccggtttcacagctgatccgcggta

SEQ ID NO: 696430 - DNA, 75 bp, synthetic construct
  source 1..75: mol_type = other DNA
ctgattcgtgacgtgccaaatgaatactctatctataaagagaaagagttcacctttaacggtattcgtcagctc

SEQ ID NO: 696431 - DNA, 75 bp, synthetic construct
  source 1..75: mol_type = other DNA
cgccaaaggtaagccaatggataccgttccgctggtgatgatggcggcgactaaaattggcgaacgtcagggcta

SEQ ID NO: 696432 - DNA, 75 bp, synthetic construct
  source 1..75: mol_type = other DNA
tcaaaactatgatcccgggtgtaccgcagatcgacgcggagtcctacatcctgattgactataactccggcaaag

SEQ ID NO: 696433 - DNA, 75 bp, synthetic construct
  source 1..75: mol_type = other DNA
aaactatgatcccgggtgtaccgcagatcgacgcggagtcctacatcctgattgactataactccggcaaagtgc

SEQ ID NO: 696434 - DNA, 75 bp, synthetic construct
  source 1..75: mol_type = other DNA
cgacagcctccagccgccctccacaaatcacagcggaagagataacggcctcgcaggccgcattctccaccttag

SEQ ID NO: 696435 - DNA, 75 bp, synthetic construct
  source 1..75: mol_type = other DNA
gggacgcgatattctgcacgcctgggacgtcacctggaactcggcgcaaataatggataacgcgctacaaccaga

SEQ ID NO: 696436 - DNA, 75 bp, synthetic construct
  source 1..75: mol_type = other DNA
ggtgacctttgcactcgccacgctcgaaaacgtctttggtcccgtctatgacctggttgagatccgcgatcgctc

SEQ ID NO: 696437 - DNA, 75 bp, synthetic construct
  source 1..75: mol_type = other DNA
gttccggtttctcagctgatccgcggtattaacctgcaatcgggtaacgatgcttgtgtcgccatggccgatttt

SEQ ID NO: 696438 - DNA, 75 bp, synthetic construct
  source 1..75: mol_type = other DNA
ccgccgcgatcctgccagcctgaccaaaatgatgaccagttacgttatcggccaggcaatgaaagccggtaaatt

SEQ ID NO: 696439 - DNA, 75 bp, synthetic construct
  source 1..75: mol_type = other DNA
ctgacagacagcctcgcaccgctacccgaaacgcggattgaaagagaggcgctggcgctgcaaaaactcaatgtc

SEQ ID NO: 696440 - DNA, 75 bp, synthetic construct
  source 1..75: mol_type = other DNA
gtgcgctggtgtctgggaccgtaaccgtcgccggggagggctatgaaactaaggtggtggatttcgggcgtgctt

SEQ ID NO: 696441 - DNA, 75 bp, synthetic construct
  source 1..75: mol_type = other DNA
ccaggcggaccgacgaacctttcagcatggataagacttaagaataaagaattacctccttcagtacataactac

SEQ ID NO: 696442 - DNA, 75 bp, synthetic construct
  source 1..75: mol_type = other DNA
ggttgctgctgatggaaagcttcgtaagctactctgccttcctttgaagaagttaaatggatggctgttcagcat

SEQ ID NO: 696443 - DNA, 75 bp, synthetic construct
  source 1..75: mol_type = other DNA
acgctaatctcggcctgaagccgcgccagtacgatccgcagaaagcgaaagagttgctggaaaaagcaggctgga

SEQ ID NO: 696444 - DNA, 75 bp, synthetic construct
  source 1..75: mol_type = other DNA
cagcactctgctgggcgcaaccacgatggagcagctgaaaactaacgtcgaaagtttgcatctggagttaagcga

SEQ ID NO: 696445 - DNA, 75 bp, synthetic construct
  source 1..75: mol_type = other DNA
ataccatctggagggcgaggggcgttttaattaatcacacgcgggatatagatatttatgagcctgacgggccga

SEQ ID NO: 696446 - DNA, 75 bp, synthetic construct
  source 1..75: mol_type = other DNA
gttttttcgttgttttcggtgtcatttgcgccgttattggttgggcagttattgagtccattctttggctgcttt

SEQ ID NO: 696447 - DNA, 75 bp, synthetic construct
  source 1..75: mol_type = other DNA
tgatcagctcaattatcggctttatgacgattcctttcctgggatggttgtccgatagaattggccgccgtattc

SEQ ID NO: 696448 - DNA, 75 bp, synthetic construct
  source 1..75: mol_type = other DNA
ggtgtgttgccgacctatgcgcagattggtgtttttgcgccaatcttgctggtgacgttgcgtattattcagggg

SEQ ID NO: 696449 - DNA, 75 bp, synthetic construct
  source 1..75: mol_type = other DNA
tataccgttcctggcgagcgttgtcgtgatggtctttgctatctggttgcgtatgaatctgaaagaaagcccggt

SEQ ID NO: 696450 - DNA, 75 bp, synthetic construct
  source 1..75: mol_type = other DNA
gtcctttccgttttatcgcaccctcgcagtttaaaaaccacgaaaccatgaacggaattaaagcgccgattggca

SEQ ID NO: 696451 - DNA, 75 bp, synthetic construct
  source 1..75: mol_type = other DNA
gttcatcggcaccgatgcgttaagcaaatcaatggcagaaatcattcaggccgatatgcaccagattggcgctga

SEQ ID NO: 696452 - DNA, 75 bp, synthetic construct
  source 1..75: mol_type = other DNA
gatcgaaactgtgatgctggcgcttaataccgccaaagcccctaccaacgagctggcagtgcgggaagcgctcaa

SEQ ID NO: 696453 - DNA, 75 bp, synthetic construct
  source 1..75: mol_type = other DNA
ctgttcttttttatctacacctggcctttctttctggcgttgatgcccgtcgcggttgtagtggggattgccctg

SEQ ID NO: 696454 - DNA, 75 bp, synthetic construct
  source 1..75: mol_type = other DNA
gcgggtaactcaggtttaattcagactttccttgcgggctatttagtgcagacgttattgtttaacaaagcaatt

SEQ ID NO: 696455 - DNA, 75 bp, synthetic construct
  source 1..75: mol_type = other DNA
gggttgggtgcaggtgcggaaatttccggtgccggtacgatgctggcggaatatgcgccaaaaggtaagcgcgga

SEQ ID NO: 696456 - DNA, 75 bp, synthetic construct
  source 1..75: mol_type = other DNA
cgattcccggctttatgaccattccgttccttggttggttatccgataaaattggtcgccggatcccgtatatta

SEQ ID NO: 696457 - DNA, 75 bp, synthetic construct
  source 1..75: mol_type = other DNA
tcaggactggatgagggggctaaacaaaaaagaacgcttcttatctgccacatggaagggaacaaaagaaatacc

SEQ ID NO: 696458 - DNA, 75 bp, synthetic construct
  source 1..75: mol_type = other DNA
aacagccaaaaattcccaagatcaacttcctttactcccgccagcggatggtccgtttggcttagaagccggtct

SEQ ID NO: 696459 - DNA, 75 bp, synthetic construct
  source 1..75: mol_type = other DNA
atgaagatagcgacgataaaaactgggcttgcttcactggcgatgctgccgggactggtaatggctgcacctgcg

SEQ ID NO: 696460 - DNA, 75 bp, synthetic construct
  source 1..75: mol_type = other DNA
cgccattgccgccgagctggagggtttctatctgcgtcagcacggcgaggaaaaaggtcgtcagattgcctgtgc

SEQ ID NO: 696461 - DNA, 75 bp, synthetic construct
  source 1..75: mol_type = other DNA
atgaaaaagccattaccccccgtattacgcgccgcgctgtatcgtcgcgccgtggcctgtgcatggctgacggta

SEQ ID NO: 696462 - DNA, 75 bp, synthetic construct
  source 1..75: mol_type = other DNA
ggaccactcaaagccgccccgtcgctgtcctttctcgggctggccgtgatggatgagctttgcgcccgtcatatc

SEQ ID NO: 696463 - DNA, 75 bp, synthetic construct
  source 1..75: mol_type = other DNA
ccggtgccggtacgatgctggcggaatatgcgccaaaaggtaagcgcggaattatctcctcatttgtggctatgg

SEQ ID NO: 696464 - DNA, 75 bp, synthetic construct
  source 1..75: mol_type = other DNA
agacccgtcttgaggtaaagagcgtctttctggccgaggggctgagcacatacaagccgctgaaagccagcaacc

SEQ ID NO: 696465 - DNA, 75 bp, synthetic construct
  source 1..75: mol_type = other DNA
cctgctggaagatttaatggaagccggtccactcaaaaccgccccgtcgctgtcctttctcgggctggccgtgat

SEQ ID NO: 696466 - DNA, 75 bp, synthetic construct
  source 1..75: mol_type = other DNA
gggataccctacgatgatgttgataccggaatcgagcgcatgaatgaaatgacacaacaggcgcaaaaagcactt

SEQ ID NO: 696467 - DNA, 75 bp, synthetic construct
  source 1..75: mol_type = other DNA
catcacagcgaaaccgttattcaccgttacggtaccggcgcaatggtgttgtgctggcactgcgacaaccagctg

SEQ ID NO: 696468 - DNA, 75 bp, synthetic construct
  source 1..75: mol_type = other DNA
tggcgtatttgggttatcttgccggatatcagcacattaatgactgtatggaagatgaacattatcgtcatgcgg

SEQ ID NO: 696469 - DNA, 75 bp, synthetic construct
  source 1..75: mol_type = other DNA
tccaccggcctgacagattaacaaaaagcactcttgatttgattaaatctcgatgctgtgaatctgacgatggtt

SEQ ID NO: 696470 - DNA, 75 bp, synthetic construct
  source 1..75: mol_type = other DNA
aagaccatttttaaccagtaaatctgaaatggttattgaagctaaaaaaatactgaaatttttcgacgaaaaaat

SEQ ID NO: 696471 - DNA, 75 bp, synthetic construct
  source 1..75: mol_type = other DNA
gcacattaatgactgtatggaagatgaacattatcgttatgcggcgtatggcttgatgttgcaggaacaagcgcc

SEQ ID NO: 696472 - DNA, 75 bp, synthetic construct
  source 1..75: mol_type = other DNA
agtacacatgacttggccaacggtcaagcgaagagcctgggttgtaagactttgaccaaaactaaccctatcaat

SEQ ID NO: 696473 - DNA, 75 bp, synthetic construct
  source 1..75: mol_type = other DNA
ctcaccgcatgttgaactggcggtgcatttatttgctgatttggccctcgccacgtccttccttggtgtagcatt

SEQ ID NO: 696474 - DNA, 75 bp, synthetic construct
  source 1..75: mol_type = other DNA
cactgccggactgcctctggtttacccggactggcttgcccctgaccatctcacggtttactggcgcgttgccgt

SEQ ID NO: 696475 - DNA, 75 bp, synthetic construct
  source 1..75: mol_type = other DNA
atgtaacaacaaaggttgaaaccatttctgacgtagctttagaaatttcccgtttaaaagttacgattggaatat

SEQ ID NO: 696476 - DNA, 75 bp, synthetic construct
  source 1..75: mol_type = other DNA
atgcggaaccaggcgaagaattgatctttatactggaagaaccaagcccagaattgagtgatcaggaattatcaa

SEQ ID NO: 696477 - DNA, 75 bp, synthetic construct
  source 1..75: mol_type = other DNA
caacctacggcgagccgagtaacgacgtgctgcaaagtgtaatgggcgtcgatccacagcctccggtgaaggaga

SEQ ID NO: 696478 - DNA, 75 bp, synthetic construct
  source 1..75: mol_type = other DNA
acaactaggttgtgacgagattataacaataggcgtcagtatgggaggatatgcagcttcattatttggcgctct

SEQ ID NO: 696479 - DNA, 75 bp, synthetic construct
  source 1..75: mol_type = other DNA
atatatcattgatatacccacatattcttaatatcttctcagtggacacaacaaaatctcaagatttcaaccttt

SEQ ID NO: 696480 - DNA, 75 bp, synthetic construct
  source 1..75: mol_type = other DNA
acgctgagcctggtgtactggaacagacggcccaagcttacattgaatcgcatggtgccattgaacgtcatcttg

SEQ ID NO: 696481 - DNA, 75 bp, synthetic construct
  source 1..75: mol_type = other DNA
ataacagcccaatggaacgcttcttcaggagtctgaagaacgaatggatgccggtggtgggttacgaagcttctg

SEQ ID NO: 696482 - DNA, 75 bp, synthetic construct
  source 1..75: mol_type = other DNA
actcatacgttgcacatgattgtcaaataggagactatgttacatttgctcctggggctaaatgtaatggatatg

SEQ ID NO: 696483 - DNA, 75 bp, synthetic construct
  source 1..75: mol_type = other DNA
tatcgacctgctgttactggcactgacattatttgtcggccaggtattaagcgacaacctgaatgcgggcagtcg

SEQ ID NO: 696484 - DNA, 75 bp, synthetic construct
  source 1..75: mol_type = other DNA
ccggcgagcagctaaacttgatgctacaacagcgggaatggcgcgaaggattccttgccgaacggatgcaggatg

SEQ ID NO: 696485 - DNA, 75 bp, synthetic construct
  source 1..75: mol_type = other DNA
accagggctggtgcatcaggcaaatggcggtattttaatcatctccttgcgtacactgctggcacaacctctgct

SEQ ID NO: 696486 - DNA, 75 bp, synthetic construct
  source 1..75: mol_type = other DNA
ttacgtaacgccgttagcgcaaatgataatttcgcaacactaacgcaagtcgtcattgctgactgggtggaagcg

SEQ ID NO: 696487 - DNA, 75 bp, synthetic construct
  source 1..75: mol_type = other DNA
tggatggcgatagtgcctcgatggctgaactctgcgccctgataagcgccctcgccgatgtgccggtgaatcaga

SEQ ID NO: 696488 - DNA, 75 bp, synthetic construct
  source 1..75: mol_type = other DNA
acaatctgggcagtggacgatgtcactgatgcactgcctttattattaaatctgatgtgggatggcgaaggccag

SEQ ID NO: 696489 - DNA, 75 bp, synthetic construct
  source 1..75: mol_type = other DNA
ttacgtaacgcagtgagtgcagatgataattttgcgactttaacgcaagttgtcgctgccgactgggtagaagca

SEQ ID NO: 696490 - DNA, 75 bp, synthetic construct
  source 1..75: mol_type = other DNA
tctgtgggcattgatgtgttacaccgcactgctattgctggaggtgtatcagcatgtacccgcagataccggtct

SEQ ID NO: 696491 - DNA, 75 bp, synthetic construct
  source 1..75: mol_type = other DNA
cccaatcatcatgacctcgctggcgtttattgcgggggtaatgccgctggcgatagcaaccggcgcaggggcgaa

SEQ ID NO: 696492 - DNA, 75 bp, synthetic construct
  source 1..75: mol_type = other DNA
aaattctctcatttacatgaatataatgatccctatgagtttttccttactattgattttaatcgcggttctgat

SEQ ID NO: 696493 - DNA, 75 bp, synthetic construct
  source 1..75: mol_type = other DNA
agcgatccgaaccttggcgtgattgtcgaaaccctgaccgaacacggtactcgttactgcatggcgcagaattat

SEQ ID NO: 696494 - DNA, 75 bp, synthetic construct
  source 1..75: mol_type = other DNA
tgatgcgtgagaaagggatgaatcgcagcgaatccgggcagttaggtttctcggtactgctgtttcaggatctgg

SEQ ID NO: 696495 - DNA, 75 bp, synthetic construct
  source 1..75: mol_type = other DNA
gaccacgccgctgctgatgaagctggtggataaatggctatcccgccagtttaacggaccggaagaagaagacga

SEQ ID NO: 696496 - DNA, 75 bp, synthetic construct
  source 1..75: mol_type = other DNA
cagcatttgtgattctgaatggtattttggtgctgatgttcttgaactgcgtaacaacgaatcggatagtaaaaa

SEQ ID NO: 696497 - DNA, 75 bp, synthetic construct
  source 1..75: mol_type = other DNA
aggatgatgtacggaatcccggtgccttgcctttgttgtctctggcaccattacaacgtgacattatcaaaatcg

SEQ ID NO: 696498 - DNA, 75 bp, synthetic construct
  source 1..75: mol_type = other DNA
atgacggcatgtgttcagcgaaaagatgccaggggaacggtgcgtttcctgtggcaactggtgccattacagcgc

SEQ ID NO: 696499 - DNA, 75 bp, synthetic construct
  source 1..75: mol_type = other DNA
ataaactcgattttctccgcgaggccaggatattaaacaccatatggctcattaccgctttcggtttggcggcaa

SEQ ID NO: 696500 - DNA, 75 bp, synthetic construct
  source 1..75: mol_type = other DNA
gattgaagccgagtttccgatctcgatcaccggaatgttgatggatgctatcgaagcgcgtttacagcagcagta

SEQ ID NO: 696501 - DNA, 75 bp, synthetic construct
  source 1..75: mol_type = other DNA
ctggtgatgctgctggcagccgtatccgtctggcaggtgccggagcagtaccaggggcggttatttttactgtgg

SEQ ID NO: 696502 - DNA, 75 bp, synthetic construct
  source 1..75: mol_type = other DNA
caccgccgcgacgctgctgctggtgttgggttccgcattgtttatggatgcgctggggctgtcgatggcgctcgg

SEQ ID NO: 696503 - DNA, 75 bp, synthetic construct
  source 1..75: mol_type = other DNA
gcggaaagcgaatatcgccatgaactggaaacggctatcgatccgtttaagggcttgttgctcgggctatttttt

SEQ ID NO: 696504 - DNA, 75 bp, synthetic construct
  source 1..75: mol_type = other DNA
tattcttgcgcgagcgcgcggacgtgtggaagcgcatgagttattacaggcaggggtgacgcagttttcccgtga

SEQ ID NO: 696505 - DNA, 75 bp, synthetic construct
  source 1..75: mol_type = other DNA
tttcggaactcggcgtggtgttcctgatgtttatcatcggcctggagttgaatccctccaagctttggcaactgc

SEQ ID NO: 696506 - DNA, 75 bp, synthetic construct
  source 1..75: mol_type = other DNA
gggcgttatgggcagtggctcactggcttcagtatgatgtttttaatgtacgccctgacagcggcgtacattagc

SEQ ID NO: 696507 - DNA, 75 bp, synthetic construct
  source 1..75: mol_type = other DNA
ggcaggggtgacgcagttttcccgtgaaacattctccagtgcgttagagctggggcgcaagacgctggtcacgct

SEQ ID NO: 696508 - DNA, 75 bp, synthetic construct
  source 1..75: mol_type = other DNA
atgtttatcatcggccttgagttgaatccctccaagctttggcaactgcggcgttcgatttttggcgtaggcgcg

SEQ ID NO: 696509 - DNA, 75 bp, synthetic construct
  source 1..75: mol_type = other DNA
cgctggggctgtcgatggcgctcggtacatttattgcgggcgtgctgctggcggaaagtgaatatcgccatgaac

SEQ ID NO: 696510 - DNA, 75 bp, synthetic construct
  source 1..75: mol_type = other DNA
tggtccgtggggactggggtttattagcgacgtcgatgagatcctccacttttcggaacttggcgtggtgttcct

SEQ ID NO: 696511 - DNA, 75 bp, synthetic construct
  source 1..75: mol_type = other DNA
aagtgaatatcgccatgaactggaaacggctatcgatcccttcaaaggcttgctgctcggtttgttctttatctc

SEQ ID NO: 696512 - DNA, 75 bp, synthetic construct
  source 1..75: mol_type = other DNA
tgtatctgctggcgcgattgtatggcgtgcgtagctctgagcggatgcagtttgctggcgtgttgagtcagggcg

SEQ ID NO: 696513 - DNA, 75 bp, synthetic construct
  source 1..75: mol_type = other DNA
cgatgtctcaactgcaatggcgtgcaattgatgcgtgagaaagggatgaatcgcagcgaatccgggcagctcggg

SEQ ID NO: 696514 - DNA, 75 bp, synthetic construct
  source 1..75: mol_type = other DNA
tttgctggtgtgctgagtcagggcggtgagtttgcctttgtgctcttttctacagcctcttcacaacgattgttt

SEQ ID NO: 696515 - DNA, 75 bp, synthetic construct
  source 1..75: mol_type = other DNA
gagcagggggaatttgatttttacaggcaaatttatcctgtgacaggtggagagcaccaggttgaagccttgatg

SEQ ID NO: 696516 - DNA, 75 bp, synthetic construct
  source 1..75: mol_type = other DNA
ccgtagtgctgggggcgaaaactgaccgtatccgttttaatgagtctgagaaattattgacctggggtttccgct

SEQ ID NO: 696517 - DNA, 75 bp, synthetic construct
  source 1..75: mol_type = other DNA
atgtctgatcatctgggctttcgttcgtcactgctgcaagcgagctttaactacgaaaggatgcaggcgggcggt

SEQ ID NO: 696518 - DNA, 75 bp, synthetic construct
  source 1..75: mol_type = other DNA
tcgggattgatatgccattccaggatgatccaaccgatgaatgggcgatctgtgatggtgactggaagatgatta

SEQ ID NO: 696519 - DNA, 75 bp, synthetic construct
  source 1..75: mol_type = other DNA
agtttatgaactgaatttggcaggggaaactgatggattacgtggtcgcaaggataatctttgggaaggcggcat

SEQ ID NO: 696520 - DNA, 75 bp, synthetic construct
  source 1..75: mol_type = other DNA
taaaatttctggaagagcatttaattcttaatacacagcgctatgcccatcatgatgagacatctttaattacag

SEQ ID NO: 696521 - DNA, 75 bp, synthetic construct
  source 1..75: mol_type = other DNA
aaggagaaaaccgcgacaccattaaaggcctcaaagtggcactgtttggcccaatcgccgggattggcgatgcga

SEQ ID NO: 696522 - DNA, 75 bp, synthetic construct
  source 1..75: mol_type = other DNA
taaagtcttcccgaacattttaccgatggcctacaccctgctgatgtattacttcctgcgggtgaaaaaagcgca

SEQ ID NO: 696523 - DNA, 75 bp, synthetic construct
  source 1..75: mol_type = other DNA
acttactgcgggtgaaaaaagcgcatccagtactgttaatcggcgtaacgtttgtgctttccatcgtttgttccg

SEQ ID NO: 696524 - DNA, 75 bp, synthetic construct
  source 1..75: mol_type = other DNA
gaaaaagatttataaggacgacaaaccgggcctaagcgcggcgatgaaagataacctcgaatttattaataccca

SEQ ID NO: 696525 - DNA, 75 bp, synthetic construct
  source 1..75: mol_type = other DNA
gcctggttgacccacggctttgaagtggctggcggtattctgcctgccgttggttttggcttgctgctgcgcgta

SEQ ID NO: 696526 - DNA, 75 bp, synthetic construct
  source 1..75: mol_type = other DNA
agagaactcgcagatgattgcccgttcggcaaccatcctcgggatcacggtaatcggcgggctgatcgcttcgta

SEQ ID NO: 696527 - DNA, 75 bp, synthetic construct
  source 1..75: mol_type = other DNA
atcgttatttttaccagtgacaatggcccggtcacacgtgaagcacgtaaggtctatgagctgaacctggcaggg

SEQ ID NO: 696528 - DNA, 75 bp, synthetic construct
  source 1..75: mol_type = other DNA
atggtagtgtccgctattgccagtacacctcatctgttgagttgggcgggggcggcatatattgtctggctggcg

SEQ ID NO: 696529 - DNA, 75 bp, synthetic construct
  source 1..75: mol_type = other DNA
tgcatctttatggaaaaatatcaccaatggctgaaataatggacatcgctgaagagtacaagctattggtcctag

SEQ ID NO: 696530 - DNA, 75 bp, synthetic construct
  source 1..75: mol_type = other DNA
ctcactggttcggaacaaatcttttacagcgggttcaaagaatttgtgcgcctgcatcgtgccaatagccatgcg

SEQ ID NO: 696531 - DNA, 75 bp, synthetic construct
  source 1..75: mol_type = other DNA
tccatttatatggacagattagtgatatgcggaggatatctgatatagcaaggaaatataatcttttggtccttg

SEQ ID NO: 696532 - DNA, 75 bp, synthetic construct
  source 1..75: mol_type = other DNA
gtttttatcctggaaaaaatctcggagcattaggtgatgcaggtgctatcacaactaatgatgatgaattagcga

SEQ ID NO: 696533 - DNA, 75 bp, synthetic construct
  source 1..75: mol_type = other DNA
catgacgccaggaccgaacaatattctcgcccttagctctgctacgtcgcatggatttcgtcaaagtacccgcgt

SEQ ID NO: 696534 - DNA, 75 bp, synthetic construct
  source 1..75: mol_type = other DNA
gtgtctcatcgttctgaatttcagcacgtaatgactgaaatacgtaataatcctgtaaaatttctggaagagaat

SEQ ID NO: 696535 - DNA, 75 bp, synthetic construct
  source 1..75: mol_type = other DNA
ttacgcggtgaacaaaaaatcgctgattgataacgcgttgtatggtacccagcaggtcgccgacaccctgtttgc

SEQ ID NO: 696536 - DNA, 75 bp, synthetic construct
  source 1..75: mol_type = other DNA
aatactgccaaagcccccaccaacgagctggcagtacgtgaagcgctcaactacgcggtgaacaaaaaatcgctg

SEQ ID NO: 696537 - DNA, 75 bp, synthetic construct
  source 1..75: mol_type = other DNA
tcggtacggttggctccatcagcccgtatattggtctgtttggtacggtctgggggatcatgcacgcctttatcg

SEQ ID NO: 696538 - DNA, 75 bp, synthetic construct
  source 1..75: mol_type = other DNA
agttggggggatgcagccgggtttagcttttatcctggcaagaatctaggtgcactaggtgatgcgggagctgta

SEQ ID NO: 696539 - DNA, 75 bp, synthetic construct
  source 1..75: mol_type = other DNA
tcattatgcttattgaccatggatattcactggccgctattatgacggatattattacaacgccactgtttaaac

SEQ ID NO: 696540 - DNA, 75 bp, synthetic construct
  source 1..75: mol_type = other DNA
tgccattcgtgattttacgatggaataccctacacacatatatgatttggcactgtctaacactcaatccagacg

SEQ ID NO: 696541 - DNA, 75 bp, synthetic construct
  source 1..75: mol_type = other DNA
atttggtgcgctgcataagtgtgagctgtgtaaccagaaaggtgtggagcgtctcgataaaggcggtctgccagg

SEQ ID NO: 696542 - DNA, 75 bp, synthetic construct
  source 1..75: mol_type = other DNA
gccttatgaaaatctcgacctgccgaaactggacgatctttctactggtgcgcgttccgaacatgtccaacacac

SEQ ID NO: 696543 - DNA, 75 bp, synthetic construct
  source 1..75: mol_type = other DNA
gccgttactgcatggtcgcctgcccatacaacgtgccgaagtacgactacaacaacccgtttggtgcgctgcata

SEQ ID NO: 696544 - DNA, 75 bp, synthetic construct
  source 1..75: mol_type = other DNA
acaataacaagggaagactcactcgtggctgcaaccctgcttactcaaaatctattcacacatggttacgttttg

SEQ ID NO: 696545 - DNA, 75 bp, synthetic construct
  source 1..75: mol_type = other DNA
gtgaacagacgtaattttattaaagcagcctcctgcggggcattgctgacgggcgcgctgccgtctgtcagccat

SEQ ID NO: 696546 - DNA, 75 bp, synthetic construct
  source 1..75: mol_type = other DNA
taaagtccaggatagtcagttgatgaaatatatcctgtacaaaggatttattggcatcgacggtattagcctgac

SEQ ID NO: 696547 - DNA, 75 bp, synthetic construct
  source 1..75: mol_type = other DNA
actacatcttatccgctctacgggataaacgctgcgatatccgcgatcgcggataaaaaggaggatttaaaagtc

SEQ ID NO: 696548 - DNA, 75 bp, synthetic construct
  source 1..75: mol_type = other DNA
atgttctggaaccctgaagtaataacgacgaccggaaaatcactccgcatcactcaaactccatttaacataata

SEQ ID NO: 696549 - DNA, 75 bp, synthetic construct
  source 1..75: mol_type = other DNA
aaaagatccgaaaaccggcattgtccattacgacaaagatgtgtgcaccggctgccgttactgcatggtcgcctg

SEQ ID NO: 696550 - DNA, 75 bp, synthetic construct
  source 1..75: mol_type = other DNA
ctaactttgcaacagtgccagctgggttggtactggttaagtcgagtaagaggaaaagtacaatatgcagaccta

SEQ ID NO: 696551 - DNA, 75 bp, synthetic construct
  source 1..75: mol_type = other DNA
atgtactggcaaaagtcggtgggtttgatttggtcggaatggctggcgtgatgttaggtgccgcctcctgtggtt

SEQ ID NO: 696552 - DNA, 75 bp, synthetic construct
  source 1..75: mol_type = other DNA
gcgtgaagctgctgtggggaaccgccaactgctttacaaaccctcgctatggcgcgggtgcggcgacgaacccag

SEQ ID NO: 696553 - DNA, 75 bp, synthetic construct
  source 1..75: mol_type = other DNA
atcgcgttcgttatgaaggctcaaaatcctctaacccgttagcattccgtcactacaatcccgacgaactggtgt

SEQ ID NO: 696554 - DNA, 75 bp, synthetic construct
  source 1..75: mol_type = other DNA
tgggccgctttatgcaaatggtggttgagcataaacataaaatcggcttccagggtacgttgcttatcgaaccga

SEQ ID NO: 696555 - DNA, 75 bp, synthetic construct
  source 1..75: mol_type = other DNA
ttaaaactctaatttctaaagagagaaaatcgcattttattacgccatttgctttggtttataaaacattttgtg

SEQ ID NO: 696556 - DNA, 75 bp, synthetic construct
  source 1..75: mol_type = other DNA
actgatgcggccggtcaggtggtatttgaaaccagactgaagcccacggtcgccatcgtggacgcaggccgccgc

SEQ ID NO: 696557 - DNA, 75 bp, synthetic construct
  source 1..75: mol_type = other DNA
agtctggcaccactctttctggatactgaaacgacaggactggataatacctcggaagccctggaaatcggcctg

SEQ ID NO: 696558 - DNA, 75 bp, synthetic construct
  source 1..75: mol_type = other DNA
tacattatgcgcaccaacataaaccaaggaagaatccagtcgttggcggtcatgattgtcgtgctcattaataac

SEQ ID NO: 696559 - DNA, 75 bp, synthetic construct
  source 1..75: mol_type = other DNA
actctgatagaattgggtctcaaaagacgcaatgcgtgtgcagattttcttttagatgttgtgaaacaagaaatt

SEQ ID NO: 696560 - DNA, 75 bp, synthetic construct
  source 1..75: mol_type = other DNA
atacgatcccagccatcgatcctgccgctatgtcgcgtgcacaacggcatattgacgggttactcaaacctgttg

SEQ ID NO: 696561 - DNA, 75 bp, synthetic construct
  source 1..75: mol_type = other DNA
gcgtgaagctgctgtggggaaccgctaactgctttacaaaccctcgctacggcgcgggtgcggcgacgaacccag

SEQ ID NO: 696562 - DNA, 75 bp, synthetic construct
  source 1..75: mol_type = other DNA
aactcaggttgttaccgcgatggaagcgacgcataagttgggcggtgaaaactatgtattgtggggcggtcgtga

SEQ ID NO: 696563 - DNA, 75 bp, synthetic construct
  source 1..75: mol_type = other DNA
ctcccggtgctgagccggtgaaatggtacaaaagcgcctatggcggcaagtacgccgtataccgcattgcagact

SEQ ID NO: 696564 - DNA, 75 bp, synthetic construct
  source 1..75: mol_type = other DNA
gcaacagaaatcattgctgtttccggggcgcgctgctgggtgggatttgatccttcgcgtggcgtggatagttct

SEQ ID NO: 696565 - DNA, 75 bp, synthetic construct
  source 1..75: mol_type = other DNA
cacggcggtatcggcaaagctgagcacgctggcaacggtgacatggagcgatgcaggcagtcgctttgtggttac

SEQ ID NO: 696566 - DNA, 75 bp, synthetic construct
  source 1..75: mol_type = other DNA
ggcgataaagccattgccaaattcactgctgttactgatggcgcattcaaactgaccattaacggcacgttaaaa

SEQ ID NO: 696567 - DNA, 75 bp, synthetic construct
  source 1..75: mol_type = other DNA
gggctgacggtgtcactctggaagtcaatggcggagattataacgttattgaacatgtccgcatcgcggataaag

SEQ ID NO: 696568 - DNA, 75 bp, synthetic construct
  source 1..75: mol_type = other DNA
gaaatagcaaagcattatgcagaaaactatccgcatgtgcgcttgctgcatcaggcgaatgctggcgcatcggta

SEQ ID NO: 696569 - DNA, 75 bp, synthetic construct
  source 1..75: mol_type = other DNA
caggtggaaatttacatcatcgtgcgcacctacgaatgtccgaaaggtatcaaggcatctgtcatgctggatttg

SEQ ID NO: 696570 - DNA, 75 bp, synthetic construct
  source 1..75: mol_type = other DNA
catcagggactgaccttggcgctcttttaaaactgacaacggttgcaggtgccacagtcacccaggggcaggcag

SEQ ID NO: 696571 - DNA, 75 bp, synthetic construct
  source 1..75: mol_type = other DNA
agcctcatatgttaccataatgattttcatgtggttaaccttgctttcagttaatctatactttaatggtttacg

SEQ ID NO: 696572 - DNA, 75 bp, synthetic construct
  source 1..75: mol_type = other DNA
accgattatggtgaacatgagcgtacacttgaacagaaagtcgccgacgtcaaacgccagctacagtgcggagaa

SEQ ID NO: 696573 - DNA, 75 bp, synthetic construct
  source 1..75: mol_type = other DNA
ggtgctgacctacgtcaacgactatggcgcacggatgccgctgtattttaaatgtggcggcgatacctgccaggt

SEQ ID NO: 696574 - DNA, 75 bp, synthetic construct
  source 1..75: mol_type = other DNA
agacgaagactggatgagcgcggtcaaacaggcccagagcgtggcatccgtggaagggatccttctggcttttga

SEQ ID NO: 696575 - DNA, 75 bp, synthetic construct
  source 1..75: mol_type = other DNA
ccgtttgtgtaacagcgccgtcaccattgctgacagtccagcgcgtgtggcaaccggggcgctgtccgcattgaa

SEQ ID NO: 696576 - DNA, 75 bp, synthetic construct
  source 1..75: mol_type = other DNA
cgaccaaatgaccttttagcacgcgttggcggcgaagagtttggcgtcttgctgacggagaccgatactgaaagc

SEQ ID NO: 696577 - DNA, 75 bp, synthetic construct
  source 1..75: mol_type = other DNA
atgatgaacagcaccaataaacttagtgttattatcccgttatataatgcgggcgatgatttccgcacttgtatg

SEQ ID NO: 696578 - DNA, 75 bp, synthetic construct
  source 1..75: mol_type = other DNA
tcacccgtgtccggcgcacacactccacctcacccgtggagaactccttaattaccaaccctcaggagggtgaat

SEQ ID NO: 696579 - DNA, 75 bp, synthetic construct
  source 1..75: mol_type = other DNA
cagcgtcacgctgcgcaataacgacccgaaaatgccgtatctggcacaaagctggatggaagacgaacagggtaa

SEQ ID NO: 696580 - DNA, 75 bp, synthetic construct
  source 1..75: mol_type = other DNA
atgattaaacatctctctgccaaaacattgacaacggtactgtcgttgctggcagcaacggtaagtttttctgcc

SEQ ID NO: 696581 - DNA, 75 bp, synthetic construct
  source 1..75: mol_type = other DNA
ttgctggcgctggaattgtctggactctctataatggcctggcaagtgagttgaaatggcgcgatgatacaacac

SEQ ID NO: 696582 - DNA, 75 bp, synthetic construct
  source 1..75: mol_type = other DNA
cagatcaagcaattgttaattgatggcgtaaatcctgatacattgcccgtgtactttaaccggatgatggatgtt

SEQ ID NO: 696583 - DNA, 75 bp, synthetic construct
  source 1..75: mol_type = other DNA
cggaaaggcggtaaatcctgctccggctggctgtgggcttacgtcagcggagaaagagtaagcgtcaacggagca

SEQ ID NO: 696584 - DNA, 75 bp, synthetic construct
  source 1..75: mol_type = other DNA
atgactaaacatctctctgtcaaaacattggcaacggtactgtcgttactggctgcaacggtaagtttttctgct

SEQ ID NO: 696585 - DNA, 75 bp, synthetic construct
  source 1..75: mol_type = other DNA
aacgcatcgattcaatgatgaacgggcaggtaaaagtgcagggaatgccggatatcaacaaattgcctgccgatc

SEQ ID NO: 696586 - DNA, 75 bp, synthetic construct
  source 1..75: mol_type = other DNA
tttatcctgaatttcaccaacaaataacttatgaagcattgcgagtttgtcatgcagtgcgtaaagagccggata

SEQ ID NO: 696587 - DNA, 75 bp, synthetic construct
  source 1..75: mol_type = other DNA
actgacctatgtcaacgactatggcgctcggatgccgctctttttcacctgcaacggtaacagttgccaggttga

SEQ ID NO: 696588 - DNA, 75 bp, synthetic construct
  source 1..75: mol_type = other DNA
gctgacctatgtcaacgactatggcgcacggatgccactctttttcacctgtagcggcaacagttgtcaggttga

SEQ ID NO: 696589 - DNA, 75 bp, synthetic construct
  source 1..75: mol_type = other DNA
tggcgcaaagctggattgaagatgaaaagggcgtcaaaatcagctcgccgctggcggtattgccgcctgtacagc

SEQ ID NO: 696590 - DNA, 75 bp, synthetic construct
  source 1..75: mol_type = other DNA
ggacacggctggtgtttaacgaaagtgacaaatccatcagcgtcacgctgcgcaataacgatcccaaactgccct

SEQ ID NO: 696591 - DNA, 75 bp, synthetic construct
  source 1..75: mol_type = other DNA
cattactacctggcatgtcgccactggcgcaggtctacagcggtcatcagtttggcgtctgggcgggccagttgg

SEQ ID NO: 696592 - DNA, 75 bp, synthetic construct
  source 1..75: mol_type = other DNA
gtttgcccgttatcgggtacgtttgcaacaagacgaggttagcgatagtgagcgtcagcagctgatgcaaagcgt

SEQ ID NO: 696593 - DNA, 75 bp, synthetic construct
  source 1..75: mol_type = other DNA
actacaccgcctgcatgaggcgttgcgtaatcctttcagcgatcgtgatgacgattatgtctgtcgtccaccgga

SEQ ID NO: 696594 - DNA, 75 bp, synthetic construct
  source 1..75: mol_type = other DNA
caaaagcaactgatcagtgactgtgcagccagcccggcaacctgccagcagaaatacggtgatgtactgactgac

SEQ ID NO: 696595 - DNA, 75 bp, synthetic construct
  source 1..75: mol_type = other DNA
tgataagtttatcaccaccgactatttgcaacagtgccgccgatatgatccaactgataaaggaatttgacgctc

SEQ ID NO: 696596 - DNA, 75 bp, synthetic construct
  source 1..75: mol_type = other DNA
gcagctccatcagcaaaaggggatgataagtttatcaccaccgactatttgcaacagtgcccaaatggtggtcac

SEQ ID NO: 696597 - DNA, 75 bp, synthetic construct
  source 1..75: mol_type = other DNA
attgcaccgcctgcatggggcgttgcgaaatcctttcagcgacagagatgatgactatgtcagtcgtccacctga

SEQ ID NO: 696598 - DNA, 75 bp, synthetic construct
  source 1..75: mol_type = other DNA
tatgaacactgacaacatgtcgattctcggcctgaccctcgattacgggccgttcggcttcctcgatgattacga

SEQ ID NO: 696599 - DNA, 75 bp, synthetic construct
  source 1..75: mol_type = other DNA
gggtgatggacgggcggttttacgttcgacgatacgagaaagtctcgccagtgaggcgatgcattatctgggcat

SEQ ID NO: 696600 - DNA, 75 bp, synthetic construct
  source 1..75: mol_type = other DNA
cattactaccgggcatgtcaccactggcgcaggtctacagtggtcatcagtttggcgtctgggcgggccagttgg

SEQ ID NO: 696601 - DNA, 75 bp, synthetic construct
  source 1..75: mol_type = other DNA
cgaacagcagcttgcagatggcagcacaatggactggcatctgaaaggcgcggggctaacacagtattcacggat

SEQ ID NO: 696602 - DNA, 75 bp, synthetic construct
  source 1..75: mol_type = other DNA
caacaagacgaggttaccgatagtgagcgtcagcaactgatgcaaagcgttaacccggctctggtgttgcgcaac

SEQ ID NO: 696603 - DNA, 75 bp, synthetic construct
  source 1..75: mol_type = other DNA
aggctgggcgtaataaggttgttatgacggaggctgaaattcttatgaaacataaggatgatgaggctttgttga

SEQ ID NO: 696604 - DNA, 75 bp, synthetic construct
  source 1..75: mol_type = other DNA
ccgtactacgtgatcatcagcaacgccagcgctaaaaaaggcggcaccccgccggcgggattcacaccgctgatg

SEQ ID NO: 696605 - DNA, 75 bp, synthetic construct
  source 1..75: mol_type = other DNA
tccgtggcagcataaggtgacgctcatccgtaacggccaggacttcaccgtcaataacccgacgccgtactacgt

SEQ ID NO: 696606 - DNA, 75 bp, synthetic construct
  source 1..75: mol_type = other DNA
gttttcatgcgcatgtggtcttctggatcgatcgtcagagggttaaaaaaatatatccctttgcggagcggatta

SEQ ID NO: 696607 - DNA, 75 bp, synthetic construct
  source 1..75: mol_type = other DNA
aggtgacgctcatccgtaacggccaggacttcaccgtcaataacccgacgccgtactacgtggcagcacaaggtg

SEQ ID NO: 696608 - DNA, 75 bp, synthetic construct
  source 1..75: mol_type = other DNA
ggtgaaggtacaggggatgccggatatcaacaagctgcctgccgaccgcgagagcgtgttctacttcaacgtgcg

SEQ ID NO: 696609 - DNA, 75 bp, synthetic construct
  source 1..75: mol_type = other DNA
cctaatacgctgcaaattgccctgcaaacgcgtatcaaattgttctggcgacccaaggcactggcaaaaattaac

SEQ ID NO: 696610 - DNA, 75 bp, synthetic construct
  source 1..75: mol_type = other DNA
ggttttttaccgctttacttgaccatcacatcgatcagttggtcgcacgctattcctgcctgcgggccttacgca

SEQ ID NO: 696611 - DNA, 75 bp, synthetic construct
  source 1..75: mol_type = other DNA
ttctggctcgatcgtcagagggttaaaaaaatatatccctttgcggagcggattacggaatgctggcggtctatt

SEQ ID NO: 696612 - DNA, 75 bp, synthetic construct
  source 1..75: mol_type = other DNA
ttaatttatatttcaatcgtttgcgtagtgatatctggaatggggtgtcggtgattgctttttgtgctgtgctat

SEQ ID NO: 696613 - DNA, 75 bp, synthetic construct
  source 1..75: mol_type = other DNA
gcctgatttcttacaacctgatcatcgctggcttgaattgcagttgcgtatgctgctggaacaggttgaacaatt

SEQ ID NO: 696614 - DNA, 75 bp, synthetic construct
  source 1..75: mol_type = other DNA
ccgtattatgtgatcctcagcaacgccagtacgcagaaaaatggtaatccggcagccgggtttacgccgctggtg

SEQ ID NO: 696615 - DNA, 75 bp, synthetic construct
  source 1..75: mol_type = other DNA
gcaggtaaaagtccagggaatgccggatatcaacaagttacccgccgatcgtgagagtatgttctactttaacgt

SEQ ID NO: 696616 - DNA, 75 bp, synthetic construct
  source 1..75: mol_type = other DNA
gacgcgtatgtcgatcgcaacggatgccgaagtgctggtttattccggtccggcagcatccgtccggcagataga

SEQ ID NO: 696617 - DNA, 75 bp, synthetic construct
  source 1..75: mol_type = other DNA
tttccggtagtcagtcgcagtttacggtgggtcaggaagtgcctgttctggacagcgtcacttatcagggcaaca

SEQ ID NO: 696618 - DNA, 75 bp, synthetic construct
  source 1..75: mol_type = other DNA
cacgcaatcaggttctttctcaaatcatgtacagaccgtggattattctggcgcttctgcatccgcagcttcttc

SEQ ID NO: 696619 - DNA, 75 bp, synthetic construct
  source 1..75: mol_type = other DNA
cggtatttgcctatcacgttaatgatcctgaacgctacggtgtcgttgagtttgataaaaacggtacggcaataa

SEQ ID NO: 696620 - DNA, 75 bp, synthetic construct
  source 1..75: mol_type = other DNA
accgtaaagggtttattgatgctgagcaagtaaaagtgttagcacaacctctgaaaaaaaatgcttatggtcagt

SEQ ID NO: 696621 - DNA, 75 bp, synthetic construct
  source 1..75: mol_type = other DNA
acaaggactcagcaactttgtccgtttcagttctggatcgctcgatgcactttatgagttgttcagaacagacag

SEQ ID NO: 696622 - DNA, 75 bp, synthetic construct
  source 1..75: mol_type = other DNA
gacacggggacacatcagagcctgattgaggcaagcaactttattgcaacaattgaagagcgtcaagggttgaaa

SEQ ID NO: 696623 - DNA, 75 bp, synthetic construct
  source 1..75: mol_type = other DNA
aacaggggcgtttatctgttgccatgatgggacgtggttatgcatggttggacacggggacacatcaaagtctta

SEQ ID NO: 696624 - DNA, 75 bp, synthetic construct
  source 1..75: mol_type = other DNA
aaaaagtaattatgcggtaactgggctttatttctatgataacgacgttgtagaaatggcaaaaaatcttaagcc

SEQ ID NO: 696625 - DNA, 75 bp, synthetic construct
  source 1..75: mol_type = other DNA
gcctggaagaaaaaccgttacaaccaaaaagtaattatgcggtaaccgggctttatttctatgataacgatgttg

SEQ ID NO: 696626 - DNA, 75 bp, synthetic construct
  source 1..75: mol_type = other DNA
ttggtgataatatcttctatggtcacgacctgccgaaattaatggataccgctgttaacagagagagtggcgcaa

SEQ ID NO: 696627 - DNA, 75 bp, synthetic construct
  source 1..75: mol_type = other DNA
atctgcacgtggcgaactggaaattacagatattaaccgtatttatatggaacaaggacgtttgtctgtagccat

SEQ ID NO: 696628 - DNA, 75 bp, synthetic construct
  source 1..75: mol_type = other DNA
gctgttaataaagaaagtggcgcaacggtatttgcttatcacgttaatgatcctgagcgctatggtgtcgtggag

SEQ ID NO: 696629 - DNA, 75 bp, synthetic construct
  source 1..75: mol_type = other DNA
tcccaatgatatcgctatcagtagtgtagcttggtccgagggcgatcgtaccaagaagacctcccgcctggaaac

SEQ ID NO: 696630 - DNA, 75 bp, synthetic construct
  source 1..75: mol_type = other DNA
cagtgggcttgaccattttatggtgcaaatcatttcgcagaatgacggcccggtagggaaatctaaaaaggtaaa

SEQ ID NO: 696631 - DNA, 75 bp, synthetic construct
  source 1..75: mol_type = other DNA
actgctcctagtctgagcgaacagatcatttcgaacgtaccgaagctcgagactgccgctttcatcgcccctaat

SEQ ID NO: 696632 - DNA, 75 bp, synthetic construct
  source 1..75: mol_type = other DNA
gtactgctttattgaaccggatgtgccagtggccttaaatggcgacccgatgcgtttacagcaggtcatctccaa

SEQ ID NO: 696633 - DNA, 75 bp, synthetic construct
  source 1..75: mol_type = other DNA
tcgcgctatcgtaatgaaaacgtggccatttgtgtgctggtggatgtttcttcgcgcgtgaagatggaagagtcg

SEQ ID NO: 696634 - DNA, 75 bp, synthetic construct
  source 1..75: mol_type = other DNA
gggaaagactacattcctcacgtccgttctgccctattggatggccttgtgccctcagcctatcctgtcggcatt

SEQ ID NO: 696635 - DNA, 75 bp, synthetic construct
  source 1..75: mol_type = other DNA
gcaggtcaaagtattagctgaaccgctgaaaaaaaatgcttatggtcagtacttaatcaaattgacacagggata

SEQ ID NO: 696636 - DNA, 75 bp, synthetic construct
  source 1..75: mol_type = other DNA
gtgaaagcattagctgagccgctgaaaaaaaatgcttatggccagtatctgctgaaaatgattaaaggttattaa

SEQ ID NO: 696637 - DNA, 75 bp, synthetic construct
  source 1..75: mol_type = other DNA
aacagggcagattgtctgttgctatgatgggacgtggttatgcatggttagacacaggtacacaccaaagtctta

SEQ ID NO: 696638 - DNA, 75 bp, synthetic construct
  source 1..75: mol_type = other DNA
cagcgtccgcagtttgatatcctcacacaagtcggctcgtggtcgtattgctgatcttgggctcagcgataagac

SEQ ID NO: 696639 - DNA, 75 bp, synthetic construct
  source 1..75: mol_type = other DNA
gggctgtcgttcacatccggaaattccggtgaatgatgagcaatcgctggtgatggagtcatctttattggctgc

SEQ ID NO: 696640 - DNA, 75 bp, synthetic construct
  source 1..75: mol_type = other DNA
atttattatcggtgaagagtttattggtggtgatgattgtgctttgattcttggtgataatatcttttacggtca

SEQ ID NO: 696641 - DNA, 75 bp, synthetic construct
  source 1..75: mol_type = other DNA
tggccggtggatctggcacacgtctctatccggttactatggcggtgagcaagcagttgttgcccatctatgaca

SEQ ID NO: 696642 - DNA, 75 bp, synthetic construct
  source 1..75: mol_type = other DNA
ctttcagaattgattttgcctacaggaaagacacgcccagttttggtcattcctgtaggcacagtatgtgtatgg

SEQ ID NO: 696643 - DNA, 75 bp, synthetic construct
  source 1..75: mol_type = other DNA
tgggtaatggaatatacgtcaaacaagggacttcatattcattttatcggctacctggatgggcaacgtcacaac

SEQ ID NO: 696644 - DNA, 75 bp, synthetic construct
  source 1..75: mol_type = other DNA
cgaaacaataccgatgcgcagcatatgacaatcgacactaacggtcagatggtcatgaagagcaaacaacagttg

SEQ ID NO: 696645 - DNA, 75 bp, synthetic construct
  source 1..75: mol_type = other DNA
cacccgctggcgttgatggatggcccgttcagcgatgatacgttgcgcaactggccgtcattggtgcgcgaagac

SEQ ID NO: 696646 - DNA, 75 bp, synthetic construct
  source 1..75: mol_type = other DNA
aaagaacacggtattattctgggccgtagcaggcttcccgaaaaaagtaaccgcggccgaccacgacataactga

SEQ ID NO: 696647 - DNA, 75 bp, synthetic construct
  source 1..75: mol_type = other DNA
ggaaggggagggttactttcacctttgccgggctaaagacaaatacccggtgcgtatcgatcacgtgattcacta

SEQ ID NO: 696648 - DNA, 75 bp, synthetic construct
  source 1..75: mol_type = other DNA
atgtataatgctaaccccaattacgaaatgaatttcgcgattctgaaagatgtgaatgaacacatggaggggttg

SEQ ID NO: 696649 - DNA, 75 bp, synthetic construct
  source 1..75: mol_type = other DNA
tattattctggggcatagcaggcttcccgaaaaaagtaaccgcggccgaccacgactgaacagcatcctgctagg

SEQ ID NO: 696650 - DNA, 75 bp, synthetic construct
  source 1..75: mol_type = other DNA
agaacggctgcgtattgccctgctgaatgtggattacgtcaccagttttgaactgccttttcggctgcttttaac

SEQ ID NO: 696651 - DNA, 75 bp, synthetic construct
  source 1..75: mol_type = other DNA
ctaaacaggatcagaaagaacacggtattattctgggccgtagcaggcttcccgaaaaaagtaaccggggccgac

SEQ ID NO: 696652 - DNA, 75 bp, synthetic construct
  source 1..75: mol_type = other DNA
tcctgtaagcacagtatgtgtattgaaatataccgtttacttagtgaaacccaaacgatgctggcgggatattac

SEQ ID NO: 696653 - DNA, 75 bp, synthetic construct
  source 1..75: mol_type = other DNA
ttacgttacgccctcagctacctggctaaacaggatcagaaagaacacggtattattctgggccgtagcaggctt

SEQ ID NO: 696654 - DNA, 75 bp, synthetic construct
  source 1..75: mol_type = other DNA
gaatgaatcgccccgtcttcgccggcaatggcaggatgtcctggatgagtgccggcagacagaggcagggccgga

SEQ ID NO: 696655 - DNA, 75 bp, synthetic construct
  source 1..75: mol_type = other DNA
gatattctgatcatcagcaccccgcaggacacaccgcgctttgagcagctgctgggcgacggcagccagtggggc

SEQ ID NO: 696656 - DNA, 75 bp, synthetic construct
  source 1..75: mol_type = other DNA
ctgtatttgcctatcatgtgcacgacccggaacgttatggagtggtcgaatttgataatcaaggtaccgctattt

SEQ ID NO: 696657 - DNA, 75 bp, synthetic construct
  source 1..75: mol_type = other DNA
taataatgggtatttaactgtaagcttaaatcgagtaagtaaaattcatcaatgtttgttgcaattaaaaaaata

SEQ ID NO: 696658 - DNA, 75 bp, synthetic construct
  source 1..75: mol_type = other DNA
tcggagataatatcttctacggtcatgacctgccgaagttaatggacgcagcagttaacaaagaaagtggcgcaa

SEQ ID NO: 696659 - DNA, 75 bp, synthetic construct
  source 1..75: mol_type = other DNA
accgtaaagggtttattgattctggacaggttagggtattagccgagccacttaagaaaaatgcttatggtcaat

SEQ ID NO: 696660 - DNA, 75 bp, synthetic construct
  source 1..75: mol_type = other DNA
caagcccggacggcctggcccaggcctttatcctcggcgaagagtttatcggcggcgacgattgcgcgctggtgc

SEQ ID NO: 696661 - DNA, 75 bp, synthetic construct
  source 1..75: mol_type = other DNA
atgataaggcgatagagcaaatattgaaaatttatttttcagcgataaaagatcatttttgggctaatgtatgta

SEQ ID NO: 696662 - DNA, 75 bp, synthetic construct
  source 1..75: mol_type = other DNA
aaaggaaaactatgttctcattattgatgaaataaatcggggtaatatttcaaaaatttttggtgaactaattac

SEQ ID NO: 696663 - DNA, 75 bp, synthetic construct
  source 1..75: mol_type = other DNA
cgctggaaacacaacagggtaaggccttccagctgacgtataaaagtcaaaccaactttggaattttcccgtcac

SEQ ID NO: 696664 - DNA, 75 bp, synthetic construct
  source 1..75: mol_type = other DNA
atgattacttataccggatataaagtgaaaattatttttataatttttttattcttagtttgccatgtcgtagcc

SEQ ID NO: 696665 - DNA, 75 bp, synthetic construct
  source 1..75: mol_type = other DNA
actattaatgagggtacgagttttactgttaatatgccggatgtgtgggccagtgaattgagccgggctggtgcc

SEQ ID NO: 696666 - DNA, 75 bp, synthetic construct
  source 1..75: mol_type = other DNA
acctgaaaaacatatcggtgaaaatatcggtgttaaccagcccgggaccgacggcgacaagctgtactttatgta

SEQ ID NO: 696667 - DNA, 75 bp, synthetic construct
  source 1..75: mol_type = other DNA
ggcaacacggagaagagggcggttctatgcgcggcgcagcaaacgatctgcgcaaccaggcggctgcaatgggcg

SEQ ID NO: 696668 - DNA, 75 bp, synthetic construct
  source 1..75: mol_type = other DNA
aagacatttgagtccataggcaagcccttaccaaaccgccacacagtggtgctctcgcgccaagctggttatagc

SEQ ID NO: 696669 - DNA, 75 bp, synthetic construct
  source 1..75: mol_type = other DNA
ctgtgacaaaaatcatggcctgcgggaccacgctgatggggtacacacagtggtgctgttcatctccggactgca

SEQ ID NO: 696670 - DNA, 75 bp, synthetic construct
  source 1..75: mol_type = other DNA
gctgtctgttgctggcgctggaattgtatggactctctataatggcctggcaagtgagttgaaatggcgcgatga

SEQ ID NO: 696671 - DNA, 75 bp, synthetic construct
  source 1..75: mol_type = other DNA
tttgtcgcgcagaaacaacaagccgacatcgatcagaagtatgcccagttcgaggcagcacctgagaaggtcgaa

SEQ ID NO: 696672 - DNA, 75 bp, synthetic construct
  source 1..75: mol_type = other DNA
ttgtcggtgccgcgcttctgatggcggggtgtagcgccagtaacgaattgagtgctgccggtcagagtgtgcgca

SEQ ID NO: 696673 - DNA, 75 bp, synthetic construct
  source 1..75: mol_type = other DNA
aaggcaggtgctaagtcaactaagatcagcaataagttggtgcatgcggcgtcagttgatagatagttgcgcaat

SEQ ID NO: 696674 - DNA, 75 bp, synthetic construct
  source 1..75: mol_type = other DNA
acgatttcagaagaacgcttgttacacgtctgtccgagatgaatgtcgagcctcatgttactgagcgaatgctcg

SEQ ID NO: 696675 - DNA, 75 bp, synthetic construct
  source 1..75: mol_type = other DNA
ttccctggagaagacataaaaaaaccgatcagcatcgctgcagccaaccgattcgtaaatagaataaggggaggg

SEQ ID NO: 696676 - DNA, 75 bp, synthetic construct
  source 1..75: mol_type = other DNA
gtttaaccttgctttttatattactgctgtctgtagctggcgctggaattgtatggactctctataatggcctgg

SEQ ID NO: 696677 - DNA, 75 bp, synthetic construct
  source 1..75: mol_type = other DNA
aagccgcagacgtgttttcatcgagcggcctggccgcgtatgccattggcggcattatgatgattgctaccgttg

SEQ ID NO: 696678 - DNA, 75 bp, synthetic construct
  source 1..75: mol_type = other DNA
gctataagcctgtgtttaggtccaatagctatattctgtctcctgtggaatccaacaaaaggcatatttgctaag

SEQ ID NO: 696679 - DNA, 75 bp, synthetic construct
  source 1..75: mol_type = other DNA
gatagccgggagcctgttgaggttagcgcattaccgagagaactaaaacctcttgggcaggcgttgaataaaatg

SEQ ID NO: 696680 - DNA, 75 bp, synthetic construct
  source 1..75: mol_type = other DNA
ccggagccagtattcattacggcgctgacacctggaacgtgctggatattgttcagcgttgggacagcctgtttg

SEQ ID NO: 696681 - DNA, 75 bp, synthetic construct
  source 1..75: mol_type = other DNA
ctgttagggctttctctaccgggcttaatcactttcttactcttctggctggtgaacgtcggaatcggtttcggt

SEQ ID NO: 696682 - DNA, 75 bp, synthetic construct
  source 1..75: mol_type = other DNA
actgccgaaaacgcaaagtcagcggacctggaaaacatttaactattttaccttatggatgggttcggttcataa

SEQ ID NO: 696683 - DNA, 75 bp, synthetic construct
  source 1..75: mol_type = other DNA
tcacaagctgaagggctactcgaccaaagggaagagttataacaactacctgttcgcaatgtaccaggataacca

SEQ ID NO: 696684 - DNA, 75 bp, synthetic construct
  source 1..75: mol_type = other DNA
gttgatagcagtaaaaatatatcttctttaatgcctttcattacgacagatcagcatgtaaggacatgggcttaa

SEQ ID NO: 696685 - DNA, 75 bp, synthetic construct
  source 1..75: mol_type = other DNA
atgaagaaagataatctgagtaaaaaagatgaaacaatgatattcgccatttcagcaacgctaatgttgtatgtg

SEQ ID NO: 696686 - DNA, 75 bp, synthetic construct
  source 1..75: mol_type = other DNA
ggaaatagcctgccggctgcgggatatgggctggacgccggaacggattcaggaggcaaccggactttccggtga

SEQ ID NO: 696687 - DNA, 75 bp, synthetic construct
  source 1..75: mol_type = other DNA
agactaagacagagcggaatgccggtggtgacaacgaccgtggaggtgcacgataatctgacgggaacaacccgc

SEQ ID NO: 696688 - DNA, 75 bp, synthetic construct
  source 1..75: mol_type = other DNA
cggatcagacgtttgggagtacagcttccagctaaggtcatggattttctgagtgttgcattagcagtaactgca

SEQ ID NO: 696689 - DNA, 75 bp, synthetic construct
  source 1..75: mol_type = other DNA
ttttcatgatttatatgtcaaggatatgttgataagaaatatagagtcgggacgatcttttgatgattatagtgt

SEQ ID NO: 696690 - DNA, 75 bp, synthetic construct
  source 1..75: mol_type = other DNA
atgactattgcagaacgtcttatacagaaaggtttcgacgaagattttcaagaaggttttaaagaaggggctctt

SEQ ID NO: 696691 - DNA, 75 bp, synthetic construct
  source 1..75: mol_type = other DNA
atgacgcttgcagaacgtcttatacagaaaggttttgaaaaaggtgctcttgaagtggcgcgggaaatagcctgc

SEQ ID NO: 696692 - DNA, 75 bp, synthetic construct
  source 1..75: mol_type = other DNA
attgcatgagtgtgttctggcgacagcatgaagccgaattctctcgctttctgacatcgaagacaggtgatagcg

SEQ ID NO: 696693 - DNA, 75 bp, synthetic construct
  source 1..75: mol_type = other DNA
atgagcaccatcctgaaatgggcgggtaataaaaccgtcattatgccagaactgaaaaaataccttcctgctggc

SEQ ID NO: 696694 - DNA, 75 bp, synthetic construct
  source 1..75: mol_type = other DNA
ctgtttccgggtcgcgctgctggatgggatttgatccttcgcgtggcgtggatagttctgctgtgtacgaggtgc

SEQ ID NO: 696695 - DNA, 75 bp, synthetic construct
  source 1..75: mol_type = other DNA
tgtttctaacagtgatacatccctgatccgttcgctgtatcgcaattttactcaccactatatcaaggtaaaacg

SEQ ID NO: 696696 - DNA, 75 bp, synthetic construct
  source 1..75: mol_type = other DNA
atatttcctgtatctcaatcgtcacggttaccgtggtttatgtcgctataacaagagcgggcatttcaatattcc

SEQ ID NO: 696697 - DNA, 75 bp, synthetic construct
  source 1..75: mol_type = other DNA
tctataaaaagattgccgctgattgcgaagtgtttatatctcgtgccagagctttatttgaggaagcaaacaggg

SEQ ID NO: 696698 - DNA, 75 bp, synthetic construct
  source 1..75: mol_type = other DNA
actgatttcatgaaagcggtatattttctgtatctcaatcgacatggttaccgtgggttatgtcgctataacaag

SEQ ID NO: 696699 - DNA, 75 bp, synthetic construct
  source 1..75: mol_type = other DNA
gtaattataaaaatccgtattttcctgaaaaagaaattcgcgcatttgcagagaaagcccagcgtgcaacgttta

SEQ ID NO: 696700 - DNA, 75 bp, synthetic construct
  source 1..75: mol_type = other DNA
gtgtattgcgatccgccttatgacggtacgttttccggctatcacgctgacggcttcactgaagatgaccagtat

SEQ ID NO: 696701 - DNA, 75 bp, synthetic construct
  source 1..75: mol_type = other DNA
tctataaaaaaatcgcccttgattgtgaggctttcatatcacgcacgaaaagtatttttgcgatagcgaatagag

SEQ ID NO: 696702 - DNA, 75 bp, synthetic construct
  source 1..75: mol_type = other DNA
agtaaatctgcaacagaaatcattgctgtttccggggcgcgctgctgggtgggatttgatccatcgcgtggcgta

SEQ ID NO: 696703 - DNA, 75 bp, synthetic construct
  source 1..75: mol_type = other DNA
cagcatcggcgtagcagctggtgagagtaaatcagcaacagaaatcattgctgtttccgggccgcgctgctgggt

SEQ ID NO: 696704 - DNA, 75 bp, synthetic construct
  source 1..75: mol_type = other DNA
attaatgttatgtgggccgggattggggttgcactgcttggggggattttcatgctggtctttgagcgcaatgcg

SEQ ID NO: 696705 - DNA, 75 bp, synthetic construct
  source 1..75: mol_type = other DNA
agtaaatctgcaacagaaatcatcgctgtttctgggcgcgctgctgggtgggatttgagccttcgcgtggcgtgg

SEQ ID NO: 696706 - DNA, 75 bp, synthetic construct
  source 1..75: mol_type = other DNA
atgtatatcgggatagatcttggcacctcgggcgtaaaagttattttgctcaacgagcagggtgaggtggttgct

SEQ ID NO: 696707 - DNA, 75 bp, synthetic construct
  source 1..75: mol_type = other DNA
tgaccattcaactcgataatcatcaacagggaattggaacgtcgctgttttgggtagtatataacttaggtttta

SEQ ID NO: 696708 - DNA, 75 bp, synthetic construct
  source 1..75: mol_type = other DNA
acagtagtatctttcccatctaaatgggcaatggatttttgcaggaattattacagattagattttgataaatta

SEQ ID NO: 696709 - DNA, 75 bp, synthetic construct
  source 1..75: mol_type = other DNA
cattgagttgttgccgcaacttcctttagaacagtcgcatctgccgaacgcacagtgttatgctgcttatcagcc

SEQ ID NO: 696710 - DNA, 75 bp, synthetic construct
  source 1..75: mol_type = other DNA
atgtcccagctttaatcgcggctgctcaacaggctgatgaaagtgccgagcctgtctggtttctgccttatcttt

SEQ ID NO: 696711 - DNA, 75 bp, synthetic construct
  source 1..75: mol_type = other DNA
caacgagcagggtgaggtggttgcttcgcaaacggaaaagctgaccgtttcgcgcccgcatccactctggtcgga

SEQ ID NO: 696712 - DNA, 75 bp, synthetic construct
  source 1..75: mol_type = other DNA
cggtttcactgaagatgaccagtatcaccttgcatccgttcttgaacatcggtcatcagaaggacatccggtcat

SEQ ID NO: 696713 - DNA, 75 bp, synthetic construct
  source 1..75: mol_type = other DNA
gtaaaagctcagcgggcaacgtttatctgcgccagcttcgatgaaacgctggcgatgttgcacgcgggggatgtg

SEQ ID NO: 696714 - DNA, 75 bp, synthetic construct
  source 1..75: mol_type = other DNA
gtaattataaaaatccgtattttcctgaaaaagaaattcgtgcatttgcagtaaaagctcagcgggcaacgttta

SEQ ID NO: 696715 - DNA, 75 bp, synthetic construct
  source 1..75: mol_type = other DNA
taaatgatgaggatgcaagtttaatcgaacgcaaggctattgaaaaagcaacagtagtatctttcccatctaaat

SEQ ID NO: 696716 - DNA, 75 bp, synthetic construct
  source 1..75: mol_type = other DNA
tgtatatgcagcgaaaatttccagatttacccccttccgcccttgaatttttgaaatcggagatagcaaaagcgt

SEQ ID NO: 696717 - DNA, 75 bp, synthetic construct
  source 1..75: mol_type = other DNA
tggaaactgaattgtttaccttcattctgcaacgtgtggcacaggaaatttcggggatacttgtgcgtgtgccgt

SEQ ID NO: 696718 - DNA, 75 bp, synthetic construct
  source 1..75: mol_type = other DNA
gtgagtacacgaattgattatctggtggataaatactcttttacagagctgaatgaatctccacgtcttcgccgg

SEQ ID NO: 696719 - DNA, 75 bp, synthetic construct
  source 1..75: mol_type = other DNA
taatattgttattttcccttcagattagtgcagccattactggcaaggaaagtgaggttgtttcaccattattaa

SEQ ID NO: 696720 - DNA, 75 bp, synthetic construct
  source 1..75: mol_type = other DNA
gaagcagcggtgtctggagtccggtatggacagctgcctgtcgaagccggtaacgctggatgtgataaaacagac

SEQ ID NO: 696721 - DNA, 75 bp, synthetic construct
  source 1..75: mol_type = other DNA
tcgctcgattgataccgccgcggcctataaaaacgaagaaggcgtcggcaaggcactgaaaaatgccgcacttgc

SEQ ID NO: 696722 - DNA, 75 bp, synthetic construct
  source 1..75: mol_type = other DNA
tgatgtctgggatttccgtctcgacaaagacgaactcggcgaaattgcaaaactcgatcagggcaagcgtctcgg

SEQ ID NO: 696723 - DNA, 75 bp, synthetic construct
  source 1..75: mol_type = other DNA
cgaagcatggaaaggcatgatcgaattgcaaaaagagggattaatcaaaagcatcggcgtgtgcaacttccagat

SEQ ID NO: 696724 - DNA, 75 bp, synthetic construct
  source 1..75: mol_type = other DNA
aatgccggtggtgacaacgaccgcggaggtgcatgataatctgacgggaacaacccgcaaagtaccggtctacca

SEQ ID NO: 696725 - DNA, 75 bp, synthetic construct
  source 1..75: mol_type = other DNA
gtgaggaaaacttctggatagaccgggtttcgccggatgatggcggaagctgtcatctctggcttgggcgtggcg

SEQ ID NO: 696726 - DNA, 75 bp, synthetic construct
  source 1..75: mol_type = other DNA
gttcgaagaactaatggatgcctaccggcgcgaggcaatggcaattatcgcccgctgggatctggctgatcagct

SEQ ID NO: 696727 - DNA, 75 bp, synthetic construct
  source 1..75: mol_type = other DNA
atcgagatggagagcgacgatcctgctaacgctctgccgacgacggacaaagcggtcagcgataatgacgatatg

SEQ ID NO: 696728 - DNA, 75 bp, synthetic construct
  source 1..75: mol_type = other DNA
gacacgctgaccatcggtgaggaaaacttctggatagaccggatttcgccggatgatggcggaagctgtcatctc

SEQ ID NO: 696729 - DNA, 75 bp, synthetic construct
  source 1..75: mol_type = other DNA
atcagccagaaaaatgtggtgttcaatgataaacgatttggctgcgtgtacagcctgaaggccagcctttccggt

SEQ ID NO: 696730 - DNA, 75 bp, synthetic construct
  source 1..75: mol_type = other DNA
gcccccgcgaagccctgctcgacagcctgaaaaagttacaacttgattatatcgatctctacttaatgcactggc

SEQ ID NO: 696731 - DNA, 75 bp, synthetic construct
  source 1..75: mol_type = other DNA
acaagagttagtggatagtgcgctggctcatcatattccccgcattatttttaccagctcaacgtctgtctatgg

SEQ ID NO: 696732 - DNA, 75 bp, synthetic construct
  source 1..75: mol_type = other DNA
ggtacttcggtcgatattttgcgtcttgctggcctggtggggccggggcgtcatccagggcgcttctttgccgga

SEQ ID NO: 696733 - DNA, 75 bp, synthetic construct
  source 1..75: mol_type = other DNA
cgacgcgcaaggcacggtgaaagaaactaccccgcgtaatccggtaaccaacagtggacgagtattagaagaact

SEQ ID NO: 696734 - DNA, 75 bp, synthetic construct
  source 1..75: mol_type = other DNA
ggcgcaggtgtctggggcggcgaaaacctactgcctggtatgtcaccactggcgcaggtttacagtggtcatcag

SEQ ID NO: 696735 - DNA, 75 bp, synthetic construct
  source 1..75: mol_type = other DNA
ataaaagttatgcatgataagggaactggagcaactgaaatagctaagcatatgggtattgcgcgttcaaccgta

SEQ ID NO: 696736 - DNA, 75 bp, synthetic construct
  source 1..75: mol_type = other DNA
ttattgtcagacctagtaatgtatatggtttggcattaaagagtaagttattcctacctagcataatcagaaatg

SEQ ID NO: 696737 - DNA, 75 bp, synthetic construct
  source 1..75: mol_type = other DNA
gctattcactactttatgctgtcaccctacagcgtggtgatggacgttaaaatgctcaatttctttcgccatatg

SEQ ID NO: 696738 - DNA, 75 bp, synthetic construct
  source 1..75: mol_type = other DNA
aacgctacgcacaagattcagactgaatcatggagtccattggcccagggaggaaaaggcgtttttgaccagaaa

SEQ ID NO: 696739 - DNA, 75 bp, synthetic construct
  source 1..75: mol_type = other DNA
atgaaaaaggtcgcaattgtcgggttagggtggttaggcatgccgctggcgatgtcactttcagcgcgaggctgg

SEQ ID NO: 696740 - DNA, 75 bp, synthetic construct
  source 1..75: mol_type = other DNA
tggcgtcgcaaaagccgcgacctgttatccggtcactgcggggttaactcagcgttttacattcacaaatttacg

SEQ ID NO: 696741 - DNA, 75 bp, synthetic construct
  source 1..75: mol_type = other DNA
cgggagaggttcttcgtgattatctgactggcacaagtattgtgcaggcagcttctgcgctgaacatttcccgct

SEQ ID NO: 696742 - DNA, 75 bp, synthetic construct
  source 1..75: mol_type = other DNA
gttcgaagaacttatggatgcctaccggcgcgaggcaatggcaattatcgcccgctgggatctggcggatcggat

SEQ ID NO: 696743 - DNA, 75 bp, synthetic construct
  source 1..75: mol_type = other DNA
acctgcgtgaagtgaccaaaattttctcctcgctgattgtttcccctatcgtcggcctggtcattgcgggaggcc

SEQ ID NO: 696744 - DNA, 75 bp, synthetic construct
  source 1..75: mol_type = other DNA
aaaggcaaacgtaaaccgccattctggacgcgtattgcactgattgtttccgctgcgggcgtggcgttttcgcat

SEQ ID NO: 696745 - DNA, 75 bp, synthetic construct
  source 1..75: mol_type = other DNA
caacttgctgtggtgatggcggcattttttaacttttttggcgtattgcttggcggacttagcgtcgcctatgcc

SEQ ID NO: 696746 - DNA, 75 bp, synthetic construct
  source 1..75: mol_type = other DNA
tgcatccagctctcatacgctgattggcgcgatcatcgggattggtttaaccaatgcgttgatgaccgggacgtc

SEQ ID NO: 696747 - DNA, 75 bp, synthetic construct
  source 1..75: mol_type = other DNA
gcgcctataccgatgctaactacctcggtggtggtgacgtagatcaagactggtccgcgaacgtgggtgttaaat

SEQ ID NO: 696748 - DNA, 75 bp, synthetic construct
  source 1..75: mol_type = other DNA
gttatttatactcgtgccatgcaaccacaacttgctgtggtgatggcggcattttttaacttttttggcgtgtta

SEQ ID NO: 696749 - DNA, 75 bp, synthetic construct
  source 1..75: mol_type = other DNA
gaccgcgagcaggctttcaacttgtacgaatgggcaattaagtgcttgcatcttggggagcatcgcgaacttgtt

SEQ ID NO: 696750 - DNA, 75 bp, synthetic construct
  source 1..75: mol_type = other DNA
acaataaggaatggatgattgcgataataattacctacctttttgttttgttatgtctggcaacatacgctattg

SEQ ID NO: 696751 - DNA, 75 bp, synthetic construct
  source 1..75: mol_type = other DNA
ggcaatggtcgccttcagagcgtgcacgtctacaagacattgccaaacgctataaggtgaagtggtccggtaata

SEQ ID NO: 696752 - DNA, 75 bp, synthetic construct
  source 1..75: mol_type = other DNA
cgatgctaactacctcggtggtggtgacgtagatcaagactggtccgcgaatgtgggtgttaaatatacctggta

SEQ ID NO: 696753 - DNA, 75 bp, synthetic construct
  source 1..75: mol_type = other DNA
acgaatcgccctctgacggacttcgggggaaaaacgagtatttttagtcatcctgtttacctctttctcagggag

SEQ ID NO: 696754 - DNA, 75 bp, synthetic construct
  source 1..75: mol_type = other DNA
atgtcatacccgactaatgtcgttgcgctcgtagagagcgattttctggcccaggctcgtgaaatgatgaaagat

SEQ ID NO: 696755 - DNA, 75 bp, synthetic construct
  source 1..75: mol_type = other DNA
ggcgcgaacgatggtcagaaaggcattggtctggttatgttggtattgattggcgtcgcgccagcaggcttcgtg

SEQ ID NO: 696756 - DNA, 75 bp, synthetic construct
  source 1..75: mol_type = other DNA
ccggtacagtgaaatttgttaatgttgcccaggggacttgcatggaggcctttaaaaacggggtgatacataata

SEQ ID NO: 696757 - DNA, 75 bp, synthetic construct
  source 1..75: mol_type = other DNA
tcaacagcaggaggtggtagttctggctttcctgaagtttcaataatgagtaccggaggtgcactgattactgtc

SEQ ID NO: 696758 - DNA, 75 bp, synthetic construct
  source 1..75: mol_type = other DNA
tgattacccgctggcaggggaaatccgtggtttttgatgccagtcataacgtgtttgactacaaagtattacgaa

SEQ ID NO: 696759 - DNA, 75 bp, synthetic construct
  source 1..75: mol_type = other DNA
ttgatagcatccggcttcatcaactggcctcaacttttgacggtgtaacaggcaaaggcgttcgccaggaagtgc

SEQ ID NO: 696760 - DNA, 75 bp, synthetic construct
  source 1..75: mol_type = other DNA
ggcaaaggcgttcgccaggaagtactggaggccgctaaagacagccctgagttcgaagaactaatggatgcctac

SEQ ID NO: 696761 - DNA, 75 bp, synthetic construct
  source 1..75: mol_type = other DNA
cagaaagttttcacgcgtggccagcgtatggagccatacgtaatagacctgctttctgaggaaacagggatggaa

SEQ ID NO: 696762 - DNA, 75 bp, synthetic construct
  source 1..75: mol_type = other DNA
aaactatccataatatgccattcgtggtcactgcgcaggacgttctttgcgcaattttaactgcacatcatttgg

SEQ ID NO: 696763 - DNA, 75 bp, synthetic construct
  source 1..75: mol_type = other DNA
ggacgcgtattgcgctgatcctttccgctatcggtgtggcgttttctcacggcgcaaatgatggtcagaaaggca

SEQ ID NO: 696764 - DNA, 75 bp, synthetic construct
  source 1..75: mol_type = other DNA
taaaacggtaaccagcattctgatggcctgggtgtttaccctcccggctgcagtgctgctctccggcgggttgta

SEQ ID NO: 696765 - DNA, 75 bp, synthetic construct
  source 1..75: mol_type = other DNA
tgatgaagatatgtgtaatcgcgcatcagaaatcatcataaccgaaattaacaaaaacacatatcctccagattc

SEQ ID NO: 696766 - DNA, 75 bp, synthetic construct
  source 1..75: mol_type = other DNA
aaattctgtctaacattcgctcgttgagagcgtttgcgcgtgaagtggattttgcacttcttgaagatatgtcgg

SEQ ID NO: 696767 - DNA, 75 bp, synthetic construct
  source 1..75: mol_type = other DNA
gcatcacgaaatggtttatatgctgtacggcgatcaggatggccgtctggccccggcggtcagcctgaaagcgtg

SEQ ID NO: 696768 - DNA, 75 bp, synthetic construct
  source 1..75: mol_type = other DNA
tccggatttggcggtgaaattcatgttcatctgcataacgttgttacgcagaatccccgcgaactggcgaaactg

SEQ ID NO: 696769 - DNA, 75 bp, synthetic construct
  source 1..75: mol_type = other DNA
agctcgacgccagcttaacgcccttaatcagttacaacacacgggtacagtgctcagcgaaaaacaacaaaagct

SEQ ID NO: 696770 - DNA, 75 bp, synthetic construct
  source 1..75: mol_type = other DNA
cgggggcaaaatgcgcccgatggaggatgtgctggctgacctttataaagctacccgcaaatacggggaagttga

SEQ ID NO: 696771 - DNA, 75 bp, synthetic construct
  source 1..75: mol_type = other DNA
gcgtcttggttttgacattcttacccggtcaatgaatgtcgtcagggtgttgcctgcgctgtggggaatggtgac

SEQ ID NO: 696772 - DNA, 75 bp, synthetic construct
  source 1..75: mol_type = other DNA
cgatggaggatgtgctggccgacctttataaagccacccgcaaatacggggaagttgaccgggtatcgttcttta

SEQ ID NO: 696773 - DNA, 75 bp, synthetic construct
  source 1..75: mol_type = other DNA
cgatacgctgacagcagcatttacccggaccaatactgatttacgcgcgctgggcgaaaccatgaagtataccgg

SEQ ID NO: 696774 - DNA, 75 bp, synthetic construct
  source 1..75: mol_type = other DNA
ggtaaagatatgaacgccaagtaccgcgaaacctctcgcggcggcctggcaatgaaaatcgttgcctgcgattaa

SEQ ID NO: 696775 - DNA, 75 bp, synthetic construct
  source 1..75: mol_type = other DNA
ggcaaagacatgaacgccaagtaccgcgaaacctctcgcggcggcctggcgatgaaagtggttgcctgcgattaa

SEQ ID NO: 696776 - DNA, 75 bp, synthetic construct
  source 1..75: mol_type = other DNA
ttactactccatcggcggtggctttatcgttgatgaagaacattttggtcagcaggatagcgcaccggttgaagt

SEQ ID NO: 696777 - DNA, 75 bp, synthetic construct
  source 1..75: mol_type = other DNA
acagacagcaataccgggacgctacgcagactcagcaaaattgctgataacacaggtaagctggttgatgagacg

SEQ ID NO: 696778 - DNA, 75 bp, synthetic construct
  source 1..75: mol_type = other DNA
ctgtggggaatggtgacgggttccgtttctttactgggaggcgctatcggggcgctgttcagtccggttggtctt

SEQ ID NO: 696779 - DNA, 75 bp, synthetic construct
  source 1..75: mol_type = other DNA
cggtgttcttaatatggcgctggcaggtggcgtcgaactcggcgagacggctgatataggctccaatatcctcac

SEQ ID NO: 696780 - DNA, 75 bp, synthetic construct
  source 1..75: mol_type = other DNA
acctttgaacggtttggtcctgtttttgacgcaatcggaagcgggatcagccaggtgtttaactggtttaaatcg

SEQ ID NO: 696781 - DNA, 75 bp, synthetic construct
  source 1..75: mol_type = other DNA
gtggctaaaaaaggcgactttaagcctacccagaaagaggttgaccaagctattactcgcttgaaaaaagtaact

SEQ ID NO: 696782 - DNA, 75 bp, synthetic construct
  source 1..75: mol_type = other DNA
aacgctgttcgaagccattatgctggtgttcctggtgatgtatctgttcttgcagaatatgcgagcaacgctgat

SEQ ID NO: 696783 - DNA, 75 bp, synthetic construct
  source 1..75: mol_type = other DNA
ccgccaaaagaagcgacggaaaaaatcaatgtcgcaaatccagggcgcactggtgggtatcgcgatggtgctgtc

SEQ ID NO: 696784 - DNA, 75 bp, synthetic construct
  source 1..75: mol_type = other DNA
aaagataagagtgcgtatatttcaaatcttaagttagttgcccctcatgtgtctgcatttttagaaaaattttca

SEQ ID NO: 696785 - DNA, 75 bp, synthetic construct
  source 1..75: mol_type = other DNA
aacatcaggtatgtaaagcacagtttgatacagccatggcaaaactcagtgaacaggaatcattaatcaccaatc

SEQ ID NO: 696786 - DNA, 75 bp, synthetic construct
  source 1..75: mol_type = other DNA
aattatttttgcgaggcgcttaatatcatatatgaaggcagcccacctttacctaatcaagataaatcaggtcag

SEQ ID NO: 696787 - DNA, 75 bp, synthetic construct
  source 1..75: mol_type = other DNA
gatcctcactgctgaccacggttgtgatccgacctggaccggtactgaccacacgcgtgaacacattccggtact

SEQ ID NO: 696788 - DNA, 75 bp, synthetic construct
  source 1..75: mol_type = other DNA
agaagatgcagaacgctttggtgacgtcggggctgacaccctgggtcatatcgcagaagcttgtgccaaaggcga

SEQ ID NO: 696789 - DNA, 75 bp, synthetic construct
  source 1..75: mol_type = other DNA
ccccaccattgcggtacccgtggtgttgttagggacgtttgccatcctcgccgcttttggttactccatcaacac

SEQ ID NO: 696790 - DNA, 75 bp, synthetic construct
  source 1..75: mol_type = other DNA
gagaaagcaaacgttgaaagtgtctttacggttaacggctttagcttcagcggccaggcacctccgcaaccccat

SEQ ID NO: 696791 - DNA, 75 bp, synthetic construct
  source 1..75: mol_type = other DNA
gatcctcaccgctgaccacggttgcgatccgacctggaccggtactgaccacacgcgtgaacacattccggtact

SEQ ID NO: 696792 - DNA, 75 bp, synthetic construct
  source 1..75: mol_type = other DNA
ctccgatcacgaaaacagcttcccgcaagagctgctggataaactggttgaacgcgctaatctgccgggttacct

SEQ ID NO: 696793 - DNA, 75 bp, synthetic construct
  source 1..75: mol_type = other DNA
ggtggctttatcgttgatgaagagcattttggccagcaggatagcgcaccggttgaagttccttatccgtacagt

SEQ ID NO: 696794 - DNA, 75 bp, synthetic construct
  source 1..75: mol_type = other DNA
gtgctgcaaatggatgatgactacaccgttatcaattcgatggtggcaggtggtccggcagcgaagagtaaagct

SEQ ID NO: 696795 - DNA, 75 bp, synthetic construct
  source 1..75: mol_type = other DNA
agaagttctatcgcgttaacggcggcagtacgcaacgtaaaggcgtaacgccagacatcatcatgccgacgggta

SEQ ID NO: 696796 - DNA, 75 bp, synthetic construct
  source 1..75: mol_type = other DNA
ggttgatgtgattggctggcgtcttgatgatgtcgttgccttaatcaaagggccgaaaggcagtaaggttcgtct

SEQ ID NO: 696797 - DNA, 75 bp, synthetic construct
  source 1..75: mol_type = other DNA
ccgatgatttgattaaaagctacgtggcggcaggattcaaaaaaattcaccttgattgcagcatgtcctgtcagg

SEQ ID NO: 696798 - DNA, 75 bp, synthetic construct
  source 1..75: mol_type = other DNA
catccgctggtgctggaagctgcaatccgctacgccagtgcaaaccaaacgccgttactgattgaagcaacctcc

SEQ ID NO: 696799 - DNA, 75 bp, synthetic construct
  source 1..75: mol_type = other DNA
atggttacgctttggggaaattatgaggggatctccttaaaccatggcgtacatgccaaagtttccacgccagtg

SEQ ID NO: 696800 - DNA, 75 bp, synthetic construct
  source 1..75: mol_type = other DNA
tcgtcccaaagaaccgaactggacagcctgggcaaacgaaattcgcctgatgtgtgaaccgccccgggtttcctg

SEQ ID NO: 696801 - DNA, 75 bp, synthetic construct
  source 1..75: mol_type = other DNA
cagctgcagaaactggaaaaacagaatgtcagcagcgtcatcatcgacctgcgtagcaatggtggtggggcgctg

SEQ ID NO: 696802 - DNA, 75 bp, synthetic construct
  source 1..75: mol_type = other DNA
cctggaagcggatgtgacgctgttctgcgatgtcctgtgtgatacggacctgcagcgggtgttcactccggacga

SEQ ID NO: 696803 - DNA, 75 bp, synthetic construct
  source 1..75: mol_type = other DNA
ggacgaatcgtgagtctttacgagcaggcggccagcgatgatggcgagatcacgagaccgaaagaacccaactgg

SEQ ID NO: 696804 - DNA, 75 bp, synthetic construct
  source 1..75: mol_type = other DNA
tcacagacaaatttgtgaaatgtttgggcgtctccagcgggattcgttctgggtaaaaaacatcatgagtccggc

SEQ ID NO: 696805 - DNA, 75 bp, synthetic construct
  source 1..75: mol_type = other DNA
cagccgcgatccgttctggtgccgtaacgtgctcagcccgtcgaagctgcgggaaaaatgggatgagctttccct

SEQ ID NO: 696806 - DNA, 75 bp, synthetic construct
  source 1..75: mol_type = other DNA
gcctgggcaaacgaaattcgcctgatgtgtgtacaggatggtcgtactcacaaacaaatctgcgagatgtacagc

SEQ ID NO: 696807 - DNA, 75 bp, synthetic construct
  source 1..75: mol_type = other DNA
actttggcgaagccgatctggtgtatgtcattggtaccgaagtgccggtacctggcggcgcgcatgaaaccttaa

SEQ ID NO: 696808 - DNA, 75 bp, synthetic construct
  source 1..75: mol_type = other DNA
cagccaacgccacgggcactcattattaaccatattcaggacatcctggcgcagtaccacgctgcctgtgaaggc

SEQ ID NO: 696809 - DNA, 75 bp, synthetic construct
  source 1..75: mol_type = other DNA
aagttggcccggcgctgaccttcgccctacgtgaagccctgttttctctggcggctatcgaagaagaactggtgc

SEQ ID NO: 696810 - DNA, 75 bp, synthetic construct
  source 1..75: mol_type = other DNA
ccatggtcgcctgatgctggcaaacggtcagcacgaagtagaatttccggttgatcagtgcatgaacttccatgc

SEQ ID NO: 696811 - DNA, 75 bp, synthetic construct
  source 1..75: mol_type = other DNA
catcgagcgtaacgccattgcggcaggggaagcagtaaaagctgcacggatggcgctgcgccgtaccagcgagtg

SEQ ID NO: 696812 - DNA, 75 bp, synthetic construct
  source 1..75: mol_type = other DNA
ggaaaacgtgatgctcgaccgcccggaatactggcaaagccactaccacggtgacggcaacgcgcgtcgtctggc

SEQ ID NO: 696813 - DNA, 75 bp, synthetic construct
  source 1..75: mol_type = other DNA
tttctttgctgggaggcgctatcggggcgctgttcagtccggttggattgattgctgctgcgtttgtggctgcgg

SEQ ID NO: 696814 - DNA, 75 bp, synthetic construct
  source 1..75: mol_type = other DNA
agttcgagagtcaatgtaaaattatgcatgatataaataattctttctttgcggctacaaaatgtgctggtattt

SEQ ID NO: 696815 - DNA, 75 bp, synthetic construct
  source 1..75: mol_type = other DNA
atgaccatctataccttatcccacgggtcgctaaagctgggcgtttctgaccagggcggcgtaatcgaaggcttc

SEQ ID NO: 696816 - DNA, 75 bp, synthetic construct
  source 1..75: mol_type = other DNA
tggaatttatgccgtttgttccgcacatccgctggtgctggaagctgcaatccgctacgccagtgcaaaccaaac

SEQ ID NO: 696817 - DNA, 75 bp, synthetic construct
  source 1..75: mol_type = other DNA
caagtttttggtttttattctttcagaaatgtttatctttggttaaatgtgctctatccagtggagatcgcaaac

SEQ ID NO: 696818 - DNA, 75 bp, synthetic construct
  source 1..75: mol_type = other DNA
ctacccgcaaatacggggaagttgaccgggtatcgttctttaaggacattgccggagaagaggctttcacatcat

SEQ ID NO: 696819 - DNA, 75 bp, synthetic construct
  source 1..75: mol_type = other DNA
tgagaaaagaacttgaaggcgcacgcggtgaggctgaacgcacggcaaaggttatggccaacaaccttgacggcg

SEQ ID NO: 696820 - DNA, 75 bp, synthetic construct
  source 1..75: mol_type = other DNA
attgctgctgcgtttgtggctgcggcggttctcatctggaaatactgggaacccatcaaggcgttttatgccggg

SEQ ID NO: 696821 - DNA, 75 bp, synthetic construct
  source 1..75: mol_type = other DNA
gtttttccctcctgacaggatcaatgaatgtcgtcagggtgctgccagcactatggggaatggtaacaggttcca

SEQ ID NO: 696822 - DNA, 75 bp, synthetic construct
  source 1..75: mol_type = other DNA
ttgcccgtgaagatggtcaccttttctcctgcaccgttcaggacttctccgacggtgggctggggatcaaaatcc

SEQ ID NO: 696823 - DNA, 75 bp, synthetic construct
  source 1..75: mol_type = other DNA
aaactgaaaacaggtggtgcactggcaacaggtgcggcagcggcgggcggctatgctgccgggcgttttttgcag

SEQ ID NO: 696824 - DNA, 75 bp, synthetic construct
  source 1..75: mol_type = other DNA
taagcctgcttccgcaatcaacatcacccccgtagtcccggctcctctgcctccggcgctggttcctgttgttgc

SEQ ID NO: 696825 - DNA, 75 bp, synthetic construct
  source 1..75: mol_type = other DNA
actcgatgatcaaccgttacactgccgatcgccgtttgcgtcatgacgatgcctacacgccagataacgtcgcgg

SEQ ID NO: 696826 - DNA, 75 bp, synthetic construct
  source 1..75: mol_type = other DNA
gtcaggaacaggaacaactgcagtctcgcattcagagtctgatgcagcgtgcgccggtttggctggccgcgcaga

SEQ ID NO: 696827 - DNA, 75 bp, synthetic construct
  source 1..75: mol_type = other DNA
ttgccggacgcgatcgtaaagtggatatcaaaccatttgccattcagggcctgccgatgtcggtgcagccgacac

SEQ ID NO: 696828 - DNA, 75 bp, synthetic construct
  source 1..75: mol_type = other DNA
atgtcaacatgggtcactataacggaagctgttgagatcactaccaaagccataaaacaaaaaattactcctagc

SEQ ID NO: 696829 - DNA, 75 bp, synthetic construct
  source 1..75: mol_type = other DNA
agggacggttttatttatggtcaaaatttaagactctgtacagaagctagatatatttgtcctgtgcaacaaatt

SEQ ID NO: 696830 - DNA, 75 bp, synthetic construct
  source 1..75: mol_type = other DNA
tgataccccagggaaaatcgacccaatcccgcatccgtatggcgaagatttgccctgtgcggataacaaaccggt

SEQ ID NO: 696831 - DNA, 75 bp, synthetic construct
  source 1..75: mol_type = other DNA
gcgcagaacataaaaacctgtatccgcatatcaacgcctcgcgtccgcgtccgctggatccggtccgttatctca

SEQ ID NO: 696832 - DNA, 75 bp, synthetic construct
  source 1..75: mol_type = other DNA
tgcgggcgagctgaactggcaggatttactgcgcgtggatgcaggcagttggtacagcaaagcgtttaaaggtga

SEQ ID NO: 696833 - DNA, 75 bp, synthetic construct
  source 1..75: mol_type = other DNA
gttcgcgcaacggctgtgctacgtcaacgccatgttccatttcttgtcgggcattccacggctgatcttcctgac

SEQ ID NO: 696834 - DNA, 75 bp, synthetic construct
  source 1..75: mol_type = other DNA
tccaggtagtatggccgctgaatcgtcagccggtgccattgccgaaagatatgtcgctgtggccgtcggtggata

SEQ ID NO: 696835 - DNA, 75 bp, synthetic construct
  source 1..75: mol_type = other DNA
acgcgcggctggccagaaacccgcgcggcactggcgaacatggtgcaggcggcgcagaacttgcgtcgggggtaa

SEQ ID NO: 696836 - DNA, 75 bp, synthetic construct
  source 1..75: mol_type = other DNA
gtggaatggattgaagccctgctgaagaaagcggcaaaacgcattccggcagagcgcctgtgggttaacccggac

SEQ ID NO: 696837 - DNA, 75 bp, synthetic construct
  source 1..75: mol_type = other DNA
cggcaccggaactgccgcgcggtttgttgctggatgagtggcgcgacgactggcgcgaactgaccgcgcggctgg

SEQ ID NO: 696838 - DNA, 75 bp, synthetic construct
  source 1..75: mol_type = other DNA
gcagaaagtgaatctgttgcttaaacgcggtcagcaggaatacgtcttcccggctcaggtggcgcgcgtgatggg

SEQ ID NO: 696839 - DNA, 75 bp, synthetic construct
  source 1..75: mol_type = other DNA
tcgactgcgaccacgtacccacgcgttcgtttttgcaaatgaccatgggctggttcctgaaagagaagcaattgg

SEQ ID NO: 696840 - DNA, 75 bp, synthetic construct
  source 1..75: mol_type = other DNA
ggaaattttacctgcgggtaaaggcactaaaacccgcacggtgacgttgacgcgtgagcgcattcgtctggaaga

SEQ ID NO: 696841 - DNA, 75 bp, synthetic construct
  source 1..75: mol_type = other DNA
cgcgtggattgtgctggtgcttggctacttccaggtggtatggccgctgaaccgtcagccagtaccgctgccaaa

SEQ ID NO: 696842 - DNA, 75 bp, synthetic construct
  source 1..75: mol_type = other DNA
catgtgcggtgattcgccgtaagccgctggatgagattggcggcattgctgtcgaaacggtaaccgaagatgcgc

SEQ ID NO: 696843 - DNA, 75 bp, synthetic construct
  source 1..75: mol_type = other DNA
gcgccagcgttgatgatcgccctgttcgtgctgccgcatatgatccatgccagcctgaccaactcgaagatccag

SEQ ID NO: 696844 - DNA, 75 bp, synthetic construct
  source 1..75: mol_type = other DNA
cgtcacgccaacgaacgccgtgttcatcttgataaagcgctggagtttcgtcgtgagctacatatttcgcgtcag

SEQ ID NO: 696845 - DNA, 75 bp, synthetic construct
  source 1..75: mol_type = other DNA
gcgcgacgtgctgcgcatgtcggaagatccaaaacgtccggaacgtaaaattcagttcttcgtggcggtttatca

SEQ ID NO: 696846 - DNA, 75 bp, synthetic construct
  source 1..75: mol_type = other DNA
tctgcgaagcggagatgggcaacctgacccgcaaactgcgcaagctggagcgggattactttgagatgcgcgagc

SEQ ID NO: 696847 - DNA, 75 bp, synthetic construct
  source 1..75: mol_type = other DNA
catcaactcgcgccaccagcgcgtggtggttggtgtgcgtctacaacaggttgccgggcgcgatcgtaaagttga

SEQ ID NO: 696848 - DNA, 75 bp, synthetic construct
  source 1..75: mol_type = other DNA
atcgaagcttcgctgtacggcgggatctccagcgccattacgcgctctctgcgcgactacctgttgccggaaaac

SEQ ID NO: 696849 - DNA, 75 bp, synthetic construct
  source 1..75: mol_type = other DNA
tgcgcactttagctactccgactcggcagaaatgctcagcggtaacagcgatctcaacgaaaaactgcgtgaacg

SEQ ID NO: 696850 - DNA, 75 bp, synthetic construct
  source 1..75: mol_type = other DNA
gggcagcgcacgccgcagaccattggcgaagaactgctggattaccgcaactatctggaaatggaagttgaggtt

SEQ ID NO: 696851 - DNA, 75 bp, synthetic construct
  source 1..75: mol_type = other DNA
tcgcatgacgctggaagcgattcgtgtcacccagtcggaccgtgacctgtttaagcatctgatcagcgaagccac

SEQ ID NO: 696852 - DNA, 75 bp, synthetic construct
  source 1..75: mol_type = other DNA
acgctatccggaagtcactttatcgctagtctcctccgaaacgattattaatttgatcgaaagaaaagtggatgt

SEQ ID NO: 696853 - DNA, 75 bp, synthetic construct
  source 1..75: mol_type = other DNA
cttttatcgatttccttagcgagcatgtaaaaacagctccggaggagctgtcagagaggcttaatcccattcagg

SEQ ID NO: 696854 - DNA, 75 bp, synthetic construct
  source 1..75: mol_type = other DNA
ttcgccgtgacgagttgcacgcgcaactgagcaataaccgttcacgccgcaatcaactggaaaaagcgcttacct

SEQ ID NO: 696855 - DNA, 75 bp, synthetic construct
  source 1..75: mol_type = other DNA
agagcacaacggtgccgaaggcgatctggaagcggattatcaggcggccagcgatcacctgaacctggtgcaaac

SEQ ID NO: 696856 - DNA, 75 bp, synthetic construct
  source 1..75: mol_type = other DNA
atctcaacgaaaaactgcgtgaacgtttggaacatgcagaagcagagcgtactcgcgcccgtgaagcgctgcgcg

SEQ ID NO: 696857 - DNA, 75 bp, synthetic construct
  source 1..75: mol_type = other DNA
tcgtgagctacacacttctcgtcagcaactagcggcggagcagtacaaacacgtcgatatggcgcgtgaactggc

SEQ ID NO: 696858 - DNA, 75 bp, synthetic construct
  source 1..75: mol_type = other DNA
agcggcgtgcgtaaagcgttccaggacatggaagcggcgctgcgtgaaaaccgcatgacgctggaagcgattcgt

SEQ ID NO: 696859 - DNA, 75 bp, synthetic construct
  source 1..75: mol_type = other DNA
atcaggagctggaagcacgcattgcctctctttccgatagcgtgtctaacgcccgcgaagagcgtatggcactgc

SEQ ID NO: 696860 - DNA, 75 bp, synthetic construct
  source 1..75: mol_type = other DNA
cgcctgctgttcctcgatgaagccgcgcgactggacgcccgttctatcgccacgctgtttgaattgtgtgaacgt

SEQ ID NO: 696861 - DNA, 75 bp, synthetic construct
  source 1..75: mol_type = other DNA
ctgcaaacgtcagggcaagaattttgatatcgacgaactggaagccctgcatcaggaactggaagcacgcattgc

SEQ ID NO: 696862 - DNA, 75 bp, synthetic construct
  source 1..75: mol_type = other DNA
cggatgcgcttaagtgaactggaacagcgtctgcgcgagcagcaagaagccgaacgcctgctggcagacttctgc

SEQ ID NO: 696863 - DNA, 75 bp, synthetic construct
  source 1..75: mol_type = other DNA
agttgctggagcgtgagcgcgaggccattgttgaacgcgatgaagtaggcgcgcgcaaaaacgccgtcgatgaag

SEQ ID NO: 696864 - DNA, 75 bp, synthetic construct
  source 1..75: mol_type = other DNA
gtcattcgatgacagcgtgttcagcgttgatgaactggaaaaagcggtggtggtgaaaattgccgaccgtcagtg

SEQ ID NO: 696865 - DNA, 75 bp, synthetic construct
  source 1..75: mol_type = other DNA
agttcgtatgacaccaaaaaagagctacttaacgatctgcaacgtgaattgcaggatatcggcgtgcgtgctgat

SEQ ID NO: 696866 - DNA, 75 bp, synthetic construct
  source 1..75: mol_type = other DNA
tacatgtggttggtttacgtggctttgcgccgcagcttcctgaaacgcttcctggagctgacgaagcgtcttccc

SEQ ID NO: 696867 - DNA, 75 bp, synthetic construct
  source 1..75: mol_type = other DNA
gtcacgccattgtggtgccggacctgtcacaagtagccgagcagctggaaggcttgactgattgtccggaagatc

SEQ ID NO: 696868 - DNA, 75 bp, synthetic construct
  source 1..75: mol_type = other DNA
gtgcggcgaagagttcacctccagccaggatgttacagaatatctacaacagttgctggagcgtgagcgcgaagc

SEQ ID NO: 696869 - DNA, 75 bp, synthetic construct
  source 1..75: mol_type = other DNA
gaacgttacgaagcggatctcgatgaactgcagatccgtctggaagagcaaaacgaagtggtggcagaagccatc

SEQ ID NO: 696870 - DNA, 75 bp, synthetic construct
  source 1..75: mol_type = other DNA
cgcgggaacgtattcgtcttgaagaccgcgcggttaaaatgtctgtgaaaaccgtcggtaaagaaaaagtcggcg

SEQ ID NO: 696871 - DNA, 75 bp, synthetic construct
  source 1..75: mol_type = other DNA
caaatataaaacgtgaagtaaccacgcttgaaggttttaaaggtttgaaaattcgtgtaatgccaacacaggttg

SEQ ID NO: 696872 - DNA, 75 bp, synthetic construct
  source 1..75: mol_type = other DNA
aaggaaggagagttgtcaaaaatacaacaagctgttcaacctgttatagaaaaacataaaaaaccgtcggtgaag

SEQ ID NO: 696873 - DNA, 75 bp, synthetic construct
  source 1..75: mol_type = other DNA
ggacgtacagggcggtaaaaacagacgttttgtggtgcagatcaccggatacggagaacagggagaacgctggat

SEQ ID NO: 696874 - DNA, 75 bp, synthetic construct
  source 1..75: mol_type = other DNA
gtggatacgggcggtgaagccggggtgacggataacgcctatcgtttctggcggcagtgtcgccgcgaagggctg

SEQ ID NO: 696875 - DNA, 75 bp, synthetic construct
  source 1..75: mol_type = other DNA
ggccgctggcttctgatccggatgtgcgcatgcgtctgatggccatggcggtggatacgggaggggaagccgggg

SEQ ID NO: 696876 - DNA, 75 bp, synthetic construct
  source 1..75: mol_type = other DNA
aggatgaactcgaaaaagctcaaaacagcagagctgaaattataattattgaaggagagttggcaaataaaatta

SEQ ID NO: 696877 - DNA, 75 bp, synthetic construct
  source 1..75: mol_type = other DNA
atgttcactccatcatgaaacttgctgtcgattgcgatggtaaccggctacctcatttagaaaagcaaatagacg

SEQ ID NO: 696878 - DNA, 75 bp, synthetic construct
  source 1..75: mol_type = other DNA
aatcttgatcctgaataccttggtttctattctagtgagctgaatgctggtgaaaccgtttctttatgggaagta

SEQ ID NO: 696879 - DNA, 75 bp, synthetic construct
  source 1..75: mol_type = other DNA
ctgttctggcagcatcccccgttatttgtattgatgttattgtgcgctgggtagataagattcagttatatgcca

SEQ ID NO: 696880 - DNA, 75 bp, synthetic construct
  source 1..75: mol_type = other DNA
aaggttggagtgaagattcagcacataagctagttatagagtatgattttgcaagagatttaatcacgtacatgg

SEQ ID NO: 696881 - DNA, 75 bp, synthetic construct
  source 1..75: mol_type = other DNA
ttcttaatgaagaaggaacatttaacaatatataccttgcaagcggaaatggtaaggtaatactaaataaagata

SEQ ID NO: 696882 - DNA, 75 bp, synthetic construct
  source 1..75: mol_type = other DNA
tgacagataatgcctataaattctggcgtcgctgccgtcttgatggtcttggaaagcgtatttatctgtttaagg

SEQ ID NO: 696883 - DNA, 75 bp, synthetic construct
  source 1..75: mol_type = other DNA
ccacatgtcaggcagtagcacggataggtaaaacaaacaggaaacacccacaactgtacgatgtgtactgctatt

SEQ ID NO: 696884 - DNA, 75 bp, synthetic construct
  source 1..75: mol_type = other DNA
ccaccatcaaagagatgaaagaagcgggtgataacactatcgtcttcaccaacttcgttgacttcgactcttctt

SEQ ID NO: 696885 - DNA, 75 bp, synthetic construct
  source 1..75: mol_type = other DNA
cagcaggaaggtgcattagtaaactggaaaaataatcccgacggtacacgcagtccgtatgaaataaatgtgacc

SEQ ID NO: 696886 - DNA, 75 bp, synthetic construct
  source 1..75: mol_type = other DNA
atatcaatcagcttaaaaccggcgttttgcggctgggaatcccgccgatggttgggatgttgatggccgggccga

SEQ ID NO: 696887 - DNA, 75 bp, synthetic construct
  source 1..75: mol_type = other DNA
ttaaattcctgattgaccgactcaagccggaagaacggcaattcgcgctggacctgctcaacggccagacggcat

SEQ ID NO: 696888 - DNA, 75 bp, synthetic construct
  source 1..75: mol_type = other DNA
acgggcagggaagggttaaagagctgattgatgcaattccacccgaggaacgggaaaaggctttaaagttgctgc

SEQ ID NO: 696889 - DNA, 75 bp, synthetic construct
  source 1..75: mol_type = other DNA
tctgcattacattactcgggatatgataacaacttcgcatggagcattggggccggtgttcgctatgacgtaact

SEQ ID NO: 696890 - DNA, 75 bp, synthetic construct
  source 1..75: mol_type = other DNA
acagaaggggataaatataaatcagaggctgacgttaaaagtcatgacattatgtttggggtaacttatcatttc

SEQ ID NO: 696891 - DNA, 75 bp, synthetic construct
  source 1..75: mol_type = other DNA
ctcctgccccagcaaaattccagtcatctcaaaattagcactagtgttagacatatatccaagcctatctcttat

SEQ ID NO: 696892 - DNA, 75 bp, synthetic construct
  source 1..75: mol_type = other DNA
ttgggggaggatgtttataagtataagggcggcgataagaacgatactgtatttggtgcaggccttgcggtgggc

SEQ ID NO: 696893 - DNA, 75 bp, synthetic construct
  source 1..75: mol_type = other DNA
atttcagaaacagcagtgcattcacaccatggatatctgctggtctgggttatgcacgggttcatcataaaactt

SEQ ID NO: 696894 - DNA, 75 bp, synthetic construct
  source 1..75: mol_type = other DNA
actctccaggaaacccggggcggttcaggccttgcggtgggctatgatttttatcaacattacaatgttcctgtg

SEQ ID NO: 696895 - DNA, 75 bp, synthetic construct
  source 1..75: mol_type = other DNA
gatctcaaattctaggccaattatctgagcaggtgaactatcagcaactttattcgcaggcactgcaagacccag

SEQ ID NO: 696896 - DNA, 75 bp, synthetic construct
  source 1..75: mol_type = other DNA
gaggcgtttgacctgctggtgtatgcggatgcgcttgccgttctgcatggttacgaaaagatccgctggccctcc

SEQ ID NO: 696897 - DNA, 75 bp, synthetic construct
  source 1..75: mol_type = other DNA
cctgattgctccggaacagaagcgtgaactgaataaccaggggatctggctgcgggaaggcgaacgggcagcggc

SEQ ID NO: 696898 - DNA, 75 bp, synthetic construct
  source 1..75: mol_type = other DNA
cagttacagaaactggaaaaacagaatgtcagcagcatcattatcgatctgcggagcaacggtggcggagcgctg

SEQ ID NO: 696899 - DNA, 75 bp, synthetic construct
  source 1..75: mol_type = other DNA
gcagcttatttataagtacctgaccgccgagcaggaatacgaatccacgcgcagcgaagaaaccctgaaaacggt

SEQ ID NO: 696900 - DNA, 75 bp, synthetic construct
  source 1..75: mol_type = other DNA
atcattcactgcggcactatgccgccacaacatttaaacagaatggcttccctgaacagttcgcttcgcaggtac

SEQ ID NO: 696901 - DNA, 75 bp, synthetic construct
  source 1..75: mol_type = other DNA
ccctgataacaccggacgaacgggccgacgggcgcaggctgcgggtgatgtgcctctctggcttcttcagactga

SEQ ID NO: 696902 - DNA, 75 bp, synthetic construct
  source 1..75: mol_type = other DNA
gtactcagcgtgaattgctgaattcattgttgcagggcggcgacacgctactgctcgaactgactaagctgaaag

SEQ ID NO: 696903 - DNA, 75 bp, synthetic construct
  source 1..75: mol_type = other DNA
tcctgctcaccgcagcgcgtcgctgctcgctggtgatcgacaacccagcaccggaagtcttcctggtggatctgc

SEQ ID NO: 696904 - DNA, 75 bp, synthetic construct
  source 1..75: mol_type = other DNA
gtactcagcgcgagttgcttaactcattactccagggcggcgacacgctactgcttgagctaaccaagctgaaag

SEQ ID NO: 696905 - DNA, 75 bp, synthetic construct
  source 1..75: mol_type = other DNA
gaagcgcatcatcacagtagcccggaaggggcaattgaagtcgatgaaagcgaagtcgatctcgatgctatcagt

SEQ ID NO: 696906 - DNA, 75 bp, synthetic construct
  source 1..75: mol_type = other DNA
agctggctgaaaaagagagccagcaactggatgcgtatttgcaggccttgcgtaatcaattgaacagccaacgcc

SEQ ID NO: 696907 - DNA, 75 bp, synthetic construct
  source 1..75: mol_type = other DNA
caggaattagcgcgcttacgctcagagctggcggaaaaagagagccagcaactggatgcgtatttgcaggcctta

SEQ ID NO: 696908 - DNA, 75 bp, synthetic construct
  source 1..75: mol_type = other DNA
ccatccttagtggatacgaaaaaattaaatggccgtcagctcctgagtgggcacggagggaaacgtggatcgagg

SEQ ID NO: 696909 - DNA, 75 bp, synthetic construct
  source 1..75: mol_type = other DNA
atgaaactgaacgacagtaacttattccgccagcaggcgttaattaacggggaatggctggacgccaacaatggc

SEQ ID NO: 696910 - DNA, 75 bp, synthetic construct
  source 1..75: mol_type = other DNA
cggcggcgatgattacccgtaaagccggcccggcgctggcggcaggctgcaccatggtgctgaagcccgccagtc

SEQ ID NO: 696911 - DNA, 75 bp, synthetic construct
  source 1..75: mol_type = other DNA
ggaacagtgcgcgaaagacatcaaaaaagtgtcgctggagctgggcggcaacgcaccgtttatcgtctttgacga

SEQ ID NO: 696912 - DNA, 75 bp, synthetic construct
  source 1..75: mol_type = other DNA
gagcgcgtggtagccagcattggcagccatacagatagtgacacgaaagcctggctctcctggaaggcgcatgaa

SEQ ID NO: 696913 - DNA, 75 bp, synthetic construct
  source 1..75: mol_type = other DNA
cagagaaaatatccatgacgcagaatgtatccgtgaaattcacgaagcgcccctgcaggctcccggcattctgca

SEQ ID NO: 696914 - DNA, 75 bp, synthetic construct
  source 1..75: mol_type = other DNA
atgaatgatggcagacagacgcctccgccccccgaggcatggaaaatccggtttctggctaacggtacacccgga

SEQ ID NO: 696915 - DNA, 75 bp, synthetic construct
  source 1..75: mol_type = other DNA
gaagcgaagaaacgctcaagacagtcatcaacaccgactggggattaccttatcttccccgggccagcatggagc

SEQ ID NO: 696916 - DNA, 75 bp, synthetic construct
  source 1..75: mol_type = other DNA
attcaaaaaaacaatttatcaaaaatagaaaatcatgctgttttattttgccaagaagttagaaaatttaaagtc

SEQ ID NO: 696917 - DNA, 75 bp, synthetic construct
  source 1..75: mol_type = other DNA
ggaagaagcgattaagtatttcgaaagcaagggatacgttatcggcttccgctggcacgatgtgaaggacatcgc

SEQ ID NO: 696918 - DNA, 75 bp, synthetic construct
  source 1..75: mol_type = other DNA
ctgttagccatctgtattcagcatgagatggatcacctggtcggcaaactgtttatggattatctgtcaccgctg

SEQ ID NO: 696919 - DNA, 75 bp, synthetic construct
  source 1..75: mol_type = other DNA
ttatagcctttcagatcgtattcgttattactggccgaatgcaaggattagtgcggcagtagataaactgattgc

SEQ ID NO: 696920 - DNA, 75 bp, synthetic construct
  source 1..75: mol_type = other DNA
ccaaacaatttgaacgcattcagtccggggaattatcagcaataccgcatcagctgattatggataaaatttatg

SEQ ID NO: 696921 - DNA, 75 bp, synthetic construct
  source 1..75: mol_type = other DNA
tatcgacaccctgttccgtattggtcgtggacgtgcaccgactggcgaacctgcggcggcagcggaaatgaccaa

SEQ ID NO: 696922 - DNA, 75 bp, synthetic construct
  source 1..75: mol_type = other DNA
tgagccgaccattaaacaaccggtaagatggaagaacgcactcggcgaactaaatgccaatctggatatcagtat

SEQ ID NO: 696923 - DNA, 75 bp, synthetic construct
  source 1..75: mol_type = other DNA
ttgattgctgaatctattgatccctcagcagtgcgccaatttatcatccagtataacattgcgatgcagaagcag

SEQ ID NO: 696924 - DNA, 75 bp, synthetic construct
  source 1..75: mol_type = other DNA
caattgattttgcggttatggaaaaaacaaaaaattgcgtagtctgtcctgtagatattgggtggagtgatgtag

SEQ ID NO: 696925 - DNA, 75 bp, synthetic construct
  source 1..75: mol_type = other DNA
atgcaggcggcggcgatcgttgagttagccgaagcaacacgcaaaaaaggcctggcggaagcagaagcgcaacgt

SEQ ID NO: 696926 - DNA, 75 bp, synthetic construct
  source 1..75: mol_type = other DNA
tttctgatgaacaaaccagccttaaattcaaactggcgctattacagtcgttacctgcagtaatagagaaatccg

SEQ ID NO: 696927 - DNA, 75 bp, synthetic construct
  source 1..75: mol_type = other DNA
gaacttatcgcccccgaaaatcgcagcggttgcctggcggtaattgaagaagtgatgctcgacgaaccgcagtac

SEQ ID NO: 696928 - DNA, 75 bp, synthetic construct
  source 1..75: mol_type = other DNA
cgggcaggggaaagccagagccagaacggatggttctgtgagagaaaccaaccgctggaatctgctgtttctgtc

SEQ ID NO: 696929 - DNA, 75 bp, synthetic construct
  source 1..75: mol_type = other DNA
ttgttgaaaaacctaatcgctcaagggctgaagagtatatctcctcaggtaaatatctctggaatagtgggatgt

SEQ ID NO: 696930 - DNA, 75 bp, synthetic construct
  source 1..75: mol_type = other DNA
tgaacgacattctgccggtttatcagcaagtgctggcagaactggcgaaacgcggcattgagtgggtacagatcg

SEQ ID NO: 696931 - DNA, 75 bp, synthetic construct
  source 1..75: mol_type = other DNA
ggaggcagatgttgaactgttcattgatgttctgtgtgataccggactgcaacctgtattttcagaggatgatcg

SEQ ID NO: 696932 - DNA, 75 bp, synthetic construct
  source 1..75: mol_type = other DNA
ttaccacgctacaggatgtggacatgctgatctatgtccacggcgcgaatgacccggaaagtcggttgcctgccg

SEQ ID NO: 696933 - DNA, 75 bp, synthetic construct
  source 1..75: mol_type = other DNA
tgtttattccatcaggtccgattgtgcaggttcgtgataacaacggcaaggttcgcgaagatagcgataacgacg

SEQ ID NO: 696934 - DNA, 75 bp, synthetic construct
  source 1..75: mol_type = other DNA
gataccctgtcggtggtggcgaaaacccgccgtaacctggaagcggatgtgacgctgttctgcgatgtcctgtgt

SEQ ID NO: 696935 - DNA, 75 bp, synthetic construct
  source 1..75: mol_type = other DNA
atggcaaaagatctgaaaacgctggcgctggccagactgtcagggtttcgtcataaaacggtgaaggtgccggaa

SEQ ID NO: 696936 - DNA, 75 bp, synthetic construct
  source 1..75: mol_type = other DNA
gatggagaggatgacgataccctgtcggggggggcaaaaacccgccgtaacctggaagcggatgtgacgctgttc

SEQ ID NO: 696937 - DNA, 75 bp, synthetic construct
  source 1..75: mol_type = other DNA
gcaagtgctggcagaactggcgaaacgcggcatcgagtgggtacagattgatgaacccgcgttggtactggaact

SEQ ID NO: 696938 - DNA, 75 bp, synthetic construct
  source 1..75: mol_type = other DNA
atggattcgattgcggcgctggacgcagacgtcatcaccatcgaaacctcgcgttccgacatggagttgctggag

SEQ ID NO: 696939 - DNA, 75 bp, synthetic construct
  source 1..75: mol_type = other DNA
tttgtctttacgcaaaacggttgggtacagagctacggttcccgctgcgtgaagccaccgattgttattggtgac

SEQ ID NO: 696940 - DNA, 75 bp, synthetic construct
  source 1..75: mol_type = other DNA
ttttcgtccatgcggaaaacgcccctttcgtccagagtctgcttgaaaacgcggccacgagccattgccaccagc

SEQ ID NO: 696941 - DNA, 75 bp, synthetic construct
  source 1..75: mol_type = other DNA
ccaagctgactcgttgattaaaatttcgcggatctgggccgatttttttcccgcaaacacatcgaatcagcctat

SEQ ID NO: 696942 - DNA, 75 bp, synthetic construct
  source 1..75: mol_type = other DNA
gaaggtgaaacgctacactgcgaaaaaaagcggaccgcagaagtcattgctcccggcctggtgtcgggtatcggc

SEQ ID NO: 696943 - DNA, 75 bp, synthetic construct
  source 1..75: mol_type = other DNA
ttgcctcatcctcatacattgatctagattttattcgattatcaaaagaacaatttcaagattgtcctgctgaat

SEQ ID NO: 696944 - DNA, 75 bp, synthetic construct
  source 1..75: mol_type = other DNA
atgttttctcgctggcaatgacggcgtttgctcgcgaaatcgatccgcataccaattacctttccccgcgcaata

SEQ ID NO: 696945 - DNA, 75 bp, synthetic construct
  source 1..75: mol_type = other DNA
gatgctgttattcttgctttaatatgtatgtattctatttcgttcgtttatgctactgttttattgagaaaatat

SEQ ID NO: 696946 - DNA, 75 bp, synthetic construct
  source 1..75: mol_type = other DNA
ccagccagcaagccatctggagccaggtttatactatcggctcaagttgagctcctcagggcatgaggctctcaa

SEQ ID NO: 696947 - DNA, 75 bp, synthetic construct
  source 1..75: mol_type = other DNA
ggctgtgagcatcgccttgaacaatgcatgaccgcgctgcaagagacgctaacgccggagtcgcagggtgagtga

SEQ ID NO: 696948 - DNA, 75 bp, synthetic construct
  source 1..75: mol_type = other DNA
ggctgtgagcatcgccttgaacagtgcatgaccgcgctgcaagagacgctgacgccggagtcgcagggtgagtga

SEQ ID NO: 696949 - DNA, 75 bp, synthetic construct
  source 1..75: mol_type = other DNA
gccaggagcagggctttagcgaaggtcatcagcaaggttttgccgaggggcgacgccagggctacaccgaaggca

SEQ ID NO: 696950 - DNA, 75 bp, synthetic construct
  source 1..75: mol_type = other DNA
cttgccagcaataccacttttccggtgacgccggatgctgacggtaaagtcacgtttgatggtctggagttgacg

SEQ ID NO: 696951 - DNA, 75 bp, synthetic construct
  source 1..75: mol_type = other DNA
gccgacccttctcgtacgactgtcgcttatgttgatgggactgcgggcaatcttgagatcccggagaaattgctg

SEQ ID NO: 696952 - DNA, 75 bp, synthetic construct
  source 1..75: mol_type = other DNA
tcaatgcccaacataacaagggggatgatgccaatggtaaagaaggggaggatttctttgctatcggtaagcccg

SEQ ID NO: 696953 - DNA, 75 bp, synthetic construct
  source 1..75: mol_type = other DNA
acgtttctggtgtgcagcgtgagtatgatgcttttattaccaaccagttacgtgcggcgcagacgcaaagtagcg

SEQ ID NO: 696954 - DNA, 75 bp, synthetic construct
  source 1..75: mol_type = other DNA
ggcggctgggttggcaatggcgtctacgtttctggcgtacagcgtgaatatgatgcgtttattaccaaccagtta

SEQ ID NO: 696955 - DNA, 75 bp, synthetic construct
  source 1..75: mol_type = other DNA
cgaattaaaccagattgttggtgtagaagtcagcgttcaggatggcggcacttataacatcacgatggccaatgg

SEQ ID NO: 696956 - DNA, 75 bp, synthetic construct
  source 1..75: mol_type = other DNA
aactggatatcggctgcgagcaccgcctggaacaatgcatgaccgcgctacaagagacgctaacgccggagtcac

SEQ ID NO: 696957 - DNA, 75 bp, synthetic construct
  source 1..75: mol_type = other DNA
gccgtagctaaaaaacttaatattataatttttggtggtactggttcaggtaagacaacttttgcaaaatcagtt

SEQ ID NO: 696958 - DNA, 75 bp, synthetic construct
  source 1..75: mol_type = other DNA
gctgtgggagctggccttgactacgactacattgataggcgtgtcagaacttcatttgatgccgttttatacatg

SEQ ID NO: 696959 - DNA, 75 bp, synthetic construct
  source 1..75: mol_type = other DNA
cttccagcattaacgcttttactctggcaaagcgtgtcgccgcctttaacgtgccggtgctcattcagggcgaaa

SEQ ID NO: 696960 - DNA, 75 bp, synthetic construct
  source 1..75: mol_type = other DNA
aaaaaaacaatcgcacagagcatgttactcatagagaagtatttagaccatgggggaagtttgactctatagatc

SEQ ID NO: 696961 - DNA, 75 bp, synthetic construct
  source 1..75: mol_type = other DNA
tgaaaacagcctcgcccaatctttccagtggcggcaaagtgcgcaactggcgctggcggtactgcgctctttaca

SEQ ID NO: 696962 - DNA, 75 bp, synthetic construct
  source 1..75: mol_type = other DNA
atgattgacgaaacgctaacggcgctcactgatatcaaaatgccccattacgcaccgctggctcaagccagcggt

SEQ ID NO: 696963 - DNA, 75 bp, synthetic construct
  source 1..75: mol_type = other DNA
tacgcgtattgcaggaacaacaggttgagcgattaggcagcaaccgacaaattaaactcaattttcgcctgattg

SEQ ID NO: 696964 - DNA, 75 bp, synthetic construct
  source 1..75: mol_type = other DNA
gcctgattgcggatgcgaaacctgccagccgtcacctgattggcctgaatattatccaggacattcccggtcata

SEQ ID NO: 696965 - DNA, 75 bp, synthetic construct
  source 1..75: mol_type = other DNA
gaagagtttaaccgcctgcgcgacgcggtgccggaaaaggtcagcgaatgggggctgacgccttcgccggatctg

SEQ ID NO: 696966 - DNA, 75 bp, synthetic construct
  source 1..75: mol_type = other DNA
ctggcccggtaacgtgcgccagttggaaaacgctattcagcggggaatgattttaaaccgcgacggcgttattta

SEQ ID NO: 696967 - DNA, 75 bp, synthetic construct
  source 1..75: mol_type = other DNA
atgtctgaacttattgcatctgccgcctccagcataaacgcttttactctggcaaagcgtgtcgccgcctttaac

SEQ ID NO: 696968 - DNA, 75 bp, synthetic construct
  source 1..75: mol_type = other DNA
tgcaatggcctgttcagcccgccgtccacattgccgaaaccggcgatttaggccagcacggacgaagcgcgcagt

SEQ ID NO: 696969 - DNA, 75 bp, synthetic construct
  source 1..75: mol_type = other DNA
ggtcaacccggactgtggcctgaaaacgcgcggctggccagaaacccgcgcggcactggcgaacatggtgcaggc

SEQ ID NO: 696970 - DNA, 75 bp, synthetic construct
  source 1..75: mol_type = other DNA
cggtacgggggcacaggcaggcaggaactcggttgaaaataatgcgattagtgatattgccgagaacctggcctc

SEQ ID NO: 696971 - DNA, 75 bp, synthetic construct
  source 1..75: mol_type = other DNA
gcgattgccggaatgctgtatccgggcgtgaaacagtcagacctcagtgaagagcagaagcagacgataagtacg

SEQ ID NO: 696972 - DNA, 75 bp, synthetic construct
  source 1..75: mol_type = other DNA
ggcgaacgcacttaccggtatgtccggcagcagtggacatgctgaaggtaccacgtcatccgccatcagcggcgg

SEQ ID NO: 696973 - DNA, 75 bp, synthetic construct
  source 1..75: mol_type = other DNA
tgaaaggcattaaaaagatcctgattgcctctggtgtgcgttatgacatcgccgtagaagatccgcgctatatca

SEQ ID NO: 696974 - DNA, 75 bp, synthetic construct
  source 1..75: mol_type = other DNA
tccgataccgtgcgccgttccgtgctggtggattcgaaagccgacatgctgatgttcggtaacggtgagcgtccg

SEQ ID NO: 696975 - DNA, 75 bp, synthetic construct
  source 1..75: mol_type = other DNA
gaagacgtcttcgtaccgaagggcgacaaacagcgtcgtttgcataaagcgttgttgcgttaccacgatccggca

SEQ ID NO: 696976 - DNA, 75 bp, synthetic construct
  source 1..75: mol_type = other DNA
gggtaataatgttgctgccggtgcagcaggcgcagcaacgggagagctggcagccagagcgattgccggaatgct

SEQ ID NO: 696977 - DNA, 75 bp, synthetic construct
  source 1..75: mol_type = other DNA
tgcaggtgggaatactgcgggtgtggctaccggagctgctgctgggaagaatgttgttgagaataacctgctggg

SEQ ID NO: 696978 - DNA, 75 bp, synthetic construct
  source 1..75: mol_type = other DNA
tggctggcggtcttaccggaaacagcagcgcatcagcagcagtgggagcacagagcgggaagaatgctgttgata

SEQ ID NO: 696979 - DNA, 75 bp, synthetic construct
  source 1..75: mol_type = other DNA
attgcctccgtcagtgccatggatagtctggacatccgggcagataaaaacatttcggtcacaggggcagaaatc

SEQ ID NO: 696980 - DNA, 75 bp, synthetic construct
  source 1..75: mol_type = other DNA
acagccgtctggcggcactgaaaggaacacaggcggttctgtctggtgtacaggccggtgttaaccacggactgc

SEQ ID NO: 696981 - DNA, 75 bp, synthetic construct
  source 1..75: mol_type = other DNA
gctgacggcggacgacctctccctccggggcaaaacactgaataccgcagggaccacgcagggacagaatatcac

SEQ ID NO: 696982 - DNA, 75 bp, synthetic construct
  source 1..75: mol_type = other DNA
gatgaagatatggtgaatctggcgctgtggctgaaaaagcatcgtttccgcctcgaccaggtacagaacttctac

SEQ ID NO: 696983 - DNA, 75 bp, synthetic construct
  source 1..75: mol_type = other DNA
cgcgcatgagctggtacaacggctcggtaatgagcctgaagcatggctcaaagaatactggcgcctgacggctta

SEQ ID NO: 696984 - DNA, 75 bp, synthetic construct
  source 1..75: mol_type = other DNA
tcttctcaacgtcaagatgcagcttttataaagcggttcttgatagttgaaatggagaagcccgacaaagttgct

SEQ ID NO: 696985 - DNA, 75 bp, synthetic construct
  source 1..75: mol_type = other DNA
acaataacctgcctatgctggtaattgaaaaattcgtttcggtagccgttgcagtaaacaacacaggaactgacg

SEQ ID NO: 696986 - DNA, 75 bp, synthetic construct
  source 1..75: mol_type = other DNA
aaacactggcgtcattgcttgttccgtggactcgcggccatgaaaacggttggttgttcgataacgattcagatt

SEQ ID NO: 696987 - DNA, 75 bp, synthetic construct
  source 1..75: mol_type = other DNA
cgaacccatgactgtgcttctgatgccgagctaattaagtggcacgctgatttgaatcagcttttaaaagggatt

SEQ ID NO: 696988 - DNA, 75 bp, synthetic construct
  source 1..75: mol_type = other DNA
cgttcagagacgagccgagcgttaatgaaaagtatttgcagcatagccagcaccttgatgattatattatctcga

SEQ ID NO: 696989 - DNA, 75 bp, synthetic construct
  source 1..75: mol_type = other DNA
gccgtggaagatccgcgctatatcaaagaactggcgacccatcacgtcggcggttatctgaagattgccccggaa

SEQ ID NO: 696990 - DNA, 75 bp, synthetic construct
  source 1..75: mol_type = other DNA
aaacgccagcaggagcaaagaaagtgcagcctcgtctggtgaatacaggggcgaagaaacgccctaaagcggcat

SEQ ID NO: 696991 - DNA, 75 bp, synthetic construct
  source 1..75: mol_type = other DNA
acgggcgtgatttccgatctcggcggaccgactgcgaacatgtatatgttgcgctgcaaatcaccgcgcgctgaa

SEQ ID NO: 696992 - DNA, 75 bp, synthetic construct
  source 1..75: mol_type = other DNA
ccgaccgggtgattatcatgcgcgatcgcaaacaggtagcggagatcccgctggcagagctttccgttccggcga

SEQ ID NO: 696993 - DNA, 75 bp, synthetic construct
  source 1..75: mol_type = other DNA
gatcgcaaacaggtggcggagatcccgctggcagaactttccgttccggcgatcatgaacgccattgcggcgtaa

SEQ ID NO: 696994 - DNA, 75 bp, synthetic construct
  source 1..75: mol_type = other DNA
aaggcagcagcctctcgcatgatagctcgcaatacaggtggcaaaattatcaatattgcctctttaacaagtgaa

SEQ ID NO: 696995 - DNA, 75 bp, synthetic construct
  source 1..75: mol_type = other DNA
cctggtaatcatcgtgaatgcggcattaatgagtgaacggcccatttgggtaataagttgcttaatgattgtgtt

SEQ ID NO: 696996 - DNA, 75 bp, synthetic construct
  source 1..75: mol_type = other DNA
tgtatatgaacaaatgcttaaagagtactatgctgatgaactccgatcagccgaaaaagaaaatcgagagcctga

SEQ ID NO: 696997 - DNA, 75 bp, synthetic construct
  source 1..75: mol_type = other DNA
tgataaattagctgctgatagagccagcaaggtcgtgtcgttgctgaagagggagcggggttctaatagtgaaac

SEQ ID NO: 696998 - DNA, 75 bp, synthetic construct
  source 1..75: mol_type = other DNA
ctggtgttacgacggtttatgctttcgcgaatatggttactccaccttctgagtatggtatcgccatgtataacc

SEQ ID NO: 696999 - DNA, 75 bp, synthetic construct
  source 1..75: mol_type = other DNA
aatatcaacagaagtttagtttccatctggatgcgacacatagctttgcgcctcaacaatcggctatcgatgcac

SEQ ID NO: 697000 - DNA, 75 bp, synthetic construct
  source 1..75: mol_type = other DNA
ccatggacgtgatggcgctgtccctcaagttggccgcgcggatgattgaggatggcaagctcgatcgggctctgg

SEQ ID NO: 697001 - DNA, 75 bp, synthetic construct
  source 1..75: mol_type = other DNA
gatgcgcagctcggctgggataccgatcagttcccgaacagcgtggaagaaaataccctggtgatgtacgagatc

SEQ ID NO: 697002 - DNA, 75 bp, synthetic construct
  source 1..75: mol_type = other DNA
ccagacgggctcacgttatatcaacggcacaggctctgacctgacgcagatgaaatacctgatggacagcgcggc

SEQ ID NO: 697003 - DNA, 75 bp, synthetic construct
  source 1..75: mol_type = other DNA
ggtgcgctgtcgctgtccggggcaagtgtaagcagctatcccctgccatccggtaacaatggttattttgtcccg

SEQ ID NO: 697004 - DNA, 75 bp, synthetic construct
  source 1..75: mol_type = other DNA
tcagtgccgtgcggttatcagcgctgccggtgatgtgtctgccagctttgccactgacaccggtaataccactgt

SEQ ID NO: 697005 - DNA, 75 bp, synthetic construct
  source 1..75: mol_type = other DNA
atgtatggtttgagcattatgaagccggatggcagcgtatggataagtccaggttttacgccgcagtgtctgatc

SEQ ID NO: 697006 - DNA, 75 bp, synthetic construct
  source 1..75: mol_type = other DNA
ctctctactctacaaagatctgtatccgcaggatgcgaagaacctagaaacagtgcttcagggactggatgcagg

SEQ ID NO: 697007 - DNA, 75 bp, synthetic construct
  source 1..75: mol_type = other DNA
cgaagtctgagacgaaatatcagcacgatatcgtctccggctcaaccctcagcgccggtaacaatgtctctgtca

SEQ ID NO: 697008 - DNA, 75 bp, synthetic construct
  source 1..75: mol_type = other DNA
atgagcgcaatcacattacgtaaagcgttgggtgtacttgcgaagtcatcttcgttttccgtcaccaccgttaca

SEQ ID NO: 697009 - DNA, 75 bp, synthetic construct
  source 1..75: mol_type = other DNA
ggaaacagcaccgcatcagcagcagtgggagcacaaagcgggaagaatgctgttgagaataactttttgaccgca

SEQ ID NO: 697010 - DNA, 75 bp, synthetic construct
  source 1..75: mol_type = other DNA
atgcatcagcctcccgttcacttcacttaccgcctgctgagttacttggtcagtgcgattatcgccgggcagccg

SEQ ID NO: 697011 - DNA, 75 bp, synthetic construct
  source 1..75: mol_type = other DNA
gttgatcagtatgaagcgccgtacccggaaaatctgcgccatatcaccatcacggccatgataaccaaccgcgat

SEQ ID NO: 697012 - DNA, 75 bp, synthetic construct
  source 1..75: mol_type = other DNA
cgtatcagcgctttccgcacccgtgctgaccaatgacggcaccattcagggcaacggtaaaaccacgctcagcgc

SEQ ID NO: 697013 - DNA, 75 bp, synthetic construct
  source 1..75: mol_type = other DNA
tgccagtggcgatgtggctggcgcggctgctggggctggtgccgggaagaacgttgttgagaataacttcttaag

SEQ ID NO: 697014 - DNA, 75 bp, synthetic construct
  source 1..75: mol_type = other DNA
aaagcctctacccggacgtagatccgtcgaaactgacagaagatcagaagcaaactgtaagcacgctggcaacgc

SEQ ID NO: 697015 - DNA, 75 bp, synthetic construct
  source 1..75: mol_type = other DNA
atctggatcaccgcaccggcggtcaggcactgcgcgatctgctaaacctgtttattccggcgcatgacagtccgc

SEQ ID NO: 697016 - DNA, 75 bp, synthetic construct
  source 1..75: mol_type = other DNA
ggttacaaaaaattcacagcggtgtggcggaaattgttatcttactgaaccgcctgccgccagactggctgatcc

SEQ ID NO: 697017 - DNA, 75 bp, synthetic construct
  source 1..75: mol_type = other DNA
gctgccgctctatctctgcggcgaggagcgcacgacctcacacctgttcgaactgctgcacaccagcgccattgc

SEQ ID NO: 697018 - DNA, 75 bp, synthetic construct
  source 1..75: mol_type = other DNA
gctgccgttttatctctgcggcgaggagcgtacagcctcacacctgttcgaacttctacataccagcgccatcgc

SEQ ID NO: 697019 - DNA, 75 bp, synthetic construct
  source 1..75: mol_type = other DNA
tgagctgacggtggatgaagacggattctctggtattagcccgtatctgttcggtctggtgttggagcaatatat

SEQ ID NO: 697020 - DNA, 75 bp, synthetic construct
  source 1..75: mol_type = other DNA
tggctgtaaaacaacgcctgttacccgccgtctgcccggttccgggctgctggtttatggtcgcggcgtcagttg

SEQ ID NO: 697021 - DNA, 75 bp, synthetic construct
  source 1..75: mol_type = other DNA
cttcaaacaaaagttaataacgatatatctgctgctattaaaagtgagcaacaagcgcgagttagcggcgattca

SEQ ID NO: 697022 - DNA, 75 bp, synthetic construct
  source 1..75: mol_type = other DNA
cgctcgctatcgccagaatggtaatggccctgcttatatccagtatcaagcagaagacagtaaagctcggaatca

SEQ ID NO: 697023 - DNA, 75 bp, synthetic construct
  source 1..75: mol_type = other DNA
ccatagaaaaacaggatacgatggctgaaattagctatatgcgcaccattcggactccagatgaatatgagcgtc

SEQ ID NO: 697024 - DNA, 75 bp, synthetic construct
  source 1..75: mol_type = other DNA
cagccagtatctctataacgatacatgggtggattcaataggtgagattgtcgatacaccgatgaactacccaaa

SEQ ID NO: 697025 - DNA, 75 bp, synthetic construct
  source 1..75: mol_type = other DNA
gagattaacggtaacagtggcggaaatgggagattagttatcaatgggcagagaatcgacgtttacgacgacaat

SEQ ID NO: 697026 - DNA, 75 bp, synthetic construct
  source 1..75: mol_type = other DNA
aagaactgacgctgataccgcattgacgtcgcagattaactcactaaagacgcaaactggtaaagatataaaggc

SEQ ID NO: 697027 - DNA, 75 bp, synthetic construct
  source 1..75: mol_type = other DNA
ttaatgagtgaacgacccgtttgggtaataagttgcttaatgattgtgttatggtcaggcattatctcgcattga

SEQ ID NO: 697028 - DNA, 75 bp, synthetic construct
  source 1..75: mol_type = other DNA
ttatgagcaggcatacaggaacaccggtgaggatgctttcggtattctggaacgtatcaggcttctgaagtgttt

SEQ ID NO: 697029 - DNA, 75 bp, synthetic construct
  source 1..75: mol_type = other DNA
cgaaaccgaaggcgaacgcgtcgggcagatcaatgccctgtcagttgttgaatttccgggacatccgcgcgcttt

SEQ ID NO: 697030 - DNA, 75 bp, synthetic construct
  source 1..75: mol_type = other DNA
tttcttatagcgacaatcatcgtcctgcggcggaagccactatcagccatatgcgacgtattcgctcggaggacg

SEQ ID NO: 697031 - DNA, 75 bp, synthetic construct
  source 1..75: mol_type = other DNA
ccggagaatggtgataccacacccgcactggtcacgcaggggggacagacgtttatcaatgaggccctgataaag

SEQ ID NO: 697032 - DNA, 75 bp, synthetic construct
  source 1..75: mol_type = other DNA
tcatgataagagtaaaattcggatccatgacccggttctgttttacctgaaatcctatacagacgattttgatac

SEQ ID NO: 697033 - DNA, 75 bp, synthetic construct
  source 1..75: mol_type = other DNA
actttcaaaagaagtcctatcgttacaagccaaagttgaaggcgatattagtgccgctatatctgaagaaaaaaa

SEQ ID NO: 697034 - DNA, 75 bp, synthetic construct
  source 1..75: mol_type = other DNA
ctcgcgatgtactgtcgttcctggctggcaaaattacatcttccgagcttggtcaggctctgcttgaggacatca

SEQ ID NO: 697035 - DNA, 75 bp, synthetic construct
  source 1..75: mol_type = other DNA
attgtgacgaggaggtcgatgatggctttgggggtaaagagaaacgttttgcaatcaatacgcagatcactagcc

SEQ ID NO: 697036 - DNA, 75 bp, synthetic construct
  source 1..75: mol_type = other DNA
ttctggctgttgctggtcgccctgcttaatgcccgacatggtgatgtgatgacgctttccggtgtactgctgacg

SEQ ID NO: 697037 - DNA, 75 bp, synthetic construct
  source 1..75: mol_type = other DNA
atgaacaaggttgctcaatattaccgtgaactggttgcgtcactgagctatgaagagagcctgaaagaagaatct

SEQ ID NO: 697038 - DNA, 75 bp, synthetic construct
  source 1..75: mol_type = other DNA
gtctgcgagaaatgtcacttccatctcccgatctacacaccggaagtgctaacgctatgcccgaaatgtggtcat

SEQ ID NO: 697039 - DNA, 75 bp, synthetic construct
  source 1..75: mol_type = other DNA
tcaaacttgggtacagaggcgacaactcgcgatgtactgtcgttcctggaaggtaagattacatcgtctgagctt

SEQ ID NO: 697040 - DNA, 75 bp, synthetic construct
  source 1..75: mol_type = other DNA
cgcttccagcctgacagaattaaaatcagtcaggaattgattaccaatgttcataaaagtgggccacggcaggca

SEQ ID NO: 697041 - DNA, 75 bp, synthetic construct
  source 1..75: mol_type = other DNA
actctttgggctgtgagtatgcgcaaacatggactggtcgaaatttacgatacgaagaacgaaaattttatagag

SEQ ID NO: 697042 - DNA, 75 bp, synthetic construct
  source 1..75: mol_type = other DNA
tgctgatacgaacaagaaggtatcaacagcctggacgctgaaaatggaaacctccaccagcggaggccaaaaata

SEQ ID NO: 697043 - DNA, 75 bp, synthetic construct
  source 1..75: mol_type = other DNA
gatgatgttttccggcgtgattctgacgctgacggtgctgttctgtgtccacgggctggtaccggcttccggacg

SEQ ID NO: 697044 - DNA, 75 bp, synthetic construct
  source 1..75: mol_type = other DNA
atccccggtctgctgatgcttgccggagcgctgctggtctggcaggtcagggacacgctgcgtccagccctgttt

SEQ ID NO: 697045 - DNA, 75 bp, synthetic construct
  source 1..75: mol_type = other DNA
agatactggtgtgggcggctgtagctgcggcaaatcataagctgcccaaacatgcaaaatctatcctgaatgtat

SEQ ID NO: 697046 - DNA, 75 bp, synthetic construct
  source 1..75: mol_type = other DNA
gcacactgctggcccagccactgctgtggatgcggctgaaaaacattgttaaccgcgaacgcttcgattgggtag

SEQ ID NO: 697047 - DNA, 75 bp, synthetic construct
  source 1..75: mol_type = other DNA
acgccattcttcacccttttgcgatctggtaccattcaccgcgaccagttgcagagaatcatccgaacaatgaaa

SEQ ID NO: 697048 - DNA, 75 bp, synthetic construct
  source 1..75: mol_type = other DNA
tccacaccgaagaagtgatgctggacaaaattaccggaaaaacgccggtggcggcctatgtctccccgatcgttg

SEQ ID NO: 697049 - DNA, 75 bp, synthetic construct
  source 1..75: mol_type = other DNA
tgctaaatcagttcggtgataatggtacgcacgtttcgctgatggctgcggctattctggcagtgattgctgcct

SEQ ID NO: 697050 - DNA, 75 bp, synthetic construct
  source 1..75: mol_type = other DNA
tatctgaggcatggaagggttttgtaaaatataagtcggactggactccaaagattcgacaggaaagtgaaaagt

SEQ ID NO: 697051 - DNA, 75 bp, synthetic construct
  source 1..75: mol_type = other DNA
ctgtacagagtgccgtttctgaaggtagcaatcagtgtatacttaccttagctgatgcttgggaaaggtttgtaa

SEQ ID NO: 697052 - DNA, 75 bp, synthetic construct
  source 1..75: mol_type = other DNA
tacggtgactacagtgcaacagaaatgcgaaagttggtggcccatttcaaatctctctcaggttggaaaaagtgg

SEQ ID NO: 697053 - DNA, 75 bp, synthetic construct
  source 1..75: mol_type = other DNA
cgtagtgaagttgaaaccggtttgctcctgacaccgtggccgttggcaacaatggtaatggctccgctggcaggt

SEQ ID NO: 697054 - DNA, 75 bp, synthetic construct
  source 1..75: mol_type = other DNA
acatctgtttgctctttctgcgcacaaatgctggcaatggtttccctgcccttttacctgcaaaccgtgctcggg

SEQ ID NO: 697055 - DNA, 75 bp, synthetic construct
  source 1..75: mol_type = other DNA
gaaatcaggcttcgctgcatctgcaccagtcgctgggatttgtcgtcaccgcacaaatgccgcaggtaggcactc

SEQ ID NO: 697056 - DNA, 75 bp, synthetic construct
  source 1..75: mol_type = other DNA
ctggttctgctgcccgcttctcctgcggatatcaacattatctggccaatgatcttatgcggcgctggatttggc

SEQ ID NO: 697057 - DNA, 75 bp, synthetic construct
  source 1..75: mol_type = other DNA
cccgcgtcacctgcggatatcaatattatctggccgatgatcttatgtggcgctggatttggcttattccagtca

SEQ ID NO: 697058 - DNA, 75 bp, synthetic construct
  source 1..75: mol_type = other DNA
ttgccccagcgatacggtgcgatattaaccattgtgattggtatttcgatggctgtccttgacggcgcaatcgcc

SEQ ID NO: 697059 - DNA, 75 bp, synthetic construct
  source 1..75: mol_type = other DNA
cgacaatattccagaagtgccgattcttggcgagtttgaagtttacgagctgccgcgcgagaaacgccgtgatat

SEQ ID NO: 697060 - DNA, 75 bp, synthetic construct
  source 1..75: mol_type = other DNA
tgtttgcggctgtccgtcgcgcagaccgtcatccccgtatctgcatgcttcgcaccgtcgccggtgatgaacgca

SEQ ID NO: 697061 - DNA, 75 bp, synthetic construct
  source 1..75: mol_type = other DNA
atcgagcgtaggaactccggcgatagcagttatttgctactcgaaggaggctgccttatggctacaacccttacc

SEQ ID NO: 697062 - DNA, 75 bp, synthetic construct
  source 1..75: mol_type = other DNA
gtgaactggtcgcgtcactgagcgaacgcctgcgcaatggcgaacgtgatatcgacgcactggtggaacaggcgc

SEQ ID NO: 697063 - DNA, 75 bp, synthetic construct
  source 1..75: mol_type = other DNA
gtgacttaatccctgataccgaaagttatcaggaagtatttgcacagccacattttattgacgaaaacgatcctt

SEQ ID NO: 697064 - DNA, 75 bp, synthetic construct
  source 1..75: mol_type = other DNA
ccggcgatagcgtcatttatgctgttatcggaggttgccttatggctacgacccttagccgcactggaagccatc

SEQ ID NO: 697065 - DNA, 75 bp, synthetic construct
  source 1..75: mol_type = other DNA
cggaacgcctttgcgattgtgttattcatgtatgaatgcctgtcaaaaaatccgggactgattatccttgacgat

SEQ ID NO: 697066 - DNA, 75 bp, synthetic construct
  source 1..75: mol_type = other DNA
aggggctttcacgctgagaaagaaccttgctgtagaagtcgtttatcctcctaaagatgttgattctaccgctga

SEQ ID NO: 697067 - DNA, 75 bp, synthetic construct
  source 1..75: mol_type = other DNA
tactgagcatgttttatcacaccgctggaacccgctggactacataagccgttctaaatcgcgtcgtgtcggtga

SEQ ID NO: 697068 - DNA, 75 bp, synthetic construct
  source 1..75: mol_type = other DNA
aatcagatagtgcatatggtaaagcgggtgcatttacgcttaagaaaaacctcgctgttgaaatagtctatccac

SEQ ID NO: 697069 - DNA, 75 bp, synthetic construct
  source 1..75: mol_type = other DNA
aaagacggggaattataaaaccgtcagcggatatctggttaagggtcgttatttatatgggtataacaaagtacc

SEQ ID NO: 697070 - DNA, 75 bp, synthetic construct
  source 1..75: mol_type = other DNA
gccggagcgtcagaggtgccgtccgcacagcaggaactgacggttcagacagcgccagtggtgacggcagatgat

SEQ ID NO: 697071 - DNA, 75 bp, synthetic construct
  source 1..75: mol_type = other DNA
gtatcgtaaaaaaatggggcaggaagtttttgtttttgcccctgatgggtatcgtttttccgaagaagaatttga

SEQ ID NO: 697072 - DNA, 75 bp, synthetic construct
  source 1..75: mol_type = other DNA
tgattcagcctaccttgattacggaatatccggcagaagtatccccgctggcgcgtcgtaaagatgttaacccgg

SEQ ID NO: 697073 - DNA, 75 bp, synthetic construct
  source 1..75: mol_type = other DNA
gctggtatctgggggagtgggaatcatttctggggttgccggactgtacaagcgaaaacggcaccctgtccgaac

SEQ ID NO: 697074 - DNA, 75 bp, synthetic construct
  source 1..75: mol_type = other DNA
accgttaacgcaattagatctggcggtacacgtagccactaagcttaaccgctctcatctgctgaccgcacggca

SEQ ID NO: 697075 - DNA, 75 bp, synthetic construct
  source 1..75: mol_type = other DNA
tgattcagcctaccttgattacggaatatccggcagaagtgtccccgctggcgcgtcgtaaggatgttaacccgg

SEQ ID NO: 697076 - DNA, 75 bp, synthetic construct
  source 1..75: mol_type = other DNA
tgattcagcctaccttgattacggaatatccggcagaagtctccccgctggcgcgtcgtaacgatgttaacccgg

SEQ ID NO: 697077 - DNA, 75 bp, synthetic construct
  source 1..75: mol_type = other DNA
tgattcagcctaccttgattacggaatatccggcagaagtttccccgctggcgcgtcgtaatgatgttaacccgg

SEQ ID NO: 697078 - DNA, 75 bp, synthetic construct
  source 1..75: mol_type = other DNA
gataattgcggctgttgggtttgtcgcaggtaaggcgatcttctctgataatgttgtgtttaggagaaggatgta

SEQ ID NO: 697079 - DNA, 75 bp, synthetic construct
  source 1..75: mol_type = other DNA
ttagcgactgtgttatatggcacttatcccggctggtatgctgctgttgttttgttgttgacttttggtttatcg

SEQ ID NO: 697080 - DNA, 75 bp, synthetic construct
  source 1..75: mol_type = other DNA
atggaaaacaataccatcaaatgcccattctgtttcaaagagagccagcgtggggttcacgtttgcacaggctgt

SEQ ID NO: 697081 - DNA, 75 bp, synthetic construct
  source 1..75: mol_type = other DNA
atgagaattaacaaaatcctctggtcgctaactgtgctcctggttgggttgaatagccagatatcagtagccaaa

SEQ ID NO: 697082 - DNA, 75 bp, synthetic construct
  source 1..75: mol_type = other DNA
atggtacatatgtgcccaggggatagtaacgatttcgtcgatgagtttacgctaataatcaggagattttgttgg

SEQ ID NO: 697083 - DNA, 75 bp, synthetic construct
  source 1..75: mol_type = other DNA
atactgatcggaatgtctacaggtatggcgggagctactatcagtctgccaataatttttgctgtagcttttata

SEQ ID NO: 697084 - DNA, 75 bp, synthetic construct
  source 1..75: mol_type = other DNA
aggaactggaatccttaaacattgaagtctcggttgctggccgaatgatgacccgtcgtatcatggggaaagcct

SEQ ID NO: 697085 - DNA, 75 bp, synthetic construct
  source 1..75: mol_type = other DNA
tagccagtcgattattgacgttgcagtactggggccggacgagggattgccagaaggctgcgtggagatctaccc

SEQ ID NO: 697086 - DNA, 75 bp, synthetic construct
  source 1..75: mol_type = other DNA
ttcccgcgcgccaatgctggattatttaggggagttggtgggcgttcaccgtttgcctgcgcagccggcaaaaac

SEQ ID NO: 697087 - DNA, 75 bp, synthetic construct
  source 1..75: mol_type = other DNA
ggaaacgcctgccaaacgagtgctggcggcgcatgagtgggcgcagtgtaccgcaattgatgtgaccatcgccgg

SEQ ID NO: 697088 - DNA, 75 bp, synthetic construct
  source 1..75: mol_type = other DNA
cgatattgtccccagccagattatcagcgtgctgtccgttgccggggtctaccaggtcgaactggtgacaccggt

SEQ ID NO: 697089 - DNA, 75 bp, synthetic construct
  source 1..75: mol_type = other DNA
taccgtgcgggctaaaacacctgtgcaggtggattacgccattgaagccaacatcactatctatcgtgaccagga

SEQ ID NO: 697090 - DNA, 75 bp, synthetic construct
  source 1..75: mol_type = other DNA
gacgttgcagttttcggtcgtcagtgcgtataccagcaatatcctgattccccaggggacgcgggccagtgcctc

SEQ ID NO: 697091 - DNA, 75 bp, synthetic construct
  source 1..75: mol_type = other DNA
tttacattaacagattataatcaagacttatcagcggatgcattattaatcaatactcttaaaagacattatgat

SEQ ID NO: 697092 - DNA, 75 bp, synthetic construct
  source 1..75: mol_type = other DNA
aagatcaggcagaacgtttccaggagcaggttaacgctaaagctgcaggtgacgacgaagccatgttctacgatg

SEQ ID NO: 697093 - DNA, 75 bp, synthetic construct
  source 1..75: mol_type = other DNA
aagattacgtgactgcgctggaatatggtctgccgccaaccgctggtctgggtattggtatcgaccgaatgatta

SEQ ID NO: 697094 - DNA, 75 bp, synthetic construct
  source 1..75: mol_type = other DNA
cttgtacgcatcggcatccaggaagcggcaaagcagaaccttgtggcgttttcccgtgcgccaatgctcgattat

SEQ ID NO: 697095 - DNA, 75 bp, synthetic construct
  source 1..75: mol_type = other DNA
cagtgtggttggcggtggatttacaccttttattgccgctgcactcatcacttactttgccgggaactggcatag

SEQ ID NO: 697096 - DNA, 75 bp, synthetic construct
  source 1..75: mol_type = other DNA
ttcttctccataatgctggcaaacattgcgcatgacatggtggtgtgtgtgcaacaaccgatgtttaccgaaatg

SEQ ID NO: 697097 - DNA, 75 bp, synthetic construct
  source 1..75: mol_type = other DNA
cgttttgcctgaaagaaagccagcggggtgtacatgtttgtaccggctgcatggcgactgttttatatggagcct

SEQ ID NO: 697098 - DNA, 75 bp, synthetic construct
  source 1..75: mol_type = other DNA
cacatctgattcagcctaccttcattactgaatatccggcagaagtttcaccgctggcccgccgtaatgaggtta

SEQ ID NO: 697099 - DNA, 75 bp, synthetic construct
  source 1..75: mol_type = other DNA
cacatctgattcagcctacctttattactgaatatccggcagaagtctcaccgctggcccgccgtaatgaggtta

SEQ ID NO: 697100 - DNA, 75 bp, synthetic construct
  source 1..75: mol_type = other DNA
gttaatcgggaaaaacattctggtcatgcaggctgccattatcgaatggcaatcgactggcgacgctaaaagcgg

SEQ ID NO: 697101 - DNA, 75 bp, synthetic construct
  source 1..75: mol_type = other DNA
tatacgccactggcagcaatccttaacgctgctaaacgcgcatatgaagaatcagcaagcgcagctggcattcgc

SEQ ID NO: 697102 - DNA, 75 bp, synthetic construct
  source 1..75: mol_type = other DNA
attcatcgccgcagccaatccagctaccgtgctggaactactggatgaacgggaaagaaaccagcaatacatcaa

SEQ ID NO: 697103 - DNA, 75 bp, synthetic construct
  source 1..75: mol_type = other DNA
gcgttccgacatggagttgctggagtcgtttgaagagtttgattatccaaatgaaatcggtccaggcgtctatga

SEQ ID NO: 697104 - DNA, 75 bp, synthetic construct
  source 1..75: mol_type = other DNA
gttttcctcgcgttggcctgcgtcgcgagctgaaaaaagcacaagaaagttattgggcggggaactccacgcgtg

SEQ ID NO: 697105 - DNA, 75 bp, synthetic construct
  source 1..75: mol_type = other DNA
gctgactgacaaaccggtgaaagggatgctgacggggccggtgaccatactctgctggtcgttcccgcgtgaaga

SEQ ID NO: 697106 - DNA, 75 bp, synthetic construct
  source 1..75: mol_type = other DNA
cacatctgattcagcctacctttattactgaatatccggcagaagtatccccgctggcccgccgtaatgaggtta

SEQ ID NO: 697107 - DNA, 75 bp, synthetic construct
  source 1..75: mol_type = other DNA
cacatctgattcagcctaccttaattactgaatatccggcagaagtttccccgctggcccgccgtaatgaggtta

SEQ ID NO: 697108 - DNA, 75 bp, synthetic construct
  source 1..75: mol_type = other DNA
acaacgagcagttcaaaaaatgggacctcggcgacatcctcggcgcgaaaggtaaactgttcaaaaccaaaaccg

SEQ ID NO: 697109 - DNA, 75 bp, synthetic construct
  source 1..75: mol_type = other DNA
cggactggcatggatttataacacactgtttggcccaggcgaattgccggacgaatctgagaaagatgctcaggc

SEQ ID NO: 697110 - DNA, 75 bp, synthetic construct
  source 1..75: mol_type = other DNA
tgtttggccctggcgaattaccggacgaatctgagaaagatgctcaggcctactttaatcgcaaatatgcaccga

SEQ ID NO: 697111 - DNA, 75 bp, synthetic construct
  source 1..75: mol_type = other DNA
tcacaagtggttttgggaacaaagtgaagccgagcgcgccgctggcattcgcatcaaaggagaggagcatggaaa

SEQ ID NO: 697112 - DNA, 75 bp, synthetic construct
  source 1..75: mol_type = other DNA
gcataacctgaaacataacaaggtattgcatgagcgggtgattctgttaactctgcgcaccgaagacgcgccata

SEQ ID NO: 697113 - DNA, 75 bp, synthetic construct
  source 1..75: mol_type = other DNA
aaaattacaaagcgagaatgcatacatccgcaaccggtacaaagaactggacctattaatcgggaaaaacattct

SEQ ID NO: 697114 - DNA, 75 bp, synthetic construct
  source 1..75: mol_type = other DNA
atggcgcttcacaagtggttttgggaacaaagtgaagccgagcgcgccgctggcattcgcatcaaaggagagtga

SEQ ID NO: 697115 - DNA, 75 bp, synthetic construct
  source 1..75: mol_type = other DNA
ttgggaagctgcgtgttgagcttgaagcagcagagaacaaccttattgatagtgaatgccatgttgctgaactgg

SEQ ID NO: 697116 - DNA, 75 bp, synthetic construct
  source 1..75: mol_type = other DNA
aaagcttatggcgcttcacaagtggttttgggaacaaagtgaagccgagcgcgccgctggcatcaaggaggagtc

SEQ ID NO: 697117 - DNA, 75 bp, synthetic construct
  source 1..75: mol_type = other DNA
ggagtaagcgcatagcagagttagaaagtgattctcaggcacaaaagttagttgaagcaatcattgttgcgatag

SEQ ID NO: 697118 - DNA, 75 bp, synthetic construct
  source 1..75: mol_type = other DNA
aatgtttgtccggccagtttggttttggcgttgaacgcgatgccgtgtttggctttttatcgctgatcttctggc

SEQ ID NO: 697119 - DNA, 75 bp, synthetic construct
  source 1..75: mol_type = other DNA
cttgctgttgcaacgtaatgcgctgcgcgcgccggatcagtttgaaatcccaccaaaccgggttatcgaattggg

SEQ ID NO: 697120 - DNA, 75 bp, synthetic construct
  source 1..75: mol_type = other DNA
gatttataacacactgtttggccctggcgaattaccggacgaatctgagaaagatgctcaggcctactttaatcg

SEQ ID NO: 697121 - DNA, 75 bp, synthetic construct
  source 1..75: mol_type = other DNA
cctcttcccgttatccgaaacactggctgacggtaggggatcccgcccgtgaatttaccatgacgcagtccgcgc

SEQ ID NO: 697122 - DNA, 75 bp, synthetic construct
  source 1..75: mol_type = other DNA
gagacgttcgacccgacgcatgatattgacctctactgtgatcaggccagcggtatggtgaatattgccattatg

SEQ ID NO: 697123 - DNA, 75 bp, synthetic construct
  source 1..75: mol_type = other DNA
gttcgagaaaattgaggtcgattttggcaggtcgacgaagaataacatcactcagggtagtggtaaggagtggtc

SEQ ID NO: 697124 - DNA, 75 bp, synthetic construct
  source 1..75: mol_type = other DNA
ccgattgaaacgggggaaattcctccaggcaatcagaacacggtcgtctttcgtacctataaatccgtttttgac

SEQ ID NO: 697125 - DNA, 75 bp, synthetic construct
  source 1..75: mol_type = other DNA
taaaattaccggcaaaacgccggttgcggcatatgtctctccggtggtgtcaggcaaagtgctgcgcagccgtgg

SEQ ID NO: 697126 - DNA, 75 bp, synthetic construct
  source 1..75: mol_type = other DNA
gactcctttgatccaacgcatgatctggatgcgtactgcgatttcgcttccggtaccatcaatattgcgattatg

SEQ ID NO: 697127 - DNA, 75 bp, synthetic construct
  source 1..75: mol_type = other DNA
ggcatgctggttctggggaatactgctgcagatgggatccgttgttacggtgccattcaggatgcgcaggcgttg

SEQ ID NO: 697128 - DNA, 75 bp, synthetic construct
  source 1..75: mol_type = other DNA
tccctgtgatggtagatcccgcctgttcattgcttgatgaactgaaaccgctttgcgtggtggacgctattctgg

SEQ ID NO: 697129 - DNA, 75 bp, synthetic construct
  source 1..75: mol_type = other DNA
acaaactcattgaacagcccattgcatggttggggttgctggcaagtcgccgcaaggttcagcttttcctgcgtc

SEQ ID NO: 697130 - DNA, 75 bp, synthetic construct
  source 1..75: mol_type = other DNA
ctgtttttccgccgtacggtgaatttccataccgaagaggtaatgctggacaaaattaccggaaaaacgccggtg

SEQ ID NO: 697131 - DNA, 75 bp, synthetic construct
  source 1..75: mol_type = other DNA
gtatggtaaatacaccatggaaggagaccagttcgagaaaattgaggtcgattttggcaggtcgacgaagaataa

SEQ ID NO: 697132 - DNA, 75 bp, synthetic construct
  source 1..75: mol_type = other DNA
acaggcgttgtccgaaggtgtggtggcttcttcccgttacccgaaacactggctgaccgtgggcgatccggcccg

SEQ ID NO: 697133 - DNA, 75 bp, synthetic construct
  source 1..75: mol_type = other DNA
gctgcataatgagcgtgagcgagacgcggcggtggtggcatttctggtaacggcaagtggattgacgctggtcgg

SEQ ID NO: 697134 - DNA, 75 bp, synthetic construct
  source 1..75: mol_type = other DNA
ttctctcctgtagtgataatccttccggtgaagcctgtaagcgggggcaggctgaaaataaagcttatgctgccg

SEQ ID NO: 697135 - DNA, 75 bp, synthetic construct
  source 1..75: mol_type = other DNA
ctgagcgttgggacgattgcaaattagcttatgagaaagaaatgggtgagtctttgccatatgatctcgcttacg

SEQ ID NO: 697136 - DNA, 75 bp, synthetic construct
  source 1..75: mol_type = other DNA
tcttcgccagtatcagcggatatcagaatgtgggagcggcgacaactattgcagtactggtcgccagccagctga

SEQ ID NO: 697137 - DNA, 75 bp, synthetic construct
  source 1..75: mol_type = other DNA
tgtggaatatctggccgtgtactggggtaagggtgccacggtacctgatgaataccgtatccgtacgggagatac

SEQ ID NO: 697138 - DNA, 75 bp, synthetic construct
  source 1..75: mol_type = other DNA
caatgaagaggcccagcttcttcagggctggaaaaatggtggtggttcggagaacgatgctggttatcagaatga

SEQ ID NO: 697139 - DNA, 75 bp, synthetic construct
  source 1..75: mol_type = other DNA
aaaatttaaaaacgtcactcttaatgatgacccaacttatcatctcttggcgtccaaagaaattgaatatgtttt

SEQ ID NO: 697140 - DNA, 75 bp, synthetic construct
  source 1..75: mol_type = other DNA
aatagataaaattatgttacgtataaccagctcatttaaactatctggtctgtttcctccggttctacaaaaata

SEQ ID NO: 697141 - DNA, 75 bp, synthetic construct
  source 1..75: mol_type = other DNA
cagcgagctgccggaagagattaccaacagcccgatgattgatcgtaatgagagttttacctttgtcaccggcgt

SEQ ID NO: 697142 - DNA, 75 bp, synthetic construct
  source 1..75: mol_type = other DNA
gaagagattaccgacagcccgatgattgatcgtaatgagagttttacctttgtcaccggcgtgagctggcgtttt

SEQ ID NO: 697143 - DNA, 75 bp, synthetic construct
  source 1..75: mol_type = other DNA
caatttaagatcggcatgactggttcccctaaagaatcaaaatgccatcttttacagtatgtcggacttttcggt

SEQ ID NO: 697144 - DNA, 75 bp, synthetic construct
  source 1..75: mol_type = other DNA
gggtgtccatgcttctgtctctgttacaagagcaaggcgaatatcctcagccgacatcaaacgatactgagcaat

SEQ ID NO: 697145 - DNA, 75 bp, synthetic construct
  source 1..75: mol_type = other DNA
tctattttatggtttaaacaaggcatggcggggtttggcgaactggtgtccagcgtgcgtgaactgcgccccaaa

SEQ ID NO: 697146 - DNA, 75 bp, synthetic construct
  source 1..75: mol_type = other DNA
gacctctactgcgaccaggccagcggtcttgtgaatattgccattatggacggtaccgtctggcgtctgctgaat

SEQ ID NO: 697147 - DNA, 75 bp, synthetic construct
  source 1..75: mol_type = other DNA
aaggagaccagttcgagaaaattgaggtcgattttggcaggtcgacgaagaataacatcactcagggtagtggta

SEQ ID NO: 697148 - DNA, 75 bp, synthetic construct
  source 1..75: mol_type = other DNA
gctatggagccattaaggatgcacaggcgttgtctgaaggagtggtggcttcttcccgttacccgaaacactggc

SEQ ID NO: 697149 - DNA, 75 bp, synthetic construct
  source 1..75: mol_type = other DNA
ctgtttttccgccgtacagtgaatttccataccgaagaggtgatgctggacaaaattaccggaaaaacgccggtg

SEQ ID NO: 697150 - DNA, 75 bp, synthetic construct
  source 1..75: mol_type = other DNA
gaatggttttaagctgttccgcgaaaaactggatacccgtcgcggctcaaattcacaactcgaaacggcagtgaa

SEQ ID NO: 697151 - DNA, 75 bp, synthetic construct
  source 1..75: mol_type = other DNA
ggtaaaaaatggtctgagcaggaccgtgatacgtttgatccgacgcatgatattgacctctactgcgatcaggcc

SEQ ID NO: 697152 - DNA, 75 bp, synthetic construct
  source 1..75: mol_type = other DNA
gctggatacccgtcgtggctctcattccgagctggagacagcggtaaaagacctgggtaaagcggtgtcctataa

SEQ ID NO: 697153 - DNA, 75 bp, synthetic construct
  source 1..75: mol_type = other DNA
ctgaccgataaggccctgccacttgccgactttttagtttcacctgttgccagaggtatacttgaacagcatggg

SEQ ID NO: 697154 - DNA, 75 bp, synthetic construct
  source 1..75: mol_type = other DNA
ttctttattaaacagggaaacgttgcgaatcgggacatcaaccgcgggatgtgatcccgctggtgattacactca

SEQ ID NO: 697155 - DNA, 75 bp, synthetic construct
  source 1..75: mol_type = other DNA
aggggatcagtttgatactgtcgaggtggattttggacgctctgaaggaaataacattgagcaggccgacggtaa

SEQ ID NO: 697156 - DNA, 75 bp, synthetic construct
  source 1..75: mol_type = other DNA
gcgaatatgactcatccgcaaatgttaatggccacaggacatgccttgtgtattaaaccttttgcctataatcgt

SEQ ID NO: 697157 - DNA, 75 bp, synthetic construct
  source 1..75: mol_type = other DNA
tccgccgtacggtgaatttccataccgaagaggtgatgctggacaaaattaccggaaaaacgccggtggcggcct

SEQ ID NO: 697158 - DNA, 75 bp, synthetic construct
  source 1..75: mol_type = other DNA
ctgaccgagaaagccaggccactttgcaactttttagtttcgccagatgccagggcgatacttgagcaacatggg

SEQ ID NO: 697159 - DNA, 75 bp, synthetic construct
  source 1..75: mol_type = other DNA
caatcgtggcgaaatccatatcgtcgaacctgatttggcgagcgtggtaaaaactgccgtggaagagggtttttt

SEQ ID NO: 697160 - DNA, 75 bp, synthetic construct
  source 1..75: mol_type = other DNA
gctgctcgctccattgcgccagtgctgaaaaaaggcgcgctggtgatccttgaatccacctcgccggtggggtca

SEQ ID NO: 697161 - DNA, 75 bp, synthetic construct
  source 1..75: mol_type = other DNA
tgaaaaaaggcgcgctggtgatccttgaatccacctcgccggtggggtcaaccgagaagatggcagaatggttag

SEQ ID NO: 697162 - DNA, 75 bp, synthetic construct
  source 1..75: mol_type = other DNA
aaggaaataacattgagcaggccgacggtaaaaaatggtctgagcaggaccgtgatacgtttgatccgacgcatg

SEQ ID NO: 697163 - DNA, 75 bp, synthetic construct
  source 1..75: mol_type = other DNA
ccttcccggtgaagatccggcgcagctgaacgacccggcctaccgtcgtctgcgtatcatcaccgataacctcaa

SEQ ID NO: 697164 - DNA, 75 bp, synthetic construct
  source 1..75: mol_type = other DNA
taaaactcaagaaattaatgcaccgaagagcccgcagccaaaaaacaaaaaaagtaaatctgggttgtttgatat

SEQ ID NO: 697165 - DNA, 75 bp, synthetic construct
  source 1..75: mol_type = other DNA
agggtattacggtgatctggccattgtggtggcgaaaacgtcttatgtggcagaggacggtaccgaaaaacgtta

SEQ ID NO: 697166 - DNA, 75 bp, synthetic construct
  source 1..75: mol_type = other DNA
aatggctttaaattgttccgcgaaaaactggatacccgtcgcggttcaaattctcaactcgaaacagcggtgaaa

SEQ ID NO: 697167 - DNA, 75 bp, synthetic construct
  source 1..75: mol_type = other DNA
gaatggttttaagctgttaccgcgaaaaactggatacccgtcgcggctcaaattcacaactcgaaacggcagtga

SEQ ID NO: 697168 - DNA, 75 bp, synthetic construct
  source 1..75: mol_type = other DNA
gaaattccgtgcgctgtttctggagctgtttttccgccgtacggtgaatttccacaccgaagaggtgatgctgga

SEQ ID NO: 697169 - DNA, 75 bp, synthetic construct
  source 1..75: mol_type = other DNA
cgactggaagaacatgagcagtttaatcgcaagattgtcgcctccgcgccagtgggtatctgtattttgcgtacc

SEQ ID NO: 697170 - DNA, 75 bp, synthetic construct
  source 1..75: mol_type = other DNA
ggcgttgacgcaatccctggaacatgacgctgaatacacgacgcgaaaaggtctgctgaaatacaaaatctataa

SEQ ID NO: 697171 - DNA, 75 bp, synthetic construct
  source 1..75: mol_type = other DNA
cactaggatgtaagctagattttaatgttgtcaaagataagacatcatctacgacttcaaagtatttgattgaaa

SEQ ID NO: 697172 - DNA, 75 bp, synthetic construct
  source 1..75: mol_type = other DNA
ttagagtattttattaactcatctgttaaaccaatggattatgatagtttatataaattcagtcctgataaaatg

SEQ ID NO: 697173 - DNA, 75 bp, synthetic construct
  source 1..75: mol_type = other DNA
acatccgcaactggcaaccggaacaggcactcgatctgatttttgctaatgcctcactgcaatggctgcccgacc

SEQ ID NO: 697174 - DNA, 75 bp, synthetic construct
  source 1..75: mol_type = other DNA
tcttacgcgctaccatcagatgctggaagagcaatatcccctccaggagaacggacagatattgctggcatttct

SEQ ID NO: 697175 - DNA, 75 bp, synthetic construct
  source 1..75: mol_type = other DNA
ttgatcatgctgcggtcaggtgaattttctaaattaccgattcgagtttcattttgcccgttctgtggtgaaagc

SEQ ID NO: 697176 - DNA, 75 bp, synthetic construct
  source 1..75: mol_type = other DNA
atgacacatcaggagctgaaagtgatgcttctcaaagatccagcattccgggctgcttatgaagctgagagccag

SEQ ID NO: 697177 - DNA, 75 bp, synthetic construct
  source 1..75: mol_type = other DNA
tgccggaatgctatttctacgtggttaatgatgacttcgctgaaatgattctgaagctttatcaggaatattcga

SEQ ID NO: 697178 - DNA, 75 bp, synthetic construct
  source 1..75: mol_type = other DNA
atcagccactttcagagaagattgatgacgatccgcagctgttgccaatcacactaaacggctcaatgcaggcgt

SEQ ID NO: 697179 - DNA, 75 bp, synthetic construct
  source 1..75: mol_type = other DNA
ggtactggcaaaatcccttgagcatgatgctgaatacacgacgcgaaaaggtctgctgatatacaaaatctggaa

SEQ ID NO: 697180 - DNA, 75 bp, synthetic construct
  source 1..75: mol_type = other DNA
tggagcaggatgctgaatacacgacgcgaaaaggtctgctgaaatacaaaatctataaccatgaattaattcatt

SEQ ID NO: 697181 - DNA, 75 bp, synthetic construct
  source 1..75: mol_type = other DNA
gcccccgcaacattgcgcctcaccggataacgccggcttggtgtggatactacgtcgcaattcatcttcacttca

SEQ ID NO: 697182 - DNA, 75 bp, synthetic construct
  source 1..75: mol_type = other DNA
ggctagagccaacccatgtgctcatgcgcgaagtcgcctgggaacaaaattatccggatcgcgggcgtgagccgc

SEQ ID NO: 697183 - DNA, 75 bp, synthetic construct
  source 1..75: mol_type = other DNA
ggctggtagtgtcgtcagcgtcgatgctgacggtgcagtggagtgggaaacagtaaaacggttgaccgttcgcgg

SEQ ID NO: 697184 - DNA, 75 bp, synthetic construct
  source 1..75: mol_type = other DNA
atgctggcggatgaaacctggatgtccggtgccgaatgtctggcacacggatttgctgaccaggtgacacccgct

SEQ ID NO: 697185 - DNA, 75 bp, synthetic construct
  source 1..75: mol_type = other DNA
ggcgctgggactgtatatccgtaaaggtgacggacaggactatgaagatccggggagcaaagagaccgagcggga

SEQ ID NO: 697186 - DNA, 75 bp, synthetic construct
  source 1..75: mol_type = other DNA
aacttatttactttggaaacaaggggctaacatgaaagaaatgttacctcataacactttttatcgccatagaag

SEQ ID NO: 697187 - DNA, 75 bp, synthetic construct
  source 1..75: mol_type = other DNA
attgctgttactgttgatcgtgttgataatagcaacgttgttccgttaatccgtgtcttagaggctaaacctgct

SEQ ID NO: 697188 - DNA, 75 bp, synthetic construct
  source 1..75: mol_type = other DNA
aaaatgtccgcgcatggctatatgccgcagaatttaaagctaaaactcgccacggtcgcgcctgtggtaaaggtg

SEQ ID NO: 697189 - DNA, 75 bp, synthetic construct
  source 1..75: mol_type = other DNA
cgcaacggccagttgcgtgcagtggcagcgggcagtcgtctgagtttttccagtgcggcgcgtaactataacggc

SEQ ID NO: 697190 - DNA, 75 bp, synthetic construct
  source 1..75: mol_type = other DNA
acattgccgatcttggctgtggcccaggtaacagcaccgcccttctacaccaacgttggcctgctgccaggataa

SEQ ID NO: 697191 - DNA, 75 bp, synthetic construct
  source 1..75: mol_type = other DNA
aaagctggagcagattttctttgagcagtctttcgactatcagttgcactggtatcgcgccgggcttgagcaccg

SEQ ID NO: 697192 - DNA, 75 bp, synthetic construct
  source 1..75: mol_type = other DNA
tgctggcagccgtgtttgccgccgttctgtccggggtgttgtggcacaggctggacagcacccgccacgataacc

SEQ ID NO: 697193 - DNA, 75 bp, synthetic construct
  source 1..75: mol_type = other DNA
caagctggacctggtatttgataccgatccggccagtgataaaggaggcagcagtgccgcaacgaaacgacagta

SEQ ID NO: 697194 - DNA, 75 bp, synthetic construct
  source 1..75: mol_type = other DNA
gtccgtgagtccggatgtgacagggcagtatacccgtcccgtgcttgaacgtttactgctgcggacctggctgcg

SEQ ID NO: 697195 - DNA, 75 bp, synthetic construct
  source 1..75: mol_type = other DNA
ggctgacgtattttacgttcgccgcagccgtagcactggcgctaccggcaaaagccaatacctggccgctgccgc

SEQ ID NO: 697196 - DNA, 75 bp, synthetic construct
  source 1..75: mol_type = other DNA
accggcacacttcaggatgcctttgatctggaggcgctgcaggccctcgatatcatcgtaacctgtcagggcggc

SEQ ID NO: 697197 - DNA, 75 bp, synthetic construct
  source 1..75: mol_type = other DNA
gtcagcctttaccgtgggtgaccagctgctgtggggggccgcggagccgctgcgtcggatgcttcgtcaactggc

SEQ ID NO: 697198 - DNA, 75 bp, synthetic construct
  source 1..75: mol_type = other DNA
atcgcgaaatgacgatgcgtgagctaaccccagccgccgttactggtacgttgaccacgccggtaggtcgcctgc

SEQ ID NO: 697199 - DNA, 75 bp, synthetic construct
  source 1..75: mol_type = other DNA
gaagctaaacagccatcgccagtagtaccggaaggactgattaaagcggtgcgtttttatgagcaggtaaaacgt

SEQ ID NO: 697200 - DNA, 75 bp, synthetic construct
  source 1..75: mol_type = other DNA
tgggcgaaagtagtaccaaacgatcgtgaaatcacgatgcgtgagctaaccccagcagccgttaccggcacgctg

SEQ ID NO: 697201 - DNA, 75 bp, synthetic construct
  source 1..75: mol_type = other DNA
ggctgcgccgtcctttggcggcacctccggcacacttcaggatgcttttgatctggaagcgctgaaggctctcga

SEQ ID NO: 697202 - DNA, 75 bp, synthetic construct
  source 1..75: mol_type = other DNA
gatgaagatttccaaatggaacagcaggccaatgctgaattcatcgccgcagccaatccggctaccgtgctgaca

SEQ ID NO: 697203 - DNA, 75 bp, synthetic construct
  source 1..75: mol_type = other DNA
atcggcagccgttcaggattaagttgtaagatggttaactataccctgcaaacaaacggactcagcaacacctca

SEQ ID NO: 697204 - DNA, 75 bp, synthetic construct
  source 1..75: mol_type = other DNA
gaatgccgactgccggacgcaaaccatcggcagccgttcaggattaagttgtaagatggttaactataccctgca

SEQ ID NO: 697205 - DNA, 75 bp, synthetic construct
  source 1..75: mol_type = other DNA
agcctgattccgtggatcgacaaacaactcgataacggtcagagccgcgaagagtggaaggggcaggcggagact

SEQ ID NO: 697206 - DNA, 75 bp, synthetic construct
  source 1..75: mol_type = other DNA
agcttcgtgaaagcggatggcaaggttactggattgacgcagcatcgtctctgcgcatgaaagatgacgccatca

SEQ ID NO: 697207 - DNA, 75 bp, synthetic construct
  source 1..75: mol_type = other DNA
ccagcaatacatcaaacgccgcgatcaggagaacgaggaaattgcgctaacggtagggaagctgcgtgttgagct

SEQ ID NO: 697208 - DNA, 75 bp, synthetic construct
  source 1..75: mol_type = other DNA
atacattaaatcccgcgaccaggagaatgaggatattgctcttacggttgggaagctgcgcgttgagcttgagga

SEQ ID NO: 697209 - DNA, 75 bp, synthetic construct
  source 1..75: mol_type = other DNA
ttattgatggtgtcgctatgctgcctggtcgtcttaaaactgctcgtttacgggcaaattttactcaggaaaaat

SEQ ID NO: 697210 - DNA, 75 bp, synthetic construct
  source 1..75: mol_type = other DNA
gctgcgctcaaacgcggcatcgctttatggctgggatattttactggcaggtacggcctggccaggtaaagagat

SEQ ID NO: 697211 - DNA, 75 bp, synthetic construct
  source 1..75: mol_type = other DNA
cgactggtgaagccacagtttttgtggaagatgctgcgctcaaacgcggcatcgctttatggctgggatatttta

SEQ ID NO: 697212 - DNA, 75 bp, synthetic construct
  source 1..75: mol_type = other DNA
acgctcaacaacgcaatgcaggcatttaaagatgcggcgcaaactgacgcggaagtgatgcagcatgcgatggat

SEQ ID NO: 697213 - DNA, 75 bp, synthetic construct
  source 1..75: mol_type = other DNA
cgctctgttacaggctaatcccggcattgatccgtatgtaccgcgcgcaggcagtgtgttaaccattccattgca

SEQ ID NO: 697214 - DNA, 75 bp, synthetic construct
  source 1..75: mol_type = other DNA
attgcactcggtgtagttcgtcacagagtaattaatgctgaatctggaagtgtatttcgtggactactcaatctt

SEQ ID NO: 697215 - DNA, 75 bp, synthetic construct
  source 1..75: mol_type = other DNA
tcagaagaaaaggcattggagatctgcgagcttgtgtcggacggcgaaagcattaacaaaatttcgaagatgcct

SEQ ID NO: 697216 - DNA, 75 bp, synthetic construct
  source 1..75: mol_type = other DNA
ttgaaactcgtaaatggttactggcaaaactgcaaccgcgtaaatacggcgaacgcgtcacacaggagatcgtcg

SEQ ID NO: 697217 - DNA, 75 bp, synthetic construct
  source 1..75: mol_type = other DNA
aggtagaagtaaatcagactactgtccttgagataatcgataacctgaataaggagtacaatactcatggagact

SEQ ID NO: 697218 - DNA, 75 bp, synthetic construct
  source 1..75: mol_type = other DNA
gccatgccatttcgtccgctgctcgaatcggggaaacccggcaccgtgcaaatcccggtaacattgcccacctgg

SEQ ID NO: 697219 - DNA, 75 bp, synthetic construct
  source 1..75: mol_type = other DNA
atggcccgcactaaaaaggcaaatgctgacgataaaaagccagcagccaaaaaggtgggccgtccacatggctat

SEQ ID NO: 697220 - DNA, 75 bp, synthetic construct
  source 1..75: mol_type = other DNA
gcaacaaggaagaagcgcccgtccaggttgaagtcacgaaagaagagatcgcccgcatcgtccaggaagtagaag

SEQ ID NO: 697221 - DNA, 75 bp, synthetic construct
  source 1..75: mol_type = other DNA
atgacacgaaaaccgaagtctgcgggcatgggtttaggacgatggcgcgtggtgcattgggtgagtcaggtttgt

SEQ ID NO: 697222 - DNA, 75 bp, synthetic construct
  source 1..75: mol_type = other DNA
ggagtgatgacgcgatagaacgtcagctaagccactctgagcgtaatagcgttagggctgcttatattcatactt

SEQ ID NO: 697223 - DNA, 75 bp, synthetic construct
  source 1..75: mol_type = other DNA
aacagcgcattgcgtgcgatgggctatgacacgaaaactgaagtttgcgggcatggattcagaacgatggcgcgc

SEQ ID NO: 697224 - DNA, 75 bp, synthetic construct
  source 1..75: mol_type = other DNA
gcattgtttgtgccgtttcagcataaagaccgccagcaatactggaatgcgctgccgctggaaaaagcgggcgca

SEQ ID NO: 697225 - DNA, 75 bp, synthetic construct
  source 1..75: mol_type = other DNA
aagacgctgaaaaaagtggaagacgaagatttcggctactgcgaatcctgcggtgttgaaatcggtattcgccgt

SEQ ID NO: 697226 - DNA, 75 bp, synthetic construct
  source 1..75: mol_type = other DNA
atattatctccagaagtggcggaaaacattaaatcagcatgtgttatgaagccctcaactgtggttgttgcgaaa

SEQ ID NO: 697227 - DNA, 75 bp, synthetic construct
  source 1..75: mol_type = other DNA
tttgtcgaaaccgttgctgccctggcgcaccgtgaaggcatgggcgcgcgagtcaccgccagccacactacggca

SEQ ID NO: 697228 - DNA, 75 bp, synthetic construct
  source 1..75: mol_type = other DNA
agaggggctgtggcagattcatctgcaggacggaaaaatcagcgccattgatgcgcaatccggcgtgatgcccat

SEQ ID NO: 697229 - DNA, 75 bp, synthetic construct
  source 1..75: mol_type = other DNA
gttccatgcggtgctcgagtgggtggccgatccccgcagcgtattgcagaccctgtggtcagtgttacgtccagg

SEQ ID NO: 697230 - DNA, 75 bp, synthetic construct
  source 1..75: mol_type = other DNA
cgtggcatgaaaatgaaagaggagcatatagttccgcttagccgacaggcgattatattgttagaacagcttaag

SEQ ID NO: 697231 - DNA, 75 bp, synthetic construct
  source 1..75: mol_type = other DNA
cggcattgccgccggaaacagcgccaacctgattatcctgccggctgaaaatgggtttgacgcgctgcgccgtca

SEQ ID NO: 697232 - DNA, 75 bp, synthetic construct
  source 1..75: mol_type = other DNA
ctgaatttaatcacccatcatagtgccagaacgctcaatttacaggattatggtgtttccgctggaaacagcgcc

SEQ ID NO: 697233 - DNA, 75 bp, synthetic construct
  source 1..75: mol_type = other DNA
aagccgaacagaaagaggctcagaccgagaattcgggagcatatactttcgaaaccattgctcgtgaatggcatg

SEQ ID NO: 697234 - DNA, 75 bp, synthetic construct
  source 1..75: mol_type = other DNA
ttttccggagggcatttgttcagcaactggcgaatggccgctggcatgttctgaggcgtcttcctgaagcgcgtt

SEQ ID NO: 697235 - DNA, 75 bp, synthetic construct
  source 1..75: mol_type = other DNA
aagtccgatatcgagagctggacagcttctggaaactcgctctgcgctatcttaggaattgaccaacaaggtaca

SEQ ID NO: 697236 - DNA, 75 bp, synthetic construct
  source 1..75: mol_type = other DNA
taatggcggattaggaaacttaggtgtaagtgtaatgcagctggttgcaccgctggtcatttttgtacctgtatt

SEQ ID NO: 697237 - DNA, 75 bp, synthetic construct
  source 1..75: mol_type = other DNA
tccttaccttgccgggcacaggctccggtaatttcatcgccttttacgccgtatttatggggctgtttctgactg

SEQ ID NO: 697238 - DNA, 75 bp, synthetic construct
  source 1..75: mol_type = other DNA
ggatgcccgtaaaagcgtcattgataacgagatgccgaaacagctggggtatgccctgaaacaccaactgaggtt

SEQ ID NO: 697239 - DNA, 75 bp, synthetic construct
  source 1..75: mol_type = other DNA
gtacgtgctgcttatattcatacatctgagcatttagacgaaaggcgtttaatgatacagtggtgggcagattat

SEQ ID NO: 697240 - DNA, 75 bp, synthetic construct
  source 1..75: mol_type = other DNA
atgaagctcaatgccagacaggtcgaaaccgcaaagccaaaagaaaaaaactacaaaatggccgatggcggcggt

SEQ ID NO: 697241 - DNA, 75 bp, synthetic construct
  source 1..75: mol_type = other DNA
gaaagttatgagtgagaacacggtaaacagtgctttgcgagctatgggttatgacactagaactgaagtatgcgg

SEQ ID NO: 697242 - DNA, 75 bp, synthetic construct
  source 1..75: mol_type = other DNA
agaagaagcccgtacttttgaacaactcgcagttgagtggcatgcaacaaataaaaagtggtcggaagaacatag

SEQ ID NO: 697243 - DNA, 75 bp, synthetic construct
  source 1..75: mol_type = other DNA
gggatgggcggctacgtttccgggccaggtggtctggcagcatggtcgttaggcattccggttgtacttcacgaa

SEQ ID NO: 697244 - DNA, 75 bp, synthetic construct
  source 1..75: mol_type = other DNA
cgacattaccctgctttaccttctagccggttccctgagtttcttgcacgtcttgctgcatatcgtggccgtgta

SEQ ID NO: 697245 - DNA, 75 bp, synthetic construct
  source 1..75: mol_type = other DNA
atctcgttccacttagtaggcaagcgatagggttgttggagcagttaaagcagattagtggtgataagacgctgc

SEQ ID NO: 697246 - DNA, 75 bp, synthetic construct
  source 1..75: mol_type = other DNA
atgcggtagagcggcagatgagtcaccaggagcgtagctctgtgcgagcagcttacattcataaggcggagcatc

SEQ ID NO: 697247 - DNA, 75 bp, synthetic construct
  source 1..75: mol_type = other DNA
atggcatatttttatttcaaattagacagagcacagacaaataaatatttcaccaaatatcaacagactgtttta

SEQ ID NO: 697248 - DNA, 75 bp, synthetic construct
  source 1..75: mol_type = other DNA
gcgtaagcgcgatgatgtggcttttatcggggacggaccgtgctttattgccagacctgatgagtcatgccctga

SEQ ID NO: 697249 - DNA, 75 bp, synthetic construct
  source 1..75: mol_type = other DNA
tctggaagcgttgaagaaatatattaatggtggtgtgctcgcctctgttatcagtagtaaagggtttgatatcac

SEQ ID NO: 697250 - DNA, 75 bp, synthetic construct
  source 1..75: mol_type = other DNA
tggtgcactatcgacaaccaaagcgcgccattatcctgctttaccttctagccggttccctgagtttcttgcacg

SEQ ID NO: 697251 - DNA, 75 bp, synthetic construct
  source 1..75: mol_type = other DNA
cagagcatttggatgaacgtaggttgatggttcagtggtgggctgattatcttgatattattaagtatgagcata

SEQ ID NO: 697252 - DNA, 75 bp, synthetic construct
  source 1..75: mol_type = other DNA
tgccttgcacgcaccaaccgttaccggctggtagtgtcgtcagcgttgatgctgatggtgcagtggagtgggaaa

SEQ ID NO: 697253 - DNA, 75 bp, synthetic construct
  source 1..75: mol_type = other DNA
attaatttttattgtgaatcccctgattcaaataatgttgttccattagtaagaacacttgaagctaaaccagcc

SEQ ID NO: 697254 - DNA, 75 bp, synthetic construct
  source 1..75: mol_type = other DNA
cggtaatccatcaaagtttttgcaaggtcactctgttatcggttccgacgatttgcaagggttggtgttaacagc

SEQ ID NO: 697255 - DNA, 75 bp, synthetic construct
  source 1..75: mol_type = other DNA
ctttctgataatcaaatgcagttattaatgaatgcagggcgtacaaaactcattaagggcttcaaatcgtcgaaa

SEQ ID NO: 697256 - DNA, 75 bp, synthetic construct
  source 1..75: mol_type = other DNA
ttacgcaagaatattggcattacttcatattcctcatgatctaccatcctatcgtcaggtaatggcagggcaatt

SEQ ID NO: 697257 - DNA, 75 bp, synthetic construct
  source 1..75: mol_type = other DNA
gaacggtctatttgggaaaaaactcccgtcgttggagcctgaaattttactctaaatatgatgagcatacatctg

SEQ ID NO: 697258 - DNA, 75 bp, synthetic construct
  source 1..75: mol_type = other DNA
cggtgcgctatcgacaaccaaagcgcgacattacccggctttaccttccagccggttccctgagtttcttgcaca

SEQ ID NO: 697259 - DNA, 75 bp, synthetic construct
  source 1..75: mol_type = other DNA
ggagcgatgacgcgatagaacggcagttgagtcatacagagcgtaacaatgtgcgtgcagcatatattcatacct

SEQ ID NO: 697260 - DNA, 75 bp, synthetic construct
  source 1..75: mol_type = other DNA
tcatatgctggtacttacacctcctgataaagttaatccttcttataaaacatgggttatgtcagatttgccaat

SEQ ID NO: 697261 - DNA, 75 bp, synthetic construct
  source 1..75: mol_type = other DNA
ggcaaatcatttgaggcagcgcttgtaatcgacaaagaacaaaaacgggtaactttcgagttcgccgcccgtaaa

SEQ ID NO: 697262 - DNA, 75 bp, synthetic construct
  source 1..75: mol_type = other DNA
agacagcaaagccaaaagacaaaagctacaaaatggccgatggcggcggtttgtatctcgaggtttcggccaagg

SEQ ID NO: 697263 - DNA, 75 bp, synthetic construct
  source 1..75: mol_type = other DNA
ttgctggcgcaaggtatagatccaaaagcaatacagaaagaggctcaagcagagaatgctggtgcttataatttt

SEQ ID NO: 697264 - DNA, 75 bp, synthetic construct
  source 1..75: mol_type = other DNA
ctacaaaatggccgatggcggcggtttatatcttgaggtttctgccaaaggctctaaatattggcgtatgaaata

SEQ ID NO: 697265 - DNA, 75 bp, synthetic construct
  source 1..75: mol_type = other DNA
gatgatccaatggtgggctgattttttagatgcaaataagaatgctgaggtaagcccttttgattttgcgaaaaa

SEQ ID NO: 697266 - DNA, 75 bp, synthetic construct
  source 1..75: mol_type = other DNA
atgaagctcaacgccagacaggtcgagactgcaaagccaaaagacaaaacctacaaaatggccgatggcggcggt

SEQ ID NO: 697267 - DNA, 75 bp, synthetic construct
  source 1..75: mol_type = other DNA
tcttgcggcatatcgtggccgtgtaatgacacggatcgcggtcgaactttcattactaacttttgtgcgttccag

SEQ ID NO: 697268 - DNA, 75 bp, synthetic construct
  source 1..75: mol_type = other DNA
aattaagggagtgcgttattcgtatcgtggtatgaagatgaaagaggagcatatcgttccgctgagtcgtcaggc

SEQ ID NO: 697269 - DNA, 75 bp, synthetic construct
  source 1..75: mol_type = other DNA
gatggtgcagtggtgggcggattatttgtattcaaattctggagagtttatatcggcatttgattatgcaaaaaa

SEQ ID NO: 697270 - DNA, 75 bp, synthetic construct
  source 1..75: mol_type = other DNA
aatagcgcattgcgtgcgatgggctatgacacgaaaaccgaagtttgcggacatggatttaggacgatggcgcgt

SEQ ID NO: 697271 - DNA, 75 bp, synthetic construct
  source 1..75: mol_type = other DNA
ggcgacggcgcaatgtggcgttccgctggaggtgctggaaaacgcgttgcgtgaaaaaggttacaccacggggca

SEQ ID NO: 697272 - DNA, 75 bp, synthetic construct
  source 1..75: mol_type = other DNA
atgtctttatctcgcgcagcgattgtcgaccagctaaaggaaattgttggtgcagatcgcgttattaccgatgaa

SEQ ID NO: 697273 - DNA, 75 bp, synthetic construct
  source 1..75: mol_type = other DNA
ctggaagggctgaaaaagcagttcgatcctaatggcattatgaacacgggtactatctatccgattgaaaaataa

SEQ ID NO: 697274 - DNA, 75 bp, synthetic construct
  source 1..75: mol_type = other DNA
tattcgacggcggtgggattgcttcactatgggaaagagtcacatcttaacggtgaagctgaagtagaaaaacgt

SEQ ID NO: 697275 - DNA, 75 bp, synthetic construct
  source 1..75: mol_type = other DNA
cgttgctggaagggctgaaaaagcaattcgatcctaacggcattatgaacgcgggtactatctatccgattgaaa

SEQ ID NO: 697276 - DNA, 75 bp, synthetic construct
  source 1..75: mol_type = other DNA
attgctgaaatcgtggcacgttacccgcaatgccagcgcgtggacagcaagctgatcgaaacctggtttaatcac

SEQ ID NO: 697277 - DNA, 75 bp, synthetic construct
  source 1..75: mol_type = other DNA
agatggcacccaacacttcacccattttgccgacggtaaatgtgtgctgatctttatggctgaaggtaaccctcg

SEQ ID NO: 697278 - DNA, 75 bp, synthetic construct
  source 1..75: mol_type = other DNA
ctggtctgctggaagtggtatgggccgttggcctgaaatatacccacggctttagtcgtttgacgccgagtgtta

SEQ ID NO: 697279 - DNA, 75 bp, synthetic construct
  source 1..75: mol_type = other DNA
gtactgctcggtgagtccgctaacccgatgcgcctggcgagtctggcgttaatcgtattggggattattggtctg

SEQ ID NO: 697280 - DNA, 75 bp, synthetic construct
  source 1..75: mol_type = other DNA
cgtaccacgccgcgcggcaggcccggacattcgtcacatcatcatcggcaacgaaggtgcattgtgctatatcac

SEQ ID NO: 697281 - DNA, 75 bp, synthetic construct
  source 1..75: mol_type = other DNA
aacggtgtgccgcgtaccggtgcttccgctaccgaaggtgggctggaaaccgttgtggaaaactcggtggtgctc

SEQ ID NO: 697282 - DNA, 75 bp, synthetic construct
  source 1..75: mol_type = other DNA
ctggaggtgctggaaaacgcgttgcgtgaaaaaggttacaccacggggcattcaccgcaatcaaaaccgctggcg

SEQ ID NO: 697283 - DNA, 75 bp, synthetic construct
  source 1..75: mol_type = other DNA
gtcgcgtggtatggataaaggcggggtgaacgacctcgaatccgtggtcaagtgcgtacaacgcgccattgacca

SEQ ID NO: 697284 - DNA, 75 bp, synthetic construct
  source 1..75: mol_type = other DNA
tcaggcaatattaactcctgactatctcgctactttgccggagttgaatcgtaccgggaaaaatgttgcacgccc

SEQ ID NO: 697285 - DNA, 75 bp, synthetic construct
  source 1..75: mol_type = other DNA
atgctcaatgcaacaggattgcccttacaagatctggtgttcggtgcgtccgtctattttcctccgtttttcaaa

SEQ ID NO: 697286 - DNA, 75 bp, synthetic construct
  source 1..75: mol_type = other DNA
ccgcgcaaagccgccgtcgaagccgctattgcccgcgccaaagcacgcaagctggaacagcaaaaggccaatgcg

SEQ ID NO: 697287 - DNA, 75 bp, synthetic construct
  source 1..75: mol_type = other DNA
tgaacacaaccgtaagccactgggtataccggcgtttctggcaattcgtgatgccctgatgcgtgcgccagagcc

SEQ ID NO: 697288 - DNA, 75 bp, synthetic construct
  source 1..75: mol_type = other DNA
ggtaaacctgccaatgtacaggtggcgctggatctggatgtgaaaggtttccaacagtgggtggctgaggtgctg

SEQ ID NO: 697289 - DNA, 75 bp, synthetic construct
  source 1..75: mol_type = other DNA
ggcaaaccttcaaacgtgcaggtggcgctggatctggatgtaagaggcttccagcagtgggtagctgaggtgctg

SEQ ID NO: 697290 - DNA, 75 bp, synthetic construct
  source 1..75: mol_type = other DNA
aataactcccactggcttaatgatgccctcaagacgcattttcctgaatggaaaatgatgacacccgaatcgtca

SEQ ID NO: 697291 - DNA, 75 bp, synthetic construct
  source 1..75: mol_type = other DNA
agcgtaaaagcgacaagtgccgcaaatgggatcatcagtttgtctgctcacgcttcggtgcggttgcagaagatt

SEQ ID NO: 697292 - DNA, 75 bp, synthetic construct
  source 1..75: mol_type = other DNA
gtcacgtggtatggataaaggcggggttaacgacctcgaatctgtggtcaaatgcgtacaacgcgccattgacca

SEQ ID NO: 697293 - DNA, 75 bp, synthetic construct
  source 1..75: mol_type = other DNA
ctggtggtcgatgaggttcacgctgaacacattctggatggcaaattcgtcagttgtctcacctctggctgtgcc

SEQ ID NO: 697294 - DNA, 75 bp, synthetic construct
  source 1..75: mol_type = other DNA
tgaccctgactgcgaaggacgaagcctcgcaggttctggaaaagggacaaaaacaggttatcaaagccaccgaag

SEQ ID NO: 697295 - DNA, 75 bp, synthetic construct
  source 1..75: mol_type = other DNA
cagttgcctggcttccggatgtgccgatcacgataatctggtcctgttaacctcgcctaataaagcgtttaacct

SEQ ID NO: 697296 - DNA, 75 bp, synthetic construct
  source 1..75: mol_type = other DNA
tatggcgctacttgcctgggcgatgaaatcactgccggtaggtacggcttatgccgtctggacagggattggcgc

SEQ ID NO: 697297 - DNA, 75 bp, synthetic construct
  source 1..75: mol_type = other DNA
gtgctgattgccaccgatggtgtgttctcgatggacggcgtgattgccaacctgaaaggcgtttgcgatctggca

SEQ ID NO: 697298 - DNA, 75 bp, synthetic construct
  source 1..75: mol_type = other DNA
agcgcgtgaagccggtgcgcgtcatgtgctgattgccaccgatggtgtgttctcgatggacggcgtgattgccaa

SEQ ID NO: 697299 - DNA, 75 bp, synthetic construct
  source 1..75: mol_type = other DNA
ggaatggaagatgcgattctctactcttcttgttttgacgcgaacggcggcctgtttgaaacgctgctgggtgcg

SEQ ID NO: 697300 - DNA, 75 bp, synthetic construct
  source 1..75: mol_type = other DNA
tgggtgagcgtgaaattgcccgtactatgctagaactgctggaaacaccaccggcgggggaagtggtgacggggt

SEQ ID NO: 697301 - DNA, 75 bp, synthetic construct
  source 1..75: mol_type = other DNA
gtggggtccgcgctgtattgggcaatgcagcgaacgaagaaattatgcaactggcgcatctggaatgtgcaaaat

SEQ ID NO: 697302 - DNA, 75 bp, synthetic construct
  source 1..75: mol_type = other DNA
cattaaccatcgccgccagcctggcgcagattggtgagttcgcgtttatcctggcgggactgggaatggcattga

SEQ ID NO: 697303 - DNA, 75 bp, synthetic construct
  source 1..75: mol_type = other DNA
aaataaatattaataaggtgtttttaaataactataagcattgcatatcaaatgtcatcgataataaaatatcta

SEQ ID NO: 697304 - DNA, 75 bp, synthetic construct
  source 1..75: mol_type = other DNA
gcaggtgggcgctactcagtatttcctagtatggtgattcataaattatggctagactattttgatgatatgcag

SEQ ID NO: 697305 - DNA, 75 bp, synthetic construct
  source 1..75: mol_type = other DNA
gctatgaagctgctggttacttcattacacatgatatatacgaggaatgggcattagaaaagaaaatttctgtcg

SEQ ID NO: 697306 - DNA, 75 bp, synthetic construct
  source 1..75: mol_type = other DNA
atatttttgacaaatactatagtgagcttccggatgaagcccaagagactgatgccgacaagacatggagactct

SEQ ID NO: 697307 - DNA, 75 bp, synthetic construct
  source 1..75: mol_type = other DNA
cacgcatgatatttacgaggaatgggcgttagagaaaaaaatttcagtcgattatattcgtaaagcgaacaacaa

SEQ ID NO: 697308 - DNA, 75 bp, synthetic construct
  source 1..75: mol_type = other DNA
cttttagaactgaccaatgttgatccttttaaagaattcctaactgttttgataaaagataagtggcagattgtt

SEQ ID NO: 697309 - DNA, 75 bp, synthetic construct
  source 1..75: mol_type = other DNA
ggtagagttgtttgacgtctcctttgcgctcggtgcgttctttgccggtatggtgttgaacgagtctgaactgag

SEQ ID NO: 697310 - DNA, 75 bp, synthetic construct
  source 1..75: mol_type = other DNA
atttcgaggatggggtcacatttggttataacgacgcaattagtgaatgcgaaggacggattcgcgccgctggaa

SEQ ID NO: 697311 - DNA, 75 bp, synthetic construct
  source 1..75: mol_type = other DNA
tggagccgcatattcacctggacaccacgcaaaccgccggacaacagaactggaatcagtccggcacgctgtttg

SEQ ID NO: 697312 - DNA, 75 bp, synthetic construct
  source 1..75: mol_type = other DNA
cccctgctctttgccgttggtctcggcgtctttggggcaagttttggttctgcggaagtggcgataaacgttgaa

SEQ ID NO: 697313 - DNA, 75 bp, synthetic construct
  source 1..75: mol_type = other DNA
cgatgggctatatggatgggcgtgacaaaacggtaattgtagtaatgaaagccatcagggccgcaggaatcaaag

SEQ ID NO: 697314 - DNA, 75 bp, synthetic construct
  source 1..75: mol_type = other DNA
aacggtaattgcagtaatgaaagctatcagagccgctggaattaaagagaagaatttcgatgaagcaaacaatct

SEQ ID NO: 697315 - DNA, 75 bp, synthetic construct
  source 1..75: mol_type = other DNA
aattgcagtaatgaaagctatcagagccgctggaattaaagagaagaatttcgatgaagcaaatatacatgcttc

SEQ ID NO: 697316 - DNA, 75 bp, synthetic construct
  source 1..75: mol_type = other DNA
gcggggttcgcgcagtattaggcaacgctgctaacgaagagataatgcacctggcgcatctgaaatgcgcgaaat

SEQ ID NO: 697317 - DNA, 75 bp, synthetic construct
  source 1..75: mol_type = other DNA
tggtgcttaacgaatccgaacttagtcaccgcgcagcgcatgatacgctgccgttgcgcgatgcgtttgcggtgc

SEQ ID NO: 697318 - DNA, 75 bp, synthetic construct
  source 1..75: mol_type = other DNA
ttatttggtcactcccagcgtacggcattaaccattgccgccagtctggcgcaaattggtgagttcgcctttatt

SEQ ID NO: 697319 - DNA, 75 bp, synthetic construct
  source 1..75: mol_type = other DNA
cggccctattgcttagattgttgattggatgtggaataggttttctctactggttcaagttgccccacatgccag

SEQ ID NO: 697320 - DNA, 75 bp, synthetic construct
  source 1..75: mol_type = other DNA
ggctttggtgcatacgtgggctatcactcatatgttgttgaactcgaaatgaagccaaagggcatgttttcgaaa

SEQ ID NO: 697321 - DNA, 75 bp, synthetic construct
  source 1..75: mol_type = other DNA
caaccgctggcagtactggcgacgctggcaattattctgtttggtaaatcggtcgcggccctgttccttgtgcgt

SEQ ID NO: 697322 - DNA, 75 bp, synthetic construct
  source 1..75: mol_type = other DNA
aaaatgcgctagaagcggagcgtgttaagcagtggaatcagcagcagttaaacgcgccaactgctgaccttaata

SEQ ID NO: 697323 - DNA, 75 bp, synthetic construct
  source 1..75: mol_type = other DNA
gccgtcattcttaccggcgttatctggtggggggggcacctctggctccagtctcttttgtcatcacaaataccg

SEQ ID NO: 697324 - DNA, 75 bp, synthetic construct
  source 1..75: mol_type = other DNA
gggttttcagggggtgtactgcctgaaagcagtcagccagtcgcagcgtgatgaggtcatgaaagccctttctga

SEQ ID NO: 697325 - DNA, 75 bp, synthetic construct
  source 1..75: mol_type = other DNA
gtatcccctgagggcgtgcttaatggtgctgatgaggccgaaaacttcatagagattttcaaaaagcacatagcg

SEQ ID NO: 697326 - DNA, 75 bp, synthetic construct
  source 1..75: mol_type = other DNA
cagcactataaagatcaaatccagtcgtataaaaatcaactggcgacggcaactggcgttcgtgatattgccagc

SEQ ID NO: 697327 - DNA, 75 bp, synthetic construct
  source 1..75: mol_type = other DNA
taccagagccagatacaggcatacaaagaccaactggcgacggccacaggtgttcgtgatattgccagctttgtt

SEQ ID NO: 697328 - DNA, 75 bp, synthetic construct
  source 1..75: mol_type = other DNA
ttaatgaactgggtaacagtatcaccctctggcgtcgtgacggaccggtaatgatttcttttgatgatctgtgga

SEQ ID NO: 697329 - DNA, 75 bp, synthetic construct
  source 1..75: mol_type = other DNA
aacggtataatggcttttccaactctgaatggttcgaaccaatctgtagttggtattgctttaaaagaaggtatt

SEQ ID NO: 697330 - DNA, 75 bp, synthetic construct
  source 1..75: mol_type = other DNA
gaacagcaacaggctaatgcggagccagaagaacaggttgatccgcgcaaagctgccgtcgaagcggctattgca

SEQ ID NO: 697331 - DNA, 75 bp, synthetic construct
  source 1..75: mol_type = other DNA
atgagacaggatattgatatcgaccagctgatgatggagacatggcttaccgtcaccatgctgaaaaaaggtgca

SEQ ID NO: 697332 - DNA, 75 bp, synthetic construct
  source 1..75: mol_type = other DNA
tggtgctgcttcccgtcttgatattaacgctgtccggaccgggacagactcgctggcacttgccattaccattta

SEQ ID NO: 697333 - DNA, 75 bp, synthetic construct
  source 1..75: mol_type = other DNA
gtgatttccctgtttacctggcggcgggcggagcctgatgacaacgccgacgtcccgatgggatggtggggggat

SEQ ID NO: 697334 - DNA, 75 bp, synthetic construct
  source 1..75: mol_type = other DNA
gaaatgatccggcagtatcgaaatttcttgaaaaatccattgttgccggaatgactacggataatatgccgtcgc

SEQ ID NO: 697335 - DNA, 75 bp, synthetic construct
  source 1..75: mol_type = other DNA
atgagtgaagcactactgaacgcgggacgtcagacgttaatgctggagttgcaggaagcaagccgtttaccagaa

SEQ ID NO: 697336 - DNA, 75 bp, synthetic construct
  source 1..75: mol_type = other DNA
cggcgcaccattatggagttctgcgcccatttcctccaaaagtctctctcttagcacatcaaatctcggagctaa

SEQ ID NO: 697337 - DNA, 75 bp, synthetic construct
  source 1..75: mol_type = other DNA
caggtatatacttaaaccttttttttgtattctgtttatctgtagttctattgttacatatgccaccatgaaata

SEQ ID NO: 697338 - DNA, 75 bp, synthetic construct
  source 1..75: mol_type = other DNA
atgagtgaagcactactgaacgcgggacgtcagacgttaatgctggagttgcaggaagcaagccatttaccggaa

SEQ ID NO: 697339 - DNA, 75 bp, synthetic construct
  source 1..75: mol_type = other DNA
caaaatcaccgccgcaccagtggtggatgaaaacggcaaacttaccggcgcaattaacctgcaggatttctatca

SEQ ID NO: 697340 - DNA, 75 bp, synthetic construct
  source 1..75: mol_type = other DNA
ataccctgatgatgggcgacgcgctagcgatggcggtcatgcaggcgcgcggatttaatgaagaagattttgccc

SEQ ID NO: 697341 - DNA, 75 bp, synthetic construct
  source 1..75: mol_type = other DNA
atatttggtcgtcgcttaaagatatcgcaatcttaaaaacccagatcaaaataggaatctccgtagaacaacaag

SEQ ID NO: 697342 - DNA, 75 bp, synthetic construct
  source 1..75: mol_type = other DNA
tgcgatcttaaaaacacagatcaaaatgggcgtctccatcgaacaacaagagaagttgcccacaaaatccaaatt

SEQ ID NO: 697343 - DNA, 75 bp, synthetic construct
  source 1..75: mol_type = other DNA
actatcgtgaatgcgagcacctgggcggcttgcctgcagtggcgcttgctggtggcgatcttgccgcaaagcagc

SEQ ID NO: 697344 - DNA, 75 bp, synthetic construct
  source 1..75: mol_type = other DNA
ccagtctttctgatatctgcattaaattttgtttttacaccgttctcattcaggtatatacttaaaccttttttt

SEQ ID NO: 697345 - DNA, 75 bp, synthetic construct
  source 1..75: mol_type = other DNA
gccgtatctttttaagagaagtattaaaaaatacccagatcaattttggtgtgagatcgttgcctacaggattgg

SEQ ID NO: 697346 - DNA, 75 bp, synthetic construct
  source 1..75: mol_type = other DNA
gaacgtcagcgctccgatattggcgtagcgccgtctgtccatcaaattgcccgtgggctggtggcgaaagcgctg

SEQ ID NO: 697347 - DNA, 75 bp, synthetic construct
  source 1..75: mol_type = other DNA
gcgggaccgggcgagcagtgggacccgcaaaaagccgccgtcgaagccgctattgcccgtgccaaagcgcgcaaa

SEQ ID NO: 697348 - DNA, 75 bp, synthetic construct
  source 1..75: mol_type = other DNA
atccgcgaaaactaccagggcatccgcccggcaccaggctacccggcctgcccggaacatacggaaaaagccacc

SEQ ID NO: 697349 - DNA, 75 bp, synthetic construct
  source 1..75: mol_type = other DNA
tcgggtttcctgaatattgtcggcggctgctgtggcacgacgccacaacatattgctgcgatgagccgtgcagtt

SEQ ID NO: 697350 - DNA, 75 bp, synthetic construct
  source 1..75: mol_type = other DNA
aggaactttcgcgtattgccgaatgctacgtcaccgcgcacccgaatgccgggctgccaaacgcctttggtgaat

SEQ ID NO: 697351 - DNA, 75 bp, synthetic construct
  source 1..75: mol_type = other DNA
tgcctgcggaaaaaattctccgtaccgccaaagaagtgaatgctgatttgattggcctttcaggattgatcacgc

SEQ ID NO: 697352 - DNA, 75 bp, synthetic construct
  source 1..75: mol_type = other DNA
agtggtgggcgaagaggcaaaacgcctgtttaaagacgctaacgacatgctggataaattaagcgctgaaaaatc

SEQ ID NO: 697353 - DNA, 75 bp, synthetic construct
  source 1..75: mol_type = other DNA
gcccggcaccaggctacccggcctgcccggaacatacggaaaaagccaccatctgggagctgctggaagtggaaa

SEQ ID NO: 697354 - DNA, 75 bp, synthetic construct
  source 1..75: mol_type = other DNA
ccgctggtacgcgcaccgcgtgatgcagcatctgtgcacggcgaatcgggaatggctggctacgactttgttgag

SEQ ID NO: 697355 - DNA, 75 bp, synthetic construct
  source 1..75: mol_type = other DNA
aacccctgactatctcgctactttgccggagttgaatcgcaccggaaaaatgctacacgccctgtttagccacta

SEQ ID NO: 697356 - DNA, 75 bp, synthetic construct
  source 1..75: mol_type = other DNA
tgagcacaaccgaaagccactcgggataccagcgtttctggcgattcgtgatgccctgatgcgtgcaccagagcc

SEQ ID NO: 697357 - DNA, 75 bp, synthetic construct
  source 1..75: mol_type = other DNA
gggctgcctaacgcctttggtgaatacgatctcgacgctgacacgatggcaaagcagattcgcgaatgggcggaa

SEQ ID NO: 697358 - DNA, 75 bp, synthetic construct
  source 1..75: mol_type = other DNA
ttctccggacgtaaacgatccggcattccgtaacatcacctttgatcagctggtggcagcctatcgcgaatccac

SEQ ID NO: 697359 - DNA, 75 bp, synthetic construct
  source 1..75: mol_type = other DNA
ggttgatccacgcaaagcggcagttgctgcggctattgcccgcgttcaggccaaaaaagccgcccagcaaaaggt

SEQ ID NO: 697360 - DNA, 75 bp, synthetic construct
  source 1..75: mol_type = other DNA
ggtggtgaaatcggcgcgcgtgatgaaacaggcggtggcctatctcgaaccgtttattgaagccagcaaagagca

SEQ ID NO: 697361 - DNA, 75 bp, synthetic construct
  source 1..75: mol_type = other DNA
aacatggatgaagggatgctcgacgccgaagtggcgatggtgcgttttctcaatctgattgccggtgaaccggat

SEQ ID NO: 697362 - DNA, 75 bp, synthetic construct
  source 1..75: mol_type = other DNA
tcggtgagcgtaccaacgtcactggttccgccaaattcaaacgcctgatcaaagaagagaagtacaacgaagcgc

SEQ ID NO: 697363 - DNA, 75 bp, synthetic construct
  source 1..75: mol_type = other DNA
aatcaagatcaacaaaaacaaaatttagatagaattactaaagaaaaagacttgatgctaactcagttacatcta

SEQ ID NO: 697364 - DNA, 75 bp, synthetic construct
  source 1..75: mol_type = other DNA
cgtcgctggacgagatggttaacgtggcgaaagagatggagcgccagggcttcaccattccgctattgattggcg

SEQ ID NO: 697365 - DNA, 75 bp, synthetic construct
  source 1..75: mol_type = other DNA
gaaattgtcgatctcggcgtgatggtgcctgcggaaaaaattctccgtaccgctaaagaagtgaatgctgatttg

SEQ ID NO: 697366 - DNA, 75 bp, synthetic construct
  source 1..75: mol_type = other DNA
aacacactggcatgaaactcacagaatctttcgccatgtggcctggtgcatcggtttcgggttggtacttcagcc

SEQ ID NO: 697367 - DNA, 75 bp, synthetic construct
  source 1..75: mol_type = other DNA
ctggcaggcttacacgccgccggtggcgcaccgtctcggcgtgcaggaagtcgaagccagcatcgaaacgctgcg

SEQ ID NO: 697368 - DNA, 75 bp, synthetic construct
  source 1..75: mol_type = other DNA
ctacgtcaccgcccacccgaacgccgggctgcctaacgcctttggtgaatacgatctcgacgccgacacgatggc

SEQ ID NO: 697369 - DNA, 75 bp, synthetic construct
  source 1..75: mol_type = other DNA
agcacaacaactatgcgcaggactttatcggcgcgtgtgaagacatcaaacgcgaactgccgcacgcgctgattt

SEQ ID NO: 697370 - DNA, 75 bp, synthetic construct
  source 1..75: mol_type = other DNA
ttcaccatcccgctattgattggcggcgcgacgacctcaaaagcgcacacggcggtgaaaatcgagcagaactac

SEQ ID NO: 697371 - DNA, 75 bp, synthetic construct
  source 1..75: mol_type = other DNA
acccggacagcaagtactacgcggtggcgcaaattcagcgcgatcaggttgaagactatgcccgccgtaaaggta

SEQ ID NO: 697372 - DNA, 75 bp, synthetic construct
  source 1..75: mol_type = other DNA
tgaaattgagtctattgccacgcttaccgcagcgattgccagcggcatgggcgttgcagtattacccgaatcggc

SEQ ID NO: 697373 - DNA, 75 bp, synthetic construct
  source 1..75: mol_type = other DNA
gcccgctgaacccaattaccgacttagcgaactggttacgcaggcgctttgacctcaatcagtctgcgacgatcc

SEQ ID NO: 697374 - DNA, 75 bp, synthetic construct
  source 1..75: mol_type = other DNA
agtcgttatcttggtgaaaatgagttcacggttaacccctcgcgtctttcaaacataaccgttattgaaacctat

SEQ ID NO: 697375 - DNA, 75 bp, synthetic construct
  source 1..75: mol_type = other DNA
atcgatatcggcggcccaaccatggtgcgctccgccgccaagaaccataaagatgtcgccatcgtggtgaagagc

SEQ ID NO: 697376 - DNA, 75 bp, synthetic construct
  source 1..75: mol_type = other DNA
ctcgctggaagatgcggttgagaacatcgatatcggcggcccaacgatggtgcgctccgccgccaagaaccataa

SEQ ID NO: 697377 - DNA, 75 bp, synthetic construct
  source 1..75: mol_type = other DNA
aaaagtatcaccggcgaatgggcaacggtcgcggcgcaaacggtctgcctgcatggcgacggcgagcacgctctg

SEQ ID NO: 697378 - DNA, 75 bp, synthetic construct
  source 1..75: mol_type = other DNA
atggtaaatcgctgtatcttgatcagaaaggaaacctgactcagactggcagcggtactactattgcagctactt

SEQ ID NO: 697379 - DNA, 75 bp, synthetic construct
  source 1..75: mol_type = other DNA
cagaccactgaaggcgcgctgtccgaaatcaacaacaacttacagcgtattcgtgaactgacggttcaggcttct

SEQ ID NO: 697380 - DNA, 75 bp, synthetic construct
  source 1..75: mol_type = other DNA
agtacagagtgctgcaacggctaacacagcagttactggtgcgacaattaagtataatacaggtattcagtctgc

SEQ ID NO: 697381 - DNA, 75 bp, synthetic construct
  source 1..75: mol_type = other DNA
cgggacgggattaactactgacaataccacaaaatattatttacaagatgacgggtctgtaactaatggttctgg

SEQ ID NO: 697382 - DNA, 75 bp, synthetic construct
  source 1..75: mol_type = other DNA
gggcaaattgactactgaagcgtctacagctgctgaaactaccgctaacccactgaaagccctggacgatgcaat

SEQ ID NO: 697383 - DNA, 75 bp, synthetic construct
  source 1..75: mol_type = other DNA
acgggtactaactctgaatccgatctgaactcaatccaggacgaaattaaatcccgtctggacgaaattgaccgc

SEQ ID NO: 697384 - DNA, 75 bp, synthetic construct
  source 1..75: mol_type = other DNA
agcaggctgccttctatatagaagagaacgtgaaagaagcctctgttgccaccgcaacccaggttcagggtaagg

SEQ ID NO: 697385 - DNA, 75 bp, synthetic construct
  source 1..75: mol_type = other DNA
atgagaaagctcgcgcaggacatcattaaagctcaaaaaggtgaaattgagcagatgaataaatggcttgatagt

SEQ ID NO: 697386 - DNA, 75 bp, synthetic construct
  source 1..75: mol_type = other DNA
ttatactgatgttatccctgccagcgatttccgcagaacattcagaaatgaaaatgtcagatatatcctcatcgg

SEQ ID NO: 697387 - DNA, 75 bp, synthetic construct
  source 1..75: mol_type = other DNA
aaaatgactgatatgtctacctcggcttcgtcacaggaatatatggctggcatgaaagacatgcatgacaaaatg

SEQ ID NO: 697388 - DNA, 75 bp, synthetic construct
  source 1..75: mol_type = other DNA
tgctgagtccacccgccgtattgcggcaagccgcattccggctgatcacatggtgttgatggcaggtttcaccgc

SEQ ID NO: 697389 - DNA, 75 bp, synthetic construct
  source 1..75: mol_type = other DNA
ccaccgtcctctctgcccccgccaaaatcaccaaccacctggtggcgatgattgaaaaaaccattagcggccagg

SEQ ID NO: 697390 - DNA, 75 bp, synthetic construct
  source 1..75: mol_type = other DNA
gccagacccgaagtcttcgccaacagccttaagtatataaaactgcttcttaatacccctcattcaggagaatga

SEQ ID NO: 697391 - DNA, 75 bp, synthetic construct
  source 1..75: mol_type = other DNA
ggcctcgatttcaaacgcgtgaatggcggtttgctggttcaggatcgcgatctgggcatggttggcacagaagaa

SEQ ID NO: 697392 - DNA, 75 bp, synthetic construct
  source 1..75: mol_type = other DNA
ctatttcggcagcatggttccggcttaccacggcgaaagcaaagaagccgccggtcgcttctcgcgcacgctgaa

SEQ ID NO: 697393 - DNA, 75 bp, synthetic construct
  source 1..75: mol_type = other DNA
gcggcctcctggttcaggatcgcgacctgggcatggtcggtgcggaagaactgcgcgtcgtcaccaaacgccagc

SEQ ID NO: 697394 - DNA, 75 bp, synthetic construct
  source 1..75: mol_type = other DNA
cacaaatgatgaggcagcggagtttaccgggatgattcctgtttatcattttctggtcagtgccgcgattctggt

SEQ ID NO: 697395 - DNA, 75 bp, synthetic construct
  source 1..75: mol_type = other DNA
aaaatatttagattcaggattctctgaagaagaaatcatcactaatatgcctttttcaacgcatctgccaaactt

SEQ ID NO: 697396 - DNA, 75 bp, synthetic construct
  source 1..75: mol_type = other DNA
actgctattgacgccatcttaggggtttacgaagaagactcagattacagaaaatatcttgatttagggtactcg

SEQ ID NO: 697397 - DNA, 75 bp, synthetic construct
  source 1..75: mol_type = other DNA
ctggtaaatttgaagctgttgctggtgcggatgcttatgtaagcaaagatggcaaattaacgacagaaaccacca

SEQ ID NO: 697398 - DNA, 75 bp, synthetic construct
  source 1..75: mol_type = other DNA
ggtcactacatatgttggtggtgtgacattaagccgtggttttacggtggcgacggacggtaaggcttatcctgc

SEQ ID NO: 697399 - DNA, 75 bp, synthetic construct
  source 1..75: mol_type = other DNA
caaccgatgaccagaatctggatttgcagcgggatgcgcttcaggctacagggtgcggaaaaatattcgaagacc

SEQ ID NO: 697400 - DNA, 75 bp, synthetic construct
  source 1..75: mol_type = other DNA
aaggccgggcaacgggcgttgcaggaggaaataaaccgcagccagcagcagttgattcacatccgggaaaacgag

SEQ ID NO: 697401 - DNA, 75 bp, synthetic construct
  source 1..75: mol_type = other DNA
aatggttctgggacgattaccaacaaagcagcaactgtcagtgatgttactcgcgcaggcggtacattggtgaat

SEQ ID NO: 697402 - DNA, 75 bp, synthetic construct
  source 1..75: mol_type = other DNA
gtggcagtgatgccccatgcggcgaaggttctcaaacaggtgatggtgaataccggagggaacaaagagcaggtc

SEQ ID NO: 697403 - DNA, 75 bp, synthetic construct
  source 1..75: mol_type = other DNA
taagccacagagcgccctggcaaattcagggaccactcttggttatgtcgtgaacaccgtcgcgcctaacctcta

SEQ ID NO: 697404 - DNA, 75 bp, synthetic construct
  source 1..75: mol_type = other DNA
tggcagcctgagttcacagataaaacactctccaggaaaaccggggcggttcacacgcttcgctggagcgagttc

SEQ ID NO: 697405 - DNA, 75 bp, synthetic construct
  source 1..75: mol_type = other DNA
ccatgtttgattccggtgcctatatcgacctgattggtaagtatgttcatcatgataatgagtacaccgcaacct

SEQ ID NO: 697406 - DNA, 75 bp, synthetic construct
  source 1..75: mol_type = other DNA
ttttggcctggagctggagaaatcagcgttcgggaaatataacgtggacaatgcgataaacgccaacttccgtta

SEQ ID NO: 697407 - DNA, 75 bp, synthetic construct
  source 1..75: mol_type = other DNA
acgtcctcgccagcattgctgacaacggaaaacagtgccagcaactgaaggcacaggtacatgggttacagcagt

SEQ ID NO: 697408 - DNA, 75 bp, synthetic construct
  source 1..75: mol_type = other DNA
cgcttgcctttgcattgggtgggtatttcgcctggctgcaaggtcataaggcgggctatgagaaggcacagaccg

SEQ ID NO: 697409 - DNA, 75 bp, synthetic construct
  source 1..75: mol_type = other DNA
ccgggggataaaatttccaaacctgctaccgattatgtctggttttatgagatgtcttccgatggttactcattg

SEQ ID NO: 697410 - DNA, 75 bp, synthetic construct
  source 1..75: mol_type = other DNA
gatgcagatggtgctatcaccaaaactaaagaatacaccacttcttatgctgtaaataaagatactggtgaagtt

SEQ ID NO: 697411 - DNA, 75 bp, synthetic construct
  source 1..75: mol_type = other DNA
cgtacgtcgatgcggaagatatgtccgacctgccaaatgaataccgtcacgagccggaactgggtctggcatctg

SEQ ID NO: 697412 - DNA, 75 bp, synthetic construct
  source 1..75: mol_type = other DNA
atatcaaaaaacggtgcgtccgatgttcctgcaattcattgaaccttccaaacaatatgcggacattatcgtgcc

SEQ ID NO: 697413 - DNA, 75 bp, synthetic construct
  source 1..75: mol_type = other DNA
tcattatcggtattgctggcgcatcggcttccggcaagagtctcattgccagtaccctttatcgtgaattacgtg

SEQ ID NO: 697414 - DNA, 75 bp, synthetic construct
  source 1..75: mol_type = other DNA
accgctaccgacggtgatactgtcgcaacgatcaactataaatctggtgtcatgatcggttccgctacctttacc

SEQ ID NO: 697415 - DNA, 75 bp, synthetic construct
  source 1..75: mol_type = other DNA
gctaaccgttttacctctaacattaaaggcttgactcaggcggcccgtaacgccaacgacggtatttctgttgca

SEQ ID NO: 697416 - DNA, 75 bp, synthetic construct
  source 1..75: mol_type = other DNA
ctatgtagaagcggatggtgatttcactaccgacgctgcaaccaaagccgcaaccaccaccgatccgctggccgc

SEQ ID NO: 697417 - DNA, 75 bp, synthetic construct
  source 1..75: mol_type = other DNA
accggtactaactccgattctgacctggactccatccaggacgaaatcaaatctcgtctggacgaaattgaccgc

SEQ ID NO: 697418 - DNA, 75 bp, synthetic construct
  source 1..75: mol_type = other DNA
gaagccaggcatacgtagacgatgcaggcaacttgacgactaacaacgctggtagcgcagctaaagctgatatga

SEQ ID NO: 697419 - DNA, 75 bp, synthetic construct
  source 1..75: mol_type = other DNA
agcgcagatcatccagcaggccggtaactccgtgctggcaaaagctaaccaggtaccacagcaggttctgtctct

SEQ ID NO: 697420 - DNA, 75 bp, synthetic construct
  source 1..75: mol_type = other DNA
tgaaacgcggctcggcaattgacctgccggtttacagctatgttgaacatacgcgtatgaaagaaacggtgacgg

SEQ ID NO: 697421 - DNA, 75 bp, synthetic construct
  source 1..75: mol_type = other DNA
acaggcacaccgggtgccgtatctacggtaattacaactgaagatgaaacaaccttcactctggctggcggtact

SEQ ID NO: 697422 - DNA, 75 bp, synthetic construct
  source 1..75: mol_type = other DNA
atacgaatttgctggtggcaattctactactggtggcggcgttaaattcaaagacacggtgtcttctgacgcgct

SEQ ID NO: 697423 - DNA, 75 bp, synthetic construct
  source 1..75: mol_type = other DNA
aagcaggtcatgtcttcccaagctgactcgttgattaaaatttcgcggatctgggccgatttttgtcccgcaaac

SEQ ID NO: 697424 - DNA, 75 bp, synthetic construct
  source 1..75: mol_type = other DNA
gaattatgtgaacactatcaatttagtgttagtacactgcggcgctggcaagaacagcacgcagaaggcgtaaga

SEQ ID NO: 697425 - DNA, 75 bp, synthetic construct
  source 1..75: mol_type = other DNA
gatgcaggaatcctcagttggacccgcattgagcatgaacttcgacatgcgcaaagacgtacgcggtgtctttat

SEQ ID NO: 697426 - DNA, 75 bp, synthetic construct
  source 1..75: mol_type = other DNA
cgttggtgttctcaccaaactactatcagacacgtcaaaacctgttggatattgaaaacttaaaggttgatgatc

SEQ ID NO: 697427 - DNA, 75 bp, synthetic construct
  source 1..75: mol_type = other DNA
aagcaattaccttgattctggctgtgctgctgggcggcatggttggcgcggggattgtgcttgggcgtaacgcgc

SEQ ID NO: 697428 - DNA, 75 bp, synthetic construct
  source 1..75: mol_type = other DNA
ttgataaacttgatattcatgcttaccgctatgtaatgaaaccgacgttacctattcgtcgcgatagcccgaaga

SEQ ID NO: 697429 - DNA, 75 bp, synthetic construct
  source 1..75: mol_type = other DNA
accatgtcatcgagcgcatcaactgtactaacggcaaaatcaactggggcatcggcataggccttgcggggagta

SEQ ID NO: 697430 - DNA, 75 bp, synthetic construct
  source 1..75: mol_type = other DNA
aggtatctctccataccgcaaaacttcagactgaataatattcatcttgataatactgaccttgccaggaaattg

SEQ ID NO: 697431 - DNA, 75 bp, synthetic construct
  source 1..75: mol_type = other DNA
ctttactgaaggtactgacaaaatggatcgtgacgatatgcatgcttcgctcacgatgttctacaaagaaatggg

SEQ ID NO: 697432 - DNA, 75 bp, synthetic construct
  source 1..75: mol_type = other DNA
gcattgagcatgaactttgacatgcgcaaagacgttcgcggcgtgtttatggcgaaaaaagaaacactgctgtct

SEQ ID NO: 697433 - DNA, 75 bp, synthetic construct
  source 1..75: mol_type = other DNA
attcctcctggcaaaacgttacacatccttggaagcctgcgcggcaacggcagagggcgatttgtcttacaggac

SEQ ID NO: 697434 - DNA, 75 bp, synthetic construct
  source 1..75: mol_type = other DNA
accatgtcatcgagcgcatcaactgtactaatggcaaaatcaactggggcattggcataggccttgcgggaagta

SEQ ID NO: 697435 - DNA, 75 bp, synthetic construct
  source 1..75: mol_type = other DNA
tagatacttttcgcctattggtttataatactaagtttgttgaggataatttttataatgcaaaagagcaaaaag

SEQ ID NO: 697436 - DNA, 75 bp, synthetic construct
  source 1..75: mol_type = other DNA
ggtgattgtcgagcttcaaactcatacaccgctgacccagtggcagccgctgcatattcaccacgccgccagcca

SEQ ID NO: 697437 - DNA, 75 bp, synthetic construct
  source 1..75: mol_type = other DNA
ctggcttaacgataaccagaccgagttccggtaccagaacaggtcgaagtaatacccgcacattacctccagatc

SEQ ID NO: 697438 - DNA, 75 bp, synthetic construct
  source 1..75: mol_type = other DNA
tccggtaccagaacaggtcgaagtaatacccgcacgttacctccagatgcgttgctggaatgtgcgagacggacg

SEQ ID NO: 697439 - DNA, 75 bp, synthetic construct
  source 1..75: mol_type = other DNA
ggcgcggttaaccttgcggatttcgcctgggcgcggcagctcaacggcgaagggatgcgcgaactgctgcaacag

SEQ ID NO: 697440 - DNA, 75 bp, synthetic construct
  source 1..75: mol_type = other DNA
atcgcgatgaacctggtccgggacgtgagcgtctgcggcgcatggcattgccgatggaagatgaagcactggtgc

SEQ ID NO: 697441 - DNA, 75 bp, synthetic construct
  source 1..75: mol_type = other DNA
gggaatacggttttgctgaggcaaaactgtttatcaccgcagcaaccgaaggtcggggaattgatgccctgcgcg

SEQ ID NO: 697442 - DNA, 75 bp, synthetic construct
  source 1..75: mol_type = other DNA
ttgaaatttgaacgaatctataaaaatattactggccttagctgtcccatattcgggattcagtggaaggcgcca

SEQ ID NO: 697443 - DNA, 75 bp, synthetic construct
  source 1..75: mol_type = other DNA
gctttttatcgatatataaatagaggatcacactcagattcgataaatataacagacatgggcgaaataacgcct

SEQ ID NO: 697444 - DNA, 75 bp, synthetic construct
  source 1..75: mol_type = other DNA
atgtagtcattcctaatactatgaggaatatcttagaatattactttgcatttgttcataaaactaacgaattac

SEQ ID NO: 697445 - DNA, 75 bp, synthetic construct
  source 1..75: mol_type = other DNA
ttcggttccggctccaccaatattctgccgttatggaatactgacattgattcacggcctggcttaacgataacc

SEQ ID NO: 697446 - DNA, 75 bp, synthetic construct
  source 1..75: mol_type = other DNA
gtttatgacggtagaggcacctttaaagacaaacttccagatgaaattgctttgaacgcatttgctgaggtcttt

SEQ ID NO: 697447 - DNA, 75 bp, synthetic construct
  source 1..75: mol_type = other DNA
acgaacggcatcagaattgtgatttttggtattgtgcgccatttgttttctctgctggcgcagcaggtgccagtt

SEQ ID NO: 697448 - DNA, 75 bp, synthetic construct
  source 1..75: mol_type = other DNA
gctgcagagcgtatctttacgttgcatcgtgcctacacggtaaaactgatgcaaaccaaagatatgcgtaatgaa

SEQ ID NO: 697449 - DNA, 75 bp, synthetic construct
  source 1..75: mol_type = other DNA
tccaccgtcgcaaagtaccacagataaacaacagttacgtttttcagccctcgagacactgatacttcaggaaat

SEQ ID NO: 697450 - DNA, 75 bp, synthetic construct
  source 1..75: mol_type = other DNA
gcgaaggtgcaagcgtcgtggcccgtgctacggcgaggccagaagtttttagtagcagcctcaaatacataaagc

SEQ ID NO: 697451 - DNA, 75 bp, synthetic construct
  source 1..75: mol_type = other DNA
gtttacgcgccgattgttgcgagatttggacggacgttgacggggtctatacctgcgacccgcgtcaggtgcccg

SEQ ID NO: 697452 - DNA, 75 bp, synthetic construct
  source 1..75: mol_type = other DNA
ttgggccgttggtggagatataagtggatcacttttcatccgtcgttgacattattacaggcggttcgcgctgaa

SEQ ID NO: 697453 - DNA, 75 bp, synthetic construct
  source 1..75: mol_type = other DNA
cgcgcgttcgttatgtggcgcagtaaacggatggatgtcacgcattaccacaccttcaatgagtctctctttgtc

SEQ ID NO: 697454 - DNA, 75 bp, synthetic construct
  source 1..75: mol_type = other DNA
gcaccatcgaatggtggcttcaacgctctggcgaagcccgtgccgccattttagctgatcgaataccgcttgatg

SEQ ID NO: 697455 - DNA, 75 bp, synthetic construct
  source 1..75: mol_type = other DNA
aaaggaatggtcggcatggcggcgcgcgtctttgcagcgatgtcacgcgcccgtatttccgtggtgctgattacg

SEQ ID NO: 697456 - DNA, 75 bp, synthetic construct
  source 1..75: mol_type = other DNA
aaagggatggtcggcatggcggcgcgcgtctttgcagcgatgtcacgcgctcgcatttcagtggtgctgattacg

SEQ ID NO: 697457 - DNA, 75 bp, synthetic construct
  source 1..75: mol_type = other DNA
cctggaaaactggcaggaagaactggcgcaagccaaagagccgtttaatctcgggcgcttaattcgcctcgtgaa

SEQ ID NO: 697458 - DNA, 75 bp, synthetic construct
  source 1..75: mol_type = other DNA
catcaatggcaaatgcagaacgttttctgcgggttgccgatattctggaaagcaatgccaggcaggggcaggtgg

SEQ ID NO: 697459 - DNA, 75 bp, synthetic construct
  source 1..75: mol_type = other DNA
tgattctcgcccgtgaaacaggacgatcactggaactggcggatatcgaaatcgaatctgtgctgcccgcagagt

SEQ ID NO: 697460 - DNA, 75 bp, synthetic construct
  source 1..75: mol_type = other DNA
gttggcggtgcgctgctggagcaactgaagcgtcagcaaagctggctgaagaataaacatatcgacttacgtgtc

SEQ ID NO: 697461 - DNA, 75 bp, synthetic construct
  source 1..75: mol_type = other DNA
cagacatcagtcgaccagatgccgacaaattgcttgccgcttcccgtggtgagtttgttgaagggattagcgacc

SEQ ID NO: 697462 - DNA, 75 bp, synthetic construct
  source 1..75: mol_type = other DNA
tgccgctgaacagcctgctggccgcgatctcacgtttttcactgcaaaccagcgcccgtaaccagtggttcggca

SEQ ID NO: 697463 - DNA, 75 bp, synthetic construct
  source 1..75: mol_type = other DNA
gatgaagagctggagagcgtgtggaccggtaagaagacgccacagcaggcgctggataccgccgttgagcgtggg

SEQ ID NO: 697464 - DNA, 75 bp, synthetic construct
  source 1..75: mol_type = other DNA
ttgccagcaaaaacaacggctttgacggcacagacgcggtgctggagttcaacaagccggagcaggtgaaacaca

SEQ ID NO: 697465 - DNA, 75 bp, synthetic construct
  source 1..75: mol_type = other DNA
aaccagttaccgggtattatcagtcatattgaacgcggtgcggaacagtgtgaagtattgatgacgctgccagac

SEQ ID NO: 697466 - DNA, 75 bp, synthetic construct
  source 1..75: mol_type = other DNA
atattgagcgcggcgcagagcagtgcgaagtattaatggcgctacccgacgggcaaacactgtgcgccacagtgc

SEQ ID NO: 697467 - DNA, 75 bp, synthetic construct
  source 1..75: mol_type = other DNA
tgcgcgtctggggctggatgaaggcaaagaagtgttgattctgctgaaagcgccgtgggtgaacattacccagga

SEQ ID NO: 697468 - DNA, 75 bp, synthetic construct
  source 1..75: mol_type = other DNA
cactatattacgaagccaaaaatgacaaagtcagaaaacgccttgggattaaaggcggtttttactggcgcacag

SEQ ID NO: 697469 - DNA, 75 bp, synthetic construct
  source 1..75: mol_type = other DNA
gaaacgaaacaacctgaaccagtcgtgcaacaggaagaggaaaaagtttgtaccgcatgcaatcagactggtggt

SEQ ID NO: 697470 - DNA, 75 bp, synthetic construct
  source 1..75: mol_type = other DNA
atcacgccagcgataataaaactggcgaaacagcaaataccttaattaatatgaacggtcatcataaaatcacat

SEQ ID NO: 697471 - DNA, 75 bp, synthetic construct
  source 1..75: mol_type = other DNA
aaggggaactgggtaaagaggtggattctctggcccaacgttttaacgccgaaaacccggattacaaaattgtac

SEQ ID NO: 697472 - DNA, 75 bp, synthetic construct
  source 1..75: mol_type = other DNA
tttcgtaccggcaacgcgccggctattttgcaggtttatgaagttggcaccgccaccatgatggcgtcgaaagcc

SEQ ID NO: 697473 - DNA, 75 bp, synthetic construct
  source 1..75: mol_type = other DNA
gcattgctgttgcagaactacgacaacatcgacttccagggtctggctcccattgtccgcgatttctatgtcttt

SEQ ID NO: 697474 - DNA, 75 bp, synthetic construct
  source 1..75: mol_type = other DNA
gtatgaactgggcaaccgcgaaaccaatcgctataaagcggcgattttgcacagcttctgcttcggggcgatctt

SEQ ID NO: 697475 - DNA, 75 bp, synthetic construct
  source 1..75: mol_type = other DNA
aataaccactccgggctggcgatctcgcctacgcttattggttcgctgattgtcatgggcggcgtactgtttatt

SEQ ID NO: 697476 - DNA, 75 bp, synthetic construct
  source 1..75: mol_type = other DNA
gttgatgtctggcgaacgacctactatcaccaaatgccctcacaccaggcgattattgattgggtcaccgccact

SEQ ID NO: 697477 - DNA, 75 bp, synthetic construct
  source 1..75: mol_type = other DNA
ctcacctgaacttattttcgccaatgcttcgttacaatggctgcccgatcattatgaactctttccccgtctggt

SEQ ID NO: 697478 - DNA, 75 bp, synthetic construct
  source 1..75: mol_type = other DNA
agagtgccgctggagaatatcaaatacgttgccgatcttggctgtggcccaggtaacagcaccgccctgctgcat

SEQ ID NO: 697479 - DNA, 75 bp, synthetic construct
  source 1..75: mol_type = other DNA
tatgcccctcctcttctgcgtattctctggcggctgggtatccggcttccgccattaccctttatgccgttctgg

SEQ ID NO: 697480 - DNA, 75 bp, synthetic construct
  source 1..75: mol_type = other DNA
acagcgcataaagtggcctgggctgctgtgaagcatgaatatgccaaaggggatgatgataaatggcataaaaaa

SEQ ID NO: 697481 - DNA, 75 bp, synthetic construct
  source 1..75: mol_type = other DNA
atgccgtataaaacaaaaagcgatctgccggaaaatgtaaaacacgttctaccgtcccatgcccaggatatctat

SEQ ID NO: 697482 - DNA, 75 bp, synthetic construct
  source 1..75: mol_type = other DNA
gctgtttattgccacgctgacctggtttgagtttcgccgtgtgcgctttaacttcaatgtcttcttttcattgct

SEQ ID NO: 697483 - DNA, 75 bp, synthetic construct
  source 1..75: mol_type = other DNA
gcggtgctgacggggggcttatggggcacttcctggggatgtgcaatgtggttcctagattctacgtcagtactt

SEQ ID NO: 697484 - DNA, 75 bp, synthetic construct
  source 1..75: mol_type = other DNA
atggtggcaggtgaggccattattataagtatcacgggttctacgtcggaaccgccgaaatttccggcctgtgat

SEQ ID NO: 697485 - DNA, 75 bp, synthetic construct
  source 1..75: mol_type = other DNA
ttggcagtacagatgccagataactggctagagccaacccatgtgctcatgcgcgaagtcgcctgggaacaaaat

SEQ ID NO: 697486 - DNA, 75 bp, synthetic construct
  source 1..75: mol_type = other DNA
ggaatttctggtatttacccttggtgatgaagagtacggtattgatattctgaaagtgcaggagatccgtggcta

SEQ ID NO: 697487 - DNA, 75 bp, synthetic construct
  source 1..75: mol_type = other DNA
gcgaatatcacgggatcggattgtcggcagttgattcatgttgagaacggcaaacacttcgtcatccgtaatatc

SEQ ID NO: 697488 - DNA, 75 bp, synthetic construct
  source 1..75: mol_type = other DNA
ggcgaaaaaagaaacactgctgtctcttgcaaatgttcatgcggtgaatgaaaaaggacaaagctccgtcgatat

SEQ ID NO: 697489 - DNA, 75 bp, synthetic construct
  source 1..75: mol_type = other DNA
agacctctgtgaactatgacgccagcagcggcgcacgctgtaaggatcaggcctccggcaactggtatgttcgca

SEQ ID NO: 697490 - DNA, 75 bp, synthetic construct
  source 1..75: mol_type = other DNA
ttgctcattaccagcagagcgcagcaccagaaaaaatagcgcaaactattattctgaatggaattagttgtcaga

SEQ ID NO: 697491 - DNA, 75 bp, synthetic construct
  source 1..75: mol_type = other DNA
ggaattcctggtatttacccttggtgacgaagagtacggtattgatattctgaaagtgcaggagatccgtggcta

SEQ ID NO: 697492 - DNA, 75 bp, synthetic construct
  source 1..75: mol_type = other DNA
ttcgttcgaacagacctgatttacctccagtggattatgcgcagccggagttaccgccagcggattatactcagt

SEQ ID NO: 697493 - DNA, 75 bp, synthetic construct
  source 1..75: mol_type = other DNA
tggttacaggatctgaccgagagcgaacagcagctttttcttacgcgctaccatcagatgctggaagagcagtat

SEQ ID NO: 697494 - DNA, 75 bp, synthetic construct
  source 1..75: mol_type = other DNA
gaagagcagtatccccttcaggagaacggacagatactgctggcatttccgcgtctgtttattgttgcccggcgt

SEQ ID NO: 697495 - DNA, 75 bp, synthetic construct
  source 1..75: mol_type = other DNA
atctccagcgagcagctcaacgccctttccaccggcaccgctgttgcgccggaagcgggcgcgacgctgatttta

SEQ ID NO: 697496 - DNA, 75 bp, synthetic construct
  source 1..75: mol_type = other DNA
gctgaacgtgatccggctaacctaaaatgggacgaagttggtgttgacgttgtcgctgaagcaactggtctgttc

SEQ ID NO: 697497 - DNA, 75 bp, synthetic construct
  source 1..75: mol_type = other DNA
cggcttcgggatatgggctggacgccggaacggattcaggaggccacgggactttccggtgaagaactgaaaaaa

SEQ ID NO: 697498 - DNA, 75 bp, synthetic construct
  source 1..75: mol_type = other DNA
atcgctggcagtggagtatgctcagtcggggattcgcgttaacgcaatctgccctggttacgtgcgcacgccaat

SEQ ID NO: 697499 - DNA, 75 bp, synthetic construct
  source 1..75: mol_type = other DNA
caccgctatggacaaaaacacgatgtcgtggtggttaattttattaataaaggcaaccgtgccgatcagcgcgtg

SEQ ID NO: 697500 - DNA, 75 bp, synthetic construct
  source 1..75: mol_type = other DNA
atcagggatacggaaagcaactgattgatgtggccctacatgagggaaaagacctttccacattgccagtttgtc

SEQ ID NO: 697501 - DNA, 75 bp, synthetic construct
  source 1..75: mol_type = other DNA
attacccgctggcaggggaaatcaaatgttattgatgcaaaccataacgtgtttgactataacgtattacgaaag

SEQ ID NO: 697502 - DNA, 75 bp, synthetic construct
  source 1..75: mol_type = other DNA
atctggtgacattagtcattcgtaaaattctggcctcatcgtctacggcgattcagggaacgctggagacgatga

SEQ ID NO: 697503 - DNA, 75 bp, synthetic construct
  source 1..75: mol_type = other DNA
atctggcccactggttgacgttaagcggcaaagccgaggactcgctgacgcaaactattgccagcgcacgggttg

SEQ ID NO: 697504 - DNA, 75 bp, synthetic construct
  source 1..75: mol_type = other DNA
aagaaaaaaatcgagcaggaagaggaccgtctgctggaagaggtcgagcaaaagctggcgacggaaataacgtcc

SEQ ID NO: 697505 - DNA, 75 bp, synthetic construct
  source 1..75: mol_type = other DNA
cgtctgcatctctggctgctcagtcttctctatctcgccaccttcggttcgtttatcggtttttctgcgggtttt

SEQ ID NO: 697506 - DNA, 75 bp, synthetic construct
  source 1..75: mol_type = other DNA
gccaatgacctggagtcttgtctgcgagaaatggaaggtttggttggtaactctgttgccgcccatgaatccatt

SEQ ID NO: 697507 - DNA, 75 bp, synthetic construct
  source 1..75: mol_type = other DNA
gcggtaaaccgtgtggcggcaaagattatttctgtcgccacacggcaggttgcgcagaataccgttgccggggat

SEQ ID NO: 697508 - DNA, 75 bp, synthetic construct
  source 1..75: mol_type = other DNA
attaaggcgatgaaatcgcttacgctgcgttttattctggcctttccgttcacattactgacagcggcagatatc

SEQ ID NO: 697509 - DNA, 75 bp, synthetic construct
  source 1..75: mol_type = other DNA
gcaggaaactgattgttctgcatctgacaggcagccatgagccagtctgcagtaactggcccagagataaagccg

SEQ ID NO: 697510 - DNA, 75 bp, synthetic construct
  source 1..75: mol_type = other DNA
atgaaaattaatcttccgttcatacactggtcacggattagcaatgataagcgcctcgtgttatcagtggttgtc

SEQ ID NO: 697511 - DNA, 75 bp, synthetic construct
  source 1..75: mol_type = other DNA
agatttatagtgactggttggagaagcatcaaaactctggccgggtttccggttcgcgtacggcggacatgaagg

SEQ ID NO: 697512 - DNA, 75 bp, synthetic construct
  source 1..75: mol_type = other DNA
tcaaaatattattttaaatagattgaagtatgatttttcaagtaatagagaaagatactcaactcttgaggagaa

SEQ ID NO: 697513 - DNA, 75 bp, synthetic construct
  source 1..75: mol_type = other DNA
tttgagcgattatcaagctgctgtagataccttgttgaccctgacacctacagtggaaagcgtggacagccttcc

SEQ ID NO: 697514 - DNA, 75 bp, synthetic construct
  source 1..75: mol_type = other DNA
aaagacgaataacagcaaactgacgctgaccactattcagaaactgaacaatgccattactcatgaaggctataa

SEQ ID NO: 697515 - DNA, 75 bp, synthetic construct
  source 1..75: mol_type = other DNA
cactggcgatatggtggccgatccgggtgaaacggcgtatgccttaacgaaagcggcgattgttggcctgactaa

SEQ ID NO: 697516 - DNA, 75 bp, synthetic construct
  source 1..75: mol_type = other DNA
gagtggtcagaaagctgcccgttcagcaagtctgaaggcgccatgaccggttctcagtgcgtggagccgggaggc

SEQ ID NO: 697517 - DNA, 75 bp, synthetic construct
  source 1..75: mol_type = other DNA
cgacgaaacgatgaagtggtttgggaaggcaaaaactggaccgtcacacgtcacgaactgtttaacgggaaacct

SEQ ID NO: 697518 - DNA, 75 bp, synthetic construct
  source 1..75: mol_type = other DNA
ggggaggggcggtttgtatttattcttctaaatttgtttttggtgaattttctttctgttttaatatatcttaaa

SEQ ID NO: 697519 - DNA, 75 bp, synthetic construct
  source 1..75: mol_type = other DNA
cgctggtcatttttgtccccgtatttgcctttctcggcgtcaatggcgtaccgcaggccgacggttcggtgatgt

SEQ ID NO: 697520 - DNA, 75 bp, synthetic construct
  source 1..75: mol_type = other DNA
cggtttttatagcctgggcacgctggcaggcgctggtgtcgggatggcactgacggcctttggcgttccggcaac

SEQ ID NO: 697521 - DNA, 75 bp, synthetic construct
  source 1..75: mol_type = other DNA
caagcaaagcagcaccaaactgacgctgactactattcagaaactgaataacgctatcactcatgaagggtataa

SEQ ID NO: 697522 - DNA, 75 bp, synthetic construct
  source 1..75: mol_type = other DNA
cgacgcatttctgaaagtctgtcacatcgccaaaatgatcacccactacacggtgctgaatgaaacccgtaagtg

SEQ ID NO: 697523 - DNA, 75 bp, synthetic construct
  source 1..75: mol_type = other DNA
gcctgccgctggtgcaaatcgaacttaagcgtcgcggcctggggctgaaagaggcctttaaccagatcgatcgtt

SEQ ID NO: 697524 - DNA, 75 bp, synthetic construct
  source 1..75: mol_type = other DNA
aaatcaccctgagcggtacaccggttaaagatacggctaaccagtatgcccctgctgtatatctgacggacggat

SEQ ID NO: 697525 - DNA, 75 bp, synthetic construct
  source 1..75: mol_type = other DNA
atactcctttgttgaccgtaatgaccacccttctgttgactttcatgcaccgcgtctgaataaactggttacaga

SEQ ID NO: 697526 - DNA, 75 bp, synthetic construct
  source 1..75: mol_type = other DNA
acagtgccgtcagtatcacctctccggacgtcctgttaacagccccgggtgcttttgccggcagttcactgacag

SEQ ID NO: 697527 - DNA, 75 bp, synthetic construct
  source 1..75: mol_type = other DNA
cctctttctcagggagtttagtctccaggattcccggggcggttcagactatagccataacaacagccaggataa

SEQ ID NO: 697528 - DNA, 75 bp, synthetic construct
  source 1..75: mol_type = other DNA
atgccggcagcgatatcccggaagaccaggccttgctgaagaaagcacaggacattatcgctgaaaagatgaagg

SEQ ID NO: 697529 - DNA, 75 bp, synthetic construct
  source 1..75: mol_type = other DNA
actacggtctttctacggttcccttttctcagaacattcataatgaagtagaaaacacggggaaacaggagagtt

SEQ ID NO: 697530 - DNA, 75 bp, synthetic construct
  source 1..75: mol_type = other DNA
gtagggatgaatgcggaaattaaggataatatgcgtttgggactggagctggagaaatcagcgttcgggaaatat

SEQ ID NO: 697531 - DNA, 75 bp, synthetic construct
  source 1..75: mol_type = other DNA
gcctcactgggaacaaaagactacagctctcattcctggtatgccggtgctgaagttggttatcgttaccacctg

SEQ ID NO: 697532 - DNA, 75 bp, synthetic construct
  source 1..75: mol_type = other DNA
gcatcaggttataagtccttccttacagaggtcaataacctgaacaaacgtatgggtgacctgcgggatactcag

SEQ ID NO: 697533 - DNA, 75 bp, synthetic construct
  source 1..75: mol_type = other DNA
cctgaactggacatacgacaaaacatcaggcacaggtaccctgagtcagggcagtaaaaactggaccatgcacgg

SEQ ID NO: 697534 - DNA, 75 bp, synthetic construct
  source 1..75: mol_type = other DNA
gattggtaaatatattcaccatgacaatgattacacaggtaactttgccggtctgggaacgaaacactacaacac

SEQ ID NO: 697535 - DNA, 75 bp, synthetic construct
  source 1..75: mol_type = other DNA
ctttatgaagaatccgtctcagggacaggccctgaatattcccttggtcacggtaccggcgggaacttctgcaga

SEQ ID NO: 697536 - DNA, 75 bp, synthetic construct
  source 1..75: mol_type = other DNA
ctggtggtaaaaattgcccgccgttatggcaatcgtggtctggcgttgctggatcttatcgaagagggcaacctg

SEQ ID NO: 697537 - DNA, 75 bp, synthetic construct
  source 1..75: mol_type = other DNA
tacaaacccttattttggtcctgttctaataaacagaactggttggagtcatataactcgacgaaatcgcccaat

SEQ ID NO: 697538 - DNA, 75 bp, synthetic construct
  source 1..75: mol_type = other DNA
ctatgatgaatccagtgattccctgtgctggtctgatggagagtcagtcacgataaataccgacgactacggcaa

SEQ ID NO: 697539 - DNA, 75 bp, synthetic construct
  source 1..75: mol_type = other DNA
ccgacgcgctggcggttgccgaacagaatatcgaagaacacggtctgatccacaacgtcattcctattcggtccg

SEQ ID NO: 697540 - DNA, 75 bp, synthetic construct
  source 1..75: mol_type = other DNA
gggaggcgggtggggcgcgcaataatatgcagcacgttgctgggatcaccgaagcggcgaaagaaacccagccgg

SEQ ID NO: 697541 - DNA, 75 bp, synthetic construct
  source 1..75: mol_type = other DNA
aacaatgtaacaaccgtagccaactatctgcagcgacagggggttctccatatactgtattaccgtgatggtgcc

SEQ ID NO: 697542 - DNA, 75 bp, synthetic construct
  source 1..75: mol_type = other DNA
gtgaataattatgcgtggggaaattatgagtccggtggcacaattacagtgacatgcctcaaccttcctggtgcc

SEQ ID NO: 697543 - DNA, 75 bp, synthetic construct
  source 1..75: mol_type = other DNA
actgtaagagggatcgttcgaggggttttcattgctgataaatggctcaaatcaacacgtgaaaatttcccttcg

SEQ ID NO: 697544 - DNA, 75 bp, synthetic construct
  source 1..75: mol_type = other DNA
acctgttagacgctgattacatggcatacatgctgaaatatgactccactcacggtcgtttcgacggcaccgttg

SEQ ID NO: 697545 - DNA, 75 bp, synthetic construct
  source 1..75: mol_type = other DNA
aacgtttacctgcgaaccgcacgtgagttgtcccataagctggaccacgaaccaagtgcggaagagatcgcagag

SEQ ID NO: 697546 - DNA, 75 bp, synthetic construct
  source 1..75: mol_type = other DNA
cgaagcagcacttattgatgcctaccctgggttaacgaatatcatgaatggtgctggcagcaatgaattcggcgc

SEQ ID NO: 697547 - DNA, 75 bp, synthetic construct
  source 1..75: mol_type = other DNA
gttcaacactgagctttaatcgtttcgggcagggggggctgacgtcagatacgctggaggccactaacagctcat

SEQ ID NO: 697548 - DNA, 75 bp, synthetic construct
  source 1..75: mol_type = other DNA
atgaaatactgggacgaggatcctgactttgaggcaacacaaagttctcgctatggttttgaaggtcgagaagcc

SEQ ID NO: 697549 - DNA, 75 bp, synthetic construct
  source 1..75: mol_type = other DNA
gccttatatgtatcacggccaactaaacggcaatatggatgtgaatattccgcagctctcaggtaaggatgtact

SEQ ID NO: 697550 - DNA, 75 bp, synthetic construct
  source 1..75: mol_type = other DNA
gacggaagttaacaacctgaacaaacgtatgggggagctgcgtgacacgaatggtgatgccggtgcctgggcccg

SEQ ID NO: 697551 - DNA, 75 bp, synthetic construct
  source 1..75: mol_type = other DNA
gagtggcacttatggccgggtgtgcctctaacacttccgagccaaaaactcagccccagatcgcctctgccgaaa

SEQ ID NO: 697552 - DNA, 75 bp, synthetic construct
  source 1..75: mol_type = other DNA
atatttgtaaacgattcagcttgaactgcccggaagcggatctgtccgaatgggaacaggttatctttgaagaag

SEQ ID NO: 697553 - DNA, 75 bp, synthetic construct
  source 1..75: mol_type = other DNA
accacccagagcttccttaaccaacagccgcaaaatgattttgacaaaacaattgtctactccccagactcgggt

SEQ ID NO: 697554 - DNA, 75 bp, synthetic construct
  source 1..75: mol_type = other DNA
tagcaaactaccttattatgggcgacagtggttctcctctgtttgcatatgattccatacaaaaaaaatgggttc

SEQ ID NO: 697555 - DNA, 75 bp, synthetic construct
  source 1..75: mol_type = other DNA
cggaacccactcctggtatgcaggagctgaaacgggttaccgttatcacctgacggaagacacatttattgagcc

SEQ ID NO: 697556 - DNA, 75 bp, synthetic construct
  source 1..75: mol_type = other DNA
ggcgcgtataggtgaaaactgcactatatatcaaaatgtcactattggtgcaaaaacacttgatatgaaatataa

SEQ ID NO: 697557 - DNA, 75 bp, synthetic construct
  source 1..75: mol_type = other DNA
cagaacagcgttagaaaacttcttacagcagaaaccgaattatttcgaaggattctatcttgagattactgaggg

SEQ ID NO: 697558 - DNA, 75 bp, synthetic construct
  source 1..75: mol_type = other DNA
tgaattttctacctccaacacgctgcttatcaaaccccgtgatttcagcatcagtattatctccgatgaatatac

SEQ ID NO: 697559 - DNA, 75 bp, synthetic construct
  source 1..75: mol_type = other DNA
aaactgatcgattcacaagatgttgaaacgcgcggcgttgaaatccttaaaggtctggacgcaatcctcgtacct

SEQ ID NO: 697560 - DNA, 75 bp, synthetic construct
  source 1..75: mol_type = other DNA
ctgcctgccagaacgttactccacttcttcaggttgcggagcaccgcgaagctggtcgctttacttctatcgggc

SEQ ID NO: 697561 - DNA, 75 bp, synthetic construct
  source 1..75: mol_type = other DNA
tattccgcaggcgtttggcatgtcgctgaatatgacaggctctccggtgggcgcgatgaaagtgtttttaatctt

SEQ ID NO: 697562 - DNA, 75 bp, synthetic construct
  source 1..75: mol_type = other DNA
tggtgtaaacggaaatgcaaataccgggaacaatcttgtgttctcaggtaatgaagggaaaatcgaactggtatc

SEQ ID NO: 697563 - DNA, 75 bp, synthetic construct
  source 1..75: mol_type = other DNA
ccgatcaggtcgatggcctctgtgtcagtcagcaggtgacctactcttgtgagcgtaaaaaagaaggtaacggtc

SEQ ID NO: 697564 - DNA, 75 bp, synthetic construct
  source 1..75: mol_type = other DNA
agcgcatttccattatggattgattcagagcttaatttaacgtttgctgacgcgctgtttgaaggggtttccgga

SEQ ID NO: 697565 - DNA, 75 bp, synthetic construct
  source 1..75: mol_type = other DNA
gttttggattttattttctattattagcgcatttccattatggattgattcagagcttaatttaacgtttgctga

SEQ ID NO: 697566 - DNA, 75 bp, synthetic construct
  source 1..75: mol_type = other DNA
tagttaaggttgccggtggatatgcttttaaaacaggaggaaccacaggagttcctctgatatctgatgcaacaa

SEQ ID NO: 697567 - DNA, 75 bp, synthetic construct
  source 1..75: mol_type = other DNA
gtgaataaagtttattctcttaaatattgccccgtcaccggggggcttattgctgtctctgaacttgcccgcagg

SEQ ID NO: 697568 - DNA, 75 bp, synthetic construct
  source 1..75: mol_type = other DNA
agttcagacagtaaaagaccggatcctggccgggcgggcaaaacaacccgttatctttcatggtcagctgaccgg

SEQ ID NO: 697569 - DNA, 75 bp, synthetic construct
  source 1..75: mol_type = other DNA
gtttgttggcactgacaaaaacaaagccattcagacagtaaaagacagagtactggctgaacgggcaaaacaacc

SEQ ID NO: 697570 - DNA, 75 bp, synthetic construct
  source 1..75: mol_type = other DNA
cggcgctggttcagcagatggcgggtacagcgataattatacccatgttcaggtcggctttgacaaaaaacatgt

SEQ ID NO: 697571 - DNA, 75 bp, synthetic construct
  source 1..75: mol_type = other DNA
gtgtataagagacagcctgaaagcgggtattacggtggcgtgacctcccctggcgtcgatatgaccgccccgggt

SEQ ID NO: 697572 - DNA, 75 bp, synthetic construct
  source 1..75: mol_type = other DNA
cttttgttatatttttttgtattggtggcggagcgtggtataccactaaaaaatctggcattcaattacgcaccc

SEQ ID NO: 697573 - DNA, 75 bp, synthetic construct
  source 1..75: mol_type = other DNA
agcaaggctgtatgagcgagaaattaaagatagtctatcgcccattacaagaattgtcaccgtatgcgcacaacg

SEQ ID NO: 697574 - DNA, 75 bp, synthetic construct
  source 1..75: mol_type = other DNA
gtttttttgctgctgtcaagtttttttgggggatgtataggctcaacgtgcggcggaattaaatcacttagattt

SEQ ID NO: 697575 - DNA, 75 bp, synthetic construct
  source 1..75: mol_type = other DNA
tcacgctttcgctggatcagaaaacagcagcaggatttcgccagacagcctcgtcaatcagagagggaaatggtc

SEQ ID NO: 697576 - DNA, 75 bp, synthetic construct
  source 1..75: mol_type = other DNA
caccctggaaagcggtcgtgccgttgcctttatgatggatgatgccctgctggccggtgaacgtgcgaaagcgaa

SEQ ID NO: 697577 - DNA, 75 bp, synthetic construct
  source 1..75: mol_type = other DNA
ctgaacatgaatttcgagttgtcggacgaaatgaaagcactgttcaaagaacctaatgacaaagcactgaactaa

SEQ ID NO: 697578 - DNA, 75 bp, synthetic construct
  source 1..75: mol_type = other DNA
aaaattcctgcaagatgacgaaaaaacgctgcgttcactggacgatcaggaaggcattctgcaactgcttgagct

SEQ ID NO: 697579 - DNA, 75 bp, synthetic construct
  source 1..75: mol_type = other DNA
ggtcgggagctacgtgacgatgaacatgtccaccatattaaccgcgatacgatagataacgcccctgggaatctt

SEQ ID NO: 697580 - DNA, 75 bp, synthetic construct
  source 1..75: mol_type = other DNA
cgagcgttccggaaagcatgaaatcaagctaggtcgtggtcgattgcatttatatgtcaatcccgcaacaacgct

SEQ ID NO: 697581 - DNA, 75 bp, synthetic construct
  source 1..75: mol_type = other DNA
cagagcaaaaagcgcgtgtaaacggtattaatgatctgtttgccatgtttggcgggcgttatcagtcgctgcagg

SEQ ID NO: 697582 - DNA, 75 bp, synthetic construct
  source 1..75: mol_type = other DNA
gaaatttttagcgtgttcggcaaccagtacgacgggatcaaaatgtcgtgccttgaagatgcgtcctgtacgctg

SEQ ID NO: 697583 - DNA, 75 bp, synthetic construct
  source 1..75: mol_type = other DNA
gccggtaacgggaacataacaggcgatgcaattcgtcaggggctttattctcgtctcgggtatgaacgcccagag

SEQ ID NO: 697584 - DNA, 75 bp, synthetic construct
  source 1..75: mol_type = other DNA
aagtcagtttctcgccgggcgctctgataagcgcggcgatcgcaaatcgctgattgtcttttgctgcctgttagg

SEQ ID NO: 697585 - DNA, 75 bp, synthetic construct
  source 1..75: mol_type = other DNA
gttactggaacagcgcatcagtgaattggaagcgcgcaataacccggtagcagaagttcagtctcctccagctat

SEQ ID NO: 697586 - DNA, 75 bp, synthetic construct
  source 1..75: mol_type = other DNA
gcgtctcgatctggtaagccgtgaagaattcgacgttcagacgcaggtcttgttacggactcgtgagaaactggc

SEQ ID NO: 697587 - DNA, 75 bp, synthetic construct
  source 1..75: mol_type = other DNA
cagcacgatgaacccgtacaaatttgagcaactggtcggtcaattactggaagcaatgggctacgagcaggtcga

SEQ ID NO: 697588 - DNA, 75 bp, synthetic construct
  source 1..75: mol_type = other DNA
cgtgagggctatgccggatatcgccaactgaaagcaaaaaccggtttgtcagatgataaatgccgcaatctggtg

SEQ ID NO: 697589 - DNA, 75 bp, synthetic construct
  source 1..75: mol_type = other DNA
cggataaaaactgctttacagaactgaatgaatctccacgccttcgccggcagtggcaggatgttctggaggagt

SEQ ID NO: 697590 - DNA, 75 bp, synthetic construct
  source 1..75: mol_type = other DNA
tggcattcattcgagattttgaacggcaattcacatcaacaacactgacggtagatcttgaggtatacaacggct

SEQ ID NO: 697591 - DNA, 75 bp, synthetic construct
  source 1..75: mol_type = other DNA
cgcagagctggtgggtaaacgtcatgacaatgtgaaacgcactattgaaacattagccaaaggtggcgttgtccg

SEQ ID NO: 697592 - DNA, 75 bp, synthetic construct
  source 1..75: mol_type = other DNA
atgcagatcactcgccagcaatgtcagcagattgcgaacggctggcgcggtcagttagccattgcggtggataat

SEQ ID NO: 697593 - DNA, 75 bp, synthetic construct
  source 1..75: mol_type = other DNA
ccttccgtgatatgggaatgttgagctggagttgtgttgttgcccgccaccatccgcttgcgtcgatgaatgggc

SEQ ID NO: 697594 - DNA, 75 bp, synthetic construct
  source 1..75: mol_type = other DNA
aggcctttttgcatcagcattcgaaattcgcttccgccagttcggtgaaaagcacgctctactcccgtctctata

SEQ ID NO: 697595 - DNA, 75 bp, synthetic construct
  source 1..75: mol_type = other DNA
ctatatcgaccagctacgcggtgcgctgccataccataaagccattcgcggtacgctcatcactaccggaaaatt

SEQ ID NO: 697596 - DNA, 75 bp, synthetic construct
  source 1..75: mol_type = other DNA
ggcattcgccgcagcaatgcagtggaattgctggatgtagatttgcagttgtttgatgagctggagatggattaa

SEQ ID NO: 697597 - DNA, 75 bp, synthetic construct
  source 1..75: mol_type = other DNA
tatgccggatatcgccaactgaaagcaaaaaccggtttgtcagatgataaatgccgcaatctggtgaacgcttat

SEQ ID NO: 697598 - DNA, 75 bp, synthetic construct
  source 1..75: mol_type = other DNA
gacactatgagtttatcggccttggtgagacccacggacaagccacagaagggcttttgaaacgctgggacgaac

SEQ ID NO: 697599 - DNA, 75 bp, synthetic construct
  source 1..75: mol_type = other DNA
aagcaatgggctacgagcaggtcgaagtgaccaaagcctcaggcgataaaggcgtggacgtgattggtcaggtgc

SEQ ID NO: 697600 - DNA, 75 bp, synthetic construct
  source 1..75: mol_type = other DNA
ctacggtaatattttcagcattacccgacaggcgattattaacgatgatctgaatcagttaaccgttatcccgca

SEQ ID NO: 697601 - DNA, 75 bp, synthetic construct
  source 1..75: mol_type = other DNA
gttaaagattcgctggaaatacccgcagggaaaagaaagtcagttagggaaggtgcgaataagcggggaaattct

SEQ ID NO: 697602 - DNA, 75 bp, synthetic construct
  source 1..75: mol_type = other DNA
tgcaggggcgcttacaggcggctccaaaatatcaacatgcagccagagaaaaagcagcctcccaaatcgcaaatc

SEQ ID NO: 697603 - DNA, 75 bp, synthetic construct
  source 1..75: mol_type = other DNA
tatcaaggatgacagtagataaattaggtgtgaaattatatgacagggcttatgctgttatagccgaattagtat

SEQ ID NO: 697604 - DNA, 75 bp, synthetic construct
  source 1..75: mol_type = other DNA
aaaaaccttagcccagcatgaagcgcaacaatcctcagacaaacaggctttgcaggggcgattgcaggaagcgcc

SEQ ID NO: 697605 - DNA, 75 bp, synthetic construct
  source 1..75: mol_type = other DNA
caaatcgcaaatccaggaaccgctcgctaccagcagttcgatgataatccggttaagcaggtagcgcaaaacccg

SEQ ID NO: 697606 - DNA, 75 bp, synthetic construct
  source 1..75: mol_type = other DNA
ctctcgtattgcgttgccttctatctccggtagtcacaaggcggaaattaatgctgcaattgattcgctggatgc

SEQ ID NO: 697607 - DNA, 75 bp, synthetic construct
  source 1..75: mol_type = other DNA
attggtgacgcccctttcctgttggtgacctctgcgtctcatttgccgcgcgcgatgatcttttttcaacatgca

SEQ ID NO: 697608 - DNA, 75 bp, synthetic construct
  source 1..75: mol_type = other DNA
gctgatgttgttaattattggcgctggcctggcgctgctgtggtttagccgttttcaaaaaaccgggaagatttt

SEQ ID NO: 697609 - DNA, 75 bp, synthetic construct
  source 1..75: mol_type = other DNA
atgcgtgattttgagaattcctttgatgctgcccttgctggggtggacagaacgattgttgaagtgatggggctc

SEQ ID NO: 697610 - DNA, 75 bp, synthetic construct
  source 1..75: mol_type = other DNA
gtaatatcaatggttttaatgtctggttcaatgaaagaggattttatttttactggaatgaagaaacggaatttc

SEQ ID NO: 697611 - DNA, 75 bp, synthetic construct
  source 1..75: mol_type = other DNA
atgcgtgattttcagaatgcctttgatgccgcccttgccggggtggacagtacgattgttgaagtgatggggctc

SEQ ID NO: 697612 - DNA, 75 bp, synthetic construct
  source 1..75: mol_type = other DNA
gcgatcgtgttggctatgaaacgcttggccgtatctggcagtggctaaaaggttcgtcaggcgagccacggcaag

SEQ ID NO: 697613 - DNA, 75 bp, synthetic construct
  source 1..75: mol_type = other DNA
agattgcccgggaagtgaaaggcacccgtgaacgactgaagtatgcgctggaggcgggattgcaggttactgccc

SEQ ID NO: 697614 - DNA, 75 bp, synthetic construct
  source 1..75: mol_type = other DNA
caggaaagctattttgcccactgtcttgatattgctttcagggccaatgacgcgaaatattttggagctttgcgg

SEQ ID NO: 697615 - DNA, 75 bp, synthetic construct
  source 1..75: mol_type = other DNA
gtattctgccggacagtctccacaacttcctgttgtcattgattatccggcagttctggcacttcgccagatgtc

SEQ ID NO: 697616 - DNA, 75 bp, synthetic construct
  source 1..75: mol_type = other DNA
gagttcgacgtccaaacgcaagtcctgttacggactcgtgaaaaactggcgctgcttgaacaaagaatcagcgaa

SEQ ID NO: 697617 - DNA, 75 bp, synthetic construct
  source 1..75: mol_type = other DNA
tacgtatccgcaacgtcaatacgggtacgttcatcgaagctgatgtgcaaacgccaaatggtgttgtcgagtacg

SEQ ID NO: 697618 - DNA, 75 bp, synthetic construct
  source 1..75: mol_type = other DNA
aggcaccgtcacccgacaaatcgtcccttctgtaggatacggcaatatcaatattgaacaccccagtggtgcgct

SEQ ID NO: 697619 - DNA, 75 bp, synthetic construct
  source 1..75: mol_type = other DNA
tgcaaacgccaaacggtgtcgtcgagtatgagggtagcgccagaattgatggtgtaccagggacagccgcgccgg

SEQ ID NO: 697620 - DNA, 75 bp, synthetic construct
  source 1..75: mol_type = other DNA
ctcctcgcttttaatcaggcaaatgtgaatatttttcagagtcagtttctatacggcatggatcacgcagtcagg

SEQ ID NO: 697621 - DNA, 75 bp, synthetic construct
  source 1..75: mol_type = other DNA
ggaaatctcttcgattatggacctgagcctatggagttaatgacagcgatcaacacagggatttttgacggccgt

SEQ ID NO: 697622 - DNA, 75 bp, synthetic construct
  source 1..75: mol_type = other DNA
gcagtaaaagacctggaacacggcacagcattcctgatcgccaaaattaccgggtgttttaaaagccctgattac

SEQ ID NO: 697623 - DNA, 75 bp, synthetic construct
  source 1..75: mol_type = other DNA
aaacagcattcgaaaagcccatggtcgtactcaaaacaatcttccagtactgatcggtaattgtttgcatataaa

SEQ ID NO: 697624 - DNA, 75 bp, synthetic construct
  source 1..75: mol_type = other DNA
aaaaacttcttaatacccagcttggtacgatgatgcagattttactaaaaggcgatataaaaattggggtttgcc

SEQ ID NO: 697625 - DNA, 75 bp, synthetic construct
  source 1..75: mol_type = other DNA
taacagcatcagaaaggcccatgggctaccgctgactaacttaccggtactcataggaaactgcctccacatcaa

SEQ ID NO: 697626 - DNA, 75 bp, synthetic construct
  source 1..75: mol_type = other DNA
gaaccctggtgttatggaactggaagccattaataaatggaacggcacactgccgcaatacatgaccagcggtgc

SEQ ID NO: 697627 - DNA, 75 bp, synthetic construct
  source 1..75: mol_type = other DNA
atgaaaaaatttatttttgctttagccattgttctgccgaccattggccttgtcggctgcgatcgcgttgaaccc

SEQ ID NO: 697628 - DNA, 75 bp, synthetic construct
  source 1..75: mol_type = other DNA
ggtaatgttggcatcaaggtaaataaactgggcgacgataaaggcgtcggtgaggtggtcggtgttggtcgctac

SEQ ID NO: 697629 - DNA, 75 bp, synthetic construct
  source 1..75: mol_type = other DNA
tattacagtaagtcatcctgcattcaggtaagggacgaacaaaaaatccccggtgaatgcctcccgttaaaaaaa

SEQ ID NO: 697630 - DNA, 75 bp, synthetic construct
  source 1..75: mol_type = other DNA
tctgggatcgctggaaagcaccgctgcagtgcgcattccggccacgctggcggaatttaaccgtcgttatcccaa

SEQ ID NO: 697631 - DNA, 75 bp, synthetic construct
  source 1..75: mol_type = other DNA
attaataaatggaacggcacactgccgcaatacatgaccagcggtgccagtacaccatttatccaggttaaataa

SEQ ID NO: 697632 - DNA, 75 bp, synthetic construct
  source 1..75: mol_type = other DNA
ctatcgctggttgaagccgcagacaaatatgccgaactggaaaaagagaaagccacgctggaagcagaaattgct

SEQ ID NO: 697633 - DNA, 75 bp, synthetic construct
  source 1..75: mol_type = other DNA
cggactggtggtggttcacccgatgactgcgctgggtcgtgaaatgggcctgaacgagatgactggattttcaaa

SEQ ID NO: 697634 - DNA, 75 bp, synthetic construct
  source 1..75: mol_type = other DNA
gcactgaaagatattcagaaagagatgtctccggttggtattgaggtactgagcctgtcatgggttggaaagcct

SEQ ID NO: 697635 - DNA, 75 bp, synthetic construct
  source 1..75: mol_type = other DNA
gcactcaaccgactggccagcaaaatgaccaccgataagtttatcgacggtggtaagtctgaactgctggattca

SEQ ID NO: 697636 - DNA, 75 bp, synthetic construct
  source 1..75: mol_type = other DNA
atcaacaaatggaacggcacgctgccgcaatacatgaccagtaacaccgctgttccgtttgttccggtgaagtaa

SEQ ID NO: 697637 - DNA, 75 bp, synthetic construct
  source 1..75: mol_type = other DNA
ttaatgccaaagtcacggcgaaccagaaaacactgcagcgcgagcaggaagtaaaacagcgcgaagcggaagcca

SEQ ID NO: 697638 - DNA, 75 bp, synthetic construct
  source 1..75: mol_type = other DNA
gtgacttcagcatttgcactggtgatgaccgtttttcttataacgggtgagccacaaaatgtgattaccggaatt

SEQ ID NO: 697639 - DNA, 75 bp, synthetic construct
  source 1..75: mol_type = other DNA
atgaaacagcccaaaataccggtgaaaatgctgacaacactcacgattttgatggtatttctctgtgtcggcagt

SEQ ID NO: 697640 - DNA, 75 bp, synthetic construct
  source 1..75: mol_type = other DNA
aggcaagagacgagcaaaaactttccggtgaatgtttcccgttaaaaaaagtatcgctgtacctgaataacgaaa

SEQ ID NO: 697641 - DNA, 75 bp, synthetic construct
  source 1..75: mol_type = other DNA
tgccattaatgctgaaaaaatgctgaccattgaagataatgctgaggtcagggagttaattaacgctgccgaatt

SEQ ID NO: 697642 - DNA, 75 bp, synthetic construct
  source 1..75: mol_type = other DNA
acaaggcggattatgacaccctgtttatgcaggaagagaagacgctggagaagaacgtactggcaaaagtaagcg

SEQ ID NO: 697643 - DNA, 75 bp, synthetic construct
  source 1..75: mol_type = other DNA
gtgagttcagcgtttacactgatgatgacggtttttctgataacaggtgagccacagaaagtgattaccggaatt

SEQ ID NO: 697644 - DNA, 75 bp, synthetic construct
  source 1..75: mol_type = other DNA
tatgcaagtaaagaatcctgcctccaggcaagagacgagcaaaaaatttctggtgaatgcctcccgctaaaaaaa

SEQ ID NO: 697645 - DNA, 75 bp, synthetic construct
  source 1..75: mol_type = other DNA
attccgcgcttcacctatgatgaagggctggcgcagttatatggcgatccacccgcctggccaacgccaacgcgc

SEQ ID NO: 697646 - DNA, 75 bp, synthetic construct
  source 1..75: mol_type = other DNA
aatcgacttagcgatggcgcaccgctcactgtttatcctggcgaagttcccgcacgtttgcctggtcaggcgttc

SEQ ID NO: 697647 - DNA, 75 bp, synthetic construct
  source 1..75: mol_type = other DNA
tcccgcgtggccgacgccaacgcgcggcgtcagcgaaattcgcctggcattgcgttataaatcgaatgactcgtt

SEQ ID NO: 697648 - DNA, 75 bp, synthetic construct
  source 1..75: mol_type = other DNA
gtgaagagcgcctgctgggcgtaaaacgcattcctcagcgtgactttggcattccgcgttttacctacgacgaag

SEQ ID NO: 697649 - DNA, 75 bp, synthetic construct
  source 1..75: mol_type = other DNA
gaagggctggacccgctagcgcctgccgacgaaaaccggctggcagacattgccgccgcctggaccgagtatctc

SEQ ID NO: 697650 - DNA, 75 bp, synthetic construct
  source 1..75: mol_type = other DNA
cccgcgctgcaattcttcccgtggccggatgtcgatgcctggggcgagtccaaactggcgcaggccgataagcat

SEQ ID NO: 697651 - DNA, 75 bp, synthetic construct
  source 1..75: mol_type = other DNA
ttgcgactgccctgtgtgagattattggctgttttttgccatggctatggctgaaaaggaacgccagtatttggt

SEQ ID NO: 697652 - DNA, 75 bp, synthetic construct
  source 1..75: mol_type = other DNA
tctcttgatattgctgaacttctgtatgacagggtcactgcaaacgaagcctccagattaggtttctggattaag

SEQ ID NO: 697653 - DNA, 75 bp, synthetic construct
  source 1..75: mol_type = other DNA
tcttattaaactctgtctttgactttgtaaacgtagttggagatcttatcgacaggtctgtagataaggctcctg

SEQ ID NO: 697654 - DNA, 75 bp, synthetic construct
  source 1..75: mol_type = other DNA
gaatttcatgtttccattgccccaatttcatcgcttaagtacgactgggagtgggctccaattgatacaatactc

SEQ ID NO: 697655 - DNA, 75 bp, synthetic construct
  source 1..75: mol_type = other DNA
aaagcccgtacccgatcgccaccgccccgctgaccggttttgatgtgccgtggggctcggaggtgatcctcgaag

SEQ ID NO: 697656 - DNA, 75 bp, synthetic construct
  source 1..75: mol_type = other DNA
acggtgatggcggtttctatctcgacaaagcgtgcgtggtttcccgcgatccgctcgacccggataacttcggca

SEQ ID NO: 697657 - DNA, 75 bp, synthetic construct
  source 1..75: mol_type = other DNA
gatggcaaagccgctgaggagtatctgcaggagttacgaggaaatcaggcgctatcaccgctgaacctgcagttc

SEQ ID NO: 697658 - DNA, 75 bp, synthetic construct
  source 1..75: mol_type = other DNA
tcgttggcgcgaactggaagagcaggtgcgcaaaccaatgagcgaaatcgaaatggttgccgcgatggctcttga

SEQ ID NO: 697659 - DNA, 75 bp, synthetic construct
  source 1..75: mol_type = other DNA
aaacagttgagcaaatcaaaaagggtaccattcgtgagggctatgccggatatcgccagctgaaagcaaaaaccg

SEQ ID NO: 697660 - DNA, 75 bp, synthetic construct
  source 1..75: mol_type = other DNA
tcatttagccaaaacaaattcacaaacgcatatattttcgaaggcgaacaaggcaaacgcgacagcatcattgtc

SEQ ID NO: 697661 - DNA, 75 bp, synthetic construct
  source 1..75: mol_type = other DNA
tctgggcaaagccagacgaagcaagaaaagaccctctcagtgcccgctaatcaacccattgctttgacaaaattg

SEQ ID NO: 697662 - DNA, 75 bp, synthetic construct
  source 1..75: mol_type = other DNA
cacgactcagcaaggcgacatgtacaccattattccagaagtaaccctgacgcaatcttgcttgtgccgggtgca

SEQ ID NO: 697663 - DNA, 75 bp, synthetic construct
  source 1..75: mol_type = other DNA
acgttgctgaaacagttgagcaaattaaaaagggcactattcgtgagggctatgccggatatcgccaactgaaag

SEQ ID NO: 697664 - DNA, 75 bp, synthetic construct
  source 1..75: mol_type = other DNA
accgggcactactccggcgggcgcaacatgaccgtggtgcgcatcgataaagtctcttatcgcagcaaacccatt

SEQ ID NO: 697665 - DNA, 75 bp, synthetic construct
  source 1..75: mol_type = other DNA
tttattcgagtttttgtttctaagacaactcaactccaaaacaccgaagaaattaatgtgttaataaaaaaaata

SEQ ID NO: 697666 - DNA, 75 bp, synthetic construct
  source 1..75: mol_type = other DNA
ggcactgtttgtctggttgttaacgttgcatcctgcggcgagtgggcgtgtttacgcggcttatggtggcgttta

SEQ ID NO: 697667 - DNA, 75 bp, synthetic construct
  source 1..75: mol_type = other DNA
ttatgactggacgggtgcgttgattgcgctttgcggcatgttgatcattgttgcgggctggggcgcacgtaggaa

SEQ ID NO: 697668 - DNA, 75 bp, synthetic construct
  source 1..75: mol_type = other DNA
ccaggccgattttcgaatcgctgtacctcggtatgccgtggaccgaaatcgactacctgatggggccagccacct

SEQ ID NO: 697669 - DNA, 75 bp, synthetic construct
  source 1..75: mol_type = other DNA
ctcgcacatggtctcatgctggttttgcacaaataacacaaaatgcgatagctggattttctacatgctctcggg

SEQ ID NO: 697670 - DNA, 75 bp, synthetic construct
  source 1..75: mol_type = other DNA
atactctttataataaattaggtgaaagtcccaaaactataattcaagatattattaagagaaatgtttggaaaa

SEQ ID NO: 697671 - DNA, 75 bp, synthetic construct
  source 1..75: mol_type = other DNA
ggtgcgcatcgataaagtctcttatcgcagcaaaccgattttcgaatcactctatctcggtatgccgtggaccga

SEQ ID NO: 697672 - DNA, 75 bp, synthetic construct
  source 1..75: mol_type = other DNA
ggggccagccacctgtgtgccgctgtatcagcaactgaaagccgagttcccggaagtgcaggcggtgaacgccat

SEQ ID NO: 697673 - DNA, 75 bp, synthetic construct
  source 1..75: mol_type = other DNA
tttgataatattcgcggctttaccgatgcccgcgttgcaatgaacaccatcggttcctggcagaaccacgcgatt

SEQ ID NO: 697674 - DNA, 75 bp, synthetic construct
  source 1..75: mol_type = other DNA
acgattgtaatgatgttcaaagtttattgacacagggaaaccagttattggaaggggcgtatgatataacattaa

SEQ ID NO: 697675 - DNA, 75 bp, synthetic construct
  source 1..75: mol_type = other DNA
gaatatgatgataagttaaaattatcaaggccagatcttcagaaggttaagttatggcatgaaataaccggatgg

SEQ ID NO: 697676 - DNA, 75 bp, synthetic construct
  source 1..75: mol_type = other DNA
cattaatatggaaagaatgccctgctgacacacagcagggggatttatatattgatggtgagtttattgcgcagt

SEQ ID NO: 697677 - DNA, 75 bp, synthetic construct
  source 1..75: mol_type = other DNA
gctattttcatcaacggcattaaggctgatgaagcggatattccggcggataaactgatggcgctgccctccagc

SEQ ID NO: 697678 - DNA, 75 bp, synthetic construct
  source 1..75: mol_type = other DNA
ctgaccgaaggcgtttccctgcgcgatatcgtcaccatcgccaccgtgctggtcgccagtagcgcggtgaccaaa

SEQ ID NO: 697679 - DNA, 75 bp, synthetic construct
  source 1..75: mol_type = other DNA
gtggcaatctccttcgtggttgttttcctgtgccttgctgcgctctatgaaagctggtcaatacctgtatcggtt

SEQ ID NO: 697680 - DNA, 75 bp, synthetic construct
  source 1..75: mol_type = other DNA
tgccctccagcgaaacctacggcgagattgacggcgtgcaggggaacgacccggcgtacgggatgccggtcacct

SEQ ID NO: 697681 - DNA, 75 bp, synthetic construct
  source 1..75: mol_type = other DNA
gcgcaaacccggcgtaaagatgttgccagcgaggccgatttctacggcgcgatggacggggcatcgaagtttgtg

SEQ ID NO: 697682 - DNA, 75 bp, synthetic construct
  source 1..75: mol_type = other DNA
ttgtcgtcaccaaaggggccgagcgtatttccgaggtttctgcccgctttaccttagacgcgatgcccggcaaac

SEQ ID NO: 697683 - DNA, 75 bp, synthetic construct
  source 1..75: mol_type = other DNA
atgcgcaacgctactcaaaccagtctctgccgaacatcacgataaaaagagcggtttcttcggctggtttaatac

SEQ ID NO: 697684 - DNA, 75 bp, synthetic construct
  source 1..75: mol_type = other DNA
tttatggtgggcttgctaacgacaattggcttgtcggccaaaaacgctattttgattgttgagttcgctaaagat

SEQ ID NO: 697685 - DNA, 75 bp, synthetic construct
  source 1..75: mol_type = other DNA
gtgggtactggcgacatcttctacgataagtctttgctggtattagcccgtgcggtttatcttgctagcgattgg

SEQ ID NO: 697686 - DNA, 75 bp, synthetic construct
  source 1..75: mol_type = other DNA
acgacttcatcgaccgtggtcgtgtgaaaaaggtgtatgttcaggcggatgccaaattccgtatgctgccagaag

SEQ ID NO: 697687 - DNA, 75 bp, synthetic construct
  source 1..75: mol_type = other DNA
tcctgaagaatttggcaaagtcactctgcgcgtaaatagcgatggttccgttgtacgcctgaaagatgttgcacg

SEQ ID NO: 697688 - DNA, 75 bp, synthetic construct
  source 1..75: mol_type = other DNA
cgatctttgcatgggtactggctatcatcttgatgatggccggcgcgctggcgattttacaattgccggtcgcac

SEQ ID NO: 697689 - DNA, 75 bp, synthetic construct
  source 1..75: mol_type = other DNA
gcccatcagtttaagcctcggctacaagctggtggcgctggtcgataaagcccagggcaacccgctcacccagcg

SEQ ID NO: 697690 - DNA, 75 bp, synthetic construct
  source 1..75: mol_type = other DNA
cggcgcggatctggttggcgatattgtcgataactggctgtgtaacggaagggatttaccgacagtggcgttctg

SEQ ID NO: 697691 - DNA, 75 bp, synthetic construct
  source 1..75: mol_type = other DNA
agtgcagccagtgccaatacgtgaaacctgccggaatttatatctgcccgaaatgtggttttaaaccgctggccg

SEQ ID NO: 697692 - DNA, 75 bp, synthetic construct
  source 1..75: mol_type = other DNA
ctgatctacgcccgtccgacaaaatcagaaatccgttggttgcagtgcataggtagagcgttacgtacagcccca

SEQ ID NO: 697693 - DNA, 75 bp, synthetic construct
  source 1..75: mol_type = other DNA
gatggcaccgcgactggcggaagatttgagcgcggcgctcaattacagccagttgctgaaagtgtaccgggcgct

SEQ ID NO: 697694 - DNA, 75 bp, synthetic construct
  source 1..75: mol_type = other DNA
acccggcgtaaagatgttgccagcgaggccgatttctacggcgcgatggacggggcatcgaagtttgtgcgcggg

SEQ ID NO: 697695 - DNA, 75 bp, synthetic construct
  source 1..75: mol_type = other DNA
aggcacaggtagaagagctgcctacccaggaaagaattcagcaggcgcttaatcgcgtcagtgatatcagacagc

SEQ ID NO: 697696 - DNA, 75 bp, synthetic construct
  source 1..75: mol_type = other DNA
gtgattttatttaatgacgacaacccgccgccattgaaaatcgactgtccgtgtagcgcggcgataatactctcg

SEQ ID NO: 697697 - DNA, 75 bp, synthetic construct
  source 1..75: mol_type = other DNA
ctcgacagcgtgccggttgacccgaatatgctcaaccagttccagagcacgatgccgcaggtgaaagagcagatg

SEQ ID NO: 697698 - DNA, 75 bp, synthetic construct
  source 1..75: mol_type = other DNA
cggagatccgcattcgggaaaacttccgcctcaagcccagccagtacgctattttcatcaacggcattaaggctg

SEQ ID NO: 697699 - DNA, 75 bp, synthetic construct
  source 1..75: mol_type = other DNA
tggcgatatcgttcgcaactggcttgagaatggcgaggatttgccgacgatctgcttttgcgtgaatgttgcgca

SEQ ID NO: 697700 - DNA, 75 bp, synthetic construct
  source 1..75: mol_type = other DNA
tgaacttattcagcgtggtgatctgagcgattacgagttttttgccccctcaatgcctgatctggctggcgtaaa

SEQ ID NO: 697701 - DNA, 75 bp, synthetic construct
  source 1..75: mol_type = other DNA
atgctttcacgctcggatttactgacgctgttcacaatcaactttatcgtcgtcaccaaaggggccgagcgaatc

SEQ ID NO: 697702 - DNA, 75 bp, synthetic construct
  source 1..75: mol_type = other DNA
gacgcagcgcagcagctattccgtgtgaaccccgtacggattgattttaaagggccagaagccaaacgagacagg

SEQ ID NO: 697703 - DNA, 75 bp, synthetic construct
  source 1..75: mol_type = other DNA
cgcacaatatccacataaaaaaggcgttgaagggttaacgggtaaacgctgttggttggcggtacgcaatgcgtc

SEQ ID NO: 697704 - DNA, 75 bp, synthetic construct
  source 1..75: mol_type = other DNA
tggcgcaggcagcagaacaggcgagccaatcgaaatcgatgttccttgctaccgtcagccacgagctgcgtacac

SEQ ID NO: 697705 - DNA, 75 bp, synthetic construct
  source 1..75: mol_type = other DNA
cgataccgccttgaaagctctgcatgagcgcatcaataagtatcgtaatgcgccgcaggatgacagtggcagcaa

SEQ ID NO: 697706 - DNA, 75 bp, synthetic construct
  source 1..75: mol_type = other DNA
ttaccgggtacgttgccgatgggggttaccattcttgatgaaaatggtcataccctgatttcgcttaccggacca

SEQ ID NO: 697707 - DNA, 75 bp, synthetic construct
  source 1..75: mol_type = other DNA
gtagagcggtagtgaccttctgtcgtcgccatattggtattccgctggtagaaagcgccaggggagtgggtacac

SEQ ID NO: 697708 - DNA, 75 bp, synthetic construct
  source 1..75: mol_type = other DNA
agagcgcccggtgaatgggagcatagcgttgcttcgtcgcatgaactgcctgtgctactggcgcgtatctatcgg

SEQ ID NO: 697709 - DNA, 75 bp, synthetic construct
  source 1..75: mol_type = other DNA
cattccggcagaaagtgatgctcaacgactggaagaacacgagcagtttaaccgcaagattgtcgcctctgcacc

SEQ ID NO: 697710 - DNA, 75 bp, synthetic construct
  source 1..75: mol_type = other DNA
caaccctgaaagtttcacgctatatgttcagagcattggcgttgttactctggttgttgattgcgttttcatcag

SEQ ID NO: 697711 - DNA, 75 bp, synthetic construct
  source 1..75: mol_type = other DNA
ggagtaactgctaatgcgttggctgaagagaagcagcggtgtctggagtccggtatggacagctgcctgtcgaag

SEQ ID NO: 697712 - DNA, 75 bp, synthetic construct
  source 1..75: mol_type = other DNA
ttccagggaaccggtctggggctggcgatttgtgaaaaattgatcagcatgatggacggtgacatctcggtggag

SEQ ID NO: 697713 - DNA, 75 bp, synthetic construct
  source 1..75: mol_type = other DNA
ttaccgtacgtattccgttgtatggcgcgcagtactcgcagaaaaaaggcgtggaaggcttaagcggcaaacgct

SEQ ID NO: 697714 - DNA, 75 bp, synthetic construct
  source 1..75: mol_type = other DNA
aaaacggcgtgctttccccgcgtgggcgagaaacgcaagcggatgtgccggtgttcgaaccgttgtttgctgatt

SEQ ID NO: 697715 - DNA, 75 bp, synthetic construct
  source 1..75: mol_type = other DNA
ctggttggcgaggaagtatacaaggacgctaaaggcgagagccggataatgtatcgcctagaccgaaaacataca

SEQ ID NO: 697716 - DNA, 75 bp, synthetic construct
  source 1..75: mol_type = other DNA
tgaagtggtccgggctgatcgctatggaccgcgcaaacaaagcgtcgtttggtctcctgatgtacaaaaacattg

SEQ ID NO: 697717 - DNA, 75 bp, synthetic construct
  source 1..75: mol_type = other DNA
ggtttgataagacgaccgaggaatttaaaggtggtgagtattcaaaagatttcggtgatgatggctcggtcattg

SEQ ID NO: 697718 - DNA, 75 bp, synthetic construct
  source 1..75: mol_type = other DNA
acgcagatcccccctggacattccgcaacaaagcaaccgatggtcaacgcggtgcaagttttaaatatccggtca

SEQ ID NO: 697719 - DNA, 75 bp, synthetic construct
  source 1..75: mol_type = other DNA
gaaaaacttgtgcaattgttaggcgatgtttctcgcattgaactgttcgcccgccagtcgtctcatggcttcgat

SEQ ID NO: 697720 - DNA, 75 bp, synthetic construct
  source 1..75: mol_type = other DNA
cgcgttggatattgccggattaacaaatgcattcagcaatgctccgctgtcaccaacagacaaccaggggcggga

SEQ ID NO: 697721 - DNA, 75 bp, synthetic construct
  source 1..75: mol_type = other DNA
tgaagggcttcacgtggataaaatgtggtagtcgacaaccagataaactggttatgggtatgggacacatgactc

SEQ ID NO: 697722 - DNA, 75 bp, synthetic construct
  source 1..75: mol_type = other DNA
cccctaaaaccattccgcagggctgcggatgcaattgaggcttctggactggaatatacaattcttcgccctgcc

SEQ ID NO: 697723 - DNA, 75 bp, synthetic construct
  source 1..75: mol_type = other DNA
tgccttcactggcaccgaccagcagaagcaagagcatctcctgaagcaagcccaatccggcaagctggagggact

SEQ ID NO: 697724 - DNA, 75 bp, synthetic construct
  source 1..75: mol_type = other DNA
agttctcagcaggtgggtataacttccggttcaacgctaaggggctggaggtcttcggtaagcctgagatggttg

SEQ ID NO: 697725 - DNA, 75 bp, synthetic construct
  source 1..75: mol_type = other DNA
gcctggagaactcgcgcaagccggacgtgatcagagagaaactggtgcagctgctgggcgatgtgccgcgcattg

SEQ ID NO: 697726 - DNA, 75 bp, synthetic construct
  source 1..75: mol_type = other DNA
ggaatacgagcaaaaggccaaacgccgtcgccgactgattaaagcaggactttacattgatgagtttgaaaacgc

SEQ ID NO: 697727 - DNA, 75 bp, synthetic construct
  source 1..75: mol_type = other DNA
atggcgaaccgtgcgaacgctgtggcggcatcattgagaaaaccacgctgtcatcgcgcccgttttactggtgcc

SEQ ID NO: 697728 - DNA, 75 bp, synthetic construct
  source 1..75: mol_type = other DNA
atgcggcgctgcactgacagccagaccctgagtgggaaatacaccaccgatgactgggttttcaacctgatcagc

SEQ ID NO: 697729 - DNA, 75 bp, synthetic construct
  source 1..75: mol_type = other DNA
tggggcttacggaaatgctaacggaacacttctaaatctgtatatccctgcaggagaaatcaacaaattgccttt

SEQ ID NO: 697730 - DNA, 75 bp, synthetic construct
  source 1..75: mol_type = other DNA
atacaacctatgggacttacactataaacatcacagttaatttaactgataagggaaatattcagatatggttac

SEQ ID NO: 697731 - DNA, 75 bp, synthetic construct
  source 1..75: mol_type = other DNA
agcatcattgagaaaaccacgttgtcctcgcgcccgttttactggtgtccaggctgccagcactaggccgaccgc

SEQ ID NO: 697732 - DNA, 75 bp, synthetic construct
  source 1..75: mol_type = other DNA
ttcagctttaaggtttttcatcgtgatggtgagaagtgcgaacggtgtggctgcatcattgagaaaaccacgcta

SEQ ID NO: 697733 - DNA, 75 bp, synthetic construct
  source 1..75: mol_type = other DNA
ctgatatatacaatccgcaggctggtcagtactcaggacatataaatattacattcacaccaagcagttcaaaca

SEQ ID NO: 697734 - DNA, 75 bp, synthetic construct
  source 1..75: mol_type = other DNA
gttacatcctgtggtttaccccgcaaccggagaaaaccattcaggtttcgatggttcagggcgatattccgcaat

SEQ ID NO: 697735 - DNA, 75 bp, synthetic construct
  source 1..75: mol_type = other DNA
ctttggcagcggtattaactgggtctatgtcagcatcgcgacctttggcggaatgcctggcccggttaacatctt

SEQ ID NO: 697736 - DNA, 75 bp, synthetic construct
  source 1..75: mol_type = other DNA
cacgtaccggcaactggccgctgtgggtgctgacggcactgtttggttttgccgctgtgctgatgagtctgcgag

SEQ ID NO: 697737 - DNA, 75 bp, synthetic construct
  source 1..75: mol_type = other DNA
atattaagggccgtaagctgtcgatcagcgatggttcaccagacccgtacatgcggcgctgcactgacagccaga

SEQ ID NO: 697738 - DNA, 75 bp, synthetic construct
  source 1..75: mol_type = other DNA
agcaatgacgatcaggtgctcgggcagctatccgcaggctatatgctgaccgatgactggagagtgtatacccgt

SEQ ID NO: 697739 - DNA, 75 bp, synthetic construct
  source 1..75: mol_type = other DNA
accgttaccaaagctttctttgaatttgagtattcgggaaataatcatgcagatagctatacccagggggattac

SEQ ID NO: 697740 - DNA, 75 bp, synthetic construct
  source 1..75: mol_type = other DNA
ggcatcattgagaaaaccacgctgtcatctcgcccgttttactggtgtccgggctgccagcactaggccgtacgt

SEQ ID NO: 697741 - DNA, 75 bp, synthetic construct
  source 1..75: mol_type = other DNA
atgcgtaatatttctgtgtctgcgccagctcctgctgcgccattatttcctgtatcgaaccatcatgagcgattt

SEQ ID NO: 697742 - DNA, 75 bp, synthetic construct
  source 1..75: mol_type = other DNA
ccttattaattttgacttgatttataacaaattcaaatcccttgcacaatttcttctggatggagatcatgaaaa

SEQ ID NO: 697743 - DNA, 75 bp, synthetic construct
  source 1..75: mol_type = other DNA
gccattgaatataacatttcgagagaaataaattatcgtattatccgtagagcagttggttcagggaatgcatca

SEQ ID NO: 697744 - DNA, 75 bp, synthetic construct
  source 1..75: mol_type = other DNA
aaggaagcagcccgtcattatttgtgcggacggatacggttcgtgccgtgcggcgtggtgacacgttgaccatta

SEQ ID NO: 697745 - DNA, 75 bp, synthetic construct
  source 1..75: mol_type = other DNA
gacgatccggagtcgctggggtttgccggtggcggggtccgtattgaaggaagcagcccgtcattatttgtgcgg

SEQ ID NO: 697746 - DNA, 75 bp, synthetic construct
  source 1..75: mol_type = other DNA
tgccggatacataccggtatcatctgtctcatcgtattcgccggttgattgggactgaaaagacatcatcgccat

SEQ ID NO: 697747 - DNA, 75 bp, synthetic construct
  source 1..75: mol_type = other DNA
tacgattgttgaagtgatggggctctgtgcacagttcacctcgggggcacagtgtggcggagaagttcagggggt

SEQ ID NO: 697748 - DNA, 75 bp, synthetic construct
  source 1..75: mol_type = other DNA
taactcatttttccaacgacttaacgctctacagccataatcagctttacggcgtctggcgcgtggttgataccg

SEQ ID NO: 697749 - DNA, 75 bp, synthetic construct
  source 1..75: mol_type = other DNA
tgagaataagcatcatggggcgctgtttcgctttaaggtttttcatcgtgatggcgaaccgtgcgaacgctgtgg

SEQ ID NO: 697750 - DNA, 75 bp, synthetic construct
  source 1..75: mol_type = other DNA
acgttctgggtggatcgtgtttctccggatgacgggggcagttgttatctctggctgaaccgtgggcaaccaccc

SEQ ID NO: 697751 - DNA, 75 bp, synthetic construct
  source 1..75: mol_type = other DNA
actttattcagcctgggcgctttgtcttgccgggagatatggcaggagcacccgcgctgcaattcttcccgtggc

SEQ ID NO: 697752 - DNA, 75 bp, synthetic construct
  source 1..75: mol_type = other DNA
acggcgagatgttctgggtggaccgtgtttctccggatgacggagggagttgttatctctggctcaaccgtgggc

SEQ ID NO: 697753 - DNA, 75 bp, synthetic construct
  source 1..75: mol_type = other DNA
tctccaacgatgcgtggtttggtaagtctattggtccatggcagcacttccagatggcgcgaatgcgtgcgctgg

SEQ ID NO: 697754 - DNA, 75 bp, synthetic construct
  source 1..75: mol_type = other DNA
ttcaattgaaaaacttagtgctgctttgggcatatctattgatgctataaaagataaagctaatgtgatgaacgg

SEQ ID NO: 697755 - DNA, 75 bp, synthetic construct
  source 1..75: mol_type = other DNA
gtcctggagacatctggaaaacagcaaaaatgaactgatcaaaatcttcaaacaagacgcttccatcagcgattt

SEQ ID NO: 697756 - DNA, 75 bp, synthetic construct
  source 1..75: mol_type = other DNA
cgcccgcaccgccggtggtaatgagccgtatgtttggtgctcaacttttcaacggcaccagcgcggatagcggtg

SEQ ID NO: 697757 - DNA, 75 bp, synthetic construct
  source 1..75: mol_type = other DNA
ggtgtgctgcagtttgatgtggtggtatcgcgcctgaagagcgaatacaacgttgaagcagtatatgaatcagtc

SEQ ID NO: 697758 - DNA, 75 bp, synthetic construct
  source 1..75: mol_type = other DNA
gaagcgccgcacttttgccattatttctcacccggacgccggtaagactaccatcaccgagaaggtgctgctgtt

SEQ ID NO: 697759 - DNA, 75 bp, synthetic construct
  source 1..75: mol_type = other DNA
cggtacagtaaaaggccgtggctctaaccagcacgctaagtcggactggatggagatggaaaagcagcgtgggat

SEQ ID NO: 697760 - DNA, 75 bp, synthetic construct
  source 1..75: mol_type = other DNA
aaaaaagtgtaagttgtatttctttactgagtgttattgtttctggattttatcttctctggactgagtggccag

SEQ ID NO: 697761 - DNA, 75 bp, synthetic construct
  source 1..75: mol_type = other DNA
gcccatcagtttaagcctcggttacaagctggtggcgctggtggacaaagcgcagggtaatccgctcacccagcg

SEQ ID NO: 697762 - DNA, 75 bp, synthetic construct
  source 1..75: mol_type = other DNA
aaagtgatgcttgatagcgtgccagtggatccgaatatgctcaaccagttccagagcacgatgcctcaggtgaag

SEQ ID NO: 697763 - DNA, 75 bp, synthetic construct
  source 1..75: mol_type = other DNA
ttgtttttgttgttttttattatactgttaatcgttgttcttttttctgtctcaatgggtgtgtcggggcgttat

SEQ ID NO: 697764 - DNA, 75 bp, synthetic construct
  source 1..75: mol_type = other DNA
gtacgcgcctgctgaccaaaaagggcggtgatatcaaagattttgccgacctgaaaggcaaagccgtagtcgtca

SEQ ID NO: 697765 - DNA, 75 bp, synthetic construct
  source 1..75: mol_type = other DNA
taatgctggttgtcactgttttttccgcctctgtgggagtgtcaggaaatcatgaagtacactctcagatagtta

SEQ ID NO: 697766 - DNA, 75 bp, synthetic construct
  source 1..75: mol_type = other DNA
cgggcgaccgttcgcacgttgaagaagcttatccgggcgatatccttggtctgcacaaccacggcactattcaga

SEQ ID NO: 697767 - DNA, 75 bp, synthetic construct
  source 1..75: mol_type = other DNA
cggattcctgatccgcattattgagtggtggcaaaccggagaggctccgggcacgtttcgcctggatatcggcgt

SEQ ID NO: 697768 - DNA, 75 bp, synthetic construct
  source 1..75: mol_type = other DNA
tgccggatacataccggtatcatctgtctcatcgtattcgccgggtggttgggattgaaaagacatcatcgccat

SEQ ID NO: 697769 - DNA, 75 bp, synthetic construct
  source 1..75: mol_type = other DNA
ctgcaagtgccgctgcgtgacttgtggaatccggcaacctgtccggtcagtttcctgccttaccttgcctgggcg

SEQ ID NO: 697770 - DNA, 75 bp, synthetic construct
  source 1..75: mol_type = other DNA
tgccggatacataccggtatcatctgtctcatcgtattcgccgggtgtttgggaatgaaaagacatcatcgccat

SEQ ID NO: 697771 - DNA, 75 bp, synthetic construct
  source 1..75: mol_type = other DNA
gaggagatgtatctggaaatggaacggctgattgccgatgccaaacccgcaagtcgccaccttatcggcctgaac

SEQ ID NO: 697772 - DNA, 75 bp, synthetic construct
  source 1..75: mol_type = other DNA
tgattgctgatgcccgcccggtcagccgccacatgacagggctgaatatcattcaggagatccctggagatattt

SEQ ID NO: 697773 - DNA, 75 bp, synthetic construct
  source 1..75: mol_type = other DNA
gccattatttctcacccggacgccggtaaaactaccatcaccgagaaggtgctgctgttcggacaggccattcag

SEQ ID NO: 697774 - DNA, 75 bp, synthetic construct
  source 1..75: mol_type = other DNA
ggttggtgaagatctggcacagcagctgcgtgacgaactggaactggtgaaaggcgcgtctaacgagttcgacaa

SEQ ID NO: 697775 - DNA, 75 bp, synthetic construct
  source 1..75: mol_type = other DNA
acctcgcttacatcgctaccagcatggtgaacttgcgcttagcgcaagagcgttacccggatgttcagttccacc

SEQ ID NO: 697776 - DNA, 75 bp, synthetic construct
  source 1..75: mol_type = other DNA
ataagcgtgtatgactctattaccgcaacccggagattgtgcccggtataccggattgtcgcgaataataaataa

SEQ ID NO: 697777 - DNA, 75 bp, synthetic construct
  source 1..75: mol_type = other DNA
atgtcttctgtttatccggttaacgagcaatgtattaaagctgtttccttttgctatggtgatgtgctctgtggt

SEQ ID NO: 697778 - DNA, 75 bp, synthetic construct
  source 1..75: mol_type = other DNA
ggttgccttgattcagccgggtaaagttctgtatgaaatggacggtgttccggaagagctggcccgtgaagcatt

SEQ ID NO: 697779 - DNA, 75 bp, synthetic construct
  source 1..75: mol_type = other DNA
ccaggatgcgttgtcggcgagccgggtgagattaaaaaggtggtggtgaaggttaaggctgatttaatggcttaa

SEQ ID NO: 697780 - DNA, 75 bp, synthetic construct
  source 1..75: mol_type = other DNA
tgcagatgaccagattaacaaccctgaaaatgggctgatttctaaacagggtaaaaacgctcttggtcagagtga

SEQ ID NO: 697781 - DNA, 75 bp, synthetic construct
  source 1..75: mol_type = other DNA
aagacgctgaaaaaagtggaagacgaagatttcggctactgcgaatcctgcggtgttgaaattggtattcgtcgt

SEQ ID NO: 697782 - DNA, 75 bp, synthetic construct
  source 1..75: mol_type = other DNA
cagataaatacagttttactgaactgaatgaatcgccccgtcttcgccggcaatggcaggatgtcctggatgagt

SEQ ID NO: 697783 - DNA, 75 bp, synthetic construct
  source 1..75: mol_type = other DNA
aggaacaacaaaattctttcaagtggctggcggcattgctggaagaaaattatgctggcaaaactaccatttcgg

SEQ ID NO: 697784 - DNA, 75 bp, synthetic construct
  source 1..75: mol_type = other DNA
gaatcacacagcccaaaatggtcccaggaacaacaaaattccttcaagtggctggtggcattactggaagataaa

SEQ ID NO: 697785 - DNA, 75 bp, synthetic construct
  source 1..75: mol_type = other DNA
ctggtgatgattgtctttggcgccacattaatgaaagacgcgccgaaacaggaagtgaaaaccagcaacggtgtg

SEQ ID NO: 697786 - DNA, 75 bp, synthetic construct
  source 1..75: mol_type = other DNA
aaaatacgccagcggcacttaatgaggcgtttaaacactgggatttagctgtgaatgccttctcgcacctctcta

SEQ ID NO: 697787 - DNA, 75 bp, synthetic construct
  source 1..75: mol_type = other DNA
tagaagatattgaatctgatgttcgctatgtaggagatggacttgtcgaactagctcaacgcttaggcgctatca

SEQ ID NO: 697788 - DNA, 75 bp, synthetic construct
  source 1..75: mol_type = other DNA
aagcgggtggtgcgcgcagcggggcggttaaatccgccattggtttaggtctgctgctgtctgaaggcattggcg

SEQ ID NO: 697789 - DNA, 75 bp, synthetic construct
  source 1..75: mol_type = other DNA
gtaagttcggtggctgttatgtgtttggtatccagtcctatgcccagctggaagatatctacggtgagaaagcgg

SEQ ID NO: 697790 - DNA, 75 bp, synthetic construct
  source 1..75: mol_type = other DNA
tggaacagcaactgccacccgggatcagtgaatccggtgaagtggtggatatggccgcttatgaggcatggcaac

SEQ ID NO: 697791 - DNA, 75 bp, synthetic construct
  source 1..75: mol_type = other DNA
caagcccaggttatcgccatgcaaaaagaaatacaggaaaagttcagagagcagaacgaaaagttgagagaactg

SEQ ID NO: 697792 - DNA, 75 bp, synthetic construct
  source 1..75: mol_type = other DNA
atcccgggcgttgcagcaactaactggacgtgggcagtgggaagcgtgtcgggtcgtgaagaagataaatttaat

SEQ ID NO: 697793 - DNA, 75 bp, synthetic construct
  source 1..75: mol_type = other DNA
cactctgatgagagcgggtctgatcaaaatcacacagacgatggtgagcagttgaacaacacggatgctccggat

SEQ ID NO: 697794 - DNA, 75 bp, synthetic construct
  source 1..75: mol_type = other DNA
gctggtctgctggggcgcgaggcggatatgtcggggagtgctgcggatattgctcagcgtgtgtctgagtgggaa

SEQ ID NO: 697795 - DNA, 75 bp, synthetic construct
  source 1..75: mol_type = other DNA
agtggatttgcccctatatttccagacatctgttatcacttaacccattacaagcccgctgccgcagatattccc

SEQ ID NO: 697796 - DNA, 75 bp, synthetic construct
  source 1..75: mol_type = other DNA
agtgcctgcaagtgatggggtattgcccggagacaggttgtcccgttgagctggcgttacggggtatgcgtgttc

SEQ ID NO: 697797 - DNA, 75 bp, synthetic construct
  source 1..75: mol_type = other DNA
cgcctgggagcgcagccatgattatgtggcgttgctggttgatgtgcaaaggacgctgatgaaaggcgatattcc

SEQ ID NO: 697798 - DNA, 75 bp, synthetic construct
  source 1..75: mol_type = other DNA
tacggcgatgagagcggggctgagaaaaattacacagaggatgccgggcagttgaacaacactgatgatccggat

SEQ ID NO: 697799 - DNA, 75 bp, synthetic construct
  source 1..75: mol_type = other DNA
cgcgtggcaattgtggtcgataaatcgacatggtcacgggagttgattgaacgtagtggcatgtttggcattgtg

SEQ ID NO: 697800 - DNA, 75 bp, synthetic construct
  source 1..75: mol_type = other DNA
tgcatcatgccagccgtctgttaaaccacggcccgactattttgattaccagtcacgataaactgtcccagttac

SEQ ID NO: 697801 - DNA, 75 bp, synthetic construct
  source 1..75: mol_type = other DNA
gtttggcgaggtagtatcagcagcggcagacgcacgggtatttgtcgaaggccgctggcagtttgatgatgataa

SEQ ID NO: 697802 - DNA, 75 bp, synthetic construct
  source 1..75: mol_type = other DNA
agtggagagttaagtttctggcatgcctggctgtcggggattgctggttgcctgatgggggattggatctccttc

SEQ ID NO: 697803 - DNA, 75 bp, synthetic construct
  source 1..75: mol_type = other DNA
gccgaatattatcggctgcctgctgtggccgccgttttacttcctgcctgggattctggcgggcgcggcgatcga

SEQ ID NO: 697804 - DNA, 75 bp, synthetic construct
  source 1..75: mol_type = other DNA
cgttgcatcgctggtcatttctgaagaaaaacaaagcattactcgataaaactgaacatgcgttgcatcaacaca

SEQ ID NO: 697805 - DNA, 75 bp, synthetic construct
  source 1..75: mol_type = other DNA
cgacatgatcgaccaactggaagcgcgcatccgtgcgaaagccagccagttggatgaggcgcgtcgcattgacat

SEQ ID NO: 697806 - DNA, 75 bp, synthetic construct
  source 1..75: mol_type = other DNA
gaaccgtaaatgtatcattgaagacggtgaatttgctgtcgcagttgtttttatattatctggtttagcggggta

SEQ ID NO: 697807 - DNA, 75 bp, synthetic construct
  source 1..75: mol_type = other DNA
gctgggtgtcgagaacgatatcgccctgctgaattatctctcttcagtgacgttaagtccggcagataaagacta

SEQ ID NO: 697808 - DNA, 75 bp, synthetic construct
  source 1..75: mol_type = other DNA
aggcgaaaagtcgtaagtcgctgacaccactattagaaatccgcaatttgaccaaatcttacgatggtcaacatg

SEQ ID NO: 697809 - DNA, 75 bp, synthetic construct
  source 1..75: mol_type = other DNA
atggcgctctgtggcccgtccaccttcggtttgctttgcagccgtggacgccacgtccggtccgccggtatcacc

SEQ ID NO: 697810 - DNA, 75 bp, synthetic construct
  source 1..75: mol_type = other DNA
gcatgttcaccattctggtcggtcgttttgtcggcccgacgcgtccgctggtgccaatggtggcgggaatgctgg

SEQ ID NO: 697811 - DNA, 75 bp, synthetic construct
  source 1..75: mol_type = other DNA
gccgtcggtgtagtggcgctggtggtgttaattcgccacccgttgatgccgatgtatatcgatattttgcgtaaa

SEQ ID NO: 697812 - DNA, 75 bp, synthetic construct
  source 1..75: mol_type = other DNA
gaccgactgctcaacggaagtgaaaaaaggcgaagtggtggtggtttgcggcccatctggctccggtaaatcaac

SEQ ID NO: 697813 - DNA, 75 bp, synthetic construct
  source 1..75: mol_type = other DNA
gtcgattatcgaaaacctgacgctggcgcaggtgaaagttcttaaacgcgataaagcaccagctcgtgaaaaagc

SEQ ID NO: 697814 - DNA, 75 bp, synthetic construct
  source 1..75: mol_type = other DNA
cctgaaactgctggagcgtgtcgggctttctgctcacgccaataagtttccggcgcagctttccggcggtcagca

SEQ ID NO: 697815 - DNA, 75 bp, synthetic construct
  source 1..75: mol_type = other DNA
atgaacgacaaattacgctttaaagtgaacgataaccaggggcgtttcgtatttccggatacctggtttggccca

SEQ ID NO: 697816 - DNA, 75 bp, synthetic construct
  source 1..75: mol_type = other DNA
aagcgagacaagttacatcaacaaactcagacgccttgctcaacgggagcctgactttattgatatacacgctca

SEQ ID NO: 697817 - DNA, 75 bp, synthetic construct
  source 1..75: mol_type = other DNA
gtaagcagattaaaacggggtaaattcgaacttcaaatgcctggaggtggaattaaagaatgcgaaggatggtat

SEQ ID NO: 697818 - DNA, 75 bp, synthetic construct
  source 1..75: mol_type = other DNA
atggtctccgtatggtcatgtttcacatccgtcgtccggtcgttaagtacctccgtgtccatgttcttctgcgcg

SEQ ID NO: 697819 - DNA, 75 bp, synthetic construct
  source 1..75: mol_type = other DNA
tctatttttcgcgagtatttaaaaaatgtaccggggcgagcccgagtgagtttagagcgggttgtgaagaaaaag

SEQ ID NO: 697820 - DNA, 75 bp, synthetic construct
  source 1..75: mol_type = other DNA
ccggatgcctatcgcgacggtcgggcgcaatgttggctttgatgatcaactctatttctcgcgggtatttaaaaa

SEQ ID NO: 697821 - DNA, 75 bp, synthetic construct
  source 1..75: mol_type = other DNA
aggcgaagctgcttttgagcaccacccggatgcctatcgccaccgtcggtcgcaatgttggttttgacgatcaac

SEQ ID NO: 697822 - DNA, 75 bp, synthetic construct
  source 1..75: mol_type = other DNA
tgggaatgtgccgattggcgatggcgcccccatcgctgtacagtctatgaccaatacacgcacgacggacgtcga

SEQ ID NO: 697823 - DNA, 75 bp, synthetic construct
  source 1..75: mol_type = other DNA
ctggaacgcgttggcgctgatatcgtccgtgtctccgtaccgacgatggacgcggcagaagcgttcaaactcatc

SEQ ID NO: 697824 - DNA, 75 bp, synthetic construct
  source 1..75: mol_type = other DNA
tttatacagtttaactttcgtttcagtactgaactgacagacgaaatgatcaaagcgcaggttcatgcgttactg

SEQ ID NO: 697825 - DNA, 75 bp, synthetic construct
  source 1..75: mol_type = other DNA
tacaccatgccagccgtctgttaaatcatggcccaactattttgataacaacttttgatgaaaaatcacagcgac

SEQ ID NO: 697826 - DNA, 75 bp, synthetic construct
  source 1..75: mol_type = other DNA
gggataaaacaacacatggtggcgaagttatttctgcttcttcgaccatgatcgtgaatggaaaaaaggtagcac

SEQ ID NO: 697827 - DNA, 75 bp, synthetic construct
  source 1..75: mol_type = other DNA
ggacgtgggcggtgggaagtgtgtcgggtcgtgaagaagataaatttaattgctatggcattccggttgtgaaag

SEQ ID NO: 697828 - DNA, 75 bp, synthetic construct
  source 1..75: mol_type = other DNA
tcgtggcggataagatggctgaaaaccaggcgcattttctgggaaatcgttcagaaacgatgctggaatttaccc

SEQ ID NO: 697829 - DNA, 75 bp, synthetic construct
  source 1..75: mol_type = other DNA
tcgcgctgtttgtcctgatcatcggtggatttttgggagtagtaaataaaaccggggcaatagatgccggtatcg

SEQ ID NO: 697830 - DNA, 75 bp, synthetic construct
  source 1..75: mol_type = other DNA
gtttggcgaggtggtatcagcagcggcagacgcacgagtatttgtcgaaggccgctggcagtttgatgatgataa

SEQ ID NO: 697831 - DNA, 75 bp, synthetic construct
  source 1..75: mol_type = other DNA
caagcgccgggtagccagcactggctcggaacagatagttacgggcgagatctgctttcacgtttaatctacggc

SEQ ID NO: 697832 - DNA, 75 bp, synthetic construct
  source 1..75: mol_type = other DNA
gaacgacggagggattcgcgtacttaaccgtggatacgatccaacgaaaaacaaatggagcgagagcgaaggtaa

SEQ ID NO: 697833 - DNA, 75 bp, synthetic construct
  source 1..75: mol_type = other DNA
gttccgtccgcagaaggttctttggcaagggattttttgcccattgcttgccgattttgtgctcatcgccggact

SEQ ID NO: 697834 - DNA, 75 bp, synthetic construct
  source 1..75: mol_type = other DNA
aaagcctcgaaacgctgacccgcaccatcaccgaaaccagcgagcaacaggtcagttgggagacgataccgctga

SEQ ID NO: 697835 - DNA, 75 bp, synthetic construct
  source 1..75: mol_type = other DNA
atgcctggtaagcagatggcaattgacgccgatcttaatgccggattgatcaatcaggcgcaggcgcaaacccgg

SEQ ID NO: 697836 - DNA, 75 bp, synthetic construct
  source 1..75: mol_type = other DNA
gaacgacggagggattcgtgtacttaaccgtggatacgatccaacgaaaaataaatggagcgagagcgaaggtaa

SEQ ID NO: 697837 - DNA, 75 bp, synthetic construct
  source 1..75: mol_type = other DNA
cgatatgacggtagtcgatctcagtgggcggccactgctcaccattaccgaacatcatcaagaaaaccaaccact

SEQ ID NO: 697838 - DNA, 75 bp, synthetic construct
  source 1..75: mol_type = other DNA
aactgcgtggttcacaacgcttattgctggaactgattcgtcgtcatgcccccgtgacacgggcggaattggcgc

SEQ ID NO: 697839 - DNA, 75 bp, synthetic construct
  source 1..75: mol_type = other DNA
ttttttgattgccgtctgtcatcgccgattgaagccgcagaaagcagtcggatttgcgatgacgtttccggttag

SEQ ID NO: 697840 - DNA, 75 bp, synthetic construct
  source 1..75: mol_type = other DNA
accgcgattacctgtggatcctgtcgcgcacgccaaccatcccggatgcggtgaaacaggattatctgaacaccg

SEQ ID NO: 697841 - DNA, 75 bp, synthetic construct
  source 1..75: mol_type = other DNA
agcgccagctccagcacgcacgtattctcggcattggctatgcagtgcccggatttctgaaagcggatggtcgca

SEQ ID NO: 697842 - DNA, 75 bp, synthetic construct
  source 1..75: mol_type = other DNA
atgttctccggcctggtggtggaaggggagcgcaataccgggcagcgcggccagccgtcgctgccgttgcgcctt

SEQ ID NO: 697843 - DNA, 75 bp, synthetic construct
  source 1..75: mol_type = other DNA
gtatacgctgaataatgaactggaaaatctgctgaccaacgtggtgaatcaggcgcaacagggcggcaaagtgat

SEQ ID NO: 697844 - DNA, 75 bp, synthetic construct
  source 1..75: mol_type = other DNA
ccgaagtacaaattatgtaacctggctgacgctatttcctggttatgcggatgtgatttattcgatgccaaaatc

SEQ ID NO: 697845 - DNA, 75 bp, synthetic construct
  source 1..75: mol_type = other DNA
ccaacccgcgaaacattgcagcgtctggggctggaagatattgccgccgatctggcagcacacaatctactgcct

SEQ ID NO: 697846 - DNA, 75 bp, synthetic construct
  source 1..75: mol_type = other DNA
atggtagtcgctgaacgcatcacccatttttaccgtcagtgtggtgcatatggtggcacgatcattgagctggat

SEQ ID NO: 697847 - DNA, 75 bp, synthetic construct
  source 1..75: mol_type = other DNA
aaaatctacccattgctgaacgtgtgcggaaaaaattaggtactgatgatcctgctatatgggttcctcacttcc

SEQ ID NO: 697848 - DNA, 75 bp, synthetic construct
  source 1..75: mol_type = other DNA
ttgcacacatattcttaagaaaagttatgttgctaatcatcctttagttgttgaggtaatgcttaatacttttta

SEQ ID NO: 697849 - DNA, 75 bp, synthetic construct
  source 1..75: mol_type = other DNA
aatggactcagagcaagattatcaaaatggtgtactgtcaacggcaagaaagggcaatacgcatgggtgctcgac

SEQ ID NO: 697850 - DNA, 75 bp, synthetic construct
  source 1..75: mol_type = other DNA
cgaggccgatttctacggcgcgatggacggggcatcaaagtttgtgcgcggggacgccatcgccgggatgatgat

SEQ ID NO: 697851 - DNA, 75 bp, synthetic construct
  source 1..75: mol_type = other DNA
cgctgacccgcaccatcaccgaaaccagcgagcaacaggtcagttgggaaaccattccgcttatcgagcctatca

SEQ ID NO: 697852 - DNA, 75 bp, synthetic construct
  source 1..75: mol_type = other DNA
ggatgccgcacctgccgtttttgctgttcagcgccctgcttggctttaccggctggcgaatgagcaaacgcccgc

SEQ ID NO: 697853 - DNA, 75 bp, synthetic construct
  source 1..75: mol_type = other DNA
gaaggagcagatgaaagcggcggggaaagaccctgtgctgctggtgccaccgcagttgcgccctttgctggcgcg

SEQ ID NO: 697854 - DNA, 75 bp, synthetic construct
  source 1..75: mol_type = other DNA
cgcagctgcgccctttgctggcgcgctacgcaaggttgtttgcgccggggctgcatgtgctgtcgtataacgaag

SEQ ID NO: 697855 - DNA, 75 bp, synthetic construct
  source 1..75: mol_type = other DNA
gattatgttcgtgctggcggtggtgccgggaatgccgcacttcccgttcctgatgttcagcgccctgcttggttt

SEQ ID NO: 697856 - DNA, 75 bp, synthetic construct
  source 1..75: mol_type = other DNA
gtgaaggcactaaatgcgtttaatgacgcttttgatattgactatatgcaacagggcgacccggcacgcgtaatt

SEQ ID NO: 697857 - DNA, 75 bp, synthetic construct
  source 1..75: mol_type = other DNA
ttctttctgttatcgggatacattcccccttcacccaaatggagcgaagttgaaaatctgttactgaatacgcca

SEQ ID NO: 697858 - DNA, 75 bp, synthetic construct
  source 1..75: mol_type = other DNA
tttgtgatgtgtccggaatgttttttctgatgttatttttctgtggttaccgtgcttgttattgttcttcttctt

SEQ ID NO: 697859 - DNA, 75 bp, synthetic construct
  source 1..75: mol_type = other DNA
ggcgcgttatgctgactggctgaaagattttaaacagggaccaacgggtaaagagctccatgtttatggcatcta

SEQ ID NO: 697860 - DNA, 75 bp, synthetic construct
  source 1..75: mol_type = other DNA
cgccgggatgtaaggggcaacgccgtttcgcgcacgcgctctccgtcgttgcggcgggtccctgctcattgcctg

SEQ ID NO: 697861 - DNA, 75 bp, synthetic construct
  source 1..75: mol_type = other DNA
gcgccgtggcctgcgctcctggcatcccggcaaaaagacgccgggatgtaaggagcaacgccgtttcgcaaaccg

SEQ ID NO: 697862 - DNA, 75 bp, synthetic construct
  source 1..75: mol_type = other DNA
cgtggcctgcgctcccggcatcccggcaaaaggccgccgggatgtaaggggcaacgccgtttcgcaaaccgcgct

SEQ ID NO: 697863 - DNA, 75 bp, synthetic construct
  source 1..75: mol_type = other DNA
tacgatgcttcatttcgtggcgttccgttttcggtggagagcgacgagggttcgttcggacgccgcgttcaggtc

SEQ ID NO: 697864 - DNA, 75 bp, synthetic construct
  source 1..75: mol_type = other DNA
aggaaaatctcattttttatcccagactggaaagcgagttaatacaatgtattaacctgaagaacgaaggaaaag

SEQ ID NO: 697865 - DNA, 75 bp, synthetic construct
  source 1..75: mol_type = other DNA
agggggctgatatggcaacaaaagaaagaaaatcagaaacgtcttcgtcaactggctggcctgctggggcgcgag

SEQ ID NO: 697866 - DNA, 75 bp, synthetic construct
  source 1..75: mol_type = other DNA
gaccttctacgtgattttcgccctgctgattctgtcattggcgctttctacgacgattcgtcagccagagcagaa

SEQ ID NO: 697867 - DNA, 75 bp, synthetic construct
  source 1..75: mol_type = other DNA
atgcgtcccgtgaaactgatatcctggatcgaaatgccatctcccatccgggctttgttccgatcagggcattaa

SEQ ID NO: 697868 - DNA, 75 bp, synthetic construct
  source 1..75: mol_type = other DNA
gaaaaatcagcaggcggttgtggctgttggtggttccactgaacgtcagtccgatattattcatgtttctcatcc

SEQ ID NO: 697869 - DNA, 75 bp, synthetic construct
  source 1..75: mol_type = other DNA
tgtaatgggcaacgccgtttcgcgcatgcgctctccgtcgttgcagcgggtccctgctcattgtctgccgggtgc

SEQ ID NO: 697870 - DNA, 75 bp, synthetic construct
  source 1..75: mol_type = other DNA
ctgaaaggaggctatgtcatagacgcgattgatcctaaagatggtatcaacatctcccgcccagacgaatatata

SEQ ID NO: 697871 - DNA, 75 bp, synthetic construct
  source 1..75: mol_type = other DNA
gtaatagcaagttagatggcgaatacagccgcgttattgaagatgttaatcgtggtcggttttatgaattggcat

SEQ ID NO: 697872 - DNA, 75 bp, synthetic construct
  source 1..75: mol_type = other DNA
cgcgtgattgaagatgttaatcgtggtcggttttgcgaattgacatacaatgaggaattggaaaaaacatatttt

SEQ ID NO: 697873 - DNA, 75 bp, synthetic construct
  source 1..75: mol_type = other DNA
gtgaacatcaacaccacgataacgatcgatacagccctgaacaccggcctggcgctccttggttatttttacatc

SEQ ID NO: 697874 - DNA, 75 bp, synthetic construct
  source 1..75: mol_type = other DNA
atgaacgataaaaaactttatatctcggacgtcacgttgcgtgatggtatgcacgccattcgtcatcagtattca

SEQ ID NO: 697875 - DNA, 75 bp, synthetic construct
  source 1..75: mol_type = other DNA
aaaacggcgcaaacaggagctacgccagaaggcattagaagcgttctatgacgcatttgaacttaacagcattga

SEQ ID NO: 697876 - DNA, 75 bp, synthetic construct
  source 1..75: mol_type = other DNA
tccgctggatattgtggcccgcgtactggcggtgatgggaatggtcagcgtcggttttctgctgttcattctctt

SEQ ID NO: 697877 - DNA, 75 bp, synthetic construct
  source 1..75: mol_type = other DNA
tccggggctgatctttcatccgcctctgctttatatggggtatgtcggtttctcggtggcgtttgcttttgccat

SEQ ID NO: 697878 - DNA, 75 bp, synthetic construct
  source 1..75: mol_type = other DNA
caaccactaatcatgttttcacgttcgaacgagtaacgctttgcactattatccttatgcataaggatacgggac

SEQ ID NO: 697879 - DNA, 75 bp, synthetic construct
  source 1..75: mol_type = other DNA
atacttgatgaatataaaaataaatatccctcgatattcaaaattaagcatagagaaaataaagggatagtagct

SEQ ID NO: 697880 - DNA, 75 bp, synthetic construct
  source 1..75: mol_type = other DNA
tgctgtgcctggcgctaggaattgcgctgctgctgtccgtgtatccgctatggggcgtggcgcgcggagatgcgc

SEQ ID NO: 697881 - DNA, 75 bp, synthetic construct
  source 1..75: mol_type = other DNA
caatgcgctgtggtcgcgggaatctctgctgttagcgaacaacgttttgctggtcgccgcaatgctggtggtatt

SEQ ID NO: 697882 - DNA, 75 bp, synthetic construct
  source 1..75: mol_type = other DNA
gcttgcactggcttttgtgctgttctacgaagccatcaatggtttccatgacacagccaacgccgtggcaaccgt

SEQ ID NO: 697883 - DNA, 75 bp, synthetic construct
  source 1..75: mol_type = other DNA
aggcgtgaagcagggcagtgtcagcattgtgggcatgaccgctgacgggaattttgtggctgtggttgcggtgac

SEQ ID NO: 697884 - DNA, 75 bp, synthetic construct
  source 1..75: mol_type = other DNA
caccaattatctttaaaaatggcagcctgactggcacatggcgcgtagaacgcatctcaaactaccttccatata

SEQ ID NO: 697885 - DNA, 75 bp, synthetic construct
  source 1..75: mol_type = other DNA
gatattcgtgtcggtgatgcgagagaaacgctgaaagatctcggtggtcctgtcgattttattcttattgatggt

SEQ ID NO: 697886 - DNA, 75 bp, synthetic construct
  source 1..75: mol_type = other DNA
aaactctgaaagatctcggtggtcctgtcgattttattcttattgatggttttcctcttgctgatggcccaagcc

SEQ ID NO: 697887 - DNA, 75 bp, synthetic construct
  source 1..75: mol_type = other DNA
attgtgcatatgctgccgacggatctgctgcttaatatgggatcgtctcatggccttgccatggtgttctctatg

SEQ ID NO: 697888 - DNA, 75 bp, synthetic construct
  source 1..75: mol_type = other DNA
ctcttgcgttgacctgattcgttttgaaggcgttaacatccgcaactttgtcagcctgatctgctctgtactggg

SEQ ID NO: 697889 - DNA, 75 bp, synthetic construct
  source 1..75: mol_type = other DNA
acgagcaagccatcatcttaaaaccgggaatgttcgccgtgtttatgccaggtgaaccgcataaaccaggatgcg

SEQ ID NO: 697890 - DNA, 75 bp, synthetic construct
  source 1..75: mol_type = other DNA
agcccaatacaatgataagcaaagtaatattgcgcactatgacgaaacgataacacgactacgagaattacgtgc

SEQ ID NO: 697891 - DNA, 75 bp, synthetic construct
  source 1..75: mol_type = other DNA
ttccggtgctccgtttgcaatcagtgcttcaactatcctcggtaactgggctgcgccgctggtttctgcattcac

SEQ ID NO: 697892 - DNA, 75 bp, synthetic construct
  source 1..75: mol_type = other DNA
ttgtcagcctgatctgctctgtactgggtttgaagtggtcaacaaaaactggccaccgagttagagttttttcca

SEQ ID NO: 697893 - DNA, 75 bp, synthetic construct
  source 1..75: mol_type = other DNA
ggtaggccaggcaggtgtacgtgccgctaacgacggtaacttcccgaaagtttatggtgaagtcgacagcaacgg

SEQ ID NO: 697894 - DNA, 75 bp, synthetic construct
  source 1..75: mol_type = other DNA
gccccattcgtgatccccaggttatacgtgttctggaacgcatgaataatgaacgtaaacatcccccgcaggaga

SEQ ID NO: 697895 - DNA, 75 bp, synthetic construct
  source 1..75: mol_type = other DNA
tgggagcagccagccagacgctgaatcaacaggcggtaaccgccagtaatctggccaatgcctctacgcccggtt

SEQ ID NO: 697896 - DNA, 75 bp, synthetic construct
  source 1..75: mol_type = other DNA
cgcccgctggacgttgcgttgcagcaggatggctggctggccgtgcagaccgctgacggcagcgaagggtatacg

SEQ ID NO: 697897 - DNA, 75 bp, synthetic construct
  source 1..75: mol_type = other DNA
ttaatgatgaaggagaagaacaacaatggcagtcaacccacttattttttggatttcttaattttcgtctgataa

SEQ ID NO: 697898 - DNA, 75 bp, synthetic construct
  source 1..75: mol_type = other DNA
gtaataaaatggtagtgaatcttatcacaaatgtattacagggatattgcgaaacgatctatagcatctctgaaa

SEQ ID NO: 697899 - DNA, 75 bp, synthetic construct
  source 1..75: mol_type = other DNA
cattcgccagccgggggcacagtcttccgaacaaaccaccttaccctccggattacaaatcggcacgggggtacg

SEQ ID NO: 697900 - DNA, 75 bp, synthetic construct
  source 1..75: mol_type = other DNA
tgggggccgccagccagacgctgaatcagcaagcggtaactgccagtaatctggcgaatgcatctacacctggtt

SEQ ID NO: 697901 - DNA, 75 bp, synthetic construct
  source 1..75: mol_type = other DNA
agcgtcgttatgaggatttagaatatgcccgcgaaatgtcggcatttttcatcaaacagttattgcgcaacggca

SEQ ID NO: 697902 - DNA, 75 bp, synthetic construct
  source 1..75: mol_type = other DNA
aagccgatttcgtggtgatggaaccaacagcaacgccgcttcagcagttgcgctatgacaattctgtttctttag

SEQ ID NO: 697903 - DNA, 75 bp, synthetic construct
  source 1..75: mol_type = other DNA
ctgcgtgaagaatgggacatcagccagaaaaatgtggtgttcaacgataaacgctttggctgcgtgtacaacctg

SEQ ID NO: 697904 - DNA, 75 bp, synthetic construct
  source 1..75: mol_type = other DNA
aaaaaatgtgcctggtgcatatcggaaagaatctgcccgcagaaaaaaaaagccgaatttctggcaactctaatt

SEQ ID NO: 697905 - DNA, 75 bp, synthetic construct
  source 1..75: mol_type = other DNA
aaaaaatgtgcctggtgcacattggaaataatctgccagcagaaaaaaaagctgagtttctggcaactctgattg

SEQ ID NO: 697906 - DNA, 75 bp, synthetic construct
  source 1..75: mol_type = other DNA
ttgttactactgatggcattgtgctcgaagttatcctggagggaaaacgtattggctacgtgattaaaacagaaa

SEQ ID NO: 697907 - DNA, 75 bp, synthetic construct
  source 1..75: mol_type = other DNA
ccaaaaagttggcagaagcgcgtgctcatcacgctaataatctgcgaaacagctccattcacttcaacgaagaaa

SEQ ID NO: 697908 - DNA, 75 bp, synthetic construct
  source 1..75: mol_type = other DNA
tttgcgcggccagagacgttgcagctacacgacgatctgggcaggattaacttctcgtgcatcctggaaggcaca

SEQ ID NO: 697909 - DNA, 75 bp, synthetic construct
  source 1..75: mol_type = other DNA
cgctgacagagctggagatagccgaagcggaacaggtgacaaccatcaacgttaaaaccggagagcagacagcat

SEQ ID NO: 697910 - DNA, 75 bp, synthetic construct
  source 1..75: mol_type = other DNA
gcggctgcaaactttgccactctgaccgaacgggagattgctgaagcggaggaagtggcaacaatcaatattaag

SEQ ID NO: 697911 - DNA, 75 bp, synthetic construct
  source 1..75: mol_type = other DNA
ataaagcgttagacatgacagagctttccctaaaggtggcaatcaaagttatagaccgccacacacgggaaggat

SEQ ID NO: 697912 - DNA, 75 bp, synthetic construct
  source 1..75: mol_type = other DNA
caaacatgccgaccgaaaacatgaatcaggggcgacaaatgaccaaaatgcgcagagacagaacacagcaaaaat

SEQ ID NO: 697913 - DNA, 75 bp, synthetic construct
  source 1..75: mol_type = other DNA
aatttttacggacgccaaaaacgacaattcagggtggcgttctgagaattaatgtgaataataaccattatcaac

SEQ ID NO: 697914 - DNA, 75 bp, synthetic construct
  source 1..75: mol_type = other DNA
aagtgcgtccgatacgctgtatcaatactttggtcagcatggggataaagtggtgcagccgctggtgcaaaagct

SEQ ID NO: 697915 - DNA, 75 bp, synthetic construct
  source 1..75: mol_type = other DNA
ctcgacgatttacgtcacctggaatcagtcgtcactaacaaaatcagcgagattgaagccgatctggaaaaactg

SEQ ID NO: 697916 - DNA, 75 bp, synthetic construct
  source 1..75: mol_type = other DNA
cgaagtggatcttaaacgtaaaattctcgatgacttgcgtcacctggagtcagtggtgaccaataagatcagcga

SEQ ID NO: 697917 - DNA, 75 bp, synthetic construct
  source 1..75: mol_type = other DNA
gcatggcaggcactgcgcgccagtgtgaagagttccaccatgaagatgattaccagctttgcagcgccattgaaa

SEQ ID NO: 697918 - DNA, 75 bp, synthetic construct
  source 1..75: mol_type = other DNA
attgtcaacagcgtcagtaaatccgagcgtgaaagcattatcgccgcgctgcacgggcagtcgatttttaacggt

SEQ ID NO: 697919 - DNA, 75 bp, synthetic construct
  source 1..75: mol_type = other DNA
attgtaaaacgcatacaactcactgccgatcatggcgatttacagttaagcgccgcgtcggtttatttcaaagca

SEQ ID NO: 697920 - DNA, 75 bp, synthetic construct
  source 1..75: mol_type = other DNA
catcccgaactgataagcgcattcatgaccacgacggcggcaaactttgccacgctgacagaacgggagattgcc

SEQ ID NO: 697921 - DNA, 75 bp, synthetic construct
  source 1..75: mol_type = other DNA
ctcctatgaattaacagtacagccaaatgatgataggtgggcaaaagtaccagtagatactatcaggaaaaaact

SEQ ID NO: 697922 - DNA, 75 bp, synthetic construct
  source 1..75: mol_type = other DNA
cttgaaaaagcggaaagagaagttgacgtatctcatctctcaacaaaataccgcccggcagaaatttcgcctcat

SEQ ID NO: 697923 - DNA, 75 bp, synthetic construct
  source 1..75: mol_type = other DNA
tctggatgcctggcaatccatgattgatgaacagtggcaggaaggcattgtggccgtatgcagtcacaatacgct

SEQ ID NO: 697924 - DNA, 75 bp, synthetic construct
  source 1..75: mol_type = other DNA
tatcggctggcttattatcatcgtctttaactgccaggcgctgagagatcccctcataatttccccaaaacgtaa

SEQ ID NO: 697925 - DNA, 75 bp, synthetic construct
  source 1..75: mol_type = other DNA
tatcggctggctgattatcatcgtctttaactgccaggcgggtacaccgggtgaaaaccgctttgggccagaccc

SEQ ID NO: 697926 - DNA, 75 bp, synthetic construct
  source 1..75: mol_type = other DNA
acggtattctggtgtttttaccgtggtgggcagttcagttccgccgcctgcacgacaccgaccgctcggcgtggt

SEQ ID NO: 697927 - DNA, 75 bp, synthetic construct
  source 1..75: mol_type = other DNA
ctgacagagcgggagattgccgaagcggaacaggtaacaaccatcaacgttaaaaccggagaggtggaatcatga

SEQ ID NO: 697928 - DNA, 75 bp, synthetic construct
  source 1..75: mol_type = other DNA
atcagaagaaaccacataaccgcgccattgaccttacagagcactggctgagggtggcgataaaaatcatcgacc

SEQ ID NO: 697929 - DNA, 75 bp, synthetic construct
  source 1..75: mol_type = other DNA
atgaccagaaaaaccagagataagacagcgccaaaatatcgcgcattagacatgacagagcacgccttaaaggtg

SEQ ID NO: 697930 - DNA, 75 bp, synthetic construct
  source 1..75: mol_type = other DNA
gcggcaaactttgccacgatgacagaacgggagattgccgaagcggaaaaggtgacaaccatcaacgttaaaacc

SEQ ID NO: 697931 - DNA, 75 bp, synthetic construct
  source 1..75: mol_type = other DNA
atgcgcagagacagaacagagccgaaatataaagcgttagacatgacagagcacgccttaaaggtggcaatcagg

SEQ ID NO: 697932 - DNA, 75 bp, synthetic construct
  source 1..75: mol_type = other DNA
atgaccagaaaaaccagagataagacagcgccaaaatataaagcgttagacatgacagagcacgccttaaaggtg

SEQ ID NO: 697933 - DNA, 75 bp, synthetic construct
  source 1..75: mol_type = other DNA
tgttcatccgcaatccgttgatgcgctgtttgaagccgccagtcatatcaatatgcgtatgattgccggtaaggt

SEQ ID NO: 697934 - DNA, 75 bp, synthetic construct
  source 1..75: mol_type = other DNA
cgcgacgccagatcaggtttacgccgcactgctggtagccgaccagtacggtcagcgtttcctgcaagagtggga

SEQ ID NO: 697935 - DNA, 75 bp, synthetic construct
  source 1..75: mol_type = other DNA
attgtcgacaccaaaatcgttgctggcgcacctgcacgtctgttagcggcgggtatcggcgatgcgctggcaacc

SEQ ID NO: 697936 - DNA, 75 bp, synthetic construct
  source 1..75: mol_type = other DNA
acagaagattgtatgcctgggatattctgcagaaaaaacagtctgacataccgaaaaggattaaaggttatattc

SEQ ID NO: 697937 - DNA, 75 bp, synthetic construct
  source 1..75: mol_type = other DNA
ctggccgcagatagtaatattaccaaagaaaagatttgcgagaaatataaatcgaccattgaggcgtttaaaaaa

SEQ ID NO: 697938 - DNA, 75 bp, synthetic construct
  source 1..75: mol_type = other DNA
tctcaggctgaaaggtgaactgacaccagcgttattacagacacttatccgcgaaatgaaagggagcagccacta

SEQ ID NO: 697939 - DNA, 75 bp, synthetic construct
  source 1..75: mol_type = other DNA
tatgccattccgtgtacgttatgggcgctggcatccggtttttttgttgcaggttatctgctgcctttatgtgca

SEQ ID NO: 697940 - DNA, 75 bp, synthetic construct
  source 1..75: mol_type = other DNA
ctcatccccacgcaggatacacgggatatcattgccgctgccgtcagaattctggacaggatatgggtggatggc

SEQ ID NO: 697941 - DNA, 75 bp, synthetic construct
  source 1..75: mol_type = other DNA
ggtttcgcagttgaacctctttgatgatacacagccccggagcaacagtaaccagctgatgaaagtcgtggacag

SEQ ID NO: 697942 - DNA, 75 bp, synthetic construct
  source 1..75: mol_type = other DNA
aatcgaaaccgtggctgcgctgtgtcatgccgttggtctgccaattaccctggcgcaactggatattaaagaaga

SEQ ID NO: 697943 - DNA, 75 bp, synthetic construct
  source 1..75: mol_type = other DNA
ctatcgcggcaaactgatagtaccgggctttgtcgatacacatatccattatccgcaaagtgaaatggtcggtgc

SEQ ID NO: 697944 - DNA, 75 bp, synthetic construct
  source 1..75: mol_type = other DNA
tttgtttctgttgtgttttttgtgggggcaattgtgggatggatttcggtgtcatattacagccgcataacctgt

SEQ ID NO: 697945 - DNA, 75 bp, synthetic construct
  source 1..75: mol_type = other DNA
caccagatattcgctgactggcctctttccggtgaatattcctgcatgcaactggcccgggctctgttcccgggg

SEQ ID NO: 697946 - DNA, 75 bp, synthetic construct
  source 1..75: mol_type = other DNA
cggagccggataataaaatcccggcaccagtgcagatacctgaacagataaatacaccgcccgacagtctgtgct

SEQ ID NO: 697947 - DNA, 75 bp, synthetic construct
  source 1..75: mol_type = other DNA
agtgcagatacctgaacagataaatacactgccagacagtctgtgctgcgagctggttctgccggccggaactct

SEQ ID NO: 697948 - DNA, 75 bp, synthetic construct
  source 1..75: mol_type = other DNA
ggattgtgttgtgaccacagatgtgggacagcatcagatgtgggccgcgcagcacattgcccatactcgtccgga

SEQ ID NO: 697949 - DNA, 75 bp, synthetic construct
  source 1..75: mol_type = other DNA
tgttcgacgaaccgacatcggcgctggatccggagatgatcaacgaagtactggacgtgatggtcgaactggcga

SEQ ID NO: 697950 - DNA, 75 bp, synthetic construct
  source 1..75: mol_type = other DNA
aatggtatggtcactttcaggtgctgaccgactgctcaaccgaagtgaaaaaaggcgaagtagtggtggtttgcg

SEQ ID NO: 697951 - DNA, 75 bp, synthetic construct
  source 1..75: mol_type = other DNA
aacgccggagccggataataaaatcccggcaccagtgcagatacctgaacagatgcccgacagtctgtgctgtga

SEQ ID NO: 697952 - DNA, 75 bp, synthetic construct
  source 1..75: mol_type = other DNA
tggcgcaggcggttcctgctctacatgaatttctcgctgccacaaaaatgcctgccacctgcacgctgaaagggc

SEQ ID NO: 697953 - DNA, 75 bp, synthetic construct
  source 1..75: mol_type = other DNA
accgaacgataccgtcgtctgtatctccggtgacggctctttcatgatgaatgtacaagagctgggcaccgtaaa

SEQ ID NO: 697954 - DNA, 75 bp, synthetic construct
  source 1..75: mol_type = other DNA
catcgccacgtctggtccaggtgcaaccaacctgataaccgggcttgcggacgcgctgttagattccatccccgt

SEQ ID NO: 697955 - DNA, 75 bp, synthetic construct
  source 1..75: mol_type = other DNA
gtcgttagcctgcaccaagcacagtttcctggtgcaatcactggaagagttaccgcgtatcatggccgaagcgtt

SEQ ID NO: 697956 - DNA, 75 bp, synthetic construct
  source 1..75: mol_type = other DNA
gcaccgtttatcggcacggacgcatttcaggaagtggatgtcctgggattgtcgttagcctgtaccaagcacagc

SEQ ID NO: 697957 - DNA, 75 bp, synthetic construct
  source 1..75: mol_type = other DNA
aaaccacccttactgataaccccgatttcctcatgttagccagcgccttcggcatccctggccaacacatcaccc

SEQ ID NO: 697958 - DNA, 75 bp, synthetic construct
  source 1..75: mol_type = other DNA
ggcaaatggatgattatccagttgcatgacctgtgcattcacctgtttagccaggccgcgttgctggtgcattaa

SEQ ID NO: 697959 - DNA, 75 bp, synthetic construct
  source 1..75: mol_type = other DNA
gcccgcttcctcggtagtttgataattgcgccgcgtgtaagcgatccttctcgcctgatttccgcgctgcgagtg

SEQ ID NO: 697960 - DNA, 75 bp, synthetic construct
  source 1..75: mol_type = other DNA
cctgcgtttgtttattacagggagcgcatgcagcctattacggttttagcgctatttactggcaggcagctgggt

SEQ ID NO: 697961 - DNA, 75 bp, synthetic construct
  source 1..75: mol_type = other DNA
gttgatagtggtgcaaattctgcattgcggcaccttcacggtctgccacctggccgccatgcgttatattgctgc

SEQ ID NO: 697962 - DNA, 75 bp, synthetic construct
  source 1..75: mol_type = other DNA
tttcacactctcggcaccatttgtcttttatacattaatcggttcagttcttaatgccgttattcatttcatctt

SEQ ID NO: 697963 - DNA, 75 bp, synthetic construct
  source 1..75: mol_type = other DNA
ctctaacagaggctatattagccattagaggtatagataaatacgcgtcatacaaaaccataaaaacaataaaaa

SEQ ID NO: 697964 - DNA, 75 bp, synthetic construct
  source 1..75: mol_type = other DNA
gcgtgctgattaaagacgaccagaaccgcaatatgttcgaacgcggcagcgcgcagattatgccgttctttaaaa

SEQ ID NO: 697965 - DNA, 75 bp, synthetic construct
  source 1..75: mol_type = other DNA
tgattttataacatctgctatagaaatcccacctaactcacaggatttctataattatgaagataaattcaagaa

SEQ ID NO: 697966 - DNA, 75 bp, synthetic construct
  source 1..75: mol_type = other DNA
atgtaagcaagcatacctatctttcaacagttttaattgtaagtgaagacggcacacaattgctcgtaaaaacaa

SEQ ID NO: 697967 - DNA, 75 bp, synthetic construct
  source 1..75: mol_type = other DNA
atactttatgatgtgttgattacctgtgaagtcgaagactatgttaaaagtggaagaggtaaagatgtatctgag

SEQ ID NO: 697968 - DNA, 75 bp, synthetic construct
  source 1..75: mol_type = other DNA
ccgcttgattacggcaaagtgcgactgtggggctcggtggcgtttgtcattggctcggcgctgacgggcaaactg

SEQ ID NO: 697969 - DNA, 75 bp, synthetic construct
  source 1..75: mol_type = other DNA
gttgatattagtacaaattctgcactgcggtacctttactgtttgccacctggccgctatgcgctatatagccgc

SEQ ID NO: 697970 - DNA, 75 bp, synthetic construct
  source 1..75: mol_type = other DNA
gcctattacggttttagcgccatttactggcaggcagctggctactcggcctcggcggtggggtatttgtggtcg

SEQ ID NO: 697971 - DNA, 75 bp, synthetic construct
  source 1..75: mol_type = other DNA
tagcatcacgaattgagaagcgattgaataaagcttttaaagttaaccctacgcctttaaatgattctctcaaac

SEQ ID NO: 697972 - DNA, 75 bp, synthetic construct
  source 1..75: mol_type = other DNA
cgaagtttcagacgtcagagcgtcggcgcaggcaaaatgaactgagcgctgaaaaatacacccgccagcgccgta

SEQ ID NO: 697973 - DNA, 75 bp, synthetic construct
  source 1..75: mol_type = other DNA
ttagggctatttccacgcttggaaatgtagcaaatacagcagcaggaagaatcaattcacgttctgctggtagtg

SEQ ID NO: 697974 - DNA, 75 bp, synthetic construct
  source 1..75: mol_type = other DNA
actttacaaggtcactgactaatttacttaattcactaggtggtcaatctaaaaatcttggtgaacattttggcg

SEQ ID NO: 697975 - DNA, 75 bp, synthetic construct
  source 1..75: mol_type = other DNA
aatatattaggtatatctgttattgaaaaattagaaacacagagcattaataagaagcgtaacaaatgtattaac

SEQ ID NO: 697976 - DNA, 75 bp, synthetic construct
  source 1..75: mol_type = other DNA
gctcaatttttataattcctttgcaatattcaattgcattgttgggattcatggctgtatatacatagatgcatt

SEQ ID NO: 697977 - DNA, 75 bp, synthetic construct
  source 1..75: mol_type = other DNA
taaagaaagcccggaaccggtcagacaactggagcgatggatggtacccaacaagctgatacaccggagccaggc

SEQ ID NO: 697978 - DNA, 75 bp, synthetic construct
  source 1..75: mol_type = other DNA
aaacgttattaagggcttgcaaagagttgaaaaggcagctttgcagtcagcacaaagaattgaacgtaatttgaa

SEQ ID NO: 697979 - DNA, 75 bp, synthetic construct
  source 1..75: mol_type = other DNA
tatcgatgaaaggacagcatcacacatcaaccgtatgcaggaagataccctgattagctcagcttacccagagga

SEQ ID NO: 697980 - DNA, 75 bp, synthetic construct
  source 1..75: mol_type = other DNA
tcagaaagttttaaaaggcttggaaaaagccgagaaacaaacgatgcaggtagcatcacgaattgagaagcgatt

SEQ ID NO: 697981 - DNA, 75 bp, synthetic construct
  source 1..75: mol_type = other DNA
tctaatgtgattggtacatccagattaatgggtttaagcactgatgaaattaacgggattctgaaagctttcgag

SEQ ID NO: 697982 - DNA, 75 bp, synthetic construct
  source 1..75: mol_type = other DNA
atgtgtatccaccttaacttaatgatttttaccaaaatcattaggggattcatcagagctttgcagtcagcacaa

SEQ ID NO: 697983 - DNA, 75 bp, synthetic construct
  source 1..75: mol_type = other DNA
atctgtagctgatgcaattaccaaagtaatgattgtcggtatggcaactgatgtgattaactccattgttaaacc

SEQ ID NO: 697984 - DNA, 75 bp, synthetic construct
  source 1..75: mol_type = other DNA
aagatcagaaagccgataatgcgcagccttacttctttaatccctcaaccggggtaaatatcagcggtgacaaca

SEQ ID NO: 697985 - DNA, 75 bp, synthetic construct
  source 1..75: mol_type = other DNA
cgggtgaaaatgccattggcattcagatcgacggtgataatgcgacatttgttaacgttggtgatatttccgcga

SEQ ID NO: 697986 - DNA, 75 bp, synthetic construct
  source 1..75: mol_type = other DNA
ctgttccgccagacgacggcggtgatacgccagttccggatgatggcggtgatacgcctgttccgccagacgacg

SEQ ID NO: 697987 - DNA, 75 bp, synthetic construct
  source 1..75: mol_type = other DNA
atgggactgacgccacctctgtttgatctcccgtggtatgagaatgtttctgaaattttttggacatttagtctg

SEQ ID NO: 697988 - DNA, 75 bp, synthetic construct
  source 1..75: mol_type = other DNA
ggaatactaatacggtcattaaccagggaaccatcaacctggagaaaaatgaaaattacaacgattctctcggtg

SEQ ID NO: 697989 - DNA, 75 bp, synthetic construct
  source 1..75: mol_type = other DNA
attgattctggtgcgaaggcgacaaacaacggtgaagtggaactgaaaaatatcggttttgcggctgcctggaat

SEQ ID NO: 697990 - DNA, 75 bp, synthetic construct
  source 1..75: mol_type = other DNA
cgaaatggataaatattacacccaggaaaattataaagacgatgcgtttgcgaaagggaaaacgctgcaccagac

SEQ ID NO: 697991 - DNA, 75 bp, synthetic construct
  source 1..75: mol_type = other DNA
catgttttcagttggttaacgcaatgtaatcaggcatttcccctggcagaatgttcagaagaaaatccagttcca

SEQ ID NO: 697992 - DNA, 75 bp, synthetic construct
  source 1..75: mol_type = other DNA
tttgttaagtattatcgccgctattctcttgaggttttaatggcatttgcggtacttcagcacgataaaaaaact

SEQ ID NO: 697993 - DNA, 75 bp, synthetic construct
  source 1..75: mol_type = other DNA
atggacgaatcaagaaagcagtttgaggaatacgttgccaaaaaattgagattaccattcgagatgataaccgag

SEQ ID NO: 697994 - DNA, 75 bp, synthetic construct
  source 1..75: mol_type = other DNA
gctcactgaagcttgggaccatccatgcatcagagcttattcgttcactgttgagaagtagccgaccatctggtc

SEQ ID NO: 697995 - DNA, 75 bp, synthetic construct
  source 1..75: mol_type = other DNA
attcttaaaaaatctggaagcctttgaacctgtagccgaatctggtagtgactccaacttactgatagtgtttta

SEQ ID NO: 697996 - DNA, 75 bp, synthetic construct
  source 1..75: mol_type = other DNA
atgactgacaaatcattaaagaaattatcttcatctaggaaaaaacaacgcaaaaacgcggtaagcgaacatgaa

SEQ ID NO: 697997 - DNA, 75 bp, synthetic construct
  source 1..75: mol_type = other DNA
cgagtggtttctgttttgtccgtgcgatacaccctatattccccaggatttagtctcccgacttaaccatcagcg

SEQ ID NO: 697998 - DNA, 75 bp, synthetic construct
  source 1..75: mol_type = other DNA
aatgcaccttttccccggagttcaggctcgaagctatcgagcaagtggttaaataccagcgcgatgtcagagaag

SEQ ID NO: 697999 - DNA, 75 bp, synthetic construct
  source 1..75: mol_type = other DNA
cgctggcactcgagctcaaccctgactatttgcgtaaatggatacggttgtataagcaggaacttcagggtattg

SEQ ID NO: 698000 - DNA, 75 bp, synthetic construct
  source 1..75: mol_type = other DNA
tggtgtccggccagcgaaataaacgccgtgtaatcaactatcgaatgctggaatacacagacgttacagaaacgc

SEQ ID NO: 698001 - DNA, 75 bp, synthetic construct
  source 1..75: mol_type = other DNA
ggacaatattgataaagtcctgtcgccccggaaatgaggaggcgttggctggtgaacacgccgatcatctcttgt

SEQ ID NO: 698002 - DNA, 75 bp, synthetic construct
  source 1..75: mol_type = other DNA
gtggttaatgctaatcgtcatcaggaaatctatcaggcaagcggtctgaaagtgattgaagattcactggcggat

SEQ ID NO: 698003 - DNA, 75 bp, synthetic construct
  source 1..75: mol_type = other DNA
tggcctgtgggcaatgggatgtcggggaacaacgggttacagtcaggcgatgaatgttcggctggctaatcgttc

SEQ ID NO: 698004 - DNA, 75 bp, synthetic construct
  source 1..75: mol_type = other DNA
aaaagcgccgacgcctgccgcaggaaataacaccacgcggattgcgaccactgcgtttgtacaggccgctattac

SEQ ID NO: 698005 - DNA, 75 bp, synthetic construct
  source 1..75: mol_type = other DNA
ctgattaaccagaaacgcatcgcgccgctgaatcttctgagtgttgaccagaacaaccagagccagattattgcg

SEQ ID NO: 698006 - DNA, 75 bp, synthetic construct
  source 1..75: mol_type = other DNA
aggattatcgcggcaagaagccgaagctttttatgcccgaaccgatggccccaatgtcgagcgtgtgctgatgaa

SEQ ID NO: 698007 - DNA, 75 bp, synthetic construct
  source 1..75: mol_type = other DNA
tagactcgcttgatactattgcgaaaaatgaaatcgcttatgcgcttgaaaattatgatacagccggtaatgact

SEQ ID NO: 698008 - DNA, 75 bp, synthetic construct
  source 1..75: mol_type = other DNA
ttattggcggtggtacgggaagcgtggcgagatggatgttaagtatgcggtttaacccattgcatcagactattc

SEQ ID NO: 698009 - DNA, 75 bp, synthetic construct
  source 1..75: mol_type = other DNA
ggccttttggccgcaaatacgaaatggctatataaataatttttctgtttctacgttgtatcgacgcaaagggtt

SEQ ID NO: 698010 - DNA, 75 bp, synthetic construct
  source 1..75: mol_type = other DNA
atgggagccgagaatacagtatctttgtcaataccagaacataaagagctacaatcaaaatatgaaaattcatta

SEQ ID NO: 698011 - DNA, 75 bp, synthetic construct
  source 1..75: mol_type = other DNA
atataaatatgatgcaataataatacttggcgatagatatgaaatgctttctgtagctatagcggcatctataca

SEQ ID NO: 698012 - DNA, 75 bp, synthetic construct
  source 1..75: mol_type = other DNA
atgaatgccggaaaaagttttattgatcggctggaaagtagcggcttattaaccgcgacgagccatattgtggtc

SEQ ID NO: 698013 - DNA, 75 bp, synthetic construct
  source 1..75: mol_type = other DNA
ttttcacaaattcgttcgctgaaatcgccacggcccgtgcatctgaccgatttgctctggaaacccgtcaacatc

SEQ ID NO: 698014 - DNA, 75 bp, synthetic construct
  source 1..75: mol_type = other DNA
atgacaaacaataacgagctaccgactaccttgtcggcactgctgcgggattattccctggcggagggcattcag

SEQ ID NO: 698015 - DNA, 75 bp, synthetic construct
  source 1..75: mol_type = other DNA
aggatctgcttgtcgccctcgcctgtaacgcccatggtaaaacgtcagatgccgatgcccaccgcagccgcgcgt

SEQ ID NO: 698016 - DNA, 75 bp, synthetic construct
  source 1..75: mol_type = other DNA
taataaatttgatgctgtcatgatattaggtgatcgatatgagattttatcagtagccattgccgccgcaattca

SEQ ID NO: 698017 - DNA, 75 bp, synthetic construct
  source 1..75: mol_type = other DNA
tatcttgcccttaataaatattcgcagggtttaataggtaattcgtcatcgggacttattgaaataccatcttta

SEQ ID NO: 698018 - DNA, 75 bp, synthetic construct
  source 1..75: mol_type = other DNA
aaagttacaattttatattcattggctctaattctgacactggttctgatgagataatgaaggagattttaaggt

SEQ ID NO: 698019 - DNA, 75 bp, synthetic construct
  source 1..75: mol_type = other DNA
ggccgaaagagctattaagcaaaacttactactcagtcggtggcggatttatcgttgaagaagaacacttcggtc

SEQ ID NO: 698020 - DNA, 75 bp, synthetic construct
  source 1..75: mol_type = other DNA
gaactgctgaaaatgtgtgattacaatgggctgtctatttctggtctgatgatgcaaaacgaactggcgttgcgc

SEQ ID NO: 698021 - DNA, 75 bp, synthetic construct
  source 1..75: mol_type = other DNA
atttttgtagagtatatggctgtcgatatatgatttctgtgagacctgaagaatatctagctttgataaaatatt

SEQ ID NO: 698022 - DNA, 75 bp, synthetic construct
  source 1..75: mol_type = other DNA
tatgccacatgtttacagctcgattatagaccctgatacgggatatacccgaccggatgatgtagccgttttgct

SEQ ID NO: 698023 - DNA, 75 bp, synthetic construct
  source 1..75: mol_type = other DNA
tagcccggtggatatgtttaatgcagcgtgtggcccggaatcattaatcagggctgcagggcaaattgattgctc

SEQ ID NO: 698024 - DNA, 75 bp, synthetic construct
  source 1..75: mol_type = other DNA
tgacagatccaaattcggctgtttataccttcgccgggcatgtctttaactgggttggtgtaacgcacataatct

SEQ ID NO: 698025 - DNA, 75 bp, synthetic construct
  source 1..75: mol_type = other DNA
aaaattaaactttggcagggcttactggcaggtgctttagcccaactttttgttcatatgatttcattccctctc

SEQ ID NO: 698026 - DNA, 75 bp, synthetic construct
  source 1..75: mol_type = other DNA
cagaaggaaacgacaaacaatttaaccaggtctttgctgaaatggttgcctggcataatgtgacaggccgtaccg

SEQ ID NO: 698027 - DNA, 75 bp, synthetic construct
  source 1..75: mol_type = other DNA
atctcccgtggtatgagaatgtctctgaaatttttggacatttagtatggttctggtccattgaaattattcgta

SEQ ID NO: 698028 - DNA, 75 bp, synthetic construct
  source 1..75: mol_type = other DNA
gcgtgtggtccggaatcattaatcagggcggcaggacaaattgattgctcccgtaactttcttaatcctccgtat

SEQ ID NO: 698029 - DNA, 75 bp, synthetic construct
  source 1..75: mol_type = other DNA
acttctttaagcgcgtgaccggggtaaacaccactgaacgtacggatgatgcgacgcttatccagacgcgccacc

SEQ ID NO: 698030 - DNA, 75 bp, synthetic construct
  source 1..75: mol_type = other DNA
agatcagataattatcttccaggtgccgatccccgaaccgctgcgctttatcgagccgcgcgaaacggaaacccg

SEQ ID NO: 698031 - DNA, 75 bp, synthetic construct
  source 1..75: mol_type = other DNA
gatcaatatgttgcagtgatggaaagcgtgcaacatatcgttgatatggttgaagccggatgggacctggtgcta

SEQ ID NO: 698032 - DNA, 75 bp, synthetic construct
  source 1..75: mol_type = other DNA
accaccaacgccgtgtcgattcgcaacttctttaagcgcgtgaccggggtaaacaccactgaacgtacggacgat

SEQ ID NO: 698033 - DNA, 75 bp, synthetic construct
  source 1..75: mol_type = other DNA
gatttcgacgatcacccgttcaccgttcagcagtgggatgaaccatgcgccatctgcggatcgacccacagctat

SEQ ID NO: 698034 - DNA, 75 bp, synthetic construct
  source 1..75: mol_type = other DNA
ggcgtgatgcaggtgaagctgtatgaagatatcgcccgcttcggtcatatcgccactacctacgcctatccggtg

SEQ ID NO: 698035 - DNA, 75 bp, synthetic construct
  source 1..75: mol_type = other DNA
cagcgaactggataacgtcatggaatttgaagatatcgccgataacgcagcggacgcaccgactgaaacctgctt

SEQ ID NO: 698036 - DNA, 75 bp, synthetic construct
  source 1..75: mol_type = other DNA
ccatgtgctggtgaataacgcctatctcggcctgattcgtcagtcacaacgcgcctttgacatggactactgcgt

SEQ ID NO: 698037 - DNA, 75 bp, synthetic construct
  source 1..75: mol_type = other DNA
gctgcatgttaacaacctgttcgatcgtgaatacgtcgccagctgctttaacacttatggctgcttctggggcgc

SEQ ID NO: 698038 - DNA, 75 bp, synthetic construct
  source 1..75: mol_type = other DNA
aggtatcaccaccgcttttggtgttcctggagcagcaatcaatcctttctattcggcgatgcgtaagcacggcgg

SEQ ID NO: 698039 - DNA, 75 bp, synthetic construct
  source 1..75: mol_type = other DNA
ccaatatttcgatgggtagcgaactggataacgtcatggaatttgaagatatcgccgataacgcagcggacgcgc

SEQ ID NO: 698040 - DNA, 75 bp, synthetic construct
  source 1..75: mol_type = other DNA
ttcaaaccggaagatatttctccggcctttgaacaggcgaaagccttaatgaatcagtaccgtgttccggtggta

SEQ ID NO: 698041 - DNA, 75 bp, synthetic construct
  source 1..75: mol_type = other DNA
aaaaattataaataaacaggctttagaaaataaaaagtcaaactcatttagaagtgcatgggatttatttcataa

SEQ ID NO: 698042 - DNA, 75 bp, synthetic construct
  source 1..75: mol_type = other DNA
atggcgcacgacgaacaatggcttaccccgcggctgcaaacggcggcaacgctgtgtaaccagacgcccgccgcg

SEQ ID NO: 698043 - DNA, 75 bp, synthetic construct
  source 1..75: mol_type = other DNA
gggccgatgtggtccgcgacggcatcgtctgggatttcttcggtgcggtcaccattgttcgtcgccatctcgaca

SEQ ID NO: 698044 - DNA, 75 bp, synthetic construct
  source 1..75: mol_type = other DNA
tggcgtggtggtgttaactacctgtttgataatggtgtaacaccttacttcagctatagcgaatcgtttgaacct

SEQ ID NO: 698045 - DNA, 75 bp, synthetic construct
  source 1..75: mol_type = other DNA
attccgggcaggaccctctgcgtaacgcgctggcaataaaagatggcagccgctggacgcgcgatattctctgga

SEQ ID NO: 698046 - DNA, 75 bp, synthetic construct
  source 1..75: mol_type = other DNA
ggcaacgaatctttgtggtactgggatatatagaacaagaacaaagcaaatggttatcccaggataacgccatgc

SEQ ID NO: 698047 - DNA, 75 bp, synthetic construct
  source 1..75: mol_type = other DNA
cgtttccctgacttttataatctggatgcaataaaggagggagcagaggaaactgattcgataattaaagatctt

SEQ ID NO: 698048 - DNA, 75 bp, synthetic construct
  source 1..75: mol_type = other DNA
gccaaagcacgcaagctggaacagcaacaggctaatgcggtaccagaagaacaggttgatccgcgcaaagcggca

SEQ ID NO: 698049 - DNA, 75 bp, synthetic construct
  source 1..75: mol_type = other DNA
atgcggagccagaagaacagattgatccgcgcaaagcggcagttgccgcggctattgcccgcgttcaggccaaaa

SEQ ID NO: 698050 - DNA, 75 bp, synthetic construct
  source 1..75: mol_type = other DNA
cagggcaggtgggttgggaactgcagcgtgctctggcaccgctgggtaatctgattgctcttgatgttcactcca

SEQ ID NO: 698051 - DNA, 75 bp, synthetic construct
  source 1..75: mol_type = other DNA
ggcgaagctgggcgccctgatggtgcattactccaccgattatgtgttcgacggggaggggagccactatcgtca

SEQ ID NO: 698052 - DNA, 75 bp, synthetic construct
  source 1..75: mol_type = other DNA
acgacggcctatcctacgccggcgaagcgtccgctcaactcgcgcctgtcgaatgaaaaatttcagcaggcattc

SEQ ID NO: 698053 - DNA, 75 bp, synthetic construct
  source 1..75: mol_type = other DNA
tggcggtacaacaacctggcacgattatgccgctctggtatttgaagaagcgcgcaaagcagggattaaccttgc

SEQ ID NO: 698054 - DNA, 75 bp, synthetic construct
  source 1..75: mol_type = other DNA
ccgatcgcgcgttgcaatcgcatctcaacagcgtctctgctacctggcacgccttcggtcagaccaccaacaaaa

SEQ ID NO: 698055 - DNA, 75 bp, synthetic construct
  source 1..75: mol_type = other DNA
ccgtcgtgaatttggcgaaggtgagcaactgccatctgaacgcgaacttatggcgttctttaacgttgggcgtcc

SEQ ID NO: 698056 - DNA, 75 bp, synthetic construct
  source 1..75: mol_type = other DNA
cggtatcctgatttttataacgaagagatattcagggaggtgacagaagagagagaatcaacttttaaagaactt

SEQ ID NO: 698057 - DNA, 75 bp, synthetic construct
  source 1..75: mol_type = other DNA
atccgtcgtcacgatcccgatgaagccgatcgcgcattgcaatcgcatctcaacagcgtttctgccacctggcac

SEQ ID NO: 698058 - DNA, 75 bp, synthetic construct
  source 1..75: mol_type = other DNA
cgggcgtccttctgtgcgcgaagcgctggcagcgttaaaacgcaaaggtctggtgcaaataaacaacggcgaacg

SEQ ID NO: 698059 - DNA, 75 bp, synthetic construct
  source 1..75: mol_type = other DNA
ctggcagagatccctgggaacccgatctttatggcgatccacgttgctctgctcgactggctgatcgccgcccgt

SEQ ID NO: 698060 - DNA, 75 bp, synthetic construct
  source 1..75: mol_type = other DNA
ttttagccatgcggcgacgtcatttcccccaggtacggatgcgcgtatttccatcaacgtactggaatctgccgg

SEQ ID NO: 698061 - DNA, 75 bp, synthetic construct
  source 1..75: mol_type = other DNA
ggttgtggaaggggattgtacgtggccgcagtacgatcgacaaaagcatgatcctgttgaagatgcgttgcacgt

SEQ ID NO: 698062 - DNA, 75 bp, synthetic construct
  source 1..75: mol_type = other DNA
gctttttatgaccgtaccgacgggccgaatgttcgccgggtgctggaagagagtctgcctgcaaatttgacctta

SEQ ID NO: 698063 - DNA, 75 bp, synthetic construct
  source 1..75: mol_type = other DNA
agcagtggcgcacgttagcgcaattttgtgatttctcgatatttatcaacgcgcccgcatctgtgttacgggaac

SEQ ID NO: 698064 - DNA, 75 bp, synthetic construct
  source 1..75: mol_type = other DNA
actattccctccatcaaccacgcttctccatgctgagtcgtttggtgcagcagtggaagcactggatattcgccc

SEQ ID NO: 698065 - DNA, 75 bp, synthetic construct
  source 1..75: mol_type = other DNA
aagattgctgcgaagttgtgggaggagccacccctaaacgcaatattgcatcttattgggaaggagatattcctt

SEQ ID NO: 698066 - DNA, 75 bp, synthetic construct
  source 1..75: mol_type = other DNA
ctcaagccatccgaaatcccatcactgctcggctacaccgcgcgactgacccaggtgaaatgggatcgcctgaaa

SEQ ID NO: 698067 - DNA, 75 bp, synthetic construct
  source 1..75: mol_type = other DNA
ccaatgtcgagcgtgtgctgctgaatagttgtcaggccaatctgatattagagatgacggaagaaggcaggtatc

SEQ ID NO: 698068 - DNA, 75 bp, synthetic construct
  source 1..75: mol_type = other DNA
caccttttaataaaggatgtaagcgaagcctgtaacgtctcctattccgaagcactcacactcaccacgcctttt

SEQ ID NO: 698069 - DNA, 75 bp, synthetic construct
  source 1..75: mol_type = other DNA
atggccagaagttgcgtaacggatccgcgttggcgcgagctggtggcgctatatcgttatgactggattgcggcg

SEQ ID NO: 698070 - DNA, 75 bp, synthetic construct
  source 1..75: mol_type = other DNA
ggggattgtacgtggccgcagtacgatcgacaaaagcatgatcctgttgaagatgcgttgcacgttaccgcacca

SEQ ID NO: 698071 - DNA, 75 bp, synthetic construct
  source 1..75: mol_type = other DNA
gtctggtggggcgcaagctggcgggagggttatcgctggcagacgcagaagccttttatgaccgtaccgacgggc

SEQ ID NO: 698072 - DNA, 75 bp, synthetic construct
  source 1..75: mol_type = other DNA
ggctgaagatacaggcacagtaccagaacgaagagattgaaaatgtacataaaccgttgctgcacatgttggcgg

SEQ ID NO: 698073 - DNA, 75 bp, synthetic construct
  source 1..75: mol_type = other DNA
gctatcgccttgtataccaggttatagacgagaaagttgtcgttttcgtgatttctgttgggaaaagagaacgct

SEQ ID NO: 698074 - DNA, 75 bp, synthetic construct
  source 1..75: mol_type = other DNA
taacattccgctggatcagctctcagcccgcattaacgccaacccgaaaggacgctttatttatctggcgcgtca

SEQ ID NO: 698075 - DNA, 75 bp, synthetic construct
  source 1..75: mol_type = other DNA
cgctggcttttctgctcgggcgcgtagcgtggttacaggttatctccccggatatgctggttaaagagggcgaca

SEQ ID NO: 698076 - DNA, 75 bp, synthetic construct
  source 1..75: mol_type = other DNA
ggttaaccctgacatggctgagtacatcaaaaaactgaagctgccggggattcatctacgtgaagaatctcgccg

SEQ ID NO: 698077 - DNA, 75 bp, synthetic construct
  source 1..75: mol_type = other DNA
caaacaattcccggcgttacaggtgcatttaccgcagcacagtttgtttatgaccccgctggcgagcgcccgcgg

SEQ ID NO: 698078 - DNA, 75 bp, synthetic construct
  source 1..75: mol_type = other DNA
gccccccccaaacagcagatagtctgcagccggtcctttagagagcgcgtcacgacatatgaggccatgcgctag

SEQ ID NO: 698079 - DNA, 75 bp, synthetic construct
  source 1..75: mol_type = other DNA
ggtgcatatgatggaaagcgtggcgctaccgggcggcggtggcgtgaaggcggcgattaaaggctatcgtatcgc

SEQ ID NO: 698080 - DNA, 75 bp, synthetic construct
  source 1..75: mol_type = other DNA
tgtggatgaatgccgggagaggacggcggcgttgttaaggcctctgttgaaacgtatggtccgcctgctggcgtg

SEQ ID NO: 698081 - DNA, 75 bp, synthetic construct
  source 1..75: mol_type = other DNA
atggtaaccctgattgaaaaccctgagatgcatcatcaggccacgcaggttctcagccagctcagagcctttatt

SEQ ID NO: 698082 - DNA, 75 bp, synthetic construct
  source 1..75: mol_type = other DNA
acagatgtctggaaatataggggcaaatccataaaggaatggcgaaagctgggctcgacggtacgtgaacagttg

SEQ ID NO: 698083 - DNA, 75 bp, synthetic construct
  source 1..75: mol_type = other DNA
tgagtattgatgaacgcctgcaggcgctggtttatcgcgaactgaacaacgcggtggcctttaacaaggctgaat

SEQ ID NO: 698084 - DNA, 75 bp, synthetic construct
  source 1..75: mol_type = other DNA
aaagacgctaccggagagtgtatctggtcccctgagaagtccacacgcacctcagcttgtggggctcgctatggt

SEQ ID NO: 698085 - DNA, 75 bp, synthetic construct
  source 1..75: mol_type = other DNA
atgcactatcaggcttcacaggttctcaaccagctcagaatgttcattgctgaacaccagctaccggtcacagtc

SEQ ID NO: 698086 - DNA, 75 bp, synthetic construct
  source 1..75: mol_type = other DNA
aggacgttctggatatcgaaaaagagatcctgcgtattgaaaaagcctgcggtcgcgaagcaggcagcacggggc

SEQ ID NO: 698087 - DNA, 75 bp, synthetic construct
  source 1..75: mol_type = other DNA
gggtattacccgcgcggtagaaatcgctcacgcatctgaacgtttaatcggtatcgcgctgggcgcggaagacta

SEQ ID NO: 698088 - DNA, 75 bp, synthetic construct
  source 1..75: mol_type = other DNA
gtggatcacgcccgccgcgtcgtagaagccgctgaagccgccgctcgcgaaggcctcggcgtggtttccctgaac

SEQ ID NO: 698089 - DNA, 75 bp, synthetic construct
  source 1..75: mol_type = other DNA
caagccggagtacgataaaaccatctccacggcgattgtactcaacgcgctgaatacgcttggcatcaccgcaga

SEQ ID NO: 698090 - DNA, 75 bp, synthetic construct
  source 1..75: mol_type = other DNA
aaagaagtgatcaccgggaagctggatgaagtgaaagctaaagcaatggcctacgcttgcaagcaagcccaaaag

SEQ ID NO: 698091 - DNA, 75 bp, synthetic construct
  source 1..75: mol_type = other DNA
atgactgttcgctacctcaactttcaaatcaagaacattactggcggttgctatgactggtttgtcactctcgga

SEQ ID NO: 698092 - DNA, 75 bp, synthetic construct
  source 1..75: mol_type = other DNA
cacctgtcagaaatatgtcgataatccggcctgtacgctggcctcacgtcagtgcgcgttttattccgatgaggg

SEQ ID NO: 698093 - DNA, 75 bp, synthetic construct
  source 1..75: mol_type = other DNA
acacaggcgtgctgggcataccgggataaatatgtcacacagtccgcagataacggcacctgtcagaaatatgtc

SEQ ID NO: 698094 - DNA, 75 bp, synthetic construct
  source 1..75: mol_type = other DNA
gtgacacaggggcaggtactgaccggcagtggctgtactgctgacggtaactgtctgtccggcgggaacggtgac

SEQ ID NO: 698095 - DNA, 75 bp, synthetic construct
  source 1..75: mol_type = other DNA
tccccggaaggaactgaactgctgttcgcacgctgttccattttgcaggccgcgcgctctgcgggtattcaggcg

SEQ ID NO: 698096 - DNA, 75 bp, synthetic construct
  source 1..75: mol_type = other DNA
ttcgatacagtctattccgatgccaacaacgaagcgggattcctgcaagaagcggcacatataaaacaactgggc

SEQ ID NO: 698097 - DNA, 75 bp, synthetic construct
  source 1..75: mol_type = other DNA
taaaaaagcaggcggctattttaaccagcagattgtcgagccaattgccgggaaaaacggaccgctcggctatct

SEQ ID NO: 698098 - DNA, 75 bp, synthetic construct
  source 1..75: mol_type = other DNA
aggttatatcaagcgtctgcctgccgatccctggggcaatgattatgtcctcgttaatcctggtgaacatggtgc

SEQ ID NO: 698099 - DNA, 75 bp, synthetic construct
  source 1..75: mol_type = other DNA
cacgaattacacctgtgagcgggatttacaggtggagcagtactgcacacgaactgcccgtatggagctgcaggg

SEQ ID NO: 698100 - DNA, 75 bp, synthetic construct
  source 1..75: mol_type = other DNA
ggcatccatgtcattcacaagatgaattgctgtctgaattgaccacgagaaaatggagaaagtccaaatgtatgc

SEQ ID NO: 698101 - DNA, 75 bp, synthetic construct
  source 1..75: mol_type = other DNA
catctctgctcgttaagcaaagtccaggtatgcattacggtcacggctggatcgcgggtaaagatggtaagcgct

SEQ ID NO: 698102 - DNA, 75 bp, synthetic construct
  source 1..75: mol_type = other DNA
gcgtgaccaatctgaccgaattgctgccggggatcacccatgagcaggtttgcgaggcgattcgagaggcctttt

SEQ ID NO: 698103 - DNA, 75 bp, synthetic construct
  source 1..75: mol_type = other DNA
tatgtcgatctgccgttgttgcgacaactcgcggaaaacgaaacgtcagatcgtgcagcaatccacattcacgag

SEQ ID NO: 698104 - DNA, 75 bp, synthetic construct
  source 1..75: mol_type = other DNA
ttacagcaagaaccgttattcagcggcaaaccgcagctgcgcgtacacccggacgatctgcaacgcatcgatgaa

SEQ ID NO: 698105 - DNA, 75 bp, synthetic construct
  source 1..75: mol_type = other DNA
gaagtataaatgttatagcgggaattattgttgttagtttgtcctggctgttaatatcacgctttgacattctgg

SEQ ID NO: 698106 - DNA, 75 bp, synthetic construct
  source 1..75: mol_type = other DNA
agtgatatcgtgtcgctggaaaatgcactggatatgtaccgactggacaatggacgatacccgacgacagaacaa

SEQ ID NO: 698107 - DNA, 75 bp, synthetic construct
  source 1..75: mol_type = other DNA
gcgctggaaaacgccctggatatgtacaagctcgacaatcatcgctatccaaccacaaatcaggggcttgaatcc

SEQ ID NO: 698108 - DNA, 75 bp, synthetic construct
  source 1..75: mol_type = other DNA
atcatgggtgaggatggtaaacgctggcatccgtgccgttcacaagatgaattgctggcagaactatcaacgaaa

SEQ ID NO: 698109 - DNA, 75 bp, synthetic construct
  source 1..75: mol_type = other DNA
gaaagccgatcggcaaaaagccatcagcgatatcgtggcgctggaaaacgcgctggatatgtaccgactggataa

SEQ ID NO: 698110 - DNA, 75 bp, synthetic construct
  source 1..75: mol_type = other DNA
tgtatatcgaaaccatcgatcgccgaatgcaatacctgagaaagaaagggcttgttgcaaatgtgcgtgggaagg

SEQ ID NO: 698111 - DNA, 75 bp, synthetic construct
  source 1..75: mol_type = other DNA
ctggcaaacgggcagtcggggactttccctctgtccggggcaacaggtttgcaggtgacacaggggcaggtactg

SEQ ID NO: 698112 - DNA, 75 bp, synthetic construct
  source 1..75: mol_type = other DNA
ctgcacgtgaagtgaatggtcagtatgttgtctccattacctctcccgttaccggtgaaattgtcgatgcgcatt

SEQ ID NO: 698113 - DNA, 75 bp, synthetic construct
  source 1..75: mol_type = other DNA
gaacgtctacaggcggaaatagacgccttgggcgataaagagccagaaggaatgcaccctgggcagcgccttctc

SEQ ID NO: 698114 - DNA, 75 bp, synthetic construct
  source 1..75: mol_type = other DNA
atggcaaaaatgagagccgttgacgcggcaatgtatgtgctggaaaaagaaggtatcaccaccgcttttggtgtt

SEQ ID NO: 698115 - DNA, 75 bp, synthetic construct
  source 1..75: mol_type = other DNA
tgttcagagccgggtggtacgaaaaccggagtgatggaaggtaaaccctggagcatcacacaggcatgctgggca

SEQ ID NO: 698116 - DNA, 75 bp, synthetic construct
  source 1..75: mol_type = other DNA
gaaatacacggatgaatatcgtgaggtgacgataccgcactcacagttccggttcagtatgaacgggctgaaact

SEQ ID NO: 698117 - DNA, 75 bp, synthetic construct
  source 1..75: mol_type = other DNA
tgttcgaagaaagtgctgggtgtctgcctggagaaaaaacgcagctactgtcagtttgattcgaagctggcgcag

SEQ ID NO: 698118 - DNA, 75 bp, synthetic construct
  source 1..75: mol_type = other DNA
gtagtggtctggcaagggcgtttctggttactgtcttttattcccggaggctttctcggcatgacgctatttttt

SEQ ID NO: 698119 - DNA, 75 bp, synthetic construct
  source 1..75: mol_type = other DNA
acgagacacagtattacggaggggtgactgccggtggggatggcgggctgaagaataacggcaccacggaatggg

SEQ ID NO: 698120 - DNA, 75 bp, synthetic construct
  source 1..75: mol_type = other DNA
aatgtaacagtgaagaaaaggcgctgggaaaggcgaaggacaataaactgacggtgagtgtgggtgagttctgct

SEQ ID NO: 698121 - DNA, 75 bp, synthetic construct
  source 1..75: mol_type = other DNA
acagctcgcgttcgaaaatattaactccagcgaagtgaacggttatggcgtcgaccacgtaaaagtagcggaagg

SEQ ID NO: 698122 - DNA, 75 bp, synthetic construct
  source 1..75: mol_type = other DNA
taaggctcagagcgggaagagtaatgattttgccgaagctgtttctcagctggctgcgcttgccgccgcaggtaa

SEQ ID NO: 698123 - DNA, 75 bp, synthetic construct
  source 1..75: mol_type = other DNA
tggcggttaattattccgggatggtgtgggcgtttttcgccgcgctggctgccggttggctggccccggtgagtg

SEQ ID NO: 698124 - DNA, 75 bp, synthetic construct
  source 1..75: mol_type = other DNA
gcagcaggggcgcaacgggcagctacgtatcagttttggcagcgccaaaagtcctgactgccggggaataaccgt

SEQ ID NO: 698125 - DNA, 75 bp, synthetic construct
  source 1..75: mol_type = other DNA
taacggtacggtagtagtatttgacccacatggtgaatacggtaaagccctcgctggcggtaatctgcaattctc

SEQ ID NO: 698126 - DNA, 75 bp, synthetic construct
  source 1..75: mol_type = other DNA
cgttcagatttgaatctgtccagttaaacttcaacaaccagaacacgatgcgattttataagcacatctttgaaa

SEQ ID NO: 698127 - DNA, 75 bp, synthetic construct
  source 1..75: mol_type = other DNA
attcctctcgtcactggtgccgacctgctggcgcagtacgcctgtatgggacttggttttaagctgttggtggtc

SEQ ID NO: 698128 - DNA, 75 bp, synthetic construct
  source 1..75: mol_type = other DNA
tgtttgcagacagcaacagtgattaccgggcaggttccgattttgcccgtcagatccaggggcagggtattggca

SEQ ID NO: 698129 - DNA, 75 bp, synthetic construct
  source 1..75: mol_type = other DNA
tctgtgggggagacgtcttctgtctcgatggcgaatgtgataaggctcagagcgggcagagtaatgattttgccg

SEQ ID NO: 698130 - DNA, 75 bp, synthetic construct
  source 1..75: mol_type = other DNA
cagggagtggataccccgggtggaatgggtggagagttgcccgttcaacaaggcggatggcgttctgaaaggtac

SEQ ID NO: 698131 - DNA, 75 bp, synthetic construct
  source 1..75: mol_type = other DNA
atggttcaggttatgaaagaaaagataaatacctttttcagatctctgaattttaattattccgtaaagccgtgc

SEQ ID NO: 698132 - DNA, 75 bp, synthetic construct
  source 1..75: mol_type = other DNA
atgaaacgtcttctgccactgctgctggggctggcagtcagtgtggcacaggctgacagcaacagtgattaccgg

SEQ ID NO: 698133 - DNA, 75 bp, synthetic construct
  source 1..75: mol_type = other DNA
atcctgactgtcgggggattacggttgatgagctgcagaaaattcagttcgacagactggatttcactaacttct

SEQ ID NO: 698134 - DNA, 75 bp, synthetic construct
  source 1..75: mol_type = other DNA
gcaatcgcccttcctgttaaccgccagcaaaccggtgccggaagaggaagaaagcgagaaaaaagagtgccccat

SEQ ID NO: 698135 - DNA, 75 bp, synthetic construct
  source 1..75: mol_type = other DNA
cgtcctgggtggtgccacctggcggattagcatcatatggcgagatccttactggattatggacctgcagaacga

SEQ ID NO: 698136 - DNA, 75 bp, synthetic construct
  source 1..75: mol_type = other DNA
cggtcgaaaaattgtcagccggccaacgaggaaccttctatgtctgccttaagctggcgacggacgccttcggat

SEQ ID NO: 698137 - DNA, 75 bp, synthetic construct
  source 1..75: mol_type = other DNA
ggtgtcgatcgtggtgctgggccttggctctggcgcaatttccctctcggcaggcgcctttgccggggccttcgc

SEQ ID NO: 698138 - DNA, 75 bp, synthetic construct
  source 1..75: mol_type = other DNA
ttaaacttggcgtaaatggcaacctgaatccagcggccagcgtctggggaatgtgggcgtgcagctgggtgataa

SEQ ID NO: 698139 - DNA, 75 bp, synthetic construct
  source 1..75: mol_type = other DNA
ttattcgtactcaggagaaaaacagcggtccgcacggtgacgactttgaaccttttgttgaaatgaactggatcc

SEQ ID NO: 698140 - DNA, 75 bp, synthetic construct
  source 1..75: mol_type = other DNA
caagacggggcgcgtaatctgggggaaatgaaacatggcgtaaatggcaatctgaatccggcggccagcgtctgg

SEQ ID NO: 698141 - DNA, 75 bp, synthetic construct
  source 1..75: mol_type = other DNA
tgcacacggaagccaatggctcacgtattgagaatgacgcaaataacaacattcagatccgacttggtttccgca

SEQ ID NO: 698142 - DNA, 75 bp, synthetic construct
  source 1..75: mol_type = other DNA
atgaaaaacgaagcagaaaaagcgatgtggaattgcaaaacctcggatacaccatggaccttcagttccctgctg

SEQ ID NO: 698143 - DNA, 75 bp, synthetic construct
  source 1..75: mol_type = other DNA
cgtgattaccgatgtgactgcaaccagcgagcagactgacagtaccggcaacgtgctggctgtcagtgccaccgt

SEQ ID NO: 698144 - DNA, 75 bp, synthetic construct
  source 1..75: mol_type = other DNA
gtctgggtgttcaaacaaacaatataactcttcttaagaatgaggtttacttcgaaaaaatagcgaacaagatca

SEQ ID NO: 698145 - DNA, 75 bp, synthetic construct
  source 1..75: mol_type = other DNA
cgcagttaatgcctgctctcgaaaaaatggattcgaaactggtttaccagttgcatgaccgcttcagcgacagca

SEQ ID NO: 698146 - DNA, 75 bp, synthetic construct
  source 1..75: mol_type = other DNA
acaggcgcagtctgttctccagaccaccatcagcgccgttcgggtggcgcagaaaatgaaggataaccccgccgt

SEQ ID NO: 698147 - DNA, 75 bp, synthetic construct
  source 1..75: mol_type = other DNA
atgtttgcggtactgggtgatattgagtttgaactgattacctactgggacggctttgaggccactttcggtgtc

SEQ ID NO: 698148 - DNA, 75 bp, synthetic construct
  source 1..75: mol_type = other DNA
cgtgattaccgatgtgaccgcaaccagcgagcagacagacagcaccggtaacgtgctggctgtcagtgccaccgt

SEQ ID NO: 698149 - DNA, 75 bp, synthetic construct
  source 1..75: mol_type = other DNA
caagtatatctcaattatctcctgctggaatacaggctttgcaggatgcggctaggcgcgaaggcgaaataatag

SEQ ID NO: 698150 - DNA, 75 bp, synthetic construct
  source 1..75: mol_type = other DNA
gatgtctctgcgtttaagccagaaacgcagttacagtatgttgggcacctgaagcctgggatttatatcaaggcg

SEQ ID NO: 698151 - DNA, 75 bp, synthetic construct
  source 1..75: mol_type = other DNA
cgacgaaatgcctgcgtggtcgaggtgcaactaccgaaaaaacagcgtctggttcgcgtgatagaaaaaggctta

SEQ ID NO: 698152 - DNA, 75 bp, synthetic construct
  source 1..75: mol_type = other DNA
agcactcacttattcttaatcgcgaagctggttcgttcttctttttaggcgaactgctggttgatattccgctac

SEQ ID NO: 698153 - DNA, 75 bp, synthetic construct
  source 1..75: mol_type = other DNA
cgcaaccctgacagcatacgaaaaagcgcagatccctccggttgcgtcctttgatagctacaagaccgatatttc

SEQ ID NO: 698154 - DNA, 75 bp, synthetic construct
  source 1..75: mol_type = other DNA
agcttgatttggcagttacaggaatgcattgtgataatgcgtatggaaatacaatacatattatagaacaagata

SEQ ID NO: 698155 - DNA, 75 bp, synthetic construct
  source 1..75: mol_type = other DNA
gctttattctgcgccgctctgaacttgccagtaacgaagtttctccggttcctctggattacgccgtgggtgata

SEQ ID NO: 698156 - DNA, 75 bp, synthetic construct
  source 1..75: mol_type = other DNA
ccttcgacagtttccgcgttgattatgctggcgcaatgaaggctggttcagctaccgctgtaactctcggcggcg

SEQ ID NO: 698157 - DNA, 75 bp, synthetic construct
  source 1..75: mol_type = other DNA
aaggacgcgttagtgcaacttgttgaaactggtggagctcatcctctgagtcgagaacctataacagaatcaatg

SEQ ID NO: 698158 - DNA, 75 bp, synthetic construct
  source 1..75: mol_type = other DNA
agtcatttttgacatgcccgataacgctggacacacctgagactggggtgttcatgagaaactcacgaggtgctg

SEQ ID NO: 698159 - DNA, 75 bp, synthetic construct
  source 1..75: mol_type = other DNA
agttacgcccattaatgggaaaccgtatttacggctgcgatgactgtcagcttatctgcccgtggaatcgctatt

SEQ ID NO: 698160 - DNA, 75 bp, synthetic construct
  source 1..75: mol_type = other DNA
atggcactcccccgtattacacaaaaagaaatgaccgagcgtgaacagcgcgaattaaagacgctgctggatcgg

SEQ ID NO: 698161 - DNA, 75 bp, synthetic construct
  source 1..75: mol_type = other DNA
taagaaagagtacatcgataaattaatggtcgagcgtgaggctgaagcgaaaaaagcccgccagttgaagaaaaa

SEQ ID NO: 698162 - DNA, 75 bp, synthetic construct
  source 1..75: mol_type = other DNA
actaacccgctgcatccaaacgttatctcgaacccggctgcacgtatctttaaagacgacgccgaagcattgggt

SEQ ID NO: 698163 - DNA, 75 bp, synthetic construct
  source 1..75: mol_type = other DNA
atgggcaagctggaagccgtgttggcgaaaccagaatgtaaaattatgctcctgtgtagcccacagaatcctacc

SEQ ID NO: 698164 - DNA, 75 bp, synthetic construct
  source 1..75: mol_type = other DNA
gcaggctgacgactggttttgcgatatgggcaagctggaagccgtgttggcgaaaccagaatgtaaaattatgct

SEQ ID NO: 698165 - DNA, 75 bp, synthetic construct
  source 1..75: mol_type = other DNA
gtgggattatgtcgctgaccgtttcggcactgctgacctgttaccgttcacgatttcagacatggattttgccac

SEQ ID NO: 698166 - DNA, 75 bp, synthetic construct
  source 1..75: mol_type = other DNA
agggtcgtggctttgttcgtctcaatgcaggatgcccacgttcaaaactggaaaaaggtgttgccggtttgatta

SEQ ID NO: 698167 - DNA, 75 bp, synthetic construct
  source 1..75: mol_type = other DNA
gcgcgccgtggctggatgccttacgtgtctatctgcaagacaatctgacatatatcgcaaatacgataaatgcag

SEQ ID NO: 698168 - DNA, 75 bp, synthetic construct
  source 1..75: mol_type = other DNA
cctgtgtagtccgcagaaccctactggcaaagtctggacttgcgatgagctggagacaatggccgatctgtgcga

SEQ ID NO: 698169 - DNA, 75 bp, synthetic construct
  source 1..75: mol_type = other DNA
gcgcggtaatcctaggttctactctgctggcaggttgctccagcaacgctaaaatcgatcagctgtcttctgacg

SEQ ID NO: 698170 - DNA, 75 bp, synthetic construct
  source 1..75: mol_type = other DNA
aagtagatttgagcggcgcgttaacacttgaactcgccggtatcattttctcctttatgctgatcaacctatttg

SEQ ID NO: 698171 - DNA, 75 bp, synthetic construct
  source 1..75: mol_type = other DNA
acctggaagagagcggcgaactggtgaatctgtttaacgatccgcagcgtcacagtgccgacgtcaaacgtcgta

SEQ ID NO: 698172 - DNA, 75 bp, synthetic construct
  source 1..75: mol_type = other DNA
gtatcaactcgaggctaaaaaatacgttcgccgcgtcagagataaagtcccgtactctgactgggataaagagca

SEQ ID NO: 698173 - DNA, 75 bp, synthetic construct
  source 1..75: mol_type = other DNA
aacgcttgaactgttttttgttcaatcgggtacgctcacactgggcatacaggagcacgagtatttggtaaaaac

SEQ ID NO: 698174 - DNA, 75 bp, synthetic construct
  source 1..75: mol_type = other DNA
ccagctgagcaacgacgtgaacgcaatgcgttccgacgttcaggctgctaaagatgacgcagctcgtgctaatca

SEQ ID NO: 698175 - DNA, 75 bp, synthetic construct
  source 1..75: mol_type = other DNA
gacgtcagaaagaaatcgacaccggcgaggggaaacagggagaagacaccgagtcgaaaatctccgtggtctgca

SEQ ID NO: 698176 - DNA, 75 bp, synthetic construct
  source 1..75: mol_type = other DNA
atttcaatatgttctttgacggggataactacttcggcatggtgccggaaatcccccccgccaaactcacaaaaa

SEQ ID NO: 698177 - DNA, 75 bp, synthetic construct
  source 1..75: mol_type = other DNA
cttggcctcgatgacgatgcgctgtcggctgaaatctcgctcggcggttttcctgatgatgctgtctggtcgtta

SEQ ID NO: 698178 - DNA, 75 bp, synthetic construct
  source 1..75: mol_type = other DNA
ggtgctctatgaagtggaccttatcaacatggtggaaattgtggacggtgtggatctgatggaagcgcaccgcaa

SEQ ID NO: 698179 - DNA, 75 bp, synthetic construct
  source 1..75: mol_type = other DNA
cagctatcagggcgtcgcgaagtccgtcacgctgccaaaactgacccgtaagctcgaaaactatcgcggtgcggg

SEQ ID NO: 698180 - DNA, 75 bp, synthetic construct
  source 1..75: mol_type = other DNA
cccggattcggttatctgggagctttacgccgcaaccggtgtggatgccgtgccgattcgttttgcaggctctta

SEQ ID NO: 698181 - DNA, 75 bp, synthetic construct
  source 1..75: mol_type = other DNA
atggctttaccacgcaaattaaaacatctgaacttgtttaacgacgggaacaactggcaggggatcgttgagtcg

SEQ ID NO: 698182 - DNA, 75 bp, synthetic construct
  source 1..75: mol_type = other DNA
catacgcaaaaccgatgacggtaaacctttttcaattgaggggcagggggaagcaggggaaagggtgggtgatgt

SEQ ID NO: 698183 - DNA, 75 bp, synthetic construct
  source 1..75: mol_type = other DNA
caaactcaagctggatggtcgaagactctttcccgagagcattacgcgagtacaacgaaatggttgatgactata

SEQ ID NO: 698184 - DNA, 75 bp, synthetic construct
  source 1..75: mol_type = other DNA
gggttgtgatgataaaaaagccgaaacagaaacgcccccgcctgccaatagtcaacctgccgcaccagctcctga

SEQ ID NO: 698185 - DNA, 75 bp, synthetic construct
  source 1..75: mol_type = other DNA
gcggcatatcgaagaactgcaatctatgcgcaataagcttctgacgctggcgaatgcctgccccggcgatgacag

SEQ ID NO: 698186 - DNA, 75 bp, synthetic construct
  source 1..75: mol_type = other DNA
cgccaggcgcggcaggtggggtttaacctggaagagagcggtgaactggttaatctgtttaacgacccgcagcgc

SEQ ID NO: 698187 - DNA, 75 bp, synthetic construct
  source 1..75: mol_type = other DNA
ctgtatctggattccggaagcagaaaaactgttccggatccgggaggcggaagaaacaaaaaacagcctgatgca

SEQ ID NO: 698188 - DNA, 75 bp, synthetic construct
  source 1..75: mol_type = other DNA
ggcgaagctgggtgccctgatggtgcactattccacggactatgtgttcgacggcgccggcagccattatcgccg

SEQ ID NO: 698189 - DNA, 75 bp, synthetic construct
  source 1..75: mol_type = other DNA
ggctacagcgaggcggaagcgcaccacgatggcatcgaaaccgacagccgcacgctgacgctcgacaacgtgccg

SEQ ID NO: 698190 - DNA, 75 bp, synthetic construct
  source 1..75: mol_type = other DNA
tgtattttctgacgcttgtacttacagcgactctccaggccagaaagataaatactggactttaactgcttatat

SEQ ID NO: 698191 - DNA, 75 bp, synthetic construct
  source 1..75: mol_type = other DNA
tcagatgataaaaaaaatgccgatgaacaaaccaggaataatataaatcgtcttgacgattccattaacaatctt

SEQ ID NO: 698192 - DNA, 75 bp, synthetic construct
  source 1..75: mol_type = other DNA
accatatgctgcgcaccaaactgccgcgcggtattccgctgtgtatccatctgatgtccagccagctggttggcg

SEQ ID NO: 698193 - DNA, 75 bp, synthetic construct
  source 1..75: mol_type = other DNA
accggacacaccagatacctggcgtaacggcttgtgcatttcatcccgtactcctggagaagctggaactggtta

SEQ ID NO: 698194 - DNA, 75 bp, synthetic construct
  source 1..75: mol_type = other DNA
gaagatattgaagtgcttgagctgccgttcagccaggcgctggagatgattaaaaccggcgagatacgtgacggt

SEQ ID NO: 698195 - DNA, 75 bp, synthetic construct
  source 1..75: mol_type = other DNA
gactggaagaccgtccgtcactgctggttgcggtgatgttcagccttatcatttacatcgagaaccggatgtacc

SEQ ID NO: 698196 - DNA, 75 bp, synthetic construct
  source 1..75: mol_type = other DNA
gaatttccatctggcccgtaacccggaaatcgccttcctgtggaacatggccgacaactacagcaatctgctgaa

SEQ ID NO: 698197 - DNA, 75 bp, synthetic construct
  source 1..75: mol_type = other DNA
acgcggtggcgtggattgagcactggcttgatttgcgtgacctgtttggttgcgaagacgatgcgcttttcctgt

SEQ ID NO: 698198 - DNA, 75 bp, synthetic construct
  source 1..75: mol_type = other DNA
ccatatcgcccatctgcgccgggaaagcccgttcgatgcggcatcgccgctaccacgccgaccatccagcgcacg

SEQ ID NO: 698199 - DNA, 75 bp, synthetic construct
  source 1..75: mol_type = other DNA
gcatgcgtacaagcgtggaacacatctacgccgcaggcgactgcaccgaccagccgcagttcgtctatgtggcgg

SEQ ID NO: 698200 - DNA, 75 bp, synthetic construct
  source 1..75: mol_type = other DNA
ctgcgtcagcggctgggctccggtcagtcttctgtcgtgtcctacttcctcaacatcacagccttctgcaaggac

SEQ ID NO: 698201 - DNA, 75 bp, synthetic construct
  source 1..75: mol_type = other DNA
ctgcccctgaccctgcgtcattaccgggtgtttatctcgtactgttctccctcgaagaaaaaaagccgggccgac

SEQ ID NO: 698202 - DNA, 75 bp, synthetic construct
  source 1..75: mol_type = other DNA
atgtcactcatcacccgcattgaagacggcctcatctggctgtcccgctacggactggccagagaatttccggaa

SEQ ID NO: 698203 - DNA, 75 bp, synthetic construct
  source 1..75: mol_type = other DNA
cgctggcaggctggctggcctggaaggtcgcccatcccccggtgcactacttctcaacagagaacggcattatca

SEQ ID NO: 698204 - DNA, 75 bp, synthetic construct
  source 1..75: mol_type = other DNA
atgtggcggcagcggccggcactcgcgccgcgatcaacatgaccggcggtgacgcggccctgaacctgaccgcga

SEQ ID NO: 698205 - DNA, 75 bp, synthetic construct
  source 1..75: mol_type = other DNA
gagtggacccgatcttatcagcaacagcgatcgcaccgcccatgatgagcttgtcagaagactggctgaacgggt

SEQ ID NO: 698206 - DNA, 75 bp, synthetic construct
  source 1..75: mol_type = other DNA
tccggccgtgctcaaatccgccaacaccctgtggctgctgcgttaccgccctgacgaaattccgttcctgcggga

SEQ ID NO: 698207 - DNA, 75 bp, synthetic construct
  source 1..75: mol_type = other DNA
ccggaaacaggccggtgacagggaagcaacgtcagtgacggcaggactggcgacagaactgctcggaaagcaggg

SEQ ID NO: 698208 - DNA, 75 bp, synthetic construct
  source 1..75: mol_type = other DNA
agccattcccatcaatggtgcgaatgagtccattgtggaggcgctcgatcatatgctgcgcaccaaactgccgcg

SEQ ID NO: 698209 - DNA, 75 bp, synthetic construct
  source 1..75: mol_type = other DNA
gggtagcagcggcgcattgcatatcgccgtcatcggcagcggcggcacctgcgtcaatgtcggttgtgtgccgtc

SEQ ID NO: 698210 - DNA, 75 bp, synthetic construct
  source 1..75: mol_type = other DNA
ctggagaaaaagtcgaagacctcctatgccaaatggtttccgtccgtggagaaagaggcgaaggagtggggggaa

SEQ ID NO: 698211 - DNA, 75 bp, synthetic construct
  source 1..75: mol_type = other DNA
cgccgtcataccggtgcctatatcaccatcacacagaacatcgtcgactttgactctgacaaggcctccagtgcg

SEQ ID NO: 698212 - DNA, 75 bp, synthetic construct
  source 1..75: mol_type = other DNA
agaacaggatgtaccgcacgccgcgtaacctcaagaaactgaacgtcattgatgaaggctggcgtctgctggact

SEQ ID NO: 698213 - DNA, 75 bp, synthetic construct
  source 1..75: mol_type = other DNA
cagccgtctggatgaaatgatagtgctgctggaccagtacacagccaacggtacttacggccagtattttaactc

SEQ ID NO: 698214 - DNA, 75 bp, synthetic construct
  source 1..75: mol_type = other DNA
gaatggggcataaaacaggggctgaataatcacgttcacccgcataaattacgtcactcattcgccacgcatatg

SEQ ID NO: 698215 - DNA, 75 bp, synthetic construct
  source 1..75: mol_type = other DNA
gagtccggtggcggtagttctggcggtagttctggcggtggctctagtggttccagtctttctaaaggtgatatt

SEQ ID NO: 698216 - DNA, 75 bp, synthetic construct
  source 1..75: mol_type = other DNA
tacctcgacactgacgtactgcaatgggtgctggaaaacgactacgacccacggcttatcagtgcaatgagcgaa

SEQ ID NO: 698217 - DNA, 75 bp, synthetic construct
  source 1..75: mol_type = other DNA
aacatggcggtcaccggcacttcaggggccggtaaaaccggtctggtgcagcctattctgcgcagcgtgctggac

SEQ ID NO: 698218 - DNA, 75 bp, synthetic construct
  source 1..75: mol_type = other DNA
ctgataaaaacttccgctatggcgaagatgaaaataacaaacagtatcaacgtaatgccgagcaaagccgcgcag

SEQ ID NO: 698219 - DNA, 75 bp, synthetic construct
  source 1..75: mol_type = other DNA
gctttaacggcactgaacgtcccggcgctgtttacctggcagcggctctggcagctcacagccagaaaggcatcc

SEQ ID NO: 698220 - DNA, 75 bp, synthetic construct
  source 1..75: mol_type = other DNA
tgtcgctgggcggcgtttcgatgggtatcgccggttccattgttgatcacaacttctttgaatcctggctgggaa

SEQ ID NO: 698221 - DNA, 75 bp, synthetic construct
  source 1..75: mol_type = other DNA
aacagtaaccgcgcgtccgcgcaggccggactggaggtcaccgatgatatccgcgatgcggatgccgatatcgtg

SEQ ID NO: 698222 - DNA, 75 bp, synthetic construct
  source 1..75: mol_type = other DNA
cgcaatacttcaagcgtgagtaccagctgcaggacggcgatattgacgagacaccaccgtcagaacgcgagaaga

SEQ ID NO: 698223 - DNA, 75 bp, synthetic construct
  source 1..75: mol_type = other DNA
cgacctgacagaacggctggcgcgtctgttgtttgtggcgaatatctgggggcggctcaatgagcgtgacgagca

SEQ ID NO: 698224 - DNA, 75 bp, synthetic construct
  source 1..75: mol_type = other DNA
gagcttcatcagcgctgtatcgaccagcgtatcggtatcgacgtgcgtcccgatgatattcgcatcagcctggcg

SEQ ID NO: 698225 - DNA, 75 bp, synthetic construct
  source 1..75: mol_type = other DNA
ccctcagatgaacacggacgatctgcaggaacggctggcccgcattctctttgtggcaaatatccgggggcgtct

SEQ ID NO: 698226 - DNA, 75 bp, synthetic construct
  source 1..75: mol_type = other DNA
ctggatattctgatgaacggaggcgcgttaaatggcacgctggaacccgtactggctcctctgtttaagcgggtt

SEQ ID NO: 698227 - DNA, 75 bp, synthetic construct
  source 1..75: mol_type = other DNA
atgtacggcgaaccgtactggtgtgaagatgcttactacaagttgaccctcgcccaggttgaaaagctggaagaa

SEQ ID NO: 698228 - DNA, 75 bp, synthetic construct
  source 1..75: mol_type = other DNA
accctgaaagtgcttcgctcttcactggatgctgcaaaaattttcacacagacagctgatggtcaggaactggcc

SEQ ID NO: 698229 - DNA, 75 bp, synthetic construct
  source 1..75: mol_type = other DNA
accctgaaagtgctgcgttcctctctggatgcggcaaaaatttacacgcaggcggccgatgaccaggagctggcc

SEQ ID NO: 698230 - DNA, 75 bp, synthetic construct
  source 1..75: mol_type = other DNA
gtgtacgaactggcctgccgtaacttcccggatgaaatggcagacctggaggcccgggtggccatgaataataca

SEQ ID NO: 698231 - DNA, 75 bp, synthetic construct
  source 1..75: mol_type = other DNA
aaggtggttctcaagcaggatgcgtcggaattcaaacagtacaaccagaaccgccccaaccagttcagcgagctg

SEQ ID NO: 698232 - DNA, 75 bp, synthetic construct
  source 1..75: mol_type = other DNA
caggaggcctgggaagcgcacaaggaaaaagcccgtattgaccatgtggtccagaagctgacggccattcgcgag

SEQ ID NO: 698233 - DNA, 75 bp, synthetic construct
  source 1..75: mol_type = other DNA
acacgttcaagaagaacggtattgacctgttttccccgacctatatgcagttccgtaactggatagcgatgatcc

SEQ ID NO: 698234 - DNA, 75 bp, synthetic construct
  source 1..75: mol_type = other DNA
atccgtgggaatttatgctgcgcgaaatgttctccactaagcttgaagatgctggcgtgcgttggctggaaccgg

SEQ ID NO: 698235 - DNA, 75 bp, synthetic construct
  source 1..75: mol_type = other DNA
cgagtacggtttcaatttccataccatgtacggtgagccgtactggtgtgaagatgcttactacaaattgaccct

SEQ ID NO: 698236 - DNA, 75 bp, synthetic construct
  source 1..75: mol_type = other DNA
caggttgaaaagctggaagaagtcaccgccgaactgcaccagatgtgcctgaaagtggtggaaaaagtgatcgcc

SEQ ID NO: 698237 - DNA, 75 bp, synthetic construct
  source 1..75: mol_type = other DNA
ggcttttatcgatctcttctacaccggcatgaataacaccaactttaacatggcggtatgcggtacttccggtgc

SEQ ID NO: 698238 - DNA, 75 bp, synthetic construct
  source 1..75: mol_type = other DNA
gcgtaatgttccggtcaccattaatctggtttccagcaagctggttggcgatgatatcgaatatggcctccgtga

SEQ ID NO: 698239 - DNA, 75 bp, synthetic construct
  source 1..75: mol_type = other DNA
ggctggaagatcagctcaatgccggtaatttgccggaaaacagcgatcaatttaacagcctgcaagagaagctga

SEQ ID NO: 698240 - DNA, 75 bp, synthetic construct
  source 1..75: mol_type = other DNA
cgggtaccggcagcctgataaaatatggcgtcgtgaacgattacggggcggtgcgcgaatatgaaggagtcgtcc

SEQ ID NO: 698241 - DNA, 75 bp, synthetic construct
  source 1..75: mol_type = other DNA
ggtgcgcaatcccacaccttatgtggtgcagcttaattatgtgagtgtggacggtaagcgtcatcagggaaaagg

SEQ ID NO: 698242 - DNA, 75 bp, synthetic construct
  source 1..75: mol_type = other DNA
ccattaacaatgcgctagcaggtaaacaaccgctggacaatacgctgactcatttgagtggaaaggatgtagctg

SEQ ID NO: 698243 - DNA, 75 bp, synthetic construct
  source 1..75: mol_type = other DNA
acaagcattttccgctgtcacacaatttcatccctgatgatgtcgataacgccccgatactctttgcggctgtcg

SEQ ID NO: 698244 - DNA, 75 bp, synthetic construct
  source 1..75: mol_type = other DNA
gccggttctaaaacggctgatcgccactatgcagccgggggatgaactggtggtctggaagctggacaggatagg

SEQ ID NO: 698245 - DNA, 75 bp, synthetic construct
  source 1..75: mol_type = other DNA
cgtttactgtccgtattgtgaaaaaaggcacagttccggaagacagggagacactgtactgggctgtctccaact

SEQ ID NO: 698246 - DNA, 75 bp, synthetic construct
  source 1..75: mol_type = other DNA
tgccctgataggtggcgcaccggcaatgctggatacgctgaaagaaattgcggcagctatcaataatgacccgaa

SEQ ID NO: 698247 - DNA, 75 bp, synthetic construct
  source 1..75: mol_type = other DNA
ccgcagccattaacaatgatccgaatttcagtaccaccattaacaatgcgctggcactaaaagcaccgctgttaa

SEQ ID NO: 698248 - DNA, 75 bp, synthetic construct
  source 1..75: mol_type = other DNA
tgccagcgccgccgcgctcggtgtgccgttaaaacttacccatatggcggtcggcgatggcggcggaacattgcc

SEQ ID NO: 698249 - DNA, 75 bp, synthetic construct
  source 1..75: mol_type = other DNA
tgaagtcctggaattaaggctgtatgtggatgacaagatgagaaaccacattgccgcacaggatcctcataccca

SEQ ID NO: 698250 - DNA, 75 bp, synthetic construct
  source 1..75: mol_type = other DNA
tacccaaaagtgataggccttgatgcttcaagaattgttccaactgcaaacgaaaaccgtcctcgtaacattgcg

SEQ ID NO: 698251 - DNA, 75 bp, synthetic construct
  source 1..75: mol_type = other DNA
cgtgaaatcgagttgcgccagaaacagtacgagtactatcgtgatttactgttcagcttcccgaaaccagaaacc

SEQ ID NO: 698252 - DNA, 75 bp, synthetic construct
  source 1..75: mol_type = other DNA
aggtcatatctggaaaccgatgtggcagaagggaattcgctggaacgtcaaaagttccgctgtgaccgtcacgct

SEQ ID NO: 698253 - DNA, 75 bp, synthetic construct
  source 1..75: mol_type = other DNA
tgctgcgcccgttcctctgttggacgctggattaactggttcacgcagtcgggtgttgagggactgaaatcatta

SEQ ID NO: 698254 - DNA, 75 bp, synthetic construct
  source 1..75: mol_type = other DNA
caaaaccatttacatcgaagcccccttcctcgtggcaggtagcaagcagtttaagtttgggcttctcgacacgcc

SEQ ID NO: 698255 - DNA, 75 bp, synthetic construct
  source 1..75: mol_type = other DNA
atgaatggtcttggcatttttctggtgattatggccgtgtggttttgtttctcgctggtggttgttgctggtgtc

SEQ ID NO: 698256 - DNA, 75 bp, synthetic construct
  source 1..75: mol_type = other DNA
catgtttactcaggaatgggaaaccccaagttaatgagtcatcaggttgaaaatatacctgtaccagtcccctgc

SEQ ID NO: 698257 - DNA, 75 bp, synthetic construct
  source 1..75: mol_type = other DNA
tatagcaaaaataatgcttgaatccggagtccctcttgcagacatcatgcgctttaccggggtgtcagaagaaga

SEQ ID NO: 698258 - DNA, 75 bp, synthetic construct
  source 1..75: mol_type = other DNA
tctgtttatgcttgaaggtgccattatcggcattcatgaagctgcgctcccggtggcacgccgccaggagcttgc

SEQ ID NO: 698259 - DNA, 75 bp, synthetic construct
  source 1..75: mol_type = other DNA
gaacgtcaggagaaaaaggaaaaagaagaactttatttattcgtgtctgaccgtgagcgcaatttaaagaaaaac

SEQ ID NO: 698260 - DNA, 75 bp, synthetic construct
  source 1..75: mol_type = other DNA
gcaattaaggccacccacaaagggaaagagctgacaaagcggcaggttcaggctatgggagaagttcccaccttt

SEQ ID NO: 698261 - DNA, 75 bp, synthetic construct
  source 1..75: mol_type = other DNA
ggcgagggatgaaatccccacctttgagcaactgctggcagccatagagctggaggtcagacgctataacaaccg

SEQ ID NO: 698262 - DNA, 75 bp, synthetic construct
  source 1..75: mol_type = other DNA
gatgcgtcggataattgtaaaaacgccaagaccgcgttgtacaagaatcagcaacaagatgcgcctgtgcctcaa

SEQ ID NO: 698263 - DNA, 75 bp, synthetic construct
  source 1..75: mol_type = other DNA
aaccgtgcatcatcggcaaaaccgttttattcatttctcgctcaacggcggcaccttcaacgtttatcgccactt

SEQ ID NO: 698264 - DNA, 75 bp, synthetic construct
  source 1..75: mol_type = other DNA
gccattaaggccacccacaaagggaaggagctgacaaagcggcaggttaaagcaatgggagaagtccccaccttt

SEQ ID NO: 698265 - DNA, 75 bp, synthetic construct
  source 1..75: mol_type = other DNA
tgtctcaagagttgttcctacagcgacagaaaacagacctcgtaatattgcattcaactacatcgtgagggcggc

SEQ ID NO: 698266 - DNA, 75 bp, synthetic construct
  source 1..75: mol_type = other DNA
atctggacggtgaaaccctgcgttttaacccgtttgcgaacatcaccgatattgaccagtcagcggagcgtgtcc

SEQ ID NO: 698267 - DNA, 75 bp, synthetic construct
  source 1..75: mol_type = other DNA
cggggccggtaaaaccggactgatacagccacttatccgcagcgtgctggactccgggggctttgccgtggtgtt

SEQ ID NO: 698268 - DNA, 75 bp, synthetic construct
  source 1..75: mol_type = other DNA
attgcggagcaaattatccctgagaacgagggtggattctggatccgtgagattgggctttatgatgatgaaggc

SEQ ID NO: 698269 - DNA, 75 bp, synthetic construct
  source 1..75: mol_type = other DNA
cttacggccggtattttaactctgatgagccgtccctgcgggatgacgcaaaaatggtggtgctggagctgggcg

SEQ ID NO: 698270 - DNA, 75 bp, synthetic construct
  source 1..75: mol_type = other DNA
tcactcaggcggttaattcactgctgactgcgcttaaattaccggatgaatccgctcaggctaatcagatcctcg

SEQ ID NO: 698271 - DNA, 75 bp, synthetic construct
  source 1..75: mol_type = other DNA
ccatctgatgtccagtcagctggttggtgacaggattgaatacgggctgcgtgagttctcctggtcaggtgaaca

SEQ ID NO: 698272 - DNA, 75 bp, synthetic construct
  source 1..75: mol_type = other DNA
cggcaaaaccattgaagcagcggaaggtccgtatggcgaagaagggatgattgttcagcaattccacccgttacc

SEQ ID NO: 698273 - DNA, 75 bp, synthetic construct
  source 1..75: mol_type = other DNA
gcctgaaagtggtggaaaaagtgatcgccatcgatgagctgatgaccaaattccgcattccaaaacacacctgga

SEQ ID NO: 698274 - DNA, 75 bp, synthetic construct
  source 1..75: mol_type = other DNA
ggttcagcttattcgcgacagtcttcctccggaaagaaaagacgaagctgtcggtattattctggtaagcgtcaa

SEQ ID NO: 698275 - DNA, 75 bp, synthetic construct
  source 1..75: mol_type = other DNA
atctggcgtcaaaatatctaaaatgcctctgatggatatctttattcaacaatttatagagagcgtgcgtaagat

SEQ ID NO: 698276 - DNA, 75 bp, synthetic construct
  source 1..75: mol_type = other DNA
ctgccaggggggcgatttctcgaaatcctgcctaaaacaggtcaggataatgaggatactgttcgtcaacaatta

SEQ ID NO: 698277 - DNA, 75 bp, synthetic construct
  source 1..75: mol_type = other DNA
ctgtatgtatggggatgttaatgctttttcactgcttttcccgatggaggctgtttttgaatcttttgtgacgac

SEQ ID NO: 698278 - DNA, 75 bp, synthetic construct
  source 1..75: mol_type = other DNA
gaaatacaaccagctgtatccggaccagttcctgccactgcagcgcgacatgattggtaagtttggtgcggccaa

SEQ ID NO: 698279 - DNA, 75 bp, synthetic construct
  source 1..75: mol_type = other DNA
gcttcaaacagttcaccatcaaaaacatttgcactcagcgacagtgccggtggcgggttgtacacggatggaata

SEQ ID NO: 698280 - DNA, 75 bp, synthetic construct
  source 1..75: mol_type = other DNA
gcacctccagtagggaaactaatgcgacgggtgggactgaaacaaggccgcgcaacattgcatttaactacattg

SEQ ID NO: 698281 - DNA, 75 bp, synthetic construct
  source 1..75: mol_type = other DNA
aaaaaagaagtggagatttgcctcgtctcaccatcagtttcctattcgtttggtaagacaggagccccaaataaa

SEQ ID NO: 698282 - DNA, 75 bp, synthetic construct
  source 1..75: mol_type = other DNA
tgcgctaaaaagttttgatccaacgggaggtcggttcgtagttacggctgatgctttcggggaacttattacggc

SEQ ID NO: 698283 - DNA, 75 bp, synthetic construct
  source 1..75: mol_type = other DNA
ctcccgcgtgaaatcgagttgcgtcagaaacaatacgagtactatcgtgatttactgttcagtttcccaaaacct

SEQ ID NO: 698284 - DNA, 75 bp, synthetic construct
  source 1..75: mol_type = other DNA
cctgatttacgcggtgaatttattcgcggctgggatgacgggcgcggggttgatgttgggcgtgcaatcttatca

SEQ ID NO: 698285 - DNA, 75 bp, synthetic construct
  source 1..75: mol_type = other DNA
gaacagcgactggaagccatcgcgcaaatcaaagaggcacaaagcgccgttgctgccgcgcaggctttgctggag

SEQ ID NO: 698286 - DNA, 75 bp, synthetic construct
  source 1..75: mol_type = other DNA
aacgcgtgtcgaagccgcacaagccactgaacggcgtatcgcggcagatatcgacgatagtgaactgaaagcccc

SEQ ID NO: 698287 - DNA, 75 bp, synthetic construct
  source 1..75: mol_type = other DNA
tgagccgtccctgcgggatgacgcaaaaatggtggtgctggagctgggcggactggaagaccgtccgtcactgct

SEQ ID NO: 698288 - DNA, 75 bp, synthetic construct
  source 1..75: mol_type = other DNA
atcccatcaccgacacttcattcacgagggagtatcggtaatactggcgggaatgaaacccgtccacgaaatatt

SEQ ID NO: 698289 - DNA, 75 bp, synthetic construct
  source 1..75: mol_type = other DNA
taaaaattacccatatggcggtcggcgatggcggcggaacattgccaacgccggacgcaaagcagacagcactgg

SEQ ID NO: 698290 - DNA, 75 bp, synthetic construct
  source 1..75: mol_type = other DNA
ccgggcgtggcatgggtgcgggtgaacgaagaacttccgtggcctgacgaccttgcggtgaggttgccgcaatga

SEQ ID NO: 698291 - DNA, 75 bp, synthetic construct
  source 1..75: mol_type = other DNA
tatgtcaaaaccggattgccgggcgtagcgtgggtgcgggtgaatgaagaacttccgtggcctgacgacctggtg

SEQ ID NO: 698292 - DNA, 75 bp, synthetic construct
  source 1..75: mol_type = other DNA
cgcggggtgtgaaaatgatcccaggcgtaagttatcagaagattgacgatgacggactgcatgtggtgatcaacg

SEQ ID NO: 698293 - DNA, 75 bp, synthetic construct
  source 1..75: mol_type = other DNA
tgtggcgggattggttttgatacggcgatgtatttaagtcagccgggcgaatccaccagccagaatatcgccggg

SEQ ID NO: 698294 - DNA, 75 bp, synthetic construct
  source 1..75: mol_type = other DNA
catcggaaactgagtcacgaatctggcctctcgaggttggtctggtgtttaaccaggtggaaggcgttgacgtat

SEQ ID NO: 698295 - DNA, 75 bp, synthetic construct
  source 1..75: mol_type = other DNA
ttgttgttgctggtgctggtggagttgcgacgttttcgccagacgccgccgcaggtgacagcgtccgacagttaa

SEQ ID NO: 698296 - DNA, 75 bp, synthetic construct
  source 1..75: mol_type = other DNA
gttgctgcaatatacaatgctgcaaacgcaaaccccggaagcgatgttagggcggattaacggtttgtggacggc

SEQ ID NO: 698297 - DNA, 75 bp, synthetic construct
  source 1..75: mol_type = other DNA
gaaaagaaccctgatctgtatctgacgcagccgtcgctgatgaacatgatgaagcaggcaggctataaaacgtac

SEQ ID NO: 698298 - DNA, 75 bp, synthetic construct
  source 1..75: mol_type = other DNA
tgatacgcctccccataaaactcaaggacgtaatgaagataatccgacacgtaacatgtatactattccatttct

SEQ ID NO: 698299 - DNA, 75 bp, synthetic construct
  source 1..75: mol_type = other DNA
aaaggacttcagagcaactgcgccggacggctttctgctttatttttcagatcatggtgaagaagtatatgatac

SEQ ID NO: 698300 - DNA, 75 bp, synthetic construct
  source 1..75: mol_type = other DNA
gcatttaattggcggctgcgatgtggctatggagctggacgcacgacgggcaattgcccagggaacacggctggc

SEQ ID NO: 698301 - DNA, 75 bp, synthetic construct
  source 1..75: mol_type = other DNA
gtgaatcctcgcgcctgccacgaaaccaaaatgccaatccttcctgccgtgcagaaaaaaaatctggcggtggtc

SEQ ID NO: 698302 - DNA, 75 bp, synthetic construct
  source 1..75: mol_type = other DNA
gttacgatccaacccgttcagtggtgaatccgcagttcaaagaaaatacccgctggattggtaacccgtacaaga

SEQ ID NO: 698303 - DNA, 75 bp, synthetic construct
  source 1..75: mol_type = other DNA
atcgcacaatggaaatgcgtgaaaagagtgggcgttacgtgttcctcattaaagcggcgacaagtgaaacatggt

SEQ ID NO: 698304 - DNA, 75 bp, synthetic construct
  source 1..75: mol_type = other DNA
aaggtgaaatcatcaccggcgtggtgaaaaaagtaaaccgcgacaacatctctctggatctgggcaacaatgctg

SEQ ID NO: 698305 - DNA, 75 bp, synthetic construct
  source 1..75: mol_type = other DNA
gtgtttgaacggacatggatgggggatgaggcgaacatgcccaggaccctgcaggaacataaaacgttgtttgat

SEQ ID NO: 698306 - DNA, 75 bp, synthetic construct
  source 1..75: mol_type = other DNA
acttgaggcatgtggtgaggcctttctggcgcaggttcgccagcaggaagaaaaactggtcagggagatggcggc

SEQ ID NO: 698307 - DNA, 75 bp, synthetic construct
  source 1..75: mol_type = other DNA
ggtgaccgcgttcgtggcgtgctctattctgttcgcccggaagcgcgtggtgcgcaacttttcgttacccgttcc

SEQ ID NO: 698308 - DNA, 75 bp, synthetic construct
  source 1..75: mol_type = other DNA
tgctgaaccttgaagggatggatcgtgatttggcattcaaactggccgcccgtggcgtttgtacgctggaagatc

SEQ ID NO: 698309 - DNA, 75 bp, synthetic construct
  source 1..75: mol_type = other DNA
cgacctgcaggctaagcatcaggcggaagcgcacgcagcgatcgacaccttcaccaaatatctcgacatcgacga

SEQ ID NO: 698310 - DNA, 75 bp, synthetic construct
  source 1..75: mol_type = other DNA
aaagccgcgccgagtgaaacgtggtggccggaagatgccgatcacattgtattcattcgcgggcgcattgggttc

SEQ ID NO: 698311 - DNA, 75 bp, synthetic construct
  source 1..75: mol_type = other DNA
cgcgctgacgcaggactggtctgaacgtctggctgaactgggtggcgctggctatggcaacccaccgtatagccg

SEQ ID NO: 698312 - DNA, 75 bp, synthetic construct
  source 1..75: mol_type = other DNA
aatatggcatgaacagcactgacttcattgcagccatgggaagcctggatgtttccagttggtccaatattcgcc

SEQ ID NO: 698313 - DNA, 75 bp, synthetic construct
  source 1..75: mol_type = other DNA
gcaggaaatgcagacaatgccttgcaacgggcactgctacatttgaagtatgtgcgagaaataattggttattaa

SEQ ID NO: 698314 - DNA, 75 bp, synthetic construct
  source 1..75: mol_type = other DNA
aagacgagtacaccttcagcgagtcaaagtttggtcatacctgggctgccgactctctggaaaaccctgaattta

SEQ ID NO: 698315 - DNA, 75 bp, synthetic construct
  source 1..75: mol_type = other DNA
atgattgaaagcaaatactgccgcgcgctggttgaactgcgttcaagaccagcccacgagttgaaagaggtcggc

SEQ ID NO: 698316 - DNA, 75 bp, synthetic construct
  source 1..75: mol_type = other DNA
ggtcaggggcggtttgatggcattacagggcatattcccactggattaaatgcgaaagagctggaagtgtataac

SEQ ID NO: 698317 - DNA, 75 bp, synthetic construct
  source 1..75: mol_type = other DNA
atgaatatcctgcttttcggcaaaacagggcaggtgggttgggaactgcaacgtgctctggcaccgctaggtaat

SEQ ID NO: 698318 - DNA, 75 bp, synthetic construct
  source 1..75: mol_type = other DNA
gttcgcaccttccttagcggtgatggcgcagcgtgggtgaaagtggtcagcgtcattctcaatatctttgcagta

SEQ ID NO: 698319 - DNA, 75 bp, synthetic construct
  source 1..75: mol_type = other DNA
atatctttgcagtaatgaccgcgttttttggcgtctatttaggctttcgcgaagcaacgcaagggatcgtaatga

SEQ ID NO: 698320 - DNA, 75 bp, synthetic construct
  source 1..75: mol_type = other DNA
ttgctggtttgtatcatctggttgctggtggtacaacaacctggcacgattatgctgcgctggtttttgaagagg

SEQ ID NO: 698321 - DNA, 75 bp, synthetic construct
  source 1..75: mol_type = other DNA
ggaaacggatgcaacagcaccgctaaatgcttacggtgaaacaaaattagccggagaaaaagcattacaagaaca

SEQ ID NO: 698322 - DNA, 75 bp, synthetic construct
  source 1..75: mol_type = other DNA
cacagaaaagtttcagcagaactttgaactggtcttgccagattggcaggtgggggcgaaacgaatgctcaatga

SEQ ID NO: 698323 - DNA, 75 bp, synthetic construct
  source 1..75: mol_type = other DNA
taatgaagtcggggcctgggttatacactactctactgattatgttttcccaggcagtggtgacgcgccatggct

SEQ ID NO: 698324 - DNA, 75 bp, synthetic construct
  source 1..75: mol_type = other DNA
gagacgaaccatctggccttcgattttgtgaatgtcaaacttaagtcacggccggatgccgtcgatttagatccg

SEQ ID NO: 698325 - DNA, 75 bp, synthetic construct
  source 1..75: mol_type = other DNA
ggcgacaaaaccggaaggtgcagccgcgcgtgatgttcatgaggctgccgcggatgcattaggactggatgacag

SEQ ID NO: 698326 - DNA, 75 bp, synthetic construct
  source 1..75: mol_type = other DNA
accagctgggtctatgcaggtaaaggaaataacttcgccaaaacaatgttacgtctggcaaaagagcgtgaagaa

SEQ ID NO: 698327 - DNA, 75 bp, synthetic construct
  source 1..75: mol_type = other DNA
ctggggaaaaggcattacaagaacattgcgcaaagcatcttattttccgtaccagctgggtatacgctggtaaag

SEQ ID NO: 698328 - DNA, 75 bp, synthetic construct
  source 1..75: mol_type = other DNA
accagctgggtctatgcaggtaaaggaaataacttcgccaaaacgatgttgcgtctggcaaaagagcgtgaagaa

SEQ ID NO: 698329 - DNA, 75 bp, synthetic construct
  source 1..75: mol_type = other DNA
tatgctgcgctggtttttgaagaggcgcgcaaagcaggtattccccttgcactcaacaaactcaatgcggtacca

SEQ ID NO: 698330 - DNA, 75 bp, synthetic construct
  source 1..75: mol_type = other DNA
cgggtatcttttgccgtccgtcttgccgagccagacatgccttgcgggaaaatgtctccttctacgcaaatgcca

SEQ ID NO: 698331 - DNA, 75 bp, synthetic construct
  source 1..75: mol_type = other DNA
cctgcgccgccaataagttagcgatcgttataccttgtcatcgggtggtacgtggtgatggcacactttccggtt

SEQ ID NO: 698332 - DNA, 75 bp, synthetic construct
  source 1..75: mol_type = other DNA
aatgtctccttctacgcaaatgccagcgaggcactcgccgctggctttcgcccctgcaaacgttgtcagccagac

SEQ ID NO: 698333 - DNA, 75 bp, synthetic construct
  source 1..75: mol_type = other DNA
tctggtgaaaaacccctgcgtcaccacatcactgccgacggttactaccgcggccgcaaggtcatcgctaagtaa

SEQ ID NO: 698334 - DNA, 75 bp, synthetic construct
  source 1..75: mol_type = other DNA
gcagttctctatccgcgcactggtgaaaaaggggctggtggagaaaggaatgtgccgccagcgcggtgattccgg

SEQ ID NO: 698335 - DNA, 75 bp, synthetic construct
  source 1..75: mol_type = other DNA
cgttataccctgtcatcgggtagtacgcggtgatggatcgctttcaggttaccgctggggcgcgtcgcgcaaagc

SEQ ID NO: 698336 - DNA, 75 bp, synthetic construct
  source 1..75: mol_type = other DNA
aaccgcgccgcttaataccattcatgcggcgctggaacgtattgctctacgctgccagcgcggtggacctggtgc

SEQ ID NO: 698337 - DNA, 75 bp, synthetic construct
  source 1..75: mol_type = other DNA
gcaaatcaaagaggcacaaagcgccgttgccgccgcgcaggctttgctggagcaacgacaaagcgaaactcgcgc

SEQ ID NO: 698338 - DNA, 75 bp, synthetic construct
  source 1..75: mol_type = other DNA
atcgtcaccgcatagtcacaacagcattacagcggatgcaacgtaaaacaggaggaaattttctcatcgtaaatc

SEQ ID NO: 698339 - DNA, 75 bp, synthetic construct
  source 1..75: mol_type = other DNA
actgctggaacaggaaacgccgcctgtaacgctggaatccttagccgaacagctggcgatgagtccgttccattt

SEQ ID NO: 698340 - DNA, 75 bp, synthetic construct
  source 1..75: mol_type = other DNA
tggctggaactgatagccgatggtcatcatgtacatccggcggcgatgtcgctgtgttgttgctgtgcgaaagag

SEQ ID NO: 698341 - DNA, 75 bp, synthetic construct
  source 1..75: mol_type = other DNA
aaggtgcgcatccgccggagctgttccgtgagctggagattgccgaactggatcaactgattgccgtttctcagc

SEQ ID NO: 698342 - DNA, 75 bp, synthetic construct
  source 1..75: mol_type = other DNA
ttcgatttcctgcaccgcatcggcgaaagctacgccacgctgcgccgctacgcgccggaattccttgccgtgctc

SEQ ID NO: 698343 - DNA, 75 bp, synthetic construct
  source 1..75: mol_type = other DNA
tttccccggtgaaatttatcagattgatattgaatgcgataaattacttactatcaaagatgcgctttcatggat

SEQ ID NO: 698344 - DNA, 75 bp, synthetic construct
  source 1..75: mol_type = other DNA
gtcaatctcgatactccacacccgtttatgccaatgtttatcgcggtaacggcgttcggtgcggctttcgtggct

SEQ ID NO: 698345 - DNA, 75 bp, synthetic construct
  source 1..75: mol_type = other DNA
ttatctcatcccgactgctgagtttgagaaatcccgacataatgaccagttacagttggccgttcagaccgatag

SEQ ID NO: 698346 - DNA, 75 bp, synthetic construct
  source 1..75: mol_type = other DNA
accacgtcttcgcgttgatgcacctgctgggcttccgcttcgccccgcgcattcgtgacctgggcgacaccaagc

SEQ ID NO: 698347 - DNA, 75 bp, synthetic construct
  source 1..75: mol_type = other DNA
ttcgatttcctgcaccgcatcggcgagagctacgccacgctgcgccgctacgcgccggaatttctcgacgtgctc

SEQ ID NO: 698348 - DNA, 75 bp, synthetic construct
  source 1..75: mol_type = other DNA
tgatttcacgttttagcgagctttacagtcgggaaccgttttatttttgctgctgtcaggacaccgacgaagaca

SEQ ID NO: 698349 - DNA, 75 bp, synthetic construct
  source 1..75: mol_type = other DNA
tctctttacgggttaggaattgaaaggcttgctgatatatcagggaaggctgatggtattattggagaagggcag

SEQ ID NO: 698350 - DNA, 75 bp, synthetic construct
  source 1..75: mol_type = other DNA
gaagagatcgcgcagctggaagttaccggcgaatctggcgcaggtctggtaaaagtgaccatcaacggtgcacac

SEQ ID NO: 698351 - DNA, 75 bp, synthetic construct
  source 1..75: mol_type = other DNA
gtgaaattgccgcacttgcatgggaggatatcgacctgaaagctggcacgataacagtgcgacgaaattttacaa

SEQ ID NO: 698352 - DNA, 75 bp, synthetic construct
  source 1..75: mol_type = other DNA
tcatcaggaaagatttactgactggggaaaaggaaagcaggaaaaacacttccaccaacaaaggaagaacagtcc

SEQ ID NO: 698353 - DNA, 75 bp, synthetic construct
  source 1..75: mol_type = other DNA
gcttggtcctggcaggctggcgtcatcgattacaaaagaagatctgctgtttatcaggaaagatttactgaccgg

SEQ ID NO: 698354 - DNA, 75 bp, synthetic construct
  source 1..75: mol_type = other DNA
acgcgttacctgagcggaatttcaattgagcaatgtcatatacaagagatgctgggggctcaatatctttctatc

SEQ ID NO: 698355 - DNA, 75 bp, synthetic construct
  source 1..75: mol_type = other DNA
gggagcacatcaacctgaccggcgattacctatggcgcagcagcgccaaggtcggtgcggggaagtttaggccat

SEQ ID NO: 698356 - DNA, 75 bp, synthetic construct
  source 1..75: mol_type = other DNA
ccgatcacgtgtttggcttgatgcatttgctgggatttcgcttcgcgccgcgtatccgtgacttgggcgaaacca

SEQ ID NO: 698357 - DNA, 75 bp, synthetic construct
  source 1..75: mol_type = other DNA
cgcgttgatgcacctgctgggcttccgcttcgccccgcgcattcgtgacctgggcgacaccaagctctacatccc

SEQ ID NO: 698358 - DNA, 75 bp, synthetic construct
  source 1..75: mol_type = other DNA
gcggtggccgctatcccggacgattcttctgtagatatcaaagaggcggcgggcaaagcggattccagcgatatt

SEQ ID NO: 698359 - DNA, 75 bp, synthetic construct
  source 1..75: mol_type = other DNA
ccgaggcgattgatgccgatatacaggcccagcaggacctcgatgattcgctggatattctgatgaacggtggca

SEQ ID NO: 698360 - DNA, 75 bp, synthetic construct
  source 1..75: mol_type = other DNA
aaggtgcggctgttcggccgcatcggccaggcgctgatcgaggccaagcaggcgggccgcgatccgttcgccgcc

SEQ ID NO: 698361 - DNA, 75 bp, synthetic construct
  source 1..75: mol_type = other DNA
tattccgtggcctggttacccgtcttcgctgcagctgtggcaagcggaaatgcttcttttgaatctgtatttgac

SEQ ID NO: 698362 - DNA, 75 bp, synthetic construct
  source 1..75: mol_type = other DNA
gggtacctccggcatttattacattacaagttctgcctaatttggcggctgaccccatcgacattgagttacctt

SEQ ID NO: 698363 - DNA, 75 bp, synthetic construct
  source 1..75: mol_type = other DNA
tttgcgctccgttagtggattacaggcatggcacgaatggtgttatacggcgttgagcgatcgtcctgttgaatt

SEQ ID NO: 698364 - DNA, 75 bp, synthetic construct
  source 1..75: mol_type = other DNA
tgccgctggccgtggccaccgattgcgaccagtacctgcatgaccggctgacgctgctggaaacgcagctcgcca

SEQ ID NO: 698365 - DNA, 75 bp, synthetic construct
  source 1..75: mol_type = other DNA
cgacctggccaagttcgaggcgcagcgacgctatgccaccctggtggcgcttgccatcgagggcatggccaccgt

SEQ ID NO: 698366 - DNA, 75 bp, synthetic construct
  source 1..75: mol_type = other DNA
tttgcgctccattagtggattacaggcatggcacgaatggagttatacggcattgagcgagcgtcctgttgaatt

SEQ ID NO: 698367 - DNA, 75 bp, synthetic construct
  source 1..75: mol_type = other DNA
cattactcaggggattatcagcgccacgggtcgaatcggcctgaacccaaccggacggcaaaacttcctgcaaac

SEQ ID NO: 698368 - DNA, 75 bp, synthetic construct
  source 1..75: mol_type = other DNA
aattagcgcaaaatattaaacagggggggctggaactgggctttcatcatgcaggtattaccgataccgatctga

SEQ ID NO: 698369 - DNA, 75 bp, synthetic construct
  source 1..75: mol_type = other DNA
atagtcgaagtgcaattaccgaaaaaacagcgtctggttcgggtgattgaaaaagggttaccgcgtgacgcctga

SEQ ID NO: 698370 - DNA, 75 bp, synthetic construct
  source 1..75: mol_type = other DNA
gcaaccgactcaaaaagctgggcgagatgattcagcaacattgtgtttcgctgaattttagaccgtttgtcgatt

SEQ ID NO: 698371 - DNA, 75 bp, synthetic construct
  source 1..75: mol_type = other DNA
ggccggaatggaacgctggcagtggcaggatatgccgttctggcaggtcatcgcagaggcaggtatggcggcaag

SEQ ID NO: 698372 - DNA, 75 bp, synthetic construct
  source 1..75: mol_type = other DNA
tggcgctggctgggcgatggtgtgctagaactgacgccattaacgccaccgcaaggcgcgctggtgatttcagcg

SEQ ID NO: 698373 - DNA, 75 bp, synthetic construct
  source 1..75: mol_type = other DNA
cactttcagcatggccttatgccaccgctttctttcgctgcctgaatggcagtcgccggatttcgctggccgatc

SEQ ID NO: 698374 - DNA, 75 bp, synthetic construct
  source 1..75: mol_type = other DNA
gtcttcagtggctgtatgccatcgatgtgctgattgaaacacagggcgaggtctgcctccttccccttcccggcg

SEQ ID NO: 698375 - DNA, 75 bp, synthetic construct
  source 1..75: mol_type = other DNA
cagaagtacagccgtcagcaggcgagggaggcagagcagaaagcccgtgcgtaccaggcgctggtcgctcaggct

SEQ ID NO: 698376 - DNA, 75 bp, synthetic construct
  source 1..75: mol_type = other DNA
acaactgggagttagtcgttcatcgctgagagaagctcttattgttcttgagatatctggctggattattattca

SEQ ID NO: 698377 - DNA, 75 bp, synthetic construct
  source 1..75: mol_type = other DNA
gtatgctgcgcgcccgcccccatgagttattgcccggtacgctgcgcgtgatcagcgtgcggatgaattaccttc

SEQ ID NO: 698378 - DNA, 75 bp, synthetic construct
  source 1..75: mol_type = other DNA
ggggctggaactgggctttcagcaggtaggtattaccgataccgatctcagcgagtccgagcccaaactgcaagc

SEQ ID NO: 698379 - DNA, 75 bp, synthetic construct
  source 1..75: mol_type = other DNA
ttgcagaggcaggtatggcggcaagggaggccggtcatgccgtccgtgagatggagcggtggatggtgccgaaca

SEQ ID NO: 698380 - DNA, 75 bp, synthetic construct
  source 1..75: mol_type = other DNA
tacggttccgcgtcagggagcgcagtcgccacaaatctgcgctggtcatgcagaagtacagccatcagcaggcac

SEQ ID NO: 698381 - DNA, 75 bp, synthetic construct
  source 1..75: mol_type = other DNA
cgccctggttcggtgatcccggttgtagtgatgcgtgacgataagcagttaacgttgcaggttacgattcaggaa

SEQ ID NO: 698382 - DNA, 75 bp, synthetic construct
  source 1..75: mol_type = other DNA
tgcttattttatttgcactccttttttcctgttggaagaaaaactgaaaaaatcaaaccttaaccaatttaatca

SEQ ID NO: 698383 - DNA, 75 bp, synthetic construct
  source 1..75: mol_type = other DNA
acaataatccattttggctagataatgatgccgccccagggttaaaaaagagtctgggggatgtcactaaggctg

SEQ ID NO: 698384 - DNA, 75 bp, synthetic construct
  source 1..75: mol_type = other DNA
cgccctggctcagtgattccagtcgtggtgatgcgtgacgataaacagttaacgttgcaggttactattcaggaa

SEQ ID NO: 698385 - DNA, 75 bp, synthetic construct
  source 1..75: mol_type = other DNA
ttaacgaagtgtcgcctgatggcccagcggcaaatgcaggcatccaggtcaacgatctgattatctctgtgaata

SEQ ID NO: 698386 - DNA, 75 bp, synthetic construct
  source 1..75: mol_type = other DNA
gccgatcagatcattgtcgccttgcaggatggtcgggttttcgaagcattgctggttggctcggactctctgacc

SEQ ID NO: 698387 - DNA, 75 bp, synthetic construct
  source 1..75: mol_type = other DNA
ttcgtggaaaggggatttggcgcttaacgggcagtacgtgattgagcttttctcatttccattcccaccggagcg

SEQ ID NO: 698388 - DNA, 75 bp, synthetic construct
  source 1..75: mol_type = other DNA
gaagccatacgtgtcgatccatacacgcaaaaacggttcaccttctttagcgatcctgacgggctgccgctggaa

SEQ ID NO: 698389 - DNA, 75 bp, synthetic construct
  source 1..75: mol_type = other DNA
ctgtgttcttcccctgccacccgatgcgggtcaccgtctgttcccgtccgtgccttttcgtgaaggtgagcgtcg

SEQ ID NO: 698390 - DNA, 75 bp, synthetic construct
  source 1..75: mol_type = other DNA
acaacgtttcagatgtattctcccgacagagaacaacaaataaaacatgtaaaaaaaacattaaaatacgatggt

SEQ ID NO: 698391 - DNA, 75 bp, synthetic construct
  source 1..75: mol_type = other DNA
taagccattgagcttatggtgtcttggaatggcagaaggagccatggccagaacaatttctcaactatcaaaagg

SEQ ID NO: 698392 - DNA, 75 bp, synthetic construct
  source 1..75: mol_type = other DNA
gaagccatccgtgtcgatccatacacgcaaagacgcttcacgttctttaacgatcctgacgggctgccgctagaa

SEQ ID NO: 698393 - DNA, 75 bp, synthetic construct
  source 1..75: mol_type = other DNA
accgtaataagaccggcctggatctggaatacatggaatcagacggggcttgaattaggctggtttaagcaacag

SEQ ID NO: 698394 - DNA, 75 bp, synthetic construct
  source 1..75: mol_type = other DNA
gtgtttcagcaaagagcgatcaaaacggtatcatcggatgagtttgataccgagtttatggatgatgcaaggcat

SEQ ID NO: 698395 - DNA, 75 bp, synthetic construct
  source 1..75: mol_type = other DNA
acattaaaatcaagtaagtccgactttaatgcaaagcgcggactgtatgttgccagtatgattaataaagcttta

SEQ ID NO: 698396 - DNA, 75 bp, synthetic construct
  source 1..75: mol_type = other DNA
ttgcgcattgaatgtccggatggcgaaatttggctgattaatccttttaacggtgaatcgttaagcgaacatatg

SEQ ID NO: 698397 - DNA, 75 bp, synthetic construct
  source 1..75: mol_type = other DNA
ggaagaaaatcagatggagctggcgctacgtaccagcgaagcattattacaatttaacccggaagatccttatga

SEQ ID NO: 698398 - DNA, 75 bp, synthetic construct
  source 1..75: mol_type = other DNA
atatcagcccgtcggcggaactgttttatgaagaccttgatgaagctgataacattgaggtaatccgcaaattgc

SEQ ID NO: 698399 - DNA, 75 bp, synthetic construct
  source 1..75: mol_type = other DNA
gttgcttctccagaaaaagttatactgctcaagcaaggcaaggatgttgaagacattaatgacctaactcagcca

SEQ ID NO: 698400 - DNA, 75 bp, synthetic construct
  source 1..75: mol_type = other DNA
tgcagggatgcacattctggtttccgcatatggatgaatgcccaaaaagcaggagagcgatctgaatatatcata

SEQ ID NO: 698401 - DNA, 75 bp, synthetic construct
  source 1..75: mol_type = other DNA
cgatgaggtcgaaccaaaggccgggcaggtggtaccggctctcgcacacattgggcgaagcgaatcggaatcacc

SEQ ID NO: 698402 - DNA, 75 bp, synthetic construct
  source 1..75: mol_type = other DNA
tcattaaagatgttgtccagtacgcagaacgcaaaatgaacgcatacaggcaagctataacaagtcgcggttatg

SEQ ID NO: 698403 - DNA, 75 bp, synthetic construct
  source 1..75: mol_type = other DNA
gtatttataggtctatttcacataaatattcatggggggatagtgttagtaatagaaaaattaagaacgatgtta

SEQ ID NO: 698404 - DNA, 75 bp, synthetic construct
  source 1..75: mol_type = other DNA
agatgatagtgtgaagaaagggagagggagcaatactagttatccattctcgtgggtttatacattgctgagtta

SEQ ID NO: 698405 - DNA, 75 bp, synthetic construct
  source 1..75: mol_type = other DNA
atgctggatgtatggctgaagggaaatattagcccgtccgcagagctgttttatgaagaccttgatgaagccgat

SEQ ID NO: 698406 - DNA, 75 bp, synthetic construct
  source 1..75: mol_type = other DNA
acacctacggcctgcacttgccgctgctggcgggaacggaagtgagtatcgcctttgaggaaggcaacccggaca

SEQ ID NO: 698407 - DNA, 75 bp, synthetic construct
  source 1..75: mol_type = other DNA
gtttaccagcagcgataaagccatcgcgccggaatcggtgctgatgcaggacggcgcattcagcctgacggcacc

SEQ ID NO: 698408 - DNA, 75 bp, synthetic construct
  source 1..75: mol_type = other DNA
ccccagacaagatcatagagcgtggggcagtatggcagaagttcagcggccagagcatcagtcaggcgatgcaac

SEQ ID NO: 698409 - DNA, 75 bp, synthetic construct
  source 1..75: mol_type = other DNA
gctgcgcaccccggcgaacaacaaaatccggctggatgacgagcgcggcaaagagcatatcaaggtcagtaccga

SEQ ID NO: 698410 - DNA, 75 bp, synthetic construct
  source 1..75: mol_type = other DNA
accgcagctatgaactgacgttcacggcgataccctactcagaacgctacggctatcgcccggcgcttatccccc

SEQ ID NO: 698411 - DNA, 75 bp, synthetic construct
  source 1..75: mol_type = other DNA
atcgccagcggcgagcacctgcaactggcggcggcaaagaatgtgatagccaacgcaggcaacaacgccgatgtc

SEQ ID NO: 698412 - DNA, 75 bp, synthetic construct
  source 1..75: mol_type = other DNA
tcttacgaaaaaggccgcagagttttatccctgcggcctggtccgggcgcaaattgccattacggcagcctgacg

SEQ ID NO: 698413 - DNA, 75 bp, synthetic construct
  source 1..75: mol_type = other DNA
cctcaccggaatccttccggcttgacgctgattctacgactgtttttctgttccggaatccgtctcatcttcact

SEQ ID NO: 698414 - DNA, 75 bp, synthetic construct
  source 1..75: mol_type = other DNA
gcgagggctatcagtcgccatgtgttcagcctttggagagattcgttaaggagttcgtggaggtgcgccgtgata

SEQ ID NO: 698415 - DNA, 75 bp, synthetic construct
  source 1..75: mol_type = other DNA
tatcgaattttacgacgaccagagcggctatgagcgcggactgacgctgccgcttcgccatccttcagggctgca

SEQ ID NO: 698416 - DNA, 75 bp, synthetic construct
  source 1..75: mol_type = other DNA
cctcgacgacgagcgcggcaaggagcatatcaaggtcagcaccgagtatggcggcaagagccagttgaatctggg

SEQ ID NO: 698417 - DNA, 75 bp, synthetic construct
  source 1..75: mol_type = other DNA
atgcgagcgtcatatagccgcctgtgttgtaatgacaacgtttcgcggctattcttgaatggtctagatgcaaga

SEQ ID NO: 698418 - DNA, 75 bp, synthetic construct
  source 1..75: mol_type = other DNA
agctcagctcacccttccgctacgacattgagtttaccagtaccaataaagcaataacgccggagtcggtgctga

SEQ ID NO: 698419 - DNA, 75 bp, synthetic construct
  source 1..75: mol_type = other DNA
tctggttatttacttatatttttcgcggtacgccgctgtatgttcagttgctggtgttctattccggcatgtaca

SEQ ID NO: 698420 - DNA, 75 bp, synthetic construct
  source 1..75: mol_type = other DNA
gtgatcgaaatattacatgaatactggaaaccgctactgtggaccgacggttatcgctttactggcgtggcgatc

SEQ ID NO: 698421 - DNA, 75 bp, synthetic construct
  source 1..75: mol_type = other DNA
ggaaaccgttgttgtggaccgacggttatcgctttactggtgtggcgatcactctgtggctgcttattttgtcgg

SEQ ID NO: 698422 - DNA, 75 bp, synthetic construct
  source 1..75: mol_type = other DNA
cgacccaaaaacacaaattcaggtgattgtctgcattgatgagtatgaatatcagtcctgcgagtttgccgaata

SEQ ID NO: 698423 - DNA, 75 bp, synthetic construct
  source 1..75: mol_type = other DNA
gacgtgtcaggatctctggccggtggcatcacatctggatgatattgaacatcttcagacgcaaatttaccgtac

SEQ ID NO: 698424 - DNA, 75 bp, synthetic construct
  source 1..75: mol_type = other DNA
gaagaccccaaattgagcaattattgtccgtgcgttcgacattaaaacgggtagcggattcgtttctttttcagt

SEQ ID NO: 698425 - DNA, 75 bp, synthetic construct
  source 1..75: mol_type = other DNA
attatgactggaaagatacctggatgtttggcacatctttaacgcagaaatttgataaaggtggcttcaacgaat

SEQ ID NO: 698426 - DNA, 75 bp, synthetic construct
  source 1..75: mol_type = other DNA
tacgatcgcagcctgcaaaacaaacagcagattaataccaataccattgatttacgctataaagatatcccgtta

SEQ ID NO: 698427 - DNA, 75 bp, synthetic construct
  source 1..75: mol_type = other DNA
ttgttcgcaccttccttagaaaaagcgttaagagaaacgcaaagcgaactcaaaaagtataaagatgaagagaag

SEQ ID NO: 698428 - DNA, 75 bp, synthetic construct
  source 1..75: mol_type = other DNA
tctatttaatcatctcttatgtcctgatcagcctctttcgcagagctgaaaaacgctggttgcagcatgtgaaac

SEQ ID NO: 698429 - DNA, 75 bp, synthetic construct
  source 1..75: mol_type = other DNA
ttatcgctttaccggcgtggcgatcaccctgtggctgctgattttgtcggtagtgataggcggagttctggcgct

SEQ ID NO: 698430 - DNA, 75 bp, synthetic construct
  source 1..75: mol_type = other DNA
cggtacgccgctgtatgttcagttgctggtgttctattccggcatgtacacgctggagattgttaagggaaccga

SEQ ID NO: 698431 - DNA, 75 bp, synthetic construct
  source 1..75: mol_type = other DNA
atgaggcttatactgaaacattgcctaatcccgcccagtggaaagctaaaaaatcctatgaactgccgggctatt

SEQ ID NO: 698432 - DNA, 75 bp, synthetic construct
  source 1..75: mol_type = other DNA
ggccgcgaacaactgagtaccccgttccgctatgacattgaatttaccagtaccgataaagccatcacgccggag

SEQ ID NO: 698433 - DNA, 75 bp, synthetic construct
  source 1..75: mol_type = other DNA
gctacttcgtcacggagtcgtcagaacattttgccgaatatacgccgtggtttattaagccaggccgtgaggatt

SEQ ID NO: 698434 - DNA, 75 bp, synthetic construct
  source 1..75: mol_type = other DNA
cggaatcatttgatctggatggtgtaagaccgtttgtgcggatcctgtccgaaaaagtgcgtgcgcgacgcggac

SEQ ID NO: 698435 - DNA, 75 bp, synthetic construct
  source 1..75: mol_type = other DNA
tcggagggcgcaaattacaccaccgggcagtcgttgatagtggatggcggctttatgttggcgaatccgcagttc

SEQ ID NO: 698436 - DNA, 75 bp, synthetic construct
  source 1..75: mol_type = other DNA
aattacaccaccgggcagtcgttgatagtggatggcggctttatgttggcgaatccgcagttcaacccagaatag

SEQ ID NO: 698437 - DNA, 75 bp, synthetic construct
  source 1..75: mol_type = other DNA
ggcgtccgtgcggagatggtgcaactggatctcggcaatctaccagaaggtgcgcaggcgctggagaaactcatt

SEQ ID NO: 698438 - DNA, 75 bp, synthetic construct
  source 1..75: mol_type = other DNA
atggtaaatctccctgagctggggtcacctgatgtatgggctggtggaggtattggactgattgcaggtctgcta

SEQ ID NO: 698439 - DNA, 75 bp, synthetic construct
  source 1..75: mol_type = other DNA
gaacgtttacggcgaggcgcaattacaattcgtcaggaagacgaatgtcggcgtggttaagttcgaacagagtaa

SEQ ID NO: 698440 - DNA, 75 bp, synthetic construct
  source 1..75: mol_type = other DNA
ggagtaaaaacattgctgacagttggttatcaaagggttggtatgttcagccgctatatatgccaagccagtgcc

SEQ ID NO: 698441 - DNA, 75 bp, synthetic construct
  source 1..75: mol_type = other DNA
attgtggtgcgtaagctgatggattcagcaggggccagcggcaaaatcacctgccacacccaacagaaagaagcc

SEQ ID NO: 698442 - DNA, 75 bp, synthetic construct
  source 1..75: mol_type = other DNA
ggatgagtacccgaaacgctgcgtcgagcagttggagaactggcacaaagagctggaggagtataagaacgcctc

SEQ ID NO: 698443 - DNA, 75 bp, synthetic construct
  source 1..75: mol_type = other DNA
ggtcacctgatgtgtgggctggtggaggtattggactcattgcaggcctaccacttcgctatttcatcgtcagag

SEQ ID NO: 698444 - DNA, 75 bp, synthetic construct
  source 1..75: mol_type = other DNA
ggctatgagcgcggactgacgctgccgcttcgtcatccttcagggctgtttgatggtgagacggaagccgtatgg

SEQ ID NO: 698445 - DNA, 75 bp, synthetic construct
  source 1..75: mol_type = other DNA
ggcggatatggccgcgcagatagcattgataaccagccggataaatgacctgaccgcctcggtgattttgatgca

SEQ ID NO: 698446 - DNA, 75 bp, synthetic construct
  source 1..75: mol_type = other DNA
cgccatctaccagaagcagacggtgccgcaaatcgtcgaaaaaatcctgcgcgagcgtcatcatatgcgcggtca

SEQ ID NO: 698447 - DNA, 75 bp, synthetic construct
  source 1..75: mol_type = other DNA
aggcaccgaagccgaatattcatggtaatactcgctgccagaatattgtgcgctacgaaatgttcaaaaagctgg

SEQ ID NO: 698448 - DNA, 75 bp, synthetic construct
  source 1..75: mol_type = other DNA
atgagaatgggtatacagaaaattttaatactgattccaaacaaacaattgatgtcagattattgaatcaaaata

SEQ ID NO: 698449 - DNA, 75 bp, synthetic construct
  source 1..75: mol_type = other DNA
cggtgttgtgaagaatatgtttatcggtgtgggtcaggcgctgagcgtgtttgtgcgtaaagcgggcatcaaact

SEQ ID NO: 698450 - DNA, 75 bp, synthetic construct
  source 1..75: mol_type = other DNA
gcgggactacaactaccgcaccgccacggcggagatgatgacagagcagcatgacgccaccgggggcgataaaac

SEQ ID NO: 698451 - DNA, 75 bp, synthetic construct
  source 1..75: mol_type = other DNA
cgacaaggacgggcgctaccgggtcaaccttgactttgaccgcgatacgtggaaaccgggttatgaaagcctgtg

SEQ ID NO: 698452 - DNA, 75 bp, synthetic construct
  source 1..75: mol_type = other DNA
gatgcacgcgccgaaaggcgtggcggtcgccagcggcgagcacctgcaactggccgcagtgaaaaacctccagat

SEQ ID NO: 698453 - DNA, 75 bp, synthetic construct
  source 1..75: mol_type = other DNA
cgccatctaccagaaccagacggtgccgcaaatcgtcgaaaaaatcctgcgcgagcggcatcacatgcgcggtca

SEQ ID NO: 698454 - DNA, 75 bp, synthetic construct
  source 1..75: mol_type = other DNA
cgccatctaccagaatcagacggtgccgcaaatcgtcgaaaaaatcctgcgcgagcgtcatcagatgcgcggtca

SEQ ID NO: 698455 - DNA, 75 bp, synthetic construct
  source 1..75: mol_type = other DNA
cgccatctaccagaaacagacggtgccgcaaatcgtcgaaaaaatcctgcgcgagcgccatcaaatgcgcggtca

SEQ ID NO: 698456 - DNA, 75 bp, synthetic construct
  source 1..75: mol_type = other DNA
tgcgcgaaatggctccggcaatggcaatactggatggcgcacagtcacagatgaagtcgctgtccactgatgcgc

SEQ ID NO: 698457 - DNA, 75 bp, synthetic construct
  source 1..75: mol_type = other DNA
cgccatttaccagaaccagacagtgccgcaaatcgtcgaaaaaatcctgcgcgagcggcaccagatgcgcggtca

SEQ ID NO: 698458 - DNA, 75 bp, synthetic construct
  source 1..75: mol_type = other DNA
gtttatttcacgcctgctgtcggaagtgggtatctggtttcgcttcgccactgacgcgcggctgaaaatcgaggt

SEQ ID NO: 698459 - DNA, 75 bp, synthetic construct
  source 1..75: mol_type = other DNA
gaagtgcggctggagccgcgtatggcgctgctggcccgcagccgccagaatgccatctaccagaatctgacggtg

SEQ ID NO: 698460 - DNA, 75 bp, synthetic construct
  source 1..75: mol_type = other DNA
gataaagaactatttaatgttgtattcccaagagttcaatctgtccaccatcagaaaactaataaattgaagatg

SEQ ID NO: 698461 - DNA, 75 bp, synthetic construct
  source 1..75: mol_type = other DNA
tattcccttattgattaacgaaaatgtgatctccagcggaatttctctgatctcgctctggcatacctacgccga

SEQ ID NO: 698462 - DNA, 75 bp, synthetic construct
  source 1..75: mol_type = other DNA
tttatttgcgccgccattccggacgaacaggcaataaaggaagaaggtgcagtcgctgtagccactgccattgaa

SEQ ID NO: 698463 - DNA, 75 bp, synthetic construct
  source 1..75: mol_type = other DNA
ctgctggagcagggcaaagcgagttatacccatgttggccatgacggctcagggcgcttccgtcagggcgtcttt

SEQ ID NO: 698464 - DNA, 75 bp, synthetic construct
  source 1..75: mol_type = other DNA
aatgtgatagcgaacgcaggcaacaacgcagatatcggcgtagtaaaaaatatgtttatcggtgtgggtcaggcg

SEQ ID NO: 698465 - DNA, 75 bp, synthetic construct
  source 1..75: mol_type = other DNA
cagcagagtgtaaaagatctgacgcaggcggcgatcctgctaagcgcacccaagggtatggcgatcgccagcgga

SEQ ID NO: 698466 - DNA, 75 bp, synthetic construct
  source 1..75: mol_type = other DNA
aaaacacgactcggcacacaccgaccatgtgaccattcagaactacaagcgcaacgtgctgcgcacccccgccaa

SEQ ID NO: 698467 - DNA, 75 bp, synthetic construct
  source 1..75: mol_type = other DNA
gtttatttcacgcctgctgtcagaagtgggtatctggttccgctttgccaccgacgcccggttgaaaatcgaagt

SEQ ID NO: 698468 - DNA, 75 bp, synthetic construct
  source 1..75: mol_type = other DNA
accgggttatgaaagcctgtgggtacgccagtcgcgcccgtatgcgggagacacctacggcctgcacttgccgct

SEQ ID NO: 698469 - DNA, 75 bp, synthetic construct
  source 1..75: mol_type = other DNA
gatgcacgcgccgaaaggagtggcggtcgccagcggcgagcacctgcaactggccgccgtgaaaaacctccagat

SEQ ID NO: 698470 - DNA, 75 bp, synthetic construct
  source 1..75: mol_type = other DNA
actcggcacacaccgaccatgtgaccattcagaactacaagcgcaacgtactgcgcaccccggcgaacaacaaaa

SEQ ID NO: 698471 - DNA, 75 bp, synthetic construct
  source 1..75: mol_type = other DNA
ctaatatcctctgataaggaggaggtcgttaatattagtgtgtttgaacccgatgagtttttagacgatgaaatt

SEQ ID NO: 698472 - DNA, 75 bp, synthetic construct
  source 1..75: mol_type = other DNA
cagagcggctacgagcgcgggctgacactgccgcttcgccatccttcagggctgtttgatggtgaaacggaagcg

SEQ ID NO: 698473 - DNA, 75 bp, synthetic construct
  source 1..75: mol_type = other DNA
atgatgtcagagactctggcggagctcaaaaaatcagcgatgctactttcggctccggaaggaatagcgcaggtt

SEQ ID NO: 698474 - DNA, 75 bp, synthetic construct
  source 1..75: mol_type = other DNA
ggctatgagcgcgggctgacgctgccgcttcgccatccttctgggctgtttgatggtgaaacggaagccgtatgg

SEQ ID NO: 698475 - DNA, 75 bp, synthetic construct
  source 1..75: mol_type = other DNA
ctatgagagcctgtgggtacgccagtcgcgcccgtatgcgggagacacctacggtctgcacctgccgctgctggc

SEQ ID NO: 698476 - DNA, 75 bp, synthetic construct
  source 1..75: mol_type = other DNA
aatgaacaggccattctcaaaggccagagcaccagttcactgctgattccggggctggaaatcagggttcagggc

SEQ ID NO: 698477 - DNA, 75 bp, synthetic construct
  source 1..75: mol_type = other DNA
ggcagcggtgaaaaacctccagataaatgcgggaaacaacgccgatatcggcgtggtgaagaatatgtttatcgg

SEQ ID NO: 698478 - DNA, 75 bp, synthetic construct
  source 1..75: mol_type = other DNA
aagagcatatcaaggtcagtaccgaatatggcggcaagagccagctaaacctcggccatcttgttgatgccggga

SEQ ID NO: 698479 - DNA, 75 bp, synthetic construct
  source 1..75: mol_type = other DNA
gatgatgatggtctaccttatgccaacacaaaatatattgcatgtttttctgatggcactcaaaaagaaggtatt

SEQ ID NO: 698480 - DNA, 75 bp, synthetic construct
  source 1..75: mol_type = other DNA
cacaccacaagctcaaaattcgcggcctgcaaagcccggtggatgtgctgacctttgaaggccgcgagcaactga

SEQ ID NO: 698481 - DNA, 75 bp, synthetic construct
  source 1..75: mol_type = other DNA
cagggttaactgatgaaaaagggttcactgaaactatttatacggataaaaaacaaaagattagcattcatattg

SEQ ID NO: 698482 - DNA, 75 bp, synthetic construct
  source 1..75: mol_type = other DNA
gtactgatctgtggggtgcggtgcgggcaaagaaaggcatctttatcagcgccgatgcgcaggataaggcgcagg

SEQ ID NO: 698483 - DNA, 75 bp, synthetic construct
  source 1..75: mol_type = other DNA
gatgcacgcaccgaaaggggtggcggtcgccagcggcgagcacctgcaactggccgccgtgaaaaacctccagat

SEQ ID NO: 698484 - DNA, 75 bp, synthetic construct
  source 1..75: mol_type = other DNA
gatgcacgcaccgaaaggcgtggcggtcgccagcggcgagcacctgcaactggccgcggtgaaaaacctccagat

SEQ ID NO: 698485 - DNA, 75 bp, synthetic construct
  source 1..75: mol_type = other DNA
aagggggggaagatagagctggggagtcctgggaatatcctgctgaagtcagtgaatgtgcagaagatgagtaaa

SEQ ID NO: 698486 - DNA, 75 bp, synthetic construct
  source 1..75: mol_type = other DNA
gatgcacgccccgaaaggggtggcggtcgccagcggcgagcacctgcaactggccgcagtgaaaaacctccagat

SEQ ID NO: 698487 - DNA, 75 bp, synthetic construct
  source 1..75: mol_type = other DNA
gatgcacgccccgaaaggagtggcggtcgccagcggcgagcacctgcaactggccgcggtgaaaaacctccagat

SEQ ID NO: 698488 - DNA, 75 bp, synthetic construct
  source 1..75: mol_type = other DNA
gatgcacgctccgaaaggcgtggcggtcgccagcggcgagcacctgcaactggccgctgtgaaaaacctccagat

SEQ ID NO: 698489 - DNA, 75 bp, synthetic construct
  source 1..75: mol_type = other DNA
aggcagcggaaagcggcgcgttttatgcccgtatccgtcacgaacgctacctgaatgaacaggccattctcaaag

SEQ ID NO: 698490 - DNA, 75 bp, synthetic construct
  source 1..75: mol_type = other DNA
ggtgcattacgggcgccagccgaaagcctcggaaaaggttcctatgccagaatttcccatcctttcagccgtgga

SEQ ID NO: 698491 - DNA, 75 bp, synthetic construct
  source 1..75: mol_type = other DNA
cgcaccgaaaggcgtggcggtcgccagcggcgagcacctgcaactggcagcggtgaaaaacctccagataaatgc

SEQ ID NO: 698492 - DNA, 75 bp, synthetic construct
  source 1..75: mol_type = other DNA
ctgaataaagcattatcagaactggcagaggcgggaatcgtgttgtctgccccgaagggcgtgggggtagtgagt

SEQ ID NO: 698493 - DNA, 75 bp, synthetic construct
  source 1..75: mol_type = other DNA
ccatcttgttgatgccgggaaagaacagcgtggcgaaggctttgaactgcgtaccgatctgtggggcgcggtgcg

SEQ ID NO: 698494 - DNA, 75 bp, synthetic construct
  source 1..75: mol_type = other DNA
gatgcctgcggaatagaagcgggaacgccgggagaatataacgttaaggcgggatattatgggcgtaagccgaag

SEQ ID NO: 698495 - DNA, 75 bp, synthetic construct
  source 1..75: mol_type = other DNA
atgaatgcactgaccgccgtacacactaacgctgtcgattcaggccaggactatagcggattcaccctcaccccg

SEQ ID NO: 698496 - DNA, 75 bp, synthetic construct
  source 1..75: mol_type = other DNA
acaaatcgtttctgcgttttcgggtaggcaaaattcttgacgatctgtgtgcgaatcagctgcaaccgttgctgt

SEQ ID NO: 698497 - DNA, 75 bp, synthetic construct
  source 1..75: mol_type = other DNA
tcggcgcaatccccgcgtctgctggaactcaccttcaccgaacagacgaccaaacagtttctcgaacaggttgcc

SEQ ID NO: 698498 - DNA, 75 bp, synthetic construct
  source 1..75: mol_type = other DNA
atgaatgcactgaccgccgtacaaaataacgctgtcgattcaggccaggactatagcggattcaccctcaccccg

SEQ ID NO: 698499 - DNA, 75 bp, synthetic construct
  source 1..75: mol_type = other DNA
caaacagtttctcgagcaggttgccgaatggcccgtgcaggcgctggagtacaaatcgtttctgcgttttcgggt

SEQ ID NO: 698500 - DNA, 75 bp, synthetic construct
  source 1..75: mol_type = other DNA
attacgcgcgttttgtagtgaaaaatgtcgataactcagacagctatctgcgtcagccgcaccgcgtaatggagc

SEQ ID NO: 698501 - DNA, 75 bp, synthetic construct
  source 1..75: mol_type = other DNA
catcgctgaaccgaaagcgttaatcggctttgccggtccgcgtgttatcgaacagaccgttcgcgaaaaactgcc

SEQ ID NO: 698502 - DNA, 75 bp, synthetic construct
  source 1..75: mol_type = other DNA
cgtgcgtgccgttgagcaggcgctggaagataactgcccactgatctgcttctccgcctctggtggcgcacgtat

SEQ ID NO: 698503 - DNA, 75 bp, synthetic construct
  source 1..75: mol_type = other DNA
agaccgtctggcatctgcgcagaaagaaaccggcgaaaaagatgcgctggtggtgatgaaaggcaccctgtatgg

SEQ ID NO: 698504 - DNA, 75 bp, synthetic construct
  source 1..75: mol_type = other DNA
ttattcgcggtgggcgctttcagaccgcagtttatgacctgcttaaaaatggcttttcgatctcctggtatgata

SEQ ID NO: 698505 - DNA, 75 bp, synthetic construct
  source 1..75: mol_type = other DNA
gcttactgagacggtcagcaaaggcaaggctgcaattattgatggtaatgataacggtgatgcagggataatgat

SEQ ID NO: 698506 - DNA, 75 bp, synthetic construct
  source 1..75: mol_type = other DNA
gaatttgcctttatgggcggttcaatgggatccgtagtgggtgctcgttttgtgcgtgccgttgagcaggcgctg

SEQ ID NO: 698507 - DNA, 75 bp, synthetic construct
  source 1..75: mol_type = other DNA
acgatacagagtgagtctaacagaaaatgcatttgaaaaaattattgtaagcgatagaaaagagaaggttgaaca

SEQ ID NO: 698508 - DNA, 75 bp, synthetic construct
  source 1..75: mol_type = other DNA
tcatgcgctacctggttttgaagacggatgggttaccgttcaggatgcatcagcacaaggttgcatgacctggct

SEQ ID NO: 698509 - DNA, 75 bp, synthetic construct
  source 1..75: mol_type = other DNA
tgatcaaaacgttggtctggtgcgataacgaatggggctttgctaaccgaatgctcgacacgacgttagcgatgg

SEQ ID NO: 698510 - DNA, 75 bp, synthetic construct
  source 1..75: mol_type = other DNA
taaaaaagtgctcttttcacatcctggcagtaacgatctcgacgcgaccgttgtttacggcgtcaatcaggatca

SEQ ID NO: 698511 - DNA, 75 bp, synthetic construct
  source 1..75: mol_type = other DNA
accggaacaccagagcaaccgggtaagcagaatctgccagacgctgaagaaggtgacggcttcttttacgctaag

SEQ ID NO: 698512 - DNA, 75 bp, synthetic construct
  source 1..75: mol_type = other DNA
cagttgcagtctgaaattctcgacgccatctggccgcatttaaaatccggtggaaccctggtctatgccacctgt

SEQ ID NO: 698513 - DNA, 75 bp, synthetic construct
  source 1..75: mol_type = other DNA
aatggtgtggcgagcaacagtttgatcgcattttattagatgcgccttgttcagcaacgggggtgattcgtcgcc

SEQ ID NO: 698514 - DNA, 75 bp, synthetic construct
  source 1..75: mol_type = other DNA
aaaccaataattcagatgtttgattttgaaggattatggacagagattggttatgaaaaaatagatggtgaatta

SEQ ID NO: 698515 - DNA, 75 bp, synthetic construct
  source 1..75: mol_type = other DNA
gggaagttcgccaggaacgcgatcagctttttgttggtggtgacgccatccgcgtattgcatgaacgttcactgc

SEQ ID NO: 698516 - DNA, 75 bp, synthetic construct
  source 1..75: mol_type = other DNA
tacaatgctgatgatctaataaaacctgatgaagaaaaccctgacgactacctgctatttctcactaccggagag

SEQ ID NO: 698517 - DNA, 75 bp, synthetic construct
  source 1..75: mol_type = other DNA
tttgatgatgagtcgcatttgtttggggtgataacgtacatcatcaatgatgcgcgttctggtgagtttgatgat

SEQ ID NO: 698518 - DNA, 75 bp, synthetic construct
  source 1..75: mol_type = other DNA
gacagttcactgatgccgtttgatggctcgttgctgatttgttcagttgacaatgagttcagagtgaagcgatac

SEQ ID NO: 698519 - DNA, 75 bp, synthetic construct
  source 1..75: mol_type = other DNA
catccgcgactacaatcgcgttgcgctgcttagtgcggtcgctggtggtcgtcagctatctgatttacggctgct

SEQ ID NO: 698520 - DNA, 75 bp, synthetic construct
  source 1..75: mol_type = other DNA
cagatggcgaaaacctctgcggcactggcaaaaatgcaggagcgcggcttgccgtacatctccgtgctgaccgac

SEQ ID NO: 698521 - DNA, 75 bp, synthetic construct
  source 1..75: mol_type = other DNA
aaaagtaaaggtacaattacaaacgccgcaagctgcggatcagggaggctggtaggggctgtcgttacactttct

SEQ ID NO: 698522 - DNA, 75 bp, synthetic construct
  source 1..75: mol_type = other DNA
ttaatggatgatattgcacatctgaaacaggaaaaccgcctgctgcgccagcggctttcccggtttgtggctcat

SEQ ID NO: 698523 - DNA, 75 bp, synthetic construct
  source 1..75: mol_type = other DNA
atgggggtaacatcgggatgggtcggttcttcggccaagaacgaaacgggcgaacaatggatgagcgccgcaggt

SEQ ID NO: 698524 - DNA, 75 bp, synthetic construct
  source 1..75: mol_type = other DNA
gatggaatcgctgcggtttgatgcgcatgagttgctgattatccatcttccgcgccatgtactcgtgtacgacgc

SEQ ID NO: 698525 - DNA, 75 bp, synthetic construct
  source 1..75: mol_type = other DNA
gttcgccgattcgtatgcgttcatcagcaatccggcaacaggtgcgccgtctgtgtatatcatcggctccggtca

SEQ ID NO: 698526 - DNA, 75 bp, synthetic construct
  source 1..75: mol_type = other DNA
tggatatctatcagcaattaatttctgagcttgatattgaacaaaggcaaattgaaatttctgtctcaattattg

SEQ ID NO: 698527 - DNA, 75 bp, synthetic construct
  source 1..75: mol_type = other DNA
tcgccggaacttactgcaaaacgccgtttgctgattcctatgcgttcatcagcaatccggcaacaggtgcgccgt

SEQ ID NO: 698528 - DNA, 75 bp, synthetic construct
  source 1..75: mol_type = other DNA
attgagaaaatactacgctcctacactgctgatgaactggctgatggcgtgatggaatcgctgcggtttgatgcg

SEQ ID NO: 698529 - DNA, 75 bp, synthetic construct
  source 1..75: mol_type = other DNA
ccatcgttgatggtgcagaaaggtattgccgggacttactgcaaaactccgttcgccgattcgtatgctttcatc

SEQ ID NO: 698530 - DNA, 75 bp, synthetic construct
  source 1..75: mol_type = other DNA
caaagccgcaaaaagtgacgctgatggtggatgacgttccggtggctcaggtgttgcaggcgctggctgaacagg

SEQ ID NO: 698531 - DNA, 75 bp, synthetic construct
  source 1..75: mol_type = other DNA
ggggagaagctacttagcgccaaaggcagcatgactgtcgataaacgcactaatcgccttttgctgcgtgataac

SEQ ID NO: 698532 - DNA, 75 bp, synthetic construct
  source 1..75: mol_type = other DNA
taaaaataaatcgggtcaggatagcgtaccgttgcttggcgacattccctggttcgggcaattatttcgtcatga

SEQ ID NO: 698533 - DNA, 75 bp, synthetic construct
  source 1..75: mol_type = other DNA
ctttatttacgaaggcaatcagataacgtgcggcgataagctggagtccgtgaccgggaaccaaagagtagttgg

SEQ ID NO: 698534 - DNA, 75 bp, synthetic construct
  source 1..75: mol_type = other DNA
ggatgccggagtccctcttgaggacgttctgcgatttaccgggctgtcagaggaagaattggctgcggcgaacca

SEQ ID NO: 698535 - DNA, 75 bp, synthetic construct
  source 1..75: mol_type = other DNA
tgaatccggagtccctcttgaggacgttctgcgatttaccgggctgtcagaggaagagttggctgcggcgagtca

SEQ ID NO: 698536 - DNA, 75 bp, synthetic construct
  source 1..75: mol_type = other DNA
cttcatttacgaaggcaatcagataacgtgcggcgataagctggagtccgtgaccgggaaattgcaattcgatat

SEQ ID NO: 698537 - DNA, 75 bp, synthetic construct
  source 1..75: mol_type = other DNA
ttgatgcagctcaggcgcttagctattctaggttttctgggcatgttcagcaaagtgacgatcagcatcgtcttg

SEQ ID NO: 698538 - DNA, 75 bp, synthetic construct
  source 1..75: mol_type = other DNA
cagcaattcaggcatactctgaattgcagcaagcctatgatttttttaatgcaacgctgtttgagcagatgttgc

SEQ ID NO: 698539 - DNA, 75 bp, synthetic construct
  source 1..75: mol_type = other DNA
ggtgaaaacggagcaagggccaggatatatctattgcctgattgaacatcaaagcacctcaaacagactgatcgc

SEQ ID NO: 698540 - DNA, 75 bp, synthetic construct
  source 1..75: mol_type = other DNA
ccagtgaatatgttggctacacccaaagaaatccttaacagcagcggatatcttcgctcattcccgggcattgcc

SEQ ID NO: 698541 - DNA, 75 bp, synthetic construct
  source 1..75: mol_type = other DNA
tgaaaggtgtcggcaaagacttccgaaacgccgactatatcgactatctgccagtgaatatgctggctacaccca

SEQ ID NO: 698542 - DNA, 75 bp, synthetic construct
  source 1..75: mol_type = other DNA
attcatggtttatcactgaccttgaagacgaatcgcaccctgaccgatacagcgcacaatatcgcgcagaatcgc

SEQ ID NO: 698543 - DNA, 75 bp, synthetic construct
  source 1..75: mol_type = other DNA
ggtgtcaccaatcgccagcgcgagcattgagaaaatactccgctcctacactgctgatgaactggctgatggcgt

SEQ ID NO: 698544 - DNA, 75 bp, synthetic construct
  source 1..75: mol_type = other DNA
agtagggcgcatcaggaaaaacattggtttcaaattgcgcgttatcacgaagtcacctgtcactctgtctggctg

SEQ ID NO: 698545 - DNA, 75 bp, synthetic construct
  source 1..75: mol_type = other DNA
cgcgtggcgtcgagtacaacatggcgcagaatgctgtttatcgcgtgtgtggcggcaagctgtataagggcgaaa

SEQ ID NO: 698546 - DNA, 75 bp, synthetic construct
  source 1..75: mol_type = other DNA
atggacttattgccttttttactggacgcgaacctcagcgcgacaaacccacccgctattccgcactggtggaag

SEQ ID NO: 698547 - DNA, 75 bp, synthetic construct
  source 1..75: mol_type = other DNA
gcgaacctcagcgcgacaaacccacccgctattccgcactggtggaagcgtcaaccgcttattcccaaccttctg

SEQ ID NO: 698548 - DNA, 75 bp, synthetic construct
  source 1..75: mol_type = other DNA
aaattaaaaatgcggttattgaagcggaagcaacgattggtccgcaatgctttattgccgactcggtagttgcaa

SEQ ID NO: 698549 - DNA, 75 bp, synthetic construct
  source 1..75: mol_type = other DNA
gtgatcgtctttacctttttgctgttccaaaaaattcgtactgctgatagcgcccctgctatggctagcagcaag

SEQ ID NO: 698550 - DNA, 75 bp, synthetic construct
  source 1..75: mol_type = other DNA
gggtaatgctctgtattcaggtcgcctttgcgataacgacgattttaatgctgtggtcggtgtcgattaaagccg

SEQ ID NO: 698551 - DNA, 75 bp, synthetic construct
  source 1..75: mol_type = other DNA
gtcggtgtcgattaaagccgcatcgttgctgggcgatcatagcgagcaagggaaaattatgggctggatggaagg

SEQ ID NO: 698552 - DNA, 75 bp, synthetic construct
  source 1..75: mol_type = other DNA
acgggaaatttacccagcctttctctctggtgaaccagccagatgccgttggcgcgccgattaacgccggtgatt

SEQ ID NO: 698553 - DNA, 75 bp, synthetic construct
  source 1..75: mol_type = other DNA
tataaagtaccgcaagatattgtagtgcccatggccttcaggattaataactacacctttatcgaaaggaaataa

SEQ ID NO: 698554 - DNA, 75 bp, synthetic construct
  source 1..75: mol_type = other DNA
gttataaaactacaagggcaaaaatttacatgcattgaagattttcataaaaagtataatgaaatcaggctaaag

SEQ ID NO: 698555 - DNA, 75 bp, synthetic construct
  source 1..75: mol_type = other DNA
ataggtaattatgcgtttattcgtcctggcacaataatcagcaatggcgtaagaattggttttgccaccgaaatt

SEQ ID NO: 698556 - DNA, 75 bp, synthetic construct
  source 1..75: mol_type = other DNA
tgcaggagtggctacgcgcaggcggtgatacccgcaatatgcgtcagttcggcattgacgcctggcagatggaag

SEQ ID NO: 698557 - DNA, 75 bp, synthetic construct
  source 1..75: mol_type = other DNA
aatttcattatggatgtgcagggtagtgggtatatcgactttggtgatggcagtccgcttaactttttcagctat

SEQ ID NO: 698558 - DNA, 75 bp, synthetic construct
  source 1..75: mol_type = other DNA
ccgctcaggcgctggaagaagcggcggtagaagccggttatgaagtgaaaattgaaacccagggcgcggacggta

SEQ ID NO: 698559 - DNA, 75 bp, synthetic construct
  source 1..75: mol_type = other DNA
tggaatatcaccggacatgttctgcgttacctgattgttgaccggacggccgcgcctgccgggatatctgcggag

SEQ ID NO: 698560 - DNA, 75 bp, synthetic construct
  source 1..75: mol_type = other DNA
caagctgtcgaacgcgcaggtaattgatgtcaccaaaatgccaaacaatggtcgcgtgatttttggcgctaccgt

SEQ ID NO: 698561 - DNA, 75 bp, synthetic construct
  source 1..75: mol_type = other DNA
tgcaactggccttccgtactcgcatcaaactgttttatcgtccggaaggactcaccggaataccttccgatgctc

SEQ ID NO: 698562 - DNA, 75 bp, synthetic construct
  source 1..75: mol_type = other DNA
cagaacaagctctgcaaaagtgcattttttcgccattaatgattttggtggatctattgaaggcaacgccaacct

SEQ ID NO: 698563 - DNA, 75 bp, synthetic construct
  source 1..75: mol_type = other DNA
aaccatcaaactgatgtacaccgccagcagcgtcctgccaaaagacagagaaagtgtgttctggtttaacgtact

SEQ ID NO: 698564 - DNA, 75 bp, synthetic construct
  source 1..75: mol_type = other DNA
agtggtcctgggcaacatctgaaggcaaagcagcattacgcgttgataaccctacgccctactatgtctctttta

SEQ ID NO: 698565 - DNA, 75 bp, synthetic construct
  source 1..75: mol_type = other DNA
ttaatttacacattcactaaatcattcaaagggaatttgattgatttagtgacgaactcttctttttttgttgaa

SEQ ID NO: 698566 - DNA, 75 bp, synthetic construct
  source 1..75: mol_type = other DNA
atgacacgaaacaccgaactcacccgcaccgccctctaccgtctggctctgcagcgtttcgggccggatgcacag

SEQ ID NO: 698567 - DNA, 75 bp, synthetic construct
  source 1..75: mol_type = other DNA
gaatcccgggatgtttacgaaatcactttacaggacgcaattaaaaacgcggcaggcatcatcaaagaaatcgaa

SEQ ID NO: 698568 - DNA, 75 bp, synthetic construct
  source 1..75: mol_type = other DNA
cgcgttgataaccctacgccctactatgtctcttttagcagtggtgatttagaagccaacggcaaacgctatccc

SEQ ID NO: 698569 - DNA, 75 bp, synthetic construct
  source 1..75: mol_type = other DNA
tccagccaactgtacttccgagtgtactggcattggtgatgaccgcagtgttcgacgccactggcaccatccgtg

SEQ ID NO: 698570 - DNA, 75 bp, synthetic construct
  source 1..75: mol_type = other DNA
gcgtttaccgcattcagtctggtgctggggcaacatattagcgtacctgtcgcgctgggtgccgtgttcctgatg

SEQ ID NO: 698571 - DNA, 75 bp, synthetic construct
  source 1..75: mol_type = other DNA
tagcacgcccgtcatgattaaactcatctctgcggcatttaccttaggatttggaatgtcggtatattacatggc

SEQ ID NO: 698572 - DNA, 75 bp, synthetic construct
  source 1..75: mol_type = other DNA
cggaatgggcattccaatcggtaaattgtcgctctataccgcctgtggcggcatcagcccggcgtatacgcttcc

SEQ ID NO: 698573 - DNA, 75 bp, synthetic construct
  source 1..75: mol_type = other DNA
ctataatgtatacatcagttattgacaagaagtttgaagatgaacatggggtatatcttcatcaggtttacaaag

SEQ ID NO: 698574 - DNA, 75 bp, synthetic construct
  source 1..75: mol_type = other DNA
atgtatgaaaccggcaaagatatgaacgataaataccgcgaaacatcacgcggaggactggctattaaagtggtc

SEQ ID NO: 698575 - DNA, 75 bp, synthetic construct
  source 1..75: mol_type = other DNA
gcgtggcggtgaaaacgtctgccgaagctctgcaacaggccattgatgataacttctggcaagccgaataccgcg

SEQ ID NO: 698576 - DNA, 75 bp, synthetic construct
  source 1..75: mol_type = other DNA
cttggcgcaggttcagcgggatgcggcattgccgaaatgatcatcgcccagactcagcgtgaaggattaagcgag

SEQ ID NO: 698577 - DNA, 75 bp, synthetic construct
  source 1..75: mol_type = other DNA
ggcaggactgttcacggaagagatcattcgcgagatgcacaagcattgcccgcgcccgatcgtcatgccgctctc

SEQ ID NO: 698578 - DNA, 75 bp, synthetic construct
  source 1..75: mol_type = other DNA
gcgctggcagcggagaatgcggggatgaagtctggcgctatggacgaaatcaaggttatcaaccgtggagggcag

SEQ ID NO: 698579 - DNA, 75 bp, synthetic construct
  source 1..75: mol_type = other DNA
ggatggatcaccgttcaggatgcatcggcgcaaggttgcgtaacttatctggatccacaaaacggtgagaatatt

SEQ ID NO: 698580 - DNA, 75 bp, synthetic construct
  source 1..75: mol_type = other DNA
gtaaaacaacgcatatccttgaggtggcaccagaagcgcaggttgttgcggttgatatcgacgaacagcgcctct

SEQ ID NO: 698581 - DNA, 75 bp, synthetic construct
  source 1..75: mol_type = other DNA
ccacagccatcgtcgcgatatggatgtaacgatcgttgttcattcgcctggtcgcatcggttcaacaccatcagt

SEQ ID NO: 698582 - DNA, 75 bp, synthetic construct
  source 1..75: mol_type = other DNA
gctggctgagttattctccagtgaaaaagatttacaggaattacatcaggctcgtaacctggaggaaataaaaac

SEQ ID NO: 698583 - DNA, 75 bp, synthetic construct
  source 1..75: mol_type = other DNA
caaacggtcaatgctgcaatcaggcgcgttactgcgatttttaacgaagttatcccggaagatgagcagttagaa

SEQ ID NO: 698584 - DNA, 75 bp, synthetic construct
  source 1..75: mol_type = other DNA
catacccgccgtcggtgaacacctactggcgaagacggggaagccaatactacatcagcgataaaggccagaaat

SEQ ID NO: 698585 - DNA, 75 bp, synthetic construct
  source 1..75: mol_type = other DNA
ctggcgccgctgttttacagcacgcagatccgcgccacaggcgtgggaaccgccgtcgcagtcgggcgtctgggg

SEQ ID NO: 698586 - DNA, 75 bp, synthetic construct
  source 1..75: mol_type = other DNA
ttgctttttagttgccctgatggaagggctggatttacaggccgccggtatcgctgctgtcggtatcgcccacgc

SEQ ID NO: 698587 - DNA, 75 bp, synthetic construct
  source 1..75: mol_type = other DNA
tcgtcctggcacaataatcagcaatggcgtaaaaattggttttgccaccgaaattaaaaatgcggttattgaagc

SEQ ID NO: 698588 - DNA, 75 bp, synthetic construct
  source 1..75: mol_type = other DNA
atatctgcggcatttactttaggatttgcttacgccgcctggaatgtcggtattttacatggcaacgtaacgatt

SEQ ID NO: 698589 - DNA, 75 bp, synthetic construct
  source 1..75: mol_type = other DNA
tagccctggtcggcgtctgctgggtgttaggcggtgataatgggttacattatgatgaaatcatcaataatatta

SEQ ID NO: 698590 - DNA, 75 bp, synthetic construct
  source 1..75: mol_type = other DNA
tttcttcgctctttaagcagcgtgaaaaacgtcgttgtaaagacaagcgcgcgaaggcgctaaatgcgtttaatg

SEQ ID NO: 698591 - DNA, 75 bp, synthetic construct
  source 1..75: mol_type = other DNA
aacgtgcgaaagctttagcggaaaggattcgggaaaatgttgagcgtttaactggcgataatcctgaatacgcta

SEQ ID NO: 698592 - DNA, 75 bp, synthetic construct
  source 1..75: mol_type = other DNA
gctgcgcctgattctcgacaacgaaagcaaggtaaagcagttattacagattcggatggatgaactggcgaaact

SEQ ID NO: 698593 - DNA, 75 bp, synthetic construct
  source 1..75: mol_type = other DNA
actgaagaggttgccccgtccaccacgatgcaggagcagctccgcccgatgctgcgcctgattctcgacaacgaa

SEQ ID NO: 698594 - DNA, 75 bp, synthetic construct
  source 1..75: mol_type = other DNA
aggttcggcattacccgttggtgtgcctgttccgtggccttccgccactccgccaacaggctggctaaaatgcaa

SEQ ID NO: 698595 - DNA, 75 bp, synthetic construct
  source 1..75: mol_type = other DNA
accgccgtagcgcctcccgtctggctgagccagcgccaacgggtgagcaactgcaaaatatcctgcgcgcgggta

SEQ ID NO: 698596 - DNA, 75 bp, synthetic construct
  source 1..75: mol_type = other DNA
tccagaaacaggtttacacgctgacactggcagatcagcgtcatgtggtcagtgaaatcagtaatggtgtgaatc

SEQ ID NO: 698597 - DNA, 75 bp, synthetic construct
  source 1..75: mol_type = other DNA
ctaaatttaactatcgagagtggcaggttagtggtaaactttattctcaggtaaaatattatctatataaaaact

SEQ ID NO: 698598 - DNA, 75 bp, synthetic construct
  source 1..75: mol_type = other DNA
tatggcatcaatgtgggggccagcggctcagatgatttgctgggagcggtgttggtggatgtgaaaggtttctct

SEQ ID NO: 698599 - DNA, 75 bp, synthetic construct
  source 1..75: mol_type = other DNA
accgataccataaacagcgcggttaacgggcgttgggatggccaatatggaaatgtctacgctactgtctcagac

SEQ ID NO: 698600 - DNA, 75 bp, synthetic construct
  source 1..75: mol_type = other DNA
ctcacccgcaccgagctagtaccgtttaccaaaacaggcggtctgacggacggaaatgcgcaatggttcttacag

SEQ ID NO: 698601 - DNA, 75 bp, synthetic construct
  source 1..75: mol_type = other DNA
ggtgcgatcctgatagcgaaacagcagtgatgagactgttggagttaaaacagcgtccggttgataaggggctga

SEQ ID NO: 698602 - DNA, 75 bp, synthetic construct
  source 1..75: mol_type = other DNA
atgctgactgacgcgcagcgtgaaactatattttctcgctggccaggtcctgtcacctttgtttttcccgcgcct

SEQ ID NO: 698603 - DNA, 75 bp, synthetic construct
  source 1..75: mol_type = other DNA
aatcatgatcatctctcggcctttacggggacttacagctctacactggctgtcagtcgctatggcgttaatttg

SEQ ID NO: 698604 - DNA, 75 bp, synthetic construct
  source 1..75: mol_type = other DNA
cccactttctaagattgaaagtgtactcgaagttcaaccgacaacgggcttcacatcaggcgtattcagatcatt

SEQ ID NO: 698605 - DNA, 75 bp, synthetic construct
  source 1..75: mol_type = other DNA
cagaccgtacaggaaaaatgatttctaactcggttttatatgatcttcccgtatggcggttgcagagaggaaaca

SEQ ID NO: 698606 - DNA, 75 bp, synthetic construct
  source 1..75: mol_type = other DNA
atgatgataaaccccgaagcttccctgtttggcaaccttgtcgcccaggccgcctgtgcagcggatgcggtggcg

SEQ ID NO: 698607 - DNA, 75 bp, synthetic construct
  source 1..75: mol_type = other DNA
agtagaaataatctacaatgatgaagaaagttcagcaacgctatttcttaatccgcaatggagttctgcgtttaa

SEQ ID NO: 698608 - DNA, 75 bp, synthetic construct
  source 1..75: mol_type = other DNA
agctctatgcaggcctggcgaatgccgatgatgtgaattcattcgaactcggtaataactggacgtcgagtttag

SEQ ID NO: 698609 - DNA, 75 bp, synthetic construct
  source 1..75: mol_type = other DNA
atgccgcactttatcgttgaatgcagtgacaacatccgcgaagaagccgacctgccggggttgttcgccaaagtg

SEQ ID NO: 698610 - DNA, 75 bp, synthetic construct
  source 1..75: mol_type = other DNA
ctatcgcgactgcggtagatgtcctcaatgaagaacgagtcatcgcttacccaacggaagccgttttcggtgtcg

SEQ ID NO: 698611 - DNA, 75 bp, synthetic construct
  source 1..75: mol_type = other DNA
cgcgaatggcaaaagctgaatattggtacggtgatcattactgccgcactggtcgcattttacgcgggtggttgg

SEQ ID NO: 698612 - DNA, 75 bp, synthetic construct
  source 1..75: mol_type = other DNA
acaggtatcggtattggtctgttcctgctactgattgccgctaacggcgttggtatggttatcaaaaacccgatt

SEQ ID NO: 698613 - DNA, 75 bp, synthetic construct
  source 1..75: mol_type = other DNA
tccagccgactgtgctcccaagcgtgctggcactggtgatgaccgcggttttcgacgcaaccgggaccatccgcg

SEQ ID NO: 698614 - DNA, 75 bp, synthetic construct
  source 1..75: mol_type = other DNA
gtctttgctcgcgaatggcaaaaactgaatattggtacggttatcattaccgtcgccctggtcgcgttttacgct

SEQ ID NO: 698615 - DNA, 75 bp, synthetic construct
  source 1..75: mol_type = other DNA
tatatcgaatcagcggcaggaaccgccgccggaggcaaaaccggtttgaccgctaccgtggttggtgcattgttc

SEQ ID NO: 698616 - DNA, 75 bp, synthetic construct
  source 1..75: mol_type = other DNA
cggacgcaccaaagccacagggcgcgctggataattattttaaaattaccgctcgtggcagcagcgttcgccagg

SEQ ID NO: 698617 - DNA, 75 bp, synthetic construct
  source 1..75: mol_type = other DNA
ttaatgccattcgtacgctgattaccttacgcacgcgcagcttatggataatggcgatcttcatcgtgctgacgg

SEQ ID NO: 698618 - DNA, 75 bp, synthetic construct
  source 1..75: mol_type = other DNA
tatcctgccggtgccagtgccatccttaatgccattcgtacattgattaccttacgcacgcgcagcttatgggta

SEQ ID NO: 698619 - DNA, 75 bp, synthetic construct
  source 1..75: mol_type = other DNA
cgctgtttcgctgtaaagggctgaccatgcgctgcgtgatgtggttttcaacgtgttgctgggtgattcacaact

SEQ ID NO: 698620 - DNA, 75 bp, synthetic construct
  source 1..75: mol_type = other DNA
accgcattcagtctggtactcgggcaacaaattagcgttcctgtcgcactgggcgcggtctttctgatgggcgtc

SEQ ID NO: 698621 - DNA, 75 bp, synthetic construct
  source 1..75: mol_type = other DNA
gtgctgcgaacaaaaagttaattccctggtttaaaaccatggggaaacaaattggtttatcacaatctctgatag

SEQ ID NO: 698622 - DNA, 75 bp, synthetic construct
  source 1..75: mol_type = other DNA
cgacctgcgttttccggtgtggtcgcgcaatctcaacgattatgacctcgccatctacgttgccaactggcctgc

SEQ ID NO: 698623 - DNA, 75 bp, synthetic construct
  source 1..75: mol_type = other DNA
ggtacaaatatccgctgatttcctggctcagtatcatgaccagcaccggctgcttccagggtggagatatggaca

SEQ ID NO: 698624 - DNA, 75 bp, synthetic construct
  source 1..75: mol_type = other DNA
atggtgtcggtctggtgattaaaaacccgcttgatggtctgcccgttgcgctgggtgatttcgcgaccttcccgg

SEQ ID NO: 698625 - DNA, 75 bp, synthetic construct
  source 1..75: mol_type = other DNA
ggtctgtgggctaatctgccgttggcgattggttgcgccatctccctgacggcatttaccgcattcagcctggtg

SEQ ID NO: 698626 - DNA, 75 bp, synthetic construct
  source 1..75: mol_type = other DNA
cctctcttgactctatccgcgaaaacccaaacaacggacgctccatttcacaggttcgcaccgcgattcgatccg

SEQ ID NO: 698627 - DNA, 75 bp, synthetic construct
  source 1..75: mol_type = other DNA
ggtaaagcaggcttcccgcctgcggcagttttcgttgcgacctgtctggttgccggactcggttctatcgtgatg

SEQ ID NO: 698628 - DNA, 75 bp, synthetic construct
  source 1..75: mol_type = other DNA
gcggttcactcgacgcctggtttaaaatttcacaacgtggaagctctgtccgtcaggaagtggttgccgggttaa

SEQ ID NO: 698629 - DNA, 75 bp, synthetic construct
  source 1..75: mol_type = other DNA
ttctctggcgttttcgccatgccttcattgagcgatgagaacggtaattcgctaattggtagcctggatattatg

SEQ ID NO: 698630 - DNA, 75 bp, synthetic construct
  source 1..75: mol_type = other DNA
agcaccaggttggcacggcgaaaaaactgtccgttggtcagatcctgcgtaaccgtcagttctggggtatcgcac

SEQ ID NO: 698631 - DNA, 75 bp, synthetic construct
  source 1..75: mol_type = other DNA
ggtgcgctggttatctggaccgtattgcagaacaaaccggcgattgaggtggcgcaggaaacacataacgatccc

SEQ ID NO: 698632 - DNA, 75 bp, synthetic construct
  source 1..75: mol_type = other DNA
ggcgggtctgaaagccagttccgaatggttcccggcgaaagaacgttccatcgcagtaggttactttaacgttgg

SEQ ID NO: 698633 - DNA, 75 bp, synthetic construct
  source 1..75: mol_type = other DNA
gggctgtaacaccgctcgcggtttcggcgaagacatcaaacatctcggcaactccatctcccgcgctgccagcta

SEQ ID NO: 698634 - DNA, 75 bp, synthetic construct
  source 1..75: mol_type = other DNA
ctttacttgccagcacgctgcttacaggctgtaacaccgctcgcggattcggtgaagatatcaaacatctcggca

SEQ ID NO: 698635 - DNA, 75 bp, synthetic construct
  source 1..75: mol_type = other DNA
cagaaggtgtgcccgatccccaatactattgtgaaggatccgcaacatgtcgagacggaagaacagttgtgggat

SEQ ID NO: 698636 - DNA, 75 bp, synthetic construct
  source 1..75: mol_type = other DNA
tgcaaaaagaacagcactttggtgaagagatctacgtgacgcgtaaaggcgcggtgtctgcgcgtgctggtcaat

SEQ ID NO: 698637 - DNA, 75 bp, synthetic construct
  source 1..75: mol_type = other DNA
tgcatggttaacctgggcttcagcctgccggcttttggtaaaacggcacagggaacggcgaaaaaggatgagaag

SEQ ID NO: 698638 - DNA, 75 bp, synthetic construct
  source 1..75: mol_type = other DNA
gcctgctattttttactaccgcgggctttagtgaagtttcggatacgttagtgacaggaggttatgataaacaag

SEQ ID NO: 698639 - DNA, 75 bp, synthetic construct
  source 1..75: mol_type = other DNA
tctcaatccggaagctgtcatctttgccaatccgatagcacagggggcctgtgcagcagatgccattgccagcgc

SEQ ID NO: 698640 - DNA, 75 bp, synthetic construct
  source 1..75: mol_type = other DNA
cacgttcactggtacaaatacccgctgacgtactggctgaacatcatcacatcgctgggctgtctggaaggtggt

SEQ ID NO: 698641 - DNA, 75 bp, synthetic construct
  source 1..75: mol_type = other DNA
agtctggtgggtaaacccatcgatgcccttttctggtgtgccggcagtcagggcagtatgtacccgtttaacggc

SEQ ID NO: 698642 - DNA, 75 bp, synthetic construct
  source 1..75: mol_type = other DNA
ggcaaaaacatgcccaatgaccggcgtaactttgggtatctcttctggcgtaagcgcaactgcgtctttctgtaa

SEQ ID NO: 698643 - DNA, 75 bp, synthetic construct
  source 1..75: mol_type = other DNA
tttcccgctgtcgctgggcagcacaaaagtcagccagggaaaggtgccggataccgcaaacccgtcgatgccgat

SEQ ID NO: 698644 - DNA, 75 bp, synthetic construct
  source 1..75: mol_type = other DNA
tcaggtacatgcagatccgtcgtgtgaaggtcgattcgtcaacccgatcaccgatgtgtgctggcgctgcatatt

SEQ ID NO: 698645 - DNA, 75 bp, synthetic construct
  source 1..75: mol_type = other DNA
ggcctttcattgctcgtgctcaggagactgtactgactacccaagaggtgttggtcttctcatcgcaggttaaag

SEQ ID NO: 698646 - DNA, 75 bp, synthetic construct
  source 1..75: mol_type = other DNA
cgattagctgggcgtttggctcagtttatggctcgcgcattaccttacctgtagggatgatggcgggtgcgattg

SEQ ID NO: 698647 - DNA, 75 bp, synthetic construct
  source 1..75: mol_type = other DNA
ttcactggtacaaatatccgctgacgtactggctgaatatcatcacgtctgccgggtgtctgatgggcggggata

SEQ ID NO: 698648 - DNA, 75 bp, synthetic construct
  source 1..75: mol_type = other DNA
cggtcggcgccgataccgcagtctgttacgaatatccgtcgccgattatccctaaagagcgctggcgctatcaga

SEQ ID NO: 698649 - DNA, 75 bp, synthetic construct
  source 1..75: mol_type = other DNA
tcgaagcgggtcagttgccggggatattccagaaagccttctgggaaatgcgttcaggccgccctggcccggttc

SEQ ID NO: 698650 - DNA, 75 bp, synthetic construct
  source 1..75: mol_type = other DNA
cggctatcctcgcggcgcgcgcggcgaaagctatcactcttctcgaaccacctgtttctgacgtcaatgatgttg

SEQ ID NO: 698651 - DNA, 75 bp, synthetic construct
  source 1..75: mol_type = other DNA
cctggttttcaatgcttcattccgggttattgttattagaagcaaatttaaattatcccgtcggctccagtttta

SEQ ID NO: 698652 - DNA, 75 bp, synthetic construct
  source 1..75: mol_type = other DNA
ggcgtattttgccactagtatgctacgacctgcgttttccggtatggtcgcgtaatctcaatgattatgatctgg

SEQ ID NO: 698653 - DNA, 75 bp, synthetic construct
  source 1..75: mol_type = other DNA
gatcgtcaactggaaggtattaccgggcgcgatgcgatcgttctaccagagatgttcaccagcggctttgccatg

SEQ ID NO: 698654 - DNA, 75 bp, synthetic construct
  source 1..75: mol_type = other DNA
tcgggctgactggttttggcctgcttacgtgcggagtttacctgcagtttggtatggctccggctctgattttgt

SEQ ID NO: 698655 - DNA, 75 bp, synthetic construct
  source 1..75: mol_type = other DNA
agttttgcctgctggtgttctctaaggaaggtgcgaataagcggggaaattcttctcggctgactcagtcatttc

SEQ ID NO: 698656 - DNA, 75 bp, synthetic construct
  source 1..75: mol_type = other DNA
gtttcccaatcagatgttcacggtctggggcggcaatcttattccggcgattgtcattctctttggtataaccgt

SEQ ID NO: 698657 - DNA, 75 bp, synthetic construct
  source 1..75: mol_type = other DNA
acggcaatattcccagcctgattatttgctatggaaaacgcaaagataagttaatcaaaagcgtggtatttggtt

SEQ ID NO: 698658 - DNA, 75 bp, synthetic construct
  source 1..75: mol_type = other DNA
ttgctatggcaaacgtaaagataagctcatcaaaagcgtggttttcggttcgctgctggcgctggtgatttatct

SEQ ID NO: 698659 - DNA, 75 bp, synthetic construct
  source 1..75: mol_type = other DNA
gtcgattactccattctgcgcgatgccaccagcaccactgcgggaacgtcttacttcccgtatatctttatggct

SEQ ID NO: 698660 - DNA, 75 bp, synthetic construct
  source 1..75: mol_type = other DNA
gtcattctctttggtataaccgtaattttatgctggttcggcaacgtctttaacgtgttacctaaatttggctaa

SEQ ID NO: 698661 - DNA, 75 bp, synthetic construct
  source 1..75: mol_type = other DNA
ttctatatcttggcaggcctcttaatgataaggaacgtgagcatgtgcaggccttgcagaaaattacgcccaaat

SEQ ID NO: 698662 - DNA, 75 bp, synthetic construct
  source 1..75: mol_type = other DNA
ggatgatatcggtgttgctgaatacatcgagcgccagggtgtcagcgtcccggctatcctcgcggcgcgcgcggc

SEQ ID NO: 698663 - DNA, 75 bp, synthetic construct
  source 1..75: mol_type = other DNA
cgcaacatgctctctcctgccgattttggcccgaaactgctggaagtgatcaaagagcatttcccgcaggatgtg

SEQ ID NO: 698664 - DNA, 75 bp, synthetic construct
  source 1..75: mol_type = other DNA
cgccattatcgtcggaggatgcccgctgttcttcgtcaacattatggtgacgctctcctttattaaagacgcgaa

SEQ ID NO: 698665 - DNA, 75 bp, synthetic construct
  source 1..75: mol_type = other DNA
taccgggataaatatgtcacacagtccgcagataacggcacctgtcagaaatatgtcgataatccggcctgtacg

SEQ ID NO: 698666 - DNA, 75 bp, synthetic construct
  source 1..75: mol_type = other DNA
cggttgatgagctgcagaaaattcagttcgaccagctggacttcactaacttctacgaagacctgatgaataacc

SEQ ID NO: 698667 - DNA, 75 bp, synthetic construct
  source 1..75: mol_type = other DNA
aaaccgggaaaaccattaccgagtccttcatgaacaaaccgaaggacattctgtcaccggatgcgccatttattc

SEQ ID NO: 698668 - DNA, 75 bp, synthetic construct
  source 1..75: mol_type = other DNA
cagaacgcatatcagtattcagaactggtcgccatccggagagggcaccgaagattgttgttttatcgcgctggg

SEQ ID NO: 698669 - DNA, 75 bp, synthetic construct
  source 1..75: mol_type = other DNA
aaccgtggaacatctggctacaatgccgcgatgaatgtgcgtattgccagcagaacgcatatcagtattcagaac

SEQ ID NO: 698670 - DNA, 75 bp, synthetic construct
  source 1..75: mol_type = other DNA
ctgtgtgatcctcgcactggtgaaggagagcgaagcattcattgaagtgccgttgtttgatgagccaatgctgtt

SEQ ID NO: 698671 - DNA, 75 bp, synthetic construct
  source 1..75: mol_type = other DNA
ttcttatctgtgtttgtaaaaaaagagccaaaattaaaacaaacaggaataagtggccattttactatcgatgcc

SEQ ID NO: 698672 - DNA, 75 bp, synthetic construct
  source 1..75: mol_type = other DNA
ggtaaatgatttggattctgatttttatatagaaacaaaaaaaggagagaaaataactagtgacgacattaagtt

SEQ ID NO: 698673 - DNA, 75 bp, synthetic construct
  source 1..75: mol_type = other DNA
taccgcgcttcgtacgctgctgttaagccgcaagaatccgtttggcgatatcaaatcggatggcactgtgcaaac

SEQ ID NO: 698674 - DNA, 75 bp, synthetic construct
  source 1..75: mol_type = other DNA
tcagatctgccttgcggtctacgggagagcgtcaaaaacgacagagactgttttatatcaggtttcgaattacgg

SEQ ID NO: 698675 - DNA, 75 bp, synthetic construct
  source 1..75: mol_type = other DNA
aggcagaaaaagctcttcgagagaataaggaatttgatattgacactacttccttgaatgactactggaaggatt

SEQ ID NO: 698676 - DNA, 75 bp, synthetic construct
  source 1..75: mol_type = other DNA
gcaatgtatggatcccagtagagttatatataatggattagtaccttttgcggttgctatgtttgaatatttttt

SEQ ID NO: 698677 - DNA, 75 bp, synthetic construct
  source 1..75: mol_type = other DNA
gattctttataagaaaaaagaattggaaaatcagttgattttcttgagaatcgaatttctgaaatcatacaatat

SEQ ID NO: 698678 - DNA, 75 bp, synthetic construct
  source 1..75: mol_type = other DNA
cttaaagcgcttgtggaagggctcaatgaacatcctgaggcaggggttatttctgacgaggcggtcacttttttc

SEQ ID NO: 698679 - DNA, 75 bp, synthetic construct
  source 1..75: mol_type = other DNA
agggttttgtcgttaatccccgtaaaatgagcgtgatggaagaactcaaccaggcttgtgctgacatgaaacggg

SEQ ID NO: 698680 - DNA, 75 bp, synthetic construct
  source 1..75: mol_type = other DNA
tatcaaaaattcgtgcgctggtggatgaagccaatttgtttattgattttgtgctggctggtaccggaaagggaa

SEQ ID NO: 698681 - DNA, 75 bp, synthetic construct
  source 1..75: mol_type = other DNA
acgcgcattgatgcggagctatcgatgatggcattgcgggaatatagagaaaagtttccggcatggcaggatgcg

SEQ ID NO: 698682 - DNA, 75 bp, synthetic construct
  source 1..75: mol_type = other DNA
gggaatggttatcaaaaacccgattgaaggcttgccagtggcgctcggtgcgtttacctccttcccggtgatgat

SEQ ID NO: 698683 - DNA, 75 bp, synthetic construct
  source 1..75: mol_type = other DNA
cggacgcatcaaagccacagggcgccctggataattattttaaaattaccgctcgtggcagtaccgttcgccagg

SEQ ID NO: 698684 - DNA, 75 bp, synthetic construct
  source 1..75: mol_type = other DNA
tcgtcaaatgagcgtgatggaagaactcaaccaggcatgcgctgacatgaaacgggataaaaacattgccagtct

SEQ ID NO: 698685 - DNA, 75 bp, synthetic construct
  source 1..75: mol_type = other DNA
gagtgcgacgatgttctctatgaatactggacgaagggttttgtcgttaatcctcgtcaaatgagcgtgatggaa

SEQ ID NO: 698686 - DNA, 75 bp, synthetic construct
  source 1..75: mol_type = other DNA
actcaggtagggcgaatgactaacccactactctcatcctgtgatgaggatgactcggatgaggatgacgaatga

SEQ ID NO: 698687 - DNA, 75 bp, synthetic construct
  source 1..75: mol_type = other DNA
aggggatcgtggaatgaaaccttaaagaaaatccagaataaacttctggaccctaaagaacttagaaaaaaaaaa

SEQ ID NO: 698688 - DNA, 75 bp, synthetic construct
  source 1..75: mol_type = other DNA
aacgactggaaaaagcgaaagagagcggggcagactgggcgattaataacagccagacaccgcttggcgagattt

SEQ ID NO: 698689 - DNA, 75 bp, synthetic construct
  source 1..75: mol_type = other DNA
cgcgtattgctcgtgaaattgctgtacccaatagtgatgcccgaaaaaacctccgttctcacatgaaacagccat

SEQ ID NO: 698690 - DNA, 75 bp, synthetic construct
  source 1..75: mol_type = other DNA
ctattgaagcgctatgctgtggttgccctgtgataggctataacgttggtgcaattagagagttgtatgctgaaa

SEQ ID NO: 698691 - DNA, 75 bp, synthetic construct
  source 1..75: mol_type = other DNA
attggcggattgattcagaaagcatctatgtcatgcctgttaaacgtatttgtcagtacggtaaaacagctcaaa

SEQ ID NO: 698692 - DNA, 75 bp, synthetic construct
  source 1..75: mol_type = other DNA
atgcccatacattatgccgtactcagcacactctttattacactgattcttgcaactttgttctggcacacacca

SEQ ID NO: 698693 - DNA, 75 bp, synthetic construct
  source 1..75: mol_type = other DNA
attgcctcgtcactcagtttccctctgactgatggcaacaatctgtcgatgaagattgaatggatcgcaaccccc

SEQ ID NO: 698694 - DNA, 75 bp, synthetic construct
  source 1..75: mol_type = other DNA
tgatttaacctacagattatttcctagtgagcttgcgtatctcattgacgacttatatgaaagtacccaacttcc

SEQ ID NO: 698695 - DNA, 75 bp, synthetic construct
  source 1..75: mol_type = other DNA
tttctgtcaagccatagcattaattcccccggaatgagaagcgaaaggaagacattaaaactttcgaagaaagcg

SEQ ID NO: 698696 - DNA, 75 bp, synthetic construct
  source 1..75: mol_type = other DNA
aagctacgccagggggatgaaaaacttgcgcagggcgcgcgccagcaggcattcagagaggctgaggccagagaa

SEQ ID NO: 698697 - DNA, 75 bp, synthetic construct
  source 1..75: mol_type = other DNA
gcaattagagagttgtatgctgaaagttttcctggcgtgtttattgccaataataaagaagatttagcacaagta

SEQ ID NO: 698698 - DNA, 75 bp, synthetic construct
  source 1..75: mol_type = other DNA
ttaatgagcagtatgcaagggcaacgaaatgccatcgagcggatgcgtaacgagacgctggcattgtggatagcg

SEQ ID NO: 698699 - DNA, 75 bp, synthetic construct
  source 1..75: mol_type = other DNA
taatcaactgaatacagaaaagttgactttggaaatgcaaatcaaacaatatgacattgcagaacgtcaattggc

SEQ ID NO: 698700 - DNA, 75 bp, synthetic construct
  source 1..75: mol_type = other DNA
ccgcagcctgaacttgccgctgaacccgctccggttatggataagccgaagcgcaaagaagcggtgatcattatg

SEQ ID NO: 698701 - DNA, 75 bp, synthetic construct
  source 1..75: mol_type = other DNA
atctcagcccggacggcagtggccctgcgttattcagcctggcgaatatggtgaaaccgggaacattcgatcctg

SEQ ID NO: 698702 - DNA, 75 bp, synthetic construct
  source 1..75: mol_type = other DNA
ttaagtgcctcgccgatggctcgttcacacgcgaacaagccacagcggtggcagaacagtttcagaatgtcacca

SEQ ID NO: 698703 - DNA, 75 bp, synthetic construct
  source 1..75: mol_type = other DNA
taaaactgatgatgtgctgatccagtggggcgatctgtttagtgttgttccgatgactgcaaccatcgacgcatc

SEQ ID NO: 698704 - DNA, 75 bp, synthetic construct
  source 1..75: mol_type = other DNA
gcgcgttttcctgcccgcaggtttgattctggcggcggcagtgatgttgtttatgggctttgtgccatgggcgac

SEQ ID NO: 698705 - DNA, 75 bp, synthetic construct
  source 1..75: mol_type = other DNA
tgctccgcattcagcgcagccggttcagcaaccgcagccagttcagcagccggcctaccagccgcagcctgaaca

SEQ ID NO: 698706 - DNA, 75 bp, synthetic construct
  source 1..75: mol_type = other DNA
taaaactgatgatgttcttatcgagtggggcaagctgtttaacgtatcagctatgaaagccactgtgaacgcttc

SEQ ID NO: 698707 - DNA, 75 bp, synthetic construct
  source 1..75: mol_type = other DNA
ccatccgcggattcgtaaagatatgactttaatggtacgccaactggctccaggtgataatggtttaccgctcga

SEQ ID NO: 698708 - DNA, 75 bp, synthetic construct
  source 1..75: mol_type = other DNA
ttggaacctttcgtgcctatctgaacgaatatctgcgtaaccatccgcggattcgtaaagatatgaccttaatgg

SEQ ID NO: 698709 - DNA, 75 bp, synthetic construct
  source 1..75: mol_type = other DNA
aaaacgccccgcaacctgcggggcaggaaaaggagaaagacatgaccagcagcgttataccgccccttcagtcac

SEQ ID NO: 698710 - DNA, 75 bp, synthetic construct
  source 1..75: mol_type = other DNA
gataactacagcctgtttaacaccccgcagagccgttattcatcaaaccacgacactaccgcgcgtcagaatggc

SEQ ID NO: 698711 - DNA, 75 bp, synthetic construct
  source 1..75: mol_type = other DNA
tttatgcgtgataacgacttcgatacgccagtcatggtgatgtgttaccacggtaatagcagcaaaggcgcggcg

SEQ ID NO: 698712 - DNA, 75 bp, synthetic construct
  source 1..75: mol_type = other DNA
ggccgcgtatgagctggctaacgggaaatacaccgcacaggatgcaacgacagcacagaaagggatagttcagct

SEQ ID NO: 698713 - DNA, 75 bp, synthetic construct
  source 1..75: mol_type = other DNA
ctgcaattcgattctctgctggtatggcaaacgcattccagtatgtaagcccactggaagaggggaacgttgtgt

SEQ ID NO: 698714 - DNA, 75 bp, synthetic construct
  source 1..75: mol_type = other DNA
gtttctcttctgaacacaacgttactaagcgagaacaaggtaaagaatggctgatcgaaatcccgtattttcttc

SEQ ID NO: 698715 - DNA, 75 bp, synthetic construct
  source 1..75: mol_type = other DNA
tagccaactggtggaaactaacgaatctctgttcaacaaagaaacctctcgtttctcttctgaacataacgtgac

SEQ ID NO: 698716 - DNA, 75 bp, synthetic construct
  source 1..75: mol_type = other DNA
ccgaaggcgaagctgacgccggagctgatggcgtttccagtgattgagagcggggaatttaatgctaagttcctt

SEQ ID NO: 698717 - DNA, 75 bp, synthetic construct
  source 1..75: mol_type = other DNA
atgggtattcagaatttcgaccacgcacaccacaagcttaaaattcgcggtctgcaaagcccggtggacgtgctg

SEQ ID NO: 698718 - DNA, 75 bp, synthetic construct
  source 1..75: mol_type = other DNA
cgctgctggcccgcagtcgccagaacgccatctaccagaatctgacggtgccgcaaatcgtcgaaaaaatcctgc

SEQ ID NO: 698719 - DNA, 75 bp, synthetic construct
  source 1..75: mol_type = other DNA
ctccagaaacgggcggattctggatccgggaaattggtgtgtttgatgagcacggcgatttaatcgcggtgggca

SEQ ID NO: 698720 - DNA, 75 bp, synthetic construct
  source 1..75: mol_type = other DNA
gacttttgataaaacagtctaccccctgcttgcagtcgcttatccgtctggtgtgatccctgatatgcgtggctg

SEQ ID NO: 698721 - DNA, 75 bp, synthetic construct
  source 1..75: mol_type = other DNA
actggcttgatggtgcatcaagtggcacggtcgtggggaatggaacagtgccttcttctggtgcacacacccact

SEQ ID NO: 698722 - DNA, 75 bp, synthetic construct
  source 1..75: mol_type = other DNA
cattcacacaatattcctgttggcaacactggtgctggtaatggtgtttcggctggttataactcagggcttggc

SEQ ID NO: 698723 - DNA, 75 bp, synthetic construct
  source 1..75: mol_type = other DNA
tacagccgcaagtgccggaaaccatactcatagtgtcacaggcgcatcagcagtcagccagtggtcacaaaatgg

SEQ ID NO: 698724 - DNA, 75 bp, synthetic construct
  source 1..75: mol_type = other DNA
actggtaccacgtcgagcgcaggagggcatgctcacaatgtatatatcggtgcccataaccacactatcggcatt

SEQ ID NO: 698725 - DNA, 75 bp, synthetic construct
  source 1..75: mol_type = other DNA
atgcaggatttaatatcccaggttgaagatttagcgggtattgagatcgatcacaccacctcgatggtgatgatt

SEQ ID NO: 698726 - DNA, 75 bp, synthetic construct
  source 1..75: mol_type = other DNA
gcgataccgatttgacggcgatcaacgacgctttgaagagaattactgcatcgctgaacagtaaaccggggatta

SEQ ID NO: 698727 - DNA, 75 bp, synthetic construct
  source 1..75: mol_type = other DNA
acaacggcgaaaatcactacagtgtcaggagctgcgtggaggttgcccctgaagatgttgcaactttgcaacgct

SEQ ID NO: 698728 - DNA, 75 bp, synthetic construct
  source 1..75: mol_type = other DNA
gtttatacaccgccgcgaccgttggaggagattgatgctgatttggatgcggtaagcgctgagattatgaaactg

SEQ ID NO: 698729 - DNA, 75 bp, synthetic construct
  source 1..75: mol_type = other DNA
gtgtgcgaacgtgtggaaatggagtatggcttcaccactatgagtgtcgtttctctggcggatctttatggcggt

SEQ ID NO: 698730 - DNA, 75 bp, synthetic construct
  source 1..75: mol_type = other DNA
ccacgttgtacgcgcaggaattttcagggatgacgcaacaggaaacgtcgctggaatcgcttctgtcagtaacga

SEQ ID NO: 698731 - DNA, 75 bp, synthetic construct
  source 1..75: mol_type = other DNA
ggatgaaaagcgcatcatcgtcaacaccgccgacgcgaagataaagattgaggttagtccagtctggcgtggact

SEQ ID NO: 698732 - DNA, 75 bp, synthetic construct
  source 1..75: mol_type = other DNA
tgatttagagttattagccgctctggatgcaatggatgataaatatttaagccgggaaaaattcaaaaaagcatt

SEQ ID NO: 698733 - DNA, 75 bp, synthetic construct
  source 1..75: mol_type = other DNA
acccaccgtttggcgttgattggaaaaagattgataccgttatccgcaaagaacataaaaagggctacgatgggc

SEQ ID NO: 698734 - DNA, 75 bp, synthetic construct
  source 1..75: mol_type = other DNA
ctttcttatggtccgtcgccgacttactacgtggtgatttcaagcaatcgcagtatggcagagtgattctgccat

SEQ ID NO: 698735 - DNA, 75 bp, synthetic construct
  source 1..75: mol_type = other DNA
caaaatggggcaaaatggcatacaggacaacctggaaaactacatccagtcgttctcttcggatgcccgcgaaat

SEQ ID NO: 698736 - DNA, 75 bp, synthetic construct
  source 1..75: mol_type = other DNA
caatcacaatatggacgaattattctccctttcactcttcttcgtcgtctggaatgtgtactcgaaacaagtaaa

SEQ ID NO: 698737 - DNA, 75 bp, synthetic construct
  source 1..75: mol_type = other DNA
tgctgttcaaagtagtgaagaaattcgccaccaccgatctcagcccgaaagcgatttccaactatgagatgggcc

SEQ ID NO: 698738 - DNA, 75 bp, synthetic construct
  source 1..75: mol_type = other DNA
ttgtcccgttacatgacattgtgtctttttatcccccccgccttcctgtcggtggaggaactaacctcgcgactg

SEQ ID NO: 698739 - DNA, 75 bp, synthetic construct
  source 1..75: mol_type = other DNA
atgtggtctacagcattgatggcggttttgaagcctggcagcgccagtttcccgcagaggtggcgtacggcgcgt

SEQ ID NO: 698740 - DNA, 75 bp, synthetic construct
  source 1..75: mol_type = other DNA
atgattatcggaaatgaagtggttgatcttgctccactgttcgaattaaacgactcacgcaattacctactgtct

SEQ ID NO: 698741 - DNA, 75 bp, synthetic construct
  source 1..75: mol_type = other DNA
gttggcgctgggaacggtgtcgtcgtttagcggtatgttgctggcggggttcggcgctgggttgtttgcgacagg

SEQ ID NO: 698742 - DNA, 75 bp, synthetic construct
  source 1..75: mol_type = other DNA
tggggcgatctgtttagtgctgttccgatgactgcaaccatcgacgcatcaagcaccacaccttcaatggtgttc

SEQ ID NO: 698743 - DNA, 75 bp, synthetic construct
  source 1..75: mol_type = other DNA
caagcgtgagaacggtaaagaatggctggtagagatcccttacttcctgcgtgaagatatgattaagccgcaaga

SEQ ID NO: 698744 - DNA, 75 bp, synthetic construct
  source 1..75: mol_type = other DNA
ggcggctgctgtagaacgtatcgttgtattctgtaaacctgctgctttcaacgctatccgttacagtgctggcat

SEQ ID NO: 698745 - DNA, 75 bp, synthetic construct
  source 1..75: mol_type = other DNA
atcagacagggagcgatatctctccggaggcgctgaagacccgcctgactgaacgctattttaccgattttggta

SEQ ID NO: 698746 - DNA, 75 bp, synthetic construct
  source 1..75: mol_type = other DNA
ctgaatatcctgcggcaactgacagagaatgtcatgctgttcaccgagtctcaggaaggggactttacccgcttc

SEQ ID NO: 698747 - DNA, 75 bp, synthetic construct
  source 1..75: mol_type = other DNA
gatggtctgcaaatgatcgtcggagatttaagaaaggatccacacgcacttgaaacagcctgggtttcggtaatc

SEQ ID NO: 698748 - DNA, 75 bp, synthetic construct
  source 1..75: mol_type = other DNA
gccctgacgtctgaagcggcggggccacgttttcgtggaacggcggtgagcctgatgtattgcggggttcccatt

SEQ ID NO: 698749 - DNA, 75 bp, synthetic construct
  source 1..75: mol_type = other DNA
tattaatgcgctggctgccggagtcggcggttttcgctggcgaaaaacaggctgcgccaccactgcgtgccttat

SEQ ID NO: 698750 - DNA, 75 bp, synthetic construct
  source 1..75: mol_type = other DNA
tcgggtcggatcacgacgttcctgaaaactcatcttggcgggctcctccaccaggaggggaatcgctgggttgtt

SEQ ID NO: 698751 - DNA, 75 bp, synthetic construct
  source 1..75: mol_type = other DNA
caatagtactgaggtcggagggacatcatccggtaccgggctggatatggcccagacgtcgccggatgccgacga

SEQ ID NO: 698752 - DNA, 75 bp, synthetic construct
  source 1..75: mol_type = other DNA
cctcgacctgaaccccgctaaagcaaacagcgcgaaactgggtgatgcgattcgtgaggtgtttggccgggtgcg

SEQ ID NO: 698753 - DNA, 75 bp, synthetic construct
  source 1..75: mol_type = other DNA
tctcgacctgaacccggcgcgggccaacaccgcaaaactcggtgatgccattcgtgaggtgtttggccgggtgcg

SEQ ID NO: 698754 - DNA, 75 bp, synthetic construct
  source 1..75: mol_type = other DNA
gaatccattccccctcaggcatggtttgactatgccctccgtccggacagcgatgtccgtatttatccggtgccg

SEQ ID NO: 698755 - DNA, 75 bp, synthetic construct
  source 1..75: mol_type = other DNA
tggggtattttctgctgtctgacgggttgctttctgtcgggagagagggcgtcaaaagctggacagggatcatta

SEQ ID NO: 698756 - DNA, 75 bp, synthetic construct
  source 1..75: mol_type = other DNA
gggactgctggcggccatcaccgagggactcaccggctccggcctggttgcgcaggacaacggcggcaccgtact

SEQ ID NO: 698757 - DNA, 75 bp, synthetic construct
  source 1..75: mol_type = other DNA
ggctgccgggcgaaccgctggaaacgcatcaacatgaaacggtgacacttagcgcctggtttgcgcagaacgtga

SEQ ID NO: 698758 - DNA, 75 bp, synthetic construct
  source 1..75: mol_type = other DNA
cgaggagatgcagaccgcgtttaaggccccatcacaggacgattacgacggcgtggacgtgacctatatcaacgg

SEQ ID NO: 698759 - DNA, 75 bp, synthetic construct
  source 1..75: mol_type = other DNA
tctgtcctcatatacaatagcagaaaagagatagcagccacatataataatattcgtcggaaatgtatacatcat

SEQ ID NO: 698760 - DNA, 75 bp, synthetic construct
  source 1..75: mol_type = other DNA
aaaccggatcgtactacctccagaacattaacggactgggatttaccgaaagaatcacgctggatacgcctgcgc

SEQ ID NO: 698761 - DNA, 75 bp, synthetic construct
  source 1..75: mol_type = other DNA
ctccgttcaccgggattcctgaaggttatgtcaggctatctgtttcccattccggaagcgaatataagattcttg

SEQ ID NO: 698762 - DNA, 75 bp, synthetic construct
  source 1..75: mol_type = other DNA
tagctccttatgttgggatgcctgtaactctctggtacaacagcattgattaccaactattcattgctgatttta

SEQ ID NO: 698763 - DNA, 75 bp, synthetic construct
  source 1..75: mol_type = other DNA
ggctgattgatggagtggttgatccttcctggtctggcttctcaccacgcacgatgattgactatcaggctacag

SEQ ID NO: 698764 - DNA, 75 bp, synthetic construct
  source 1..75: mol_type = other DNA
agaacatatcgatcaagttgatctgtttattgccgtcaccaacgatgacgaagccaatatcatgtccgccatgct

SEQ ID NO: 698765 - DNA, 75 bp, synthetic construct
  source 1..75: mol_type = other DNA
ctggaaaaagattacagcgtcaaactcatcgaacgtaatcagcagcgcgctgccgaactggcggaaaagttgcag

SEQ ID NO: 698766 - DNA, 75 bp, synthetic construct
  source 1..75: mol_type = other DNA
aatacgatcgtcttttttggtgatgcatcggatcaggaactgctggctgaagagcacatcgatcaagttgatctg

SEQ ID NO: 698767 - DNA, 75 bp, synthetic construct
  source 1..75: mol_type = other DNA
cgaaaaactggtgaaagtaaactccctgtttgaagacatggagacgcaggttaacggcgtaaaaattgagattgc

SEQ ID NO: 698768 - DNA, 75 bp, synthetic construct
  source 1..75: mol_type = other DNA
cacattggtaatgagttagggcttgcgatggataacgaagtgattgatatgctggaatcatcttactggacgcct

SEQ ID NO: 698769 - DNA, 75 bp, synthetic construct
  source 1..75: mol_type = other DNA
accatcgttgaagctggcgatgaagtgttctttattgccgcttcgcaacatatccgcgcagtgatgagtgaatta

SEQ ID NO: 698770 - DNA, 75 bp, synthetic construct
  source 1..75: mol_type = other DNA
gccaaatcgcatcgcccgtattcgttctcaaaactatgtccgcgatgccgacaagttattccacacagatgccgt

SEQ ID NO: 698771 - DNA, 75 bp, synthetic construct
  source 1..75: mol_type = other DNA
ttggcggctcagtctgaccggcgcgtaaacgttgtggccacgcgcatttatgactccggcgtagcccgtagtatc

SEQ ID NO: 698772 - DNA, 75 bp, synthetic construct
  source 1..75: mol_type = other DNA
tggctctggctggacgagcaggcagggggtttacgcgcttaaaaatatcaacgggttgggttttacagagcgttt

SEQ ID NO: 698773 - DNA, 75 bp, synthetic construct
  source 1..75: mol_type = other DNA
taattatgttcctgacggacaaaaagtttattaccgacgtcgaacgtctcttccagccaagtcctttcttcttgt

SEQ ID NO: 698774 - DNA, 75 bp, synthetic construct
  source 1..75: mol_type = other DNA
tatccgtgcggtgatgagtgaattacagcgactggaaaaaccgtataagcggatcatgctggttggtggcggtaa

SEQ ID NO: 698775 - DNA, 75 bp, synthetic construct
  source 1..75: mol_type = other DNA
tgttctttattgccgcttcacaacatatccgcgcggtgatgagcgaattacaacgtctggaaaaaccgtataagc

SEQ ID NO: 698776 - DNA, 75 bp, synthetic construct
  source 1..75: mol_type = other DNA
taacatcacgttgtcaaataatcagaccagtttcaccaatggttattcggtaacggtgacacctgcggcagtaat

SEQ ID NO: 698777 - DNA, 75 bp, synthetic construct
  source 1..75: mol_type = other DNA
ggcacacactgaccatgtgaccatccagaactacaagcgcaacgttctgcgcaccccggccaataacaaaatccg

SEQ ID NO: 698778 - DNA, 75 bp, synthetic construct
  source 1..75: mol_type = other DNA
ggcacacaccgaccatgtgaccattcagaactacaagcgcaacgtactgcgcaccccggcgaacaacaaaatccg

SEQ ID NO: 698779 - DNA, 75 bp, synthetic construct
  source 1..75: mol_type = other DNA
atggatatccctgctctgaatttcgaccactcacaccacaagctcaaaatccgtggcctgcaaagttcggtggat

SEQ ID NO: 698780 - DNA, 75 bp, synthetic construct
  source 1..75: mol_type = other DNA
gataaccagccggataaatgacctgaccgccccggtgattttgatgcacgcaccgaaaggcgtggcggtcgccag

SEQ ID NO: 698781 - DNA, 75 bp, synthetic construct
  source 1..75: mol_type = other DNA
ctcggtacaggcacagaacgatctgatggaactgttggcacagaaatcgatagtgatcaccagtacggaagatga

SEQ ID NO: 698782 - DNA, 75 bp, synthetic construct
  source 1..75: mol_type = other DNA
cggggctggaaatcagggttcagggcgacgacgcgccagcggtgttccgcaagggcgtgctgattaccggcgtga

SEQ ID NO: 698783 - DNA, 75 bp, synthetic construct
  source 1..75: mol_type = other DNA
ttttaatcagagctttattttgctggatgaaaatactgggcaaccacttattaattggccctatgaactagaact

SEQ ID NO: 698784 - DNA, 75 bp, synthetic construct
  source 1..75: mol_type = other DNA
gggtcaccagcacggtgaaaaacgatatttatgcccatatagacaaagacgggcgctaccgggtcaacctcgatt

SEQ ID NO: 698785 - DNA, 75 bp, synthetic construct
  source 1..75: mol_type = other DNA
tgcacctgccgctgctggcaggaacggaagtcagcatcgcctttgaggaaggcaacccggacaggccgtatatcg

SEQ ID NO: 698786 - DNA, 75 bp, synthetic construct
  source 1..75: mol_type = other DNA
ctacgacattgagtttaccagtaccgataaagccatcgagccggagtcggtgctgatgcaggatggcgcattcag

SEQ ID NO: 698787 - DNA, 75 bp, synthetic construct
  source 1..75: mol_type = other DNA
aggtgcgcgaaatggctccggcgatggcaatactggatggcgcacagtcacagatgaagtcgctgtccactgatg

SEQ ID NO: 698788 - DNA, 75 bp, synthetic construct
  source 1..75: mol_type = other DNA
accattcacaccacaaactcaaaattcgcggcctgcaaagcccggtggatgtgctgaccttcgaaggccgcgaac

SEQ ID NO: 698789 - DNA, 75 bp, synthetic construct
  source 1..75: mol_type = other DNA
atatcgccggggtaaaacacgactcggcgcacaccgaccatgtgaccatccagaactacaagcgcaacgtgctgc

SEQ ID NO: 698790 - DNA, 75 bp, synthetic construct
  source 1..75: mol_type = other DNA
acacaactttgcttacaacaatacttcagcatacgcagaaactcccggtaccggtggtggaatgcatgcaactaa

SEQ ID NO: 698791 - DNA, 75 bp, synthetic construct
  source 1..75: mol_type = other DNA
tggtgtaaatattcaatgggattataccagtaatgccagcgtaacgattcatacgtcaccagcatattctgctaa

SEQ ID NO: 698792 - DNA, 75 bp, synthetic construct
  source 1..75: mol_type = other DNA
gcgccaccaacagcacgtctgaagcactggccgcaacgccgaaagcggtcaaggcagcctatgaccttgctatcg

SEQ ID NO: 698793 - DNA, 75 bp, synthetic construct
  source 1..75: mol_type = other DNA
gattatgtcgacgacaaactggcagagcatgagcagtcccgcaggcatcctgacgccacgctgaaagaaaaaggc

SEQ ID NO: 698794 - DNA, 75 bp, synthetic construct
  source 1..75: mol_type = other DNA
cactccgttgctattggcgcacacggtcacaccattacgatcgccgcgtcgggtaatgcagaaaacaccatcaaa

SEQ ID NO: 698795 - DNA, 75 bp, synthetic construct
  source 1..75: mol_type = other DNA
atgcttgagcagggaaaggcctgttatctgtataccggtcatgaccacaggggatatttccgtcagggcgttttc

SEQ ID NO: 698796 - DNA, 75 bp, synthetic construct
  source 1..75: mol_type = other DNA
gcgagcggcaccagatgcgcggtcaggacttcgtgtttaacctcaaaagcgaatacccgtcccgcgaacaggtga

SEQ ID NO: 698797 - DNA, 75 bp, synthetic construct
  source 1..75: mol_type = other DNA
gtttatttcacgcctgctgtcggaagtgggtatctggttccgctttgcgactgatgcgcggctgaaaattgaggt

SEQ ID NO: 698798 - DNA, 75 bp, synthetic construct
  source 1..75: mol_type = other DNA
gatgacggaaaattcattgctaatgtaccttactatatagaagacagcatagggaatatctataaggggtttact

SEQ ID NO: 698799 - DNA, 75 bp, synthetic construct
  source 1..75: mol_type = other DNA
taccgtggataacaccatggtgatggccacagtggattacgtgaatgacaaactgaaagaacatgaacagtcacg

SEQ ID NO: 698800 - DNA, 75 bp, synthetic construct
  source 1..75: mol_type = other DNA
gcgtgaccgcagctatgagctgacgtttaccgccatcccgtactcagaacgctatggctaccgcccggcgcttat

SEQ ID NO: 698801 - DNA, 75 bp, synthetic construct
  source 1..75: mol_type = other DNA
taacatgcgtaaaaaacagtacaactactatcgcgaccaattgctgacttttaaagaaggtgaggttggtgatgc

SEQ ID NO: 698802 - DNA, 75 bp, synthetic construct
  source 1..75: mol_type = other DNA
ccagaaaacgcgctggtggttgctgcggcgggaagtctgccaggcgatctgcagcgcatctggcaaagccgtggc

SEQ ID NO: 698803 - DNA, 75 bp, synthetic construct
  source 1..75: mol_type = other DNA
acaaataaccacctggttattaagtgcactggcgctaatgggcttttatattttctggatccgggttccgaaaat

SEQ ID NO: 698804 - DNA, 75 bp, synthetic construct
  source 1..75: mol_type = other DNA
atggcactgcctaagaaacttaaatatttcaatatgttttttgacggtgataactacttcggcatggtgccggaa

SEQ ID NO: 698805 - DNA, 75 bp, synthetic construct
  source 1..75: mol_type = other DNA
gttgagacaaaacgagcgaagagtattgtttgctgatgaaatgatttcggagttaggtggaggaagtaaggaaga

SEQ ID NO: 698806 - DNA, 75 bp, synthetic construct
  source 1..75: mol_type = other DNA
ttagttctaatgataaaagtcaaagagatatatttactacatctatcatcgcactgcttctttgtgctccaacac

SEQ ID NO: 698807 - DNA, 75 bp, synthetic construct
  source 1..75: mol_type = other DNA
attaagtaagtttaactccaggcttagaataattagaaataaagctgtaagagatcttatagggcaaaaagaaat

SEQ ID NO: 698808 - DNA, 75 bp, synthetic construct
  source 1..75: mol_type = other DNA
gttgctgttggtaacgatgctagggctacagaaaaagcgtcaacagcagtgggctcatgggctgctgcggacggt

SEQ ID NO: 698809 - DNA, 75 bp, synthetic construct
  source 1..75: mol_type = other DNA
atcaatgcaaatgccgcagaaacgggcaatagcgcgttgcagaaaattgataaagctattggtagactggccccc

SEQ ID NO: 698810 - DNA, 75 bp, synthetic construct
  source 1..75: mol_type = other DNA
caatgcgccatcagtggaccctattgttgaggcaatgaaacggcttaatttaggggacgtttctcgtgtagttca

SEQ ID NO: 698811 - DNA, 75 bp, synthetic construct
  source 1..75: mol_type = other DNA
attacaagctgaccatcaacggcgaagaaatcattgaagttgatgtgctcaatatgatctacaaagttggcggcg

SEQ ID NO: 698812 - DNA, 75 bp, synthetic construct
  source 1..75: mol_type = other DNA
ggagtgggaacatatgcttatgcaaatgcatctacagccctgggaagcgttgcatttgttgattacacggctaca

SEQ ID NO: 698813 - DNA, 75 bp, synthetic construct
  source 1..75: mol_type = other DNA
atataacggggaacgcaccaaagttgaagcgggcgatgtgtcaacgatggttaagtacattcttgatgagaaaaa

SEQ ID NO: 698814 - DNA, 75 bp, synthetic construct
  source 1..75: mol_type = other DNA
agatagcctcaagcacccgcagcaattctacttaacttccctttcaccgcaaattattttatctccggtggcaat

SEQ ID NO: 698815 - DNA, 75 bp, synthetic construct
  source 1..75: mol_type = other DNA
agcaaagtgtggctttaggtgggggaacatatgcttatgcagatgcatctacagccctgggaagcgttgcatttg

SEQ ID NO: 698816 - DNA, 75 bp, synthetic construct
  source 1..75: mol_type = other DNA
agggtatcacccatacacttcatgacccggcgctgaaagattttgcaaaggctgttgagggtaaaacagatcaca

SEQ ID NO: 698817 - DNA, 75 bp, synthetic construct
  source 1..75: mol_type = other DNA
tcgttgctctgtctagcagaacagaccgtattgattatgcagttggtagcgttgaccgccgggttactaaaaata

SEQ ID NO: 698818 - DNA, 75 bp, synthetic construct
  source 1..75: mol_type = other DNA
ttattacggttggtatgtccaaagcggcgatttggaaacggcagagaaggtactggaaaaagaacttctggcctg

SEQ ID NO: 698819 - DNA, 75 bp, synthetic construct
  source 1..75: mol_type = other DNA
ccgggcaattgctgtgccgggcagttttaacgatcagttcgccgatgcagatattcgtaattatgtgggtaacgt

SEQ ID NO: 698820 - DNA, 75 bp, synthetic construct
  source 1..75: mol_type = other DNA
cttaggggcaaactcccgaaccactcgtgataatgaagtttacattggttatgaagaggcttctggtaaagcata

SEQ ID NO: 698821 - DNA, 75 bp, synthetic construct
  source 1..75: mol_type = other DNA
atcgggtgctagctgcctttatctggtgcgcagagtgattaatcgtggcattgtggagaaagaagccattattaa

SEQ ID NO: 698822 - DNA, 75 bp, synthetic construct
  source 1..75: mol_type = other DNA
gctggcttgcgcacagcttacgctgactcggtttcaccttcttatttgtatgatgttggtccttatctgatttcc

SEQ ID NO: 698823 - DNA, 75 bp, synthetic construct
  source 1..75: mol_type = other DNA
ttaacgacaccttcggtcatttgttgggcgatgaagtgttgatgaaggtcgtgaaaatccttaaatcacaaatcc

SEQ ID NO: 698824 - DNA, 75 bp, synthetic construct
  source 1..75: mol_type = other DNA
ttctggcggaacctcggtagggcgtgtgtcgactgttagtgagagtaatggagtagcagtgggaatgcaggctaa

SEQ ID NO: 698825 - DNA, 75 bp, synthetic construct
  source 1..75: mol_type = other DNA
gctcgcgcggatggagagattgcgctagctgttggtacaggggccagcgcggataaagaaattgcaacatcagtg

SEQ ID NO: 698826 - DNA, 75 bp, synthetic construct
  source 1..75: mol_type = other DNA
tttcaggtttgtactttaattattttctttgccgcattattggcagcgatatcggggataagttgcatgtatctg

SEQ ID NO: 698827 - DNA, 75 bp, synthetic construct
  source 1..75: mol_type = other DNA
tccagcaactgccattgaaacggatcccggtgcaagtgccttccctactttctatgcctgcgctctgattgtgct

SEQ ID NO: 698828 - DNA, 75 bp, synthetic construct
  source 1..75: mol_type = other DNA
cagtattacacgccgaaaagcatcgttacgctgattgttgaaatgctccagccctacaatggccgcgtgtatgac

SEQ ID NO: 698829 - DNA, 75 bp, synthetic construct
  source 1..75: mol_type = other DNA
cggtaacggtaaggtccaccgcaaagggcaggtgctgtttattgatgcccgccagattggttatatgaaagatcg

SEQ ID NO: 698830 - DNA, 75 bp, synthetic construct
  source 1..75: mol_type = other DNA
gcacaccgccgcagggcaacgccaactttgcgtggatgcagcacatgatccaccaccttgcaccgaaaggctcga

SEQ ID NO: 698831 - DNA, 75 bp, synthetic construct
  source 1..75: mol_type = other DNA
agggaccacaggagatcagacacaactgcgtgcggcgaagcagcgtttggcctttggtcacacgcgctgggcagc

SEQ ID NO: 698832 - DNA, 75 bp, synthetic construct
  source 1..75: mol_type = other DNA
gcgctacattagtgaggttaatcaggacgacgacaatgagcaatttgccgagaagatggcgcgattgaccgcaca

SEQ ID NO: 698833 - DNA, 75 bp, synthetic construct
  source 1..75: mol_type = other DNA
gagctctaacaccaacagtgaaggtgaaatccgccgggcgattattgaggcggacttggtggagtgtatggtagc

SEQ ID NO: 698834 - DNA, 75 bp, synthetic construct
  source 1..75: mol_type = other DNA
ggcggggattatttacctggtcgtcaacggcctgctgacgctgatgatgcgtctgatcgagcgtaaagcactggc

SEQ ID NO: 698835 - DNA, 75 bp, synthetic construct
  source 1..75: mol_type = other DNA
cctacgatgtgatggtatttggcgcggcggggattatttacctgatcgttaacggcctgctgacgctgatgatgc

SEQ ID NO: 698836 - DNA, 75 bp, synthetic construct
  source 1..75: mol_type = other DNA
acgttgcaggagtatccggcactgtggcatttgttgtcagaaccgtggttatgtgcgctgattgcgttgtcgctg

SEQ ID NO: 698837 - DNA, 75 bp, synthetic construct
  source 1..75: mol_type = other DNA
gaaggaatggtggagcgccaagctggaaggtgacgtgcgctggaagtacggcacgccgccacaaggcaacgctaa

SEQ ID NO: 698838 - DNA, 75 bp, synthetic construct
  source 1..75: mol_type = other DNA
aactttccggtcgacaaaattaccacatcagaccagatgacgattaccgctgaactggcaaacggcatggtgtat

SEQ ID NO: 698839 - DNA, 75 bp, synthetic construct
  source 1..75: mol_type = other DNA
gctgacggtagcctcactggttgtggcgctgattctggcgttgatttttaccatcatcctgacgctgaaaacacc

SEQ ID NO: 698840 - DNA, 75 bp, synthetic construct
  source 1..75: mol_type = other DNA
ttaccgttggggtgcaccaaacatgcgtcgccgtctgctactggacagcatcaggccaataaaacaggtagcaac

SEQ ID NO: 698841 - DNA, 75 bp, synthetic construct
  source 1..75: mol_type = other DNA
tggtatgcgttttcactaccgaaagtgaagtccagaaaagagaacacaatggatgatgagttacgtatctggaaa

SEQ ID NO: 698842 - DNA, 75 bp, synthetic construct
  source 1..75: mol_type = other DNA
gggccacaaaagttggttgggccgcttatcgctattcctgtgaccgagctttatacggtgcaggaagaggataaa

SEQ ID NO: 698843 - DNA, 75 bp, synthetic construct
  source 1..75: mol_type = other DNA
tgatgttttatttgctcttgctggcgctttctgaacataccggttttaccgtggcatggataatcgccagtctga

SEQ ID NO: 698844 - DNA, 75 bp, synthetic construct
  source 1..75: mol_type = other DNA
tcgtcacagcaacaggcagtaaactcctttcccagagtcaccgctacgactatgactacgactctgaagatattt

SEQ ID NO: 698845 - DNA, 75 bp, synthetic construct
  source 1..75: mol_type = other DNA
ttgttaactgattttacgcagacgcctcagaaagggaatccgtcgtggcttgccagtcaggctgatgtagagagt

SEQ ID NO: 698846 - DNA, 75 bp, synthetic construct
  source 1..75: mol_type = other DNA
ccggacgactggactctgttgcccgaatgattgatgaaaccggacgattatcgctgataacggtcagacaaagtc

SEQ ID NO: 698847 - DNA, 75 bp, synthetic construct
  source 1..75: mol_type = other DNA
caggctcgttcagcacactggccggtcgtcacagcaacaggcagtaaactcctttcccagagtcaccgctatgac

SEQ ID NO: 698848 - DNA, 75 bp, synthetic construct
  source 1..75: mol_type = other DNA
gcacattggccagttgtcacagctacaggaagtaaactcctttcacaaagtcaccgttattcctacgattatgac

SEQ ID NO: 698849 - DNA, 75 bp, synthetic construct
  source 1..75: mol_type = other DNA
tgtgctctggattaagccgctactggcaacgatagaaaagggtaataacaatttttccggtatacgggagattga

SEQ ID NO: 698850 - DNA, 75 bp, synthetic construct
  source 1..75: mol_type = other DNA
gcagattaacgccagaagccggacgctggaaaccacgctgggaaaactgtccacctggacctcccgtccggtaac

SEQ ID NO: 698851 - DNA, 75 bp, synthetic construct
  source 1..75: mol_type = other DNA
gacagcaaccgggagtaagctgctttcacagaaccatcgttattactatgactatgattccgaagattttcagcc

SEQ ID NO: 698852 - DNA, 75 bp, synthetic construct
  source 1..75: mol_type = other DNA
accggctcagtcacccgggatgacaggcagataggggtcaatctgacctgggacctgtttaacaggaatgcccgt

SEQ ID NO: 698853 - DNA, 75 bp, synthetic construct
  source 1..75: mol_type = other DNA
acagtgctgaagagttgaatcttgtagaccctcgtccaaaagctggggtaatagacattagcagagcgcgtcaga

SEQ ID NO: 698854 - DNA, 75 bp, synthetic construct
  source 1..75: mol_type = other DNA
ttgctggtcgtgcaatcttcctcgccagcccaggcggtagcgtttatctcaatggcgctgttctgcgtgcatttc

SEQ ID NO: 698855 - DNA, 75 bp, synthetic construct
  source 1..75: mol_type = other DNA
gcctggcggggattctggttgggatttgctggtacgcatggtatcgcaaccgggcgcagtttgtcctgaccgatg

SEQ ID NO: 698856 - DNA, 75 bp, synthetic construct
  source 1..75: mol_type = other DNA
ccgccgaggcggtggcgcgtatctcgccgagaacggcgacgttccataaagggcaactggtgtgggggagtgtgg

SEQ ID NO: 698857 - DNA, 75 bp, synthetic construct
  source 1..75: mol_type = other DNA
atcaaaaagtcgtgaccctgagcggtttcgttgaaagccaggctcaggccgaagaggcagtgaaagtggcgaaag

SEQ ID NO: 698858 - DNA, 75 bp, synthetic construct
  source 1..75: mol_type = other DNA
atggatctaaaacgcacgcgctgggttcgtcgtcttgaggacggctcctacactatcgaatcaaattccaacctg

SEQ ID NO: 698859 - DNA, 75 bp, synthetic construct
  source 1..75: mol_type = other DNA
aggcggtttcctgttattcggtaatggcgatgtcggggaaggttcctgcatggtgcataaccccggttacgactt

SEQ ID NO: 698860 - DNA, 75 bp, synthetic construct
  source 1..75: mol_type = other DNA
gtggtgctccgggaagtggatcacctgattattctaaatacagtgttaacacttcttctgcaggcgctcatacgc

SEQ ID NO: 698861 - DNA, 75 bp, synthetic construct
  source 1..75: mol_type = other DNA
agtttggcgttttgctttctgcattttctctgtcttatggtttttcacaacttccttccggtattttgttagatc

SEQ ID NO: 698862 - DNA, 75 bp, synthetic construct
  source 1..75: mol_type = other DNA
ccgtggaagtgcgacgcatgttgtgtcgccggtcaccaggccaccagcacttcatcgtaacgtttaaaagcgatg

SEQ ID NO: 698863 - DNA, 75 bp, synthetic construct
  source 1..75: mol_type = other DNA
ccattgtggatggcgctgtggaggaaggattgctggattttctgaacgaggtgaatcccccgcactgttgtctgt

SEQ ID NO: 698864 - DNA, 75 bp, synthetic construct
  source 1..75: mol_type = other DNA
tggcagccatcaattatatggttgaaacagtggagaaaacgccgcagctaaaaggcaagctgaccatcagccacg

SEQ ID NO: 698865 - DNA, 75 bp, synthetic construct
  source 1..75: mol_type = other DNA
aagcgggcgtcggctttgtggttcctgacgatagccgtctgagcttcgatatcttaatcccgcccgatcagatca

SEQ ID NO: 698866 - DNA, 75 bp, synthetic construct
  source 1..75: mol_type = other DNA
actgaccggcattcgcgtaccgccgcaaacagaacgtaaacacatcattctcgataacgattcgccggaagcgat

SEQ ID NO: 698867 - DNA, 75 bp, synthetic construct
  source 1..75: mol_type = other DNA
ctcaccccgagtggagaaagatgtcagtagatgagtatcagaaatttggacgctcagaaatgctgcgctatgcca

SEQ ID NO: 698868 - DNA, 75 bp, synthetic construct
  source 1..75: mol_type = other DNA
gttccagccgtgctctgcgtcacctccgatattaacgtgccacgcattccttcgatgaaagccattctcggcgcg

SEQ ID NO: 698869 - DNA, 75 bp, synthetic construct
  source 1..75: mol_type = other DNA
tgactacgcggagctgctggagtcggttgccgaccgtcctgatgcagaaatgctgcaaaccatgctgctgcgctc

SEQ ID NO: 698870 - DNA, 75 bp, synthetic construct
  source 1..75: mol_type = other DNA
tctctggataacgactactatcgctttgaccaggtagggcaacgtctgatgggcgaatccagcggccagacttat

SEQ ID NO: 698871 - DNA, 75 bp, synthetic construct
  source 1..75: mol_type = other DNA
tgctgtgtttgtcatgctaacgtatacagacatggtgagcaaattttctagtattgctttagagtacttctgtat

SEQ ID NO: 698872 - DNA, 75 bp, synthetic construct
  source 1..75: mol_type = other DNA
atgcctgcgggagtaaagtcgatcaccgactggtatgcacaaaaagaacgcggcacggcgctggggatttttaac

SEQ ID NO: 698873 - DNA, 75 bp, synthetic construct
  source 1..75: mol_type = other DNA
cggtattgttgtcgatcgactggcgaaaaaaggctacgacctggcgaagacgcgtaaaacggctattgtctgcgg

SEQ ID NO: 698874 - DNA, 75 bp, synthetic construct
  source 1..75: mol_type = other DNA
ttctttttttaaaaccggcgaaaaaaagtgttcttcagatgattataacgttaaaaagttagataattctagcga

SEQ ID NO: 698875 - DNA, 75 bp, synthetic construct
  source 1..75: mol_type = other DNA
agcaattgcaaaaaaattcttaaaaacagatatttggtatgatgagtcacttcttttgaaaaataaaaaacctaa

SEQ ID NO: 698876 - DNA, 75 bp, synthetic construct
  source 1..75: mol_type = other DNA
ttataagacgatatttctttcttcaacagaaaaaactagcactttgaatgcgatgctgaagaccttatcattcaa

SEQ ID NO: 698877 - DNA, 75 bp, synthetic construct
  source 1..75: mol_type = other DNA
gcgtttgatgtgcttgccagcgataaagctgatcttgagcgattgtttcgcttgttgactcagcgttttgctttt

SEQ ID NO: 698878 - DNA, 75 bp, synthetic construct
  source 1..75: mol_type = other DNA
gtgccggaaaacttgcaactaagggattggggaaactaggtgttaaggctcttgcaaagggggctttacgcgcaa

SEQ ID NO: 698879 - DNA, 75 bp, synthetic construct
  source 1..75: mol_type = other DNA
gatcctaacgcaaagtctccgcttacaagatcaccagatggaaagttaagtggtggcgcactcgggatgttccag

SEQ ID NO: 698880 - DNA, 75 bp, synthetic construct
  source 1..75: mol_type = other DNA
tgaaatcggcagaagctgcggctcttctcatgagcaagtatctgaagcaagccaatggagacttaaacgaggcca

SEQ ID NO: 698881 - DNA, 75 bp, synthetic construct
  source 1..75: mol_type = other DNA
atgagtaaattagttcaggcctatgatttggccgaatacgaagattttattaatcaggagcagttcgctggacgc

SEQ ID NO: 698882 - DNA, 75 bp, synthetic construct
  source 1..75: mol_type = other DNA
ccagcagcaacaagcagcactacaaaaacgtaacgaccgggatattcaccaggaagaagtcactaggctggaagc

SEQ ID NO: 698883 - DNA, 75 bp, synthetic construct
  source 1..75: mol_type = other DNA
ttgcagattgaggcaggcgcaaagcgtaatgacctgccaatcactcaacacgcagtaacgcctaaaacgaatgaa

SEQ ID NO: 698884 - DNA, 75 bp, synthetic construct
  source 1..75: mol_type = other DNA
gggttcacaaggggggagacagcaacaaagacagcaacaaggcagccaatcccctagaatggataaccttccgga

SEQ ID NO: 698885 - DNA, 75 bp, synthetic construct
  source 1..75: mol_type = other DNA
gaatggtcgggggatgcgtcgagaagttgttcagggaacgctcgaagaacgtgcacgagggaaggggaccgcaac

SEQ ID NO: 698886 - DNA, 75 bp, synthetic construct
  source 1..75: mol_type = other DNA
atcaatgcaaatgccgtagaaacgggcaatagcgcgttgcagaaaattgataaagctattggtcaaaatagctcg

SEQ ID NO: 698887 - DNA, 75 bp, synthetic construct
  source 1..75: mol_type = other DNA
gctgaaaaaagctggagcactcgcttttggcgctctgggggcaaagaaacttgtaggaatgctacgcggtggtgg

SEQ ID NO: 698888 - DNA, 75 bp, synthetic construct
  source 1..75: mol_type = other DNA
agggggctttacgcgcaattccgctagtcggcacggtggctggaggtatctatgatgcggtaaccggttggaatg

SEQ ID NO: 698889 - DNA, 75 bp, synthetic construct
  source 1..75: mol_type = other DNA
tcaatcggtggcgcagggtgatcttataaatctctatggcccgaccgaagcagcaatcgatgtcagtcatcaccg

SEQ ID NO: 698890 - DNA, 75 bp, synthetic construct
  source 1..75: mol_type = other DNA
atcatctgcggttgcgtcaccgcagcgggggcactggcgtacatcttcctggttcgtcagccgatcaacgaccca

SEQ ID NO: 698891 - DNA, 75 bp, synthetic construct
  source 1..75: mol_type = other DNA
tgttggtgcgtatcggtatggggattggtgaagcgccgatgaacccatgcggtgtaaaagtcattaacgactggt

SEQ ID NO: 698892 - DNA, 75 bp, synthetic construct
  source 1..75: mol_type = other DNA
tcatcaggaaatgggaattcggaaaaaaatattaggagtagatcttacatttcataccggtgtttatacgaaggt

SEQ ID NO: 698893 - DNA, 75 bp, synthetic construct
  source 1..75: mol_type = other DNA
agccatatccggctggcgaatccccgcacggcggagagcgagtccagcctgatgctgcgtcgtggctacagttat

SEQ ID NO: 698894 - DNA, 75 bp, synthetic construct
  source 1..75: mol_type = other DNA
ggaatacgttaaacctatcggcggcggttatttttttgcgctgccgggggggaaggacgcgaacgattatttcgg

SEQ ID NO: 698895 - DNA, 75 bp, synthetic construct
  source 1..75: mol_type = other DNA
ccgggcaactggatatggggttgctgtttgtctgctaccaacacgatctggaaaaaggcttcctgacagtacaaa

SEQ ID NO: 698896 - DNA, 75 bp, synthetic construct
  source 1..75: mol_type = other DNA
actatacacaccatgaatataatattgaaacttcattagattttagttctcctttgccagagccggagcgagagc

SEQ ID NO: 698897 - DNA, 75 bp, synthetic construct
  source 1..75: mol_type = other DNA
atggcgataaacataaggatggatgtggtattcatgatccaagatataaaaacaatcatacttcaaatgacgaaa

SEQ ID NO: 698898 - DNA, 75 bp, synthetic construct
  source 1..75: mol_type = other DNA
atgtggctttcttgggtaaatttgaaagctcatataatgatagtaattattacattgaaaatgatctgtctgtat

SEQ ID NO: 698899 - DNA, 75 bp, synthetic construct
  source 1..75: mol_type = other DNA
cgctaacgtcattcctgatagtgctgagatgaaaattagcgtccgctctcttagccgtgaaacccggcaacttct

SEQ ID NO: 698900 - DNA, 75 bp, synthetic construct
  source 1..75: mol_type = other DNA
accatacacatcatgaatataatattgaaacttcattagattttagttctcctttgccagagccggagcgagagc

SEQ ID NO: 698901 - DNA, 75 bp, synthetic construct
  source 1..75: mol_type = other DNA
accatatacaccatgaatataatattgaaacttcattagattttagttctcctttgccagagccggagcgagagc

SEQ ID NO: 698902 - DNA, 75 bp, synthetic construct
  source 1..75: mol_type = other DNA
ctcttgaatccggctcgcgcgtcggcatggggatgcgcatgcatcatgcgcagcagcaggccttactggaagaaa

SEQ ID NO: 698903 - DNA, 75 bp, synthetic construct
  source 1..75: mol_type = other DNA
atgcagcgtctgtttgattatctgactgataccggcaacttaccgcgtattaataccgttgaatctccgtttgct

SEQ ID NO: 698904 - DNA, 75 bp, synthetic construct
  source 1..75: mol_type = other DNA
taatttcctgcaatggtatgtttctgagcagcatgaagaagagaaactgttcaaatcgattattgataaattaag

SEQ ID NO: 698905 - DNA, 75 bp, synthetic construct
  source 1..75: mol_type = other DNA
actaagcaaagagcagatcgttttatgcagcgaccaaaagataccttagcgaaatggctcagcacgattcttccg

SEQ ID NO: 698906 - DNA, 75 bp, synthetic construct
  source 1..75: mol_type = other DNA
ccaaatggttaagcgcgatcctccccgtggtcattgttgggctggtgggattgtttgcggtaactgtgattcgtg

SEQ ID NO: 698907 - DNA, 75 bp, synthetic construct
  source 1..75: mol_type = other DNA
gcatggtgggaaaacagctttattccccgcaggaaatgcagcagttacatcctggagatgaagaagcgtggcggc

SEQ ID NO: 698908 - DNA, 75 bp, synthetic construct
  source 1..75: mol_type = other DNA
tgttgataagcctttcaccgtgacactgtcacaagcacgggagctggatgctctggcaaagagtcttgggcgcgt

SEQ ID NO: 698909 - DNA, 75 bp, synthetic construct
  source 1..75: mol_type = other DNA
ggttccggcaagccaggccattcaggtgatggaacttattgaacttggtatcgaatccgccagacatcgcgcgac

SEQ ID NO: 698910 - DNA, 75 bp, synthetic construct
  source 1..75: mol_type = other DNA
attttcgaagaaagtggtgagctgcttggctgcgagcggcatatgatgtcgcgtgcgggcagtgcgcaggcacgg

SEQ ID NO: 698911 - DNA, 75 bp, synthetic construct
  source 1..75: mol_type = other DNA
tggttgtgtaattcgaaacggctgaagcgggagaaaaaaaaggcgctccgtggagcgccgaataacagtcacaag

SEQ ID NO: 698912 - DNA, 75 bp, synthetic construct
  source 1..75: mol_type = other DNA
tggagtttatctccactattttgcaatccgtacttaatcttggcctgttgtgtctcggcctgattttgatcgtct

SEQ ID NO: 698913 - DNA, 75 bp, synthetic construct
  source 1..75: mol_type = other DNA
gaccgtactcaatcttggcctgttgtgcctcggcctgattttggttgtcttcctcggcaaagaaacggtgcatct

SEQ ID NO: 698914 - DNA, 75 bp, synthetic construct
  source 1..75: mol_type = other DNA
caggaagccgcgtagggatggggatgcgaatgcaccatgtgcagcaacaggcgcttctggaagagatggcaggcc

SEQ ID NO: 698915 - DNA, 75 bp, synthetic construct
  source 1..75: mol_type = other DNA
tccaccagcgtcaccctgaccggctcactgctggcgattgatgctccggtgatcgccagcggcgcgaccacgccg

SEQ ID NO: 698916 - DNA, 75 bp, synthetic construct
  source 1..75: mol_type = other DNA
gtaaattcaattccttcttttgctgctacacccgttagtaccggtcttggttttagcttaatgggttcccagcca

SEQ ID NO: 698917 - DNA, 75 bp, synthetic construct
  source 1..75: mol_type = other DNA
atgccatttgctcgttatttctgcattttcataaacgttggtttgggagaagcagcaaaacgaggggtggggaca

SEQ ID NO: 698918 - DNA, 75 bp, synthetic construct
  source 1..75: mol_type = other DNA
ctggcgaagttgcccgcaggggtaaacgccagccaaagccagggtaaacgccatgacatcattcaacttggtggg

SEQ ID NO: 698919 - DNA, 75 bp, synthetic construct
  source 1..75: mol_type = other DNA
ctgacagccgtggcactcataccctggaaagccagccgcagcgtattgtttccaccagcgtcaccctgaccggct

SEQ ID NO: 698920 - DNA, 75 bp, synthetic construct
  source 1..75: mol_type = other DNA
acgcccttcttttaaccggaattttgctttcaggaatatccgcagttcaggctgccgactggccgcgtcagatta

SEQ ID NO: 698921 - DNA, 75 bp, synthetic construct
  source 1..75: mol_type = other DNA
ttgctgctggaatgcaccggatgcgccatatgcagcagtatgccgcgacaccacaagcaattttcatcgctttcg

SEQ ID NO: 698922 - DNA, 75 bp, synthetic construct
  source 1..75: mol_type = other DNA
tagcggtaagggaattgcggcggatcagcttgaagctatcttcaccccgtacttcaccaccaaagccgacggcac

SEQ ID NO: 698923 - DNA, 75 bp, synthetic construct
  source 1..75: mol_type = other DNA
cgcaggtgatggcgaaagaagccgaccgtttgaatcgcgtggtgagcgaactgctggaactggtcaagccaacgc

SEQ ID NO: 698924 - DNA, 75 bp, synthetic construct
  source 1..75: mol_type = other DNA
tttttgtttcgaattgattatcgcacaattggcgatcctctctttgggggcgagctatgtgccgctggatggtaa

SEQ ID NO: 698925 - DNA, 75 bp, synthetic construct
  source 1..75: mol_type = other DNA
gtttgctgtcaccgatgcccagggcatcatcattcttcacagtgaccccgaaatggtcgggcgtgcactctattc

SEQ ID NO: 698926 - DNA, 75 bp, synthetic construct
  source 1..75: mol_type = other DNA
gaaaaaggcagtgtacttatccgcgctctcgaatccggctcgcgcgtcggtatggggatgcgcatgcatcatgcg

SEQ ID NO: 698927 - DNA, 75 bp, synthetic construct
  source 1..75: mol_type = other DNA
tattaaagtgtgtaataacccgcagacgtgggagcatttatctgacgatatggacgttaatgccggtcgtgtaat

SEQ ID NO: 698928 - DNA, 75 bp, synthetic construct
  source 1..75: mol_type = other DNA
tgactctgttcttacgtcgagtgcctgtaaccaacggacatagagatagttcatcacaaaaagctaatgaaattg

SEQ ID NO: 698929 - DNA, 75 bp, synthetic construct
  source 1..75: mol_type = other DNA
aatcgtacgctaaggttttccgggcatccgtaagggccgaaacttcccgtcttccagtctgcggctctgccgcca

SEQ ID NO: 698930 - DNA, 75 bp, synthetic construct
  source 1..75: mol_type = other DNA
atgcagcaccggcaggataacttactggcgaacagaaatttgttgcctggtatggtttccggtcagtacgcattc

SEQ ID NO: 698931 - DNA, 75 bp, synthetic construct
  source 1..75: mol_type = other DNA
gccgccagccagtttctttgatgagctggacccgatcctcaatcgccatttgccttccccgctgttcactgacac

SEQ ID NO: 698932 - DNA, 75 bp, synthetic construct
  source 1..75: mol_type = other DNA
cgtgaagccgctcagacttatgcgcgttatggcgcgacagtgattttactgggacgtaatgaagaaaaattacgt

SEQ ID NO: 698933 - DNA, 75 bp, synthetic construct
  source 1..75: mol_type = other DNA
tatggtttccggtcagtgcgcatttaagctccgcactttctctccggtggcacgctattttcccctcctctcctg

SEQ ID NO: 698934 - DNA, 75 bp, synthetic construct
  source 1..75: mol_type = other DNA
ttattggatggatcaaagaattacagatcacacctatttcatcccgtttacccggcatatatccgcctgtaaccg

SEQ ID NO: 698935 - DNA, 75 bp, synthetic construct
  source 1..75: mol_type = other DNA
cggatttgatgagagtgaagtaacactaccacggatggggaatgtttcttacatacataatctaacgctggacta

SEQ ID NO: 698936 - DNA, 75 bp, synthetic construct
  source 1..75: mol_type = other DNA
ccggatttatattcccgtgatgaaattttaatttgggatataaataaagtaatattgcacagatatgaaaatgat

SEQ ID NO: 698937 - DNA, 75 bp, synthetic construct
  source 1..75: mol_type = other DNA
tatccaaagatagcccgtcgtcttggatacaatcagggggtgtctgaagatccacatattcagagattaacggag

SEQ ID NO: 698938 - DNA, 75 bp, synthetic construct
  source 1..75: mol_type = other DNA
ttggtcagacagttcccgttaaaaaatttatttggacttgaacactctgttattcaacaatcatgtaatatattc

SEQ ID NO: 698939 - DNA, 75 bp, synthetic construct
  source 1..75: mol_type = other DNA
aaacagaacccttacggttatctgacggtcaggatgagtatcaggtaaatgcggatttatactcccgcgatgaag

SEQ ID NO: 698940 - DNA, 75 bp, synthetic construct
  source 1..75: mol_type = other DNA
gatttctggtggcgcgtttgactgccatatgggcgcggtcggcgcgggcgcacagcctaacgcactggtaaaagt

SEQ ID NO: 698941 - DNA, 75 bp, synthetic construct
  source 1..75: mol_type = other DNA
aatgattttgcccggcctgaattaattaaacccggctaccccacaaatcgtactcatcggcgtgctcgactttca

SEQ ID NO: 698942 - DNA, 75 bp, synthetic construct
  source 1..75: mol_type = other DNA
cgcattcaaatgaatgtactaccgtcgaacgcttgaaaatgctggcggatgagcggctgtataagagtaagaaaa

SEQ ID NO: 698943 - DNA, 75 bp, synthetic construct
  source 1..75: mol_type = other DNA
ctcgatggcgatcaggatggtgagttttgctactggttgctgcaaaaaaccgtggtgcaatttcctgaggttaag

SEQ ID NO: 698944 - DNA, 75 bp, synthetic construct
  source 1..75: mol_type = other DNA
cctcgttttgggtatccgaatattaacgattcctcagaagcactggaacttatcgcctctggctgtcatatggtg

SEQ ID NO: 698945 - DNA, 75 bp, synthetic construct
  source 1..75: mol_type = other DNA
ggcaccagtggtatcacgggtaacccggcagtaggacgtgcctttgaccaactgctggagaaaggggctacctgt

SEQ ID NO: 698946 - DNA, 75 bp, synthetic construct
  source 1..75: mol_type = other DNA
ttgaaagtgttgcaaacggccaacattgcgccgcagaacggctggagcatcaggagtttgttttaacatataaag

SEQ ID NO: 698947 - DNA, 75 bp, synthetic construct
  source 1..75: mol_type = other DNA
cggcagatgattatctgtgccgatatgatcaaaccgcggttgaatgaaacgctggatgatatttgcgaagcattg

SEQ ID NO: 698948 - DNA, 75 bp, synthetic construct
  source 1..75: mol_type = other DNA
ggttttgtcgggaacacctcatttgaagatttctctcacatgatggtatcaatggcaaaaaaagcaacggtgccg

SEQ ID NO: 698949 - DNA, 75 bp, synthetic construct
  source 1..75: mol_type = other DNA
atggataatctcgacgttatttgtataggtgccgctattgttgatattccattgcaaccggtcagtaaaaatatc

SEQ ID NO: 698950 - DNA, 75 bp, synthetic construct
  source 1..75: mol_type = other DNA
atgattactaaaaatttccgactgaatgcgctggcgaataagtatgcggcagcactgtataaccacattacttcc

SEQ ID NO: 698951 - DNA, 75 bp, synthetic construct
  source 1..75: mol_type = other DNA
gattgttgttgtatcagcttattgcagttactatttgctaccagacgatttaatttcttatagtaaaacagccat

SEQ ID NO: 698952 - DNA, 75 bp, synthetic construct
  source 1..75: mol_type = other DNA
ccagcgattttgccagtaacccggaacctcgttgcccctgcattttgctgctggatgtttctggctcgatgagcg

SEQ ID NO: 698953 - DNA, 75 bp, synthetic construct
  source 1..75: mol_type = other DNA
tgttgcttcggcggctgcgatgggcggcgtcatgcatccacagcaggttaaagagggttacgacccggcattcag

SEQ ID NO: 698954 - DNA, 75 bp, synthetic construct
  source 1..75: mol_type = other DNA
aaaggtcaccgtgtggtcggcggaatgcgcgcgtctatttataacgccatgccgctggaaggcgttaaagcgctg

SEQ ID NO: 698955 - DNA, 75 bp, synthetic construct
  source 1..75: mol_type = other DNA
ttgacgtcagtcgttacggtgtgatttatgctggcgcacagaaaaatatcggcccggcgggcctgacaatcgtca

SEQ ID NO: 698956 - DNA, 75 bp, synthetic construct
  source 1..75: mol_type = other DNA
gtacgccggggttatccaaaaccagaacgtccgactttgcgccaggctggagtggcaatatggatggcgatcccc

SEQ ID NO: 698957 - DNA, 75 bp, synthetic construct
  source 1..75: mol_type = other DNA
tggacccgattcactttggtattgtcatggtgctgaacatgtgtatcggtatttgtactccgcctgtaggcagtg

SEQ ID NO: 698958 - DNA, 75 bp, synthetic construct
  source 1..75: mol_type = other DNA
agagtgacgcctatcaggacgcgatgcgttactggcaaaataccctggcggggacgttgccgattcttgatatcc

SEQ ID NO: 698959 - DNA, 75 bp, synthetic construct
  source 1..75: mol_type = other DNA
gccttctattttttggggcagtggctgcacaataccgggcacggcccgaagatgaaagccattgccgacaaaatg

SEQ ID NO: 698960 - DNA, 75 bp, synthetic construct
  source 1..75: mol_type = other DNA
gacggcgaaatcgtgtatggtattggcgcgatcaaaggggtaggtgaaggcccgattgaggccatcatcgaagcc

SEQ ID NO: 698961 - DNA, 75 bp, synthetic construct
  source 1..75: mol_type = other DNA
agctaaccgttcgcggatgaacgtgccgttccagttggcggatagcgcgcttgataaattgccgttcgcggatga

SEQ ID NO: 698962 - DNA, 75 bp, synthetic construct
  source 1..75: mol_type = other DNA
tcttcaacgattctttcccgcccgattgatgtcagccgttatggcgtgatttacgctggcgcgcagaaaaatatc

SEQ ID NO: 698963 - DNA, 75 bp, synthetic construct
  source 1..75: mol_type = other DNA
atgtacagcaaatacgacgaggcgcagtttcacttgagacttccgcatgaactccacgcgaaaattaaacagcgc

SEQ ID NO: 698964 - DNA, 75 bp, synthetic construct
  source 1..75: mol_type = other DNA
taccccgacagaagcatctgcaattgcggtaatttatacccttttccttgcactggttctttatcgtgaaatatc

SEQ ID NO: 698965 - DNA, 75 bp, synthetic construct
  source 1..75: mol_type = other DNA
agttatctgacacacaagcccttcaggaaaacgacagcatcaccgaatccgttggtgcggcaaacgacgatgaac

SEQ ID NO: 698966 - DNA, 75 bp, synthetic construct
  source 1..75: mol_type = other DNA
cccatgaacaggacggtcaatgatgacatcatcggcctggacggttcagtggaccgcaaggaaactcaccgtgcg

SEQ ID NO: 698967 - DNA, 75 bp, synthetic construct
  source 1..75: mol_type = other DNA
gcgcagataccgacctagatgatataactagttatattgctcgtttcgacatagatgcggcagaacgcttatggc

SEQ ID NO: 698968 - DNA, 75 bp, synthetic construct
  source 1..75: mol_type = other DNA
atgtgcgctgattgcgttatcgctgaacagtgcggcgtataccacgcagctgttttacggtgcaattcgtgcgat

SEQ ID NO: 698969 - DNA, 75 bp, synthetic construct
  source 1..75: mol_type = other DNA
accgcaagaaaagaaagttttcaccggcaaacaaggaggactgccagaccgttaaaggtaagcaggtttactccc

SEQ ID NO: 698970 - DNA, 75 bp, synthetic construct
  source 1..75: mol_type = other DNA
aaaaatccggaagatgagtcatcgaggggcgtgtgggtttttaatattaaagcctggaacgagctggctgatatt

SEQ ID NO: 698971 - DNA, 75 bp, synthetic construct
  source 1..75: mol_type = other DNA
tattacacaattgctatggatattatcttcgttttctcatgcagtaaaagaagtaaacgcaatcccaattatcta

SEQ ID NO: 698972 - DNA, 75 bp, synthetic construct
  source 1..75: mol_type = other DNA
tgtatcaatttcattcattcgaagcatggactaattagtacttccgctagtaacttgcatgatgttgttggtcaa

SEQ ID NO: 698973 - DNA, 75 bp, synthetic construct
  source 1..75: mol_type = other DNA
tgccgagggcggcctactattctataacctgtattcttccccgaccgagattgcgacggacagcacctataccta

SEQ ID NO: 698974 - DNA, 75 bp, synthetic construct
  source 1..75: mol_type = other DNA
taccgagtgacaatttcaggcattgaaattgttaacgtagttcacgcccgccgacagttccctgtaacaccttaa

SEQ ID NO: 698975 - DNA, 75 bp, synthetic construct
  source 1..75: mol_type = other DNA
tgcgtgaaattgtagctcaccccaattacattattctgtaccgagtgacaatttcaggcattgaaattgttaacg

SEQ ID NO: 698976 - DNA, 75 bp, synthetic construct
  source 1..75: mol_type = other DNA
acgaagaatttcaaaggttagcggcatctgcagcacaaaagctggaaatcatggcagcgaaagcagagaaagcgg

SEQ ID NO: 698977 - DNA, 75 bp, synthetic construct
  source 1..75: mol_type = other DNA
cagatcaacacgcgaaagcagaagccatcggccaggccgatatgtttggcgtactggcggaagagcctgagcaaa

SEQ ID NO: 698978 - DNA, 75 bp, synthetic construct
  source 1..75: mol_type = other DNA
aagttatcgattcagggaaatctcaccgccccacagtcgtgcaaaattaatcagggcgatgttattaaggttaat

SEQ ID NO: 698979 - DNA, 75 bp, synthetic construct
  source 1..75: mol_type = other DNA
ggtcgatggaatgggaagcccgtctacaggtgacttccatgatttagtcaagttatcgattcagggaaatctcac

SEQ ID NO: 698980 - DNA, 75 bp, synthetic construct
  source 1..75: mol_type = other DNA
ttgtctggagattcagggggccagtctaacgacattccaggactcacaaccgaccaggttgtctctgttaacacc

SEQ ID NO: 698981 - DNA, 75 bp, synthetic construct
  source 1..75: mol_type = other DNA
gctgaacccagctcaacctcatttattaaccgcaccagaaatctggctgcttaccgatctgactgaagattcaac

SEQ ID NO: 698982 - DNA, 75 bp, synthetic construct
  source 1..75: mol_type = other DNA
tccagcctgaactcaggggtgaaggttcgtttggttttcttgttcattaagtcacctgttttgtgttgtggtgag

SEQ ID NO: 698983 - DNA, 75 bp, synthetic construct
  source 1..75: mol_type = other DNA
tcagccctgtacttaccaccactggacatcaggcaggatattacaaactcaatgatagtctggatattaaaacca

SEQ ID NO: 698984 - DNA, 75 bp, synthetic construct
  source 1..75: mol_type = other DNA
catgaagatggcctgactcaggctgaagttctgaccgcactgataaaaagtgaagcgcaaaaacgatgcatgtga

SEQ ID NO: 698985 - DNA, 75 bp, synthetic construct
  source 1..75: mol_type = other DNA
ttacggttaaagagggcggcccgcggatgattgtcaccggatactccagcggtatggttgagtgtcgttggtatg

SEQ ID NO: 698986 - DNA, 75 bp, synthetic construct
  source 1..75: mol_type = other DNA
gaaaatctggctgcagggttaaatggcgagtcactattcctgttcgccggtgatcagaaagatgccgatgctatt

SEQ ID NO: 698987 - DNA, 75 bp, synthetic construct
  source 1..75: mol_type = other DNA
atgacacaagaagaaaaagtgatgtttctgatgcggctggctgtcgatacctacaatacacaattcagggagaaa

SEQ ID NO: 698988 - DNA, 75 bp, synthetic construct
  source 1..75: mol_type = other DNA
cggctctatgatatcgccgtcagcgataacaatgcctcctacagccaggcgatgtggattctggtgggcgtgatg

SEQ ID NO: 698989 - DNA, 75 bp, synthetic construct
  source 1..75: mol_type = other DNA
tcgctggaagagacggcagccagcatggagcaactgaccgcaacggtgaaacagaacgccgagaatgcgcgccag

SEQ ID NO: 698990 - DNA, 75 bp, synthetic construct
  source 1..75: mol_type = other DNA
caacataatcaacgactataaattaatatttaattccggcgagagtgttattccacctatgtcaaaaactgaatc

SEQ ID NO: 698991 - DNA, 75 bp, synthetic construct
  source 1..75: mol_type = other DNA
atcactgacctcgatccgctagaatttgacctgctgttcgaacgtttccttaacccggaacgtgtctccatgcct

SEQ ID NO: 698992 - DNA, 75 bp, synthetic construct
  source 1..75: mol_type = other DNA
tatgtcggaggcgtaaggctgaaagacatgcacccgacagaacgtggtaaagtcatcacggctgcggggctcgtt

SEQ ID NO: 698993 - DNA, 75 bp, synthetic construct
  source 1..75: mol_type = other DNA
caacgctcggaaaccacggcggtattccagcttgaatcgcgcggcatgaaggatctgatcaagcgtctgcaacct

SEQ ID NO: 698994 - DNA, 75 bp, synthetic construct
  source 1..75: mol_type = other DNA
taacccggaacgtgtctccatgcctgactttgacgttgacttctgtatggagaaacgcgatcaggttatcgaaca

SEQ ID NO: 698995 - DNA, 75 bp, synthetic construct
  source 1..75: mol_type = other DNA
ctggtggagaaattcgctggttacggatttaacaaatcgcactctgcggcctatgctttggtgtcatatcaaacg

SEQ ID NO: 698996 - DNA, 75 bp, synthetic construct
  source 1..75: mol_type = other DNA
ctccggtctttaccatttccacgtcaacgacgacggcgaaatcgtgtatggtattggcgcgatcaaaggggtagg

SEQ ID NO: 698997 - DNA, 75 bp, synthetic construct
  source 1..75: mol_type = other DNA
ctctatgcgtggaaataatattacaggatcagtttaccgttgcgatactggttttgtgtctgagggaacccctgc

SEQ ID NO: 698998 - DNA, 75 bp, synthetic construct
  source 1..75: mol_type = other DNA
ctacctactataacatcaaatatgacagtagcctgaatctgcaggcttctgatggaaaaattcataaaaactata

SEQ ID NO: 698999 - DNA, 75 bp, synthetic construct
  source 1..75: mol_type = other DNA
tcttcagacatacctaaaacaatcgcagagtatttccaggcaacttcaggtgtatatcctaaaaaatacggacag

SEQ ID NO: 699000 - DNA, 75 bp, synthetic construct
  source 1..75: mol_type = other DNA
tacttcctgccgcagttcccgaccggggacatgagcaccgaagattatctggtcaagcgtgcaaaagagggcctg

SEQ ID NO: 699001 - DNA, 75 bp, synthetic construct
  source 1..75: mol_type = other DNA
tccgcgaactgtttgatctctgcgcccgaaccgacactaaaaagctgaaccggcgagtgctggaaaagctaatca

SEQ ID NO: 699002 - DNA, 75 bp, synthetic construct
  source 1..75: mol_type = other DNA
tattgttattgatggagcaaatattgaaataggtgatgttcacacgtacgctgcctggtctggtacagcgttcag

SEQ ID NO: 699003 - DNA, 75 bp, synthetic construct
  source 1..75: mol_type = other DNA
gaataatctgatggtcattgatggtattgaagttcgtcgtgatgcttatggacgttacagcctgaacgatctgca

SEQ ID NO: 699004 - DNA, 75 bp, synthetic construct
  source 1..75: mol_type = other DNA
ggcagataacaaaccagagctacagcgtgggctggaagctcgacatatcgaactcatcgccctgggggggcacca

SEQ ID NO: 699005 - DNA, 75 bp, synthetic construct
  source 1..75: mol_type = other DNA
cgtgcttccggggatggtgccatggtttgtgatattgataagccagctgcgttttcgtcgtgcgcataaagcggc

SEQ ID NO: 699006 - DNA, 75 bp, synthetic construct
  source 1..75: mol_type = other DNA
accttggtttgggagaaggtgctccagctattggcgttccgttcttctggccgtcgccgcaatgccaaatactgt

SEQ ID NO: 699007 - DNA, 75 bp, synthetic construct
  source 1..75: mol_type = other DNA
gggctgccaggttcgcgctgcggcattatcatcgccaatgaaaaaatcatcaccgctatcactaatatgaacggc

SEQ ID NO: 699008 - DNA, 75 bp, synthetic construct
  source 1..75: mol_type = other DNA
gagccggagaaaattgaggcgggtgtgaagattctggcggaagagatagaaagagcctgggctgaaagtcactaa

SEQ ID NO: 699009 - DNA, 75 bp, synthetic construct
  source 1..75: mol_type = other DNA
tacatcattcccaatccgcagcgtgtgtttgtttacgtctacagcgccagcgtgctgccggggatggtgccgtgg

SEQ ID NO: 699010 - DNA, 75 bp, synthetic construct
  source 1..75: mol_type = other DNA
atgccagttagtcgtaatcgctgcattttcttaaacgttggtttgggagaaggttcggcattacccgttggtgtg

SEQ ID NO: 699011 - DNA, 75 bp, synthetic construct
  source 1..75: mol_type = other DNA
atgccatttgctcgttatttctgcattttcataaacgttggtttgggagaaggctctgcattacccgttggcgtg

SEQ ID NO: 699012 - DNA, 75 bp, synthetic construct
  source 1..75: mol_type = other DNA
cgtggggttgcttctgacaatgcagcgaatattggcactgaaacccgcccgcgcaacattgcatttaactacatc

SEQ ID NO: 699013 - DNA, 75 bp, synthetic construct
  source 1..75: mol_type = other DNA
tcaaatcggatggcaccgtgaaaacggctctcgaaaaccttggtttgggagaaggttcggcattacccgttggtg

SEQ ID NO: 699014 - DNA, 75 bp, synthetic construct
  source 1..75: mol_type = other DNA
caccaacaggctggctgaaatgcaacggtgcacctttttctgccgaagagtacccaaaactggcaaaggcttacc

SEQ ID NO: 699015 - DNA, 75 bp, synthetic construct
  source 1..75: mol_type = other DNA
gttgcaggaggagctttgcagcgttgtggaggcatccgttgccagcctagagaaggggcggcatgaccagttgct

SEQ ID NO: 699016 - DNA, 75 bp, synthetic construct
  source 1..75: mol_type = other DNA
ccgatttgcaccccagcaaatgtagcgttattgttaccttccttgctacagagttcgacagatatcccgctatga

SEQ ID NO: 699017 - DNA, 75 bp, synthetic construct
  source 1..75: mol_type = other DNA
cctgccagtgagcaaccaccggcacagccacgactgcgaattgctgaacaagatccaaactgggaaacattttga

SEQ ID NO: 699018 - DNA, 75 bp, synthetic construct
  source 1..75: mol_type = other DNA
cgccaggaaaacgttggcgcaggcggctgttcattataaaaaattcaaaagcatggcaccgttacccgaaatggc

SEQ ID NO: 699019 - DNA, 75 bp, synthetic construct
  source 1..75: mol_type = other DNA
tcgcgaaatcgccggtggtaacctggcgaataccctgaccattgacgggcgcagtgaaatgggcgacctggcgca

SEQ ID NO: 699020 - DNA, 75 bp, synthetic construct
  source 1..75: mol_type = other DNA
acaatacgctgactaatttgagtggaaaggatgtagctggtcttctcgcataccttggtttgggagaaggctctg

SEQ ID NO: 699021 - DNA, 75 bp, synthetic construct
  source 1..75: mol_type = other DNA
ggcgcagtgaaatgggcgacctggcgcagagcgtttcacatatgcaacgctctttgactgacaccgtcactcatg

SEQ ID NO: 699022 - DNA, 75 bp, synthetic construct
  source 1..75: mol_type = other DNA
gaaatcgccgacagttcgaagaaaattgccgacattattagcgtaatcgacggcatcgcattccagaccaatatc

SEQ ID NO: 699023 - DNA, 75 bp, synthetic construct
  source 1..75: mol_type = other DNA
ctgttccatggccttcagccacaccgccaacaggctggctgaaatgcaacggtgcggctttttctgctgaagaat

SEQ ID NO: 699024 - DNA, 75 bp, synthetic construct
  source 1..75: mol_type = other DNA
atgccagttagctgttacctctgcattttcttaaacgttggtttgggagaaggttcggcattacccgttggcgtg

SEQ ID NO: 699025 - DNA, 75 bp, synthetic construct
  source 1..75: mol_type = other DNA
ttttcataaacgttggtttaggagaaggctcagcattgcctgctggcgtacctgttccgtggccctcagccactc

SEQ ID NO: 699026 - DNA, 75 bp, synthetic construct
  source 1..75: mol_type = other DNA
gcgggtggcgttgatggatgagtggtcggggtattgttttgcaaacataataaccccactaagtgatgttactat

SEQ ID NO: 699027 - DNA, 75 bp, synthetic construct
  source 1..75: mol_type = other DNA
tacccaaatctggcaaaggcttacccaacattaaaattaccagatttacgcggggaatttattcgtggctgggat

SEQ ID NO: 699028 - DNA, 75 bp, synthetic construct
  source 1..75: mol_type = other DNA
aggagctccagctattggcgttccgttcttctggccgtccgctgcaatgccagataccgtaatcgatagctggtc

SEQ ID NO: 699029 - DNA, 75 bp, synthetic construct
  source 1..75: mol_type = other DNA
ggtgtccctgttccgtggccttcagccactccgccaacaggttggctgaaatgcaatggtgccgctttttctgct

SEQ ID NO: 699030 - DNA, 75 bp, synthetic construct
  source 1..75: mol_type = other DNA
gctcgctcaatcgcccggcaggcaccaccatccaggacatgatcacgctcgagcagaaaatgctgccggagctgc

SEQ ID NO: 699031 - DNA, 75 bp, synthetic construct
  source 1..75: mol_type = other DNA
accattgcccgcagccactgcaatatcgaaccggtttccggcctaaaaaatctgcaaaatttgcaggcggtgctg

SEQ ID NO: 699032 - DNA, 75 bp, synthetic construct
  source 1..75: mol_type = other DNA
ctgccgaagcggtggcgcgtatctcgccgagagtggcaaccttccataaaggacaactggtatgggggagtgtgg

SEQ ID NO: 699033 - DNA, 75 bp, synthetic construct
  source 1..75: mol_type = other DNA
acgggcgcgggattgatgtcggacgtaccctactttcagggcaatcacacacaattatggatcatgcacacaata

SEQ ID NO: 699034 - DNA, 75 bp, synthetic construct
  source 1..75: mol_type = other DNA
atgctggaaaaagccaatctgtacgcgcaactctatattcgtcctaacgaacagaacctgtctcgctcactgttt

SEQ ID NO: 699035 - DNA, 75 bp, synthetic construct
  source 1..75: mol_type = other DNA
tcaacgaaaaaggcgagcgtgtgtggcctaaagcgcaggatgacgccagctttgtgctggtggacgcctcctgtt

SEQ ID NO: 699036 - DNA, 75 bp, synthetic construct
  source 1..75: mol_type = other DNA
acaacaggtcgatgcgctggcgaatcggatggcggcgcagcaaatttctatcgcctcgacggtgccgattggcac

SEQ ID NO: 699037 - DNA, 75 bp, synthetic construct
  source 1..75: mol_type = other DNA
gcttcgagtgtgaaatcgtcgccttcccgcagcacggtttgctgctgtcgaaatcggaacccttaatgcgcgaag

SEQ ID NO: 699038 - DNA, 75 bp, synthetic construct
  source 1..75: mol_type = other DNA
gggagaaggtgctccagctattggcgttccgttcttctggccgtccgccgcaatgccaaatactgtaatcgacag

SEQ ID NO: 699039 - DNA, 75 bp, synthetic construct
  source 1..75: mol_type = other DNA
ttcagaacggcaaaattgtcgcgctgcgcgagaataagcagcacccggatgccacgctgccgcactatgacgctg

SEQ ID NO: 699040 - DNA, 75 bp, synthetic construct
  source 1..75: mol_type = other DNA
aaaactgatcgatttattgcagtcgaaaggcaccaccattgcccgcagccactgcaatatcgaaccggtttccgg

SEQ ID NO: 699041 - DNA, 75 bp, synthetic construct
  source 1..75: mol_type = other DNA
atgctggaaaaagccaatctctacgcgcagctctatattcgtcctaacgaacagaacctctcccgttcgctgttt

SEQ ID NO: 699042 - DNA, 75 bp, synthetic construct
  source 1..75: mol_type = other DNA
aattagctttcatgatggtatcgccggaaatcagccaggattttcacgatttaatttcaccagtaactctgtggg

SEQ ID NO: 699043 - DNA, 75 bp, synthetic construct
  source 1..75: mol_type = other DNA
ctcaaaggacagcggaggataattttaccggggcatggatatcaatgcgccctcgtaacctttcatttaattaca

SEQ ID NO: 699044 - DNA, 75 bp, synthetic construct
  source 1..75: mol_type = other DNA
ctgaagaatacccggaactggtaaaggcttatccgacaaataaattgcctgatttacgtggtgagtttattcgtg

SEQ ID NO: 699045 - DNA, 75 bp, synthetic construct
  source 1..75: mol_type = other DNA
gagaaggttcagcattacctgttggtgcacctgttccgtggccttcagagacacctccaacaggctggctgaaat

SEQ ID NO: 699046 - DNA, 75 bp, synthetic construct
  source 1..75: mol_type = other DNA
gggggcgactggtccagacggaacgggcggcccatacgtcgtgggggctgatgccactggcgcgagaattaactt

SEQ ID NO: 699047 - DNA, 75 bp, synthetic construct
  source 1..75: mol_type = other DNA
agccgcaagaatccgtttggcgatatcaaatctgatggcacggtgaaaaaggctctcgaaaatcttgatttggga

SEQ ID NO: 699048 - DNA, 75 bp, synthetic construct
  source 1..75: mol_type = other DNA
aatgctggaaaagcaccgtcatcctgttgtcgccaacgatgggtatgactcaaaagaggaatgggaactggcggc

SEQ ID NO: 699049 - DNA, 75 bp, synthetic construct
  source 1..75: mol_type = other DNA
atgtaccccaatctggcaaaagcctaccccaccaataaattaccggatttacggggcgaatttattcgtggctgg

SEQ ID NO: 699050 - DNA, 75 bp, synthetic construct
  source 1..75: mol_type = other DNA
gcattttcttaaacgttggtttgggagaaggctctgcattacctgttggtgtccctgttccgtggccttcagcca

SEQ ID NO: 699051 - DNA, 75 bp, synthetic construct
  source 1..75: mol_type = other DNA
taaggcagaagctgcgtatcaacgtgggacgttatggcctaagcgggtggcgttaatggatgattgggcggggta

SEQ ID NO: 699052 - DNA, 75 bp, synthetic construct
  source 1..75: mol_type = other DNA
gacagtcaaagttcgtgttttaagaacaactaatgggacttcatgggcgggtgcttcagctgccggttgtttatt

SEQ ID NO: 699053 - DNA, 75 bp, synthetic construct
  source 1..75: mol_type = other DNA
ggaacatcgagttcctctgtctgatgctgctgttgccctgttaaaggctttaccacgctttaagggtataaatta

SEQ ID NO: 699054 - DNA, 75 bp, synthetic construct
  source 1..75: mol_type = other DNA
tggtgccgagtggtcagagatcgatcttgaaggtaaaacatggaccatccccgccagtcgaatgaaagcagcgaa

SEQ ID NO: 699055 - DNA, 75 bp, synthetic construct
  source 1..75: mol_type = other DNA
cgctggcagcagaaggaagcagtaaacgggaatggaatcgcttcctggacacgcattaccgccgtggctggaatg

SEQ ID NO: 699056 - DNA, 75 bp, synthetic construct
  source 1..75: mol_type = other DNA
tacttcggctcttacctgaaaaaaccgccggtgccgatgagccgtctggagcactatgctggtcaggatgaaatt

SEQ ID NO: 699057 - DNA, 75 bp, synthetic construct
  source 1..75: mol_type = other DNA
tactggaaatctgccgtcaggcggacgtggagccggggatattcacggtaatccacacatggggacgagaccagc

SEQ ID NO: 699058 - DNA, 75 bp, synthetic construct
  source 1..75: mol_type = other DNA
cggtgatccacacatgggggcgtgaccagcagtggcatccgcatatccatttatcgacaactgccggtggtgtga

SEQ ID NO: 699059 - DNA, 75 bp, synthetic construct
  source 1..75: mol_type = other DNA
gtgcgtccggtagtcattgagtctgtgacaaaaatcatggcctgcgggaccacgctgatggggtacacacagtgg

SEQ ID NO: 699060 - DNA, 75 bp, synthetic construct
  source 1..75: mol_type = other DNA
gactggaattgcttcctggacacgcattaccgccgcggctggaatgtcaacatatccagggtgatggataacgcc

SEQ ID NO: 699061 - DNA, 75 bp, synthetic construct
  source 1..75: mol_type = other DNA
atcctgtgcggaggtcagatgcgttttacggggctgaagcgggactaccgtctgacagagctggtcctgatgcat

SEQ ID NO: 699062 - DNA, 75 bp, synthetic construct
  source 1..75: mol_type = other DNA
tggcgttaccggataacgcggctactgtcccggaaatacccggagctggtaataccggatgaactggcagtggaa

SEQ ID NO: 699063 - DNA, 75 bp, synthetic construct
  source 1..75: mol_type = other DNA
aggtgatgagcatgtggcgctaccggataacacggttgctgtcacggaaatcccctgacctggtgatgccggatg

SEQ ID NO: 699064 - DNA, 75 bp, synthetic construct
  source 1..75: mol_type = other DNA
gttactggcagagatgagccgcattgctgcggatgtgatacaggaaatctgccgccaggcagatgtggagccggg

SEQ ID NO: 699065 - DNA, 75 bp, synthetic construct
  source 1..75: mol_type = other DNA
taccctgacctggtgataccggatgcgctggcagttgaaggaagcagcagacgggactggaatcgcttcctggac

SEQ ID NO: 699066 - DNA, 75 bp, synthetic construct
  source 1..75: mol_type = other DNA
aaccacgctgatggggtacacacagtggtgttgttcatctccggactgttgccacacaaaaaaggtctgcttccg

SEQ ID NO: 699067 - DNA, 75 bp, synthetic construct
  source 1..75: mol_type = other DNA
tcagcgtatcccgggtgatggataatgccacccatgtggcggtgtactctggctcttacctgaaaaaacgccggt

SEQ ID NO: 699068 - DNA, 75 bp, synthetic construct
  source 1..75: mol_type = other DNA
cgctgattatggcgctgatgatgttcgataatctcgacgaccgcgagttttccggttcgctgggccgtctttgct

SEQ ID NO: 699069 - DNA, 75 bp, synthetic construct
  source 1..75: mol_type = other DNA
acgtgcgcccgatgaccatcgcctggccgctggaaatcgcccaggatctgcgtcgtctcatttcgctggacacct

SEQ ID NO: 699070 - DNA, 75 bp, synthetic construct
  source 1..75: mol_type = other DNA
gctcaatcaggcacaaaatttcgcgttgcagtctgactctgcacgtcttaaggcgctcgttgatgaactggagct

SEQ ID NO: 699071 - DNA, 75 bp, synthetic construct
  source 1..75: mol_type = other DNA
ttgcagattcgcttaaccaactgccgcagcagcaaactgacactcgccgtcagttgaacgaagtcgagcgtcggc

SEQ ID NO: 699072 - DNA, 75 bp, synthetic construct
  source 1..75: mol_type = other DNA
gaaagtctgaacggtaaacaaacgggaaggacattaacttctgcgggtagacgtcgccaggcgggaagtttgtaa

SEQ ID NO: 699073 - DNA, 75 bp, synthetic construct
  source 1..75: mol_type = other DNA
tgctgattgccattctggtgtttatcatcaccacgcaactggtgcgcaacctgcccgcgctgctggaactggtga

SEQ ID NO: 699074 - DNA, 75 bp, synthetic construct
  source 1..75: mol_type = other DNA
acccactactggcgtggctggaatgtcaacgtatcccgggtgatggataacgccacgcatgtggcggtgtacttt

SEQ ID NO: 699075 - DNA, 75 bp, synthetic construct
  source 1..75: mol_type = other DNA
acgtatcccgggtgatggataacgccccccatgtgtcggtgtactttgactcttacctgaaaaagccgccggtgc

SEQ ID NO: 699076 - DNA, 75 bp, synthetic construct
  source 1..75: mol_type = other DNA
tgtggcggtgtactttggctcttacctgaaaaagccaccggtgccgatgagtcgtctggagcattatgccggtca

SEQ ID NO: 699077 - DNA, 75 bp, synthetic construct
  source 1..75: mol_type = other DNA
tcctgcgtggttatgaaaaaatccgggactgggaacagcccccggcatgggctgccgctcaggagagtaattcaa

SEQ ID NO: 699078 - DNA, 75 bp, synthetic construct
  source 1..75: mol_type = other DNA
gctgggggagtggttctacgaggaactgacctacgaagaacgcggcacggacggaaaatggcgcaagcccggaaa

SEQ ID NO: 699079 - DNA, 75 bp, synthetic construct
  source 1..75: mol_type = other DNA
gggaagttgcgtccattttaccggaaacggagcaaaaaaccgccattcataccctgtatcaatcagtgtcatcct

SEQ ID NO: 699080 - DNA, 75 bp, synthetic construct
  source 1..75: mol_type = other DNA
gccatacaaaaaaggtctgcttccgatgtaaaagtcgctcctgcccgcactgcggggtgaaggctggcgcacagt

SEQ ID NO: 699081 - DNA, 75 bp, synthetic construct
  source 1..75: mol_type = other DNA
ccaaacaggtgacttttaatgcttctaattccgttccaacggcaagtgagaacaggcctcgaaacattgccttta

SEQ ID NO: 699082 - DNA, 75 bp, synthetic construct
  source 1..75: mol_type = other DNA
aaggcttaccccaccaataaattaccggatttacggggtgaatttattcgtggctgggatgatggacgtagtgcg

SEQ ID NO: 699083 - DNA, 75 bp, synthetic construct
  source 1..75: mol_type = other DNA
ttttcataaacgttggtttgggagaaggctctgcattacctgtcggtgtgcctgttccgtggccttccgctactc

SEQ ID NO: 699084 - DNA, 75 bp, synthetic construct
  source 1..75: mol_type = other DNA
actgaaggttgacccgctgaagtgcatcctgtgcggaggtcagatacgttttacggggctgaagcggggctaccg

SEQ ID NO: 699085 - DNA, 75 bp, synthetic construct
  source 1..75: mol_type = other DNA
ggtttgggagaaggttcggcattacccgttggtgtgcctgttccgtggccctcagccactccgccaacaggctgg

SEQ ID NO: 699086 - DNA, 75 bp, synthetic construct
  source 1..75: mol_type = other DNA
ttttcataaacgttggtttgggagaaggttcggcattacctgttggtgtccctgttccgtggccttcagccactc

SEQ ID NO: 699087 - DNA, 75 bp, synthetic construct
  source 1..75: mol_type = other DNA
cgccaacaggctggctgaaatgcaacggtgcggctttttctgctgaagcatacccggaactggcaaaggcttatc

SEQ ID NO: 699088 - DNA, 75 bp, synthetic construct
  source 1..75: mol_type = other DNA
cctgttccgtggccttccgccactccgccgacaggctggctgaaatgcaacggtgccgctttttctgctgaagaa

SEQ ID NO: 699089 - DNA, 75 bp, synthetic construct
  source 1..75: mol_type = other DNA
ctacgctcactgccctagcggcactagctacagcagcagataaactcccttatttcacaggtgttgatcgtgccg

SEQ ID NO: 699090 - DNA, 75 bp, synthetic construct
  source 1..75: mol_type = other DNA
gccaagtaaagttcagatcaccaaacaccatgcggctcttccctataaccagatcggctcctttatgaaagaact

SEQ ID NO: 699091 - DNA, 75 bp, synthetic construct
  source 1..75: mol_type = other DNA
ccccagaccggcacacctgccaccgatctggatgatgactactttgacatgttgcaggaggaactttgcagcgtg

SEQ ID NO: 699092 - DNA, 75 bp, synthetic construct
  source 1..75: mol_type = other DNA
gtcttcccgatttacgcggtgagtttatccgtggatgggacgacgggcgcaaagttgatacggggcgttcattgc

SEQ ID NO: 699093 - DNA, 75 bp, synthetic construct
  source 1..75: mol_type = other DNA
atcttcgcacatcaccagttgacacactggtcagatggcaggagcaacgcttgttgtggttgttaatggccgttg

SEQ ID NO: 699094 - DNA, 75 bp, synthetic construct
  source 1..75: mol_type = other DNA
atgtggcgttaccggataacgcggctactgtcccggaaatccccggagctggtgataccggctgagctggcagca

SEQ ID NO: 699095 - DNA, 75 bp, synthetic construct
  source 1..75: mol_type = other DNA
ccggagctggtgataccggctgagctggcagcagagggaagcggcagacgggaatggaatcgcttcctggacacc

SEQ ID NO: 699096 - DNA, 75 bp, synthetic construct
  source 1..75: mol_type = other DNA
gcgatgcaaatcaggtggagagggatgtatcagcggttactgaaggttgacccgctgaagtgcatcctgtgcgga

SEQ ID NO: 699097 - DNA, 75 bp, synthetic construct
  source 1..75: mol_type = other DNA
tggtgctgttcatctccggactgcagccacataaaaaaggtctgcttccggtgtaaaagtcgctcctgcccgcac

SEQ ID NO: 699098 - DNA, 75 bp, synthetic construct
  source 1..75: mol_type = other DNA
cgttaccagtatgcattgtcggtactggaaaaaccgatggattttaccggtaatgattcttataaccttgaccgc

SEQ ID NO: 699099 - DNA, 75 bp, synthetic construct
  source 1..75: mol_type = other DNA
ggccacacctggaaaaatcttcatttatacgcccgtaaggtgatgagcatgtggcgctaccggataacgcggcta

SEQ ID NO: 699100 - DNA, 75 bp, synthetic construct
  source 1..75: mol_type = other DNA
ggcgacaatattctgaccaacactcaggatatcgccctgctgcgtgcgaaagtaggcatggtgttccagaaaccg

SEQ ID NO: 699101 - DNA, 75 bp, synthetic construct
  source 1..75: mol_type = other DNA
tgccattgaaagggccaaggaactatcaggactcgtcgtatcacgattaaaatccgaaggcatgtatgcggttgg

SEQ ID NO: 699102 - DNA, 75 bp, synthetic construct
  source 1..75: mol_type = other DNA
tggtgctgttcatccccggactgcagccacacaaaaaaggtctgcttccggtgtaaaagtcgctcctgcccgcac

SEQ ID NO: 699103 - DNA, 75 bp, synthetic construct
  source 1..75: mol_type = other DNA
atgagtggtgatgagtttatggaaaggttctcctggcatgtggcggataaggggttccgtatggtgaggtactac

SEQ ID NO: 699104 - DNA, 75 bp, synthetic construct
  source 1..75: mol_type = other DNA
ggctgaagcggggataccgtctggcagagctggttatgatgcatgagccgctggcccgaatgcagtgttgcggct

SEQ ID NO: 699105 - DNA, 75 bp, synthetic construct
  source 1..75: mol_type = other DNA
tcatttttacgcccgtaaggtgatgagcatgtggcgttaccggataacgcggctactgtcccggaaatacccgga

SEQ ID NO: 699106 - DNA, 75 bp, synthetic construct
  source 1..75: mol_type = other DNA
atgaaagatttaactttgaagtttcatgacaaactgcagtttaaggccttcctgtcatctcttgtctggggggat

SEQ ID NO: 699107 - DNA, 75 bp, synthetic construct
  source 1..75: mol_type = other DNA
atgaaagatttaactttgaagtttcatgacaaactgcagtttaaggccttcctgtcatctcttgtctgggtggag

SEQ ID NO: 699108 - DNA, 75 bp, synthetic construct
  source 1..75: mol_type = other DNA
aagggtgttagcccttccgatgtgtatgattatcttgttacgaaatatccaacgaaatatggtataggaaaatat

SEQ ID NO: 699109 - DNA, 75 bp, synthetic construct
  source 1..75: mol_type = other DNA
gaagcgcgtgacaaagcgcgtgagctacgtaaacaaatccgtaatggtattaatccccttcaggaaaaacacgag

SEQ ID NO: 699110 - DNA, 75 bp, synthetic construct
  source 1..75: mol_type = other DNA
atgaaagatttaactttgaagtttcatgacaaactgcagtttaaggccttcctgtcatctcttggctgggcggac

SEQ ID NO: 699111 - DNA, 75 bp, synthetic construct
  source 1..75: mol_type = other DNA
atgaaagatttaactttgaagtttcatgacaaactgcagtttaaggccttcctgtcatctcttgcctgggaggaa

SEQ ID NO: 699112 - DNA, 75 bp, synthetic construct
  source 1..75: mol_type = other DNA
gcagtacactggagtcagttagcacccgaagagcagatccgtttctgggaagactatgaaacgggaagggcgacc

SEQ ID NO: 699113 - DNA, 75 bp, synthetic construct
  source 1..75: mol_type = other DNA
atggtgattaaaaatacccgtccaggccactgggctcagttggctcccgaagagcaaatccgtttctgggaagac

SEQ ID NO: 699114 - DNA, 75 bp, synthetic construct
  source 1..75: mol_type = other DNA
tgaagatatctccgtacatgcggccagaaaacgctggtatctgcagcgcagtcaggatgcgctgaaacaccgtcg

SEQ ID NO: 699115 - DNA, 75 bp, synthetic construct
  source 1..75: mol_type = other DNA
ggagaacctgtctgtatccggaatgacggttattttgtcaacattcgtattcttgatgatacgtttgatgtttct

SEQ ID NO: 699116 - DNA, 75 bp, synthetic construct
  source 1..75: mol_type = other DNA
atcaacgtgggacgttatggcctaagcgggtggcgttgatggatgaatggtcggggtattgcacagtcaatacat

SEQ ID NO: 699117 - DNA, 75 bp, synthetic construct
  source 1..75: mol_type = other DNA
taaagcggtacgcttttatgaacaggtaaagtgtgagaatccgccagccgaaaccggagcatggaaagacgctgt

SEQ ID NO: 699118 - DNA, 75 bp, synthetic construct
  source 1..75: mol_type = other DNA
aaatctattagtgacggatacatatcctaataagtcaagatatcagaaattattattagtcgatatggataatga

SEQ ID NO: 699119 - DNA, 75 bp, synthetic construct
  source 1..75: mol_type = other DNA
aaactttggttctggctggacctggctggtgaaaaacagcgatggcaaactggctatcgtttctacttctaatgc

SEQ ID NO: 699120 - DNA, 75 bp, synthetic construct
  source 1..75: mol_type = other DNA
tcaatatgatggagcaagtgctcgatatcccttcccaggaagttatctcgaaagataacgccaacgttaccatcg

SEQ ID NO: 699121 - DNA, 75 bp, synthetic construct
  source 1..75: mol_type = other DNA
aattttttcccttataatgatcgtgacaattcctctcgcctatatgaaatattgagtcacgcaataacacaatct

SEQ ID NO: 699122 - DNA, 75 bp, synthetic construct
  source 1..75: mol_type = other DNA
cccctgaagcgtggaaaatgcgttttctggccaacgggacatccggtacatggttttacactgacgacattgcag

SEQ ID NO: 699123 - DNA, 75 bp, synthetic construct
  source 1..75: mol_type = other DNA
atgaaagataacagcacaaccgccaccccagaagcctggaaaatgcgttttctggccaacgggacatccggcaca

SEQ ID NO: 699124 - DNA, 75 bp, synthetic construct
  source 1..75: mol_type = other DNA
gatcaaaggtaccgcgtttgaaggtaaatcactggaagagattattcgcagctctgaaggtggcgtattcaacaa

SEQ ID NO: 699125 - DNA, 75 bp, synthetic construct
  source 1..75: mol_type = other DNA
ccatcgcgggagccggggggcgtatgggccgccagttgattcaggcggcgctggcattagaaggcgtgcagctgg

SEQ ID NO: 699126 - DNA, 75 bp, synthetic construct
  source 1..75: mol_type = other DNA
tgcgcgaggcggcggaacaggcaacgcaagatgaatgggtagcatatattttgccggtcataacggcatttatcc

SEQ ID NO: 699127 - DNA, 75 bp, synthetic construct
  source 1..75: mol_type = other DNA
agactagatgtgacttacatcctcgcttttctcatgatggcagcatgattttttttgattcagttttttctggaa

SEQ ID NO: 699128 - DNA, 75 bp, synthetic construct
  source 1..75: mol_type = other DNA
cgtacctggcgagttacggaagcgctggaatacggcatggtaggtcataacacgggactgatttctaacgaagtc

SEQ ID NO: 699129 - DNA, 75 bp, synthetic construct
  source 1..75: mol_type = other DNA
agcagccaaagtgatgggtgactacaccgatatcgaaattattgaagcacatcatagacataaagttgatgcgcc

SEQ ID NO: 699130 - DNA, 75 bp, synthetic construct
  source 1..75: mol_type = other DNA
tttatcgattttacccgtccggaaggtacgctgaaccatctcgctttttgtcgccagcatggcaaagggatggtg

SEQ ID NO: 699131 - DNA, 75 bp, synthetic construct
  source 1..75: mol_type = other DNA
tgtcactccagaatacaccctgaatttcgacaatgccgacgccaaaatcagccagttcgatctcaatgccattga

SEQ ID NO: 699132 - DNA, 75 bp, synthetic construct
  source 1..75: mol_type = other DNA
actacgtatgcgcatgtcgttgcatcctttttatgtgcagaagcggacgttcgtcggccgtaaatatgctttccg

SEQ ID NO: 699133 - DNA, 75 bp, synthetic construct
  source 1..75: mol_type = other DNA
aggacccggtgactggcgagcagagcctgcgcatgcacatgtctctgcatcctttttacgtgcagaaacgaacgt

SEQ ID NO: 699134 - DNA, 75 bp, synthetic construct
  source 1..75: mol_type = other DNA
gtggctgaaagatacatctcacaaagacactggagtcagcttcctcccgaagagcaaatccgtttctgggaagat

SEQ ID NO: 699135 - DNA, 75 bp, synthetic construct
  source 1..75: mol_type = other DNA
aagcagtttttgtcgagcccggcggtaaacgagcgtaccgatgatgataaaacgttggcactggcgctgtggtta

SEQ ID NO: 699136 - DNA, 75 bp, synthetic construct
  source 1..75: mol_type = other DNA
gccatctggccggttctggtcagcttcagtgatgcgggcacacacaccgtggggatgagtgtttcccgtctggcc

SEQ ID NO: 699137 - DNA, 75 bp, synthetic construct
  source 1..75: mol_type = other DNA
tatatctccgtacatgcggccagaaaacgctggtatctgcagcgcagccaggatgcgctgaaacaccgtcgtgcg

SEQ ID NO: 699138 - DNA, 75 bp, synthetic construct
  source 1..75: mol_type = other DNA
gccactgggctcagttgcctcccgaagaacaaatccgcttctgggaagactatgaagcgggaagggcgacctctt

SEQ ID NO: 699139 - DNA, 75 bp, synthetic construct
  source 1..75: mol_type = other DNA
acccggttaccgggcaatacagcctgcgtatgcgtatgtccctgcatccgttttatgtacagaaacgcgaatttg

SEQ ID NO: 699140 - DNA, 75 bp, synthetic construct
  source 1..75: mol_type = other DNA
cagataaaggcggtgtaggaaaaagcaccacagcaacaaacctggcttcttatctggtaaataattcacgaacgg

SEQ ID NO: 699141 - DNA, 75 bp, synthetic construct
  source 1..75: mol_type = other DNA
tccaccaaacccaaatgtgaaaatccgtcctggtatcgtcctgcgcgctataaggcgctgagcgggcagctcggg

SEQ ID NO: 699142 - DNA, 75 bp, synthetic construct
  source 1..75: mol_type = other DNA
aacactggagtcagcttccggctgaagagcaaatccgtttctgggaagaatatgaggcgggaagggctacctctt

SEQ ID NO: 699143 - DNA, 75 bp, synthetic construct
  source 1..75: mol_type = other DNA
aacactggagtcagcttccgcccgaagagcaaattcgtttctgggaggactatgaagcgggaagggcgacttctt

SEQ ID NO: 699144 - DNA, 75 bp, synthetic construct
  source 1..75: mol_type = other DNA
cagattggcgatggcggcgtggtggtagatttgggtcacggtctgcaattgccgctcacgccgatggtgggtgaa

SEQ ID NO: 699145 - DNA, 75 bp, synthetic construct
  source 1..75: mol_type = other DNA
gacgcctcaattaacgggtaaaggccagcagtggttgacgcgtaaactgctcgatgcaggtttattaaagcctgt

SEQ ID NO: 699146 - DNA, 75 bp, synthetic construct
  source 1..75: mol_type = other DNA
tctttgaaaaactggaagacagctacttccggcaaaaagaacagcaaccggtcgcaatcccccaaacattaccag

SEQ ID NO: 699147 - DNA, 75 bp, synthetic construct
  source 1..75: mol_type = other DNA
atctcttaactggttcaaaattaaaggaatttaaaaggctagtgactattagtcacttggttagcaaatatacaa

SEQ ID NO: 699148 - DNA, 75 bp, synthetic construct
  source 1..75: mol_type = other DNA
tgcaaattaccggagaaggcgatggattatctgaaacgaaatggactgataagcgtggaggatgttttacgatga

SEQ ID NO: 699149 - DNA, 75 bp, synthetic construct
  source 1..75: mol_type = other DNA
gctgtgctgccattctgggtaaagccgacaatccaccagcatccggcaatcaggttagcgaattagcaatgtggg

SEQ ID NO: 699150 - DNA, 75 bp, synthetic construct
  source 1..75: mol_type = other DNA
ctgcaaattaccggataaagcgatggactacctgaagcgaaacggactgataagcgtggaggatattttacgatg

SEQ ID NO: 699151 - DNA, 75 bp, synthetic construct
  source 1..75: mol_type = other DNA
acgccccaattaacgggtaaaggccagcagtggttaactcgcaagctacttgatgctggtttgttaaaaccagta

SEQ ID NO: 699152 - DNA, 75 bp, synthetic construct
  source 1..75: mol_type = other DNA
tcagtgatgccggcacacacaccgtggggatgagtgtttcccgtctggccagagaaatcagcccgaaagacagca

SEQ ID NO: 699153 - DNA, 75 bp, synthetic construct
  source 1..75: mol_type = other DNA
ggtgcaaaaagtacaggacggtgaattggggcttaatgatgtcctcgccacaaatatggtactgaccattcgtca

SEQ ID NO: 699154 - DNA, 75 bp, synthetic construct
  source 1..75: mol_type = other DNA
ccagaatcatcatgagaacaaagtacgctttgttgaagcgaagcactttttcaaggttattggcgatgagctgaa

SEQ ID NO: 699155 - DNA, 75 bp, synthetic construct
  source 1..75: mol_type = other DNA
gacgcctcaattaacggggaaaggccagcagtggttgacgcgtaaactgctcgatgctggcttgttaaaaccggt

SEQ ID NO: 699156 - DNA, 75 bp, synthetic construct
  source 1..75: mol_type = other DNA
ggaattttgcaaaggttgttggacttaagcaaaacgcgctgtttgcctggttacgggagaacggcatcctgatag

SEQ ID NO: 699157 - DNA, 75 bp, synthetic construct
  source 1..75: mol_type = other DNA
tttttgtcgcgctggtgattgtcggcgcaggcgtcaaaatcgtgccgcagggctatcagtggacggtagaacgtt

SEQ ID NO: 699158 - DNA, 75 bp, synthetic construct
  source 1..75: mol_type = other DNA
ttcggtgacagtcttacctccaatcagtggaacaccataaatggcaaaaagtggatatttgatgcatccagcaaa

SEQ ID NO: 699159 - DNA, 75 bp, synthetic construct
  source 1..75: mol_type = other DNA
cgtgcattactttccgcacaatcagacgatttcaaaacgcacgagcataaaattttagggctaaatggaagtggc

SEQ ID NO: 699160 - DNA, 75 bp, synthetic construct
  source 1..75: mol_type = other DNA
tgcctgttccgtggccttccgccactccgccaacggggtggctaaaatgtaacggagcagtattttcttctgaaa

SEQ ID NO: 699161 - DNA, 75 bp, synthetic construct
  source 1..75: mol_type = other DNA
ggctatcagtggacagtagaacgttttggtcgctataccaaaacgttacagccggggctcagtctggtggtgccg

SEQ ID NO: 699162 - DNA, 75 bp, synthetic construct
  source 1..75: mol_type = other DNA
atgaaagcggaacgaaccaaacgtgcttacatccttgaagcagaagggattcgtcaggcggaaatcctcaaagcg

SEQ ID NO: 699163 - DNA, 75 bp, synthetic construct
  source 1..75: mol_type = other DNA
aacaacctaagccatttggagttaatggacagagagtggcaatattgccaaccacccctgcaggagataactcag

SEQ ID NO: 699164 - DNA, 75 bp, synthetic construct
  source 1..75: mol_type = other DNA
agagtatccggaactggcaaaagtttatccgacaaatgaattgccagatttacgtggtgagtttattcgtggctg

SEQ ID NO: 699165 - DNA, 75 bp, synthetic construct
  source 1..75: mol_type = other DNA
tggcagccacacacaattttggaccatgcacactatatggaattatggacaggggacggactcgccgcaggaagt

SEQ ID NO: 699166 - DNA, 75 bp, synthetic construct
  source 1..75: mol_type = other DNA
taaattgcctgatttacgtggtgagtttattcgtggctgggatgacggacgtggtatggatacggggagggcaat

SEQ ID NO: 699167 - DNA, 75 bp, synthetic construct
  source 1..75: mol_type = other DNA
gcaaggatatgcaacggaggatcatgctcacggattaccgtcaaaatcaaccgtagcaactgaccgctcaattaa

SEQ ID NO: 699168 - DNA, 75 bp, synthetic construct
  source 1..75: mol_type = other DNA
atgggggcatcagcatccggcagtggtgccataacaattactggagaggcgggaatcacatattacgcaagtgca

SEQ ID NO: 699169 - DNA, 75 bp, synthetic construct
  source 1..75: mol_type = other DNA
attttaaaacaaatcacgcccctgtctccagccattgacttcgataattacccaattcccaacccggctattaca

SEQ ID NO: 699170 - DNA, 75 bp, synthetic construct
  source 1..75: mol_type = other DNA
aatggtgcagctttttctgctgaagaatacccggaactggcaaaggcttacccgacaaataaattgcctgattta

SEQ ID NO: 699171 - DNA, 75 bp, synthetic construct
  source 1..75: mol_type = other DNA
attcagacaacagcggttccggtggcggctcaagtggcggcggatttagcggcgggggcggttcttctggcggtg

SEQ ID NO: 699172 - DNA, 75 bp, synthetic construct
  source 1..75: mol_type = other DNA
aggctcagatagcggcggatttagcggcggggggggggctttttgggggggggggggcccccggccgctggtaac

SEQ ID NO: 699173 - DNA, 75 bp, synthetic construct
  source 1..75: mol_type = other DNA
gttgaggcatccggtgccagtctggagaaggcgcggcacgaccagttgcttaccgcgcttcgtgctctgctgtta

SEQ ID NO: 699174 - DNA, 75 bp, synthetic construct
  source 1..75: mol_type = other DNA
gcattttcttaaacgttggtttgggagaaggtgctccagctattggcgttccgttcttctggccgtccgccgcaa

SEQ ID NO: 699175 - DNA, 75 bp, synthetic construct
  source 1..75: mol_type = other DNA
ggagcatcgagttcctctgtctgatgctgctgttgccttgttaaaagctttaccacgctttaagggtataaattt

SEQ ID NO: 699176 - DNA, 75 bp, synthetic construct
  source 1..75: mol_type = other DNA
atgaaaacagagactccatccgtaaaaattgttgctatcaccgctgacgaagcggggcaacgtatcgacaacttt

SEQ ID NO: 699177 - DNA, 75 bp, synthetic construct
  source 1..75: mol_type = other DNA
gcggtgcatggcggcagtggtttaagtttcggcgttattgaagggctgagggcgttgcgcccggaagcgcgattc

SEQ ID NO: 699178 - DNA, 75 bp, synthetic construct
  source 1..75: mol_type = other DNA
gagcagatggcgctgtttacccaaaagtgattggccttgatgcttcaagaattgttccaactgcaaacgaaaacc

SEQ ID NO: 699179 - DNA, 75 bp, synthetic construct
  source 1..75: mol_type = other DNA
ccacaaccaaagacgagacaattgaacaatatgctacaagagtttttgacaattggcgtttaggagatgccaaac

SEQ ID NO: 699180 - DNA, 75 bp, synthetic construct
  source 1..75: mol_type = other DNA
atgccatttgagcgactaacgatcattatcgaaaacgttgatttgggagaaggctcagcgttaccagttggcgtc

SEQ ID NO: 699181 - DNA, 75 bp, synthetic construct
  source 1..75: mol_type = other DNA
ggctctcgaaaaccttggtttgggagaaggctctaaattgaatgttggtaacgcggaaccccaaccccctgctat

SEQ ID NO: 699182 - DNA, 75 bp, synthetic construct
  source 1..75: mol_type = other DNA
tggggccaggaacgcaacctgatgatgacagtttcagtatgaatccgctgccaattacctgtcaggtgaatgatg

SEQ ID NO: 699183 - DNA, 75 bp, synthetic construct
  source 1..75: mol_type = other DNA
cggagctacgttcaccaaagaacaatatcctgttctggccagagtctacccgaccctccgtcttcccgatttgcg

SEQ ID NO: 699184 - DNA, 75 bp, synthetic construct
  source 1..75: mol_type = other DNA
acatctttatcgcaatttggcggtaattatccagaagggtccggccatgcgattgctgattacgatggaatatca

SEQ ID NO: 699185 - DNA, 75 bp, synthetic construct
  source 1..75: mol_type = other DNA
taaggtgtttgcggggaattaccgtagcgattatttgtggtacgcaattctgggtggaacaaacagtcgcgcaaa

SEQ ID NO: 699186 - DNA, 75 bp, synthetic construct
  source 1..75: mol_type = other DNA
attgcctgatttacgaggtgaatttattcgtggctgggatgatgggcgcggtattgatgcaggacgtgctttatt

SEQ ID NO: 699187 - DNA, 75 bp, synthetic construct
  source 1..75: mol_type = other DNA
cattacctgttggtgcgcctgttccgtggccttcagagacacctccaacaggctggctgaaatgcaacggggcgg

SEQ ID NO: 699188 - DNA, 75 bp, synthetic construct
  source 1..75: mol_type = other DNA
gtggaggcatccggtgccagcctggagaaggggcggcacgaccagttacttaccgcacttcgtgcgttgctgtta

SEQ ID NO: 699189 - DNA, 75 bp, synthetic construct
  source 1..75: mol_type = other DNA
ttttgatgcaatcagaggggctttttacgatgcaggaacacgatcagcgagaatgccgaataacacaactgatat

SEQ ID NO: 699190 - DNA, 75 bp, synthetic construct
  source 1..75: mol_type = other DNA
tttattcgtggctgggatgacggacgtggagtggatgccgggcgacaattattatcttcacagggggatgcaata

SEQ ID NO: 699191 - DNA, 75 bp, synthetic construct
  source 1..75: mol_type = other DNA
gagcggctcaggtgctaaatttaccgattcagtagggattggatcaaccagtagtaacattaccgttagcaacgg

SEQ ID NO: 699192 - DNA, 75 bp, synthetic construct
  source 1..75: mol_type = other DNA
cggtccggcgctggcggcaggctgcacgatggtgctgaaacctgccagtcagacgccgttctctgcgctggcgct

SEQ ID NO: 699193 - DNA, 75 bp, synthetic construct
  source 1..75: mol_type = other DNA
atcaggccgataagcgcctgattgttatcaagcagccgattggcgtgaccgccgccattaccccgtggaacttcc

SEQ ID NO: 699194 - DNA, 75 bp, synthetic construct
  source 1..75: mol_type = other DNA
ggacgatttagcgcgcctgatgaccctcgaacagggcaaaccactggctgaagcgaaaggcgaaatcagctacgc

SEQ ID NO: 699195 - DNA, 75 bp, synthetic construct
  source 1..75: mol_type = other DNA
gcgggtggcgttgatggatgaatggtcggggtattgtgcagctaatatgcttaggaaatgtattaccaacaactg

SEQ ID NO: 699196 - DNA, 75 bp, synthetic construct
  source 1..75: mol_type = other DNA
gttgcaggaagaactctgcagcgtggtggaggcatccggtgccagtctggagaaggcgcggcacgaccagctgct

SEQ ID NO: 699197 - DNA, 75 bp, synthetic construct
  source 1..75: mol_type = other DNA
tgacacaaagaacagatggctctgtttacccaacagtgattggccttgatgcttcaagaattgttccaactgcaa

SEQ ID NO: 699198 - DNA, 75 bp, synthetic construct
  source 1..75: mol_type = other DNA
acactgacaatggcagatatccaggagtctctgctttctccaacaaccatgcctgcttatggagttaactcaact

SEQ ID NO: 699199 - DNA, 75 bp, synthetic construct
  source 1..75: mol_type = other DNA
aaccgagcatggcggcactggagcagtgtgtacatagcccgcaggtgattgcgctgttaaacaagttgcaatatc

SEQ ID NO: 699200 - DNA, 75 bp, synthetic construct
  source 1..75: mol_type = other DNA
tggcagcgccggaagatttggcggactccgcgcagcggttgggcgaggtgtgtcagtggcttatagaaagcgcgc

SEQ ID NO: 699201 - DNA, 75 bp, synthetic construct
  source 1..75: mol_type = other DNA
ttgagcggctcaggtgctaaatttaccgattcagtagggattggatcaaccagtagtaacattaccgttagcaac

SEQ ID NO: 699202 - DNA, 75 bp, synthetic construct
  source 1..75: mol_type = other DNA
tggtaatccgctcacaggtgagctggggaccattgttgatgctgagcatctgaataacgtgcagggggctgtcag

SEQ ID NO: 699203 - DNA, 75 bp, synthetic construct
  source 1..75: mol_type = other DNA
cacaaaagatgaatgggaactggctacgattttcaaaaaaacatacacacaaggacggggacttgatgccacaaa

SEQ ID NO: 699204 - DNA, 75 bp, synthetic construct
  source 1..75: mol_type = other DNA
gcaacaccaccaacgggctggctgaaatgtaacggtgcagcattttcttctgaaatgtaccccaatctggcaaag

SEQ ID NO: 699205 - DNA, 75 bp, synthetic construct
  source 1..75: mol_type = other DNA
aacgggtactcaaaggacagcggaggataattttaccggggcatggatatcaatgcgccctcgtaacctttcatt

SEQ ID NO: 699206 - DNA, 75 bp, synthetic construct
  source 1..75: mol_type = other DNA
agtataaaagatgtcctcaattaccttggtttgggggaaggctctgcattgcctgttggtgtaccggttccatgg

SEQ ID NO: 699207 - DNA, 75 bp, synthetic construct
  source 1..75: mol_type = other DNA
aacggctctcgaaaatcttggtttgggagaaggttcggcattacccgttggtgtgcctgttccgtggccttccgc

SEQ ID NO: 699208 - DNA, 75 bp, synthetic construct
  source 1..75: mol_type = other DNA
tacaagatctcgtctgggatctatcaaaatttgccattattttaacattcgtaagcaatgctgatggctatctga

SEQ ID NO: 699209 - DNA, 75 bp, synthetic construct
  source 1..75: mol_type = other DNA
ctgctagccacagcaaattgcgcgacacaatggctggcatccacaacacaatccgaatggatggcggctatacgc

SEQ ID NO: 699210 - DNA, 75 bp, synthetic construct
  source 1..75: mol_type = other DNA
aacagcaactgccacccgggatcagtgaatccggtgaagtggtggatatggccgtttatgaggcatggcaacggg

SEQ ID NO: 699211 - DNA, 75 bp, synthetic construct
  source 1..75: mol_type = other DNA
gattattacagcaccgatatttatcttttgtctcatgtttggttttattcggagcatgtttaataattggttaca

SEQ ID NO: 699212 - DNA, 75 bp, synthetic construct
  source 1..75: mol_type = other DNA
gataaatcaacatatgttaaagatcaaggtgtagttggtcagtttttaatatggactggctcgcttattttaatg

SEQ ID NO: 699213 - DNA, 75 bp, synthetic construct
  source 1..75: mol_type = other DNA
caaccgttatggaagcaattgataaggttggatctacttatcaaagtcaattcacacaagatataatgtcattag

SEQ ID NO: 699214 - DNA, 75 bp, synthetic construct
  source 1..75: mol_type = other DNA
tacaacaaattcctgcgcaccctgctggctattcagctcgatcaactgagaacgtttcttgccggcacgcctgcc

SEQ ID NO: 699215 - DNA, 75 bp, synthetic construct
  source 1..75: mol_type = other DNA
aacgcaattagcgaatgcaatgaaactggttcgtcagcaaaatggctggacgcagagcgagctggcgaaaaaaat

SEQ ID NO: 699216 - DNA, 75 bp, synthetic construct
  source 1..75: mol_type = other DNA
gctttcagaagatctatagcccaacgcaattagcgaatgcaatgaaactggttcgtcagcaaaatggctggacgc

SEQ ID NO: 699217 - DNA, 75 bp, synthetic construct
  source 1..75: mol_type = other DNA
cacggtcggggccggtaagtcggaggttatccgtcgtctggccaactacgcccgtcagcgcggtgatatggtggt

SEQ ID NO: 699218 - DNA, 75 bp, synthetic construct
  source 1..75: mol_type = other DNA
gttaccgctgatgttagtctggtgcgcggcggcgatgtttctttgcggttggctggcgctgggcaagaaaccgta

SEQ ID NO: 699219 - DNA, 75 bp, synthetic construct
  source 1..75: mol_type = other DNA
gtggatattgatgcgattaacaacttcaaactgctggcctgtccgaaaacggtactggcgctgctagatgaacgg

SEQ ID NO: 699220 - DNA, 75 bp, synthetic construct
  source 1..75: mol_type = other DNA
aggtgctgttcagggtgcagccatgatggggctgggtgctgctggtatggctactggtaagtctctgatgcttgg

SEQ ID NO: 699221 - DNA, 75 bp, synthetic construct
  source 1..75: mol_type = other DNA
gctctttggtctgatattatgggtaaaaataagctggcagacgtttataaacggctgtatttactggtggtgtac

SEQ ID NO: 699222 - DNA, 75 bp, synthetic construct
  source 1..75: mol_type = other DNA
tctcgttggtctgatattatgggtaaaaataagctggcagacgtttataaacggctgtatttactggtggtgtac

SEQ ID NO: 699223 - DNA, 75 bp, synthetic construct
  source 1..75: mol_type = other DNA
atgcgctctgtgtttctggcctgaccgccgggacgcgtaccgacagcgcgctgttaaaacgggtcaaagaaacgg

SEQ ID NO: 699224 - DNA, 75 bp, synthetic construct
  source 1..75: mol_type = other DNA
acatcgccaaaaaacagccgctgaccctgctctactcagcaaaaaacaccacgcagaaccatgcgctggtgctgg

SEQ ID NO: 699225 - DNA, 75 bp, synthetic construct
  source 1..75: mol_type = other DNA
cagccgcaacagccggtgtctcctgccatcaacgataagaagtcagattcaggtgtgaatgttccggcagggggg

SEQ ID NO: 699226 - DNA, 75 bp, synthetic construct
  source 1..75: mol_type = other DNA
gctcgttggtctgttattatgggtaaaaataagctggcagacgtttataaacggctgtatttactggtggtgtac

SEQ ID NO: 699227 - DNA, 75 bp, synthetic construct
  source 1..75: mol_type = other DNA
cccagggcggtcagattgcctccatgcgtatccgcatgttcagtcagatcgccaatattattttctactgtctgt

SEQ ID NO: 699228 - DNA, 75 bp, synthetic construct
  source 1..75: mol_type = other DNA
ctccctgaagccggtgatctccatgtggctgtccattgctattcgtggtctgctggcaatgggagaaaaccgtaa

SEQ ID NO: 699229 - DNA, 75 bp, synthetic construct
  source 1..75: mol_type = other DNA
tgctggcaatgggagaaaaccgtaaccgtcgtgtgtggtttttctgtgatgagctacccacgttacacaaactgc

SEQ ID NO: 699230 - DNA, 75 bp, synthetic construct
  source 1..75: mol_type = other DNA
ccccgagccataagattgcagagttcgctgccggtgaaattggtgagaaagagcacctgaaagccagcgagcagt

SEQ ID NO: 699231 - DNA, 75 bp, synthetic construct
  source 1..75: mol_type = other DNA
tcgtcagatggccagcctctttgaaccggaggttgcctccggagaagatgtgactcaggctgaacagccacaaca

SEQ ID NO: 699232 - DNA, 75 bp, synthetic construct
  source 1..75: mol_type = other DNA
tgactggatgcgtggtgtccgggaagatcagaaaaacggctggctgtttatctcgtcgaacgccgacacccatgc

SEQ ID NO: 699233 - DNA, 75 bp, synthetic construct
  source 1..75: mol_type = other DNA
gcccaacgcaattagcgaatgcaatgaaactggttcgccagcaaaatggctggacgcagagcgagctggcgaaaa

SEQ ID NO: 699234 - DNA, 75 bp, synthetic construct
  source 1..75: mol_type = other DNA
gtggcaagaaaaggtgtaaatgaagtcaccctagttggttttgttggtaatgctccggtgatatctcaggccagt

SEQ ID NO: 699235 - DNA, 75 bp, synthetic construct
  source 1..75: mol_type = other DNA
ccaggataaagtaaccggaggaaaagccggaaacgacattcctgaaaatggcgctggcagtacggacaagcagca

SEQ ID NO: 699236 - DNA, 75 bp, synthetic construct
  source 1..75: mol_type = other DNA
aatacctcgctcacgacattttttaagattttacagtcgcttgaactctcaatgacgctatgcgacgcgaaaaat

SEQ ID NO: 699237 - DNA, 75 bp, synthetic construct
  source 1..75: mol_type = other DNA
aatatattaacaagttcaagaaagagctttcaaaatatatacaaccaactgctggagtggacattcaattattta

SEQ ID NO: 699238 - DNA, 75 bp, synthetic construct
  source 1..75: mol_type = other DNA
tgatttagctggcttatatctgacatggcatcgctcttcccctgaagagtggaaagcattaattgctggtggctc

SEQ ID NO: 699239 - DNA, 75 bp, synthetic construct
  source 1..75: mol_type = other DNA
attgcccgcaagccccgctgtggctcttgtattattgaagatctttgtgaatacaaagagaaagttgacatctga

SEQ ID NO: 699240 - DNA, 75 bp, synthetic construct
  source 1..75: mol_type = other DNA
tgctgatagtgggcctgggcggcctcggctgtgcagcctcgcagtatctggcaagcgccggtgtcggtaacctga

SEQ ID NO: 699241 - DNA, 75 bp, synthetic construct
  source 1..75: mol_type = other DNA
ttttgccgcgaaggtgccgctggtttccggcgcggcaattcgtatggaagggcaaatcacggtcttcacttatca

SEQ ID NO: 699242 - DNA, 75 bp, synthetic construct
  source 1..75: mol_type = other DNA
tacgtaatcaactgaacgcaggctgttttgccgcgaaggtgccgctggtttccggcgcggcaattcgtatggaag

SEQ ID NO: 699243 - DNA, 75 bp, synthetic construct
  source 1..75: mol_type = other DNA
aaaatccagcgagccatgcaggaccgaatcgccctggacgagcggattcagactgcaaaggcgcttattgatacc

SEQ ID NO: 699244 - DNA, 75 bp, synthetic construct
  source 1..75: mol_type = other DNA
gctttacagctttgacggacgctacaagattcagcgcgctatgcaggaccgtatcgcgtttgatgagcgcatcca

SEQ ID NO: 699245 - DNA, 75 bp, synthetic construct
  source 1..75: mol_type = other DNA
accggccagcgggaaaatcgtcatgtacgatgcgatgacctgccagtttcgcgaaatgaaactgatgcgcaatcc

SEQ ID NO: 699246 - DNA, 75 bp, synthetic construct
  source 1..75: mol_type = other DNA
cagttcccggatgtgaatattctgcgcctggcgttctttggcccatttatcggtgccatcgcgcgatcggttggt

SEQ ID NO: 699247 - DNA, 75 bp, synthetic construct
  source 1..75: mol_type = other DNA
accggaagaagagatggaacagcaactgccacccgggatcagtgaatccggtgaagtggtggatatgaccgctta

SEQ ID NO: 699248 - DNA, 75 bp, synthetic construct
  source 1..75: mol_type = other DNA
ctgaaagccagcgagcagtattcctacggtgctgacccggtgcgtgacggggtgtcgaccggtaaggatatggag

SEQ ID NO: 699249 - DNA, 75 bp, synthetic construct
  source 1..75: mol_type = other DNA
aaaaacggctggctgtttatttcgtcgaatgccgacacccatgcttccctgaaaccggtgatctccatgtggctg

SEQ ID NO: 699250 - DNA, 75 bp, synthetic construct
  source 1..75: mol_type = other DNA
agatattacagtcacttaatctctcgatgacgctatgcgacacgaaaaatgactcgccagaatcaaccgatcagc

SEQ ID NO: 699251 - DNA, 75 bp, synthetic construct
  source 1..75: mol_type = other DNA
atgatgagctttcagaagatctatagcccaacgcaattggcgaatgcaatgaaactggttcgccagcaaaatggc

SEQ ID NO: 699252 - DNA, 75 bp, synthetic construct
  source 1..75: mol_type = other DNA
agtcctccctgctggtcagtgaacgcatggcgttcaaactacaccgtcagggcatgattatggaaaccatcggga

SEQ ID NO: 699253 - DNA, 75 bp, synthetic construct
  source 1..75: mol_type = other DNA
tctaccatgttcactggtacaaatatccgctgacgtactggctcaatatcatcacgtcaatgggctgtcttcagg

SEQ ID NO: 699254 - DNA, 75 bp, synthetic construct
  source 1..75: mol_type = other DNA
tatggcgctgactgatgttacccgttccccttactgcatggtgaatctgggcgggttcaatatcaacgtgggtaa

SEQ ID NO: 699255 - DNA, 75 bp, synthetic construct
  source 1..75: mol_type = other DNA
cgacgacataaaattgttttatgatattattgatcttgcgaatttaacatgtcataaaaacactgtcgcacccaa

SEQ ID NO: 699256 - DNA, 75 bp, synthetic construct
  source 1..75: mol_type = other DNA
cttactcgaacgcccacgtctggaaagccatctacaaaaactcctgaccgatgccgtgaaaatgcgtgggctgat

SEQ ID NO: 699257 - DNA, 75 bp, synthetic construct
  source 1..75: mol_type = other DNA
atgatccggctgaacagagcgatggttatcgcgtactggtcgaccgcctctggccacgcggtatcaaaaaaaccg

SEQ ID NO: 699258 - DNA, 75 bp, synthetic construct
  source 1..75: mol_type = other DNA
gtgtgccggtagccagggaagtatgtacccctttaatggctgggtatcgaatgaattcagcccgatgcagacctc

SEQ ID NO: 699259 - DNA, 75 bp, synthetic construct
  source 1..75: mol_type = other DNA
atgggccagggagcctggcacgaggccaatatgtctggcgataaaatcgaccatggcggctgtgtgaatacgcta

SEQ ID NO: 699260 - DNA, 75 bp, synthetic construct
  source 1..75: mol_type = other DNA
agaacgtggtgacggcagttgaaaccaatgtgttgaggttgcacggtcggttaagccgagaatacggtattaagt

SEQ ID NO: 699261 - DNA, 75 bp, synthetic construct
  source 1..75: mol_type = other DNA
tcctgagtgactttgccagaatgattccggcagcactggataacgtgaagaattcattaccgacagattttccgg

SEQ ID NO: 699262 - DNA, 75 bp, synthetic construct
  source 1..75: mol_type = other DNA
ctttaaatcaatggcttagtgtgagctctcttgctgcggttatcgtaggtgttccgccagaggtggcgctcggtg

SEQ ID NO: 699263 - DNA, 75 bp, synthetic construct
  source 1..75: mol_type = other DNA
gcgcagggtttactaacatcagtcaaggccgcagtacccgcagtgcaaacagaacattgttttctcacccacggt

SEQ ID NO: 699264 - DNA, 75 bp, synthetic construct
  source 1..75: mol_type = other DNA
cactattattcacaacccagattatgcgcagggtttactcacatcagtaaaggccgcagtacccgcggtaaaaac

SEQ ID NO: 699265 - DNA, 75 bp, synthetic construct
  source 1..75: mol_type = other DNA
ttatgctcgatgggggtgcttacacaccgccgaaaaccttcagcggaaaactgatccgccgcgactcactcattg

SEQ ID NO: 699266 - DNA, 75 bp, synthetic construct
  source 1..75: mol_type = other DNA
tttacatatatagtgtaagaatatatacggcattagtgacgatttttttaattccaatattaattggagagattg

SEQ ID NO: 699267 - DNA, 75 bp, synthetic construct
  source 1..75: mol_type = other DNA
attttttgatgcaacttatttcatcagctattggctgtatttctatggtgttatatagtgaaaaaataaggagga

SEQ ID NO: 699268 - DNA, 75 bp, synthetic construct
  source 1..75: mol_type = other DNA
tctcaaactggcaatggggcttaacgcatccaaaggcaaaaaaacggcaatcgataaaatttatccgcgacattt

SEQ ID NO: 699269 - DNA, 75 bp, synthetic construct
  source 1..75: mol_type = other DNA
ggtcttccagtggttgattggcgcaacagatggccatgcaaaaaacttctccgtatttattcaggctggcggcag

SEQ ID NO: 699270 - DNA, 75 bp, synthetic construct
  source 1..75: mol_type = other DNA
gaccgtttcccgcgtgctttcaggtaatggctacgtcagccaggagactaaagatcgcgtgtttcaggcggtgga

SEQ ID NO: 699271 - DNA, 75 bp, synthetic construct
  source 1..75: mol_type = other DNA
cattaaatcaatggcttagtcttggttctctagctgcggtgatagcaggagtacctccagaagtagcgttggggt

SEQ ID NO: 699272 - DNA, 75 bp, synthetic construct
  source 1..75: mol_type = other DNA
taccgcgcagtttttgaaagatcagggcaaagtccctgccgtggcgaatgattacagccagtacgtgacctcgcg

SEQ ID NO: 699273 - DNA, 75 bp, synthetic construct
  source 1..75: mol_type = other DNA
ccattacgcaggattctttcgagaacggggttgtcttctctgctggcgcatttgtgtcagcgattgtagcagtgc

SEQ ID NO: 699274 - DNA, 75 bp, synthetic construct
  source 1..75: mol_type = other DNA
gcattggtatctggctgtatcacagctctgaaaatccgcgcgaccttatcccggggagaaaagacgatggccagt

SEQ ID NO: 699275 - DNA, 75 bp, synthetic construct
  source 1..75: mol_type = other DNA
cattaaatcaatggcttagtatgggttctctggcggctgttatcgctggcgtcccgccagaagtggcgttaggct

SEQ ID NO: 699276 - DNA, 75 bp, synthetic construct
  source 1..75: mol_type = other DNA
gtattggcatctggctctatcaccgttccgataatccacgcgagttaattccggggagaaaagacgatggtaacg

SEQ ID NO: 699277 - DNA, 75 bp, synthetic construct
  source 1..75: mol_type = other DNA
gtattggcatatggctctatcaccgttcagataatccacgcgagttaattccggggagaaaagacgatggtaacg

SEQ ID NO: 699278 - DNA, 75 bp, synthetic construct
  source 1..75: mol_type = other DNA
gcacctcctgaggttgctttggggtctttggctggagcggttatttttgttacctctgcagtagagtatcccatt

SEQ ID NO: 699279 - DNA, 75 bp, synthetic construct
  source 1..75: mol_type = other DNA
ctttaaatcagtggcttagcatgagttctctggtggcggttatagcaggagcacctcctgaggttgctttggggt

SEQ ID NO: 699280 - DNA, 75 bp, synthetic construct
  source 1..75: mol_type = other DNA
tcctgtgagtatctcagtacggaagataccgatcgtcacatcatggttgcagccgtcagccagaatacactcccc

SEQ ID NO: 699281 - DNA, 75 bp, synthetic construct
  source 1..75: mol_type = other DNA
aaacgtcggttactgctggcgttcctcagctacctatgcggagttctcttctacaaaccgacagcaacacttctc

SEQ ID NO: 699282 - DNA, 75 bp, synthetic construct
  source 1..75: mol_type = other DNA
gtattggtatatggctctatcaccgctctgataatccacgcgagttaatgccggggagaaaagacgatggtaaca

SEQ ID NO: 699283 - DNA, 75 bp, synthetic construct
  source 1..75: mol_type = other DNA
cgctggccggggcggtaatttttgttacctctgcagtagagtatcctgtcaagcgccgcgttctcctggcgttac

SEQ ID NO: 699284 - DNA, 75 bp, synthetic construct
  source 1..75: mol_type = other DNA
gaagggaacgagatgtttggctatttaaactctttccaggtctttctcgaggccgcaggtatgttttgtgcgccg

SEQ ID NO: 699285 - DNA, 75 bp, synthetic construct
  source 1..75: mol_type = other DNA
aatgcatttcgtggcaaattcctgggcttgtcaggttattgtgattttgtctctgacagcattcaggggctgcaa

SEQ ID NO: 699286 - DNA, 75 bp, synthetic construct
  source 1..75: mol_type = other DNA
ttttcttttacctgcactgttaactctggttggctggataatcacgctacatctggcagattatcaatttcgcca

SEQ ID NO: 699287 - DNA, 75 bp, synthetic construct
  source 1..75: mol_type = other DNA
gtcgaatggtttttaacgccgcaggggcagagtttggtagaagacgtgggttatgtgccgatgtatccaacaatg

SEQ ID NO: 699288 - DNA, 75 bp, synthetic construct
  source 1..75: mol_type = other DNA
tagggcgtattcatcatgcttatcttttttccggcactcgcggcgtcgggaaaacctctatcgcccgactgctgg

SEQ ID NO: 699289 - DNA, 75 bp, synthetic construct
  source 1..75: mol_type = other DNA
gaaatacatgacgaagcaaaagatattttctttaactactgcaattactcatatcacgaaataaaagacaaagag

SEQ ID NO: 699290 - DNA, 75 bp, synthetic construct
  source 1..75: mol_type = other DNA
ccggcggacggtaaaagtctcaccccggatgatgtgcgtccgatgcttgaacagatggtgaaggaggctgtaagc

SEQ ID NO: 699291 - DNA, 75 bp, synthetic construct
  source 1..75: mol_type = other DNA
caacagccacaacagccagtgtcttctgtcatcagtgataagaagtcagatgcaggtgtgagtgttccggcaggg

SEQ ID NO: 699292 - DNA, 75 bp, synthetic construct
  source 1..75: mol_type = other DNA
tggctgtccattgccattcgtggcctgatggcgatgggggagaaccgtaaccgtcgtgtgtggttcttctgtgac

SEQ ID NO: 699293 - DNA, 75 bp, synthetic construct
  source 1..75: mol_type = other DNA
ggaccgtatccggcagtaaaactctcactgaaatatcaggcacgaccgaaggtcgctccggagtttattccgcgt

SEQ ID NO: 699294 - DNA, 75 bp, synthetic construct
  source 1..75: mol_type = other DNA
gttgaatggtttttaacgccgcaggggcagagtttggtagaagacgtgggttatgtgccgatgtataaaacgttg

SEQ ID NO: 699295 - DNA, 75 bp, synthetic construct
  source 1..75: mol_type = other DNA
aatcacttttacttgcttgtgatttgtttagagggaaagttgactcttcttcttataaagattatatattttcaa

SEQ ID NO: 699296 - DNA, 75 bp, synthetic construct
  source 1..75: mol_type = other DNA
taccttcctgcgtaattcaccggcggccaacctggtggaagagaaaatcgagaaaacggccatatccatccgtgc

SEQ ID NO: 699297 - DNA, 75 bp, synthetic construct
  source 1..75: mol_type = other DNA
ctggaacatgaaaaaacgccggaactggcggcgaagctagcggcagaagccattgagcgcgacgcgtgggcggct

SEQ ID NO: 699298 - DNA, 75 bp, synthetic construct
  source 1..75: mol_type = other DNA
agacctgatctcttattctatatcgaggcggcatggcagcgcagagaaatagaaagaataaaagctaggttagac

SEQ ID NO: 699299 - DNA, 75 bp, synthetic construct
  source 1..75: mol_type = other DNA
atgacagacattacagccaatgttgtagtgagcatgccttcgcaactcttcactatggcgcgttcttttaaagcc

SEQ ID NO: 699300 - DNA, 75 bp, synthetic construct
  source 1..75: mol_type = other DNA
aaaagtgtatggcatcgattacattgcagagaatattcagtatttaaatataaaatccccggcaagcagttccgc

SEQ ID NO: 699301 - DNA, 75 bp, synthetic construct
  source 1..75: mol_type = other DNA
ctttttctttgtgacctggtcctcatcaagttcactgctctcaatctggcttcaccaggaagtggggctaaaagc

SEQ ID NO: 699302 - DNA, 75 bp, synthetic construct
  source 1..75: mol_type = other DNA
tgtcgctttcggaaaaggaaaacaaactggccgaacttatctggcgaataccctcatttttcgggggtattctgt

SEQ ID NO: 699303 - DNA, 75 bp, synthetic construct
  source 1..75: mol_type = other DNA
tgacgctttcggaaaaggaaaacaaactggccgaactcatcgggcgaatacccccatttttcgagtgtattctgc

SEQ ID NO: 699304 - DNA, 75 bp, synthetic construct
  source 1..75: mol_type = other DNA
caggtgagccaactttcgctaccaaaactggtcgaacaggtggcgttaaatgcctggaaagaggagaacggcaac

SEQ ID NO: 699305 - DNA, 75 bp, synthetic construct
  source 1..75: mol_type = other DNA
tggtcgtttcaaagtttatctcatcgacgaagtgcatatgctgtcgcgccacagctttaacgcactgttaaaaac

SEQ ID NO: 699306 - DNA, 75 bp, synthetic construct
  source 1..75: mol_type = other DNA
gccagcggtgacggccaggtttcaactcaggcggtcagtgcgatgctgggtacgcttgacgacgatcaggcgctg

SEQ ID NO: 699307 - DNA, 75 bp, synthetic construct
  source 1..75: mol_type = other DNA
cggttaacgggagctataaagatcaggaaaccggtgaagttaaggaatataccgactttttccgcatcaaggtat

SEQ ID NO: 699308 - DNA, 75 bp, synthetic construct
  source 1..75: mol_type = other DNA
gacgcaacacctgatgaaattcatgacgaagcaaaagaaattttctttaaccactgcaattactcatatcacgaa

SEQ ID NO: 699309 - DNA, 75 bp, synthetic construct
  source 1..75: mol_type = other DNA
gtgtggctgaacatggaaacggcgcatcagcttgagttgctatcgaatctgatttgccgggccttgcgcaaataa

SEQ ID NO: 699310 - DNA, 75 bp, synthetic construct
  source 1..75: mol_type = other DNA
gagtgtttcagtattcataatgataatttcagtgacctggaatgggagtgtaaccggccatcctttgttgtatcc

SEQ ID NO: 699311 - DNA, 75 bp, synthetic construct
  source 1..75: mol_type = other DNA
tattgctgccgggttatgtgaaggggatgaaccgttgccagaaaagcgccccataattttagaggcgcaggatgt

SEQ ID NO: 699312 - DNA, 75 bp, synthetic construct
  source 1..75: mol_type = other DNA
aaaacgggcgacaagctggatatccagggcgtaggtcaggtggaagtctcgccaaacagcgttcagggctatgac

SEQ ID NO: 699313 - DNA, 75 bp, synthetic construct
  source 1..75: mol_type = other DNA
gtcggaaagtgatgagcagaaatctcgcagagtgtttcagtattcataatgataatttcagtgacccggaatggg

SEQ ID NO: 699314 - DNA, 75 bp, synthetic construct
  source 1..75: mol_type = other DNA
tccggtgatgctgggaaaataaccatctcagaaaatggaaaagtaacaccgccatcgcaccagcatagtgaggcg

SEQ ID NO: 699315 - DNA, 75 bp, synthetic construct
  source 1..75: mol_type = other DNA
attgaaaaactggagtgctgtgttactgaattgaaaaaaagcaccccaacaaaaaatgaggtgcttgcagcagat

SEQ ID NO: 699316 - DNA, 75 bp, synthetic construct
  source 1..75: mol_type = other DNA
aaagatcaggaatgggagtgtaaccggccatcctttgttgtatacggagatggcgggaaaataaccatctcagaa

SEQ ID NO: 699317 - DNA, 75 bp, synthetic construct
  source 1..75: mol_type = other DNA
aagctcagaagcattactcagtatctgatgttttcagccgtatgggcgtcgcgatggaagaactacttcaagcgg

SEQ ID NO: 699318 - DNA, 75 bp, synthetic construct
  source 1..75: mol_type = other DNA
aacgaaccgttgccggaaaagcgccccgtaattttagaggcgcaggatgtgttgataacctacagaggaaaacta

SEQ ID NO: 699319 - DNA, 75 bp, synthetic construct
  source 1..75: mol_type = other DNA
aacaggcgaagcagtttttcatggatattgttgccgggttatgcgaaggggatgaaccgtcaccggaaaagcgcc

SEQ ID NO: 699320 - DNA, 75 bp, synthetic construct
  source 1..75: mol_type = other DNA
aaactggagtgctatatcgctgaattgaaaaaaagcaccccaacaaaaaatgaggtgcttgcagcagatgaaatg

SEQ ID NO: 699321 - DNA, 75 bp, synthetic construct
  source 1..75: mol_type = other DNA
aacgaaccgttgccggaaaagcgccccgtaattttagaggcgcaggatgtgttgataacctacaaaggaaagcta

SEQ ID NO: 699322 - DNA, 75 bp, synthetic construct
  source 1..75: mol_type = other DNA
atccggtgatgctgggaaaataaccatctcagaaaatgggaaagtaacacctccatcgcaccagcacagtgagga

SEQ ID NO: 699323 - DNA, 75 bp, synthetic construct
  source 1..75: mol_type = other DNA
agtggttccggcagagtttaaagtcgactgccaccattggttgatcctgcacgggcgttatacctgcattgcccg

SEQ ID NO: 699324 - DNA, 75 bp, synthetic construct
  source 1..75: mol_type = other DNA
cattttccgcgtttgtaatcgtactcaatttgcgccggggaaaaacgtcgaacaggtagaagaaaagctactgaa

SEQ ID NO: 699325 - DNA, 75 bp, synthetic construct
  source 1..75: mol_type = other DNA
tgaggttgtcggagcactgagggaggggatgacgatagatgacagggatggttatatcagggagcttttttttct

SEQ ID NO: 699326 - DNA, 75 bp, synthetic construct
  source 1..75: mol_type = other DNA
ctcgacgcacctgtcccgatagtaggtgctatgactgagcacgccgctgcatggcgtgcctgcctgcttgagcaa

SEQ ID NO: 699327 - DNA, 75 bp, synthetic construct
  source 1..75: mol_type = other DNA
caatccgagtgctgccagatgatgacccacgtcgccagcggtacgccgaactgttggcgcaggctggccggatga

SEQ ID NO: 699328 - DNA, 75 bp, synthetic construct
  source 1..75: mol_type = other DNA
ttgcgcccacagctacaacaactcccgttggcagtcattgacgaagtgattgtccgcgcgggggactatatcgac

SEQ ID NO: 699329 - DNA, 75 bp, synthetic construct
  source 1..75: mol_type = other DNA
atttacaactggttaaatccacggccccatcagcaagttggacagaaagtaccgctttaccaacgccaccggcag

SEQ ID NO: 699330 - DNA, 75 bp, synthetic construct
  source 1..75: mol_type = other DNA
acgagtaaacatcatcggtggggttaaaggcatcagggacttaatcgatggttatgctctgaaggctatcaaaga

SEQ ID NO: 699331 - DNA, 75 bp, synthetic construct
  source 1..75: mol_type = other DNA
aaaaattttgattaatgcgatagagttaagtcctcctaatgtttataaagcaagaattgaattaattaagtacat

SEQ ID NO: 699332 - DNA, 75 bp, synthetic construct
  source 1..75: mol_type = other DNA
ggcgtcccttatcagtaacggttttaccaatccctgttacgacggccagatgttctttgataccgaccacctggt

SEQ ID NO: 699333 - DNA, 75 bp, synthetic construct
  source 1..75: mol_type = other DNA
atgtcccataccggaggtaaggagggaacgtatcccggcacccgcgccagtgtcaccatgattggcgatgacaca

SEQ ID NO: 699334 - DNA, 75 bp, synthetic construct
  source 1..75: mol_type = other DNA
tgggatgcgttccgcaaagacagttcggtgcgctcgcgcgtggaaaaaagcgaagctgacgcgcaagccatcaat

SEQ ID NO: 699335 - DNA, 75 bp, synthetic construct
  source 1..75: mol_type = other DNA
aaaaatccgggtggcccgggcggttacggtatcgttctccagtatcgtggtgaggaacgcgagttctcagatggt

SEQ ID NO: 699336 - DNA, 75 bp, synthetic construct
  source 1..75: mol_type = other DNA
agccttcagctactcaaatgcctgaatgaacataagcctcctctttacaaacgtgaatctcttcaggactcatgg

SEQ ID NO: 699337 - DNA, 75 bp, synthetic construct
  source 1..75: mol_type = other DNA
agaaacgtaaagaggggctgagtattcatgaggcggtgtggcagctggcgtggaagaagtcagggccggagatgg

SEQ ID NO: 699338 - DNA, 75 bp, synthetic construct
  source 1..75: mol_type = other DNA
ggtgacaggattgaatacgggctgcgtgagttctcctggtcaggtgaacaggctgaacggtttaacgccattacc

SEQ ID NO: 699339 - DNA, 75 bp, synthetic construct
  source 1..75: mol_type = other DNA
caggtacaccatttacctgaccgtgatgagttccaccgcctgcaactggatatcagcaatctgcggggagaaatc

SEQ ID NO: 699340 - DNA, 75 bp, synthetic construct
  source 1..75: mol_type = other DNA
tgttgctgcggtaaacggcccgatcgctcaggcgctgattggcaaagatgctaaagatcaggctggcattgacaa

SEQ ID NO: 699341 - DNA, 75 bp, synthetic construct
  source 1..75: mol_type = other DNA
cagcactgatatgggtgtgatcatgaagccggaaggctcgatgaaaatctgtgtgctgaatggttcacgccaggt

SEQ ID NO: 699342 - DNA, 75 bp, synthetic construct
  source 1..75: mol_type = other DNA
ctggagctgggcggactggaagaccgtccgtcactgctggttgcggtgatgttcagccttatcatttacatcgag

SEQ ID NO: 699343 - DNA, 75 bp, synthetic construct
  source 1..75: mol_type = other DNA
gcgcggtattccgttgtgtatccatctgatgtccagtcagctggttggtgacaggattgagtacgggctgcgtga

SEQ ID NO: 699344 - DNA, 75 bp, synthetic construct
  source 1..75: mol_type = other DNA
agtatcgggatggctgggcactgcgcttgaatttatggatttcaagagtcatacgtgtcaactatttgataaata

SEQ ID NO: 699345 - DNA, 75 bp, synthetic construct
  source 1..75: mol_type = other DNA
agaccagtggttcagttccttcctgctgcaggtggaaaaccattcctcctggcaccgtctgtttgtggacccgtt

SEQ ID NO: 699346 - DNA, 75 bp, synthetic construct
  source 1..75: mol_type = other DNA
ctcctggtcaggtgaacaggctgaacggtttaacgccattacccgtgcctattatatgaaagcggcagcgacaca

SEQ ID NO: 699347 - DNA, 75 bp, synthetic construct
  source 1..75: mol_type = other DNA
accgggtgtttatctcgtactgttcaccctcaaagaaaaaaagccgggccgacattctggaaatggaaaacctgg

SEQ ID NO: 699348 - DNA, 75 bp, synthetic construct
  source 1..75: mol_type = other DNA
gatgcagtggtggtcagattatcttgaaatcaatcaggaaagttatgtccctccatacatccatgccagacaata

SEQ ID NO: 699349 - DNA, 75 bp, synthetic construct
  source 1..75: mol_type = other DNA
ctcaggcggtgaactctctcgtcaccgcactgaaactgcctgacgagtccgcaaaggccaacgaaatcctgggcg

SEQ ID NO: 699350 - DNA, 75 bp, synthetic construct
  source 1..75: mol_type = other DNA
cggtgatggccagccccaacggtaacctggatgaagtgcatgaaggtctgctgctgcaggcggtcaaagcctcct

SEQ ID NO: 699351 - DNA, 75 bp, synthetic construct
  source 1..75: mol_type = other DNA
atctgatgtccagtcagctggttggtgacaggattgaatacgggctgcgtgagttctcctggtcaggtgaacagg

SEQ ID NO: 699352 - DNA, 75 bp, synthetic construct
  source 1..75: mol_type = other DNA
gcgtctggatgaggccgcaagtcgacataatgttcgctggaagtgggttaaaggccacgccgggcatcgtgaaaa

SEQ ID NO: 699353 - DNA, 75 bp, synthetic construct
  source 1..75: mol_type = other DNA
taaagccagatgccaaacccaccagcattcccgtaccaatttcaacacacccgtagtcgagttcaatccccagct

SEQ ID NO: 699354 - DNA, 75 bp, synthetic construct
  source 1..75: mol_type = other DNA
ctgagaagaagccagtcaaaaacgtggatctctggaaacgtctcgacgcggccgccagtcgtcataatgtccgct

SEQ ID NO: 699355 - DNA, 75 bp, synthetic construct
  source 1..75: mol_type = other DNA
tctggccacagttgtggcactggttatttgcctgattaccttctttgttgtctcctggattctggggcgtcaggg

SEQ ID NO: 699356 - DNA, 75 bp, synthetic construct
  source 1..75: mol_type = other DNA
ttcatcctgacgctgactctggtggtggaagaccaggtgaaaactcacagcgaagccaacctgaagtacatggac

SEQ ID NO: 699357 - DNA, 75 bp, synthetic construct
  source 1..75: mol_type = other DNA
ccatccctgccagacgtaaatccgttgacggcgtacgcttctctgaacgcggggcaaaaatgaaagatgaacatc

SEQ ID NO: 699358 - DNA, 75 bp, synthetic construct
  source 1..75: mol_type = other DNA
cagctggacccgtattctgatctgaattatcagtgtgtggaggacagttttgatctgaaggtccgggcggattac

SEQ ID NO: 699359 - DNA, 75 bp, synthetic construct
  source 1..75: mol_type = other DNA
ctgcttgaccagtacactgccaacggcacttacggccagtattttaactccgatgagccgtccctgcgggatgat

SEQ ID NO: 699360 - DNA, 75 bp, synthetic construct
  source 1..75: mol_type = other DNA
ccgtcataccggtgcctatatcaccatcacacagaacatcgtcgactttgactctgacaaggcctccagtgcggc

SEQ ID NO: 699361 - DNA, 75 bp, synthetic construct
  source 1..75: mol_type = other DNA
cttatcgcgctggcctatacggcggtggcagttctgctgtggacacgcctgcgcccggtctatattccgaagccg

SEQ ID NO: 699362 - DNA, 75 bp, synthetic construct
  source 1..75: mol_type = other DNA
ctcgtccgtacaccattgaaatcctgcaacaggcgctgacctttgctaatgaaaagaacccggatctgtatctga

SEQ ID NO: 699363 - DNA, 75 bp, synthetic construct
  source 1..75: mol_type = other DNA
gatcgccatgaatacgtttatcaaaaacaaaccgtttgagaaaacgttggataacctggcatcgcgcatggaacc

SEQ ID NO: 699364 - DNA, 75 bp, synthetic construct
  source 1..75: mol_type = other DNA
gcgcccggtctatattccatctccgtggcgctatctggtgtcgtttgcactgctgtatggtttgattttgcatcc

SEQ ID NO: 699365 - DNA, 75 bp, synthetic construct
  source 1..75: mol_type = other DNA
cgcatgagtctgtacggttacccacgtgaaaccacgccggagctggatgcgctgcataaaaccgatccgaatctg

SEQ ID NO: 699366 - DNA, 75 bp, synthetic construct
  source 1..75: mol_type = other DNA
gctaatttcaaagatgaatcgggcaacgaaccacgcaccctggtactggtgattggcgagtcaacccagcgtgga

SEQ ID NO: 699367 - DNA, 75 bp, synthetic construct
  source 1..75: mol_type = other DNA
gaatgggtaacccaggggctttccgaagcgggttatgtcattgatgccgtttctgatggcagagatgggctttat

SEQ ID NO: 699368 - DNA, 75 bp, synthetic construct
  source 1..75: mol_type = other DNA
gcgaaccgtttgccgactttgtctggtcgtttgtaaatcatcagccacaggtgacacaagccacaacgttgagcg

SEQ ID NO: 699369 - DNA, 75 bp, synthetic construct
  source 1..75: mol_type = other DNA
tgagtcgctgctcacgttagccatcacactgacgttaagctggctttcgatgctgtatctgccgtggccttttac

SEQ ID NO: 699370 - DNA, 75 bp, synthetic construct
  source 1..75: mol_type = other DNA
attggctcattaccgaacgttacgagcttcgacgggttcagaagaatatttatctgtattatgttgtcatcagta

SEQ ID NO: 699371 - DNA, 75 bp, synthetic construct
  source 1..75: mol_type = other DNA
tgtcattattgccggttatttcttttctgagcgtaatgacaggaaaatgtttctcctgagttcactggttttcct

SEQ ID NO: 699372 - DNA, 75 bp, synthetic construct
  source 1..75: mol_type = other DNA
atctcgactctctatgggatgtgttaatgaacgatgtcctgccgctaccacttgagattgaatttgttcatctgg

SEQ ID NO: 699373 - DNA, 75 bp, synthetic construct
  source 1..75: mol_type = other DNA
gccacatgtacaccattccgttcctgctgtggacgtcggaaaaatggcaagcgactcatccgcgtgatttctcgc

SEQ ID NO: 699374 - DNA, 75 bp, synthetic construct
  source 1..75: mol_type = other DNA
gctgccctccgggttgttgttactgatcccggttattgaggctgaagatgcccgtacagaagaggatattgcccc

SEQ ID NO: 699375 - DNA, 75 bp, synthetic construct
  source 1..75: mol_type = other DNA
atgcgataccttgaacatatcaccaccgacggcgaacgctgggataatctggcatggcattactacggtgatgcg

SEQ ID NO: 699376 - DNA, 75 bp, synthetic construct
  source 1..75: mol_type = other DNA
ccggtatctggccacaacgggcgttcatccactggcgcattcaactggcaaaaagtctgaccgagtataatcggg

SEQ ID NO: 699377 - DNA, 75 bp, synthetic construct
  source 1..75: mol_type = other DNA
aagaaacctgcagtggttgatccggaccttatctggtcgttaccagacggcgaaatgcgccgctacgacaggcac

SEQ ID NO: 699378 - DNA, 75 bp, synthetic construct
  source 1..75: mol_type = other DNA
cgtttgaaattcgagtgtaccgccattaccgcattgtgcatggtacgcgagttgcgctggcgttcttgctcacct

SEQ ID NO: 699379 - DNA, 75 bp, synthetic construct
  source 1..75: mol_type = other DNA
ttgtatgctggaactgcaaatcaatgcttactgggccacgcgccccagccatttcgtgttattgaacgcgcaaaa

SEQ ID NO: 699380 - DNA, 75 bp, synthetic construct
  source 1..75: mol_type = other DNA
gtgaaatggaaaatattcacattgttgataattatgaaccagctgaagatagtatgctaaattctgattttctca

SEQ ID NO: 699381 - DNA, 75 bp, synthetic construct
  source 1..75: mol_type = other DNA
tgtatcaacgataaacttttatacatctgcaggcgcggtattggtaaatttatggcatgggacgccacttaaaaa

SEQ ID NO: 699382 - DNA, 75 bp, synthetic construct
  source 1..75: mol_type = other DNA
gtttcgatccaactcgtgccattaccagcccgcagttcaaagagacgacccgctggattggcaacccgtacaaaa

SEQ ID NO: 699383 - DNA, 75 bp, synthetic construct
  source 1..75: mol_type = other DNA
cgttgaatcagtggctatatcgtatacataaaacagacatcattattctgtcttgttgtccaacacataaaaact

SEQ ID NO: 699384 - DNA, 75 bp, synthetic construct
  source 1..75: mol_type = other DNA
gaacccattagcacgacaggaaatgctcctgcgaccggacaatacagtggtgttgcgacgatttttctggatatg

SEQ ID NO: 699385 - DNA, 75 bp, synthetic construct
  source 1..75: mol_type = other DNA
tcaagactgtaaaggtaataatctggggcaatttggcagtaatggctatctgtcattttatatagcaaagcctgt

SEQ ID NO: 699386 - DNA, 75 bp, synthetic construct
  source 1..75: mol_type = other DNA
ataaatttattcattattggttttctttgcccaaaataaatatgtatgactctatggtgttacaagcatctaaca

SEQ ID NO: 699387 - DNA, 75 bp, synthetic construct
  source 1..75: mol_type = other DNA
ggccgttagtgccggtaaaaaagcacaactggaatcggtcgatttttctgaccccaatcgccccttaacctgcct

SEQ ID NO: 699388 - DNA, 75 bp, synthetic construct
  source 1..75: mol_type = other DNA
caagccttgccggtactgatcccttcacaggcgtggatattacgattgccaactgcaaatcggcatactgggatg

SEQ ID NO: 699389 - DNA, 75 bp, synthetic construct
  source 1..75: mol_type = other DNA
cgcggcgaatgctcgttttgtctatcaaccgtttacacgcgatcagcggcgagggggtaactatgcaacccagcc

SEQ ID NO: 699390 - DNA, 75 bp, synthetic construct
  source 1..75: mol_type = other DNA
atgcgccatttacgcaatatttttaatctgggtatcaaagagttgcgcagtctgcttggtgataaagcgatgctg

SEQ ID NO: 699391 - DNA, 75 bp, synthetic construct
  source 1..75: mol_type = other DNA
tcctctaccggggtgccggattcgaaatcgtctggccgcagttcctgacgctgatggcaattggcggcgcatttt

SEQ ID NO: 699392 - DNA, 75 bp, synthetic construct
  source 1..75: mol_type = other DNA
atgatactggaaactaccagtgccctcattgccagcatcaatatcgtgatgaggcggcagcgcagaagggagagt

SEQ ID NO: 699393 - DNA, 75 bp, synthetic construct
  source 1..75: mol_type = other DNA
taacgccaaagctgctgctgccgataaagggatgccgctgtacgagcacatcgctgaactgaacggcactccggg

SEQ ID NO: 699394 - DNA, 75 bp, synthetic construct
  source 1..75: mol_type = other DNA
cacctggagggtggtttcgtcggtatggcagctgctccgtcaggtgcttctactggttcccgtgaagcactggaa

SEQ ID NO: 699395 - DNA, 75 bp, synthetic construct
  source 1..75: mol_type = other DNA
cgctgaagctctggctgttatcgctgaagctgttaaagctgctggttatgaactgggcaaagacatcactctggc

SEQ ID NO: 699396 - DNA, 75 bp, synthetic construct
  source 1..75: mol_type = other DNA
ttcgtcggtgctgacggtcttgagggattgcttcgatataatgtcacattaaatattggcttaacctccagcaag

SEQ ID NO: 699397 - DNA, 75 bp, synthetic construct
  source 1..75: mol_type = other DNA
tgcggcgaatgctcgttttgtctatcaaccctttacacgcgatcagcgggcgaggggggaattatgccccccact

SEQ ID NO: 699398 - DNA, 75 bp, synthetic construct
  source 1..75: mol_type = other DNA
tgcggtgaatgctcgttttgtttatcaaccgtttacacgcgatcagcgggcgaggggtaattatgcaacccagcc

SEQ ID NO: 699399 - DNA, 75 bp, synthetic construct
  source 1..75: mol_type = other DNA
ttgatggtgaagggatcgccatgcagaacatgctggtttcaccttccatgcagtttcaggaaaaggaccagtcgg

SEQ ID NO: 699400 - DNA, 75 bp, synthetic construct
  source 1..75: mol_type = other DNA
gccatcacctactatttcggttcgaaggaagatttgtaccaggcctgtgcccaatggattgccgatttcattggc

SEQ ID NO: 699401 - DNA, 75 bp, synthetic construct
  source 1..75: mol_type = other DNA
tccgctacacagccacctgacacgcctgattgccgcctggaccggctgcgacgccaatgacacccgcatgatcct

SEQ ID NO: 699402 - DNA, 75 bp, synthetic construct
  source 1..75: mol_type = other DNA
tacccaaacgctggagttcaccatcgaagaagtgaatgccgatcgcaatgtttctaataacgccaaaaatcgtca

SEQ ID NO: 699403 - DNA, 75 bp, synthetic construct
  source 1..75: mol_type = other DNA
aatatcatctgaactatataatttactaaaacacagaggagtagaggccgaagatgtagctgatcgcattattaa

SEQ ID NO: 699404 - DNA, 75 bp, synthetic construct
  source 1..75: mol_type = other DNA
tatagcgaataatgatgataattattatatgattgcattagcattggtttgtttcttgaaagtaacttctccaga

SEQ ID NO: 699405 - DNA, 75 bp, synthetic construct
  source 1..75: mol_type = other DNA
gatattatgctcccgggaatggacggctggcagatcttacaaactttacgaacggcaaagaaaacccctgttatt

SEQ ID NO: 699406 - DNA, 75 bp, synthetic construct
  source 1..75: mol_type = other DNA
atgacccagatgattgtccttgcgcttgacggggaagccattctgctgcgcaacatcaccgtcagcgccaccatg

SEQ ID NO: 699407 - DNA, 75 bp, synthetic construct
  source 1..75: mol_type = other DNA
gcgccacattatccgcacgatggttgaaatgatggagccgaacccggcccgcggcgagacgatttgcgatccggc

SEQ ID NO: 699408 - DNA, 75 bp, synthetic construct
  source 1..75: mol_type = other DNA
aacctgattctggcgaacccgccgtttaccggttcactggacgaggaagatatcgactccacgctgtcggcaatg

SEQ ID NO: 699409 - DNA, 75 bp, synthetic construct
  source 1..75: mol_type = other DNA
gttcagccattcgcattgctaacggtgaacatacaggccggaagattggttcgccaattactgacctggcgctac

SEQ ID NO: 699410 - DNA, 75 bp, synthetic construct
  source 1..75: mol_type = other DNA
cggtggtggacgggttagcgatgcttattggctcccactgtgaaatcgttttgcactctttgcaggatctaaaat

SEQ ID NO: 699411 - DNA, 75 bp, synthetic construct
  source 1..75: mol_type = other DNA
aaaaatcaatgatgccgttggctctggtctggatgctgttggcatcgggagcgtgaaagaggaagggaaaacatg

SEQ ID NO: 699412 - DNA, 60 bp, synthetic construct
  source 1..60: mol_type = other DNA
cagcgattctggcgcacgcccggcgatgtgcgccagcggagtcgtgcggcttcgtggtga

SEQ ID NO: 699413 - DNA, 75 bp, synthetic construct
  source 1..75: mol_type = other DNA
acgctcagtaccagttgcgagaggcagcccgagaatttcagagcgattataaaggatggacgcgcgatattaacg

SEQ ID NO: 699414 - DNA, 75 bp, synthetic construct
  source 1..75: mol_type = other DNA
tcatacaggagtgggggtaagaaattcgttatatttaatagcggaaatattaatgattttgaaattaatactatc

SEQ ID NO: 699415 - DNA, 75 bp, synthetic construct
  source 1..75: mol_type = other DNA
tccgcccacactggtatctgaagccatggcagagctgcgcgccctgccgccgtttcttgccagtccgctcatccg

SEQ ID NO: 699416 - DNA, 75 bp, synthetic construct
  source 1..75: mol_type = other DNA
acgacattgcgatggggccgttgattaacgccgcggcgctggaaagggttgagcaaaaagtggcgcgcgcagtag

SEQ ID NO: 699417 - DNA, 75 bp, synthetic construct
  source 1..75: mol_type = other DNA
atcaacttgcccaggttcttgaaagcgcaattagcgatcagatcggctggatcaccgcctggcgtatcggtcgct

SEQ ID NO: 699418 - DNA, 75 bp, synthetic construct
  source 1..75: mol_type = other DNA
agtattgagtttttggggctgctggataccgtagcttctgtgggggcggcgcatgttttaccgggcgcagccggt

SEQ ID NO: 699419 - DNA, 75 bp, synthetic construct
  source 1..75: mol_type = other DNA
agttagaaaacgccttcaatgaagatcccaaaatatctaacaatattaatattgaaccttacctcaataaaatgc

SEQ ID NO: 699420 - DNA, 75 bp, synthetic construct
  source 1..75: mol_type = other DNA
tcaaacaatatctgatttaaaaaagcacaatatagaaataagtgaaaagttaaatgattgcagaaaaaaattaaa

SEQ ID NO: 699421 - DNA, 75 bp, synthetic construct
  source 1..75: mol_type = other DNA
aaattagcagcgattgccgccccgcagaaatatttttactcgaagatgggattgatggctggaaaagagctggat

SEQ ID NO: 699422 - DNA, 75 bp, synthetic construct
  source 1..75: mol_type = other DNA
atgaccgaaaataccgagttatcctcgccatcacatccggcacctgacccggaaatactgaagagcacaatcaga

SEQ ID NO: 699423 - DNA, 75 bp, synthetic construct
  source 1..75: mol_type = other DNA
caccaacaagtcagccagcatggagtcagaatgatgcaatggcctttggcagccaggcactggcgaccgcattca

SEQ ID NO: 699424 - DNA, 75 bp, synthetic construct
  source 1..75: mol_type = other DNA
gaagagtgcaggccatatatgaacggcttgttttcaccaaatgtatcatatgattacttagaagaatcatgtcaa

SEQ ID NO: 699425 - DNA, 75 bp, synthetic construct
  source 1..75: mol_type = other DNA
gcgagcgggcagtgaaaggtatttgcggtcaggttgatggcagcgtggtgcctggatttatcggtctggaagcag

SEQ ID NO: 699426 - DNA, 75 bp, synthetic construct
  source 1..75: mol_type = other DNA
aacagccgcaacagccggtgtctcctgccatcaacgataagaagtcagattcaggtgtgaatgttccggcagggg

SEQ ID NO: 699427 - DNA, 75 bp, synthetic construct
  source 1..75: mol_type = other DNA
cgcaacagccgcaacagccgcaacagccgcaacagccgcaacagccgcaacagccgcaacagccgcaacagccgc

SEQ ID NO: 699428 - DNA, 75 bp, synthetic construct
  source 1..75: mol_type = other DNA
accttctttgttgtctcttggattctggggcgtcagggtaaacaacagagcgaaaatgaagttacaggtggtcgt

SEQ ID NO: 699429 - DNA, 75 bp, synthetic construct
  source 1..75: mol_type = other DNA
gaaagaggtggcccggatgctgaaaaaaggcggagaggactcggatatccggattggcgacctgccgattatccg

SEQ ID NO: 699430 - DNA, 75 bp, synthetic construct
  source 1..75: mol_type = other DNA
gttatccgtcgtctggccaactacgcccgtcagcgcggtgatatggtggtgatttatgaccgttcaggggaattt

SEQ ID NO: 699431 - DNA, 75 bp, synthetic construct
  source 1..75: mol_type = other DNA
acggcaaaaccttccggatgaacgctgctcaggtactgcatgataaatatatgatctggtgcggtgagcagctat

SEQ ID NO: 699432 - DNA, 75 bp, synthetic construct
  source 1..75: mol_type = other DNA
cgcaagtcaataaggttattcggcaggccagctttattgctgcagctctggcccagtttgtaagtgataaaacgc

SEQ ID NO: 699433 - DNA, 75 bp, synthetic construct
  source 1..75: mol_type = other DNA
tcaaatcggacggcacggtgaaaacggctctcgaaaaccttggtttgggagaagcggcaaaattaaatgttggta

SEQ ID NO: 699434 - DNA, 75 bp, synthetic construct
  source 1..75: mol_type = other DNA
ctgttcggcggtttgattgctgccaccgcctttggcgcacgcgcaattatggagtgcttcaccgatcaggggatc

SEQ ID NO: 699435 - DNA, 75 bp, synthetic construct
  source 1..75: mol_type = other DNA
atggcgcaataccgtcctgaattaatcattcgtttggggattgatattgatactgccatctcccgcaagcctgac

SEQ ID NO: 699436 - DNA, 75 bp, synthetic construct
  source 1..75: mol_type = other DNA
gcgctatgggcggcggtgattatgtactgcttctcgctgcgaagaatggcgaatctgcgcaaggttcagcgactg

SEQ ID NO: 699437 - DNA, 75 bp, synthetic construct
  source 1..75: mol_type = other DNA
tgtcgacgattggctataacggcacaaaaattcttgagattgattccagagcgccttacagcgaagtgctggaac

SEQ ID NO: 699438 - DNA, 75 bp, synthetic construct
  source 1..75: mol_type = other DNA
ttgccagtagcggtaaataaatcccaacccttgccgttaatgcgccaggtgcagatcgccgcgggtggtttaata

SEQ ID NO: 699439 - DNA, 75 bp, synthetic construct
  source 1..75: mol_type = other DNA
ctgctattaaacctgcttccgtgtctctggttgttgataacaccaaaccgctgaccatgtctactttgcagatcg

SEQ ID NO: 699440 - DNA, 75 bp, synthetic construct
  source 1..75: mol_type = other DNA
gcctaaaccgaataacacgatcatgattcagaataaagcgactatcatgattcgtcagaatgttggatcgctaga

SEQ ID NO: 699441 - DNA, 75 bp, synthetic construct
  source 1..75: mol_type = other DNA
atatattgagcgcgtctatgatgaaaataacaagccgtgtgggtatgttgctaatgattccgctttaccgttttg

SEQ ID NO: 699442 - DNA, 75 bp, synthetic construct
  source 1..75: mol_type = other DNA
aagaggtccacgataatgaggatttgcctcttccgtcgaatgcccccgattttgttgaggcccgggcagcgtatt

SEQ ID NO: 699443 - DNA, 75 bp, synthetic construct
  source 1..75: mol_type = other DNA
gttctgttcactctacttcgcccacattttcttcccttccgggaacacgacgactcaactactacaaacagcagg

SEQ ID NO: 699444 - DNA, 75 bp, synthetic construct
  source 1..75: mol_type = other DNA
atggttgattcgcttgaaaagggtagcaaactggtcggaggagatgagcgcaattttgcgcccatcggtttttat

SEQ ID NO: 699445 - DNA, 75 bp, synthetic construct
  source 1..75: mol_type = other DNA
ttcgtaaagctatcgacacacacagtcttagccgcttattaggcgaaaaacgaggctctacgaaggtacaaatga

SEQ ID NO: 699446 - DNA, 75 bp, synthetic construct
  source 1..75: mol_type = other DNA
aaggcgtcgtcatcacgacgctggcccgttatttgttgggtgaaaagtgcggtaatcgactgaaaaccatagatg

SEQ ID NO: 699447 - DNA, 75 bp, synthetic construct
  source 1..75: mol_type = other DNA
gccgttgtagataaacacgccctgctcgcccatcaacaacgggtggtgagtggggaacaggaaccgagttattaa

SEQ ID NO: 699448 - DNA, 75 bp, synthetic construct
  source 1..75: mol_type = other DNA
ttcgtaagtctgtagatagccattcaatgacccgtctgttaggcgctaaaaagggcgctacgaaggttaaagaag

SEQ ID NO: 699449 - DNA, 75 bp, synthetic construct
  source 1..75: mol_type = other DNA
ttgccacagccgaataactcacgagcaatcgtcaataatactgctttgctgattcgtcagaatgctggatcactg

SEQ ID NO: 699450 - DNA, 75 bp, synthetic construct
  source 1..75: mol_type = other DNA
atgattgattctcttgaaaaaggaagcgaattagccgggcgcaattttgcgctggggtattttgtagaatcttca

SEQ ID NO: 699451 - DNA, 75 bp, synthetic construct
  source 1..75: mol_type = other DNA
gaagtgaatatctggcgtaaccgtatggttgccagaatgcgcgaccttgtccgcaatgacggctgggcgaatggc

SEQ ID NO: 699452 - DNA, 75 bp, synthetic construct
  source 1..75: mol_type = other DNA
cagaccaatggcgtactgattaacgacgaatgggcggtatttctggctcagcatcagtttctggtgggcatatcg

SEQ ID NO: 699453 - DNA, 75 bp, synthetic construct
  source 1..75: mol_type = other DNA
cgaagcctgcgggctggcgctgtaatctggcctgtgattactgtttttacctggcaaaagggcagggtgtgctgc

SEQ ID NO: 699454 - DNA, 75 bp, synthetic construct
  source 1..75: mol_type = other DNA
gaaaggtttgccgcaggtcgccgtcggtcatgttgaacttgattacaccagcgcaaatctgattgagtcgaagag

SEQ ID NO: 699455 - DNA, 75 bp, synthetic construct
  source 1..75: mol_type = other DNA
atgacgaaccggaagcgggggacaattctcccgaaaaaaatcgcgagcagtggctgaaaaatgaggaacgacagg

SEQ ID NO: 699456 - DNA, 75 bp, synthetic construct
  source 1..75: mol_type = other DNA
aaaacccgtgtttgaacaggtgatggcggcgctggactgtctgaagcgtcatcgtgtggacgtcaatatcctgag

SEQ ID NO: 699457 - DNA, 75 bp, synthetic construct
  source 1..75: mol_type = other DNA
taagcccgtatttgagcaggtgatggtggcgctggactgtctgaagcgtcatcgtgtggacgtcaatatcctgac

SEQ ID NO: 699458 - DNA, 75 bp, synthetic construct
  source 1..75: mol_type = other DNA
ccgcgctgcgggaaatgctggatacattacaaaatcaaaccagcgccaaactgaccctcgactgccgcttgccaa

SEQ ID NO: 699459 - DNA, 75 bp, synthetic construct
  source 1..75: mol_type = other DNA
ggtgcatttgttgcaaattattcgcgaagcggtgctgaatgcgatgaagcacgccaacgccagcgaaatcgccgt

SEQ ID NO: 699460 - DNA, 75 bp, synthetic construct
  source 1..75: mol_type = other DNA
tgggaccggggcgtggctgggtggatccggtcgcggagaaaaaaggggcgattctggcgatggaggccggcatgt

SEQ ID NO: 699461 - DNA, 75 bp, synthetic construct
  source 1..75: mol_type = other DNA
ttttatcagtgtattgataaacatcatatctgttttcacaaaaatttctctcctccaggctaaaacgctttcttc

SEQ ID NO: 699462 - DNA, 75 bp, synthetic construct
  source 1..75: mol_type = other DNA
ccaacgacgcgttaaaagccaaaatgttggctgagagcgaaccgcgaatcaccatttcgttttataagtacttcc

SEQ ID NO: 699463 - DNA, 75 bp, synthetic construct
  source 1..75: mol_type = other DNA
acaaccttccggtggcggcacgttagtgagtattagctttcgctctgcggagggtgaggaaagccagctaatgta

SEQ ID NO: 699464 - DNA, 75 bp, synthetic construct
  source 1..75: mol_type = other DNA
gcctgccacaacgttctgagccgctcccgttggcttttgccgtgcaggatggagccagctatgccggtgcaattc

SEQ ID NO: 699465 - DNA, 75 bp, synthetic construct
  source 1..75: mol_type = other DNA
acaatatctttctggctatgcggtagaaccggcggatcaacgtaatcgccgcattccgttggtgcgctttgaaag

SEQ ID NO: 699466 - DNA, 75 bp, synthetic construct
  source 1..75: mol_type = other DNA
gcctgccacaacgttctgagcctcttccattggcctttgccgtacaggatggtgccagctatgctggggcgattc

SEQ ID NO: 699467 - DNA, 75 bp, synthetic construct
  source 1..75: mol_type = other DNA
ctcaggagcaggaaaaaccgaccaaagaaggtttcttcgcgcgcctgaaacgcagcctgttaaaaaccaaagaaa

SEQ ID NO: 699468 - DNA, 75 bp, synthetic construct
  source 1..75: mol_type = other DNA
gctggtcaccattgatggcgaagacgcccgtgactttgacgatgcggtttactgcgagaaaaaacgcggtggtgg

SEQ ID NO: 699469 - DNA, 75 bp, synthetic construct
  source 1..75: mol_type = other DNA
gcgaccaaagcgaagcgtgcggcgaagaaaaaagtggcagagcgatcaataccctctttaaaagaagagggttag

SEQ ID NO: 699470 - DNA, 75 bp, synthetic construct
  source 1..75: mol_type = other DNA
caagtgggcaacggatggcgttcgtacaatatctttctggttacgcggtagaaccggcggaccagcgtaatcgcc

SEQ ID NO: 699471 - DNA, 75 bp, synthetic construct
  source 1..75: mol_type = other DNA
gtctcgctctacagtgcccaaaaacccggtgatatggcttttatacgcgtggcatcttattaccccgttacgatg

SEQ ID NO: 699472 - DNA, 75 bp, synthetic construct
  source 1..75: mol_type = other DNA
ttgaagagtgcatgattctggcgaatatctcggcggcgcgtttcgttgagaaagcgaaagaaccggcactgttcc

SEQ ID NO: 699473 - DNA, 75 bp, synthetic construct
  source 1..75: mol_type = other DNA
gcgtggatggcaaagtctcagcgaaaacggggtcgttgcaaggggtgtataacctggcaggattcatcaccacgg

SEQ ID NO: 699474 - DNA, 75 bp, synthetic construct
  source 1..75: mol_type = other DNA
aagtgattactgcgctggcggcgttgattcaactcggccccgattttcgttttaccacgacgcttgaaaccaaag

SEQ ID NO: 699475 - DNA, 75 bp, synthetic construct
  source 1..75: mol_type = other DNA
gaaccggcggaccagcgtaatcgccgtattccgttagtgcgtttcgaaagccgattgtataaagatatttatcag

SEQ ID NO: 699476 - DNA, 75 bp, synthetic construct
  source 1..75: mol_type = other DNA
attgacgccagcaccgggcagaatgcggtaagccaggccaaactgttccacgaagcggttggtttaaccggcatt

SEQ ID NO: 699477 - DNA, 75 bp, synthetic construct
  source 1..75: mol_type = other DNA
atcatttgaaccagacagaaaatccagtggaataacttcaacttatagagttccttctggcacatcgctatattc

SEQ ID NO: 699478 - DNA, 75 bp, synthetic construct
  source 1..75: mol_type = other DNA
ctgatggtgattttgattgtgatatagatattgccaacctgaaaataacagcacttaaccggccatcaagaatgt

SEQ ID NO: 699479 - DNA, 75 bp, synthetic construct
  source 1..75: mol_type = other DNA
cgtgacattgagcaaggcatggagcaaattaaccgcacgcgcaccacacccgttcagatagaaatattgcctgct

SEQ ID NO: 699480 - DNA, 75 bp, synthetic construct
  source 1..75: mol_type = other DNA
atttagacgtttttgacggagcaaaattttctcttgatggtgtaaggttttatcttaatggtctggcaacggtta

SEQ ID NO: 699481 - DNA, 75 bp, synthetic construct
  source 1..75: mol_type = other DNA
gatataatcagggggtgtctgaagatccacatattcagagattaacggagtcttttgcttttttaagctcaagaa

SEQ ID NO: 699482 - DNA, 75 bp, synthetic construct
  source 1..75: mol_type = other DNA
atgaataaactgttatcttactatcagaaagaacttgcttttcttaaaaaacaaggggctgagtttgccagcaaa

SEQ ID NO: 699483 - DNA, 75 bp, synthetic construct
  source 1..75: mol_type = other DNA
ttctgtcgggctgaatcacacacacaagtttctggggggtgtcggaacactgaatccggtattcacacgggggat

SEQ ID NO: 699484 - DNA, 75 bp, synthetic construct
  source 1..75: mol_type = other DNA
gaccggaggtctgcagcaccgcattattcacaattatctggatgatgttctgcttcagggcagcagctgtaaact

SEQ ID NO: 699485 - DNA, 75 bp, synthetic construct
  source 1..75: mol_type = other DNA
gactgacggcgcgacccgcaaacagcttcgcgatgctgaggcgctctacggtctgctgaaagaagagatgggtga

SEQ ID NO: 699486 - DNA, 75 bp, synthetic construct
  source 1..75: mol_type = other DNA
taactacctcgacgatgttctgctggaaagcagcagccgtaaactcaccagcctgctgtttggcctgaaccacac

SEQ ID NO: 699487 - DNA, 75 bp, synthetic construct
  source 1..75: mol_type = other DNA
gcagattaaccgtctgcgtacggagccggtacagattgaaatatcgcccggtgaccgtgagggatggtcggtggt

SEQ ID NO: 699488 - DNA, 75 bp, synthetic construct
  source 1..75: mol_type = other DNA
ggaatggagggggaggttctgaacctgcgggatattgagcaggggatggagcagattaaccgtctgcgtacggag

SEQ ID NO: 699489 - DNA, 75 bp, synthetic construct
  source 1..75: mol_type = other DNA
agtttttatacttcaatcagtggaatactgaaggctgaaatgttcccggcccaggttcgcgcattaggtgttggt

SEQ ID NO: 699490 - DNA, 75 bp, synthetic construct
  source 1..75: mol_type = other DNA
aatagatgatttttgtctattgtctggaaaaatctccataggaaataatgttcatattgccgcatactgtaatat

SEQ ID NO: 699491 - DNA, 75 bp, synthetic construct
  source 1..75: mol_type = other DNA
ctccggcgaaattaataaaaactattaccagttacctgtggtgcagagcggtacacaaagtaccgccagccaggg

SEQ ID NO: 699492 - DNA, 75 bp, synthetic construct
  source 1..75: mol_type = other DNA
gaaagatattggtgatatctatgaacagtttcttgaaaaggacatcctgttacagcgcgcaattcatgaaattga

SEQ ID NO: 699493 - DNA, 75 bp, synthetic construct
  source 1..75: mol_type = other DNA
gggtaacccgaaggtcgcaatggtcagtatgacgggcagcgtcgccgccggggagaaaatcatggcaactgcggc

SEQ ID NO: 699494 - DNA, 75 bp, synthetic construct
  source 1..75: mol_type = other DNA
gtggcgttgggtggcaaagcagtagacgggaaaggatattattatccgccgacattgctgctggatgttcgccag

SEQ ID NO: 699495 - DNA, 75 bp, synthetic construct
  source 1..75: mol_type = other DNA
aaaccgagcgaatttacaccaaataacgcaattgctttcgccaaaatcgtcgatgaaattggccttccacgcggc

SEQ ID NO: 699496 - DNA, 75 bp, synthetic construct
  source 1..75: mol_type = other DNA
caactacgtgaaagccatccgttacctgcaggggattgagcataacggtgagcccttcaccatccgtgactggat

SEQ ID NO: 699497 - DNA, 75 bp, synthetic construct
  source 1..75: mol_type = other DNA
gcctgagtgccgtgcttgccgcaagagaagcagaaggtcgccagatggccagcctcttcgaaccggatgtcccgg

SEQ ID NO: 699498 - DNA, 75 bp, synthetic construct
  source 1..75: mol_type = other DNA
aggacgtaccatttttgcggaagcggcgtacctgatgcgtaatgaccccaaccgcagctacagcaaactggtgga

SEQ ID NO: 699499 - DNA, 75 bp, synthetic construct
  source 1..75: mol_type = other DNA
caacaaccagttgcgccgcagccgcagtatcaacagccgcaacaaccggttgcaccgcagcagcaggataccctg

SEQ ID NO: 699500 - DNA, 75 bp, synthetic construct
  source 1..75: mol_type = other DNA
ttacacagcagccgcagtatcagcagccgcaacagccggttgtaccacagccgcaggataccctgcttcatccgc

SEQ ID NO: 699501 - DNA, 75 bp, synthetic construct
  source 1..75: mol_type = other DNA
gccaatattattttctactgcctgtttatcctgttctggattctggtcgcactcggtctctggataaagataacc

SEQ ID NO: 699502 - DNA, 75 bp, synthetic construct
  source 1..75: mol_type = other DNA
tttgttaaccgacttggtgaagcgatgcaggcggtgcagtttggcaatccttctgaacgcaacgacattgcaatg

SEQ ID NO: 699503 - DNA, 75 bp, synthetic construct
  source 1..75: mol_type = other DNA
cgtccaataggcggctggttatttggtcgtattgctgacaaacatggccgcaagaaatcgatgctgctatcggta

SEQ ID NO: 699504 - DNA, 75 bp, synthetic construct
  source 1..75: mol_type = other DNA
aatcctcgaaaacccaaagcatgaaaaccaaatctccggcgctatgggcggcggtgattatgtactgcttctcgc

SEQ ID NO: 699505 - DNA, 75 bp, synthetic construct
  source 1..75: mol_type = other DNA
gccagcggcgaactgtcggcagagaaaatcgatgaagtgatgctgatcttaagcaacctgcgcgaaggctgggaa

SEQ ID NO: 699506 - DNA, 75 bp, synthetic construct
  source 1..75: mol_type = other DNA
ggggcctcttcaggtaacctggttgaatggtttgatttctacgtctactcgttttgttccctctacttcgcccac

SEQ ID NO: 699507 - DNA, 75 bp, synthetic construct
  source 1..75: mol_type = other DNA
ccttcttctggtatgtgaccttgatggccgtggtggcgtttctggtttctttgatgctacatcgcaaagggaagg

SEQ ID NO: 699508 - DNA, 75 bp, synthetic construct
  source 1..75: mol_type = other DNA
gacgttgatcggcggacaactgctagccctactggttgtcgtggttttacaacacaccatggaagacgctgcact

SEQ ID NO: 699509 - DNA, 75 bp, synthetic construct
  source 1..75: mol_type = other DNA
cctgtgcattatgtcggaaggccgttgctatctgtcgtcgtatctgacaggtgagtcgcccaacaccgtgggtgc

SEQ ID NO: 699510 - DNA, 75 bp, synthetic construct
  source 1..75: mol_type = other DNA
atgatatgcgcgttcaggaagagttaagccgtatcactactgctgaagaatttatttctcagcggaatctgaata

SEQ ID NO: 699511 - DNA, 75 bp, synthetic construct
  source 1..75: mol_type = other DNA
cttcactcgaggcgttttcgttatgcaatcaaatataaggagttacccatgatgcactttcagctcgcgggtagc

SEQ ID NO: 699512 - DNA, 75 bp, synthetic construct
  source 1..75: mol_type = other DNA
gtgctgttttctggcctgatggacgagctggaacgcgccagaagccatattgaagggcggcgtttcgagaagaaa

SEQ ID NO: 699513 - DNA, 75 bp, synthetic construct
  source 1..75: mol_type = other DNA
ggtcatgttgaacttgattacaccagcgtaaatctgattgagtcgaagagttttaagctctatctcaatagcttt

SEQ ID NO: 699514 - DNA, 75 bp, synthetic construct
  source 1..75: mol_type = other DNA
agattgatcgggaaaaactgctgcgttatctggtttctttccgtcatcacaacgagttccatgagcaatgcgtag

SEQ ID NO: 699515 - DNA, 75 bp, synthetic construct
  source 1..75: mol_type = other DNA
atgtgcaggcggtgggtattcagaccaacgcctcttttaatttatccaccttagtcgcgacttttcagcactctc

SEQ ID NO: 699516 - DNA, 75 bp, synthetic construct
  source 1..75: mol_type = other DNA
taacgcgggcgcgtgagcggtattcgcgcgcgcaggaaactgcgggaaaactgaaaacaggtggtgcgctggcaa

SEQ ID NO: 699517 - DNA, 75 bp, synthetic construct
  source 1..75: mol_type = other DNA
cttgagcgattcatccgcacgaaagaggaagtgaacaaggaagcggtcctggcggagccggatgcggtgaaaggg

SEQ ID NO: 699518 - DNA, 75 bp, synthetic construct
  source 1..75: mol_type = other DNA
aataccgtaatacaaacaacgcaataggctataccttccgctattacgcgacgcaaatgaatgctgataaaaata

SEQ ID NO: 699519 - DNA, 75 bp, synthetic construct
  source 1..75: mol_type = other DNA
atggagggaatgattaaagtcgttgccgaataccgtaatacaaacaacgcaataggctataccttccgctattac

SEQ ID NO: 699520 - DNA, 75 bp, synthetic construct
  source 1..75: mol_type = other DNA
aaatagccgtctggcgacaatgtctttttttattacctgcattattaaccctggttggctggataatcacgctac

SEQ ID NO: 699521 - DNA, 75 bp, synthetic construct
  source 1..75: mol_type = other DNA
gccaacaaagatcaggttttaccattgatcctcaccggcccaaaagagagcgccgactacttccgcgtactggac

SEQ ID NO: 699522 - DNA, 75 bp, synthetic construct
  source 1..75: mol_type = other DNA
gaatttgtcgtacatacgctgggagaaaacgcgcgccgccattatcgcatcattattgatgacgctgccgaagta

SEQ ID NO: 699523 - DNA, 75 bp, synthetic construct
  source 1..75: mol_type = other DNA
tcccaacctgaatctcgacaactccgtccacatcactaacctggtcttttccatcttgcgtaacgctcgcgcgct

SEQ ID NO: 699524 - DNA, 75 bp, synthetic construct
  source 1..75: mol_type = other DNA
agagtgccgcagcggcttatgttccgcaatcccgcgatgccgtggtatgtgatatccgccggattggtgacctgc

SEQ ID NO: 699525 - DNA, 75 bp, synthetic construct
  source 1..75: mol_type = other DNA
atggatgacctgctacagggctttgtcgcccagcatcgtatgaagttgcctggctctgcctacattccttgctac

SEQ ID NO: 699526 - DNA, 75 bp, synthetic construct
  source 1..75: mol_type = other DNA
tgcaaatgccgtttgaaccgacccatgaaaacatggccaatctgaagctgtacccggatcagcctgttgaagtac

SEQ ID NO: 699527 - DNA, 75 bp, synthetic construct
  source 1..75: mol_type = other DNA
tggtttttaacgccgcaggggcagagattggtggaagatgtaggttatgtgccgatgtataaaaccttaccttaa

SEQ ID NO: 699528 - DNA, 75 bp, synthetic construct
  source 1..75: mol_type = other DNA
acaaatgctgctgtcgctggcccgccaatgggccagtatcaccctgtccgtcaattttaacatgcagtggactgc

SEQ ID NO: 699529 - DNA, 75 bp, synthetic construct
  source 1..75: mol_type = other DNA
agtactcaggggatgacgctgcagagactgatcgaatgcgcagctggtatccggttgtcctcacgtgcagtcagg

SEQ ID NO: 699530 - DNA, 75 bp, synthetic construct
  source 1..75: mol_type = other DNA
ggagatgccctccttctggaacagtattttcgctgccgtgatcccggtcatcctgatggctatcgccgccgtttg

SEQ ID NO: 699531 - DNA, 75 bp, synthetic construct
  source 1..75: mol_type = other DNA
gcccttgagattctggctttaggtggtccacttcttaatcaactggtaattgatgaagttctggtcgcagcagac

SEQ ID NO: 699532 - DNA, 75 bp, synthetic construct
  source 1..75: mol_type = other DNA
atcgtttacaaatgagctatgaactgacgcatacactgacggaaagtgtagtttcagccattattttgtggcagg

SEQ ID NO: 699533 - DNA, 75 bp, synthetic construct
  source 1..75: mol_type = other DNA
tatttatcgtaccagatgcgtttttcctcgagtatcagtagcctgactgacaagttttttgcctggcgtatgctc

SEQ ID NO: 699534 - DNA, 75 bp, synthetic construct
  source 1..75: mol_type = other DNA
gcaaaaattggtggattggtttttaacgccgcaggggcaaagtttgttagaagatgtgggatatgtgccgctgta

SEQ ID NO: 699535 - DNA, 75 bp, synthetic construct
  source 1..75: mol_type = other DNA
atcgcgctgcatctggcagattatcaatttcgccagatgggagcgggttggttggctgatcttatgctcccctgg

SEQ ID NO: 699536 - DNA, 75 bp, synthetic construct
  source 1..75: mol_type = other DNA
atgctgggtgtcggacttgccggtattattgaagtttgtaatatctttatcacgccaacaatttaccttctgctc

SEQ ID NO: 699537 - DNA, 75 bp, synthetic construct
  source 1..75: mol_type = other DNA
tgctttatcggaattgccggatctcaccgctcaacggaaaacattgcgtgattttcttgatgccattcgtgatga

SEQ ID NO: 699538 - DNA, 75 bp, synthetic construct
  source 1..75: mol_type = other DNA
gattgcgtgggtgcagtacataaaagccattcaggctatagatacttcatctgcgccaaatatcaactggcccac

SEQ ID NO: 699539 - DNA, 75 bp, synthetic construct
  source 1..75: mol_type = other DNA
ttttagtctcattagtgggtggtgagtactggtggatagtcattatacccgttggcgcgcatatcagtttttcgc

SEQ ID NO: 699540 - DNA, 75 bp, synthetic construct
  source 1..75: mol_type = other DNA
aggccgcagccgaggcggcaccgcagacccgggaagaagtcagccgtgatatccgcaccctgggagatattcagc

SEQ ID NO: 699541 - DNA, 75 bp, synthetic construct
  source 1..75: mol_type = other DNA
tattattatccacaacccagactatgcgcaggggttactgacctcggtaaaagcggcagcatcagtagtacaaac

SEQ ID NO: 699542 - DNA, 75 bp, synthetic construct
  source 1..75: mol_type = other DNA
ggtctcatggatacaggaaaaactccatattccacagccggtcggtgatgaagccgtgtttactgctcaaccggt

SEQ ID NO: 699543 - DNA, 75 bp, synthetic construct
  source 1..75: mol_type = other DNA
ggaaaacgtggcttacgttggggatgatctcatcgactggccggtaatggaaaaagtgggcctaagcgtagccgt

SEQ ID NO: 699544 - DNA, 75 bp, synthetic construct
  source 1..75: mol_type = other DNA
actgcaggcagcgcagctttcggaaaaacaacttgaaacgctccgccgcgctgatcgctacactgatttcaacga

SEQ ID NO: 699545 - DNA, 75 bp, synthetic construct
  source 1..75: mol_type = other DNA
aaagttgcgccggtgctgatcatcgcagaaggttacgcaactgctggaagtatcacagaagctacccaggtgcca

SEQ ID NO: 699546 - DNA, 75 bp, synthetic construct
  source 1..75: mol_type = other DNA
tgggcgatgcggtgcctgcccgccggttacaggaggctatcgacccggtgctggagccggtcattgacgccatca

SEQ ID NO: 699547 - DNA, 75 bp, synthetic construct
  source 1..75: mol_type = other DNA
ggagcgcgagatccccagcgattttcagatgggcgataccatcacgcttaatctgaaacgcccgtcgtttaaaga

SEQ ID NO: 699548 - DNA, 75 bp, synthetic construct
  source 1..75: mol_type = other DNA
cgcgcgcccaccagccccggcgcgcgggtggcgtttatgtcgcaactggatgatgtacaggtgcaggtagagaaa

SEQ ID NO: 699549 - DNA, 75 bp, synthetic construct
  source 1..75: mol_type = other DNA
gctgcactgcaggacaggttaaagtcagccatgtgggcggcaaccgcaaaaattcggtgctgttcatcagtctgc

SEQ ID NO: 699550 - DNA, 75 bp, synthetic construct
  source 1..75: mol_type = other DNA
atggcgtgctgtcagatggcctgatttatatgggcaacaacggcgaagaacttaaagcgttcaatgttcgtgatg

SEQ ID NO: 699551 - DNA, 75 bp, synthetic construct
  source 1..75: mol_type = other DNA
ctgaaagcgttcaatgttcgtgacggttatggcattcgttgtgcgctcacctctgatattgaagtcgctatcatt

SEQ ID NO: 699552 - DNA, 75 bp, synthetic construct
  source 1..75: mol_type = other DNA
ccaaataaaatcgacccgaaggtgaaaaacgtcgccgcggtggcggtgagcgccacgctgccgccgatgtactcg

SEQ ID NO: 699553 - DNA, 75 bp, synthetic construct
  source 1..75: mol_type = other DNA
gatgctcttaaagacgcgccggtgctcattgtggccgaaggttacgcaactgcaggaagcataaccgaagctacc

SEQ ID NO: 699554 - DNA, 75 bp, synthetic construct
  source 1..75: mol_type = other DNA
tctggacggcgttctgcataatgccggattgcttggcgaagtttgcccgatgagtgaacaaaatccgcagatctg

SEQ ID NO: 699555 - DNA, 75 bp, synthetic construct
  source 1..75: mol_type = other DNA
taccaaaaggcgtatctcttgataaatttgcaaaatggagcggtgagccagctgctgctgcagaaaaaaatacgc

SEQ ID NO: 699556 - DNA, 75 bp, synthetic construct
  source 1..75: mol_type = other DNA
tgaatgacctgcagaacaatttttaccaaacgcttgaggcagaaaaagcagccttaacgcaaggtgttatcaagc

SEQ ID NO: 699557 - DNA, 75 bp, synthetic construct
  source 1..75: mol_type = other DNA
aggaagtgaacaaggaagcggtcctggcggagccggatgcagtgaaaggcattgccggtattaaggtgaataaag

SEQ ID NO: 699558 - DNA, 75 bp, synthetic construct
  source 1..75: mol_type = other DNA
atggctaaacgtgttacaaaattaaaggccgcagccgaggctgcaccgcagacccgcgaagaagtcagccgcgat

SEQ ID NO: 699559 - DNA, 75 bp, synthetic construct
  source 1..75: mol_type = other DNA
atcaaagcggacgaattgggcgttataaccgccgttttccactcccacgttggtgatattcctgtattgtcagcg

SEQ ID NO: 699560 - DNA, 75 bp, synthetic construct
  source 1..75: mol_type = other DNA
tcagattgaaaatatcagtggagacccgcgagagttaccgcaggatgttaagtttcctaaaaactggtggcctaa

SEQ ID NO: 699561 - DNA, 75 bp, synthetic construct
  source 1..75: mol_type = other DNA
gaaaagcagcttgatattattcgccgcgctgatcgttacactgactttaacgatctggccgtaaatagttctctt

SEQ ID NO: 699562 - DNA, 75 bp, synthetic construct
  source 1..75: mol_type = other DNA
cgttataaaggcattaacgctattcaccttatggcgcagggttatagcgatcaacgttggatgacctataagcag

SEQ ID NO: 699563 - DNA, 75 bp, synthetic construct
  source 1..75: mol_type = other DNA
acagtgcagttaaggcgctggccgctgttaacgaaggggataatcgttcaatttatgactcacgtctcatcaata

SEQ ID NO: 699564 - DNA, 75 bp, synthetic construct
  source 1..75: mol_type = other DNA
acacaggaacaaccggtaacgctggaaacagagctgcgcgtaaaagagcataatgaggtcttggccgaggtacag

SEQ ID NO: 699565 - DNA, 75 bp, synthetic construct
  source 1..75: mol_type = other DNA
cagaggctgatatgaccactaaaactgaaacgtctattacatcagcgcagcagcgccagtatcgtgcagagaaat

SEQ ID NO: 699566 - DNA, 75 bp, synthetic construct
  source 1..75: mol_type = other DNA
agagatttaccaactgctgaagcggaaatatctcgcgtgcaggcgtctattatcaaatggtatgcgtcagaatat

SEQ ID NO: 699567 - DNA, 75 bp, synthetic construct
  source 1..75: mol_type = other DNA
tttttatcgggaaaatgatgccagttatgactcgcattggttggtatggttttccatttgttatagtacttcttt

SEQ ID NO: 699568 - DNA, 75 bp, synthetic construct
  source 1..75: mol_type = other DNA
cgcgatgggctatggcgatggttatccgcgcgccgcgccgtccggtacgccagtgctggtgaacggtcgcgaagt

SEQ ID NO: 699569 - DNA, 75 bp, synthetic construct
  source 1..75: mol_type = other DNA
tggctgctttattctgaacatcattgcggtcaggcgattattaacgccgacgatgaagtgggccgccgctggctg

SEQ ID NO: 699570 - DNA, 75 bp, synthetic construct
  source 1..75: mol_type = other DNA
gccggatggcgtaaatccggtattggcggcgcagatggtaaacatggcttgcatgaatatctgcagacccaggtg

SEQ ID NO: 699571 - DNA, 75 bp, synthetic construct
  source 1..75: mol_type = other DNA
agcgaattactacattttttcacaccagcccagatgtcaagaacagagaaataaggctggaatggtcaggagata

SEQ ID NO: 699572 - DNA, 75 bp, synthetic construct
  source 1..75: mol_type = other DNA
gtcgcaatggatatgatttgcgtagatttaggtccacaggcgcaagataaagccggggatccggtcattttgtgg

SEQ ID NO: 699573 - DNA, 75 bp, synthetic construct
  source 1..75: mol_type = other DNA
aagcgaacgcttatggtcacggtcttcttgagaccgcgcgaacgctccccgatgctgacgcctttggcgtagccc

SEQ ID NO: 699574 - DNA, 75 bp, synthetic construct
  source 1..75: mol_type = other DNA
ccggacgctacaaccgcgccagacgcgaagccgaaaagcgccgcgcattgtgctggtgggcggactacgttatgc

SEQ ID NO: 699575 - DNA, 75 bp, synthetic construct
  source 1..75: mol_type = other DNA
tcgctgcaatgacaaaagtaagtgcttacgaacttatcacgcgcctgacgtcaagggtggcgatgaaatacgtcg

SEQ ID NO: 699576 - DNA, 75 bp, synthetic construct
  source 1..75: mol_type = other DNA
atgcaagcggcaactgttgtgattaaccgccgcgctctgcgacacaccctgcaacgtcttcgtgaactggcccct

SEQ ID NO: 699577 - DNA, 75 bp, synthetic construct
  source 1..75: mol_type = other DNA
ccggtacgccagtgctggtgaacggtcgcgaagtgccgattgtggggcgagtcgcgatggatatgatctgcgtag

SEQ ID NO: 699578 - DNA, 75 bp, synthetic construct
  source 1..75: mol_type = other DNA
cacgcctgcagccggtttgtggacgtatggaagtgttcactgcgacaggcaaaccgacggtagtggtggattacg

SEQ ID NO: 699579 - DNA, 75 bp, synthetic construct
  source 1..75: mol_type = other DNA
ctgattaccttagaattagatgaatccaaatttggatgcatcttttttgaccaatatggacgcgagcaaacagaa

SEQ ID NO: 699580 - DNA, 75 bp, synthetic construct
  source 1..75: mol_type = other DNA
accgatctggcacgtatgaaggcactttctgatatcggcctcgaactttctattaccggcggaattacccctgcc

SEQ ID NO: 699581 - DNA, 75 bp, synthetic construct
  source 1..75: mol_type = other DNA
gatctgccactgtttaaagatatccgcgtaaaggcgtttattgccggacgggcgctggcaggcgcggcaaatccg

SEQ ID NO: 699582 - DNA, 75 bp, synthetic construct
  source 1..75: mol_type = other DNA
aaacgaactgaccatgctgggattagaagcgacgccgctcacagacgatccgcgatttttacaggccaccgaagc

SEQ ID NO: 699583 - DNA, 75 bp, synthetic construct
  source 1..75: mol_type = other DNA
gtcgatgcggtgatctggaacgtggtggcggaaagcgaactggcaatgctgggattagaagcgatgccgctgacg

SEQ ID NO: 699584 - DNA, 75 bp, synthetic construct
  source 1..75: mol_type = other DNA
ggttggtctgacgcaggccgcgttgaaaacgctggaatctggcggtgcgatacgtattgaacgtcgtgggcgcaa

SEQ ID NO: 699585 - DNA, 75 bp, synthetic construct
  source 1..75: mol_type = other DNA
cttacttctcttgaattagatgagtccaaatttggacgcatcttttttgaccaatatggacgtgaacaaaccgaa

SEQ ID NO: 699586 - DNA, 75 bp, synthetic construct
  source 1..75: mol_type = other DNA
cggtggtgacggacgataacccgcgtaccgaagaaccgcgcgctatcatcaacgatattctggcgggaatgttag

SEQ ID NO: 699587 - DNA, 75 bp, synthetic construct
  source 1..75: mol_type = other DNA
tgtcgatggaagacaatatcaatctgaacggtcatggccgctggttgaaagcgatcgacgtgaactatcacgaca

SEQ ID NO: 699588 - DNA, 75 bp, synthetic construct
  source 1..75: mol_type = other DNA
atggcacagaactgcggcggtgaaattcagatcgagctattcggcaactggacgctggacgatgcccgtgactgg

SEQ ID NO: 699589 - DNA, 75 bp, synthetic construct
  source 1..75: mol_type = other DNA
ggcgctggcaggcgcagcaaatccggcgcaagtggctggcgatttccatgcgcaaatcgactccatctggggagg

SEQ ID NO: 699590 - DNA, 75 bp, synthetic construct
  source 1..75: mol_type = other DNA
tcgtaaaactcggattgcttgaagaagaaaaggccgcaactttgaaattgccacagccgaataactcacgagcaa

SEQ ID NO: 699591 - DNA, 75 bp, synthetic construct
  source 1..75: mol_type = other DNA
caatcatcagggccgtccggttacggcattaaaggcggctgcccatatcgccgccattcttgcccgcgccgacga

SEQ ID NO: 699592 - DNA, 75 bp, synthetic construct
  source 1..75: mol_type = other DNA
ctgacctgcatcaccccgggctccagtgtcgatattctggtcacagaccacggtatcgcagttaacccggcacgt

SEQ ID NO: 699593 - DNA, 75 bp, synthetic construct
  source 1..75: mol_type = other DNA
ccggctctgacggcgtactgcgtggtgcttccggtggtcactgcgataccgcgattgcctctgcgctttccatca

SEQ ID NO: 699594 - DNA, 75 bp, synthetic construct
  source 1..75: mol_type = other DNA
aacacattcgccagggcgtggttacccgcatttatacctctggcctgcgcggtccactggcggaagagatctccc

SEQ ID NO: 699595 - DNA, 75 bp, synthetic construct
  source 1..75: mol_type = other DNA
attacagcctgctggcggcgctgaaacactggggtataaaacccggacaagtggagatagtgaacctgcagccac

SEQ ID NO: 699596 - DNA, 75 bp, synthetic construct
  source 1..75: mol_type = other DNA
cttcaaagaaggtttctccatgcagaccggcaccggcggcgcatcgctggcggtaacccgtttcctggaagacaa

SEQ ID NO: 699597 - DNA, 75 bp, synthetic construct
  source 1..75: mol_type = other DNA
gctgcggctccctcggctatgcgatggtcgatgccgacaatgcgaaacaagtagtcatgctcaccgaggaactgc

SEQ ID NO: 699598 - DNA, 75 bp, synthetic construct
  source 1..75: mol_type = other DNA
agattttacaggaagagattgcgttaaagcgcgaagctttcgaggctcacgagcggagcatacttgcgcaggtgg

SEQ ID NO: 699599 - DNA, 75 bp, synthetic construct
  source 1..75: mol_type = other DNA
caacgatcgctctctccccatggggcctctactcctcccgtcaaaaacaaaataacgaggaggttgaaatcgctt

SEQ ID NO: 699600 - DNA, 75 bp, synthetic construct
  source 1..75: mol_type = other DNA
gggattttttctaagtattgtgatttctgtgatgttttgccttgtcaaaaaaatggtagatgaataccaacaaaa

SEQ ID NO: 699601 - DNA, 75 bp, synthetic construct
  source 1..75: mol_type = other DNA
atgacgcagaaaattgaacaatctcaacgacaagaacgggtagcggcctggaatcgtcgcgctgaatgcgatctt

SEQ ID NO: 699602 - DNA, 75 bp, synthetic construct
  source 1..75: mol_type = other DNA
tcatggcacacgctgcagcggaatatccgcgagagtgctgcggcgtggtggcacagaaaagccgggttgagcgct

SEQ ID NO: 699603 - DNA, 75 bp, synthetic construct
  source 1..75: mol_type = other DNA
ggtgtattccaccaacgtgcccggcattgggctgcgctttcgccgcggtggtgccattcagtttacctatccgga

SEQ ID NO: 699604 - DNA, 75 bp, synthetic construct
  source 1..75: mol_type = other DNA
actacagcctgctggcggcgctgaaacactggggcattaaacccgggcaagtggagattgtgaacctgcagccgc

SEQ ID NO: 699605 - DNA, 75 bp, synthetic construct
  source 1..75: mol_type = other DNA
tttagagttcaaaagaacaatatgttcaagctttgactatataaagagccgttctgtaatagcaaaatacctagc

SEQ ID NO: 699606 - DNA, 75 bp, synthetic construct
  source 1..75: mol_type = other DNA
acaaaaaattcgtattccaatggtgccggacagccgcagcatgaatctgtccaatgcggtgtcggtagtggtgta

SEQ ID NO: 699607 - DNA, 75 bp, synthetic construct
  source 1..75: mol_type = other DNA
gccgatctggcacgcatgaaagcgctttccgatatcggccttgagctttccattactggcgggattacccctgct

SEQ ID NO: 699608 - DNA, 75 bp, synthetic construct
  source 1..75: mol_type = other DNA
ttcttttatcaccactatcaaaaatggaaaagtgaccgggatgcgccatgttgccaaaggcgaacatctgatgac

SEQ ID NO: 699609 - DNA, 75 bp, synthetic construct
  source 1..75: mol_type = other DNA
gaaaaaaataaaaccgtaagcaatgtcactgcgggtaaattttctgcacctgccacatttacagtaacctataac

SEQ ID NO: 699610 - DNA, 75 bp, synthetic construct
  source 1..75: mol_type = other DNA
gcattatattgttgccagcgaacgcggcattgaagccttacgcgcaaccatcatttttagtatgtggtcgattat

SEQ ID NO: 699611 - DNA, 75 bp, synthetic construct
  source 1..75: mol_type = other DNA
agtgctgttgcggttgaagtgtggaatacgagcactccagcagttggtagtgccacacaattcagttgcgttacc

SEQ ID NO: 699612 - DNA, 75 bp, synthetic construct
  source 1..75: mol_type = other DNA
gccgtgccgtttatctccaccacgcattacagtctgctggcggcgctgaaacactggggcataaaacccggacaa

SEQ ID NO: 699613 - DNA, 75 bp, synthetic construct
  source 1..75: mol_type = other DNA
gatcgaggttttcctgctcgcctcgcagctcggtaactcagaagcgctggtagtgaagaaaaacatcactaaacc

SEQ ID NO: 699614 - DNA, 75 bp, synthetic construct
  source 1..75: mol_type = other DNA
atggcacagaactgcggtggtgaaattcagatcgagctattcggtaactggacgctggacgatgcccgtgactgg

SEQ ID NO: 699615 - DNA, 75 bp, synthetic construct
  source 1..75: mol_type = other DNA
atgatattaaaaaaattatgttatggattatcgggtagtctatttctggcttcatcactgttaaccatttcctca

SEQ ID NO: 699616 - DNA, 75 bp, synthetic construct
  source 1..75: mol_type = other DNA
acgatgggcctggatttgcaaacggctccgccgctgctgataaagcaagcgctgtggcggttgaagtatggagta

SEQ ID NO: 699617 - DNA, 75 bp, synthetic construct
  source 1..75: mol_type = other DNA
aatcgccatagaagcgcgatacctttcattaaattgcgcttctttgctggccgggcgtttgaactggcattcatt

SEQ ID NO: 699618 - DNA, 75 bp, synthetic construct
  source 1..75: mol_type = other DNA
ctgccgttaccatcctgactatgtcactgcgtttatggcaatggaaggtccgtggttcattcctgatgatgtcaa

SEQ ID NO: 699619 - DNA, 75 bp, synthetic construct
  source 1..75: mol_type = other DNA
gacgattcgccgttgttggatctgtatcgggttgccgagcaggttgtgctggaagcgtttccgaaacaagaaatg

SEQ ID NO: 699620 - DNA, 75 bp, synthetic construct
  source 1..75: mol_type = other DNA
ggctattatcacccggatgctgttgacgaaagtgaagcttgagccggtggatgaagatgtcgatgagccaacacc

SEQ ID NO: 699621 - DNA, 75 bp, synthetic construct
  source 1..75: mol_type = other DNA
aacgcggagatgcccatccattagaggctattatcacccggatgctgttgacgaaagtgaagcttgagccggtgg

SEQ ID NO: 699622 - DNA, 75 bp, synthetic construct
  source 1..75: mol_type = other DNA
gaagatgcccgttattaccagtgtgcacaacggttgtactgcggcgagggggaaagcctgcttgccgatctctgt

SEQ ID NO: 699623 - DNA, 75 bp, synthetic construct
  source 1..75: mol_type = other DNA
gccttcaagaggtgatggggttaattatgtaaccattcgtcctcgtaacattgcgtttaattacatcgtaagggc

SEQ ID NO: 699624 - DNA, 75 bp, synthetic construct
  source 1..75: mol_type = other DNA
cacgaaagccgcctgaatattgacagtacggtgggcaaaggtacgcgtttcagttttgttctgccggaacgttta

SEQ ID NO: 699625 - DNA, 75 bp, synthetic construct
  source 1..75: mol_type = other DNA
tcaaggtgtctggcaatgaagatcagctacgcagtgcgatttcgaacctggtctataacgccgtgaatcatacgc

SEQ ID NO: 699626 - DNA, 75 bp, synthetic construct
  source 1..75: mol_type = other DNA
cattatccgccaggcttatcttgctcgcttaccgttgtgtcatcccgaaaccgatccgcaagggtttaaagcatt

SEQ ID NO: 699627 - DNA, 75 bp, synthetic construct
  source 1..75: mol_type = other DNA
cacaagctgataatttgttgttgcagtggagcaagagtcattgcccggattatttcgcgttattagtgatggtta

SEQ ID NO: 699628 - DNA, 75 bp, synthetic construct
  source 1..75: mol_type = other DNA
gctctggcaggacttgccactgcagcagatctgttgccttattttaccggagcagaccgcgcagcgctgacaacc

SEQ ID NO: 699629 - DNA, 75 bp, synthetic construct
  source 1..75: mol_type = other DNA
gaactggcaaaggcttatccgacaaataaattgcctgatttacgtggtgagtttattcgtggctgggatgatgaa

SEQ ID NO: 699630 - DNA, 75 bp, synthetic construct
  source 1..75: mol_type = other DNA
gtggacaatttgatgaggggagtaacgcatttaatagtaaaggagaaatgaccacaatagattcaacgggatggg

SEQ ID NO: 699631 - DNA, 75 bp, synthetic construct
  source 1..75: mol_type = other DNA
catcaccgcgctgatcctatgccggggccggagctgggtgcctggtcactggtctttgaagatacggtaagcggc

SEQ ID NO: 699632 - DNA, 75 bp, synthetic construct
  source 1..75: mol_type = other DNA
tgaagcggatatcctgagcaattccaccatggatgtgcttatcaaaattcaggccagtgaggcggttgttgtcaa

SEQ ID NO: 699633 - DNA, 75 bp, synthetic construct
  source 1..75: mol_type = other DNA
gatgaagtctttatgtccggtactgcggctgaaatcacgccagtgcgcagtgtagacggtattcaggtaggcgaa

SEQ ID NO: 699634 - DNA, 75 bp, synthetic construct
  source 1..75: mol_type = other DNA
cgccgccacggttatcaggaaggtatcgcgctggatgtgaatggttacatctctgaaggtgcaggcgaaaacctg

SEQ ID NO: 699635 - DNA, 75 bp, synthetic construct
  source 1..75: mol_type = other DNA
cgatatatgagagatacattccccgctgattggataattcaatgtgcgttagaaacaggtatttcacttcgttgg

SEQ ID NO: 699636 - DNA, 75 bp, synthetic construct
  source 1..75: mol_type = other DNA
ccgatgcggacaaggtgctggagcggaacaccccgttgcagatgaggaatggtggcaggatttccgagccgcaat

SEQ ID NO: 699637 - DNA, 75 bp, synthetic construct
  source 1..75: mol_type = other DNA
taatcattaccaatgatggtgagaaaagagtgaagttgcgcgaaacgccgacaacctggtgtgttggtccgaaag

SEQ ID NO: 699638 - DNA, 75 bp, synthetic construct
  source 1..75: mol_type = other DNA
atgccagttagccgctatctctgcattttcttaaacgttggtttgggagaaggttcggcattacccgttggtgtg

SEQ ID NO: 699639 - DNA, 75 bp, synthetic construct
  source 1..75: mol_type = other DNA
acaggctcgtcagacttggagtttacagagtgcaccaacgctggaaacgttgcaaatggcactgaagcagccgct

SEQ ID NO: 699640 - DNA, 75 bp, synthetic construct
  source 1..75: mol_type = other DNA
cctgtatcaacagtaatcaatctttccaatgtttttggtgtaaatgatgatacagaaaaatttgtaataagatac

SEQ ID NO: 699641 - DNA, 75 bp, synthetic construct
  source 1..75: mol_type = other DNA
ccaaacttttgctcagctggcgctggataaatccgagctggtcattcgccaggcagatttagtgagcgatgcagc

SEQ ID NO: 699642 - DNA, 75 bp, synthetic construct
  source 1..75: mol_type = other DNA
cggaaggtacacatattaccgtgcgctggcagcgagtaccgcacggtgccgagtttagcgttgaagataacgggc

SEQ ID NO: 699643 - DNA, 75 bp, synthetic construct
  source 1..75: mol_type = other DNA
cggcaattgatacgcatgatgatgcagtccaggccgtttaccggaaagcacatttcagcggcggaggatcgcccg

SEQ ID NO: 699644 - DNA, 75 bp, synthetic construct
  source 1..75: mol_type = other DNA
gccaggggggcggcgaattgcccctggttccaggcaaggactggagcaatcagcagaatatctatcaccgttggt

SEQ ID NO: 699645 - DNA, 75 bp, synthetic construct
  source 1..75: mol_type = other DNA
gcttatgccttaatgaccgatatccattgggacgattgcttctgccggaaggatatcggctggcgcgccatcgaa

SEQ ID NO: 699646 - DNA, 75 bp, synthetic construct
  source 1..75: mol_type = other DNA
gccatgcgtgaatttacggctgatggcgggcgcaagctggggattaagcccacgcacattgtggtgcccacctct

SEQ ID NO: 699647 - DNA, 75 bp, synthetic construct
  source 1..75: mol_type = other DNA
gagccgggaacgggcaggataacccgctacatgatgctgagtaacagagccggagaattcacggtatggggtgat

SEQ ID NO: 699648 - DNA, 75 bp, synthetic construct
  source 1..75: mol_type = other DNA
aacgcaattactgaagaatatctgcgccagggggggggcggcgaattgccccttgtaccaggcaaggactggaac

SEQ ID NO: 699649 - DNA, 75 bp, synthetic construct
  source 1..75: mol_type = other DNA
gctgagcttaacatgcgtaaaaaacagtacaactactatcgcgaccggttatttagttttggtgcccacgatgtt

SEQ ID NO: 699650 - DNA, 75 bp, synthetic construct
  source 1..75: mol_type = other DNA
tgggtcgccgtgctggtgaaccgccattaccactcgagcgccagcgtgcgatcgcaaatctggtgtacagcaaac

SEQ ID NO: 699651 - DNA, 75 bp, synthetic construct
  source 1..75: mol_type = other DNA
tctgcgatgaaagagtttggtatcagcaaagcagaagatcaggcaatgtttattgctcaagtcgggcatgagtct

SEQ ID NO: 699652 - DNA, 75 bp, synthetic construct
  source 1..75: mol_type = other DNA
gccgttgcttctgctgcctatcgttctggttcactaatgcttgatgagcgtaccggactgactcacgactacacc

SEQ ID NO: 699653 - DNA, 75 bp, synthetic construct
  source 1..75: mol_type = other DNA
tattggaaggaaaagagtggttaattacgcgttgtgaaaaaatctattttgataatctggagaaatggtttggac

SEQ ID NO: 699654 - DNA, 75 bp, synthetic construct
  source 1..75: mol_type = other DNA
agaagaaggtttcgacgtgatattacaaacgtcgcacaatccggcagaagatctgcaaaaaatgcgaaagcaaaa

SEQ ID NO: 699655 - DNA, 75 bp, synthetic construct
  source 1..75: mol_type = other DNA
aggctgacggtggccgcaaactcggcatcaaacccacccatattgttgtccccacctcgctggaaaaacaggcgg

SEQ ID NO: 699656 - DNA, 75 bp, synthetic construct
  source 1..75: mol_type = other DNA
tgggatttagccgaggtcgaggcatggattgatgcgtgcaaacattccagcccggcccctcgccccggaatgggg

SEQ ID NO: 699657 - DNA, 75 bp, synthetic construct
  source 1..75: mol_type = other DNA
cgcacttagtagtcgcaaggtcgtgtgggatttagccgaggtcgaggcatggattgatgcgtgcaaacattccgg

SEQ ID NO: 699658 - DNA, 75 bp, synthetic construct
  source 1..75: mol_type = other DNA
cggttctgccatggcgtggactccgaatggcaacggtggttctgttcaacttagcggcatgttgaccccggatgt

SEQ ID NO: 699659 - DNA, 75 bp, synthetic construct
  source 1..75: mol_type = other DNA
ttttgctggcatcggtaacgggactgcttatctggcatttctggaatttattgcgcctttcatggtggctgtggg

SEQ ID NO: 699660 - DNA, 75 bp, synthetic construct
  source 1..75: mol_type = other DNA
atgcactcagcggcggacgcctgtgggtctggtctgcagaagacagcacccccggtctggcagcccgtctcacga

SEQ ID NO: 699661 - DNA, 75 bp, synthetic construct
  source 1..75: mol_type = other DNA
atgccttttgccgtactcgcactggccctcgtgatgacgttcctcacgatcctctcatacgaaaccgggaaacag

SEQ ID NO: 699662 - DNA, 75 bp, synthetic construct
  source 1..75: mol_type = other DNA
agatcccgttgcagagctggcattgcgtcgttacgagctacgactggcaaaatcgctggcacatgtggtgaatat

SEQ ID NO: 699663 - DNA, 75 bp, synthetic construct
  source 1..75: mol_type = other DNA
agcggacatgcgctgaaaggcagtgaaattatcagcctggttgaagaaagcgatccggtagcggaactggcattg

SEQ ID NO: 699664 - DNA, 75 bp, synthetic construct
  source 1..75: mol_type = other DNA
gtgccgcagcggcacagccggacgaactggtgttcgcagccctgcgtgacggtgtgaaagtcgcctgttatgacg

SEQ ID NO: 699665 - DNA, 75 bp, synthetic construct
  source 1..75: mol_type = other DNA
aaatcaaaatgttaaatttattaataaaaagggtaactgttactatttcggacaagcattattagtttccgtgaa

SEQ ID NO: 699666 - DNA, 75 bp, synthetic construct
  source 1..75: mol_type = other DNA
gtcagaacttctttgataccgaacaccccgtctacccaaatgtggatggtaccggtgatgtggcgctggtcagca

SEQ ID NO: 699667 - DNA, 75 bp, synthetic construct
  source 1..75: mol_type = other DNA
cctttgccggaatatgtcggatatgtgcgctgtcaccacccggcttcgtgaccagggcgttacccttatttttct

SEQ ID NO: 699668 - DNA, 75 bp, synthetic construct
  source 1..75: mol_type = other DNA
cgcgcggtatcgacattccggatgtcagccatgtctttaacttcgatatgccacgcagtggcgatacttatttac

SEQ ID NO: 699669 - DNA, 75 bp, synthetic construct
  source 1..75: mol_type = other DNA
atgaaaaaagtagttttaacggcccttctggcatgtgccttgggggttgctgggactgcctccgcatatcagcac

SEQ ID NO: 699670 - DNA, 75 bp, synthetic construct
  source 1..75: mol_type = other DNA
tacagtggcgaaggtaacgaaccggtcgaacgaatgatgaaggattatttccgcgtcacgcgtcgcgtcagcgaa

SEQ ID NO: 699671 - DNA, 75 bp, synthetic construct
  source 1..75: mol_type = other DNA
gctgcgcgaagcaggcatcaacaactgctatctcgaaggtgagatggtgcaaggcaaacgcaacgaagcgatcaa

SEQ ID NO: 699672 - DNA, 75 bp, synthetic construct
  source 1..75: mol_type = other DNA
gagcgtctgctcgaagatccggtggaagtttctgcgaatccgtccacccgtgagcgcaaaaagattcatcagtgg

SEQ ID NO: 699673 - DNA, 75 bp, synthetic construct
  source 1..75: mol_type = other DNA
ttgaactcgacgaaagcctgctggaagccctccaggataaaggtttcactcgaccgaccgccattcaggctgccg

SEQ ID NO: 699674 - DNA, 75 bp, synthetic construct
  source 1..75: mol_type = other DNA
tgaagctggaagtcggtcatagcgtacgcacgcttgaggagtgcatgctggaagggttatcggatttaaccgtcg

SEQ ID NO: 699675 - DNA, 75 bp, synthetic construct
  source 1..75: mol_type = other DNA
tgaagctggaagtcggtcatagcgtgcgcacgcttgaagagtgcatgctggaagggttatcggatttaaccgtcg

SEQ ID NO: 699676 - DNA, 75 bp, synthetic construct
  source 1..75: mol_type = other DNA
tggccccgtgatgaattaaccgtctgtgggataaaagcccatatcgatactttccagcgttggctgggtgatgcc

SEQ ID NO: 699677 - DNA, 75 bp, synthetic construct
  source 1..75: mol_type = other DNA
attttgccgaactccacgggctgaactcgcgcgagacgcaactggtcgcctggctggttcgccagcacttgctga

SEQ ID NO: 699678 - DNA, 75 bp, synthetic construct
  source 1..75: mol_type = other DNA
cactgcaccatatctggtcacgctgccgggcaaactattttgttcgtcacagtccaaatcaactggcctggcacg

SEQ ID NO: 699679 - DNA, 75 bp, synthetic construct
  source 1..75: mol_type = other DNA
gacgatgagtttcagctacgcggtacgcttatcgacctgcgcgatgaaacgctgtttatgcgccagccagaagcc

SEQ ID NO: 699680 - DNA, 75 bp, synthetic construct
  source 1..75: mol_type = other DNA
ttgaactcgacgaaagcctgctggaagcactccaggataaaggtttcactcgcccgaccgccattcaggctgccg

SEQ ID NO: 699681 - DNA, 75 bp, synthetic construct
  source 1..75: mol_type = other DNA
atgacctcgggaaaaaagcagcagcggactttatgcaacagcagtcccgtgatggtggtcagttaagcggagcat

SEQ ID NO: 699682 - DNA, 75 bp, synthetic construct
  source 1..75: mol_type = other DNA
cagtaagcagaaaggctcgtatggttctgacgcataccggaaggctgaacagacgctgacagacagtctgaaccg

SEQ ID NO: 699683 - DNA, 75 bp, synthetic construct
  source 1..75: mol_type = other DNA
gcttatgccttaatgaccgatattcactgggacgactgcttctgccggaaagatatcggctggcgcgctatcgaa

SEQ ID NO: 699684 - DNA, 75 bp, synthetic construct
  source 1..75: mol_type = other DNA
gcgggatagtgagcagaaagggacatataacacggatgactacagaaaggccgagcaggcgctgacggagagcct

SEQ ID NO: 699685 - DNA, 75 bp, synthetic construct
  source 1..75: mol_type = other DNA
acggagagcctgaaccgacaactgaatgagaatcgccgttactggcaacagcttgaaattgctcagggtaactgg

SEQ ID NO: 699686 - DNA, 75 bp, synthetic construct
  source 1..75: mol_type = other DNA
ctgaaaggatgacagaagcgcataaacagcttctggcccttcagcagcgtatcagcgatttggccggtaaaaaac

SEQ ID NO: 699687 - DNA, 75 bp, synthetic construct
  source 1..75: mol_type = other DNA
gtcatgccagccaccagaccggactggatgtcgatatctttctgcaactgccgaaaacacgctggacctccgcgc

SEQ ID NO: 699688 - DNA, 75 bp, synthetic construct
  source 1..75: mol_type = other DNA
aggtcatgcgtaccgatcagcgtcgctatttcggtcacccggatctggtgatgtttattcagcgtctgagtagcc

SEQ ID NO: 699689 - DNA, 75 bp, synthetic construct
  source 1..75: mol_type = other DNA
attgatgagttacgaccgaagacccgtgcgccaagcgagaaacagaccggcaagccatcgaaaaaagtgttggca

SEQ ID NO: 699690 - DNA, 75 bp, synthetic construct
  source 1..75: mol_type = other DNA
gagaatgcggataacacagccgggacagtggaacagttgttcacgtctgcgttcagtagcatgagtgactggctg

SEQ ID NO: 699691 - DNA, 75 bp, synthetic construct
  source 1..75: mol_type = other DNA
tggttgtatcgtcggcgctgacacgctgccgatacagtccgaacattatcaggtcatgcgtaccgatcagcgtcg

SEQ ID NO: 699692 - DNA, 75 bp, synthetic construct
  source 1..75: mol_type = other DNA
ctatttcggtcacccggacctggtgatgtttatccagcgtctgagtagccaggtgagcaatctgggcatgggtac

SEQ ID NO: 699693 - DNA, 75 bp, synthetic construct
  source 1..75: mol_type = other DNA
cgccaaattgcgccattttactgttgaaaccgaagtgacgtttttgccgacccataccgaccgaaaatcattcct

SEQ ID NO: 699694 - DNA, 75 bp, synthetic construct
  source 1..75: mol_type = other DNA
tttcgggtggtaaagattccggattaatgctgcatctgaccgccgaaattgcccgacaaatgggcaaaaaaatct

SEQ ID NO: 699695 - DNA, 75 bp, synthetic construct
  source 1..75: mol_type = other DNA
ggttgcgctcccgcttacgacgcaaaattccctatcacaataccaacccgaatggcagtgctgggaacctgatgt

SEQ ID NO: 699696 - DNA, 75 bp, synthetic construct
  source 1..75: mol_type = other DNA
gaccactgccgcaccaggcggtcatagctggtacatttaccccatctacgactggaaagtggctgatatctggac

SEQ ID NO: 699697 - DNA, 75 bp, synthetic construct
  source 1..75: mol_type = other DNA
cattattttttgtgattttcattaaaaaaagactgccggaagcaggatattatcagagacccgtaaacaactcag

SEQ ID NO: 699698 - DNA, 75 bp, synthetic construct
  source 1..75: mol_type = other DNA
ccgaaaaaacgctggacctccgcgcaactcttgcgcccgcaagcattagatttggtttcccgcgacggtaaacac

SEQ ID NO: 699699 - DNA, 75 bp, synthetic construct
  source 1..75: mol_type = other DNA
cgctcaatattctggaagctgcacgagagcgtattacctggacacttaacaccctaccccgcgtttgtgtctcat

SEQ ID NO: 699700 - DNA, 75 bp, synthetic construct
  source 1..75: mol_type = other DNA
ttctgtcgcgcgaatccctgtacctggcggatgaagtgtttatgtccggtacggcggcagaaatcacgccagtgc

SEQ ID NO: 699701 - DNA, 75 bp, synthetic construct
  source 1..75: mol_type = other DNA
tttcccgtggggagcgtatctgggcgcagaagcgctggagcaggggatcgatgcgatggtttcctcctggaaccg

SEQ ID NO: 699702 - DNA, 75 bp, synthetic construct
  source 1..75: mol_type = other DNA
gcaccaaacaccatcccaaccgcggcaaaagccggtggtaactacctctcttccctgctggtgggtagcgaagcg

SEQ ID NO: 699703 - DNA, 75 bp, synthetic construct
  source 1..75: mol_type = other DNA
cgctgaatattttagaagctgcacaggaacgtattacctggacacttaacaccttgccccgtgtttgcgtttctt

SEQ ID NO: 699704 - DNA, 75 bp, synthetic construct
  source 1..75: mol_type = other DNA
tcatttagcccgaccaaagcgaagaactatcagcgttataacgaacgaataaaaggaaaacgtcaggaatggggg

SEQ ID NO: 699705 - DNA, 75 bp, synthetic construct
  source 1..75: mol_type = other DNA
cttcgaacaatttgtgcgtgagtttgccgaatggttttcgcaaaaacgtccggcggcgatgatgatcggcatccg

SEQ ID NO: 699706 - DNA, 75 bp, synthetic construct
  source 1..75: mol_type = other DNA
ctccattatcagaccggaaacgttcgaatggcgatcatcgtgagttagttttgagattttttgcatacttaaatg

SEQ ID NO: 699707 - DNA, 75 bp, synthetic construct
  source 1..75: mol_type = other DNA
agccgctggtacaaaagcgaagtggagcagtggatgcaacagcgaatcgaggagtcacgaggagcagcagcatga

SEQ ID NO: 699708 - DNA, 75 bp, synthetic construct
  source 1..75: mol_type = other DNA
ggccgcagcagccgctggtacaaaagtgaagtggagcagtggatgcagcagcgaatcgaggagtcacgaggagca

SEQ ID NO: 699709 - DNA, 75 bp, synthetic construct
  source 1..75: mol_type = other DNA
aggccatttccctaaacccatcaaactggggcgcagcagccgctggtacaaaagtgaagtggagcagtggatgca

SEQ ID NO: 699710 - DNA, 75 bp, synthetic construct
  source 1..75: mol_type = other DNA
tttccagcgttggctgggtgatgcctttgacaatgggatctctgcagaacagttgattgaggcgcgtaccgagtt

SEQ ID NO: 699711 - DNA, 75 bp, synthetic construct
  source 1..75: mol_type = other DNA
agcgctggcttttgctattaagtgggtggctgttggtattgctgtgtctccgatgctgtatgggctggcaaaact

SEQ ID NO: 699712 - DNA, 75 bp, synthetic construct
  source 1..75: mol_type = other DNA
tcctcgccgggctctcctttcaggctactgccgcaaacaccaaaactctgcatttcggtacttctgcaacctatg

SEQ ID NO: 699713 - DNA, 75 bp, synthetic construct
  source 1..75: mol_type = other DNA
aagaaaattctctgagcagatttttaaaattactggcgatgagaatgcggcaaaaaatgaattagaaccgtggac

SEQ ID NO: 699714 - DNA, 75 bp, synthetic construct
  source 1..75: mol_type = other DNA
atgttacagaacaacatcaaacagctccgtacccagctatctatcactcagcgcgagctggcgtttatgattggc

SEQ ID NO: 699715 - DNA, 75 bp, synthetic construct
  source 1..75: mol_type = other DNA
aagagcttgctcagattcaagatgaaaacgcgaaaaatagaaaaaaagctgaaattgcagccttggtcacttctg

SEQ ID NO: 699716 - DNA, 75 bp, synthetic construct
  source 1..75: mol_type = other DNA
ccagggctctttactgaatgctatggcagtattcggtgcggttatgcctgcagcactgttgctgatattcgcctg

SEQ ID NO: 699717 - DNA, 75 bp, synthetic construct
  source 1..75: mol_type = other DNA
ctggggcgcagcagccgctggtacaaaagtgaagtggagcagtggatgcagcagcgaattgaggaatcacgagga

SEQ ID NO: 699718 - DNA, 75 bp, synthetic construct
  source 1..75: mol_type = other DNA
atgttaaatacacagaaagccattaatgcggaaaaatataacgagtgggtaaaaaaattctctgagcagattttt

SEQ ID NO: 699719 - DNA, 75 bp, synthetic construct
  source 1..75: mol_type = other DNA
tactggtatgcgcggattattactgctggtggcgatccgttatatgtcgcgcgtcgctgcctggcgatagcgtcg

SEQ ID NO: 699720 - DNA, 75 bp, synthetic construct
  source 1..75: mol_type = other DNA
gcgcgctttactaaattacatggttcattggactggtatgctactgaaggggctataaggcgttttggattgcca

SEQ ID NO: 699721 - DNA, 63 bp, synthetic construct
  source 1..63: mol_type = other DNA
atgttgcgggggctttatccctggtggcattggttgctggagagagaaaacccccgcacgttg

SEQ ID NO: 699722 - DNA, 75 bp, synthetic construct
  source 1..75: mol_type = other DNA
agaagctcaccgtgttcgcccgctatacgcagcaacagggggtacagattgcttaccaccatcatatgggcacgg

SEQ ID NO: 699723 - DNA, 75 bp, synthetic construct
  source 1..75: mol_type = other DNA
gcgcgcctgcttggccccattttgcagcgccacgatctgcaactggtctctggctggtactccggccgcctgctg

SEQ ID NO: 699724 - DNA, 75 bp, synthetic construct
  source 1..75: mol_type = other DNA
gcagtatatcagaaattattgatctatcatctaattctggcgagcatgctgattctcatccttttatcctctcga

SEQ ID NO: 699725 - DNA, 75 bp, synthetic construct
  source 1..75: mol_type = other DNA
tagatgtcataaaaaaactaacagaagtgacgaccataaaatataatcacaatgggtgttttcctctttatacat

SEQ ID NO: 699726 - DNA, 75 bp, synthetic construct
  source 1..75: mol_type = other DNA
tggttaagcccggtatttcagtgatcacgcctaacccgaaaagctctggtggcgcacgctggaactacctggcag

SEQ ID NO: 699727 - DNA, 75 bp, synthetic construct
  source 1..75: mol_type = other DNA
atcggttgtcgataaagtggtggagaaaaaaggcaccaaagaggtggcagaagcctatctgaaatatctctactc

SEQ ID NO: 699728 - DNA, 75 bp, synthetic construct
  source 1..75: mol_type = other DNA
tgggtaacaatattaatggcacgccagtcaactataaggtttatattaccagcgacgtcaacgcatgggcgatgg

SEQ ID NO: 699729 - DNA, 75 bp, synthetic construct
  source 1..75: mol_type = other DNA
atgaaactacctgagaatatcgctcaggatgttgataagtacattgcatataaaacccggcatcagaaaagaggg

SEQ ID NO: 699730 - DNA, 75 bp, synthetic construct
  source 1..75: mol_type = other DNA
tattagcaggcgaggtttaactatcagtaccgagggtaaatatatccaccctcaacaaagtattatcgacacccc

SEQ ID NO: 699731 - DNA, 75 bp, synthetic construct
  source 1..75: mol_type = other DNA
acggttggctggtggtggaggctgaacaggacccggcgatcgcccatccgctgacctacgcccgtctgggatata

SEQ ID NO: 699732 - DNA, 75 bp, synthetic construct
  source 1..75: mol_type = other DNA
caaaaaatgatctaaacacccttgaaaataagtcggtacttacttatgatcgtggtgcagcccaagaaagcgggc

SEQ ID NO: 699733 - DNA, 75 bp, synthetic construct
  source 1..75: mol_type = other DNA
aaataagttagtacttacttatgatcgcgatacagtccaaggaagcggacaagatcaaccccgagggaatgggga

SEQ ID NO: 699734 - DNA, 75 bp, synthetic construct
  source 1..75: mol_type = other DNA
ttgctgtccgagagattgttgcattgcatgacggaaccctggagatgcagatcgcggcgcttctgcatgatgtgg

SEQ ID NO: 699735 - DNA, 75 bp, synthetic construct
  source 1..75: mol_type = other DNA
ggcgaccagccgtctatgcagtacatcggcaaagccctgaaagagtttcgtgacagcgggaaaccggtttatgcc

SEQ ID NO: 699736 - DNA, 75 bp, synthetic construct
  source 1..75: mol_type = other DNA
ttcatcgaaatattgaagaatcgccagagcagatccgcaatttctggaaacgagcgactcgccagaatgcctcta

SEQ ID NO: 699737 - DNA, 75 bp, synthetic construct
  source 1..75: mol_type = other DNA
tgacgagaaaaagaaagatgctcgtgcctacgcctactggatttcacctcagcaaatgctggatgtggcatggga

SEQ ID NO: 699738 - DNA, 75 bp, synthetic construct
  source 1..75: mol_type = other DNA
tttctatggggttttcgttagtagcttgttttttcgtaaaaagcgtcaattgcctcatcactatattgtacttgt

SEQ ID NO: 699739 - DNA, 75 bp, synthetic construct
  source 1..75: mol_type = other DNA
taagactttgtattcaatgtgagaatgaagcactgaaggacagtgacttttgcgctgtttgtgaagaacgcgaat

SEQ ID NO: 699740 - DNA, 75 bp, synthetic construct
  source 1..75: mol_type = other DNA
ggggcagatcaaacaactgctcgggtcacggatgatgatcggcgtttatatcggtcagtactgtatcaacgccct

SEQ ID NO: 699741 - DNA, 75 bp, synthetic construct
  source 1..75: mol_type = other DNA
tggtaaacatacgcaaaatcattagtccttattttggctttgctacagatgcataccctttcaacgacggtacat

SEQ ID NO: 699742 - DNA, 75 bp, synthetic construct
  source 1..75: mol_type = other DNA
tccattttttggtgggatacaggaaacaacgaatgttaggctgagtgatgatgcttacagaactcttatattttg

SEQ ID NO: 699743 - DNA, 75 bp, synthetic construct
  source 1..75: mol_type = other DNA
agtactctgcaagcaaaaaattactatccatcattgatacctttaatcaggcaattagccttgatgatttcactg

SEQ ID NO: 699744 - DNA, 75 bp, synthetic construct
  source 1..75: mol_type = other DNA
tgaacgtggtcgaattgataaagagtggatcaaacgtctgccggataactccgcgccgtatacctccaccattgt

SEQ ID NO: 699745 - DNA, 75 bp, synthetic construct
  source 1..75: mol_type = other DNA
cggtcctgttagcagacagctttaaagccggtggtaaggtgctttcctgcggcaacggcggctcccattgcgatg

SEQ ID NO: 699746 - DNA, 75 bp, synthetic construct
  source 1..75: mol_type = other DNA
tccgggaaaatatcaccctgggcgttcaggccggttatgcccacagcgtcagcggcagcagcgctgaagggtata

SEQ ID NO: 699747 - DNA, 75 bp, synthetic construct
  source 1..75: mol_type = other DNA
ttgagcgcgttaaatcttctggtgcgatggggatgtttgctggtgctgatgcagcatctttcttcaaacagttgc

SEQ ID NO: 699748 - DNA, 75 bp, synthetic construct
  source 1..75: mol_type = other DNA
gtcgcgaaggcgatgtactgctggggatctccacctccggtaactctgcaaacgtgatcaaagcgatcgcggcgg

SEQ ID NO: 699749 - DNA, 75 bp, synthetic construct
  source 1..75: mol_type = other DNA
ggctaactttttaaaagatgacgccaatattcactccattcagcgcgcggcggtcctgttagcagacagctttaa

SEQ ID NO: 699750 - DNA, 75 bp, synthetic construct
  source 1..75: mol_type = other DNA
ggctatccggcgattgccatttctgatgtcagccacatcacctgcgtcggtaacgattttggatttaacgatatt

SEQ ID NO: 699751 - DNA, 75 bp, synthetic construct
  source 1..75: mol_type = other DNA
ttcagcggaaaaatgccggcacatatctttccgaaaagagccgttgagccgtcggtaattgcacaggttgtcatc

SEQ ID NO: 699752 - DNA, 75 bp, synthetic construct
  source 1..75: mol_type = other DNA
acacgccgacgagaccgggctgcgtatcctggacacgaaaaaaggcggtaaatcacattcgggttatctgtggtg

SEQ ID NO: 699753 - DNA, 75 bp, synthetic construct
  source 1..75: mol_type = other DNA
ccccgtcagtacaatggcggatagggtcggtgttgctggcgctgcactggccccgctggcaaaattgttacgcca

SEQ ID NO: 699754 - DNA, 75 bp, synthetic construct
  source 1..75: mol_type = other DNA
caccctgttcccaaaccagttcgtcatcgcggctgagcacacggtacaggcggcgtatgaagcacagcgtgaatt

SEQ ID NO: 699755 - DNA, 75 bp, synthetic construct
  source 1..75: mol_type = other DNA
cctgcacttcattcgcgatgaagtcagcgagaagctggaatatatccccgcacaggttgtggtccaccgctatat

SEQ ID NO: 699756 - DNA, 75 bp, synthetic construct
  source 1..75: mol_type = other DNA
atgaactgagctgcttcctgggtgacggagctgtgcccctggacaacaatatctgtgagcgagccattcgcccgg

SEQ ID NO: 699757 - DNA, 75 bp, synthetic construct
  source 1..75: mol_type = other DNA
tttcgcaatttgcctatgatgataccgactgggcaatgatgtccagcgccccggatatggaatctggtcattact

SEQ ID NO: 699758 - DNA, 75 bp, synthetic construct
  source 1..75: mol_type = other DNA
actggcggctttggttatgatccaatcttcttcgtaccttccgaaggaaaaaccgctgccgaactgacccgcgaa

SEQ ID NO: 699759 - DNA, 75 bp, synthetic construct
  source 1..75: mol_type = other DNA
cgacgattccggtctggcggttgatgcgcttggcggagcgccgggtatttactccgctcgttattccggtgaaga

SEQ ID NO: 699760 - DNA, 75 bp, synthetic construct
  source 1..75: mol_type = other DNA
cgtctggaagaacgtcgggcaagggctgaggcaatggctgcccgccttgatagccttgcgtgtcatatcacatcc

SEQ ID NO: 699761 - DNA, 75 bp, synthetic construct
  source 1..75: mol_type = other DNA
tatgtgcagtctccgcgctattaccgtgcgttaatagcaggtggcgcccgttacaacctgaacggtcagccgtgc

SEQ ID NO: 699762 - DNA, 75 bp, synthetic construct
  source 1..75: mol_type = other DNA
caccgctgtgctgaatttggtgccatgcatgtgcatcacggtcatttacctttccctgaactggagcgtttctga

SEQ ID NO: 699763 - DNA, 75 bp, synthetic construct
  source 1..75: mol_type = other DNA
cttccactgtgtgctggtgtatctgcgtcacgcggaagatcccactccgctggtgtgtcacggcagctggccggg

SEQ ID NO: 699764 - DNA, 75 bp, synthetic construct
  source 1..75: mol_type = other DNA
cggcattaatgaactgattgatgacctgatggatcctggaaaacaatgtactgttcccacgcgcgctggcgggtg

SEQ ID NO: 699765 - DNA, 75 bp, synthetic construct
  source 1..75: mol_type = other DNA
agcagatcctcttcccgatgatcaaacaaggcatgggtagccaggcgatggggccaatcagcgtaatggaaagcg

SEQ ID NO: 699766 - DNA, 75 bp, synthetic construct
  source 1..75: mol_type = other DNA
agacgctggaaaatttcagtgaaaagctggaggtcgaaggccgcagtttatggcaggacgcgcgtcgacgtttta

SEQ ID NO: 699767 - DNA, 75 bp, synthetic construct
  source 1..75: mol_type = other DNA
ctgaagcaatggcagctcgccttgatagcctggcgtgtcatatcacatccagccagctaaaccacgtcgaagcgg

SEQ ID NO: 699768 - DNA, 75 bp, synthetic construct
  source 1..75: mol_type = other DNA
tggcgattaccgcaccggcgatgtgatccacggtctgccgctggaagaggtggaaggcggtaaagtgttccatgc

SEQ ID NO: 699769 - DNA, 75 bp, synthetic construct
  source 1..75: mol_type = other DNA
gatctccacttccggtaactctgcaaacgtgatcaaagcgatcgcggcggcgcgtgagaaggggatgaaagtgat

SEQ ID NO: 699770 - DNA, 75 bp, synthetic construct
  source 1..75: mol_type = other DNA
aatgccaactccggatgaccaactgccggtgatcctaccggaagatgtggtaatggacggcattaccagcccaat

SEQ ID NO: 699771 - DNA, 75 bp, synthetic construct
  source 1..75: mol_type = other DNA
cgcgaacgtgctggccaggaacatctggtagcaaaatatcttgatggcgttactgtgcgtaaagtgatttacgta

SEQ ID NO: 699772 - DNA, 75 bp, synthetic construct
  source 1..75: mol_type = other DNA
ggaactgaaaggcgaaggcgatatcgacaacgcgccgtggccggttgctgacgaaaaagcgatggtggaagactc

SEQ ID NO: 699773 - DNA, 75 bp, synthetic construct
  source 1..75: mol_type = other DNA
tgatattcgggattatccgctggccgtgcgcatcgggcggtatgtcatcgcgcacaacctggcaatgccagaccg

SEQ ID NO: 699774 - DNA, 75 bp, synthetic construct
  source 1..75: mol_type = other DNA
tccgcagccgaaccagaagacgccagcgcacagcaggcgcaggacgaaagcagcaaaagtaaaaagacaacgcgg

SEQ ID NO: 699775 - DNA, 75 bp, synthetic construct
  source 1..75: mol_type = other DNA
tccgtcacaacctcatcatgccggataactttggccgtactgctgccacagtgctgaccgaagaaatctgcaacc

SEQ ID NO: 699776 - DNA, 75 bp, synthetic construct
  source 1..75: mol_type = other DNA
ggcgtgttgttagtgatggcgcgctttaaagagatcctcgatataaaccccgtcggtcgccgtgcgcgcgtgcaa

SEQ ID NO: 699777 - DNA, 75 bp, synthetic construct
  source 1..75: mol_type = other DNA
tggcggcgcgttgccgctggaaaaaggcgtgttgttagtgatggcgcgctttaaagagatcctcgatataaaccc

SEQ ID NO: 699778 - DNA, 75 bp, synthetic construct
  source 1..75: mol_type = other DNA
caccgctgcgctgaatttggtgccatgcacgtgcatcacggtcatttacctttccctgaactggagcgtttctga

SEQ ID NO: 699779 - DNA, 75 bp, synthetic construct
  source 1..75: mol_type = other DNA
atgggcgttggcgagcgtaaagtgaactaccgcctgcgcgactggggtgtttcccgtcagcgttactggggcgcg

SEQ ID NO: 699780 - DNA, 75 bp, synthetic construct
  source 1..75: mol_type = other DNA
cacaagcgaaccagcaacgcactgaagaacgcgcagcagctactgaagccgttgcagaacgccgggtagaaacaa

SEQ ID NO: 699781 - DNA, 75 bp, synthetic construct
  source 1..75: mol_type = other DNA
gcagtggcagaacgtcaggcagaagtcaccagagaggccagtaatgtacagcagaaagttaatcatatgcctggc

SEQ ID NO: 699782 - DNA, 75 bp, synthetic construct
  source 1..75: mol_type = other DNA
tgatcccggcgctggagctgatcgacgcccgctgccacaacatcgatccggaaacccagcgcccgcgcaaagtgt

SEQ ID NO: 699783 - DNA, 75 bp, synthetic construct
  source 1..75: mol_type = other DNA
atgaagaatactaaattactgctggcgattgcgacctctgcagcattactgacagggtgtcaaaatacccacggt

SEQ ID NO: 699784 - DNA, 75 bp, synthetic construct
  source 1..75: mol_type = other DNA
gaaggttgatctggtagcgcagcctgagctgctggcacaggatgaatacgcggcccgtagcgcggcgtggttctt

SEQ ID NO: 699785 - DNA, 75 bp, synthetic construct
  source 1..75: mol_type = other DNA
gtaaacccgaagatcaggcaatgtttattgctcaggtcgggcatgagtctggtggcttcacccggttacaggaaa

SEQ ID NO: 699786 - DNA, 75 bp, synthetic construct
  source 1..75: mol_type = other DNA
ggctaactttgttcgggctgggcgtctcactcagggacaggccaacgcattggggcgacgcgcaggcgaaccacc

SEQ ID NO: 699787 - DNA, 75 bp, synthetic construct
  source 1..75: mol_type = other DNA
ctcactcagggacaagccaacgcattggggcgtcgcgcaggtgaaccaccattgccacttgagcgacagcgcgca

SEQ ID NO: 699788 - DNA, 75 bp, synthetic construct
  source 1..75: mol_type = other DNA
atcaatggtggccggaacggcatcgacgaccggcgcgcgcggtacatcactgccagtaaggtgctggcggtatga

SEQ ID NO: 699789 - DNA, 75 bp, synthetic construct
  source 1..75: mol_type = other DNA
actatcgcgactgcggcaacggcctgaaggtggatctggttaagcagcctgagctgctggcgcaggacgagtatg

SEQ ID NO: 699790 - DNA, 75 bp, synthetic construct
  source 1..75: mol_type = other DNA
ggacgaagtgcgcgccaaattatgcaaggcgtgcgcctttgcccgtcgtggtctgaccgatgcagacaacatggc

SEQ ID NO: 699791 - DNA, 75 bp, synthetic construct
  source 1..75: mol_type = other DNA
cggctggattgagggaacgctggagactgacggcgggcaacaggacgaagtaattgccacgctgatggtgtgggc

SEQ ID NO: 699792 - DNA, 75 bp, synthetic construct
  source 1..75: mol_type = other DNA
tgattatcaatggtggccggaacggcatcgacgaccggcgtgcgcgatacataactgccagtaaggtgctggcgg

SEQ ID NO: 699793 - DNA, 75 bp, synthetic construct
  source 1..75: mol_type = other DNA
ctcactcagggacaggccaacgcattggggcgacgcgcaggcgaaccaccattgccacttgagcgccagagagcg

SEQ ID NO: 699794 - DNA, 75 bp, synthetic construct
  source 1..75: mol_type = other DNA
accgacgacctgatgcgcgtcacgcagatcatcaacggcgggcagaatggcatcgacgatcgccgtgtgcgttac

SEQ ID NO: 699795 - DNA, 75 bp, synthetic construct
  source 1..75: mol_type = other DNA
cggcgtgaccaccgaagtgacggtaaaactgctgccgaagccgcccgtggcgcgggttctgttagccagctttga

SEQ ID NO: 699796 - DNA, 75 bp, synthetic construct
  source 1..75: mol_type = other DNA
gcctcccgttcgaaataccagaactacgataacgattcggtatttctgcggttgtccgttccttggggaagcaca

SEQ ID NO: 699797 - DNA, 75 bp, synthetic construct
  source 1..75: mol_type = other DNA
tggtcaggcgctggcgctggaagtgggaaaaggtagcccatacgactaccgtattaaatccgtggtgtataaccc

SEQ ID NO: 699798 - DNA, 75 bp, synthetic construct
  source 1..75: mol_type = other DNA
gattgtcctgcgtgttaatagcccaggcggcagcgttaccgcgtctgaagtgattcgcgctgaactggctgcagc

SEQ ID NO: 699799 - DNA, 75 bp, synthetic construct
  source 1..75: mol_type = other DNA
tgttcacgatatgctggcgggcaacgcgtttggcgacgcgggtcatcgcattgttatcgaagagttcctcgacgg

SEQ ID NO: 699800 - DNA, 75 bp, synthetic construct
  source 1..75: mol_type = other DNA
taaactgggaacaatatcatcagatattactcagtctatcgcaagtcttcctcaaaaagaaaagcaacaggggaa

SEQ ID NO: 699801 - DNA, 75 bp, synthetic construct
  source 1..75: mol_type = other DNA
taaatgtgaatggacaggcgatttcacctacgaatctggaggtttcttttatagagcgagaaatatcaaaaagca

SEQ ID NO: 699802 - DNA, 75 bp, synthetic construct
  source 1..75: mol_type = other DNA
cgtcgataagcccgacagttcgcagcggtttagtaagttaagtcgtcagttgcttggtgccagttccgatcgtct

SEQ ID NO: 699803 - DNA, 75 bp, synthetic construct
  source 1..75: mol_type = other DNA
gagcagattgataaaatcgcccagggccacgtctggactggtcaggatgcgaaggccaacggtctggttgatagc

SEQ ID NO: 699804 - DNA, 75 bp, synthetic construct
  source 1..75: mol_type = other DNA
gctcagcaggtattccctggcgcgcaagggttgcttgagggtttaaccaaaaccggtggcgataccgcgaaatat

SEQ ID NO: 699805 - DNA, 75 bp, synthetic construct
  source 1..75: mol_type = other DNA
ggcggcagcgttactgcgtctgaagtgattcgatctgaactggcagcagcccgagcggctggcaagcctgtggtt

SEQ ID NO: 699806 - DNA, 75 bp, synthetic construct
  source 1..75: mol_type = other DNA
gaagcagtggcatctggaatattacgtcgatgaaccgaccttcttcgacaaagtgatggacaacatgtcaggttc

SEQ ID NO: 699807 - DNA, 75 bp, synthetic construct
  source 1..75: mol_type = other DNA
cgttgccgctaaccgccagatccctgcccagcaggtattccctggggcgcaaggtttgcttgatggtttaaccaa

SEQ ID NO: 699808 - DNA, 75 bp, synthetic construct
  source 1..75: mol_type = other DNA
acagaacggacggaagaaaacctttcaggtcgatacagcctcggttccttatctgacgcgtccgggacaggtccg

SEQ ID NO: 699809 - DNA, 75 bp, synthetic construct
  source 1..75: mol_type = other DNA
ggtttccggtcgttcgcgtaattatgaacacaccatggagggaccggtttttgctgccggtgaggcatcctgggg

SEQ ID NO: 699810 - DNA, 75 bp, synthetic construct
  source 1..75: mol_type = other DNA
ggcccgcattccgggagaagagacgaagcagggtaaatcctggcgtctgagctattccaaacgttttgatgacgt

SEQ ID NO: 699811 - DNA, 75 bp, synthetic construct
  source 1..75: mol_type = other DNA
tcggctgggacggccggacacagtgtgtggtggatatcccggcacatccggacccggcacagcaactgctgctgc

SEQ ID NO: 699812 - DNA, 75 bp, synthetic construct
  source 1..75: mol_type = other DNA
ctggaaggctcgaaagcgtttaccaaagatttcctggcccgccataagatccctacggcggaataccagaacttc

SEQ ID NO: 699813 - DNA, 75 bp, synthetic construct
  source 1..75: mol_type = other DNA
tgcattcggcgcgtttggttttggtcgtatgaaggggcgagaaaaggccgaagatgaagctgaaaagcagcgcat

SEQ ID NO: 699814 - DNA, 75 bp, synthetic construct
  source 1..75: mol_type = other DNA
gtgatttcgcagcagggacgcattctttatgactccaccgtgccggcaggtccgttcaccattcaggacctggac

SEQ ID NO: 699815 - DNA, 75 bp, synthetic construct
  source 1..75: mol_type = other DNA
tggcgtggggaattaataattactggacactatatggtggaggtatttttactgataagtataattcatttgctc

SEQ ID NO: 699816 - DNA, 75 bp, synthetic construct
  source 1..75: mol_type = other DNA
cgatagcattcatgacggtctgggaagttacagtataaatactggttttagtcatgggggatctgaatcaaatca

SEQ ID NO: 699817 - DNA, 75 bp, synthetic construct
  source 1..75: mol_type = other DNA
aacgcaaaaggccgtgaactggggatggtggcagacagtggtctggcctggctgagtggggtaagcccgggtgaa

SEQ ID NO: 699818 - DNA, 75 bp, synthetic construct
  source 1..75: mol_type = other DNA
ccgggacctgagtaagttcggcactgtttccgctgatgtaacccagtccgtggcccgtataccgggttatgacac

SEQ ID NO: 699819 - DNA, 75 bp, synthetic construct
  source 1..75: mol_type = other DNA
aacgggaatatccggccacgatcacgccagtggtggcagttattcaggatggtgtctcagtggcatgttgatgtt

SEQ ID NO: 699820 - DNA, 75 bp, synthetic construct
  source 1..75: mol_type = other DNA
aatgcgaatagtaataagccacatcatggaggatcatatcagtccgtctactattttggcaccgctggtgctaac

SEQ ID NO: 699821 - DNA, 75 bp, synthetic construct
  source 1..75: mol_type = other DNA
cacgatacgtacgatgctgacagatatctttaacagtaattaccagtgttatggctatcgtcgcctgcatgcgat

SEQ ID NO: 699822 - DNA, 75 bp, synthetic construct
  source 1..75: mol_type = other DNA
cgccacccaggaggcctctgaaacatatgacgacgaagccgcaattcagctgctgatagacgagattgaacatgc

SEQ ID NO: 699823 - DNA, 75 bp, synthetic construct
  source 1..75: mol_type = other DNA
agcagcagcgtctcgatgaactgtacgccactcaggatgttactgaaacgtttgaagatagagccgcgattcagg

SEQ ID NO: 699824 - DNA, 75 bp, synthetic construct
  source 1..75: mol_type = other DNA
ggcgctgttgccggagggctggaagaaagatttcaccaccttctttacgctcgacggacagactttgatgagcct

SEQ ID NO: 699825 - DNA, 75 bp, synthetic construct
  source 1..75: mol_type = other DNA
aattcagggataaagaagatgaattatctttaatgtttaaagataattgttttgaacgatttgtccctgaatgtc

SEQ ID NO: 699826 - DNA, 75 bp, synthetic construct
  source 1..75: mol_type = other DNA
atgttgaaagaaaatcgccatttagcttatgaaatagtaaatgattactttcataagccacttaatgaaattgaa

SEQ ID NO: 699827 - DNA, 75 bp, synthetic construct
  source 1..75: mol_type = other DNA
tggtcggcgtcttgcagccctgcagttattactcactgaaaaccgcatcgatgccgggtatcaggtgatcgttaa

SEQ ID NO: 699828 - DNA, 75 bp, synthetic construct
  source 1..75: mol_type = other DNA
gggatgcatattgaagagtatcacagaaggctgacaagtgatgctcccagtggaaagagaggtcaggcatggctg

SEQ ID NO: 699829 - DNA, 75 bp, synthetic construct
  source 1..75: mol_type = other DNA
tcaggtgccggaaaccctgatgagcaaaattatcctggtgcgtggcagtatcccggacacctccgcagcgctgga

SEQ ID NO: 699830 - DNA, 75 bp, synthetic construct
  source 1..75: mol_type = other DNA
cgaacttttcccggaggttcggctggagctaatccaggggacgccacaggaaattgcgacgttgttgcaaaatgg

SEQ ID NO: 699831 - DNA, 75 bp, synthetic construct
  source 1..75: mol_type = other DNA
cagccgacaaaagcaaacttcttcggacacctgaaaaagccgcagattatcgcagccctgaatgatgcaggactg

SEQ ID NO: 699832 - DNA, 75 bp, synthetic construct
  source 1..75: mol_type = other DNA
taagggcgttggcctgttgcagaatctggtcgtgcatacccagcctggtgaccgttacggtgtcgccgcaggtgg

SEQ ID NO: 699833 - DNA, 75 bp, synthetic construct
  source 1..75: mol_type = other DNA
aaccgctgggtgcctggctggatgtgtacaccacgtccacaggcagagacggaaaccacggaataccgtgacaac

SEQ ID NO: 699834 - DNA, 75 bp, synthetic construct
  source 1..75: mol_type = other DNA
gtaagccgtccagtgtgtttatcgaccatgatacctttgttaaacaggggttttactcaaggctaaatcaaggag

SEQ ID NO: 699835 - DNA, 75 bp, synthetic construct
  source 1..75: mol_type = other DNA
cgggcggcttatatccataaggcggaacatcttggggagcgaatgttgatgctgcagtggtgggctgattatctg

SEQ ID NO: 699836 - DNA, 75 bp, synthetic construct
  source 1..75: mol_type = other DNA
acgacacacaaacggaagtatgtgggcatggttttagaacaatggcgcgtggtgctttgggggagtcggggcttt

SEQ ID NO: 699837 - DNA, 75 bp, synthetic construct
  source 1..75: mol_type = other DNA
cgattcctggtgagcgtgaaccgctggaaggtgttaagcattctcaacgtggctcgaagatgaggactcctcatc

SEQ ID NO: 699838 - DNA, 75 bp, synthetic construct
  source 1..75: mol_type = other DNA
tactcgtgacttactggtcccaattaaagcagtggaaaagtcaggacgccttgaagtggctgcgcgtcttcaaca

SEQ ID NO: 699839 - DNA, 75 bp, synthetic construct
  source 1..75: mol_type = other DNA
tctcaccattctggaaaaaatcaaaagcatgagtggaaaccgtgagctgatcttcgttggtgatcacgatccgcg

SEQ ID NO: 699840 - DNA, 75 bp, synthetic construct
  source 1..75: mol_type = other DNA
gctgcgttttgcccgctggacagaagtggattttgaaacggctatgtggacgatccccggtgagcgtgaaccgct

SEQ ID NO: 699841 - DNA, 75 bp, synthetic construct
  source 1..75: mol_type = other DNA
gttcggctaagcctgaagcaaaagcctataaacttactgacggcgacggcatggttttgctggttcaccctaacg

SEQ ID NO: 699842 - DNA, 75 bp, synthetic construct
  source 1..75: mol_type = other DNA
tcccgcagaaggggaaaacaaggttgtaacctctgccactcttctacgttctggattccgtatgaatccagacag

SEQ ID NO: 699843 - DNA, 75 bp, synthetic construct
  source 1..75: mol_type = other DNA
ttcgtatgaatccggacaggattctgatgacagaaatcaggggagctgaggcatgggattttctgaaagcatcga

SEQ ID NO: 699844 - DNA, 75 bp, synthetic construct
  source 1..75: mol_type = other DNA
tggtttcaggacgatggcgtgtagttctttgattgaatcgggattgtggtcgagggatgcagtagagcggcagat

SEQ ID NO: 699845 - DNA, 75 bp, synthetic construct
  source 1..75: mol_type = other DNA
aattttaaagcagataaaacagttttgtggggctcatgacttgatatttattggtgatcacgattcgcacaagcc

SEQ ID NO: 699846 - DNA, 75 bp, synthetic construct
  source 1..75: mol_type = other DNA
cgatccctggtgagcgtgaaccgctggaaggtgtaaagcattctcagcgtggttcaaagatgcgaactccccatc

SEQ ID NO: 699847 - DNA, 75 bp, synthetic construct
  source 1..75: mol_type = other DNA
tctggtgttttctggaactgtgcaatgctggattgtcggttgaggatattaagcggcaggtgatggaaaatagtg

SEQ ID NO: 699848 - DNA, 75 bp, synthetic construct
  source 1..75: mol_type = other DNA
ttcgtgaagcatgtagtcttaatgatggtgttatttttataaaaaatgatcagatcgttccattaagttcggggc

SEQ ID NO: 699849 - DNA, 75 bp, synthetic construct
  source 1..75: mol_type = other DNA
gtcacggcactaatcaccacgccggtgatgtggatcatcagtgcgctgattaacattgtcatggccaacatgttt

SEQ ID NO: 699850 - DNA, 75 bp, synthetic construct
  source 1..75: mol_type = other DNA
gcaacggtgtacgtggtcaatctttccaacctaagcgatgaagcgcaagccgcgctaaaaagtgatgtcgaaagc

SEQ ID NO: 699851 - DNA, 75 bp, synthetic construct
  source 1..75: mol_type = other DNA
ttattttgacccgaaacgtggtcctgaaacgctaacggggtactgtaaacctgcggtagatcgttttactcatcg

SEQ ID NO: 699852 - DNA, 75 bp, synthetic construct
  source 1..75: mol_type = other DNA
ataaaaaactcaagggcgtggattgtattcagacactgtcccgtcttaatcgcacctatccgggcaaaagcagca

SEQ ID NO: 699853 - DNA, 75 bp, synthetic construct
  source 1..75: mol_type = other DNA
gagaaaaacttcactggcagatttagagaaaacatatcctgaatttgattttattattcataaacaccatcttga

SEQ ID NO: 699854 - DNA, 75 bp, synthetic construct
  source 1..75: mol_type = other DNA
gcaccgtttcgcggcgtacttccagcagggcaatatggagtctaacggtaagtatgttgaccgtaacggtaaggt

SEQ ID NO: 699855 - DNA, 75 bp, synthetic construct
  source 1..75: mol_type = other DNA
ctgggttggcggccgttactctttgtggtcagcgattggcctgtcgattgttctctccatcggctttgataactt

SEQ ID NO: 699856 - DNA, 75 bp, synthetic construct
  source 1..75: mol_type = other DNA
acacttcgatgaaatgaaagacgttacgatcgccgatctttttgctaaagacggcgatcgtttttctaagttctc

SEQ ID NO: 699857 - DNA, 75 bp, synthetic construct
  source 1..75: mol_type = other DNA
gttttcccttgaggatatcatcagcgatctgaacgtaccccgcctgaacacactgacagttgaggtgaagaatgc

SEQ ID NO: 699858 - DNA, 75 bp, synthetic construct
  source 1..75: mol_type = other DNA
cccataacccgctctctgatcatcaccagaaactgctgtctaacttctttgctcagaccgaagcgctggcgtttg

SEQ ID NO: 699859 - DNA, 75 bp, synthetic construct
  source 1..75: mol_type = other DNA
ctgcgtaaccgtagcaataccccgattctggttgatggcaaagatgtaatgccggaagtcaacgcggtgctggag

SEQ ID NO: 699860 - DNA, 75 bp, synthetic construct
  source 1..75: mol_type = other DNA
tgagttgtttggcgaagaaacgaccgatgcagacaagctggtatggcttgatggcgtagcggctaaagtttccga

SEQ ID NO: 699861 - DNA, 75 bp, synthetic construct
  source 1..75: mol_type = other DNA
ggtgccagtggatacagcatcacttctgccaccaacaacaataaattaagcggtactgcggtaatttataagtaa

SEQ ID NO: 699862 - DNA, 75 bp, synthetic construct
  source 1..75: mol_type = other DNA
cgatggcgcatctacccttgatgctctggaagcaaaactggctgaaaaagctgcggctgctggcgccagcggata

SEQ ID NO: 699863 - DNA, 75 bp, synthetic construct
  source 1..75: mol_type = other DNA
tgtggccgatatattggacttttctgataggcatccaacaataatatttggtggtgcgacgtttgaatcctgtac

SEQ ID NO: 699864 - DNA, 75 bp, synthetic construct
  source 1..75: mol_type = other DNA
aaggttttgaacggattgttgccggatgtccggtacccattgttggtaatgactccaacttattgatagtgtttt

SEQ ID NO: 699865 - DNA, 75 bp, synthetic construct
  source 1..75: mol_type = other DNA
acagttgcgcggtggcggcgcaggtttatatcggcagcgaatatgaacatcagtcgatcaaaaatattattcagc

SEQ ID NO: 699866 - DNA, 75 bp, synthetic construct
  source 1..75: mol_type = other DNA
tcgtttaccgtcatttcacacagaggcatcatcaaatgaaaatcagaaatattctcgctatctcccttgcaacat

SEQ ID NO: 699867 - DNA, 75 bp, synthetic construct
  source 1..75: mol_type = other DNA
gaccgcacggtgctggacgaccagcttcaggacaccatctggcagttcgaacacgccgacggcgtggtcgggcgc

SEQ ID NO: 699868 - DNA, 75 bp, synthetic construct
  source 1..75: mol_type = other DNA
gtggtcgggcgcatcaataacaaagagggcgacggttccaaatcggaaaagctcgccaacgcgctggaaaactcg

SEQ ID NO: 699869 - DNA, 75 bp, synthetic construct
  source 1..75: mol_type = other DNA
gccgcatcgtgccggagctggtttacagcccgcatgcatcgaacgccgcatttgaagataccggtataaaagcga

SEQ ID NO: 699870 - DNA, 75 bp, synthetic construct
  source 1..75: mol_type = other DNA
tgcaatatttatccgatccagctcgggcaaagggctttgcttatctgatgtttgatatgctaacggggaaaattg

SEQ ID NO: 699871 - DNA, 75 bp, synthetic construct
  source 1..75: mol_type = other DNA
cagtatgacgtctttatgaccaccagactcgcaggtgacagcactttcttcctgccatttaacaaaggcaccaaa

SEQ ID NO: 699872 - DNA, 75 bp, synthetic construct
  source 1..75: mol_type = other DNA
acgccaccgatatccagtcgcgcacctggggtacgcttggcgtactgcgccacggcctgaaaattcgcaacgccc

SEQ ID NO: 699873 - DNA, 75 bp, synthetic construct
  source 1..75: mol_type = other DNA
tgatacaaactagttatgaaatttttgatgaagacattaaggatgagcgatggagaggattaacttttcattgca

SEQ ID NO: 699874 - DNA, 75 bp, synthetic construct
  source 1..75: mol_type = other DNA
gtggtacgtttacccatttcagcgccagacattttggcgcgctggcctgtacgctggaacttggcaaagcgttgc

SEQ ID NO: 699875 - DNA, 75 bp, synthetic construct
  source 1..75: mol_type = other DNA
taccgtaacccatgatgtagagtatgtgttattccctaatccgttggtagcgttgggattacgcgcgggattaat

SEQ ID NO: 699876 - DNA, 75 bp, synthetic construct
  source 1..75: mol_type = other DNA
attggcatcaacactgcaatccttgcgcctggcggcgggagcgtcgggattggatttgccatccccagtaatatg

SEQ ID NO: 699877 - DNA, 75 bp, synthetic construct
  source 1..75: mol_type = other DNA
aaaggctatgtgctgaccaacaaccatgtgattaatcaggcacagaaaatcagtattcagctcaatgatgggcgc

SEQ ID NO: 699878 - DNA, 75 bp, synthetic construct
  source 1..75: mol_type = other DNA
ttccgaaaagcgtaactccggcgggctgccagattaaattcatcaagcaagaaattctggacttcttttataaac

SEQ ID NO: 699879 - DNA, 75 bp, synthetic construct
  source 1..75: mol_type = other DNA
caaatgtttttcggaaatgtcttttattcgccatcaccgaattgagttcatgatggctgggtttatgatttattt

SEQ ID NO: 699880 - DNA, 75 bp, synthetic construct
  source 1..75: mol_type = other DNA
gccagaagcctgttttatgctgttacagtcattgttatattccttattggatggggagcaggtattgttttcttt

SEQ ID NO: 699881 - DNA, 75 bp, synthetic construct
  source 1..75: mol_type = other DNA
ttgttatgcaatgtgttgttatgtttttgggttgttaatggtgttgctatggatgacagtactctgctcaggcac

SEQ ID NO: 699882 - DNA, 75 bp, synthetic construct
  source 1..75: mol_type = other DNA
tggaactgacgccattaacgccaccgcaaggcgcactggtgatttcagcggggatccacggtaatgagacggcac

SEQ ID NO: 699883 - DNA, 75 bp, synthetic construct
  source 1..75: mol_type = other DNA
gtcatcgtcgggtgatggctgaaaaagggatcaccgcaaaagcagagcaacgggcgataaaaatgttcgcttatg

SEQ ID NO: 699884 - DNA, 75 bp, synthetic construct
  source 1..75: mol_type = other DNA
aaaaatatttctactcaactggaaattgagtaccttcaaaataagataaaaaaagaagaagctattttttattgt

SEQ ID NO: 699885 - DNA, 75 bp, synthetic construct
  source 1..75: mol_type = other DNA
caattgcaatgaccatgtctgcaggttctgcaatggcttctcagggggatattcatttttttggtaatgtaacgg

SEQ ID NO: 699886 - DNA, 75 bp, synthetic construct
  source 1..75: mol_type = other DNA
cgattttcatcgtgctgcgctttggcgagcttatctatcgcgacaagctgtcgttagcgtttgccggtgacttct

SEQ ID NO: 699887 - DNA, 75 bp, synthetic construct
  source 1..75: mol_type = other DNA
tctctcttgatggatctattcagtcggagggcgatcaggtttcaatcggcattacccaaaaatcaccccgatcag

SEQ ID NO: 699888 - DNA, 75 bp, synthetic construct
  source 1..75: mol_type = other DNA
cgatggctgagcacttccgcgccgatccgacgtatgcggcggaattgcttgccgaagtccgccgcaagggtactc

SEQ ID NO: 699889 - DNA, 75 bp, synthetic construct
  source 1..75: mol_type = other DNA
acccgacagtggatgaaaccaccggctccgtcacgttgcgtgcaattttccccaacccgaatggtgacttgctgc

SEQ ID NO: 699890 - DNA, 75 bp, synthetic construct
  source 1..75: mol_type = other DNA
ttacgcctacttcccgacctgggaagaactgttgatttctattggttttgtggctattgagatttgcgcttatat

SEQ ID NO: 699891 - DNA, 75 bp, synthetic construct
  source 1..75: mol_type = other DNA
tgaaaagagcctattcgtcaagctgaccaacaccatcagtgtgttgctggcgattttcatcgtgctgcgctttgg

SEQ ID NO: 699892 - DNA, 75 bp, synthetic construct
  source 1..75: mol_type = other DNA
aggtgagctaacgccaaatggtattggcgctcagggtgggacggcacaggacgcgtatgtaattctgacaccagc

SEQ ID NO: 699893 - DNA, 75 bp, synthetic construct
  source 1..75: mol_type = other DNA
ggaaggtttcaaatttactgctcaactgaaaggtggtcaaaccccgggtgacttccagggggcagcggcttacgc

SEQ ID NO: 699894 - DNA, 75 bp, synthetic construct
  source 1..75: mol_type = other DNA
atgcagaaaaagttatttcagatggtttcaaatttactgctcaacttaaaggtggcaatactcctggtgacttcc

SEQ ID NO: 699895 - DNA, 75 bp, synthetic construct
  source 1..75: mol_type = other DNA
atgtttgcaagatgcgtttactctgacactgcgtgctttactgttggtgaattatatagcgttgatcttcttaac

SEQ ID NO: 699896 - DNA, 75 bp, synthetic construct
  source 1..75: mol_type = other DNA
caattgcaatgactatggttgcgggttcagcaatggcatctactggtgatgttcagttctttggtaacgtatctg

SEQ ID NO: 699897 - DNA, 75 bp, synthetic construct
  source 1..75: mol_type = other DNA
gggacttcagttcaccgcaaaattgaagggtggtaccactccgggtgacttccagacagcagctgcttacgcggt

SEQ ID NO: 699898 - DNA, 75 bp, synthetic construct
  source 1..75: mol_type = other DNA
ggaaaaaatcaccgacctgctgacggctgacagagcacgtgaacagaagggggcagaaataaatgcctggcgaag

SEQ ID NO: 699899 - DNA, 75 bp, synthetic construct
  source 1..75: mol_type = other DNA
atggcgttcggcgtttacccggatgtttcgctggcggatgcgcggaagaaaagggaagaggccagaaagctggta

SEQ ID NO: 699900 - DNA, 75 bp, synthetic construct
  source 1..75: mol_type = other DNA
ggttctaaaatgcgtagtcctcatcttgttcccttaagccgtcaggctctgaaagtgttagaagagataaaacat

SEQ ID NO: 699901 - DNA, 75 bp, synthetic construct
  source 1..75: mol_type = other DNA
acaaccctgctcaggagatggcaggagctattgctgtagccaaaagaatccacaggccagctttgccattcgaac

SEQ ID NO: 699902 - DNA, 75 bp, synthetic construct
  source 1..75: mol_type = other DNA
gctgcaatggtgggctgattttctggatgcgaaccgggagaagggaattacgccgtttgactatgcgaagaccta

SEQ ID NO: 699903 - DNA, 75 bp, synthetic construct
  source 1..75: mol_type = other DNA
ccaaccaaaaaaggtcggaagatcatgctaatcgtgtaaaaaagagcctggaggacaatatcttcccaacaattg

SEQ ID NO: 699904 - DNA, 75 bp, synthetic construct
  source 1..75: mol_type = other DNA
ggcgaaagagattattactttcgagaaggttgccagagagtggctcctaaccaaccaaaaaaggtcggaagatca

SEQ ID NO: 699905 - DNA, 75 bp, synthetic construct
  source 1..75: mol_type = other DNA
gacttcgaaaaagccatgtggacgatccctccggagcggaaacctattgacggggtcaagtactcgcatcgtggc

SEQ ID NO: 699906 - DNA, 75 bp, synthetic construct
  source 1..75: mol_type = other DNA
catcgtgcggctctggagcttaaccgcatacctgaattacttcaccgcattgatcattactccggcaggccgtta

SEQ ID NO: 699907 - DNA, 75 bp, synthetic construct
  source 1..75: mol_type = other DNA
tcgttgattgagtcgggattatggtcgagggatgcggtagagcggcagatgagtcaccaggagcgtagctctgtg

SEQ ID NO: 699908 - DNA, 75 bp, synthetic construct
  source 1..75: mol_type = other DNA
atgcacctgctgatcaaccccaatggttcaaaatactggcgactccaataccgttttgatggcaagcaaaaagtt

SEQ ID NO: 699909 - DNA, 75 bp, synthetic construct
  source 1..75: mol_type = other DNA
gacgaaagaagctattacctttgagtcggttgccagagcttggcatgcaactaacaagaaatggtcagaggatca

SEQ ID NO: 699910 - DNA, 75 bp, synthetic construct
  source 1..75: mol_type = other DNA
tattaatcttcattcgttccagtgaattgcgctttgcccgctggtctgagatcgatttcgatacggcaatgtgga

SEQ ID NO: 699911 - DNA, 75 bp, synthetic construct
  source 1..75: mol_type = other DNA
ttggcacttgggatttaccctgaaataacactggcggatgccagagcacgtcgtgacgacgcgcgtaagctgcta

SEQ ID NO: 699912 - DNA, 75 bp, synthetic construct
  source 1..75: mol_type = other DNA
cgcaaagctgatatctccgggcgctggaagtttgacggggaaaaagtcgttgatactctgaccgcggagaaagcg

SEQ ID NO: 699913 - DNA, 75 bp, synthetic construct
  source 1..75: mol_type = other DNA
cgtataaccagagtcttcaattacgtaaacagccatccaacactctggaaggtgggtatggtggctggcgcgaaa

SEQ ID NO: 699914 - DNA, 75 bp, synthetic construct
  source 1..75: mol_type = other DNA
tgttcagctcagtagcgccaccaacagtgattctgaaacgcttgcggcaacgccaaaggcggtaaaggcagcata

SEQ ID NO: 699915 - DNA, 75 bp, synthetic construct
  source 1..75: mol_type = other DNA
caggcgatgttcactaaagggatggaaatccacattcgccagcgcaccatgaagaaggacctggaatcgctgagc

SEQ ID NO: 699916 - DNA, 75 bp, synthetic construct
  source 1..75: mol_type = other DNA
gagtgttgcagaagtgcctgattcggaggaaaaccgcaaggcagacagctcagggcgctggaagtttgacgggga

SEQ ID NO: 699917 - DNA, 75 bp, synthetic construct
  source 1..75: mol_type = other DNA
ataatcacgagtatcagtaaggatgtgtcgatgctgtggccagtggggcagagtgtggtggaggttgaggataca

SEQ ID NO: 699918 - DNA, 75 bp, synthetic construct
  source 1..75: mol_type = other DNA
gcgttttgctcgctggtcagaaatcgattttgaaacgtcaatgtggactatcccgcccgagcgagagcctattcc

SEQ ID NO: 699919 - DNA, 75 bp, synthetic construct
  source 1..75: mol_type = other DNA
caatcccaggtgagcgtgagcaactggaaggagtcaagcattctcagcgtggctcgatgaaccgccccgggaatc

SEQ ID NO: 699920 - DNA, 75 bp, synthetic construct
  source 1..75: mol_type = other DNA
cgatccccggtgagcgtgaagcgctggacggtgttaaacattcacagcgtggttcaaagatgcggaagccccatc

SEQ ID NO: 699921 - DNA, 75 bp, synthetic construct
  source 1..75: mol_type = other DNA
tatgacctggctaacgggaaatataccgcacaggacgccaccacagcgcgaaaaggtcttgtccagctcagtagt

SEQ ID NO: 699922 - DNA, 75 bp, synthetic construct
  source 1..75: mol_type = other DNA
tggggggggggggaatcggttgttttgttttattaaggatgcaaaattcttctttttgtcaccgacaattggtgc

SEQ ID NO: 699923 - DNA, 75 bp, synthetic construct
  source 1..75: mol_type = other DNA
taatggttctggcgttctgtttttcatcaaaaattacactggcgatattctgaatttcgaaacggcagtcgagat

SEQ ID NO: 699924 - DNA, 75 bp, synthetic construct
  source 1..75: mol_type = other DNA
agcctgtccatgaacgtctatgcgaaataccagtggcagaactatggcgcagcgaacgaaaacgagtgggacggt

SEQ ID NO: 699925 - DNA, 75 bp, synthetic construct
  source 1..75: mol_type = other DNA
aggggatgacagcggtaacgcaatcaacggtattaagacccgtaccaataactccatcgcttccagccatattct

SEQ ID NO: 699926 - DNA, 75 bp, synthetic construct
  source 1..75: mol_type = other DNA
ttcgcgaacaactacatttacgacatgggtcgtaataaagatggtcgccagagcacctggtacatgggtctgggt

SEQ ID NO: 699927 - DNA, 75 bp, synthetic construct
  source 1..75: mol_type = other DNA
gcagcccctgataatcacctgacccacgaagagcgctctgctttgcagaaactctggggcggtttggaggcagga

SEQ ID NO: 699928 - DNA, 75 bp, synthetic construct
  source 1..75: mol_type = other DNA
ttgatacccggcatctttttgatgccaacacagtctggctgggcctgaaacgaggacaacttcaacgcaactatg

SEQ ID NO: 699929 - DNA, 75 bp, synthetic construct
  source 1..75: mol_type = other DNA
caccctttagcttatgtcgtgccgttaacactggtggagatagcgaagtggccgctaatcacatatcggcaggga

SEQ ID NO: 699930 - DNA, 75 bp, synthetic construct
  source 1..75: mol_type = other DNA
tttttccgcgctgcagcgcgatgtcatccgtatggtggcgtttgtggcgatggtgggggaccacatagccactgc

SEQ ID NO: 699931 - DNA, 75 bp, synthetic construct
  source 1..75: mol_type = other DNA
gctgacccgaatattattttctggcatcactggcctgatgaacgtatgcatcatctggccgaacagggagctggt

SEQ ID NO: 699932 - DNA, 75 bp, synthetic construct
  source 1..75: mol_type = other DNA
ctgtgccggtgcgaccgcctccgagctacccggtgataccacaccgtttgcacgggccatggggtttgggcagcg

SEQ ID NO: 699933 - DNA, 75 bp, synthetic construct
  source 1..75: mol_type = other DNA
cattgctgacaattacccaacaagtgcatgcttcagcagctattgtagcctctaccgccgcgactacggctgctg

SEQ ID NO: 699934 - DNA, 75 bp, synthetic construct
  source 1..75: mol_type = other DNA
aaacgttctgacgaggctgtaggttcgcttggatgtacggtatatggggatagtgagagtagagaaattccatgg

SEQ ID NO: 699935 - DNA, 75 bp, synthetic construct
  source 1..75: mol_type = other DNA
cgggttactggctggccttccgggatgtcggccttgcgtggtggcaactgaatatcctgttcacctttgctgttg

SEQ ID NO: 699936 - DNA, 75 bp, synthetic construct
  source 1..75: mol_type = other DNA
atgacacgatattggaatttaattgccctattattctctgtgatatctatgtcatccattgctgatgatacaacg

SEQ ID NO: 699937 - DNA, 75 bp, synthetic construct
  source 1..75: mol_type = other DNA
aaagccctggcatccggtaagaaaaaaacacgcgaaacccgtaatgatgaggccacccggttattgctgcagtac

SEQ ID NO: 699938 - DNA, 75 bp, synthetic construct
  source 1..75: mol_type = other DNA
acggggatgtgttattcagtcggcagtgctacgcgccaggggagcagttcgccgacccggtttatcggccagtcg

SEQ ID NO: 699939 - DNA, 75 bp, synthetic construct
  source 1..75: mol_type = other DNA
caccgaaaggcatgatgctgggcggggttattggcggtattaccgcggccgtctatggtctgggtaaagcctggt

SEQ ID NO: 699940 - DNA, 75 bp, synthetic construct
  source 1..75: mol_type = other DNA
gtatgcgtacggttataaaaacaaaaaaccggtccgcgtgtcgccgggacagcttgatgcggaatcttacggcgt

SEQ ID NO: 699941 - DNA, 75 bp, synthetic construct
  source 1..75: mol_type = other DNA
acattctgtaccaccggaaaactgaacttcaaatcttttaccgcctcgctcctttctgatctggcaaaaatcatg

SEQ ID NO: 699942 - DNA, 75 bp, synthetic construct
  source 1..75: mol_type = other DNA
agggtaactggaaaaacggtgccatgcgggcgtttcagaatttcacggcagatgcggataatgcggcaggcactg

SEQ ID NO: 699943 - DNA, 75 bp, synthetic construct
  source 1..75: mol_type = other DNA
gccgttaattacttaccgacaggggattacgtgtcacgaacggtgcaatagtgatccacacccaacgcctgaaat

SEQ ID NO: 699944 - DNA, 75 bp, synthetic construct
  source 1..75: mol_type = other DNA
gcaggggcggcaggagtgggagcgccgccttgcggctctgattacacgacgacgggggcatcccgggtaccggct

SEQ ID NO: 699945 - DNA, 75 bp, synthetic construct
  source 1..75: mol_type = other DNA
gatctgttgaggggttagcgctggctatttttgataacaacagacaaagtattagtaatggtataataagcacca

SEQ ID NO: 699946 - DNA, 75 bp, synthetic construct
  source 1..75: mol_type = other DNA
gtggatgcagataatacggcagaaacagcagaacaggtgttctcgtcagccttcagcaacatgggaaatggcctg

SEQ ID NO: 699947 - DNA, 75 bp, synthetic construct
  source 1..75: mol_type = other DNA
ccggtgcggggctgcaggaattacagcgtattcagcaacagatccgacaggccagaaacagtggcgggattggtc

SEQ ID NO: 699948 - DNA, 75 bp, synthetic construct
  source 1..75: mol_type = other DNA
tggcgttctcactattgcaacgacgcatactcaggcacgttatagcttgcctgaggtcattaaagcttttcgcga

SEQ ID NO: 699949 - DNA, 75 bp, synthetic construct
  source 1..75: mol_type = other DNA
cgagagtgcttcgccaaaaacgacagatgctctgaaagcattctggcaacgccagacaacaccgaaagctatcct

SEQ ID NO: 699950 - DNA, 75 bp, synthetic construct
  source 1..75: mol_type = other DNA
cctccgggaatccaatctttatgggattcagctaaggaaaaaataaagccaagtgcacctgacaaatcaccggag

SEQ ID NO: 699951 - DNA, 75 bp, synthetic construct
  source 1..75: mol_type = other DNA
tgtttggtcaagtcttcctacaaatttacggttcgactgcgaccaaagaagatgctattcaggtatttaaggact

SEQ ID NO: 699952 - DNA, 75 bp, synthetic construct
  source 1..75: mol_type = other DNA
tcggcactggcgagtgtccgccggagtgggacgctgattactggttcgatggggcgaactaccttagcgaactga

SEQ ID NO: 699953 - DNA, 75 bp, synthetic construct
  source 1..75: mol_type = other DNA
gcaggtttcttgatagcaacagcactatcctcaatgttgctgtctcacgcgctaaagatagttttctggtatttg

SEQ ID NO: 699954 - DNA, 75 bp, synthetic construct
  source 1..75: mol_type = other DNA
gaggcatgaagccaaatggagggagccgtcataaccctcttgaagctgaaacaatagcagcatggctggtggcac

SEQ ID NO: 699955 - DNA, 75 bp, synthetic construct
  source 1..75: mol_type = other DNA
actagtatacatttttactcgcggattaattggcatttctatcctgtcatggctagcatacatatgcctcgggaa

SEQ ID NO: 699956 - DNA, 75 bp, synthetic construct
  source 1..75: mol_type = other DNA
gcactgcaggaaaaaattcagcgagcaaagaaattcccgtggacgaacgcgtccaccacggtggaatacgatcag

SEQ ID NO: 699957 - DNA, 75 bp, synthetic construct
  source 1..75: mol_type = other DNA
gaaccgacaactgaatgagaatcgccgttactggcaacagcttgaaattgctcagggtgactggaaaaacggagt

SEQ ID NO: 699958 - DNA, 75 bp, synthetic construct
  source 1..75: mol_type = other DNA
gatcaacactatgctggatagcgctgtcgaaacgttaaatgctggcgaacgaccggtgatacacagtgacagagg

SEQ ID NO: 699959 - DNA, 75 bp, synthetic construct
  source 1..75: mol_type = other DNA
gccgcatcacccgttcacctgtccggtggagtatttagagaaatacactgatttttactacgaactgggtgagaa

SEQ ID NO: 699960 - DNA, 75 bp, synthetic construct
  source 1..75: mol_type = other DNA
gtccggcccgtggaccaacaacgtcgcgccgggcaaaaacatttccaccatggggcgctactttaaggatgcggg

SEQ ID NO: 699961 - DNA, 75 bp, synthetic construct
  source 1..75: mol_type = other DNA
gctcaatgtcccgcaaaggatgttcacctgataatgcggcatgcgaaggctttttcggcagactgaaaacggaaa

SEQ ID NO: 699962 - DNA, 75 bp, synthetic construct
  source 1..75: mol_type = other DNA
ataccgctcaccctaccatgtatttctacaatccaggcgattgctacccgcaggatattgccacaataccggctg

SEQ ID NO: 699963 - DNA, 75 bp, synthetic construct
  source 1..75: mol_type = other DNA
gagaaactcattgcacaatcgccatcacgtttaacgttatgcaccgctttccagatataaaaaacccgctcgatg

SEQ ID NO: 699964 - DNA, 75 bp, synthetic construct
  source 1..75: mol_type = other DNA
taatagcaggtcttgatgatgatgatgttgatgatgattacataaatggattgattgaaatagaatatgcaagga

SEQ ID NO: 699965 - DNA, 75 bp, synthetic construct
  source 1..75: mol_type = other DNA
tcagcagcgccactaacagcacgtcagaaacgcaggcagccacaccaaaggcagtgaaggaggtatatgaccttg

SEQ ID NO: 699966 - DNA, 75 bp, synthetic construct
  source 1..75: mol_type = other DNA
aggctctatatcagcaaattaataatgaaccgccagactctggaatggtaagggatctcatcgcggtgactgata

SEQ ID NO: 699967 - DNA, 75 bp, synthetic construct
  source 1..75: mol_type = other DNA
gtcttatccagttacctttactactgcttccttcacctgcatcaatctaaggtgtgggaaccggtagcaacagga

SEQ ID NO: 699968 - DNA, 75 bp, synthetic construct
  source 1..75: mol_type = other DNA
tcaagacgaacttttctgatgctgatttctggattgtacgtcgaggctctttaaaaactgttggcgaaccttcct

SEQ ID NO: 699969 - DNA, 75 bp, synthetic construct
  source 1..75: mol_type = other DNA
ttgatctggggattgatgccgctgattttaaagagcagcttccgcgtattaaggcacagctgaccggggcggccc

SEQ ID NO: 699970 - DNA, 75 bp, synthetic construct
  source 1..75: mol_type = other DNA
ggaagatcaaacagggggacggtggatccgtgcacatgaaccagtaatgctgatgaaacgattaatcagtaacct

SEQ ID NO: 699971 - DNA, 75 bp, synthetic construct
  source 1..75: mol_type = other DNA
agagtggagcacggctatcgtgaacagcttccgcgaagcgggatcgcaagcctccgggtttgcgcaggagttgat

SEQ ID NO: 699972 - DNA, 75 bp, synthetic construct
  source 1..75: mol_type = other DNA
cgacattaatgctgtttttgtctctgaacgttaaggtagtagtcatcatgaacagtgctgccagtggcagcaggg

SEQ ID NO: 699973 - DNA, 75 bp, synthetic construct
  source 1..75: mol_type = other DNA
gctgcccggacagccatgtctgcactggcagaggaaaccggtcggcgtactgcggatattgacagtaacctcaat

SEQ ID NO: 699974 - DNA, 75 bp, synthetic construct
  source 1..75: mol_type = other DNA
tcaccctggcaaaccgtgccggatggattgataccttactgtccccgaaggggatggtcaccggcggggttatcg

SEQ ID NO: 699975 - DNA, 75 bp, synthetic construct
  source 1..75: mol_type = other DNA
gatggcggctacacgatgaacatcgcacagcttgccagaatgaaggatgaaaagctggtagacagctacacaact

SEQ ID NO: 699976 - DNA, 75 bp, synthetic construct
  source 1..75: mol_type = other DNA
gatggcggctacacgatgaacatcgcacagcttgccagaatgaaagatgaaaagctggtggacagctacacaact

SEQ ID NO: 699977 - DNA, 75 bp, synthetic construct
  source 1..75: mol_type = other DNA
gatagcagtttcagaggctattcaggccaatattgagttgctatccgagagcaggcgtgagtcactgatcgacag

SEQ ID NO: 699978 - DNA, 75 bp, synthetic construct
  source 1..75: mol_type = other DNA
gtaatacatctggcacaggcctttgggaagatattgcggggcgaaaaggtaatctggatacagtagcaggaatcc

SEQ ID NO: 699979 - DNA, 75 bp, synthetic construct
  source 1..75: mol_type = other DNA
caacggtctggtgattgtcgaaatgctgccgccaattgacgtcagtcagtatggcaaagatcaggttcgtgagtt

SEQ ID NO: 699980 - DNA, 75 bp, synthetic construct
  source 1..75: mol_type = other DNA
tcaacctctttacctgcgtaaaagtattttactggtaaagaaaggcaatcctaaaaacattcaagggattgacga

SEQ ID NO: 699981 - DNA, 75 bp, synthetic construct
  source 1..75: mol_type = other DNA
tgggctaaaaatggcggtaatggctggggatttgttccagatgtttttctggcctatctggcggagcgcggcgtc

SEQ ID NO: 699982 - DNA, 75 bp, synthetic construct
  source 1..75: mol_type = other DNA
gtaaaacaggggctaagctcgccattccgctgacgctaacgattgacgcgctcaatatctcattggctgatatac

SEQ ID NO: 699983 - DNA, 75 bp, synthetic construct
  source 1..75: mol_type = other DNA
tttaccatgcagccgaacatctcccaatctggctgaggctggcaatggatttggctgtcgttacagggcagagag

SEQ ID NO: 699984 - DNA, 75 bp, synthetic construct
  source 1..75: mol_type = other DNA
aaatcagattcaatggcggcgcggtatagggacagccgtggacgggaatgggacaaaattgaaatcgacaaatga

SEQ ID NO: 699985 - DNA, 75 bp, synthetic construct
  source 1..75: mol_type = other DNA
ttaccttcccgaaagagggaatagcgccaggggtgcaggagactgccgatgccgtcgctcatctcattgagttgg

SEQ ID NO: 699986 - DNA, 75 bp, synthetic construct
  source 1..75: mol_type = other DNA
ttatctcgctcggtggtcgcaccattgttgatgccacagggtctgagtctatcggacgagatgcgcaggcattac

SEQ ID NO: 699987 - DNA, 75 bp, synthetic construct
  source 1..75: mol_type = other DNA
ttagaaaatcaagaaaatgctgatgtatggatcacatgggctgactgggctgccagtaatccgggtattggtgat

SEQ ID NO: 699988 - DNA, 75 bp, synthetic construct
  source 1..75: mol_type = other DNA
gaccgtgccgggggctgacgaggaaagtgatgatgaactgcgcgagcgttgccgcaatcagttcaatctggtggg

SEQ ID NO: 699989 - DNA, 75 bp, synthetic construct
  source 1..75: mol_type = other DNA
gaacgtcacggcaaaacctgccagcgccgcagaaggggtgatccggtttgttaaggaagatgccagagcggtggt

SEQ ID NO: 699990 - DNA, 75 bp, synthetic construct
  source 1..75: mol_type = other DNA
gtgttcgcaatcagtttaatcttgccggcgcttatcacacagatgctgtttaccggggattaattgccggcgttg

SEQ ID NO: 699991 - DNA, 75 bp, synthetic construct
  source 1..75: mol_type = other DNA
ccattggttttgataactttgttgaactgctttccggcgcacacgccatggacaagcacttctccaccacgccgg

SEQ ID NO: 699992 - DNA, 75 bp, synthetic construct
  source 1..75: mol_type = other DNA
atcaacacgctgggacatcacgggcacggtgatgatatgcagtgttatcccatgccggaaacgcttcacgatctg

SEQ ID NO: 699993 - DNA, 75 bp, synthetic construct
  source 1..75: mol_type = other DNA
tgagcatgaagcaccgagggggccaggaacagccaatgcctttttattactggacagtggggtggcatcagcgcc

SEQ ID NO: 699994 - DNA, 75 bp, synthetic construct
  source 1..75: mol_type = other DNA
ggtaatggcgcagatgttctgatggagcgtgcattgacctgggcgcgtcaggaacgtgcgactctgcgtaaaaca

SEQ ID NO: 699995 - DNA, 75 bp, synthetic construct
  source 1..75: mol_type = other DNA
gggagcggcgacaggtcgatacgccagtcagtcatatcgatttactgccgacaatgatggcgctggcagatattg

SEQ ID NO: 699996 - DNA, 75 bp, synthetic construct
  source 1..75: mol_type = other DNA
tgttcgtaaagatgcgaacagcgatattcgtaaatttgccgaatggctcaattctgaggaggcatcaccagtttt

SEQ ID NO: 699997 - DNA, 75 bp, synthetic construct
  source 1..75: mol_type = other DNA
agacttcgtcagtcaggtatggttatagtcacccgggaagttgaggtatcagactccctgaccggaaccaccaga

SEQ ID NO: 699998 - DNA, 75 bp, synthetic construct
  source 1..75: mol_type = other DNA
aaccaccagactgagttcctgctgtaaagactcccgtccagtaaccaagaatgacatcatttggattcacttcac

SEQ ID NO: 699999 - DNA, 75 bp, synthetic construct
  source 1..75: mol_type = other DNA
ggacgtttttgttcccgcacgtggccgatacgcttggcgcgttgcaggctaaaggcctgccgctaggcctggtca

SEQ ID NO: 700000 - DNA, 75 bp, synthetic construct
  source 1..75: mol_type = other DNA
ttactggctgctgttaaccagacactggtgagttttgagcatccgctgactgatggcgacgaagtggcgttcttc

SEQ ID NO: 700001 - DNA, 75 bp, synthetic construct
  source 1..75: mol_type = other DNA
gattgccagcgcagtgatggccagcattttcattgcgccagccgcgtttgcttttaaagagtacccggcaggcga

SEQ ID NO: 700002 - DNA, 75 bp, synthetic construct
  source 1..75: mol_type = other DNA
atgacgcaaaaccgggaattatttcaggtctggttacagaaattagcgcagtggcatcagaccactacgccttat

SEQ ID NO: 700003 - DNA, 75 bp, synthetic construct
  source 1..75: mol_type = other DNA
cccgtgtgcgtctctacaacttcgaataagattaatcttaatcgactgcacaatggcttggttattgtcgaaatg

SEQ ID NO: 700004 - DNA, 75 bp, synthetic construct
  source 1..75: mol_type = other DNA
tctttcccggcgttcccgccagtattcgaaccagataaacgccctgtcccgtagcgggcaaagttcccttcgtgc

SEQ ID NO: 700005 - DNA, 75 bp, synthetic construct
  source 1..75: mol_type = other DNA
acattgcaaaatatggcgacacgtcccagcgtgtggattttgttagtcgccatcctcgtcatgctagtctggctg

SEQ ID NO: 700006 - DNA, 75 bp, synthetic construct
  source 1..75: mol_type = other DNA
atgatacaacctatttccggccctcctcctgggcaaccaccaggtcagggagataacctgccgtctggcgcgggc

SEQ ID NO: 700007 - DNA, 75 bp, synthetic construct
  source 1..75: mol_type = other DNA
gggatatcgcgaaggtaaggcagtacatgtttcgccaggggcgttagatgctgaagcttatggtgtgaagtcgac

SEQ ID NO: 700008 - DNA, 75 bp, synthetic construct
  source 1..75: mol_type = other DNA
ggtatcgtgatgctggctaacaaaaactatcccaatccagcgagagttaccgccgcctggcagattctcaacact

SEQ ID NO: 700009 - DNA, 75 bp, synthetic construct
  source 1..75: mol_type = other DNA
tggctttaatgccggcattaagcctgtcattattttctgccggggcgtatgccagtggttattccgttacacctg

SEQ ID NO: 700010 - DNA, 75 bp, synthetic construct
  source 1..75: mol_type = other DNA
ggcaccattgcggaagtagtgaatcacttcaaaaaacgccgtatttccatctggatgttcccggaaggaacccgc

SEQ ID NO: 700011 - DNA, 75 bp, synthetic construct
  source 1..75: mol_type = other DNA
ctgctggtttctttggtgccagtctgctaaccctgttacgtcacgccaccatgtttagcagcgtgctggcgagac

SEQ ID NO: 700012 - DNA, 75 bp, synthetic construct
  source 1..75: mol_type = other DNA
atgacacagaatcgggctgagatgggtttttctgcgttcctggggaaaatgggcatcagtatgaatgacagggcg

SEQ ID NO: 700013 - DNA, 75 bp, synthetic construct
  source 1..75: mol_type = other DNA
cataaaggtggcaaacagcggcccctttgaagaaatcaagaacgagatgcgccgggtgcttaactggcacgacat

SEQ ID NO: 700014 - DNA, 75 bp, synthetic construct
  source 1..75: mol_type = other DNA
cgttttaactaaagaaaacaatgagataaatgtttctatcctgtctgctgataagtgcgactggactctcaaccg

SEQ ID NO: 700015 - DNA, 75 bp, synthetic construct
  source 1..75: mol_type = other DNA
actggtgaagaggatgaacaatatcaagcgccggaagtagtacaggattttgcaccgggcactattcaggaattg

SEQ ID NO: 700016 - DNA, 75 bp, synthetic construct
  source 1..75: mol_type = other DNA
gtcaggttatcactggcagcattaacgccgcgatcaagggatctgcatcacgtttatacaatcaagggcgacacc

SEQ ID NO: 700017 - DNA, 75 bp, synthetic construct
  source 1..75: mol_type = other DNA
tgcaaccgaagtggctgcggatttcccaaccgttgaagcgttacgccagcacctggctgcgcagagcgatcgctg

SEQ ID NO: 700018 - DNA, 75 bp, synthetic construct
  source 1..75: mol_type = other DNA
ggaaacccccggggcaacacctcataagcgctaacttaaggggtgaaccatctgaagaacgcgacgcctcggtgc

SEQ ID NO: 700019 - DNA, 75 bp, synthetic construct
  source 1..75: mol_type = other DNA
ttcactagcatagcaatgggtcttggcgtgttcaatcagggcttaactggcgatactagccaaataaattacagc

SEQ ID NO: 700020 - DNA, 75 bp, synthetic construct
  source 1..75: mol_type = other DNA
tttatgttgtcgaacagaagggggaaaaagatgagatcctctccgaattaccagatattaatttttcccgccttt

SEQ ID NO: 700021 - DNA, 75 bp, synthetic construct
  source 1..75: mol_type = other DNA
atgtgctttataaatctgcgatccgtagcagacaccaaaaatacacagacacggagaatcgctatatttacttat

SEQ ID NO: 700022 - DNA, 75 bp, synthetic construct
  source 1..75: mol_type = other DNA
ggatgaacaggcatcaactcatgaaaaagccggagcaattggcagcactgccggcgcctggctcggcggtgctgt

SEQ ID NO: 700023 - DNA, 75 bp, synthetic construct
  source 1..75: mol_type = other DNA
gcgcatcggaaagattaacttccttgaatgcttaaagttgatggaaaaagagcgcgtgatgggtggtgatgcgtt

SEQ ID NO: 700024 - DNA, 75 bp, synthetic construct
  source 1..75: mol_type = other DNA
tggggtgtaattaagtggcttattagactactttattggatcactcgcgcagttgacttctttgaagggggagat

SEQ ID NO: 700025 - DNA, 75 bp, synthetic construct
  source 1..75: mol_type = other DNA
cgtggatatctcgcttagcgtggctgcttacggtcatttatagcgccgtaccgctggcgtatctgtgcggtatct

SEQ ID NO: 700026 - DNA, 75 bp, synthetic construct
  source 1..75: mol_type = other DNA
aaccgctgggtgcctggctggatgtgtgcaccacgcccacagacggatgccactgaacgcaccgataacctggct

SEQ ID NO: 700027 - DNA, 75 bp, synthetic construct
  source 1..75: mol_type = other DNA
gaacagattgccggattccgcgcaatggcgcaggaaggcaaaacgcctgcacaaatcggtgatttgctgggctat

SEQ ID NO: 700028 - DNA, 75 bp, synthetic construct
  source 1..75: mol_type = other DNA
aggccgtggacgtaaggccgagcagccggagcctcagccgcaaccgccggaaggtgacgattacgggttttcaga

SEQ ID NO: 700029 - DNA, 75 bp, synthetic construct
  source 1..75: mol_type = other DNA
gtcttccgaacgcacgctggcagtccaggccgcgctgataaagcagcccgaaaaaacagtggcactgatggtctg

SEQ ID NO: 700030 - DNA, 75 bp, synthetic construct
  source 1..75: mol_type = other DNA
gcgctcgatgctgccctgctggaaaaactccaggctgtcgctgaacaccttcgggaagctgaaggctgggaatgg

SEQ ID NO: 700031 - DNA, 75 bp, synthetic construct
  source 1..75: mol_type = other DNA
ctgtgttcttcccctgccatccgatgcggggcatcgtctgttcccgtccgtgccttttcgtgaaggtgagcggcg

SEQ ID NO: 700032 - DNA, 75 bp, synthetic construct
  source 1..75: mol_type = other DNA
ctgggaaaagatccggaagtccgttacatccccaacgggggcgcagtggcaaacctgcaggtggccacatcagaa

SEQ ID NO: 700033 - DNA, 75 bp, synthetic construct
  source 1..75: mol_type = other DNA
tgatccggaagtccgttacatccccaacgggggcgcagtggcaaacctgcaggtggctacgtcagaaagctggcg

SEQ ID NO: 700034 - DNA, 75 bp, synthetic construct
  source 1..75: mol_type = other DNA
atctgcaaaaacgcaggaaaccgtcctgtctgccctgctggcgcagacggaggaagtgagcgtgccgctggcctc

SEQ ID NO: 700035 - DNA, 75 bp, synthetic construct
  source 1..75: mol_type = other DNA
gaatgaggccagactgtccggtgccgcgcgggacgcggagaaaatgaagaaaggcgatgcggctgaacatgcaga

SEQ ID NO: 700036 - DNA, 75 bp, synthetic construct
  source 1..75: mol_type = other DNA
aggatggggcggtaaaccggaagtgcagaccattcgtcgtctggtgaccgaaagtgaagtggcggtggcggggaa

SEQ ID NO: 700037 - DNA, 75 bp, synthetic construct
  source 1..75: mol_type = other DNA
atcggttttcacatgcgtgactggtggcagccgacaaaagcaaacttcttcggacacctgaaaaagccgcagatt

SEQ ID NO: 700038 - DNA, 75 bp, synthetic construct
  source 1..75: mol_type = other DNA
tctgaacgactgactgtgacaaccgctccgtcctgtgcggggcatcaccggagagatgaggatgagcgaatattt

SEQ ID NO: 700039 - DNA, 75 bp, synthetic construct
  source 1..75: mol_type = other DNA
tggcatggacactctgtctgaatgtatttggcagtggagcgtacagcaatcccgccagaatccgcctggaatgtg

SEQ ID NO: 700040 - DNA, 75 bp, synthetic construct
  source 1..75: mol_type = other DNA
cgctgggtgcctgactggatgtgtgcaccacgtccacaggcagagacggaagccacggaatgccgtaacaaccag

SEQ ID NO: 700041 - DNA, 75 bp, synthetic construct
  source 1..75: mol_type = other DNA
actgattaagtcaccgctgaatgtgcgcacggtgccgtattccgcagagtccgtcagcgaactggcggagtccat

SEQ ID NO: 700042 - DNA, 75 bp, synthetic construct
  source 1..75: mol_type = other DNA
agctggcgtgacaaacagacgggggagatgcgggagcagacggaatggcaccgcgtggtgctgttcggcaagctc

SEQ ID NO: 700043 - DNA, 75 bp, synthetic construct
  source 1..75: mol_type = other DNA
ggggctgatgctttctcgcctgacgaactgcgcaccgatttgttcagcgatgacggggacggttatgtcgaccgc

SEQ ID NO: 700044 - DNA, 75 bp, synthetic construct
  source 1..75: mol_type = other DNA
atgtcagtagtaaagtctgaaccagacaccacccgcaaagcaagccgtaaatctgcaaaaacgcaggaaacagtc

SEQ ID NO: 700045 - DNA, 75 bp, synthetic construct
  source 1..75: mol_type = other DNA
ccgccacgttcagcgaatgctgaaactggccgaccttgccccagtgatccttgatgcgctggcagaagaccacat

SEQ ID NO: 700046 - DNA, 75 bp, synthetic construct
  source 1..75: mol_type = other DNA
ccgccacgttcagcgaatgctgaaactggccgaccttgccccagtgatcctagatgcgctggcagaagacctcat

SEQ ID NO: 700047 - DNA, 75 bp, synthetic construct
  source 1..75: mol_type = other DNA
ccgccacgttcagcgaatgctgaaactggctgaccttgccccagtgatcctcgatgcgctggcagaagaccccat

SEQ ID NO: 700048 - DNA, 75 bp, synthetic construct
  source 1..75: mol_type = other DNA
gcgttacgacgcgctggaaaaccagtgtgaggaatctgacctgctggaagcagaaatgaagctgatgcgctgcat

SEQ ID NO: 700049 - DNA, 75 bp, synthetic construct
  source 1..75: mol_type = other DNA
tcgccgactggcagcactcaatatgctggcagagcgtggcatcattccggctgactggcctgtccgcgtgaaaat

SEQ ID NO: 700050 - DNA, 75 bp, synthetic construct
  source 1..75: mol_type = other DNA
tcgtctggtgaccgaaagtgaaggaagaacgcctgaacgaactgatgacgcgttacgacgcgctggaaaaccagt

SEQ ID NO: 700051 - DNA, 75 bp, synthetic construct
  source 1..75: mol_type = other DNA
atgtgagcattatgcgctgaccagcgatgcgccctcggggaaggaaggtgccgcattcatggcgatgatggcaga

SEQ ID NO: 700052 - DNA, 75 bp, synthetic construct
  source 1..75: mol_type = other DNA
cggtatcacccgttacgtcactgaaattcttgttaagaccacgggcaccgtgcagatgctgggacgtgcaccaca

SEQ ID NO: 700053 - DNA, 75 bp, synthetic construct
  source 1..75: mol_type = other DNA
gaagcggtgctgacggaggcggaagaagaacgcctgaacgaactgatggcacgttacgacgcgctggaaaaccag

SEQ ID NO: 700054 - DNA, 75 bp, synthetic construct
  source 1..75: mol_type = other DNA
gtcgcttgcttatgcttacaaagagcttacgcctgagattatgcgcggtcatatcgctgtattcgagcgatatgg

SEQ ID NO: 700055 - DNA, 75 bp, synthetic construct
  source 1..75: mol_type = other DNA
gtcaacaataaccattgtgcttatattatgaaccactccttaaaaccctggaacacatttggcattgatcataat

SEQ ID NO: 700056 - DNA, 75 bp, synthetic construct
  source 1..75: mol_type = other DNA
cttcagtgggtgtatgccatcgatgtgctgattgaaacacagggcgaggtctgcctccttcctcttcctggcgat

SEQ ID NO: 700057 - DNA, 75 bp, synthetic construct
  source 1..75: mol_type = other DNA
cttcagtggttgtatgccatcgatgtgctgattgaaacacagggcgaggtctgcctccttccccttcctggggat

SEQ ID NO: 700058 - DNA, 75 bp, synthetic construct
  source 1..75: mol_type = other DNA
ggcgggtagcgtctggtcgccaaaagttttgttacaggataaagctctgctgtggttcacctgctctgcctttct

SEQ ID NO: 700059 - DNA, 75 bp, synthetic construct
  source 1..75: mol_type = other DNA
tggctggcagctatctgttccgcgttccccatgcttttcattcaaatttgggtaaagcgcagcgagaaaatcatc

SEQ ID NO: 700060 - DNA, 75 bp, synthetic construct
  source 1..75: mol_type = other DNA
tttttccggcaacagcctgctattgtggggtatgtcagctgcggtatttactgtcggtgaaatcatttatgcgcc

SEQ ID NO: 700061 - DNA, 75 bp, synthetic construct
  source 1..75: mol_type = other DNA
atcattgtcaccaccgcgcttattccaggcaaaccagcgccgaagctaaggaaggtgcgaataagtggggaaatt

SEQ ID NO: 700062 - DNA, 75 bp, synthetic construct
  source 1..75: mol_type = other DNA
tcgcggtgcttatagccagcattaatattttcggtggcttcaccgtgactcagcgcatgctgaaaatgttccgca

SEQ ID NO: 700063 - DNA, 75 bp, synthetic construct
  source 1..75: mol_type = other DNA
gtgcaagcgggcgctgaaatagtagaagggaataacgtctggcagtcagagatcattctgaaggtcaatgcaccg

SEQ ID NO: 700064 - DNA, 75 bp, synthetic construct
  source 1..75: mol_type = other DNA
aacgggggcgcagtggcaaacctgcaggtggccacgtcagaaagctggcgcgacaaactgacgggagaaattaag

SEQ ID NO: 700065 - DNA, 75 bp, synthetic construct
  source 1..75: mol_type = other DNA
gagcagaccgaatggcatcgcgtggtgctgttcggcaagctcgcggaagtggcaggggaatatctgcgcaagggg

SEQ ID NO: 700066 - DNA, 75 bp, synthetic construct
  source 1..75: mol_type = other DNA
gagcagaccgaatggcaacgcgtggtgctgttcggcaagctcgcggaagtggcaggtgaatatctgcgcaagggg

SEQ ID NO: 700067 - DNA, 75 bp, synthetic construct
  source 1..75: mol_type = other DNA
gagcagactgaatggcaacgcgtggtgctgttcggcaagctcgcggaagtggcaggcgaatatctgcgcaagggg

SEQ ID NO: 700068 - DNA, 75 bp, synthetic construct
  source 1..75: mol_type = other DNA
agtggggcgagcgttttccgtcactggccgggatggaacgctggcagtggcaggatatgccgttctggcaggtca

SEQ ID NO: 700069 - DNA, 75 bp, synthetic construct
  source 1..75: mol_type = other DNA
agctcgcggaagtggcaggtgaatatctgcgcaagggcgcgcaggtctacatcgaggggcaactccgtacccgta

SEQ ID NO: 700070 - DNA, 75 bp, synthetic construct
  source 1..75: mol_type = other DNA
gagcagacggaatggcatcgcgtggtgctgttcggcaagctcgcggaagtggcaggcgaatatctgcgcaagggg

SEQ ID NO: 700071 - DNA, 75 bp, synthetic construct
  source 1..75: mol_type = other DNA
tgacaaacagactggggagatgcgggagcagactgaatggcagcgcgtggtgctgttcggcaagctcgcggaagt

SEQ ID NO: 700072 - DNA, 75 bp, synthetic construct
  source 1..75: mol_type = other DNA
tgacaaacagacaggggagatgcgggagcagacggaatggcaacgcgtggtgctgttcggcaagctcgcggaagt

SEQ ID NO: 700073 - DNA, 75 bp, synthetic construct
  source 1..75: mol_type = other DNA
tgacaaacagacaggggagatgcgggagcagacagaatggcagcgcgtggtgctgttcggcaagctcgcggaagt

SEQ ID NO: 700074 - DNA, 75 bp, synthetic construct
  source 1..75: mol_type = other DNA
tgacaaacagacgggggagatgcgggagcagacggaatggcagcgcgtggtgctgttcggcaagctcgcggaagt

SEQ ID NO: 700075 - DNA, 75 bp, synthetic construct
  source 1..75: mol_type = other DNA
tgacaaacagaccggggagatgcgggagcagacggaatggcaccgcgtggtgctgttcggcaagctcgcggaagt

SEQ ID NO: 700076 - DNA, 75 bp, synthetic construct
  source 1..75: mol_type = other DNA
tgacaaacagaccggggagatgcgggagcagaccgaatggcagcgcgtggtgctgttcggcaagctcgcggaagt

SEQ ID NO: 700077 - DNA, 75 bp, synthetic construct
  source 1..75: mol_type = other DNA
tccaccatgcctgtgttgagcatggtggtgaaggtgagcaaaccaactacgtgcagggcgcgaacattgccggtt

SEQ ID NO: 700078 - DNA, 75 bp, synthetic construct
  source 1..75: mol_type = other DNA
cgcgaaaacgaaaggccgtggacgtaaggctgcgcagcccgagcctcagccgcaaccgccggagggggaggatta

SEQ ID NO: 700079 - DNA, 75 bp, synthetic construct
  source 1..75: mol_type = other DNA
ggtgccgcgttcatggcgatgatggcagaaaaagcccgtcttgcggccctgttaccggagggatggtcacgggac

SEQ ID NO: 700080 - DNA, 75 bp, synthetic construct
  source 1..75: mol_type = other DNA
ggcggggaacagtaaattccgcttcgtgggggctgatgccttctcgccagatgaactgcgcaccgatttgttcag

SEQ ID NO: 700081 - DNA, 75 bp, synthetic construct
  source 1..75: mol_type = other DNA
cggaatcacagccggaaccgaaaaaaggtggcgcgaaaacgaaaggccgtggacgtaaggccgcgcagccggagc

SEQ ID NO: 700082 - DNA, 75 bp, synthetic construct
  source 1..75: mol_type = other DNA
tcggcttcgaacaaaccttcaaaaatgccctgactactctgccgatgggcggtggtaaaggcggcagcgatttcg

SEQ ID NO: 700083 - DNA, 75 bp, synthetic construct
  source 1..75: mol_type = other DNA
ctggcagagcgtggcatcattccggctgactggcctgtccgcgtgaaaattatttcgcaggaactggcgacggcc

SEQ ID NO: 700084 - DNA, 75 bp, synthetic construct
  source 1..75: mol_type = other DNA
tcgatgcgctggcagaagacctcatcaccaccgagcactgtcaggcgctggcgctggagaacgacaccgcgcgtc

SEQ ID NO: 700085 - DNA, 75 bp, synthetic construct
  source 1..75: mol_type = other DNA
ccttaacggtgtccagacccgtgagtgtggtcacacgtcacgcagtccgcttgacacgctggaaaccgccatcgg

SEQ ID NO: 700086 - DNA, 75 bp, synthetic construct
  source 1..75: mol_type = other DNA
tcacctgacgaactgcgtactgatttgttcagcgatgacggggacggttatgtggaccgtgtggcgctcgatgct

SEQ ID NO: 700087 - DNA, 75 bp, synthetic construct
  source 1..75: mol_type = other DNA
gcgcagacggaggaagtgagcgtgccgctggcctcactgattaaatcaccgctgaatgtgcgcacggtgccgtat

SEQ ID NO: 700088 - DNA, 75 bp, synthetic construct
  source 1..75: mol_type = other DNA
gaagtacagaccattcgtcgtctggtgaccgaaagtgaagtggcggtggcagggaacagtaaattccgcttcgtg

SEQ ID NO: 700089 - DNA, 75 bp, synthetic construct
  source 1..75: mol_type = other DNA
tgctctgcttctgtaccgcgtgcagtcttaacggtgtccagacccgcgagtgtggtcacacgtcacgcagtccgc

SEQ ID NO: 700090 - DNA, 75 bp, synthetic construct
  source 1..75: mol_type = other DNA
ggtgctgttatccctgctcagcttctgtaccgcgtgcagtcttaacggtgtccagacccgcgagtgtggtcacac

SEQ ID NO: 700091 - DNA, 75 bp, synthetic construct
  source 1..75: mol_type = other DNA
gtcgccgcaggtggtcgccgactggcagcactcaacatgctggcagagcgtggcatcattccggctgactggcct

SEQ ID NO: 700092 - DNA, 75 bp, synthetic construct
  source 1..75: mol_type = other DNA
ccgcagactggcagcactcaatatgctggctgagcgtggaatcattccggctgactggcctgtccgcgtgaaaat

SEQ ID NO: 700093 - DNA, 75 bp, synthetic construct
  source 1..75: mol_type = other DNA
aaatccctggcacttctggcatggacactctgtctgaatgtatttggcagcggagcttacagcaatcccgccaga

SEQ ID NO: 700094 - DNA, 75 bp, synthetic construct
  source 1..75: mol_type = other DNA
cgctgggtgcctgactggatgtgtgcaccacgtccgcaggcagagacggaaaccacggaataccgtgacaaccag

SEQ ID NO: 700095 - DNA, 75 bp, synthetic construct
  source 1..75: mol_type = other DNA
gcagaaagatttcaccacattcttcacgcttgacggacaggccctgatgagtctgatggttttctgtactgcctg

SEQ ID NO: 700096 - DNA, 75 bp, synthetic construct
  source 1..75: mol_type = other DNA
agccgcaggatatcgctgtctgacctgcgatttttcatgccgtccctgaccgcagaagaactgcgcggcaaccgt

SEQ ID NO: 700097 - DNA, 75 bp, synthetic construct
  source 1..75: mol_type = other DNA
agtctgccgctgctgacgaaaatgtcctcagagcgcacgctggcagtccaggcggcactgatgcagcaatcagac

SEQ ID NO: 700098 - DNA, 75 bp, synthetic construct
  source 1..75: mol_type = other DNA
caggaggtgctgttatccctgctcagtttctgcaccgcatgcagccttaacggtgtccagacccgtgagtgtggt

SEQ ID NO: 700099 - DNA, 75 bp, synthetic construct
  source 1..75: mol_type = other DNA
gctgattaagtcaccactgaatgtgcgcacggtgccgtattctgcggagtccgtcagtgaactggcggagtccat

SEQ ID NO: 700100 - DNA, 75 bp, synthetic construct
  source 1..75: mol_type = other DNA
ggggctgatgccttctcgccagatgaactgcgcactgatttgttcagcgacgatgagggtggctatgtggactgt

SEQ ID NO: 700101 - DNA, 75 bp, synthetic construct
  source 1..75: mol_type = other DNA
gattgtgcagttgtgtttttgattactgcaatacgactctccacccgttccggatacagacagaagagtatcaca

SEQ ID NO: 700102 - DNA, 75 bp, synthetic construct
  source 1..75: mol_type = other DNA
tgaccgaaagtgaagtggcggtggccgggaacagtaaattccgcttcgtgggggctgatgccttctcgccagatg

SEQ ID NO: 700103 - DNA, 75 bp, synthetic construct
  source 1..75: mol_type = other DNA
cgcacggtgccgtattctgcggagtccgtcagcgaactggcggactccattaaatgtgtcggcctgttacagaat

SEQ ID NO: 700104 - DNA, 75 bp, synthetic construct
  source 1..75: mol_type = other DNA
aggtggccacgtcagaaacctggcgcgacaaacagacgggggaaatgaaggagcagacggaatggcaccgcgtgg

SEQ ID NO: 700105 - DNA, 75 bp, synthetic construct
  source 1..75: mol_type = other DNA
ggaaaaagcgtcagtggaggaaatcagcctgccgttgctgacgaaaatgtcctcagagcgcacgctggcagtcca

SEQ ID NO: 700106 - DNA, 75 bp, synthetic construct
  source 1..75: mol_type = other DNA
gaaaggcgatgcggctgaacatgcagagttccatatgaaagacaaccgctgggtgcctggctggatgtgtgcacc

SEQ ID NO: 700107 - DNA, 75 bp, synthetic construct
  source 1..75: mol_type = other DNA
tcggctttcacatgcgcgactggtggcagccgacaaaagcaaacttcttcggacacctgaaaaagccgcagatta

SEQ ID NO: 700108 - DNA, 75 bp, synthetic construct
  source 1..75: mol_type = other DNA
ctggaatgtaaacattattcgctgaccagcgatgcgccgtcagggaaggaaggtgccgcgttcatggcgatgatg

SEQ ID NO: 700109 - DNA, 75 bp, synthetic construct
  source 1..75: mol_type = other DNA
cttccgaacgcacgctggcagtccaggcggcactgatgcagcaaccggacaaatctctggcactgctggcatgga

SEQ ID NO: 700110 - DNA, 75 bp, synthetic construct
  source 1..75: mol_type = other DNA
catcagggtaacacgctggcggaatatccgtatgcgggggcgtttttccgctgtctgaacggaagccgcaggata

SEQ ID NO: 700111 - DNA, 75 bp, synthetic construct
  source 1..75: mol_type = other DNA
attcttgttaagaccacgggcaccatgcagatgctgggacgtgccgcaggaactcagactcagccggacggcaca

SEQ ID NO: 700112 - DNA, 75 bp, synthetic construct
  source 1..75: mol_type = other DNA
aactgcgtactgatttgttcagcgatgacggggacggttatgtggaccgtgtggcgctcgatgctgccctgctgg

SEQ ID NO: 700113 - DNA, 75 bp, synthetic construct
  source 1..75: mol_type = other DNA
gagggatgggcacgggacatgacgacgttcctgtcactcagccaggaggtactgttatccctgctcagtttctgc

SEQ ID NO: 700114 - DNA, 75 bp, synthetic construct
  source 1..75: mol_type = other DNA
ccctgctcagtttctgtaccgcgtgcagtcttaacggtgtccagacccgcgagtgtggtcacacgtcacgcagtc

SEQ ID NO: 700115 - DNA, 75 bp, synthetic construct
  source 1..75: mol_type = other DNA
ctgcaccgcatgcagccttaacggtgtccagacccgtgagtgtggtcacacgtcacgcagtccgcttgactcgct

SEQ ID NO: 700116 - DNA, 75 bp, synthetic construct
  source 1..75: mol_type = other DNA
ttaccgaaagtgaagtggcggtggcggggaacagtaaattccgcttcgtgggggctgatgccttctcgccagacg

SEQ ID NO: 700117 - DNA, 75 bp, synthetic construct
  source 1..75: mol_type = other DNA
ttaccgaaagtgaagtggcggtggccgggaacagtaaattccgcttcgtgggggctgatgccttctcgccagagg

SEQ ID NO: 700118 - DNA, 75 bp, synthetic construct
  source 1..75: mol_type = other DNA
tgctgattgaaacacagggcgaggtttgcctccttccccttccaggcgatgcagcagaacgcttgttcccgtcgg

SEQ ID NO: 700119 - DNA, 75 bp, synthetic construct
  source 1..75: mol_type = other DNA
tgaccgaaagtgaagtggcggtggctgggaacagtaaattccgcttcgtgggggctgatgccttctcgccagacg

SEQ ID NO: 700120 - DNA, 75 bp, synthetic construct
  source 1..75: mol_type = other DNA
tcaccgaaagtgaagtggcggtggcggggaacagtaaattccgcttcgtgggggctgatgccttctcgccagatg

SEQ ID NO: 700121 - DNA, 75 bp, synthetic construct
  source 1..75: mol_type = other DNA
tcaccgaaagtgaagtggcggtggctgggaacagtaaattccgcttcgtgggggctgatgccttctcgccagagg

SEQ ID NO: 700122 - DNA, 75 bp, synthetic construct
  source 1..75: mol_type = other DNA
tgccgtccctgaccgcagaagaactgcgtggcaaccgttctcagtggctgtatgccgtcgatgtgctgattgaaa

SEQ ID NO: 700123 - DNA, 75 bp, synthetic construct
  source 1..75: mol_type = other DNA
tcgccataaatccgcgctggtcatgcagaagtacagccgccagcaggcgagggagacagagcagaaagcccgtgc

SEQ ID NO: 700124 - DNA, 75 bp, synthetic construct
  source 1..75: mol_type = other DNA
tgtcgccgcaggtggtcgccgactggcagcactcaacatgctggcagagcgtggcatcattccggctgactggcc

SEQ ID NO: 700125 - DNA, 75 bp, synthetic construct
  source 1..75: mol_type = other DNA
gtgacgctgaccggcgggcaaaaacacgtagcgcaagcggcggagttctgggtgttctgtgccgactttaaccgc

SEQ ID NO: 700126 - DNA, 75 bp, synthetic construct
  source 1..75: mol_type = other DNA
gtcttgcggccctgttaccggagggatggtcacgggacatgacgacgttcctgtcactcagtcaggaggtgctgt

SEQ ID NO: 700127 - DNA, 75 bp, synthetic construct
  source 1..75: mol_type = other DNA
gtcatcatttgaccggtttttctggcaggaggaaccactctggcggctgatttttgaagctggtgaggccggtcg

SEQ ID NO: 700128 - DNA, 75 bp, synthetic construct
  source 1..75: mol_type = other DNA
tgaatgcagcggtggagcatcttcgcgcactggagaaaaaaggcgtcatcacgataaagcgtggcgtggcccggg

SEQ ID NO: 700129 - DNA, 75 bp, synthetic construct
  source 1..75: mol_type = other DNA
ccaaccaatcaggaggtggcaaccatgctgggataccgttcagtgaatgcagcggtagagcatcttcgcgcactg

SEQ ID NO: 700130 - DNA, 75 bp, synthetic construct
  source 1..75: mol_type = other DNA
gcgcactgcttgccggtgaggagagcgccaggttgcgtgcagcccactggttacatgagaggggcctgaaagtat

SEQ ID NO: 700131 - DNA, 75 bp, synthetic construct
  source 1..75: mol_type = other DNA
gacagcgaggctgtcgggattatccgcgcactgcttgccggtgaggaaaacgcaaggctgcgtgcaacccactgg

SEQ ID NO: 700132 - DNA, 75 bp, synthetic construct
  source 1..75: mol_type = other DNA
cgtcatcacgataaagcgtggcgtggcccgggggataacgcttcataccgcggtgaaggacgacgacagcgaggc

SEQ ID NO: 700133 - DNA, 75 bp, synthetic construct
  source 1..75: mol_type = other DNA
tggtctgcaatgtggaatggcaatcgctgggatgatggcaccgaatatccggatccgcactcagttacgcactgg

SEQ ID NO: 700134 - DNA, 75 bp, synthetic construct
  source 1..75: mol_type = other DNA
cgtatgggcgtttagatctcgctagaaagcaggttggacaagctattggcaaaggctctggcccattcaaggatg

SEQ ID NO: 700135 - DNA, 75 bp, synthetic construct
  source 1..75: mol_type = other DNA
acggtatcttcattgatactgctgcacagtttgtgtcactacagcaacacggcagatgttcgcctgatgaatggt

SEQ ID NO: 700136 - DNA, 75 bp, synthetic construct
  source 1..75: mol_type = other DNA
caccaatggtttcggtgcgatggttaaaggcggttacacctggaaagacggtaatggcctgtttattcagccata

SEQ ID NO: 700137 - DNA, 75 bp, synthetic construct
  source 1..75: mol_type = other DNA
accaaccataagtctggaagattactgtgctgactgggcgaccaacccaccagatgttcgcgtaaagcgtatgct

SEQ ID NO: 700138 - DNA, 75 bp, synthetic construct
  source 1..75: mol_type = other DNA
tgtgctgactgggcgactaaccctccagatgttcgcgtaaagcgtatgcttattaagcgtgtcgcgacgatggtg

SEQ ID NO: 700139 - DNA, 75 bp, synthetic construct
  source 1..75: mol_type = other DNA
ggcgggcaaaagctattttctcaaatggcatcgcggcacgaccctgaaagagataatcaaaaatttactctcatt

SEQ ID NO: 700140 - DNA, 75 bp, synthetic construct
  source 1..75: mol_type = other DNA
gcggaaataattatgacctggtcattaatcttacggatcagtggatggtggcgctgctggtacgttgtttacctg

SEQ ID NO: 700141 - DNA, 75 bp, synthetic construct
  source 1..75: mol_type = other DNA
gcgcactgcttgccggtgaggaaaacgccaggctgcgtgcagcctactggttacatgagaggggcctgaaagtat

SEQ ID NO: 700142 - DNA, 75 bp, synthetic construct
  source 1..75: mol_type = other DNA
gacagcgaggcggccgggattatccgcgcactgcttgccggtgaggtgaacgccaggctgcgtgcagctcactgg

SEQ ID NO: 700143 - DNA, 75 bp, synthetic construct
  source 1..75: mol_type = other DNA
gctcactgcttgccggtgaggaaaacgccaggctgcgtgcaacccactggttacatgagaggggcctgaaagtat

SEQ ID NO: 700144 - DNA, 75 bp, synthetic construct
  source 1..75: mol_type = other DNA
cgacacgctggatgatcgacgtcgggcaaaagtgctgtcgctactcaacggcattacctgcatcattccggtgtt

SEQ ID NO: 700145 - DNA, 75 bp, synthetic construct
  source 1..75: mol_type = other DNA
cgtttgcattgggaatttttaagccgcgcacactgatgatcacctcgcaaatgttattcctggcggcgggtatca

SEQ ID NO: 700146 - DNA, 75 bp, synthetic construct
  source 1..75: mol_type = other DNA
tttattttaaaagaaacacgccctgctgcgcctgctgcttcggacagaccacgagagaataccgagtcgctgctt

SEQ ID NO: 700147 - DNA, 75 bp, synthetic construct
  source 1..75: mol_type = other DNA
tctgaaaacccagaaattaatgcactctatggtataagcaataaaggtgcgggaacattcgataaaattaaaaat

SEQ ID NO: 700148 - DNA, 75 bp, synthetic construct
  source 1..75: mol_type = other DNA
gcacgaacttgaccgcaacaaaaaatatctttctgttattccagcggaagatgtcattgccgctacggaaaagct

SEQ ID NO: 700149 - DNA, 75 bp, synthetic construct
  source 1..75: mol_type = other DNA
atgcgttgcaacagcgtgggtatcaggttgtgctgacctgcgggccttcggcagatgatctcgcctgtatcgatg

SEQ ID NO: 700150 - DNA, 75 bp, synthetic construct
  source 1..75: mol_type = other DNA
ccgatgcaaaaatcgatatgctgctttatcaggatacaattcctattttgtctgaaaacccggaaattaatacgc

SEQ ID NO: 700151 - DNA, 75 bp, synthetic construct
  source 1..75: mol_type = other DNA
tggtcataaagatgcgatatcacggagatatgttattaactactcctgtcatcagtacgctcaagcagaattatc

SEQ ID NO: 700152 - DNA, 75 bp, synthetic construct
  source 1..75: mol_type = other DNA
tcattagtctatttggtgcaacggatcacgtattctggcgtccctggaccgagaatattattcaattctgggcgg

SEQ ID NO: 700153 - DNA, 75 bp, synthetic construct
  source 1..75: mol_type = other DNA
taacggtgatgcaaccgacaacattacccttgctggctcaaatattattaatggtcggattgaaacaatagttat

SEQ ID NO: 700154 - DNA, 75 bp, synthetic construct
  source 1..75: mol_type = other DNA
ccgcgaactacctcaggtaaaatacaaaagtttttgttaagaaaagatattatgcggcgtttaacgcaggatgtc

SEQ ID NO: 700155 - DNA, 75 bp, synthetic construct
  source 1..75: mol_type = other DNA
cgcgctttatgcacaccgatggttacgctgccgcaggtgtagagattaaagtggtcgatgacgcacgcaagacct

SEQ ID NO: 700156 - DNA, 75 bp, synthetic construct
  source 1..75: mol_type = other DNA
acgtggtggcgttcgccattttgcgcgacacgctggacgatcgacgtcgggctaaagtgctgtcgttactcaacg

SEQ ID NO: 700157 - DNA, 75 bp, synthetic construct
  source 1..75: mol_type = other DNA
gtggtcaccgctccattcgccatttcactgatgaacctatctccgctgaacagcgtgaggcgattatcaacagcg

SEQ ID NO: 700158 - DNA, 75 bp, synthetic construct
  source 1..75: mol_type = other DNA
tgttgctcggtgtcgttgatacggcaatgatggcgcagaatgcattaaccgcagcggaatcgctgggattgggcg

SEQ ID NO: 700159 - DNA, 75 bp, synthetic construct
  source 1..75: mol_type = other DNA
gatcgcgcgtgtagcaaccatggtgcgtaaaatgcatgcagcagggataaatcaccgcgactgttacatttgcca

SEQ ID NO: 700160 - DNA, 75 bp, synthetic construct
  source 1..75: mol_type = other DNA
gtgcgttgccgacgctgctgacggcacaggtggcgttcaacaagctgaacaaattcgcgctcgcgccttttaaag

SEQ ID NO: 700161 - DNA, 75 bp, synthetic construct
  source 1..75: mol_type = other DNA
gggctgataccaacgttgccgcgacctattcgttgacgctgttattcctgcgtacgccgctgctttcggcggttg

SEQ ID NO: 700162 - DNA, 75 bp, synthetic construct
  source 1..75: mol_type = other DNA
cttttatcaatcagcgccttatcgaaacggcggataccagtctgctggtgttgccggagtttctgggattattgc

SEQ ID NO: 700163 - DNA, 75 bp, synthetic construct
  source 1..75: mol_type = other DNA
attggcgcatggaatatgctgatcgggattctgattgcctgtagcatagtgagcctgttgctgattatgttcgtc

SEQ ID NO: 700164 - DNA, 75 bp, synthetic construct
  source 1..75: mol_type = other DNA
agccgccagggcgaaagcccaggaatatatggccgcagtcattcgcacgctcacgcctttgatgactaaagcgca

SEQ ID NO: 700165 - DNA, 75 bp, synthetic construct
  source 1..75: mol_type = other DNA
acttgctggctggcgcccctaccttcgatctctctatcagccagtttcgagaaaactttaacagccagaacccca

SEQ ID NO: 700166 - DNA, 75 bp, synthetic construct
  source 1..75: mol_type = other DNA
caaaatccggcgataacaaagttactacaatcgagtttaaattagaacctgatggcgggattctggatcgcggta

SEQ ID NO: 700167 - DNA, 75 bp, synthetic construct
  source 1..75: mol_type = other DNA
agatgagcgaagacgcctggctgttcagggttgtcggacttgcgccagctgccagcaagatctggagcttatccg

SEQ ID NO: 700168 - DNA, 75 bp, synthetic construct
  source 1..75: mol_type = other DNA
tacagcaataaaaatgcgtcgtctgaactaccagactgtatccgcaactcattgttgtgagtgtggcgatcccat

SEQ ID NO: 700169 - DNA, 75 bp, synthetic construct
  source 1..75: mol_type = other DNA
gcttcatgactgaagatggtagctggctggccggtgtggcgatgtcttctgcgaaaggtgacatgaccaccatgc

SEQ ID NO: 700170 - DNA, 75 bp, synthetic construct
  source 1..75: mol_type = other DNA
cacctatgtccggactgcaatggtcatttcttcaactggcgatgttgttgttaatggcggtaatttcgttgcaaa

SEQ ID NO: 700171 - DNA, 75 bp, synthetic construct
  source 1..75: mol_type = other DNA
tatggctctttctgcaccagcattcgctgctgataacgcggtatcaactacaccggttacactggataaagataa

SEQ ID NO: 700172 - DNA, 75 bp, synthetic construct
  source 1..75: mol_type = other DNA
gtatattccaccaatgagaaaccgacacctagcgaaattggcgcagtggctaagactgaccggatcgatttcggt

SEQ ID NO: 700173 - DNA, 75 bp, synthetic construct
  source 1..75: mol_type = other DNA
aaacggtcgctctgaatggatcaaggtatattccaccaatgagaaaccgacacctagcgaaattggcgcagtagc

SEQ ID NO: 700174 - DNA, 75 bp, synthetic construct
  source 1..75: mol_type = other DNA
cctttacgcttccgtatgttctatgttgtgaactctggctatagtgctgctaacacagggtacttttgtatattc

SEQ ID NO: 700175 - DNA, 75 bp, synthetic construct
  source 1..75: mol_type = other DNA
gccactctactatcacgctgccttgccagcgccggtagtgccggatgaaatgtattggcaggatgcgccagttga

SEQ ID NO: 700176 - DNA, 75 bp, synthetic construct
  source 1..75: mol_type = other DNA
atggcagacctcattgattcagcatcagaaattgaagaattacagcgcaacaccgcaataaaaatgcgccgcctg

SEQ ID NO: 700177 - DNA, 75 bp, synthetic construct
  source 1..75: mol_type = other DNA
gatggcgggattctagcaaggggtatagcgaccgagggaaaaattctgcgacaaggggattatggcgtaggtgca

SEQ ID NO: 700178 - DNA, 75 bp, synthetic construct
  source 1..75: mol_type = other DNA
gtgaatttcgatagctctctggttgaaccgctaatatgctccgcacgctataccggaagcacctttcggagagga

SEQ ID NO: 700179 - DNA, 75 bp, synthetic construct
  source 1..75: mol_type = other DNA
tcgccgactggcggcactcaacatgctggcagagcgtggcatccttccggctgactggcctgtccgtgtgaaggt

SEQ ID NO: 700180 - DNA, 75 bp, synthetic construct
  source 1..75: mol_type = other DNA
cgcagcgaggatgatgcggctgacgacgctgaccgcacggaacaggtgcgggacaaagcggctgtggaggaaatc

SEQ ID NO: 700181 - DNA, 75 bp, synthetic construct
  source 1..75: mol_type = other DNA
tgttaaccgcttaccctgcagccaaccttaaccgtgatgacaccggagcgccgaaaaccgtggtcctgggtggag

SEQ ID NO: 700182 - DNA, 75 bp, synthetic construct
  source 1..75: mol_type = other DNA
agtctccccaaccggcaaacagaacagctttgccagccgtgcctacgcctcctgggcgctggcagaaaaaggcac

SEQ ID NO: 700183 - DNA, 75 bp, synthetic construct
  source 1..75: mol_type = other DNA
aaatccgcgttgacctgttcagtggtgatgaaggcggctatatcagcgctctgtcgctggatatggcgctgctcg

SEQ ID NO: 700184 - DNA, 75 bp, synthetic construct
  source 1..75: mol_type = other DNA
tgtgtccagcgtggtgtgcagttacgcagtgaggatgatgcggctgacgacgctgaccgcacggaacaggtgcag

SEQ ID NO: 700185 - DNA, 75 bp, synthetic construct
  source 1..75: mol_type = other DNA
actggtggcagccgacgaaagcaaacttcttcggacacctgaaaaagccgcagattatcgcagccctgaatgagg

SEQ ID NO: 700186 - DNA, 75 bp, synthetic construct
  source 1..75: mol_type = other DNA
aggcagaagaagaacgcctgaacgaactgatggcacgttacgacgcgctggaaaaccagtgtgaggaatctgacc

SEQ ID NO: 700187 - DNA, 75 bp, synthetic construct
  source 1..75: mol_type = other DNA
cgcagcgaggatgatgcggctgacgacgctgaccgcacggaacaggtgccggagaaagcggctgtggaggaaatc

SEQ ID NO: 700188 - DNA, 75 bp, synthetic construct
  source 1..75: mol_type = other DNA
cgcagcgaggatgatgcggctgacgacgctgaccgcacggaacaggtgctggaaaaagcggcagtggaggaaatc

SEQ ID NO: 700189 - DNA, 75 bp, synthetic construct
  source 1..75: mol_type = other DNA
cgcagcgaggatgatgcggctgacgacgctgaccgcacggaacaggtgcaggataaagcggcagtggaggaaatc

SEQ ID NO: 700190 - DNA, 75 bp, synthetic construct
  source 1..75: mol_type = other DNA
gcgcctttacggaagccgcgcttaaagtctcccccaccggtaaacaaaacagctttgccagccgtgcctacgcct

SEQ ID NO: 700191 - DNA, 75 bp, synthetic construct
  source 1..75: mol_type = other DNA
gcaccacatgaaagacaaccgctgggtgccaggctggatgtgtgcaccacgtccacaggcagagacagaaaccac

SEQ ID NO: 700192 - DNA, 75 bp, synthetic construct
  source 1..75: mol_type = other DNA
aaagtgaagtggcggtggcggggaacagtaaattccgcttcgtgggggctgatgccttctcgccagatgaactgc

SEQ ID NO: 700193 - DNA, 75 bp, synthetic construct
  source 1..75: mol_type = other DNA
gtggaaagagaggtcaggcatggctgagtctgatgcaggagaaagcccgtctggaggctctgttaccggaaggat

SEQ ID NO: 700194 - DNA, 75 bp, synthetic construct
  source 1..75: mol_type = other DNA
aacaggcagtgtctggtcgccgaaagttttattacaagataaagcactgttgtggtttacctgctctggttttct

SEQ ID NO: 700195 - DNA, 75 bp, synthetic construct
  source 1..75: mol_type = other DNA
gacaggtacaaggggaatacgtggagttgagcgacggcactttatcgtggttagggaacgccttgtactggatgc

SEQ ID NO: 700196 - DNA, 75 bp, synthetic construct
  source 1..75: mol_type = other DNA
cgttccagtagtaccggaagaaaaaccaatgcctaatcctcttggcatgtacgcggttgatgctgttgctgctat

SEQ ID NO: 700197 - DNA, 75 bp, synthetic construct
  source 1..75: mol_type = other DNA
caggtgcaggaaaaagcgtcagtggaggaaatcagcctgccgttgctgacgaaaatgtcctcagagcgcacgctg

SEQ ID NO: 700198 - DNA, 75 bp, synthetic construct
  source 1..75: mol_type = other DNA
gatgtgcgggttatccgcaatctgattacggaaagtgaagtgatgctttctcacctgacgaactgcgtactgatt

SEQ ID NO: 700199 - DNA, 75 bp, synthetic construct
  source 1..75: mol_type = other DNA
acctgaaaaagccgcagattatcgatgccctgaatgatgcaggactgtccggtgctgcgcgggacgcggagaaaa

SEQ ID NO: 700200 - DNA, 75 bp, synthetic construct
  source 1..75: mol_type = other DNA
cgcacggtgccgtattctgcggagtccgtcagtgaactggctgattccattaagggagtcggcctgctgcagaat

SEQ ID NO: 700201 - DNA, 75 bp, synthetic construct
  source 1..75: mol_type = other DNA
tgattaaagaaatcaaagaacgcataggcagcctggacgtgcgagacaatattgagcgccgggcttatgaaattg

SEQ ID NO: 700202 - DNA, 75 bp, synthetic construct
  source 1..75: mol_type = other DNA
gacccgtgagtatggtcacacgtcacgcagtccgctgggcactgttgcaaagttagcgatgaggcagccttttgt

SEQ ID NO: 700203 - DNA, 75 bp, synthetic construct
  source 1..75: mol_type = other DNA
tcaaagcacggcgagtatatggctggacaggtacaaggggaatacgtggagttgagcgacggcactttatcgtgg

SEQ ID NO: 700204 - DNA, 75 bp, synthetic construct
  source 1..75: mol_type = other DNA
gtgatctcctttcatgaaaatacgcagacgccggagatgcgtgccggaagtggcgtggtggtgtcctggcgttac

SEQ ID NO: 700205 - DNA, 75 bp, synthetic construct
  source 1..75: mol_type = other DNA
aaagattcagccaccccatttttcctgaccggtttaacttatgctattattatgatcacttcattaataatgctc

SEQ ID NO: 700206 - DNA, 75 bp, synthetic construct
  source 1..75: mol_type = other DNA
tttggtgtggctggtatggcgttaataggtatctatttctctgtaaaaatgaaattagataaagcatctcacgcc

SEQ ID NO: 700207 - DNA, 75 bp, synthetic construct
  source 1..75: mol_type = other DNA
atcactggagcagaatgcactatcgggcaactatccggtaactccggatagttggataagctgtagtgagcgaat

SEQ ID NO: 700208 - DNA, 75 bp, synthetic construct
  source 1..75: mol_type = other DNA
acgctacaggctggaacgattgccgcgaagccatgcttcagtccggaaactttcgggaaaataaagattcgtcaa

SEQ ID NO: 700209 - DNA, 75 bp, synthetic construct
  source 1..75: mol_type = other DNA
acgaaaatgtcttcagagcgcacgctggcagtccaggcggcgctgatgcaacagccggacaaatctctggcactg

SEQ ID NO: 700210 - DNA, 75 bp, synthetic construct
  source 1..75: mol_type = other DNA
ccaaccaatcaggaggtggcaaccatgctgggataccgttcagtgaatgcagcggtggaacatcttcgcgcactg

SEQ ID NO: 700211 - DNA, 75 bp, synthetic construct
  source 1..75: mol_type = other DNA
ggtttctctgtttggtatcacgctgatttgcgccggtttctcggttggttttggtgtggcgatgagtcaggcgtt

SEQ ID NO: 700212 - DNA, 75 bp, synthetic construct
  source 1..75: mol_type = other DNA
tgggattgatatgtacctcgttggtttaccgcgcatcgccgccgatctcaatgccagcgaagcgcagttacatat

SEQ ID NO: 700213 - DNA, 75 bp, synthetic construct
  source 1..75: mol_type = other DNA
tagatatcgccatgtttggtcgtatgctggcgaataaacctgagtttaatgttgaagccgcctgtcaggtcgcgc

SEQ ID NO: 700214 - DNA, 75 bp, synthetic construct
  source 1..75: mol_type = other DNA
acaaaacagctttgccagccgggcttatgcctcctgggcgctggcagaaaaaggcaccgatcaaccgcgttctct

SEQ ID NO: 700215 - DNA, 75 bp, synthetic construct
  source 1..75: mol_type = other DNA
gcgcactgcttgccggtgaggaaaacgccaggctgcgtgcagctcactggttacatgagagggaactgaaagtat

SEQ ID NO: 700216 - DNA, 75 bp, synthetic construct
  source 1..75: mol_type = other DNA
atgcactatcgggcaactctccggtaactccggatggttggataagctgtagtgagcgaatgccggacgacaggc

SEQ ID NO: 700217 - DNA, 75 bp, synthetic construct
  source 1..75: mol_type = other DNA
aggatatgccattctggcaggtcatcacagaggctggtatggcggcaagggaggccggtcatgccgtccgtgaga

SEQ ID NO: 700218 - DNA, 75 bp, synthetic construct
  source 1..75: mol_type = other DNA
atgactgcccgtcagaatgcactggttcccctgaacgcagagcaacaggccgcatggcgggcggtggcggagacg

SEQ ID NO: 700219 - DNA, 75 bp, synthetic construct
  source 1..75: mol_type = other DNA
caaaaaatatagagctttcacgtatttatcaggaaatatcttggatgacgtaactcactggatgcctctaccaga

SEQ ID NO: 700220 - DNA, 75 bp, synthetic construct
  source 1..75: mol_type = other DNA
tggcaccgcgtggtgctgttcggcaagctcgcggaagtggcaggtgaatatctgcgcaagggcgcgcaggtctac

SEQ ID NO: 700221 - DNA, 75 bp, synthetic construct
  source 1..75: mol_type = other DNA
attcttgttaagaccacgggcaccgtgcagatgttggggagtgcaccacagcagaacgctcaggcgcaaccgcag

SEQ ID NO: 700222 - DNA, 75 bp, synthetic construct
  source 1..75: mol_type = other DNA
cctcagcagaatgggcagccacagagtgctgacgcgacgaaaaaaggtggcgtgaaaacgaaaggccgtggacgt

SEQ ID NO: 700223 - DNA, 75 bp, synthetic construct
  source 1..75: mol_type = other DNA
attgaccgtgaatataacacgttcactggtatgtattctgacaaagcagaagtcgaacggtgggtgcggctgcat

SEQ ID NO: 700224 - DNA, 75 bp, synthetic construct
  source 1..75: mol_type = other DNA
aagttgccagttaatacaccttgccaagatgcgccagcccatatctggctgcaaacagctggagtatggccagaa

SEQ ID NO: 700225 - DNA, 75 bp, synthetic construct
  source 1..75: mol_type = other DNA
gagcgacggcactttatcgtggttagggaacgccttgtactggatgccgctaccagaaccgccgcaggaggcgaa

SEQ ID NO: 700226 - DNA, 75 bp, synthetic construct
  source 1..75: mol_type = other DNA
tggagttgagcgacggcactttatcgtggttagggaacgccttgttctggatgcctctaccggaaccgcctcagg

SEQ ID NO: 700227 - DNA, 75 bp, synthetic construct
  source 1..75: mol_type = other DNA
cacagagtgctgacacgacgaaaaaagggagcgcgaaaacaaaaggccgtggacgtaaggccgcgcagccggagc

SEQ ID NO: 700228 - DNA, 75 bp, synthetic construct
  source 1..75: mol_type = other DNA
ggctggtgaatatctgcgcaagggcgtgcaggtctacatcgaaggccagcttcgtacccgtagccgggaggataa

SEQ ID NO: 700229 - DNA, 75 bp, synthetic construct
  source 1..75: mol_type = other DNA
tgatgcggctgaacatgcagagcaccatatgaaagacaaccgctgggttccaggctggatgtgtgcaccacatcc

SEQ ID NO: 700230 - DNA, 75 bp, synthetic construct
  source 1..75: mol_type = other DNA
acattgaacaaatcttccctgagctttcgaacttaattgatattattaataaatggctttcacatggaaacattg

SEQ ID NO: 700231 - DNA, 75 bp, synthetic construct
  source 1..75: mol_type = other DNA
ggctcaggaaagaatgcccggggctgacagtccacaggaactgatgaaaagggcaaaggagtatcaggataagta

SEQ ID NO: 700232 - DNA, 75 bp, synthetic construct
  source 1..75: mol_type = other DNA
ccacacaatgctgcccgccatgagtgatcagttgatggcgttcggttatgtgaaggggtggaatgcctgccgcgc

SEQ ID NO: 700233 - DNA, 75 bp, synthetic construct
  source 1..75: mol_type = other DNA
gtccatcagcacaaaggcaccattagcgcattgcgtcgggtggttgagccgctcggctttctgattgaagtgcgc

SEQ ID NO: 700234 - DNA, 75 bp, synthetic construct
  source 1..75: mol_type = other DNA
gtgctggtgagcgaagagggcgaatgctggtttgattcgccgattatcgccgaatatatcgagttaatgaatgtt

SEQ ID NO: 700235 - DNA, 75 bp, synthetic construct
  source 1..75: mol_type = other DNA
tgaaaggaacccgcaattttgagaataaagtctcggtaattgtagccttacaggataaagaacgttttgccggtg

SEQ ID NO: 700236 - DNA, 75 bp, synthetic construct
  source 1..75: mol_type = other DNA
tgattaaccatggcccttaccggcatacgctgcagtaccgcacatatcacggaaacggacaacgcctggctgtac

SEQ ID NO: 700237 - DNA, 75 bp, synthetic construct
  source 1..75: mol_type = other DNA
atatgtggtggggatggtttatgggtgggtatactctgtatatgtcatgggattatgagtttaaatacagattgc

SEQ ID NO: 700238 - DNA, 75 bp, synthetic construct
  source 1..75: mol_type = other DNA
atacgggtactgttttcatattatctcttccgttaagtatgatatatattctttctgttattataaaaaggctgt

SEQ ID NO: 700239 - DNA, 75 bp, synthetic construct
  source 1..75: mol_type = other DNA
tgatatttatctggatgatttcggtactggttattcgagcttaagttatttgcaggatctggatgtcgatattct

SEQ ID NO: 700240 - DNA, 75 bp, synthetic construct
  source 1..75: mol_type = other DNA
cagcagcatatttcgatcaatcttgaatccaccgtgctcacctcggaaaaaatcccgcaattgctgcgtgaaatg

SEQ ID NO: 700241 - DNA, 75 bp, synthetic construct
  source 1..75: mol_type = other DNA
tgatttcgggagtactgattctttcagtattgctgcctgtcggcttaagcatctggctggcccatcagcaggtag

SEQ ID NO: 700242 - DNA, 75 bp, synthetic construct
  source 1..75: mol_type = other DNA
gtccatcagcacaaaggcaccatcagcgcattgcgtcgggtcgtcgagccgctcggctttctgattgaggtgcgc

SEQ ID NO: 700243 - DNA, 75 bp, synthetic construct
  source 1..75: mol_type = other DNA
agcgtctggctgccgcctgccgtgggcgaacaggtcatgattgcctgtatcaatggcgaccccgtaaccgcttcc

SEQ ID NO: 700244 - DNA, 75 bp, synthetic construct
  source 1..75: mol_type = other DNA
aatgtgtggctgccgccatcacccggcgaacaggtggtaattgcctgcatcggcggcaacccggaaaccgccatg

SEQ ID NO: 700245 - DNA, 75 bp, synthetic construct
  source 1..75: mol_type = other DNA
gttcatctcaaacggtgtccaggttgatgatcatggtcatggtgccgtgcagcgtggtggaagctggacggaggg

SEQ ID NO: 700246 - DNA, 75 bp, synthetic construct
  source 1..75: mol_type = other DNA
gagacttaccaaagtcattcagcttagaaaaatatgatgaccttgaaaatatgtctgataaggatttgtttcgtc

SEQ ID NO: 700247 - DNA, 75 bp, synthetic construct
  source 1..75: mol_type = other DNA
tgagcaatatcatccgcaccgggatcatctctgaagttgatgagaagtcctggcgcgtgcgcgttcgcagcggcg

SEQ ID NO: 700248 - DNA, 75 bp, synthetic construct
  source 1..75: mol_type = other DNA
ggatgaagtcatcatcactgccagagatggtgcaagactccgttataacgcaaaggaaggtgcccttgacgcaac

SEQ ID NO: 700249 - DNA, 75 bp, synthetic construct
  source 1..75: mol_type = other DNA
agtctgagtgtgaacggaaagattttcgttggtacgggatgctatcacggcgatgccctgacggtttacccctac

SEQ ID NO: 700250 - DNA, 75 bp, synthetic construct
  source 1..75: mol_type = other DNA
ccggctcatcaccgcttgaaattgctgccgcgaaagcctgtgcggaaattgaaaaaacgccggtcagtattcgtg

SEQ ID NO: 700251 - DNA, 75 bp, synthetic construct
  source 1..75: mol_type = other DNA
ccgccacatgacagggctgaatatcattcaggaaattccgggagatattttcgcagcggcggcaacttatgacgg

SEQ ID NO: 700252 - DNA, 75 bp, synthetic construct
  source 1..75: mol_type = other DNA
taccgctggcagcaggcttcggagcgcatggccgaacggctgggggagagtaagcgactcgtcagaaccgtattg

SEQ ID NO: 700253 - DNA, 75 bp, synthetic construct
  source 1..75: mol_type = other DNA
gcagacagccattccacaagttccggtaactccggatggttggataagctgtagtgagcgaatgccgaacgataa

SEQ ID NO: 700254 - DNA, 75 bp, synthetic construct
  source 1..75: mol_type = other DNA
tgtggaactggcgcacctgcccggtaaagctgctgccgtatctggcgtgggcgctgtcggtcgacaggtgggatg

SEQ ID NO: 700255 - DNA, 75 bp, synthetic construct
  source 1..75: mol_type = other DNA
tgaagagcgcaggagaacggaagtctatattcataaccttaatgaagatggatttacaccagtgcttgtaaaggc

SEQ ID NO: 700256 - DNA, 75 bp, synthetic construct
  source 1..75: mol_type = other DNA
cggcatttgagcgcgccacgttatatcgcactcgactgaaacggctaaaagagatcaatcagccgggctacagct

SEQ ID NO: 700257 - DNA, 75 bp, synthetic construct
  source 1..75: mol_type = other DNA
atggtttccgtcagagccttcgggggaagagtaaaacacaaaacaaacacaccagggggtagtgtgacggacgat

SEQ ID NO: 700258 - DNA, 75 bp, synthetic construct
  source 1..75: mol_type = other DNA
ggccaactgctacagcagtttgtcagcgccggtaacgcgctgcttgtggcgaccagcagtttctgggagggggtg

SEQ ID NO: 700259 - DNA, 75 bp, synthetic construct
  source 1..75: mol_type = other DNA
gtcgaccgcccacacttagtcaaactggtcgaaaacctgtttagccgcgaaagttttgcccgcaccgaaccgcca

SEQ ID NO: 700260 - DNA, 75 bp, synthetic construct
  source 1..75: mol_type = other DNA
acatcccggggcatcctgacgctaatgatgggtggataattcctggtgcgtcgtggaaaccgtcacactggatgc

SEQ ID NO: 700261 - DNA, 75 bp, synthetic construct
  source 1..75: mol_type = other DNA
tataaagattgctttgtggtcaaagcacgcaaaaaagcgatggacgccgatgtggtggtggtaaaccatcatctg

SEQ ID NO: 700262 - DNA, 75 bp, synthetic construct
  source 1..75: mol_type = other DNA
ctgcaaaaccgcccggcacaacaaagtgtcattgtcaccggacgcggttgccacagtcagatattaaaaatggca

SEQ ID NO: 700263 - DNA, 75 bp, synthetic construct
  source 1..75: mol_type = other DNA
ttgaaacggaaccgcgcacgctgattttttatgaatccacccaccgtctgttagacagcctggaagatattgtcg

SEQ ID NO: 700264 - DNA, 75 bp, synthetic construct
  source 1..75: mol_type = other DNA
gcgctgttgcaggcagaactgccactgaaaaaagcggcggcgctggccgcagagattcacggcgtgaagaaaaat

SEQ ID NO: 700265 - DNA, 75 bp, synthetic construct
  source 1..75: mol_type = other DNA
ggaagcggacgtgatgatcttcgacgaagcccatcagttgccggatattgccagccagtactttggtcagtcact

SEQ ID NO: 700266 - DNA, 75 bp, synthetic construct
  source 1..75: mol_type = other DNA
gctcctggtctaatcaaacagtcgatggtgatatcagcacctgcgtcagcgtggcggaagattcacaggcgtggc

SEQ ID NO: 700267 - DNA, 75 bp, synthetic construct
  source 1..75: mol_type = other DNA
atgcgttttgtgcaaccccgaacggaatctcagcaggcaatgcgggctctgcatcgtgttcgagaatccttggtt

SEQ ID NO: 700268 - DNA, 75 bp, synthetic construct
  source 1..75: mol_type = other DNA
gactgcacctgagcctgctgttggccctgatgaagatgtttctattcaggccagtggtagtaatagagcatttga

SEQ ID NO: 700269 - DNA, 75 bp, synthetic construct
  source 1..75: mol_type = other DNA
tcacgatcaagcaaaaatgttttaagaggattacatttccaaaaaacgaagccacaaggtaaacttgtaagagtt

SEQ ID NO: 700270 - DNA, 75 bp, synthetic construct
  source 1..75: mol_type = other DNA
gcatcagcagacggcattctggatgcggttctggaagatgaaggtacaaccgtaacgtctcgtcagatccttggt

SEQ ID NO: 700271 - DNA, 75 bp, synthetic construct
  source 1..75: mol_type = other DNA
gaaaaacgtgtcccgatgactcgcctgcgtaagcgtgtggcagagcgtctgctggaagcgaaaaactcccccgcc

SEQ ID NO: 700272 - DNA, 75 bp, synthetic construct
  source 1..75: mol_type = other DNA
gggtgccacaacctggcctttttctacaaaaacgagctttctgtggttgatattcaagggttacaacatgtttaa

SEQ ID NO: 700273 - DNA, 75 bp, synthetic construct
  source 1..75: mol_type = other DNA
ctgaaggtgaaataacaagtatttgcggtgggtggatgtattttggcaatgagcgtgagccggatacattcgaaa

SEQ ID NO: 700274 - DNA, 75 bp, synthetic construct
  source 1..75: mol_type = other DNA
gcaatggtgatgaatttttcgaaacacagagtcgcaatgtaaccgactggatgcaactaccagaacctcctcttt

SEQ ID NO: 700275 - DNA, 75 bp, synthetic construct
  source 1..75: mol_type = other DNA
ttttttgagagctttaaccagaaggtttttgaggaagctgtaggccgcaaagttgaatttgtccaagataaccat

SEQ ID NO: 700276 - DNA, 75 bp, synthetic construct
  source 1..75: mol_type = other DNA
cccctcgctctttccataatatcagagaaagataaaagaggacattccttatcagaaattaaatcttatatctaa

SEQ ID NO: 700277 - DNA, 75 bp, synthetic construct
  source 1..75: mol_type = other DNA
ttcacggttgtgcatccgctatagcaatatgtggatactgccagttgaaaggatggaggagtttctcgaagaggc

SEQ ID NO: 700278 - DNA, 75 bp, synthetic construct
  source 1..75: mol_type = other DNA
gagcgcaattctgggtatgcacgctatcaaagatcgtccgatggcggtgaatggtcaggttgagatcctgccgat

SEQ ID NO: 700279 - DNA, 75 bp, synthetic construct
  source 1..75: mol_type = other DNA
ccgcgcggcctggtgacaccggtactgcgtgatgtcgataccctcggcatggcagacatcgagaagaaaatcaaa

SEQ ID NO: 700280 - DNA, 75 bp, synthetic construct
  source 1..75: mol_type = other DNA
aatctcgacgccagcgccattaaaggcaccggtgtgggtggtcgtctgactcgtgaagatgtggaaaaacatctg

SEQ ID NO: 700281 - DNA, 75 bp, synthetic construct
  source 1..75: mol_type = other DNA
gccgctctccattcaggttcatccaaacaaacgcaattctgaaatcggttttgccaaagaaaatgccgcaggtat

SEQ ID NO: 700282 - DNA, 75 bp, synthetic construct
  source 1..75: mol_type = other DNA
gtggtagcaacaagtaagttggctcacatacctaaacctctaaaaggttttggacaaagtagctttaatcagatc

SEQ ID NO: 700283 - DNA, 75 bp, synthetic construct
  source 1..75: mol_type = other DNA
agagcatcctcttgactacatgagagtagttgcaacaagtaagttagctcacatacctaaacctcctaagggttt

SEQ ID NO: 700284 - DNA, 75 bp, synthetic construct
  source 1..75: mol_type = other DNA
gccagatctttctcagcaagccctgactgaaaaaggcgtgctgttcaactctggcgagttcaacggtcttgacca

SEQ ID NO: 700285 - DNA, 75 bp, synthetic construct
  source 1..75: mol_type = other DNA
gtttattgccgccaacgaatcaccggtgactgtcaaaggccacggccgtttagcgcgtgtttacaacaagctgta

SEQ ID NO: 700286 - DNA, 75 bp, synthetic construct
  source 1..75: mol_type = other DNA
attcgaagccaaaccggctaaccagttgttgacccagccggtgaaacaaggtgcagaactggacttcccgattcc

SEQ ID NO: 700287 - DNA, 75 bp, synthetic construct
  source 1..75: mol_type = other DNA
cgtagcacaacagaatgactgggaggccaccgatccggctttccgtgaagcgaatgtgcaggggaaaaacctgat

SEQ ID NO: 700288 - DNA, 75 bp, synthetic construct
  source 1..75: mol_type = other DNA
ggcttcaacaagtttgttgttcagtacgcaacagactcgatgacctcgcagggtaaaggtctgtcgcagggttct

SEQ ID NO: 700289 - DNA, 75 bp, synthetic construct
  source 1..75: mol_type = other DNA
aactatcgtctggttgatggcgcatcgaaagacggctggttattcactgctgaacatactcagagtgtcctgaag

SEQ ID NO: 700290 - DNA, 75 bp, synthetic construct
  source 1..75: mol_type = other DNA
agccgttccagctaacttcgaaggcggcagcttcggtcgtggcgacagcgacgagtggaccttcggtgcccagat

SEQ ID NO: 700291 - DNA, 75 bp, synthetic construct
  source 1..75: mol_type = other DNA
acgcaacagactctatgacctcacagggcaaagggctgtcgcaagggtctggcgtcgcatttgataacgaacact

SEQ ID NO: 700292 - DNA, 75 bp, synthetic construct
  source 1..75: mol_type = other DNA
gggacatgatgtacgtgggtatgtaccaggatatcaactgggataacgacaacggcaccaaatggtggaccgtcg

SEQ ID NO: 700293 - DNA, 75 bp, synthetic construct
  source 1..75: mol_type = other DNA
aaaaccagctcaaaatgctgggttttggttatgactggagccgcgagctggcaacctgtacgccggaatactacc

SEQ ID NO: 700294 - DNA, 75 bp, synthetic construct
  source 1..75: mol_type = other DNA
agaaccgtatccgcatcctggaagagcagatgaagctcgcacgccagcagcgtttcggtaaaaaatgcgaatcgc

SEQ ID NO: 700295 - DNA, 75 bp, synthetic construct
  source 1..75: mol_type = other DNA
cttgaaaacggtcattcacaacaagcgccaactggcgtgtatgccaacgctggtgatgctgccaacttactgatt

SEQ ID NO: 700296 - DNA, 75 bp, synthetic construct
  source 1..75: mol_type = other DNA
cgtcaatatttgccgggatgattgaggaagatgtggggctgaagattcgctacatcgctatgcagattcttactg

SEQ ID NO: 700297 - DNA, 75 bp, synthetic construct
  source 1..75: mol_type = other DNA
aacggcaaaacgtaatggcctggagccacatgcctggctgacggatgttctgacgcgtctgcctgaatggccgga

SEQ ID NO: 700298 - DNA, 75 bp, synthetic construct
  source 1..75: mol_type = other DNA
tggaagaaatgctgaaactggtgcgtcagcaacgcttcggtaaaaaatgcgaaacactggccgggatgcagcgtt

SEQ ID NO: 700299 - DNA, 75 bp, synthetic construct
  source 1..75: mol_type = other DNA
atgaactgagctgcttcctgggtgacggagccgtgcccctggacaacaatatctgcgagcgtgctatccgccgta

SEQ ID NO: 700300 - DNA, 75 bp, synthetic construct
  source 1..75: mol_type = other DNA
tcagcaacgcttcggtaaaaaatgcgaaacactggccgggatgcagcgttccctgttcgaagaggacgtgaacgt

SEQ ID NO: 700301 - DNA, 75 bp, synthetic construct
  source 1..75: mol_type = other DNA
atgactaagaccccacgtagtcgcaatgcagacgataaagtcattcagggtaaggaacttgatgcttacattaaa

SEQ ID NO: 700302 - DNA, 75 bp, synthetic construct
  source 1..75: mol_type = other DNA
cgtcacgcggaagatcccactccgctggtgtgccacggcagctggccgggcgtgattactcgtgaaccagcgggc

SEQ ID NO: 700303 - DNA, 75 bp, synthetic construct
  source 1..75: mol_type = other DNA
aagaaaatcgcggggttgtaccgtcttgagaagaagatcagtagccgccccgtggaaaaaatccgccagtggcga

SEQ ID NO: 700304 - DNA, 75 bp, synthetic construct
  source 1..75: mol_type = other DNA
ccggttcatcttccacgggtggaaaaaattatccagccggacactgaccattgccctgaatgtgacgagccgctg

SEQ ID NO: 700305 - DNA, 75 bp, synthetic construct
  source 1..75: mol_type = other DNA
atcttccgcgtgttgaaaaggaaatcctgccggtcactgatcattgccctgaatgtgacgaaccgctgcgccata

SEQ ID NO: 700306 - DNA, 75 bp, synthetic construct
  source 1..75: mol_type = other DNA
gtaaacgagagttaactatagatgaaaaagataaattggctaaggggcgaaccggtgctgcttatataagtaagg

SEQ ID NO: 700307 - DNA, 75 bp, synthetic construct
  source 1..75: mol_type = other DNA
ggccgggattatttgacggtgacaccccccggcttctggcctgcggtatccgggacgtgttactggaagacatat

SEQ ID NO: 700308 - DNA, 75 bp, synthetic construct
  source 1..75: mol_type = other DNA
actatcatcaatgtcaccacgccaccaaaatggaaggtgaaaaagcagaagctggccgagaaagcggcccgggaa

SEQ ID NO: 700309 - DNA, 75 bp, synthetic construct
  source 1..75: mol_type = other DNA
gcctcacagctgggcgtgaatcgcggtgatcaaatccgtgtgatggtcccttccgccagccagtttacgccaatg

SEQ ID NO: 700310 - DNA, 75 bp, synthetic construct
  source 1..75: mol_type = other DNA
gaagcagggcgaagtggcgatcctacagacacaaggcttaactccacgacaaatcatgatggtctttatggtaca

SEQ ID NO: 700311 - DNA, 75 bp, synthetic construct
  source 1..75: mol_type = other DNA
tgacactgaagcggaaaacagaaggggagacgcctgtccgcagccggaaaaccatcatcaatgtcaccacgccac

SEQ ID NO: 700312 - DNA, 75 bp, synthetic construct
  source 1..75: mol_type = other DNA
aagcgtatgcggcagcgcgtctggagaaaattcgccgccagaaccggataaaggcagaacttcaggccgtgcttg

SEQ ID NO: 700313 - DNA, 75 bp, synthetic construct
  source 1..75: mol_type = other DNA
gtggaaggtgaaaaagcagaagctggccgagaaagcagcccggaagcagagctggcggcaaaaaaagcgcaggcc

SEQ ID NO: 700314 - DNA, 75 bp, synthetic construct
  source 1..75: mol_type = other DNA
atttttcgagaaacatattagtagtaatattaacataaacaaattacagaatgatgtaggacgctatattgttat

SEQ ID NO: 700315 - DNA, 75 bp, synthetic construct
  source 1..75: mol_type = other DNA
gactatggtttgcaatatggtgctaaatacccgcttaacaataattttggtgatccattcggggaactcaaagca

SEQ ID NO: 700316 - DNA, 75 bp, synthetic construct
  source 1..75: mol_type = other DNA
atgacagagcagaaacgaccggtactgacactgaagcggaaaacagagggaacaacacctgtccgcagccggaaa

SEQ ID NO: 700317 - DNA, 75 bp, synthetic construct
  source 1..75: mol_type = other DNA
aaccaataattttcgggaaatcccggaagcgtcaaccagctctccggtaactccggctcttctgccaggtggttt

SEQ ID NO: 700318 - DNA, 75 bp, synthetic construct
  source 1..75: mol_type = other DNA
tgacactgaagcggaaaacggaaggggcaacgcctgcacctgtccgcagccggaaaactatcatcaatgtcacca

SEQ ID NO: 700319 - DNA, 75 bp, synthetic construct
  source 1..75: mol_type = other DNA
aagcgtatgcggcagcgcgtctggataaaatccgccgccagaaccggataaagacagaacttcaggccgtgcttg

SEQ ID NO: 700320 - DNA, 75 bp, synthetic construct
  source 1..75: mol_type = other DNA
ttgaagcgcgtttacatcgtgaaattacgggaatgctgaaaagtatcacgttgagccgcagcgcaaccgggaaat

SEQ ID NO: 700321 - DNA, 75 bp, synthetic construct
  source 1..75: mol_type = other DNA
taccgtcgcaggtgatggcggcgaagcaaaaaacaagtgatcttgtgaacaggatgaaagcagcattttcgcgga

SEQ ID NO: 700322 - DNA, 75 bp, synthetic construct
  source 1..75: mol_type = other DNA
cccgattacgggcaatgactctttgatcttcacccgcaccactcaatacaaaatcgtgccgaagcgccagagcgc

SEQ ID NO: 700323 - DNA, 75 bp, synthetic construct
  source 1..75: mol_type = other DNA
catgagcctcttaatcaggcgctgaagcgcgccgcagatcatcattttgaactggataatgagctgcccattcgc

SEQ ID NO: 700324 - DNA, 75 bp, synthetic construct
  source 1..75: mol_type = other DNA
actgttgagctggttggggatccttctatgtgggaactgtatcgttacgaccataagacattgttaagccttcag

SEQ ID NO: 700325 - DNA, 75 bp, synthetic construct
  source 1..75: mol_type = other DNA
agttaagaaaggtcgcgacatacaatttcagatcttcaaaagaagccctaagctggcccttgccaaacaaggttg

SEQ ID NO: 700326 - DNA, 75 bp, synthetic construct
  source 1..75: mol_type = other DNA
cgaaaacgtgccattgttgtggttacaaaatgccggaaatgccacttcataaacgcatctggcgatgccctgagt

SEQ ID NO: 700327 - DNA, 75 bp, synthetic construct
  source 1..75: mol_type = other DNA
acggggcatatttctcaggaggaggaagcgtatgcggcagcgcgtctggataaaatccgccgccagaaccggata

SEQ ID NO: 700328 - DNA, 75 bp, synthetic construct
  source 1..75: mol_type = other DNA
gtggtactgcaaagcgcgcgcagcgtggcggtcggggtgatgctgggtatcgatccggcgcaaaaagatccgcta

SEQ ID NO: 700329 - DNA, 75 bp, synthetic construct
  source 1..75: mol_type = other DNA
tacgtattagcccagggtggcccattggttgagcgcgataagctgcgcatccgtctgaattatgaaaccactgaa

SEQ ID NO: 700330 - DNA, 75 bp, synthetic construct
  source 1..75: mol_type = other DNA
tggtctggaagctccggtaaaacccacgttgatatcaacagttactggcctggatatggggcttgagcactacgc

SEQ ID NO: 700331 - DNA, 75 bp, synthetic construct
  source 1..75: mol_type = other DNA
tgaatgtggggcggagcatgaccgcgatatcaatgcagcgcttaatatccggcaaaaaggaatactggaactaaa

SEQ ID NO: 700332 - DNA, 75 bp, synthetic construct
  source 1..75: mol_type = other DNA
gaacaaaaacggtttgcgaaattgcttgatggcaaagtaacggatgacatttccgtgatgcgtaaaacggccaac

SEQ ID NO: 700333 - DNA, 75 bp, synthetic construct
  source 1..75: mol_type = other DNA
gaacagagccataccggaaaagaacacacccatgagcatgagcatgagcatgaagaagggggccatgaaatctga

SEQ ID NO: 700334 - DNA, 75 bp, synthetic construct
  source 1..75: mol_type = other DNA
acgtccagggcgcttgacccggatctgcacacccatgcttttgtcatgaacatgacccagcgcgtggacggccag

SEQ ID NO: 700335 - DNA, 75 bp, synthetic construct
  source 1..75: mol_type = other DNA
cacctttgatatggcgcactttacggatgaacaaatccggggattctcgcggcgttctgctcagatagaagaagg

SEQ ID NO: 700336 - DNA, 75 bp, synthetic construct
  source 1..75: mol_type = other DNA
agttcccagcgtttcaaagaactgcttgtcggggagattgacccttttacacagatgaagcgctccagcggtgac

SEQ ID NO: 700337 - DNA, 75 bp, synthetic construct
  source 1..75: mol_type = other DNA
tacgcttcgaccgttcatagcgctcaggggctaacctgcgacaaggtttttatcaatatggatacccgatcactc

SEQ ID NO: 700338 - DNA, 75 bp, synthetic construct
  source 1..75: mol_type = other DNA
attgctttcagcccgcgcacacacaccaagctgtctgtataccaggccgtcagcgccgagctggcgccgggtgat

SEQ ID NO: 700339 - DNA, 75 bp, synthetic construct
  source 1..75: mol_type = other DNA
atttaatgcacaaatcggcgggaaagtattaatgacgttgaagtacggtaataagagcgttccattcggtgcaat

SEQ ID NO: 700340 - DNA, 75 bp, synthetic construct
  source 1..75: mol_type = other DNA
gctggggcagccgttaaacgatacggtggtgcttgttaaagcgcctggcgcaaaagatgtaaaagtcgaaaacca

SEQ ID NO: 700341 - DNA, 75 bp, synthetic construct
  source 1..75: mol_type = other DNA
tgatcgagaagcataacgctcgcgcggtattcctgggggatacgtcacagacgaaagcggtagaagccggtaagc

SEQ ID NO: 700342 - DNA, 75 bp, synthetic construct
  source 1..75: mol_type = other DNA
gcgcggttacagaaattgtgacgagcaaagatcggtttgtggccgcacatggttacgccggtaccggtaaaagct

SEQ ID NO: 700343 - DNA, 75 bp, synthetic construct
  source 1..75: mol_type = other DNA
gattgcaggccagctgcttgccgggaaaaccctcaagaaggagcagatgcgcgcggttacagaaattgtgacgag

SEQ ID NO: 700344 - DNA, 75 bp, synthetic construct
  source 1..75: mol_type = other DNA
ccaccacgactgaccagagaagcaaagacgcgccaccgctaccagccatgacgaaagcggaatggcaggcgcagc

SEQ ID NO: 700345 - DNA, 75 bp, synthetic construct
  source 1..75: mol_type = other DNA
tggcgtgtggctgcgcattttttggtgtcgtttatcgtaggagtacttggcgctcgagttttgtcggcctggatc

SEQ ID NO: 700346 - DNA, 75 bp, synthetic construct
  source 1..75: mol_type = other DNA
cagcaggatattgcatcactggtgtccggcctgttctcccgtctgcggggtggaggaggcggcaatgttaagtaa

SEQ ID NO: 700347 - DNA, 75 bp, synthetic construct
  source 1..75: mol_type = other DNA
tggcgagtggcggcacattttctggtgtctttcattgttggtgtgctgggcgcgcacgtgctgtctgcctggatt

SEQ ID NO: 700348 - DNA, 75 bp, synthetic construct
  source 1..75: mol_type = other DNA
atgttaggttgggtaattacctgtcacgatgaccgggcgcaagagatactggatgcgctggagaaaaaacatggg

SEQ ID NO: 700349 - DNA, 75 bp, synthetic construct
  source 1..75: mol_type = other DNA
atgaaacgcttgagcaggcctacgatatttttctcgaactggctgtccgacaatctcgatccagctgatgttctg

SEQ ID NO: 700350 - DNA, 75 bp, synthetic construct
  source 1..75: mol_type = other DNA
acgttgtgtgatgaaatcgatcggctgatcggaaatacctggaagagggagaaagtcagccagcctgtaacagag

SEQ ID NO: 700351 - DNA, 75 bp, synthetic construct
  source 1..75: mol_type = other DNA
aagaagctacaccggaaatggaggcgaacccctaccacgactatgagcggtatgctgacgaagggccggactatg

SEQ ID NO: 700352 - DNA, 75 bp, synthetic construct
  source 1..75: mol_type = other DNA
catgaaaaacgcgacagaagccgcgcatgatggccctgatacttcaggtactgaaaacacgtctcaggatttgcg

SEQ ID NO: 700353 - DNA, 75 bp, synthetic construct
  source 1..75: mol_type = other DNA
gaaggtatcaaatctggccgcctgaaaaaaaccagccatcgggtaacgaccgttgaaggtatccgggtagagaaa

SEQ ID NO: 700354 - DNA, 75 bp, synthetic construct
  source 1..75: mol_type = other DNA
gaagtgaatgcttctatcgacggcgatgatgtggtttaccacaactatttcgacgtcagcatggcggtttctacg

SEQ ID NO: 700355 - DNA, 75 bp, synthetic construct
  source 1..75: mol_type = other DNA
caacgcctatcatcaacccaccgcagagcgcaattctgggtatgcacgctatcaaagatcgtccgatggcagtga

SEQ ID NO: 700356 - DNA, 75 bp, synthetic construct
  source 1..75: mol_type = other DNA
actccctgatccaaaagtgaatggcaatgccggtagtttcttcaaaaaccctgttgtatctgccgaaacggctaa

SEQ ID NO: 700357 - DNA, 75 bp, synthetic construct
  source 1..75: mol_type = other DNA
ggtgaaatacactttgcagcaaggtatgcccggtctggaaaatttggcattaattccgggctgtgtcggctcatc

SEQ ID NO: 700358 - DNA, 75 bp, synthetic construct
  source 1..75: mol_type = other DNA
cattccgcaggagctggcgacggcggcatcaatgactgaaaacggtcatcgtcgggatatgcaccctgccgaaca

SEQ ID NO: 700359 - DNA, 75 bp, synthetic construct
  source 1..75: mol_type = other DNA
cattccgcaggagctggcgaccgccgcatcaatgactgaaaacggtcatcgtcgggatatgcaccctgccgaaca

SEQ ID NO: 700360 - DNA, 75 bp, synthetic construct
  source 1..75: mol_type = other DNA
cattccgcaggagctggcgactgctgcatcaatgactgaaaacggtcatcgtcgggatatgcaccctgccgaaca

SEQ ID NO: 700361 - DNA, 75 bp, synthetic construct
  source 1..75: mol_type = other DNA
cgttcctgtcactcagtcaggaggtgctgttatccctgctcagtttctgcaccgcatgcagccttaacggtgtcc

SEQ ID NO: 700362 - DNA, 75 bp, synthetic construct
  source 1..75: mol_type = other DNA
cgatgcgctggcagaagaccgcatcaccaccgaacactgtcaggcgctggcgctggagaacgacaccgcgcgtca

SEQ ID NO: 700363 - DNA, 75 bp, synthetic construct
  source 1..75: mol_type = other DNA
gattccgcaggagctggcgacggccgcatcaatgactgaaaacggtcatcgtcgggatatgcaccctgccgaaca

SEQ ID NO: 700364 - DNA, 75 bp, synthetic construct
  source 1..75: mol_type = other DNA
atgcgcgactggtggcagccgacgaaagcaaacttcttcggacacctgaaaaagccgcagattatcgcagccctg

SEQ ID NO: 700365 - DNA, 75 bp, synthetic construct
  source 1..75: mol_type = other DNA
cattccgcaggagctggcgactgccgcatcgatgaccgagaacggtcagcgtcgggatatgcaccctgctgaaca

SEQ ID NO: 700366 - DNA, 75 bp, synthetic construct
  source 1..75: mol_type = other DNA
tgaagaaaggcgatgcggctgaacatgcagagttccacatgaaagacaaccgctgggtgcctggctggatgtgtg

SEQ ID NO: 700367 - DNA, 75 bp, synthetic construct
  source 1..75: mol_type = other DNA
cattccgcaggagctggcgacagcagcatcaatgactgaaaacggtcatcgtcgggatatgcaccctgccgaaca

SEQ ID NO: 700368 - DNA, 75 bp, synthetic construct
  source 1..75: mol_type = other DNA
aattccgcaggagctggcgacagccgcatcaatgactgaaaacggtcatcgtcgggatatgcaccctgccgaaca

SEQ ID NO: 700369 - DNA, 75 bp, synthetic construct
  source 1..75: mol_type = other DNA
tcgccgactggctgcactcaacatgctggcagagcgtggcatcattccggctgactggcctgtccgggtgaaggt

SEQ ID NO: 700370 - DNA, 75 bp, synthetic construct
  source 1..75: mol_type = other DNA
agcccgtcttgcagccctgttaccggagggatggtcacgggatatgacgacattcctgtcactcagccaggaggt

SEQ ID NO: 700371 - DNA, 75 bp, synthetic construct
  source 1..75: mol_type = other DNA
tgaactcattgatgaaagcctggcgatgaggggagagcggcgttgccttcacttttctcctcaggcagccagaat

SEQ ID NO: 700372 - DNA, 75 bp, synthetic construct
  source 1..75: mol_type = other DNA
ggtgaaaggaaaacgaccgtggataaagtgtttatgaaagcattttatctcagggatgaagccctggcggaagaa

SEQ ID NO: 700373 - DNA, 75 bp, synthetic construct
  source 1..75: mol_type = other DNA
atgatgtgtccggtggcgcaggggcggaagtcatggctgttcgcgggttcgctgcggggagaagagcggctggcg

SEQ ID NO: 700374 - DNA, 75 bp, synthetic construct
  source 1..75: mol_type = other DNA
ggtttttgatgtgtcaaccaacatcaatgcaggggacaaggataataaccggagataattattcatcacagtatc

SEQ ID NO: 700375 - DNA, 75 bp, synthetic construct
  source 1..75: mol_type = other DNA
gaatcgaagatggcggttctggggcctttaagagacttcagagaatatgctgctaaaaatgcagagtatatggca

SEQ ID NO: 700376 - DNA, 75 bp, synthetic construct
  source 1..75: mol_type = other DNA
gttctcttttcatcgacaggaaatcatctcccggaattattttgaaggagccaagactgacggtatcggtgatga

SEQ ID NO: 700377 - DNA, 75 bp, synthetic construct
  source 1..75: mol_type = other DNA
agagcgagaatgcatacgcgcgacgtgtgaattaccagaggtttaacgccggcgctggtgtgcatgaaccagatg

SEQ ID NO: 700378 - DNA, 75 bp, synthetic construct
  source 1..75: mol_type = other DNA
atgaagccccaggacgatatttctatcaaccctggggctgccactccaaacccaaacaatttggatggtagtccc

SEQ ID NO: 700379 - DNA, 75 bp, synthetic construct
  source 1..75: mol_type = other DNA
tcaaccctggggctacctacccaaacctgaacaatttggatggtagtcccttcttcgcatggaggcaatataaac

SEQ ID NO: 700380 - DNA, 75 bp, synthetic construct
  source 1..75: mol_type = other DNA
gtaagattggtctggtcacactgggcgttgcagtagtgatgctgttgatggtgccgtggctgaaacgcatgattg

SEQ ID NO: 700381 - DNA, 75 bp, synthetic construct
  source 1..75: mol_type = other DNA
tgaattaccagaggtttaacgccggtgctggtgtgcatgagccagatgacgagtacaacggcatccccaacaaag

SEQ ID NO: 700382 - DNA, 75 bp, synthetic construct
  source 1..75: mol_type = other DNA
ccggatggttttaaacatgtgtatgagggcgttccggagtctgatgatgatgcggcaattagactggccccctga

SEQ ID NO: 700383 - DNA, 75 bp, synthetic construct
  source 1..75: mol_type = other DNA
ccaccagcgtcagtgctggcaggaaggcggtcgtaaaaactgcgccaaagatccggtttatcgccaaatggaaag

SEQ ID NO: 700384 - DNA, 75 bp, synthetic construct
  source 1..75: mol_type = other DNA
tcaccagcgccagtgctggcaggacggtggacgtaaaaactgcgctaaagatccggtctatcgcaagatggaaag

SEQ ID NO: 700385 - DNA, 75 bp, synthetic construct
  source 1..75: mol_type = other DNA
tcgtaccgggctgcggcaaaaagtggcctctgcgcaggcggaacatcatctggtggccgatatcgcctgggcggt

SEQ ID NO: 700386 - DNA, 75 bp, synthetic construct
  source 1..75: mol_type = other DNA
caagcaaatttcctcagtggatgaactgacaaaattaacgacagaactcgccagttattgcgctgatgtatccag

SEQ ID NO: 700387 - DNA, 75 bp, synthetic construct
  source 1..75: mol_type = other DNA
tgcccgtggccccattgcgcggatttacttctacatgcgtgaccagtacaacctgaacctctcacgccagcaaac

SEQ ID NO: 700388 - DNA, 75 bp, synthetic construct
  source 1..75: mol_type = other DNA
tgcacgcggtgccattgcgcgcacctacttctatatgcgtgaccaatacaacctgacactctctcgccagcaaac

SEQ ID NO: 700389 - DNA, 75 bp, synthetic construct
  source 1..75: mol_type = other DNA
ttctggattagccgcgcggtaagggttaacgaccgtctggaaattcatgatgttattgggccagacgaatatacc

SEQ ID NO: 700390 - DNA, 75 bp, synthetic construct
  source 1..75: mol_type = other DNA
tcacggtaaacggcggcgatgcgcacgatcagcaagcgttagattatgcgctttatcacctgcgcatcatgacgc

SEQ ID NO: 700391 - DNA, 75 bp, synthetic construct
  source 1..75: mol_type = other DNA
ttacgtcgcaatgtcgtctggtcttcagccagcggcgcacgttatgccattgccagccgtcgctttgtttcggca

SEQ ID NO: 700392 - DNA, 75 bp, synthetic construct
  source 1..75: mol_type = other DNA
acaggcaagccgttttagacgagtggggcagcgcgtcgcttcgccagcttgaaatgtgcgcgcagcagagttacg

SEQ ID NO: 700393 - DNA, 75 bp, synthetic construct
  source 1..75: mol_type = other DNA
cgatcagcgggcgttagactatgcgctttatcatttgcgtattatgacgcccgcccacgacgagcgtagcagcat

SEQ ID NO: 700394 - DNA, 75 bp, synthetic construct
  source 1..75: mol_type = other DNA
ccagcaacggcactggttacaccatcgccagccgtcgctttgtttcggcagaccaactgccgctcattgcgctgg

SEQ ID NO: 700395 - DNA, 75 bp, synthetic construct
  source 1..75: mol_type = other DNA
gatctcggtcaacaaaccgatattgatatctatctcgaccgccacgtagtgcgtcaggggcgatatctttcgctg

SEQ ID NO: 700396 - DNA, 75 bp, synthetic construct
  source 1..75: mol_type = other DNA
gtgggagcatgattcagaagaaaataaatgcgatgatccatttattggattagaggttgctctaatgtcttcact

SEQ ID NO: 700397 - DNA, 75 bp, synthetic construct
  source 1..75: mol_type = other DNA
ttactgtgcagaaaatgcaactttgttgtgacctgcgcactggcaaacaagctggccagagtagcttgggcgttt

SEQ ID NO: 700398 - DNA, 75 bp, synthetic construct
  source 1..75: mol_type = other DNA
ttaaaacgactaatcagatgcatgctttcctgctggagtttggtatcagcgttccgagggggccgactattatca

SEQ ID NO: 700399 - DNA, 75 bp, synthetic construct
  source 1..75: mol_type = other DNA
cctggctaccatctggtgcgtacctgccgtgaagcggggattcgtgtggtgccgctacccggaccgtgtgctgct

SEQ ID NO: 700400 - DNA, 75 bp, synthetic construct
  source 1..75: mol_type = other DNA
ggcgaaatggtgctgattgtcgaaggccataaagcacaggaagaagacttacccgccgatgccctgcgcacgctg

SEQ ID NO: 700401 - DNA, 75 bp, synthetic construct
  source 1..75: mol_type = other DNA
taccactgaatgatgcgcttcttcagtgggaacaagagcagacagaaggcgtctcagatccatttgccggactgg

SEQ ID NO: 700402 - DNA, 75 bp, synthetic construct
  source 1..75: mol_type = other DNA
ccttcatccgatcccggatcgttccggcctgtggcgctatctcagcaccacactgctgctactgacgatgctggg

SEQ ID NO: 700403 - DNA, 75 bp, synthetic construct
  source 1..75: mol_type = other DNA
gatctcggccaacaaaccgatatcgatatctacctcgatcgccacgtggcccgtcagggacgttatctttcactg

SEQ ID NO: 700404 - DNA, 75 bp, synthetic construct
  source 1..75: mol_type = other DNA
tgatgaagattcaggcctattatgaaagctgcctgaacccgcaactgatcaccccttcagaaagccttatcgaat

SEQ ID NO: 700405 - DNA, 75 bp, synthetic construct
  source 1..75: mol_type = other DNA
atggaaaacattgcgctcattggtatcgatctgggtaaaaactctttccatattcattgccaagatcgtcgcggc

SEQ ID NO: 700406 - DNA, 75 bp, synthetic construct
  source 1..75: mol_type = other DNA
tcgcagatcatctggaatgacgcccgttcattgccattaccggaatctgaactggtcaacaaggccacggcactg

SEQ ID NO: 700407 - DNA, 75 bp, synthetic construct
  source 1..75: mol_type = other DNA
gtattatcgacctggtctatcccgcgcactggcagccttatattgcgcaggatctggggcagcaaacggatatcg

SEQ ID NO: 700408 - DNA, 75 bp, synthetic construct
  source 1..75: mol_type = other DNA
gaaagcgcgacgcaatggctggcagggcgcgctgtttccgtgggagagcgcacgtagcggcgaagaagaaacgcc

SEQ ID NO: 700409 - DNA, 75 bp, synthetic construct
  source 1..75: mol_type = other DNA
gtcatttcaccggcagtcgcggaagttggtttgtgcctttacaggataatgatcgttatctcacctggagccagc

SEQ ID NO: 700410 - DNA, 75 bp, synthetic construct
  source 1..75: mol_type = other DNA
atccgcagtcgttacggtattcggcaactgatttggcagggcgatacgcagatattaagtttgacgccaggcgca

SEQ ID NO: 700411 - DNA, 75 bp, synthetic construct
  source 1..75: mol_type = other DNA
ctacgtttataagctgcccggaatgctttggcgatgatgattgcgatacctgtgacgggagcggacgaattgaaa

SEQ ID NO: 700412 - DNA, 75 bp, synthetic construct
  source 1..75: mol_type = other DNA
gtatggcgatttgtggttcctgcggcatgatggttaacaacgtgccaaaactggcatgtaaaaccttcttgcgtg

SEQ ID NO: 700413 - DNA, 75 bp, synthetic construct
  source 1..75: mol_type = other DNA
gatcgttatctcacctggagccagcttggtcttactcagcaggatgatgggctggtgagcaatgtgggcgttggg

SEQ ID NO: 700414 - DNA, 75 bp, synthetic construct
  source 1..75: mol_type = other DNA
ctaacgcacaatctaccttcgagcaaaaagcggcaaatccctttgataataacaatgatggtctgccggatttag

SEQ ID NO: 700415 - DNA, 75 bp, synthetic construct
  source 1..75: mol_type = other DNA
ggcctgtttgatgagtcaggggcattgattgccgtggggaactgcccggaaagctataaaccgcaactggctgaa

SEQ ID NO: 700416 - DNA, 75 bp, synthetic construct
  source 1..75: mol_type = other DNA
caacattgttcgctggggtaatcagacgcgagaccctgagacgctcaggtatcgatattctttcgacgttgactg

SEQ ID NO: 700417 - DNA, 75 bp, synthetic construct
  source 1..75: mol_type = other DNA
cgctgaaggtatcgaaactgcgctgtctgcacatcagatttacaaagtgaatacctgggcgactatgaccgccaa

SEQ ID NO: 700418 - DNA, 75 bp, synthetic construct
  source 1..75: mol_type = other DNA
attacactttccgactccttccgtcttatgagaaaagcaaatattaacaccctgacggccacacagaacaaccgg

SEQ ID NO: 700419 - DNA, 75 bp, synthetic construct
  source 1..75: mol_type = other DNA
taattcctggttgtgtcggctcatcacctatccagaatattggtgcttatggcgtagaattacagcgagtttgcg

SEQ ID NO: 700420 - DNA, 75 bp, synthetic construct
  source 1..75: mol_type = other DNA
atcatttggcatcgagaaaaatgtctgccggaatctgtgaaagacagaccaagccgaagctatgaatatgtattc

SEQ ID NO: 700421 - DNA, 75 bp, synthetic construct
  source 1..75: mol_type = other DNA
ttctatgaagtgccttatgacgcaaccacctcgttgctggatgcgctgggctatatcaaagacaacctggcgccg

SEQ ID NO: 700422 - DNA, 75 bp, synthetic construct
  source 1..75: mol_type = other DNA
gccagctcggccttcagccctatgagcctatttcacaggctatgcatgaattcaccgatacccgcgatgaaaaca

SEQ ID NO: 700423 - DNA, 75 bp, synthetic construct
  source 1..75: mol_type = other DNA
ctctgttctgatgttgtcggcttgctcgtcaatcgtgctatttatctcaaaaaaataaccactgcggatgaatta

SEQ ID NO: 700424 - DNA, 75 bp, synthetic construct
  source 1..75: mol_type = other DNA
gcaggtccaactaccttatagcagtattgtggtcgatgaagctcaagatatcggtgccccggcatttactcttat

SEQ ID NO: 700425 - DNA, 75 bp, synthetic construct
  source 1..75: mol_type = other DNA
ttacaggtcactcttgacgcgcagcgtattgcgattcgaacttctgcgcccgtttcactgcgtttgaacggtcag

SEQ ID NO: 700426 - DNA, 75 bp, synthetic construct
  source 1..75: mol_type = other DNA
aaatcactattactccgctggacgccgacgcgtcagtgctgatttcaacaggcattgacgccacgcaaaccaacc

SEQ ID NO: 700427 - DNA, 75 bp, synthetic construct
  source 1..75: mol_type = other DNA
ctgacgaaattaacgacagaaatcgccagctattgcgctgataaatttaagaagctgaacgacaaaaggagctgg

SEQ ID NO: 700428 - DNA, 75 bp, synthetic construct
  source 1..75: mol_type = other DNA
tctcactcctctgtttgcagagctgcggaatgataatccacaaaaaaatgatggggttttcgatatagacaatat

SEQ ID NO: 700429 - DNA, 75 bp, synthetic construct
  source 1..75: mol_type = other DNA
taatgttcttaacgtggtatgcggcgtggcgaaacttaaatttgacgatgcggtaaaaggcgttgcgccttacgt

SEQ ID NO: 700430 - DNA, 75 bp, synthetic construct
  source 1..75: mol_type = other DNA
tttgtctggtcaatgcagaaagtcagaaggttgtctgccaggtgcaggggcgtacttataccctgagttacccgc

SEQ ID NO: 700431 - DNA, 75 bp, synthetic construct
  source 1..75: mol_type = other DNA
cgcagagccaaacttcgatataaatggcaactctccggtaactccggatggttgggttatagtgccgaagaaact

SEQ ID NO: 700432 - DNA, 75 bp, synthetic construct
  source 1..75: mol_type = other DNA
agctgcggaatgataatccacaaaaaaatgatggggtgatggcacgaatatactgccgttccaggctcgttatat

SEQ ID NO: 700433 - DNA, 75 bp, synthetic construct
  source 1..75: mol_type = other DNA
atggggttttcgatatagacaatatgccccttactgaagaacctgagtgcgttattaacgacctgaatctgtatt

SEQ ID NO: 700434 - DNA, 75 bp, synthetic construct
  source 1..75: mol_type = other DNA
cggtaaccgtcggcgcattagttactgctaatcaagctgattccctggtcactgtgcagcgtctggatccgattt

SEQ ID NO: 700435 - DNA, 75 bp, synthetic construct
  source 1..75: mol_type = other DNA
ggtaggaacttatcgttctcgtgatggcctgcgaaaggatgtatttacgcgtgcagtatttatattgccagagat

SEQ ID NO: 700436 - DNA, 75 bp, synthetic construct
  source 1..75: mol_type = other DNA
aacttttcccggatattacctttactatccaagccgtaagcagcacccacctgcttttgcgctgatgatcgatgc

SEQ ID NO: 700437 - DNA, 75 bp, synthetic construct
  source 1..75: mol_type = other DNA
tgccgggatccgtctgggggaaagcgtggataaagacatgattgcggtaagaattgggccggacatgagaatggc

SEQ ID NO: 700438 - DNA, 75 bp, synthetic construct
  source 1..75: mol_type = other DNA
gttgtataccgtatgggcttcggtgccactcgtgcagaagcacgtcagctggttagccataaagcaattatggta

SEQ ID NO: 700439 - DNA, 75 bp, synthetic construct
  source 1..75: mol_type = other DNA
catgtgatatggaacaaattgtagaactggccaaaagtagaaatttgtttgtaattgaagattgcgctgaagcct

SEQ ID NO: 700440 - DNA, 75 bp, synthetic construct
  source 1..75: mol_type = other DNA
ttggggagcaccggttcagggaaatctttcactgttgcttccatacttgaacagtctgcgcagctagctcacgcc

SEQ ID NO: 700441 - DNA, 75 bp, synthetic construct
  source 1..75: mol_type = other DNA
tgtcgatattgttgaaggacgttttgatgccgggatacgtctgggtgaaactgtcgataaggatatgattgcagt

SEQ ID NO: 700442 - DNA, 75 bp, synthetic construct
  source 1..75: mol_type = other DNA
atgagcatcaaaacacataccggaataatcattaccaatgatggtgagaaaagagtgaaagagcgcggcatgatt

SEQ ID NO: 700443 - DNA, 75 bp, synthetic construct
  source 1..75: mol_type = other DNA
cacaagccagcgttacgcgtgctgtggtcatacagcgaaagaaaatcgcctgtcacaaagtcaattcagatgcca

SEQ ID NO: 700444 - DNA, 75 bp, synthetic construct
  source 1..75: mol_type = other DNA
gaactggtcgttgataacggctttgtcgatattgttgaggggcgttttgatgccgggatccgtctgggggaaagc

SEQ ID NO: 700445 - DNA, 75 bp, synthetic construct
  source 1..75: mol_type = other DNA
tgtcgatattgttgaagggcgttttgatgccgggatacgtctgggtgaaactgtggataaagatatgattgcagt

SEQ ID NO: 700446 - DNA, 75 bp, synthetic construct
  source 1..75: mol_type = other DNA
tgtcgatattgttgaaggccgttttgatgccgggatacgtctgggtgaaactgtagataaggatatgattgcagt

SEQ ID NO: 700447 - DNA, 75 bp, synthetic construct
  source 1..75: mol_type = other DNA
ttcctcctcaggagatccctgattttacactcgatgctgttgttaccacggttgtcgcgttgctcaatgaccggc

SEQ ID NO: 700448 - DNA, 75 bp, synthetic construct
  source 1..75: mol_type = other DNA
caacaacctggttctgcatctggctggcacaatattactttgtcattaaccgattgtccggttgaaacaagtgca

SEQ ID NO: 700449 - DNA, 75 bp, synthetic construct
  source 1..75: mol_type = other DNA
tggccgccgtgatggcgcgctttacccgcgcgtcgtttgtcgacgttttaagcgaagattatatgcgtaccgcga

SEQ ID NO: 700450 - DNA, 75 bp, synthetic construct
  source 1..75: mol_type = other DNA
tggcggcggtgatggcgcgttttacccgtgcttcatttgtcgatgtcttaagtgaagattatatgcgtaccgcga

SEQ ID NO: 700451 - DNA, 75 bp, synthetic construct
  source 1..75: mol_type = other DNA
gctagaaaactcgaggggcgactgagcctatcagaaggatggtttgacatcccccactcattgctggattcccca

SEQ ID NO: 700452 - DNA, 75 bp, synthetic construct
  source 1..75: mol_type = other DNA
ttcaaaaagacttcacaagaggttcctgttagctacgttttgcgcgttattcacagcaactctccaggccgccga

SEQ ID NO: 700453 - DNA, 75 bp, synthetic construct
  source 1..75: mol_type = other DNA
tcacctgcactattcaaaccaaagaagctaacgttaatctcggggatctttatacgcgcaatctgcaacaacctg

SEQ ID NO: 700454 - DNA, 75 bp, synthetic construct
  source 1..75: mol_type = other DNA
ggcattacgtatatgcttcagatgacggttttgatcccaatttttccacccagaaagctgacacaacacgaatga

SEQ ID NO: 700455 - DNA, 75 bp, synthetic construct
  source 1..75: mol_type = other DNA
atgagacgttccggcggcacactgtttcttatcgtcctgctgacagcgacaacactcctgacagcctgcacgcca

SEQ ID NO: 700456 - DNA, 75 bp, synthetic construct
  source 1..75: mol_type = other DNA
ctttctgaactaatgtttaaaaatgacggggacaataaatggagttgctggacatctttagggtctctcgccgaa

SEQ ID NO: 700457 - DNA, 75 bp, synthetic construct
  source 1..75: mol_type = other DNA
agacagttggcagcactacattttaccctccctgacgctcggcgcggcagtggcagccgtgatggcgcgctttac

SEQ ID NO: 700458 - DNA, 75 bp, synthetic construct
  source 1..75: mol_type = other DNA
gtcgtcccgttgccaatgagattgccagccgcttcatgcctactctatggttgactattaccagtatgacctggg

SEQ ID NO: 700459 - DNA, 75 bp, synthetic construct
  source 1..75: mol_type = other DNA
catcaggttaattcacttcagcgcagggatgatttttaccgtgatattgctgatgcggatttactgggcgttcgt

SEQ ID NO: 700460 - DNA, 75 bp, synthetic construct
  source 1..75: mol_type = other DNA
gatgccaggtatgtggatatacagcgaacgccgatgtaaatggcgctcgtaacattttagctgcggggcacgccg

SEQ ID NO: 700461 - DNA, 75 bp, synthetic construct
  source 1..75: mol_type = other DNA
tgaacgctgtgatgaggatttgcgggagcgcctgcaatcctcatcgttcagtgatatgctgtccggcttcaaaga

SEQ ID NO: 700462 - DNA, 75 bp, synthetic construct
  source 1..75: mol_type = other DNA
gtcgctgctgaccacgcaggcgtatacaggacgaccctggcctctgattgatggcgtcgggcagatttacggcat

SEQ ID NO: 700463 - DNA, 75 bp, synthetic construct
  source 1..75: mol_type = other DNA
tttttgagctgcgcacattgccgcatcagcagttacagcaaaataaaagctggcgacatgtgaaaaatgaacgcg

SEQ ID NO: 700464 - DNA, 75 bp, synthetic construct
  source 1..75: mol_type = other DNA
atcattcgaataagaccatttacacatccgtatttattgaaagtatttcaaaaattaacataccagccagaattt

SEQ ID NO: 700465 - DNA, 75 bp, synthetic construct
  source 1..75: mol_type = other DNA
caactggccaagctggcggtaaaagatttacgtattgatacccgaaactccgaaaccggattaatacgatatagc

SEQ ID NO: 700466 - DNA, 75 bp, synthetic construct
  source 1..75: mol_type = other DNA
gtatgcggctcactccaggcctgtatcagcccccatttcgctccggaggctttcttttcccagagggcagactct

SEQ ID NO: 700467 - DNA, 75 bp, synthetic construct
  source 1..75: mol_type = other DNA
ttaaccgttcagcaagctggcagtatatcggtgcaggtgatgatcgcattgtgctttccggcgtgctttatcctg

SEQ ID NO: 700468 - DNA, 75 bp, synthetic construct
  source 1..75: mol_type = other DNA
acgctgtcaggcgtcctttacccggaaatcaccggtggaaatatctcgctgtcagcccttgaaactgtcggctac

SEQ ID NO: 700469 - DNA, 75 bp, synthetic construct
  source 1..75: mol_type = other DNA
cgaccgtcagcgatgccctggccgggttaaagacgagtgcaaataatgcgataaaccgggtgaaagactcgctca

SEQ ID NO: 700470 - DNA, 75 bp, synthetic construct
  source 1..75: mol_type = other DNA
ttaaccgttcagcaagctggcagtatatcggggcaggcgatgatcgcatcgttctttctggtgtgctttatcctg

SEQ ID NO: 700471 - DNA, 75 bp, synthetic construct
  source 1..75: mol_type = other DNA
ttaaccgttcggcaagctggcagtatatcggtgcaggtgatgatcgcatcgttctttcgggtgttctttatcctg

SEQ ID NO: 700472 - DNA, 75 bp, synthetic construct
  source 1..75: mol_type = other DNA
acaggacgcccctggcctctgattgatggtgtcgggcagatttacggcatgtatgtgctgactgaaacgaatacg

SEQ ID NO: 700473 - DNA, 75 bp, synthetic construct
  source 1..75: mol_type = other DNA
aacctgctttcacgtttacggtgttaaaagattaccttgaaactcaggaaattgaacctcgatatttctactaca

SEQ ID NO: 700474 - DNA, 75 bp, synthetic construct
  source 1..75: mol_type = other DNA
tgtacgggcgcaagatcgagcgtccacaacgtggcctgcccgcacacctgtatcttcccggcgctcacggcggcg

SEQ ID NO: 700475 - DNA, 75 bp, synthetic construct
  source 1..75: mol_type = other DNA
gcactggcaggccgcaccggagcccgcgaatgccgccccggagatgacgccggaagatcgggaggcagcgcttga

SEQ ID NO: 700476 - DNA, 75 bp, synthetic construct
  source 1..75: mol_type = other DNA
atgcacagggcgcaagggaagccgcagcctgacgcacacggctggcgggagttggagggtgagaccgcgaaatct

SEQ ID NO: 700477 - DNA, 75 bp, synthetic construct
  source 1..75: mol_type = other DNA
atgatagtcattgaggatttgaaggtcagcaacatgtcaaagtcagcagcgggtacggtcagccagccggggcgc

SEQ ID NO: 700478 - DNA, 75 bp, synthetic construct
  source 1..75: mol_type = other DNA
actggcaggccgcaccgcagccggaaaacgccgccccggagatgagcgacacggatcgggaggcggcgctggaac

SEQ ID NO: 700479 - DNA, 75 bp, synthetic construct
  source 1..75: mol_type = other DNA
gaaaacacggcgtcaggcaggtactgatcgcctacgacaatgatccggcgggtaatgaggcggcggtgaaacagg

SEQ ID NO: 700480 - DNA, 75 bp, synthetic construct
  source 1..75: mol_type = other DNA
ttaatggatgcggtgctcaacctgatcccgccagaggaacggctgcaatacagcgccatgaccgggcagagcctg

SEQ ID NO: 700481 - DNA, 75 bp, synthetic construct
  source 1..75: mol_type = other DNA
gcgcccgcagtcgcggcggttatgcgcgggccgccgccgcagaactgggcctggcagaaggcgatctgcgtcgct

SEQ ID NO: 700482 - DNA, 75 bp, synthetic construct
  source 1..75: mol_type = other DNA
atgatggcgaatgcccgttcagtgaagtacgctgctgctacggttgcctgtattaccgcccctttactgatggtg

SEQ ID NO: 700483 - DNA, 75 bp, synthetic construct
  source 1..75: mol_type = other DNA
ggtttaaaccgttcgatactggatcagggctggtatgaaatgcgccgccagcttgcgtacaagcagctctggcgt

SEQ ID NO: 700484 - DNA, 75 bp, synthetic construct
  source 1..75: mol_type = other DNA
atgcatacctttatttttcttgtgctgataaaaaatattaacggtggcggaagctggaatgttaccccccatgcc

SEQ ID NO: 700485 - DNA, 75 bp, synthetic construct
  source 1..75: mol_type = other DNA
tcagcgtggaagcgttgccggaaggtgaactgatgatcgccttaccgggagaacgctggacgatacggggcttaa

SEQ ID NO: 700486 - DNA, 75 bp, synthetic construct
  source 1..75: mol_type = other DNA
caccggtacaggtggtgattaccgaaggttacgccacggcactgacggtgagccagatcaccgccggatgcgtag

SEQ ID NO: 700487 - DNA, 75 bp, synthetic construct
  source 1..75: mol_type = other DNA
taaagctgactggaatgacttccaccgtgagcacggtattacacgtgcccgtgaagcctttcgtaacggtcttgt

SEQ ID NO: 700488 - DNA, 75 bp, synthetic construct
  source 1..75: mol_type = other DNA
actgaaagctaaaggcatgaagcaaaaagctgtagcagaggcgttaggcttagggattgcaacggttaaacgtaa

SEQ ID NO: 700489 - DNA, 75 bp, synthetic construct
  source 1..75: mol_type = other DNA
tagcgggaaaaccctggctgagcatcttgagcagcacgtagcgcattatcatggtgcaccattccgcgactggct

SEQ ID NO: 700490 - DNA, 75 bp, synthetic construct
  source 1..75: mol_type = other DNA
tttccggggctgcaattgggcgctggccttatatcctgtcagcattaggtatcaaagtaccgtccgcaggacatc

SEQ ID NO: 700491 - DNA, 75 bp, synthetic construct
  source 1..75: mol_type = other DNA
gtaatcagtgcggtcatggcgatggtcttgatctggttcgtctggtgacaggaagaaagataaaagaagtcgccg

SEQ ID NO: 700492 - DNA, 75 bp, synthetic construct
  source 1..75: mol_type = other DNA
tcagccaggtaaagcaaaaactgcttaatactccagaagctgtcaaagggtatgaagatgccgataaagaactgg

SEQ ID NO: 700493 - DNA, 75 bp, synthetic construct
  source 1..75: mol_type = other DNA
attattcagcaaccgcagtcataatttctggcctgtattatcggggttccttgtggcagtagcctatttattgat

SEQ ID NO: 700494 - DNA, 75 bp, synthetic construct
  source 1..75: mol_type = other DNA
atggttgatcgcttcctcgccgctctccacggcgacgatggccgccgccatcagcaagtgcgccagttcccctat

SEQ ID NO: 700495 - DNA, 75 bp, synthetic construct
  source 1..75: mol_type = other DNA
caaaaaataaaaacgctaaagtgaaaaaaaaaagacgactcagcaggtttctcaatccgaacgaaactcattgtt

SEQ ID NO: 700496 - DNA, 75 bp, synthetic construct
  source 1..75: mol_type = other DNA
cgtatgcaatcagagtttgaaaaaaacaatctcttcgccgggttaacgcagggagttgaaggcatagctctgttt

SEQ ID NO: 700497 - DNA, 75 bp, synthetic construct
  source 1..75: mol_type = other DNA
cgcgtatttcctatgatgctgaccccaaaaaataaaaacgctaaagtgaaaaaacaaaagaagactccgcaggtt

SEQ ID NO: 700498 - DNA, 75 bp, synthetic construct
  source 1..75: mol_type = other DNA
gcacggttacgcgtctataccacccatcttgtcagtacctcgttcgtctcccctgccatccagcgggcggcaggt

SEQ ID NO: 700499 - DNA, 75 bp, synthetic construct
  source 1..75: mol_type = other DNA
aatacgctggatgtgccggtcatcgacaactactggcagaccgaatccggctggccgattatggcgattgctcgc

SEQ ID NO: 700500 - DNA, 75 bp, synthetic construct
  source 1..75: mol_type = other DNA
cgagccgaccgccagttgggtgagcaatacgctggatgtgccggtcatcgacaactactggcagaccgaatccgg

SEQ ID NO: 700501 - DNA, 75 bp, synthetic construct
  source 1..75: mol_type = other DNA
tttacgagcgtgcgttgcaggtggcgggcgtcgcagaagtttgggtggcaactgacgacccgcgtgttgaacagg

SEQ ID NO: 700502 - DNA, 75 bp, synthetic construct
  source 1..75: mol_type = other DNA
attggtgaacacacctggctgattgagaaagctggaatcgtggttcacagatgccaacgcaacccatttaccgga

SEQ ID NO: 700503 - DNA, 75 bp, synthetic construct
  source 1..75: mol_type = other DNA
ctgcgcagggcgctgactgatgccgtcacggtgctgaaaactaaccccgagatgctgcggatattcgtggataac

SEQ ID NO: 700504 - DNA, 75 bp, synthetic construct
  source 1..75: mol_type = other DNA
tttacaacgggttatatgcggatgccagcgcgttccgttcgtttcgggtgcttccagtcgatgccttcgagaagc

SEQ ID NO: 700505 - DNA, 75 bp, synthetic construct
  source 1..75: mol_type = other DNA
gattgccgcaaccggtccgggcgtcgacaccccagcatgcctggaaaaagtgcgcgccctgatggcacaggaact

SEQ ID NO: 700506 - DNA, 75 bp, synthetic construct
  source 1..75: mol_type = other DNA
ccaatgattcgcccgcgggatgtagaaacgctgctacaaggaatgcgtgatgatcccgcgttgccagtggcaacg

SEQ ID NO: 700507 - DNA, 75 bp, synthetic construct
  source 1..75: mol_type = other DNA
atgcaacagcggctgtactgcacaggaattatttatcagttgatatgccgtgccatgatattgctattgccgaaa

SEQ ID NO: 700508 - DNA, 75 bp, synthetic construct
  source 1..75: mol_type = other DNA
cgatcccgcgttgccggtggcaacgctatgccacgcgatttctgccgaagaagcgactgaacccagcacggtaaa

SEQ ID NO: 700509 - DNA, 75 bp, synthetic construct
  source 1..75: mol_type = other DNA
ttccgtatccgcgtaatgctgaaaaagcgcgctacctgaaacacgtcggtatttacgcttatcgtcgcgatgtgc

SEQ ID NO: 700510 - DNA, 75 bp, synthetic construct
  source 1..75: mol_type = other DNA
ccaatgattcgcccgcgggatgtagaaacgctgttacaaggaatgcgtgatgaccccgcgttgccagtggcaacg

SEQ ID NO: 700511 - DNA, 75 bp, synthetic construct
  source 1..75: mol_type = other DNA
gttaagacgcagccgtgcgcatgttgtggaaagccagctgatgatccccaccacctgataggccacggtcagggt

SEQ ID NO: 700512 - DNA, 75 bp, synthetic construct
  source 1..75: mol_type = other DNA
ttcagaaaatcactgacttagactggccggatttacaacaatttatatctaatggtataaatagattcgataagt

SEQ ID NO: 700513 - DNA, 75 bp, synthetic construct
  source 1..75: mol_type = other DNA
gcttgtagaacaagaggtatttcaagaaatgagcagatatttaaaagagatagaaaatgaagcgacaaatagcta

SEQ ID NO: 700514 - DNA, 75 bp, synthetic construct
  source 1..75: mol_type = other DNA
ctacgttcggcaacggctgtaggcatgataagacgcgcaagcgtcgcatcaggcatcgtgcaccgattgccggat

SEQ ID NO: 700515 - DNA, 75 bp, synthetic construct
  source 1..75: mol_type = other DNA
tcagcactgcgaagatgctccgtgcatcgacgtatgcccgacaggggcgtcgtggcgtgatgagcaggggatcgt

SEQ ID NO: 700516 - DNA, 75 bp, synthetic construct
  source 1..75: mol_type = other DNA
atcacagcttcggtgaaaataaatataatctgcttggtcgccagtatccgatgggcgatacaaaaagtatcgaag

SEQ ID NO: 700517 - DNA, 75 bp, synthetic construct
  source 1..75: mol_type = other DNA
ttgttacgtactgcatcgccttattcatggcgaagcttgggaactttgatctgcaggcggcagcgaccatcaccg

SEQ ID NO: 700518 - DNA, 75 bp, synthetic construct
  source 1..75: mol_type = other DNA
tggaagaaggccgccaaagctcaatgtttgacgaccatccagcatccgccgaacgcgcccagcatattcgcgatc

SEQ ID NO: 700519 - DNA, 75 bp, synthetic construct
  source 1..75: mol_type = other DNA
cgccaacgcggcatcagcccggcaggtcttgccaccagctttgaaaaactggcaaagctggaagaaggccgtcaa

SEQ ID NO: 700520 - DNA, 75 bp, synthetic construct
  source 1..75: mol_type = other DNA
ggatgttagctctcgatctgttggctataggtccatctctcgaggaaatagcaaccttatgggagcggtgtatgg

SEQ ID NO: 700521 - DNA, 75 bp, synthetic construct
  source 1..75: mol_type = other DNA
gatattaacgcatttcatgagttaaataatcttggcgtcatactggatttacgcgtcgtagcgtcagatccctca

SEQ ID NO: 700522 - DNA, 75 bp, synthetic construct
  source 1..75: mol_type = other DNA
ccgtactccattaagaaatggaatcgtgacaagtttgccgctgatccgtatggtcgtaatctttatggcgtaccg

SEQ ID NO: 700523 - DNA, 75 bp, synthetic construct
  source 1..75: mol_type = other DNA
ctgatgattccggtcatacggcagcagagttctacaccaaccgaacagtcgtgcatttaatgacgcgcattatgg

SEQ ID NO: 700524 - DNA, 75 bp, synthetic construct
  source 1..75: mol_type = other DNA
gtccgtaccaggttcgctaccttaaccctgtcactaaagtggcagataaatgtgatttctgcgctgagtcccgac

SEQ ID NO: 700525 - DNA, 75 bp, synthetic construct
  source 1..75: mol_type = other DNA
tatgatgacagataacgaagtcgaagcggtgatcggtcacgagatggggcacgtagcgttaggccatgtgaagaa

SEQ ID NO: 700526 - DNA, 75 bp, synthetic construct
  source 1..75: mol_type = other DNA
ttaaattgaatttctcatattttgaaagaaacattaatgctaacttattaacatctataaaagatacccttgcct

SEQ ID NO: 700527 - DNA, 75 bp, synthetic construct
  source 1..75: mol_type = other DNA
aagagcttactaaagaattaatagcaggttatacgaagcaagcagagtttgaaattctaacggacttttcctcaa

SEQ ID NO: 700528 - DNA, 75 bp, synthetic construct
  source 1..75: mol_type = other DNA
ccagtggccacattcatcgtggcacgacaagaacttcacaacaatgcggcacccaccaggaagcattcgcctgtg

SEQ ID NO: 700529 - DNA, 75 bp, synthetic construct
  source 1..75: mol_type = other DNA
ctgcgggcgggattgtcggcagtttatcgcaatcacaactcggtgacctgggcgagaaattagtcaattcgcaat

SEQ ID NO: 700530 - DNA, 75 bp, synthetic construct
  source 1..75: mol_type = other DNA
tcaacggtcagccagtgaactacaaagtgtatatggctaaggatgtgaatgcgtttgcgatggccaacggctgta

SEQ ID NO: 700531 - DNA, 75 bp, synthetic construct
  source 1..75: mol_type = other DNA
catggtatgaagctgcaacaaaacgtccaggcagtctacatggaatgtaaagaaaaaatagagattcggcatgaa

SEQ ID NO: 700532 - DNA, 75 bp, synthetic construct
  source 1..75: mol_type = other DNA
gtgaccgtggtgacatcgttggcgtttactgcacggttaagactcctgcaggtgattaccttacggaagagatga

SEQ ID NO: 700533 - DNA, 75 bp, synthetic construct
  source 1..75: mol_type = other DNA
ccctgtcactaaagtggcagataaatgtgatttctgcgctgagtcccgactggcaaaaggctttccgcccatttg

SEQ ID NO: 700534 - DNA, 75 bp, synthetic construct
  source 1..75: mol_type = other DNA
caaggagatagtttcagaactgatttttccgaattgcgtataggggataatttgttcaattcactatcagagctt

SEQ ID NO: 700535 - DNA, 75 bp, synthetic construct
  source 1..75: mol_type = other DNA
ggaaacgattattagataacagcggacatcctgcattgaaaatagtacaggataaacctgaacatgccgatgaat

SEQ ID NO: 700536 - DNA, 75 bp, synthetic construct
  source 1..75: mol_type = other DNA
atgagcatgagcattgttgagttcgttaaacagcaagagccgctctttgttggggcggttacagaccaatcagtc

SEQ ID NO: 700537 - DNA, 75 bp, synthetic construct
  source 1..75: mol_type = other DNA
accgctatcagtctgcagaaagccgggctgcacacgccggcacagcaggccattcatctggcccttcctgtgctg

SEQ ID NO: 700538 - DNA, 75 bp, synthetic construct
  source 1..75: mol_type = other DNA
agcggtgtggtggtgagaatcgccggtgaaggccgtccgtggaatcccggtgccatcaccggtggccgcgtgtgg

SEQ ID NO: 700539 - DNA, 75 bp, synthetic construct
  source 1..75: mol_type = other DNA
ccgaccgtttcacggtggtacaggggtatgccggtgtgggtaagaccactcagttccgggcggtgatgtcagccg

SEQ ID NO: 700540 - DNA, 75 bp, synthetic construct
  source 1..75: mol_type = other DNA
gtcaggagggcgcatgggcaccggagcactccgtgacggagttcagtcacagccaggaagcgaaactggcagaag

SEQ ID NO: 700541 - DNA, 75 bp, synthetic construct
  source 1..75: mol_type = other DNA
gacagtccggcacggtttattgcaccggggcgcaaatatccgcagccgtatgtggcactgccggcgtttgaccgt

SEQ ID NO: 700542 - DNA, 75 bp, synthetic construct
  source 1..75: mol_type = other DNA
tttactgaactgggacgggaaatcgatgcgcagataaaacggggtgatttactgcatgtggatgtggctaaaggc

SEQ ID NO: 700543 - DNA, 75 bp, synthetic construct
  source 1..75: mol_type = other DNA
ccaaagaagaggcgattcgttttgcaggcgagcaactggtgaaaggcggttacgttgagccagaatatgtgcagg

SEQ ID NO: 700544 - DNA, 75 bp, synthetic construct
  source 1..75: mol_type = other DNA
aagggaaacctgccagcggtcgtgcggtattgtcacaggagcaggacggcatcaaatcgcacacccacggaggga

SEQ ID NO: 700545 - DNA, 75 bp, synthetic construct
  source 1..75: mol_type = other DNA
agggaccggttacgtggagggattacgcgcagagctgaccgaagacataccgctgaccacgccagacttcccgtc

SEQ ID NO: 700546 - DNA, 75 bp, synthetic construct
  source 1..75: mol_type = other DNA
tgttcagtacggcacgggaactgcgggacgtggcggcaggccgtgccgttctccgtcaggcagggctggccgggg

SEQ ID NO: 700547 - DNA, 75 bp, synthetic construct
  source 1..75: mol_type = other DNA
ctggcccttcctgtgctggaaagtaaaaacctggccttcagcatggtggacctgctgacagaggcgaagtcgttt

SEQ ID NO: 700548 - DNA, 75 bp, synthetic construct
  source 1..75: mol_type = other DNA
actgcagggcagcgtcgataaggatgtttttacccgtcttctggagggcaggctgccggacggggcggatctaag

SEQ ID NO: 700549 - DNA, 75 bp, synthetic construct
  source 1..75: mol_type = other DNA
gtgagcgggtggctgaactggtcatgatggcccgggagcaggggcgggaagtgcagattatcgctgctgaccgtc

SEQ ID NO: 700550 - DNA, 75 bp, synthetic construct
  source 1..75: mol_type = other DNA
cggaactgcgggaggcggtatacagcctgattaaccgggatgtggaaagggcactgtccgggcttgagagtgtga

SEQ ID NO: 700551 - DNA, 75 bp, synthetic construct
  source 1..75: mol_type = other DNA
aaggatgccggggtgaacacatatcgctggcagggcggagagcagcgaccggcaaccatcatcagtgaaccagac

SEQ ID NO: 700552 - DNA, 75 bp, synthetic construct
  source 1..75: mol_type = other DNA
gattgtcagaaaaatggcggagaacaaacctgacctgccggacggcagaacagagcaggctgtcagggagattgc

SEQ ID NO: 700553 - DNA, 75 bp, synthetic construct
  source 1..75: mol_type = other DNA
ggaacccggagacacgcagtcatgaccgctatgtgatagaccgggtgacggcgcagagtaacagcctgaccctgc

SEQ ID NO: 700554 - DNA, 75 bp, synthetic construct
  source 1..75: mol_type = other DNA
tattgatgaaatagttacaggttcatatcaccagatttcacttgaaggtcttgctgctgggaatgttgttattaa

SEQ ID NO: 700555 - DNA, 75 bp, synthetic construct
  source 1..75: mol_type = other DNA
cgccactcgcaggaagcccaaatcgtttttcagatgagttaaataaacttgatacagtgcaatctgtttgcttca

SEQ ID NO: 700556 - DNA, 75 bp, synthetic construct
  source 1..75: mol_type = other DNA
ggcaggccgtgccgttcttcgtcaggcgggacttgccgggggagacagtcctgcacggtttattgctccgggacg

SEQ ID NO: 700557 - DNA, 75 bp, synthetic construct
  source 1..75: mol_type = other DNA
gaccggtgaccggatgcgcttcacgaagagtgaccgggagcgcggttatgtggccaacagcgtctggacggtgac

SEQ ID NO: 700558 - DNA, 75 bp, synthetic construct
  source 1..75: mol_type = other DNA
cgcgttcaggaaatgaaagcagagtctaaaggtgcttccccgctggctgctggcgatgtaaccaacgacctgagt

SEQ ID NO: 700559 - DNA, 75 bp, synthetic construct
  source 1..75: mol_type = other DNA
tgttcagtacggcgcgggagctgcgggacgtggcggcaggccgtgccgttcttcgtcaggcggggcttgccgggg

SEQ ID NO: 700560 - DNA, 75 bp, synthetic construct
  source 1..75: mol_type = other DNA
cgccgaatttcagcaacacgctgttcctgctcgatgagagctctatggtgggcaataccgacatggcacgggcat

SEQ ID NO: 700561 - DNA, 75 bp, synthetic construct
  source 1..75: mol_type = other DNA
cggtccgggaggttgcccgggaaaatctgctgcaggagcgtctgcagcagatggagcgggatatggttcgtgacc

SEQ ID NO: 700562 - DNA, 75 bp, synthetic construct
  source 1..75: mol_type = other DNA
atcatgaaggagattgtgcgtcagacgccggaactgcgggaggcggtatacagcctgattaaccgggatgtggaa

SEQ ID NO: 700563 - DNA, 75 bp, synthetic construct
  source 1..75: mol_type = other DNA
agccggagccgttatctgcgggatatgtaccgcccgggaatggtgatggagcagtggaacccggagacacgcagt

SEQ ID NO: 700564 - DNA, 75 bp, synthetic construct
  source 1..75: mol_type = other DNA
gatgtgatgattggtgcgggtagcctggtcccacaaaataaacggctggagagcggatatctgtatctcggtagc

SEQ ID NO: 700565 - DNA, 75 bp, synthetic construct
  source 1..75: mol_type = other DNA
cgcccgttaactgatgaagaaaaatctgcgttacgctattcagctaataactacgtgaaatggaaagacgagtat

SEQ ID NO: 700566 - DNA, 75 bp, synthetic construct
  source 1..75: mol_type = other DNA
tctgctgcaggagcgtctgcagcagatggagcgggatatggtccgtgacctgcagaaagagaaaaccctgggcgg

SEQ ID NO: 700567 - DNA, 75 bp, synthetic construct
  source 1..75: mol_type = other DNA
gtgaaaccgtctcaggtgccacgtctggagggcgcatgggcaccggagcactccgtgacggagttcagtcacagc

SEQ ID NO: 700568 - DNA, 75 bp, synthetic construct
  source 1..75: mol_type = other DNA
ggaaaaacttgcccgccatccctcctttacggtggtttctgagcagataaaggcgcgtgccggtgagacattgct

SEQ ID NO: 700569 - DNA, 75 bp, synthetic construct
  source 1..75: mol_type = other DNA
caggagcgactgcagcagatggagcgggatatggtccgcgacctgcagaaagagaaaaccctgggcggagactga

SEQ ID NO: 700570 - DNA, 75 bp, synthetic construct
  source 1..75: mol_type = other DNA
gaaacgcccgggcattccgtcagtgacagtgcgacggtttttgcctccgtcacacagatggcaatggacaacgcc

SEQ ID NO: 700571 - DNA, 75 bp, synthetic construct
  source 1..75: mol_type = other DNA
aaaccctgggcggagactgatacaggaagacaaacactgatgacaacggataacacgaacacgacacgtaacgat

SEQ ID NO: 700572 - DNA, 75 bp, synthetic construct
  source 1..75: mol_type = other DNA
atgtctgatgttttacgcccataccgcgatctttttccacaaatcggtcagcgcgtaatgatcgacgatagcagt

SEQ ID NO: 700573 - DNA, 75 bp, synthetic construct
  source 1..75: mol_type = other DNA
aggcagcggcgactggaccgcatacggaccgggctccggagcaaacctgacagtaaaccttccggggcacacaca

SEQ ID NO: 700574 - DNA, 75 bp, synthetic construct
  source 1..75: mol_type = other DNA
aaactttgactggctggatggttcatcgtccggttctcatattggtaatggatacgttcctgccgcaggtgacca

SEQ ID NO: 700575 - DNA, 75 bp, synthetic construct
  source 1..75: mol_type = other DNA
gccgtgccgttctccgtcaggcagggctggccgggggagacagccctgcacggtttattgcaccgggacgtaaat

SEQ ID NO: 700576 - DNA, 75 bp, synthetic construct
  source 1..75: mol_type = other DNA
aggcgctgggctatgaaacggaagtggttggtaagcacggtatgtgggagatgccgggggtaccggtggaagcct

SEQ ID NO: 700577 - DNA, 75 bp, synthetic construct
  source 1..75: mol_type = other DNA
ccgggttcgacatccgggcatatcgtgacgcggcggatcagcgtgcggggctgtttcacaggaggggccggatgt

SEQ ID NO: 700578 - DNA, 75 bp, synthetic construct
  source 1..75: mol_type = other DNA
atgccgtacagaaaggaactgcccacgatgtgctagagccgaaatcggaccgggaggtcatgaatgcagagcggc

SEQ ID NO: 700579 - DNA, 75 bp, synthetic construct
  source 1..75: mol_type = other DNA
gccaccctgaacggtctggcccgcagcggtcgtgatgtccggctgtattcctcactggatgaaacccgtactgcg

SEQ ID NO: 700580 - DNA, 75 bp, synthetic construct
  source 1..75: mol_type = other DNA
gtgggtgaagccgggcaacgctggacaacggaacagttcgtggaatggctgaatgagcgtggtgccttcagacca

SEQ ID NO: 700581 - DNA, 75 bp, synthetic construct
  source 1..75: mol_type = other DNA
gtcctgcacggtttattgctccgggacgtaaatatccgcaaccgtatgtggcactgccggcttttgaccgtaacg

SEQ ID NO: 700582 - DNA, 75 bp, synthetic construct
  source 1..75: mol_type = other DNA
aggcagcggtgactggaccgcatacgggccgggttcaggggcaagcctgacggttaactttccggcacacacgca

SEQ ID NO: 700583 - DNA, 75 bp, synthetic construct
  source 1..75: mol_type = other DNA
cggcggaacaggtgattgatcatctccgttgcgacctgctggtaatcaaacccgatcaataccagacgccagttg

SEQ ID NO: 700584 - DNA, 75 bp, synthetic construct
  source 1..75: mol_type = other DNA
ccggaaggaggcaaggcgctggtggcggtgaatctcgccagtgaagagccgtatcataatgcgctcaatgaaaaa

SEQ ID NO: 700585 - DNA, 75 bp, synthetic construct
  source 1..75: mol_type = other DNA
aaagatgccggggtgaacacatatcgctggcaggggggagagcagcgaccggcaaccatcatcagtgaaccggac

SEQ ID NO: 700586 - DNA, 75 bp, synthetic construct
  source 1..75: mol_type = other DNA
atgccgggcgtaccggtggaggccttttccggacgctcgcaggctatccgggaggccgtcggggaagacgcctcg

SEQ ID NO: 700587 - DNA, 75 bp, synthetic construct
  source 1..75: mol_type = other DNA
tggccctgtcgcgtatgaagcagcatgtgcaggtgtataccgataaccgtcagggctggacggatgccattaaca

SEQ ID NO: 700588 - DNA, 75 bp, synthetic construct
  source 1..75: mol_type = other DNA
acagtccggcacggtttattgcaccggggcgcaaatatccgcagccgtatgtggcactgccggcgtttgaccgta

SEQ ID NO: 700589 - DNA, 75 bp, synthetic construct
  source 1..75: mol_type = other DNA
aaggatgacgggctgataaccctgcaggatgcggaaggtaacacgcggctgatttcgccccgggaggcggtggct

SEQ ID NO: 700590 - DNA, 75 bp, synthetic construct
  source 1..75: mol_type = other DNA
tggtggataatgtgtatcaccggattgccggtatcagcaaggatgacgggctgataaccctgcaggatgcggaag

SEQ ID NO: 700591 - DNA, 75 bp, synthetic construct
  source 1..75: mol_type = other DNA
aattgtcagaaaaatggcagagaacaaacctgacctgccggacggcaaaacagagctggctgtcagggatattgc

SEQ ID NO: 700592 - DNA, 75 bp, synthetic construct
  source 1..75: mol_type = other DNA
cgtctctccacctgggagaataacccggatgcccttgccctggtggataatgtgtatcaccggattgtcggtatc

SEQ ID NO: 700593 - DNA, 75 bp, synthetic construct
  source 1..75: mol_type = other DNA
aaggatgccggggtgaacacatatcgctggcaggggggagaacagcgaccggcaaccatcatcagtgaaccggac

SEQ ID NO: 700594 - DNA, 75 bp, synthetic construct
  source 1..75: mol_type = other DNA
agattggtagagagaaagctggcatgagccaagctcaactagctgaaaaaattggactttcacaacaatctgtag

SEQ ID NO: 700595 - DNA, 75 bp, synthetic construct
  source 1..75: mol_type = other DNA
caaataataaagttacgttcaatattactaccgctgccgatggttttggatataaagccaaattaaatgctgggc

SEQ ID NO: 700596 - DNA, 75 bp, synthetic construct
  source 1..75: mol_type = other DNA
aaatggcttcctggctggttgagtggaaaaacgccactgaaacgcaatggcttaaagattctcccagtcacagcc

SEQ ID NO: 700597 - DNA, 75 bp, synthetic construct
  source 1..75: mol_type = other DNA
gggcgggctgaaccggcctccctgcctgtgagcgattcaccgttcacggcactgaagctggagaacggctggggg

SEQ ID NO: 700598 - DNA, 75 bp, synthetic construct
  source 1..75: mol_type = other DNA
cgttggccggatcgattgagtatgaccattgcggtgtcggggatctcgtttccggcatttgctctggggatgctt

SEQ ID NO: 700599 - DNA, 75 bp, synthetic construct
  source 1..75: mol_type = other DNA
acgcttacaggcccttcaggagccgtttaaggggctatccaaggatcaggtagcgggactgatccggcaggcggt

SEQ ID NO: 700600 - DNA, 75 bp, synthetic construct
  source 1..75: mol_type = other DNA
gcgatgacggttgttgtgccggggcgggctgaaccggcctccctgcctgtgagcgattcaccgttcacggcactg

SEQ ID NO: 700601 - DNA, 75 bp, synthetic construct
  source 1..75: mol_type = other DNA
agctatgcccctgagccgccactgcctgagccggtgacgcgcccggtcgagctgtacgttaacggcgaactggtg

SEQ ID NO: 700602 - DNA, 75 bp, synthetic construct
  source 1..75: mol_type = other DNA
catcgttcagtgatatgctgtccggcttcaaagataaggtgacatcatctcttaacagcgcggccagctccgtta

SEQ ID NO: 700603 - DNA, 75 bp, synthetic construct
  source 1..75: mol_type = other DNA
gaaaaagatagaattttcactgacccttgaacgctgtgatgaggatttgcgggagcgcctgcaatcctcatcatt

SEQ ID NO: 700604 - DNA, 75 bp, synthetic construct
  source 1..75: mol_type = other DNA
cgccgctggtgtgggcgtctggaaggttcgccatctcgccgacagcaaattacttattaaagaagagacgatatt

SEQ ID NO: 700605 - DNA, 75 bp, synthetic construct
  source 1..75: mol_type = other DNA
gccacccagccgctggaggccgtgatggatgcaatccgcactaccgtgacccactgggttaaggagttggacgca

SEQ ID NO: 700606 - DNA, 75 bp, synthetic construct
  source 1..75: mol_type = other DNA
attaccggactgccgccgggggcgattgccacgccgggagaagattcgctgaaggctgccgcacatccggcaaaa

SEQ ID NO: 700607 - DNA, 75 bp, synthetic construct
  source 1..75: mol_type = other DNA
gtcgccacgtttatcgttacgctatttttgccacccaatttttgggtaagcggcgtgaaggcgattgccgaagcg

SEQ ID NO: 700608 - DNA, 75 bp, synthetic construct
  source 1..75: mol_type = other DNA
gcgggcgtcgttaaatggtcatctcgaacaagccgcgcaccgcgtcgcgcctgagttttccgcattcctgacgcg

SEQ ID NO: 700609 - DNA, 75 bp, synthetic construct
  source 1..75: mol_type = other DNA
atgcgcgtattcagcgcctgcttaagcgcgcggtccatcgggcgattgataaggtcgatctttccggcaccagtg

SEQ ID NO: 700610 - DNA, 75 bp, synthetic construct
  source 1..75: mol_type = other DNA
agatttctgttactaacagcgcgatcaacaacctgccgccggatgtggacctggtcatcactcaccgtgacctga

SEQ ID NO: 700611 - DNA, 75 bp, synthetic construct
  source 1..75: mol_type = other DNA
ccgcgttatttattccaacaggatggttaccgaacgaaacgctggcgaagctggtcgggccaatgatcacctatc

SEQ ID NO: 700612 - DNA, 75 bp, synthetic construct
  source 1..75: mol_type = other DNA
cggcaaatcgagttaaatatcggcaaagatctgcagtttatccgtgtcaacggtacgctggttggcggttgtatt

SEQ ID NO: 700613 - DNA, 75 bp, synthetic construct
  source 1..75: mol_type = other DNA
tggggctgatggtgtgaccgcaggcagcgttctgctggttgatagcgttaataaccgtactaacggttcgctgaa

SEQ ID NO: 700614 - DNA, 75 bp, synthetic construct
  source 1..75: mol_type = other DNA
gaagatatggacattctgtttggctacggctctacgctaacccgttctaaagcgttgaaacagcccggtcagtat

SEQ ID NO: 700615 - DNA, 75 bp, synthetic construct
  source 1..75: mol_type = other DNA
atctacagcctgttgaataaaaccccggatgcttcccccgattctgcaagtaatacttcggttatttgcactatt

SEQ ID NO: 700616 - DNA, 75 bp, synthetic construct
  source 1..75: mol_type = other DNA
ttatccctgttgaatttggttaagccggtgcagacacgcctgaaccggcacaataaaatacaccccccgttactg

SEQ ID NO: 700617 - DNA, 75 bp, synthetic construct
  source 1..75: mol_type = other DNA
ttatcgaaaagcacctcgtcgccgaagtgaaaaaggctggcggggtcgcctttaagttcgtgtcacccggtcgcc

SEQ ID NO: 700618 - DNA, 75 bp, synthetic construct
  source 1..75: mol_type = other DNA
atggcctatgaacgtgaaagccttatcgaaaagcacctcgtcgctgaagtaaaaaaagctggcggagtggccttt

SEQ ID NO: 700619 - DNA, 75 bp, synthetic construct
  source 1..75: mol_type = other DNA
caaacaaacggtccgcgcggtggtgtgctcagccatgtagtggtacgcgtcacggcggatgcagtgctggaactg

SEQ ID NO: 700620 - DNA, 75 bp, synthetic construct
  source 1..75: mol_type = other DNA
tgaatgatttaatgctacaaaccaaaagcatcgctacccgtacccaggaaccatttacctggtacattgtggcgg

SEQ ID NO: 700621 - DNA, 75 bp, synthetic construct
  source 1..75: mol_type = other DNA
cctttgtggtgtcatcgctctgtcgctgctgtatgccgcctatgcctcgcaaacgctgcgcggcgcgttgaaagc

SEQ ID NO: 700622 - DNA, 75 bp, synthetic construct
  source 1..75: mol_type = other DNA
catgattcatgatgcacgggaaaaggccggtgagctggggaaagagcaggttatggtgcctgtcctgaacacagc

SEQ ID NO: 700623 - DNA, 75 bp, synthetic construct
  source 1..75: mol_type = other DNA
aatggtcgatgccgacaccgcttatatgaccagccgtggcctgcgcactttaggtgtgcgtctgcgtcaacatca

SEQ ID NO: 700624 - DNA, 75 bp, synthetic construct
  source 1..75: mol_type = other DNA
ccaagtatctgataggtcactcggatgccatgatcggcaccgcagtatgcaatgcccgttgctgggagcaactac

SEQ ID NO: 700625 - DNA, 75 bp, synthetic construct
  source 1..75: mol_type = other DNA
aaattctggtggtgctgtttatctattttggctcctcgcagttactgctgacgctttcggatggcttcaccatca

SEQ ID NO: 700626 - DNA, 75 bp, synthetic construct
  source 1..75: mol_type = other DNA
tcgaaaagcacctcatcgccgaagtgaaaaaggctggcgggatcgcctttaagtttgtgtcacccggtcgccgct

SEQ ID NO: 700627 - DNA, 75 bp, synthetic construct
  source 1..75: mol_type = other DNA
ccggattgcccgtgataatcctgacagtggtgtggtggtaagaatagccggtgaaggccgtccgtggaatcccgg

SEQ ID NO: 700628 - DNA, 75 bp, synthetic construct
  source 1..75: mol_type = other DNA
aagcgaaactggcagaagcgcagcagaaggcgatgctgaaaggcgatgctgaaaggcgaggctttcccggatatc

SEQ ID NO: 700629 - DNA, 75 bp, synthetic construct
  source 1..75: mol_type = other DNA
atgccgggcgtaccggtggaggccttttccagtcgttcacaggctatcagggaggccgtcggggaaggggcctcg

SEQ ID NO: 700630 - DNA, 75 bp, synthetic construct
  source 1..75: mol_type = other DNA
ccccgattcaaaaagcggggacagaatgatgcattccgctacccgcagggcgtaaagctcgatcaggaaaacagc

SEQ ID NO: 700631 - DNA, 75 bp, synthetic construct
  source 1..75: mol_type = other DNA
gagtcgttatctgcgggatatgtaccgcccggggatggtgatggagcagtggaacccggagacacgcagtcatga

SEQ ID NO: 700632 - DNA, 75 bp, synthetic construct
  source 1..75: mol_type = other DNA
tgtgcaggtgtacaccgataaccgtcagggctggacggatgccatcagcaaagccgtacagaaaggaacggccca

SEQ ID NO: 700633 - DNA, 75 bp, synthetic construct
  source 1..75: mol_type = other DNA
aagtcgttattacaacctggtcagttcgctgctgaacaggttgttacgctggtgggaccaaaaggtaaattacac

SEQ ID NO: 700634 - DNA, 75 bp, synthetic construct
  source 1..75: mol_type = other DNA
cgaacggctgcgtgcgctgggctttaccgtggtggtattaaatagcaaaaatctggaggaaattattttaagccg

SEQ ID NO: 700635 - DNA, 75 bp, synthetic construct
  source 1..75: mol_type = other DNA
caagcggctgcgcgagctgggctttaccgtggtggtgctggatagcaaaaatctggaggaaattattttaagccg

SEQ ID NO: 700636 - DNA, 75 bp, synthetic construct
  source 1..75: mol_type = other DNA
ccaaagaagaagcgattcgttttgctggcgagcagctggtgaaaggtggttacgttgagccggaatacgttcagg

SEQ ID NO: 700637 - DNA, 75 bp, synthetic construct
  source 1..75: mol_type = other DNA
actgaagctggagagcggctgggtggaaacacccgggcattccgtcagtgacagtgcgaaggtttttgcctccgt

SEQ ID NO: 700638 - DNA, 75 bp, synthetic construct
  source 1..75: mol_type = other DNA
atgacgggctgataaccctgcaggatgcggaaggtaacacgcggctgatttcgccccgggaggcggtggctgaag

SEQ ID NO: 700639 - DNA, 75 bp, synthetic construct
  source 1..75: mol_type = other DNA
gcagcgcgcagtcacccgttgagtttgcccaggaacataacctgattgataccgctaaacgccgcctccgtaaaa

SEQ ID NO: 700640 - DNA, 75 bp, synthetic construct
  source 1..75: mol_type = other DNA
atgacacagcgacgcagcttccgcactggcgcagaacgccacgctaaccgtttctcaaccagcgcatcacgcagc

SEQ ID NO: 700641 - DNA, 75 bp, synthetic construct
  source 1..75: mol_type = other DNA
tttgcactaagcagcggcgacaatcagttcggacaggatttcacattgtacgaagcacttcgtacagttgatcgt

SEQ ID NO: 700642 - DNA, 75 bp, synthetic construct
  source 1..75: mol_type = other DNA
cgattgaaaatctgagccgggttcgtaaaaacgccattccgtcggcttcagcaatggctattaaccgcgtggcta

SEQ ID NO: 700643 - DNA, 75 bp, synthetic construct
  source 1..75: mol_type = other DNA
taaaacaaatcggcgaacacacctggctgattgagaaagctggaatcgtggttcacagatgcccacgcaatccgt

SEQ ID NO: 700644 - DNA, 75 bp, synthetic construct
  source 1..75: mol_type = other DNA
gcgaaacacacgccacacctgatggacatcccgtaaaacaaatcggcgagcacacctggctgattgagaaagctg

SEQ ID NO: 700645 - DNA, 75 bp, synthetic construct
  source 1..75: mol_type = other DNA
tcatccagcgattaaataatggacgctggcatgttatgcaacgtctgccagaagcacggtatgcgaagggcaatg

SEQ ID NO: 700646 - DNA, 75 bp, synthetic construct
  source 1..75: mol_type = other DNA
gcatgccgatctgcttagctggtttaaagggaacgatcgcccacccgcccccgccggaaaaccgttggagttcag

SEQ ID NO: 700647 - DNA, 75 bp, synthetic construct
  source 1..75: mol_type = other DNA
acgatctgtacgatcgtgcctcaggccaggacaagcgataccacattgtcgaaggcgctaaccatatggacttgt

SEQ ID NO: 700648 - DNA, 75 bp, synthetic construct
  source 1..75: mol_type = other DNA
aagcaggcatcaggacgtccctggtggtaccgacaccgcacagaattaccccgtgaatggcacggaccagaatag

SEQ ID NO: 700649 - DNA, 75 bp, synthetic construct
  source 1..75: mol_type = other DNA
ttcaggtgctgctccagcgactggtttatctctggcacggaagccgggctgccggtcgcccgtggtggtatcgcc

SEQ ID NO: 700650 - DNA, 75 bp, synthetic construct
  source 1..75: mol_type = other DNA
agacgcacgcaacgccagatggccatacagtaaaacaaattggcgaacacacctggctgattgaaaaagctggaa

SEQ ID NO: 700651 - DNA, 75 bp, synthetic construct
  source 1..75: mol_type = other DNA
ttatccagcgattaaataatgggcgctggcatgttatgcaacgtcttccccaggccagatatgagaagggcaatg

SEQ ID NO: 700652 - DNA, 75 bp, synthetic construct
  source 1..75: mol_type = other DNA
ggggcgggtagtctggttgcgctgaaagatcacattaatacgatgccaggcacaccgatgacaggccttaatgat

SEQ ID NO: 700653 - DNA, 75 bp, synthetic construct
  source 1..75: mol_type = other DNA
cgggactgggagcgctggctgaacgaatagaagacgcagttgccatttcttatagcgatttgccggggtttccgg

SEQ ID NO: 700654 - DNA, 75 bp, synthetic construct
  source 1..75: mol_type = other DNA
aaatccgcaggccagaatcaaggttaaccgggggatttgccgtaatcaagctggggaatgcgcgggttgtcctgt

SEQ ID NO: 700655 - DNA, 75 bp, synthetic construct
  source 1..75: mol_type = other DNA
atgaaggaacagcgcaattcttcacaacagcgcttccgcaacggggcggaacgccatgccaaccgtttcgctacc

SEQ ID NO: 700656 - DNA, 75 bp, synthetic construct
  source 1..75: mol_type = other DNA
gtaccggaacagaacgccaagctaaccgtttcgctaccagcgcatcacgcagcaacatccgctacagcctgagcg

SEQ ID NO: 700657 - DNA, 75 bp, synthetic construct
  source 1..75: mol_type = other DNA
atgaaaaaaaacgctaataatccatactccaaatttcgtaatggcgtagaacgccatgctaaccgtttcgctacc

SEQ ID NO: 700658 - DNA, 75 bp, synthetic construct
  source 1..75: mol_type = other DNA
ttatccagcgattaaataatgggcgctggcatgttatgcaacgtcttccccaggccagatataaggagggcaatg

SEQ ID NO: 700659 - DNA, 75 bp, synthetic construct
  source 1..75: mol_type = other DNA
gtaaaaaccaggtcagctgtggctacgacgcccagtacgtgcaaatcggcccgggcaagggcaagcaaacagaaa

SEQ ID NO: 700660 - DNA, 75 bp, synthetic construct
  source 1..75: mol_type = other DNA
cacagccttacctgaaggcaatcgcaccactacggacgaaggcgatccgaacaaagacaaaaccggcaccggcga

SEQ ID NO: 700661 - DNA, 75 bp, synthetic construct
  source 1..75: mol_type = other DNA
aagaatatcccggaacccacgccgccggagccggtcacccgcccgatggagctgtatatcaatggcgaactggtg

SEQ ID NO: 700662 - DNA, 75 bp, synthetic construct
  source 1..75: mol_type = other DNA
atgaatcgctgggatttacttagtttgaaaaataatatatttatatgtttttgtattgtgtttgttaaggagttt

SEQ ID NO: 700663 - DNA, 75 bp, synthetic construct
  source 1..75: mol_type = other DNA
atgtctgggaaaagtttaggcttaatcgaaaccgtcgggatgtctgcggcggtagaagccgccgatgccgcaatg

SEQ ID NO: 700664 - DNA, 75 bp, synthetic construct
  source 1..75: mol_type = other DNA
ggctgatactggcttcggtaagaccttcatctatgaccggattaagtccggcgacctgccaaaagccaaagttat

SEQ ID NO: 700665 - DNA, 75 bp, synthetic construct
  source 1..75: mol_type = other DNA
ttgtctcggctgatgccggagcgcgcggtggcaaaatcattccctataaaaaattgctcgacgatgcgataagtc

SEQ ID NO: 700666 - DNA, 75 bp, synthetic construct
  source 1..75: mol_type = other DNA
agcgctttgtgaagacttactggtcgttgtttccccgcccggtatacgccacctttgactggggtatccgcgatg

SEQ ID NO: 700667 - DNA, 75 bp, synthetic construct
  source 1..75: mol_type = other DNA
tgccgacctggccggactgcggcgtgtggtggaaaatcgtcgagaaatatcaggttagccggatgttctcagcgc

SEQ ID NO: 700668 - DNA, 75 bp, synthetic construct
  source 1..75: mol_type = other DNA
cgggcgaaccattaccgggtgggatgaggataaaaacaatatccgcacgttttaccgggatgacatcgaccgttt

SEQ ID NO: 700669 - DNA, 75 bp, synthetic construct
  source 1..75: mol_type = other DNA
ggcctgccattccgcttctgattgaaggcgccaaaatgaccctgtggatttcgatcctcggtctggctggcggcc

SEQ ID NO: 700670 - DNA, 75 bp, synthetic construct
  source 1..75: mol_type = other DNA
acaggagcgcattcgctttatctggaataacgaagcacgcacgctgaaaaactggcatcacgacacagggaaata

SEQ ID NO: 700671 - DNA, 75 bp, synthetic construct
  source 1..75: mol_type = other DNA
aagacatcggcgcacagtacatcatcatcggccactctgaacgtcgtacttaccacaaagaatctgacgaactga

SEQ ID NO: 700672 - DNA, 75 bp, synthetic construct
  source 1..75: mol_type = other DNA
attacccggtacgtgagctgctgggtatcagccaggcagatgaacgcctgatttataacacggtgctgggccgga

SEQ ID NO: 700673 - DNA, 75 bp, synthetic construct
  source 1..75: mol_type = other DNA
acaggaacgcattcgctttatctggaataacgaagcacgcacgctgaaaaactggcatcacgacacggggaaata

SEQ ID NO: 700674 - DNA, 75 bp, synthetic construct
  source 1..75: mol_type = other DNA
ggaagggccgctgccgccggggtgtattcagaccatctggggcgacgacgaccgctttgtgaagacgtactggtc

SEQ ID NO: 700675 - DNA, 75 bp, synthetic construct
  source 1..75: mol_type = other DNA
tgcacgcaccttcggtggttggatagccaaccacgtcgcgctggtctttattgaagtgatccgcggcacacctat

SEQ ID NO: 700676 - DNA, 75 bp, synthetic construct
  source 1..75: mol_type = other DNA
acgctggatgtgccggtcatcgacaactactggcagaccgaatccggctggccgattatggcgattgctcgcggt

SEQ ID NO: 700677 - DNA, 75 bp, synthetic construct
  source 1..75: mol_type = other DNA
cgttacgggaaaagctattcacctttgatgtggatattttgcgcaacgatgtctgtgatatcagccttaatctgc

SEQ ID NO: 700678 - DNA, 75 bp, synthetic construct
  source 1..75: mol_type = other DNA
tcgtccgaacagcatactcaaagccggtcagcatcgttatcagcgggcattcatccagcgattaaataatgggcg

SEQ ID NO: 700679 - DNA, 75 bp, synthetic construct
  source 1..75: mol_type = other DNA
ccgctgaaaacctcagtcgtatcagtaaaacggcggtgccagctgcttcagcaatggccattaaccgcgtggcca

SEQ ID NO: 700680 - DNA, 75 bp, synthetic construct
  source 1..75: mol_type = other DNA
ttcactcggtagtgtttggtggatttgcctcgcacagcgtggcggcgcggattgatgacgctaaaccggtgctga

SEQ ID NO: 700681 - DNA, 75 bp, synthetic construct
  source 1..75: mol_type = other DNA
ggtctggacgacaggccgacgcgtctgggaagccccggcgtgccgatgtatggctacaacgtgcagttgctcaat

SEQ ID NO: 700682 - DNA, 75 bp, synthetic construct
  source 1..75: mol_type = other DNA
cgaccgctattcgcgtgctgaaaaaattccctaccgctgaaattcgtaaacacgatctctcgtcgctggaagtgc

SEQ ID NO: 700683 - DNA, 75 bp, synthetic construct
  source 1..75: mol_type = other DNA
tttgctggtggatcgcgggctggcgaaaatggcgcgcgttagcgggcgggatgtcgatttcgcgtcgttgcgcca

SEQ ID NO: 700684 - DNA, 75 bp, synthetic construct
  source 1..75: mol_type = other DNA
attcaaaccatctggggcgatgacgaccgctttgtgaagacgtactggtcgctgttttcccgtccggtgtacgcc

SEQ ID NO: 700685 - DNA, 75 bp, synthetic construct
  source 1..75: mol_type = other DNA
tcggaaacagaagaagagcgcacctttacctttcgccagctgcatgacgaagtgaacgcggtggcctcaatgctg

SEQ ID NO: 700686 - DNA, 75 bp, synthetic construct
  source 1..75: mol_type = other DNA
cctgctcccgggtacggcggatcctgcttcgtctgccgtgggaacatgacaacgccttcagttgcagaaagacct

SEQ ID NO: 700687 - DNA, 75 bp, synthetic construct
  source 1..75: mol_type = other DNA
tttatggaccgattcaacaaccggtattcgtgatgaaggggtgtataacagccagacgggaaaatacgataaaca

SEQ ID NO: 700688 - DNA, 75 bp, synthetic construct
  source 1..75: mol_type = other DNA
gaaggtttaagtcgtaataccagccagcccaatgaaacggcgttggttagtggacaattgacctggaatgcgccg

SEQ ID NO: 700689 - DNA, 75 bp, synthetic construct
  source 1..75: mol_type = other DNA
caagagtatttcgacggccctgaactggatcggctgattctggatgcctggagcaacgtactgggcttcgcatca

SEQ ID NO: 700690 - DNA, 75 bp, synthetic construct
  source 1..75: mol_type = other DNA
tctacaccgatgaaaacggcacgcttcgtgtcaggagtatgggggctattgataaaaaaggatttacggatgaag

SEQ ID NO: 700691 - DNA, 75 bp, synthetic construct
  source 1..75: mol_type = other DNA
cgtcagtgcgctgatgaatgcaacccccggacgtgatctctgctggctcctgacccgtcatcctgaaaaacctga

SEQ ID NO: 700692 - DNA, 75 bp, synthetic construct
  source 1..75: mol_type = other DNA
ttgaggacgagaaccgccgtctcaaacagatgtttgctgacctgagtctggaaaaccggactcagtatccgtcag

SEQ ID NO: 700693 - DNA, 75 bp, synthetic construct
  source 1..75: mol_type = other DNA
atcagatcattgccgtaattaaatcggttgaagccggacgaaccgttaaagatgtctgccgggaggccggtatat

SEQ ID NO: 700694 - DNA, 75 bp, synthetic construct
  source 1..75: mol_type = other DNA
atgtgcggattgaaggcgcgggtatcttaggtggtatgaacttatcgggtcagcgaagggccgttacaagggatg

SEQ ID NO: 700695 - DNA, 75 bp, synthetic construct
  source 1..75: mol_type = other DNA
ggaaaatacgataaacatcgcgcacgttcttttttagccgccagttggcatgatgataccagtcgctattctctg

SEQ ID NO: 700696 - DNA, 75 bp, synthetic construct
  source 1..75: mol_type = other DNA
tgaaaggggagttgctcggcttttacgcgcaactcgaaggtttaagtcgtaataccagccagcccaatgaaacgg

SEQ ID NO: 700697 - DNA, 75 bp, synthetic construct
  source 1..75: mol_type = other DNA
cccggacgcgacctttgctggctcctgacccgtcatcctgaaaagccggaataccacgtggtgctgtgtgtcaga

SEQ ID NO: 700698 - DNA, 75 bp, synthetic construct
  source 1..75: mol_type = other DNA
tcaggcgctgatatgggcattcagtgatttcgcccgcgctcgtcgtgatgtgtgcgatccggaggcccgttgcct

SEQ ID NO: 700699 - DNA, 75 bp, synthetic construct
  source 1..75: mol_type = other DNA
cccaggttgcacctccgggcgtaacagcacacgtagttgatgttgccaaaatgattcgcgtctacaacaacccga

SEQ ID NO: 700700 - DNA, 75 bp, synthetic construct
  source 1..75: mol_type = other DNA
cgtcagtgcgctgatgaatgcaacacccggacgtgacctctgctggctcctgacccgtcatcctgaaaaaccgga

SEQ ID NO: 700701 - DNA, 75 bp, synthetic construct
  source 1..75: mol_type = other DNA
agcagatcacccgggatgtggtgctggacagtcgttcaccggactgcgaagagatatttcaagcgctgatctggg

SEQ ID NO: 700702 - DNA, 75 bp, synthetic construct
  source 1..75: mol_type = other DNA
tggatcggttgatactggatgcctggagtaatgtgctgggtttcgcgtcaccaggtgaagcaaagccgtaccaga

SEQ ID NO: 700703 - DNA, 75 bp, synthetic construct
  source 1..75: mol_type = other DNA
ggcgaggcttgccggtgcgctgctgacgttttcccttgaacataacgtcagcgccgttccgccctatgtccacga

SEQ ID NO: 700704 - DNA, 75 bp, synthetic construct
  source 1..75: mol_type = other DNA
gcttcgtctgccatgtgaatatgacaataccttcaacagcagaacgacctggtttggtatggattttatcgaaac

SEQ ID NO: 700705 - DNA, 75 bp, synthetic construct
  source 1..75: mol_type = other DNA
tggtcaggtgcagatgcgtcagggtttctttgccgtgcagcagacctgtccacactgtcagggccgcggtacgct

SEQ ID NO: 700706 - DNA, 75 bp, synthetic construct
  source 1..75: mol_type = other DNA
ccgtggcgtgtgcgatccggaagcgcgtcacctcgccggtaatccctggtatcccggagcaacaggacggcactg

SEQ ID NO: 700707 - DNA, 75 bp, synthetic construct
  source 1..75: mol_type = other DNA
atagcctggcccccttctggccatcttatcagaacaaagtcatcggcgtccttgagcgtgcgctgcgtgagcagt

SEQ ID NO: 700708 - DNA, 75 bp, synthetic construct
  source 1..75: mol_type = other DNA
agcagatcacccggaatgtggtgctggacagtcgttcaccggactgcgaagagagactcaaagagttgatatggg

SEQ ID NO: 700709 - DNA, 75 bp, synthetic construct
  source 1..75: mol_type = other DNA
ttatcagaacaaagtcgtcggcgtccttgagcgtgcgctgcgtgagcagtccggctcacggatacggcggatcct

SEQ ID NO: 700710 - DNA, 75 bp, synthetic construct
  source 1..75: mol_type = other DNA
cagcagccatgtggagcaccaccggcgcgcccgggacagcccctcatgcgtcaccgtccggtaccgttacatcac

SEQ ID NO: 700711 - DNA, 75 bp, synthetic construct
  source 1..75: mol_type = other DNA
ccttcaaactggcagcctcggcagagtttatcgaacgcgccgatgcgttacccgcgtttgaaaaagcctacgact

SEQ ID NO: 700712 - DNA, 75 bp, synthetic construct
  source 1..75: mol_type = other DNA
caaattgcaggacagcttttatatcaacgtttcctgggatgcgctgaacgcggcatacagtgaacacccggagag

SEQ ID NO: 700713 - DNA, 75 bp, synthetic construct
  source 1..75: mol_type = other DNA
atggcaaggttcgattacgatattatcaatctgtctctggaacatgaactgaatgagtggctggcagagagaggt

SEQ ID NO: 700714 - DNA, 75 bp, synthetic construct
  source 1..75: mol_type = other DNA
gccttgagattcctttatggcctgtagtgatatttctcgctttcttcgatgctacggtagtgcagatcaagcgag

SEQ ID NO: 700715 - DNA, 75 bp, synthetic construct
  source 1..75: mol_type = other DNA
tacgtcaggagctggctgagaaaaacaaactcgcttcgcttgccgatctcagccgctatctgaaggagggcggca

SEQ ID NO: 700716 - DNA, 75 bp, synthetic construct
  source 1..75: mol_type = other DNA
tgcgtcaggatgtggcagagaaaaacaaactcacttcgcttgccgacctgagtcgttatctgaaagagggtggca

SEQ ID NO: 700717 - DNA, 75 bp, synthetic construct
  source 1..75: mol_type = other DNA
caaaatgttggttttgttgatgctgactgttgcgggccttggcgcatttatgagctcaacgggcgtcgtcgcaat

SEQ ID NO: 700718 - DNA, 75 bp, synthetic construct
  source 1..75: mol_type = other DNA
aatggggtttctgaatttcgcgcgcgtgacgttttgcttattgatatgtctgcggctgatgtcgatctccggcaa

SEQ ID NO: 700719 - DNA, 75 bp, synthetic construct
  source 1..75: mol_type = other DNA
ctgcggaaatctggcctggccgttatgaggaagaaggcgagctgcggcaaccgaaaaatcctctccccgtcaggt

SEQ ID NO: 700720 - DNA, 75 bp, synthetic construct
  source 1..75: mol_type = other DNA
ggcaaaacaggggcgcgattttgtggcgctgaatttaccggaagaagtgagtgaggcatcgcccgcacacagcca

SEQ ID NO: 700721 - DNA, 75 bp, synthetic construct
  source 1..75: mol_type = other DNA
gtgaagcatcgcccgcacacagtcaggcaccccatgccattttctgtctggtgttgatggtggcgttaatgctga

SEQ ID NO: 700722 - DNA, 75 bp, synthetic construct
  source 1..75: mol_type = other DNA
ttttgtagtgagcaactgctggaaccgatggttctgcgtggagaatatttttccgatcaggcgcttgatgtcggc

SEQ ID NO: 700723 - DNA, 75 bp, synthetic construct
  source 1..75: mol_type = other DNA
aaaatacgtatattcctaatcctgagaagtattcaaacctctcctatgatattaaggatgatgatgggggtaaga

SEQ ID NO: 700724 - DNA, 75 bp, synthetic construct
  source 1..75: mol_type = other DNA
gcttgcccgcatcaacacacagcatcctgacgcccgccccccggtagtggcggctgcaatgtggggtgccactgg

SEQ ID NO: 700725 - DNA, 75 bp, synthetic construct
  source 1..75: mol_type = other DNA
tggccagcgacgtgaaccaccgctggtttaagcacattgttctgccgtccatacttggcggtgcgggaaagggag

SEQ ID NO: 700726 - DNA, 75 bp, synthetic construct
  source 1..75: mol_type = other DNA
aacggcgtgaggcattacagaaactgcttgcccgtatcaacacacagcatcaggatgcccggccaccggtagtgg

SEQ ID NO: 700727 - DNA, 75 bp, synthetic construct
  source 1..75: mol_type = other DNA
gccctgaatgaacataccggcatgtcatccgtggccagcgacgtgaaccaccgctggtttaagcacatcgttctg

SEQ ID NO: 700728 - DNA, 75 bp, synthetic construct
  source 1..75: mol_type = other DNA
attgctcgcgcactcaacgttcacccagcaaaaatctggcctagccgttatgaggaagaaggcgaactgcggcaa

SEQ ID NO: 700729 - DNA, 75 bp, synthetic construct
  source 1..75: mol_type = other DNA
ttgccgggatgaatgcgatcgacgcattaaggctatccaggaggaagaaaaaaaggttgcctgggctgtaacaga

SEQ ID NO: 700730 - DNA, 75 bp, synthetic construct
  source 1..75: mol_type = other DNA
gcccgaaacctacaccggcttattcgacgcgctcttgtacgctgactgtgattatgtactcactcagtcgtttac

SEQ ID NO: 700731 - DNA, 75 bp, synthetic construct
  source 1..75: mol_type = other DNA
gtaaaatcgcctacggtaaacatcatttatcaattatggtgttttcgccgtcactggaaagcctgattgcagaca

SEQ ID NO: 700732 - DNA, 75 bp, synthetic construct
  source 1..75: mol_type = other DNA
ctgcatgtcccgtgaggaagcgaaaaaggcgattaagcgcacccgacggctgatgatgagtgctgatgatgatgc

SEQ ID NO: 700733 - DNA, 75 bp, synthetic construct
  source 1..75: mol_type = other DNA
cgcatacgctgacaccatcagcgaactctattacacctctctggggaaacgaccgttccggcgcaaccgtctgtt

SEQ ID NO: 700734 - DNA, 75 bp, synthetic construct
  source 1..75: mol_type = other DNA
ctgtctcaaaatatgtcccagcagagataatatttatatctcaagtcatcaggtttcttaaaaagggcggtgagg

SEQ ID NO: 700735 - DNA, 75 bp, synthetic construct
  source 1..75: mol_type = other DNA
gagctgagacggctggcaaaagaggacattcatttctttgacctgaagttgctggcgtttaaaacgcgtggcaac

SEQ ID NO: 700736 - DNA, 75 bp, synthetic construct
  source 1..75: mol_type = other DNA
atgggcagcggacagaaaacgctcggtctttctccggtttcaatcagttaatccgcaaaggcaccgggaaaccgg

SEQ ID NO: 700737 - DNA, 75 bp, synthetic construct
  source 1..75: mol_type = other DNA
atcgccgaaagcctgcgcaacatccggcatcatgaagaggccaaccgggcggcgattgtggaagcgttgcgtgtc

SEQ ID NO: 700738 - DNA, 75 bp, synthetic construct
  source 1..75: mol_type = other DNA
ttctcgaagaggccggacgggcgttgcaggccgccattaagggattgctgagtctgcaacaacaacagaacagcc

SEQ ID NO: 700739 - DNA, 75 bp, synthetic construct
  source 1..75: mol_type = other DNA
accgtctcagtggtaagccctacaatctacgatggaggccactcaaagagcaattcggtcaagagtacacaggtg

SEQ ID NO: 700740 - DNA, 75 bp, synthetic construct
  source 1..75: mol_type = other DNA
gcgctgatcgaagcagccgtagacattgccagcaatgaatacgataccgacgacatggcgttcacccattcggtg

SEQ ID NO: 700741 - DNA, 75 bp, synthetic construct
  source 1..75: mol_type = other DNA
cgcgaatttatgcgccgctccggtgatgcctggctagtagttcaagccggttggcttgatgaaggcaatgggcca

SEQ ID NO: 700742 - DNA, 75 bp, synthetic construct
  source 1..75: mol_type = other DNA
atggaaacaaatcgagacggtggaaggaaccggccaccattaccgcctgctggtgcatgtacgtcaaagcagcat

SEQ ID NO: 700743 - DNA, 75 bp, synthetic construct
  source 1..75: mol_type = other DNA
gccgccggtaaagctggatgagaaaacgcagtttattggtgtcgtggcctatttctccgatgaccaggccactga

SEQ ID NO: 700744 - DNA, 75 bp, synthetic construct
  source 1..75: mol_type = other DNA
tatatcgaccaccaggatttcaacctgttgccggacaccatcaaaaccctgccgccggtaaagctggatgagaaa

SEQ ID NO: 700745 - DNA, 75 bp, synthetic construct
  source 1..75: mol_type = other DNA
tttgcgaaaaataatattaatattatccggattaaattaacgtttgccgatgattacacggtgacgttttacagc

SEQ ID NO: 700746 - DNA, 75 bp, synthetic construct
  source 1..75: mol_type = other DNA
caaaaaacactgacatgtactgttgaattatcagaagcgctaacgcctgaagtctatgatgacgaagtttatatg

SEQ ID NO: 700747 - DNA, 75 bp, synthetic construct
  source 1..75: mol_type = other DNA
tgcgttaaaaacacttatcgtttatattggcgttgaggattatggttttgatgcatcgctggatatcgtgatgaa

SEQ ID NO: 700748 - DNA, 75 bp, synthetic construct
  source 1..75: mol_type = other DNA
ggaaggctatacgtactactttaatgcaaagaaatggtgtagggacttttgagaattacatgaggcactggtggg

SEQ ID NO: 700749 - DNA, 75 bp, synthetic construct
  source 1..75: mol_type = other DNA
atgacccacggaatatgggagttggggaacggtcaggagaaaaaatcggtgaaggtaagcggacatctttcctcc

SEQ ID NO: 700750 - DNA, 75 bp, synthetic construct
  source 1..75: mol_type = other DNA
tgacggaatggtctggagttctccggaaagacatggcgccatgagctcggtgatgaaggcccagattgactggat

SEQ ID NO: 700751 - DNA, 75 bp, synthetic construct
  source 1..75: mol_type = other DNA
tcgctggtcagaaggtatggtgtggtgctcccctgagcgtcatggcgcgatgaccggcataatgaaagcccagat

SEQ ID NO: 700752 - DNA, 75 bp, synthetic construct
  source 1..75: mol_type = other DNA
aagccaggataaacgctatcacattgttgaaggcgcaaaccatatggatctttatgacggcaaagctatgtggct

SEQ ID NO: 700753 - DNA, 75 bp, synthetic construct
  source 1..75: mol_type = other DNA
gaggctatattcaggaagaattggcaaaacttaaccattttttccgcgattaccgcgcgaacaaaataaagtcca

SEQ ID NO: 700754 - DNA, 75 bp, synthetic construct
  source 1..75: mol_type = other DNA
taattgtgacaaaatggcgattgagaaggtgcaattgacttatccggattcggtcgtggcgaggtggtgcccctg

SEQ ID NO: 700755 - DNA, 75 bp, synthetic construct
  source 1..75: mol_type = other DNA
ctggcagtggaaacagtttcgccaatctgaacgaatggcattatttccccggagagcagaatgccgattcaacaa

SEQ ID NO: 700756 - DNA, 75 bp, synthetic construct
  source 1..75: mol_type = other DNA
aatttaagaaactgatagatattgacttctcattcaatgaagatatcaatataatatcaggaaccaatgggacat

SEQ ID NO: 700757 - DNA, 75 bp, synthetic construct
  source 1..75: mol_type = other DNA
ttagctggttcatgaacggcgtggagacggcaaacgagtgccgattaatcacgcgcgggcggctggcgtttatca

SEQ ID NO: 700758 - DNA, 75 bp, synthetic construct
  source 1..75: mol_type = other DNA
gaagaagcggcaaggttactgaccgccatgggcgcagaagtgcggatcttcaatccttctggcttgcctcttcct

SEQ ID NO: 700759 - DNA, 75 bp, synthetic construct
  source 1..75: mol_type = other DNA
acgttcctacagccgactggcaactgaggaagctgcaaggctgctgactgccatgggcgcagaggtgcggatctt

SEQ ID NO: 700760 - DNA, 75 bp, synthetic construct
  source 1..75: mol_type = other DNA
ttaacaaagcgagtgcaccggatctttccggatgcagaagtgaaggttaagccgatgcaggcgaacggcttaaac

SEQ ID NO: 700761 - DNA, 75 bp, synthetic construct
  source 1..75: mol_type = other DNA
acactggcaaagatggtgtttacttccatctacaaggccaaccagataatttcttgtcactatcagcaactgaga

SEQ ID NO: 700762 - DNA, 75 bp, synthetic construct
  source 1..75: mol_type = other DNA
atgttcattctctggtatagtgccaacagtacttttggcaaggatttagacatcgtgatgggcgtaagagcgcaa

SEQ ID NO: 700763 - DNA, 75 bp, synthetic construct
  source 1..75: mol_type = other DNA
attgcggaacttgcggactatcttgaactcgaaaaccatatgccgcgtgcgtttactgaagcgcaagccgaagca

SEQ ID NO: 700764 - DNA, 75 bp, synthetic construct
  source 1..75: mol_type = other DNA
ggtaataatccgaatgccttccggttattattgcgagaacgctccggcacctccgctgcatttcgtgccgccgtc

SEQ ID NO: 700765 - DNA, 75 bp, synthetic construct
  source 1..75: mol_type = other DNA
aaatggaaggaaagcggagcgtgagtatgctcgtgatgagcttgatcacagattcatcattgacggtgatctggc

SEQ ID NO: 700766 - DNA, 75 bp, synthetic construct
  source 1..75: mol_type = other DNA
tgatatcttaatcacacctgtaacaagagaagaaatcgcctttaaaggaattaaggacgcagttaatgacgctaa

SEQ ID NO: 700767 - DNA, 75 bp, synthetic construct
  source 1..75: mol_type = other DNA
ggagacagcgatgatatttttgacgttgccagttttgataatgaaaacgacgcaaaagaattttgcaaaattgtg

SEQ ID NO: 700768 - DNA, 75 bp, synthetic construct
  source 1..75: mol_type = other DNA
tggctgtgaaacagcgaaaaaaatcagccaggtgatccgcaatccggatattcaggtcggaaagctgatggatca

SEQ ID NO: 700769 - DNA, 75 bp, synthetic construct
  source 1..75: mol_type = other DNA
atgaacggcaaagcgtttctggcctgcgttctgatgagcgtcgtattaactggctgtgaaacagcgaaaaaaatc

SEQ ID NO: 700770 - DNA, 75 bp, synthetic construct
  source 1..75: mol_type = other DNA
aatgggtgacggtagggacgggctggcaagcctggccggatctcggtaaagagagcgggctggttttgcgcgatg

SEQ ID NO: 700771 - DNA, 75 bp, synthetic construct
  source 1..75: mol_type = other DNA
catcggtaataatcctaacgccttccggttattattgcgggaacgctccggcacctccgctgcgtttcgtgccgc

SEQ ID NO: 700772 - DNA, 75 bp, synthetic construct
  source 1..75: mol_type = other DNA
ggaagccgcatttagccaattaagtgctgaacgcagcttcgccagcctgagtttgcgtgaagtggcgcgtgaagc

SEQ ID NO: 700773 - DNA, 75 bp, synthetic construct
  source 1..75: mol_type = other DNA
tatatcgatcaccaggacttcaacctgttgccggacaccgtaaaaacactgccgccgatcaagctggatgagaaa

SEQ ID NO: 700774 - DNA, 75 bp, synthetic construct
  source 1..75: mol_type = other DNA
actgtcatttatcgcgtcgagtctgaacatatttctcaggggattgacgctgtaatgaaaaatgctgaacgcgtg

SEQ ID NO: 700775 - DNA, 75 bp, synthetic construct
  source 1..75: mol_type = other DNA
tggcggtgctaccagtaaaaagaacactggcaacactacaacgacattaaatcagcctatgctatcgtgcaaaga

SEQ ID NO: 700776 - DNA, 75 bp, synthetic construct
  source 1..75: mol_type = other DNA
gggcaaactgtaacagataatgtaatgcgttcacccagaactatttcaatcagtggtgtggttgtagttggtgaa

SEQ ID NO: 700777 - DNA, 75 bp, synthetic construct
  source 1..75: mol_type = other DNA
atgatattctcgatgctcagattaaatgcaataaggcttggaagctggactattcagacttaacagaagctgaaa

SEQ ID NO: 700778 - DNA, 75 bp, synthetic construct
  source 1..75: mol_type = other DNA
gtaaagatggtattaaaattgatgactccattattacaagctttaaagcctctaaagatgttggtatttcaaatg

SEQ ID NO: 700779 - DNA, 75 bp, synthetic construct
  source 1..75: mol_type = other DNA
acagtggcaaagatggcatctatttccacttaagagataatgtagatgccttcttaaccttatcagctactgaga

SEQ ID NO: 700780 - DNA, 75 bp, synthetic construct
  source 1..75: mol_type = other DNA
ggaaattaacttcaaagctgttgttgggcagactgatatctctgctgcaactggaaaggctgctactacgaatga

SEQ ID NO: 700781 - DNA, 75 bp, synthetic construct
  source 1..75: mol_type = other DNA
gaagtgctgggacatgtacctggagacagcgatgatatttttgacgttgccagttttgataatgaaaacgacgca

SEQ ID NO: 700782 - DNA, 75 bp, synthetic construct
  source 1..75: mol_type = other DNA
aaatagccaggagtccgaatccagaatagagaaaggtgatgcattgaaggaacaggccaccgaacaggaacaggc

SEQ ID NO: 700783 - DNA, 75 bp, synthetic construct
  source 1..75: mol_type = other DNA
gtcttctgccgccgagcgttttaatattattccagcgcagcataaaatcagaacagcaaaggacggctccccccg

SEQ ID NO: 700784 - DNA, 75 bp, synthetic construct
  source 1..75: mol_type = other DNA
atgatttacactaatcagcttcgttacactggcaaagatggcgtttactttcatctacaaggccaaccagataat

SEQ ID NO: 700785 - DNA, 75 bp, synthetic construct
  source 1..75: mol_type = other DNA
attattaaccacctgcgggttaagctacatcggtacgccctgtgaggataatggtgaaacgttaggattacatgg

SEQ ID NO: 700786 - DNA, 75 bp, synthetic construct
  source 1..75: mol_type = other DNA
ctgccgcccatttatgccagccccggcgatcgtaatgacgacgtctctgcggcagaaatggcgcaacgccacctt

SEQ ID NO: 700787 - DNA, 75 bp, synthetic construct
  source 1..75: mol_type = other DNA
gcagccctttctctgctgcaaaccgtttcacaatgtatactccgaattcatcggctatcatccagcgtttttttg

SEQ ID NO: 700788 - DNA, 75 bp, synthetic construct
  source 1..75: mol_type = other DNA
aaaagagttgtctgaataatcagtgtcaagaaccgtttgatggacacaaatttggttttgacgccatggcgggag

SEQ ID NO: 700789 - DNA, 75 bp, synthetic construct
  source 1..75: mol_type = other DNA
tggtcattatgtagatggtttcaagggttctgtacatcgtagtgcagaaaataacaactcaacttggggatggga

SEQ ID NO: 700790 - DNA, 75 bp, synthetic construct
  source 1..75: mol_type = other DNA
ggtggaagcccgtgatgctaatgacaaaattcttggtacgttaaccctttctccaccttcggcactgccggatac

SEQ ID NO: 700791 - DNA, 75 bp, synthetic construct
  source 1..75: mol_type = other DNA
ggatacccaaacgctcacaccggcaccagaaggtctgacctataccgtcaatggtcgggcacttcctgcaaaaga

SEQ ID NO: 700792 - DNA, 75 bp, synthetic construct
  source 1..75: mol_type = other DNA
gggcagctacgattcaaactggctaataatcgtgtgaacagttcagtgatgaacaagttccatatcaacgtgccg

SEQ ID NO: 700793 - DNA, 75 bp, synthetic construct
  source 1..75: mol_type = other DNA
atgaacagcccagagcacttgccgtctgagacgcacaaaccgatcaccggctacttgtggggcgcgctggccgtg

SEQ ID NO: 700794 - DNA, 75 bp, synthetic construct
  source 1..75: mol_type = other DNA
ccggaggcgctgaattatgcgcggcacttgccggcgcatggtgcaccggactgacattcttatacctgtgggcaa

SEQ ID NO: 700795 - DNA, 75 bp, synthetic construct
  source 1..75: mol_type = other DNA
tgcggtttctggggccgggcaattgccctggcaggcaggccgtagcgttaccgattatctgcaagatcacccccg

SEQ ID NO: 700796 - DNA, 75 bp, synthetic construct
  source 1..75: mol_type = other DNA
tgcgtcaaagaataggtaaagaattggtttcgcatggcattgataatgctaactatggtttaaatagtaccgcag

SEQ ID NO: 700797 - DNA, 75 bp, synthetic construct
  source 1..75: mol_type = other DNA
aacttttatccggcccagacaaaccagaaaagttgtcttgacgaacagtgtcaggagccgttcgacggccgcaag

SEQ ID NO: 700798 - DNA, 75 bp, synthetic construct
  source 1..75: mol_type = other DNA
ccgggttaaacctggtgattaaacagggcaacctgagtggtcgcctaaatgatatcaaagttggagcgccgggtg

SEQ ID NO: 700799 - DNA, 75 bp, synthetic construct
  source 1..75: mol_type = other DNA
tatccggtatttttgtggcgaaatactctgacccacctgcagcgtcgacgattagaaaatggttaattccaattt

SEQ ID NO: 700800 - DNA, 75 bp, synthetic construct
  source 1..75: mol_type = other DNA
acacgctcaaaagcgatagtgaagaaaacgtcggtcactggaaaaatgcgcagtatgacgccttactaaaccagg

SEQ ID NO: 700801 - DNA, 75 bp, synthetic construct
  source 1..75: mol_type = other DNA
cgttgacgccgccagaggtagaaggttttcgtgcgccaacgttcggggaactgcaacaaccgatgggcgagcgcg

SEQ ID NO: 700802 - DNA, 75 bp, synthetic construct
  source 1..75: mol_type = other DNA
ggaaaaacgcaaagtatgacgcgttactaaaccaggccgctcagaccactgacgcgacaaagcgtaatgcgttgt

SEQ ID NO: 700803 - DNA, 75 bp, synthetic construct
  source 1..75: mol_type = other DNA
ggagctgcagggtgtctatatcgaagaacatgatggtcgtaagcaagtttggtgctatgtcatcaagcctcgtga

SEQ ID NO: 700804 - DNA, 75 bp, synthetic construct
  source 1..75: mol_type = other DNA
acaggcgggatacgacgcctctcatccgctacgctttgagctgttctacaacaagtacgatctgcatgaaaaaac

SEQ ID NO: 700805 - DNA, 75 bp, synthetic construct
  source 1..75: mol_type = other DNA
tacgcttgagcagccggttccttggttcacgacgatgctcgcctggccgacgttgttcccggttcctcatcatgt

SEQ ID NO: 700806 - DNA, 75 bp, synthetic construct
  source 1..75: mol_type = other DNA
aatcaccggctacgatacggacgccggggggatcaggacgttttacaaggcagacatcggggactacctggaaat

SEQ ID NO: 700807 - DNA, 75 bp, synthetic construct
  source 1..75: mol_type = other DNA
atctggggtggtgctgttttgcgttacttcagcgctctggaagaagggatcaacctgctgccaggttttgcaccg

SEQ ID NO: 700808 - DNA, 75 bp, synthetic construct
  source 1..75: mol_type = other DNA
gaacagggggagccgttaggtttatctgcggccgtgacacgtacttcagccgcatacggtgtatcggtcacccgg

SEQ ID NO: 700809 - DNA, 75 bp, synthetic construct
  source 1..75: mol_type = other DNA
gtatctcgatgcccggcgtagtggtgatttcatgttgtcgcggcagtcgtgggatgcgacatataatgatgcatc

SEQ ID NO: 700810 - DNA, 75 bp, synthetic construct
  source 1..75: mol_type = other DNA
tgagtatctggcgctggataattcggtcaccggctataaccgctatcgcgcgggagaggtcgatctcacctgggt

SEQ ID NO: 700811 - DNA, 75 bp, synthetic construct
  source 1..75: mol_type = other DNA
attgcttaccgggggggggggactacttattgtctgtctcggttattacgcactttggaacccttggcaattacg

SEQ ID NO: 700812 - DNA, 75 bp, synthetic construct
  source 1..75: mol_type = other DNA
aaaagacatgtggaaccaccgcctggcagccagctttggttgggcttttctgcgcatgtactgcccgaaaaatat

SEQ ID NO: 700813 - DNA, 75 bp, synthetic construct
  source 1..75: mol_type = other DNA
ccgtattctcggcatgggcgatgttctgtcgttgatcgaagatatcgaaagtaaagttgaccgcgcgcaggcaga

SEQ ID NO: 700814 - DNA, 75 bp, synthetic construct
  source 1..75: mol_type = other DNA
cctgtttgtggttgacgccatgaccggtcaggatgctgccaatacggcaaaagcgttcaatgaagcgttaccgct

SEQ ID NO: 700815 - DNA, 75 bp, synthetic construct
  source 1..75: mol_type = other DNA
agtgagtaataccggattaaccggatacattgaaggctataacgactgtttacaggatcatggcgatggcaagta

SEQ ID NO: 700816 - DNA, 75 bp, synthetic construct
  source 1..75: mol_type = other DNA
aagcctttctggaacggcacggtggcgtccgtgcatttcagtggacgccaccttatgactggaaaccgatcaggg

SEQ ID NO: 700817 - DNA, 75 bp, synthetic construct
  source 1..75: mol_type = other DNA
atgcagtttgactggagtgccatctggccggccattccgcttctgatcgaaggcgctaaaatgactctgtggatt

SEQ ID NO: 700818 - DNA, 75 bp, synthetic construct
  source 1..75: mol_type = other DNA
gaaattagccagcaagctaaaaaaaggcgacggcttcgatctcaacgactttcttgagcaactgcgccagatgaa

SEQ ID NO: 700819 - DNA, 75 bp, synthetic construct
  source 1..75: mol_type = other DNA
cgcgtgatagccagattggtgcatgggtttcgaagcagtccagtcgcatttctgcccgcggtatccttgaaagta

SEQ ID NO: 700820 - DNA, 75 bp, synthetic construct
  source 1..75: mol_type = other DNA
attaccctgtacacagtaaattcattaaatgaggtggagctttattcttcggatccgtttgagtggagatctgat

SEQ ID NO: 700821 - DNA, 75 bp, synthetic construct
  source 1..75: mol_type = other DNA
gggttacgctactttgcgcagccttaaccagattattacctatgatgcttaccatatggcggaagtgtacctgac

SEQ ID NO: 700822 - DNA, 75 bp, synthetic construct
  source 1..75: mol_type = other DNA
gccgttcggctgaatggtcagtgagtaacaccggattaaccggatacattgaaggctataacgactgtttacagg

SEQ ID NO: 700823 - DNA, 75 bp, synthetic construct
  source 1..75: mol_type = other DNA
attactggcgtggatagcaagggatttgaaaaaatatattgagcctggcgggcctggtgacgaaatgacggttga

SEQ ID NO: 700824 - DNA, 75 bp, synthetic construct
  source 1..75: mol_type = other DNA
gggcggcgaacatcgactgcatgaccgctttttgtaccagcgtgaaaacgaggtgtggaaaatcgatcgtctcgc

SEQ ID NO: 700825 - DNA, 75 bp, synthetic construct
  source 1..75: mol_type = other DNA
gcgctggtggtgcgctggcagaaagtgttggcgcacaactggcgagaacaggtgaaagtgctgtgcgtaatgttg

SEQ ID NO: 700826 - DNA, 75 bp, synthetic construct
  source 1..75: mol_type = other DNA
tttgtcttcgccgaagggatcgcgtacggcccggaaatggcagcgaaagcgcagtctgacgcgaaagcagccatc

SEQ ID NO: 700827 - DNA, 75 bp, synthetic construct
  source 1..75: mol_type = other DNA
aaaactttttgcccaaaagcaggcaaaaacttttgcggtcttcccccggacagtcgtttccggccgtggcagtga

SEQ ID NO: 700828 - DNA, 75 bp, synthetic construct
  source 1..75: mol_type = other DNA
gcagaacaaaagatgatggcagatccggcaggagatattgatctgcgcatagctgaagattcgctgcttgaatca

SEQ ID NO: 700829 - DNA, 75 bp, synthetic construct
  source 1..75: mol_type = other DNA
accgttccggtcgcgccgcctctgtcgcgccgaggcctgcgctcctggcatcccggcaaaaggccgccgggatgt

SEQ ID NO: 700830 - DNA, 75 bp, synthetic construct
  source 1..75: mol_type = other DNA
atgttatttttctgtggttaccgtgcctgttactgttcttcttcttcttcttcttcttcttcttcctctttccgt

SEQ ID NO: 700831 - DNA, 75 bp, synthetic construct
  source 1..75: mol_type = other DNA
aggcagctgctggcgcacctgccagtctccgccgaacccgctggcgcggtttcgggctgtcgctacggtccgatg

SEQ ID NO: 700832 - DNA, 75 bp, synthetic construct
  source 1..75: mol_type = other DNA
tgacagaattcttcgttgcggtcgccattctgggggctgtatcttggctaggaacgcttgctccgtctcaggcaa

SEQ ID NO: 700833 - DNA, 75 bp, synthetic construct
  source 1..75: mol_type = other DNA
ccagcatcctggcagggtactctcagtctggtcagttgtctgattattttgttgaacagtggcgtgaaaagcaca

SEQ ID NO: 700834 - DNA, 75 bp, synthetic construct
  source 1..75: mol_type = other DNA
tggtgtggcgtttggtggtgtaggtcggttccttaacgcccgcggtgagagcgctgcagctcctgaattttcccc

SEQ ID NO: 700835 - DNA, 75 bp, synthetic construct
  source 1..75: mol_type = other DNA
gtgctgcggcggtaacttcgctacagggtttttctgagtttgaacggctgacagcacagggtgttgatttcagga

SEQ ID NO: 700836 - DNA, 75 bp, synthetic construct
  source 1..75: mol_type = other DNA
tggataaaatcgtatccccgattgctcagtttgttaacgaaaacacctcgctcaatgacacttcagtttcataca

SEQ ID NO: 700837 - DNA, 75 bp, synthetic construct
  source 1..75: mol_type = other DNA
tggctgaaccaggcaaaagtcacagcaacatcagacctgatacagctgcgccagggcgatgagatccagatcggg

SEQ ID NO: 700838 - DNA, 75 bp, synthetic construct
  source 1..75: mol_type = other DNA
ggttaaacagcttaacgaggcattgtttcaggaaaaagagcgcctgcacattacgcttgattccatcggtgaagc

SEQ ID NO: 700839 - DNA, 75 bp, synthetic construct
  source 1..75: mol_type = other DNA
ccctgatcgatgacagcaatcatcaggcggcagacgtgatgtcgcaggccgatatcgcctgttatgcttcgaaaa

SEQ ID NO: 700840 - DNA, 75 bp, synthetic construct
  source 1..75: mol_type = other DNA
caatccaacaaatcgctatgccagtttcttggttacagccaggaagagctgcgtgccattacctttcaacaactt

SEQ ID NO: 700841 - DNA, 75 bp, synthetic construct
  source 1..75: mol_type = other DNA
ccagcgtacaaggcaatttgatggatgaaatgctgatttcgatcattcagggtcacgcccggcggctgggattga

SEQ ID NO: 700842 - DNA, 75 bp, synthetic construct
  source 1..75: mol_type = other DNA
ctcccatgatgcactgacgcatctcgccaaccgcgccagttttgagaaacaactgcgtatcctgctgcaaacggt

SEQ ID NO: 700843 - DNA, 75 bp, synthetic construct
  source 1..75: mol_type = other DNA
ttacgaaccgcagcaagctgccgcacatagcgaacgggcggtgatgtcgcttgatgaacagtggcggatgattaa

SEQ ID NO: 700844 - DNA, 75 bp, synthetic construct
  source 1..75: mol_type = other DNA
tatggatatgaccgaggttaaacagcttaacgaggcattgtttcaggaaaaagagcgcctgcacattacgcttga

SEQ ID NO: 700845 - DNA, 75 bp, synthetic construct
  source 1..75: mol_type = other DNA
gcgaagatttaaaggcgtggttaattatcgaccatctggaatataacagacactgtggggttaaaggggcgcata

SEQ ID NO: 700846 - DNA, 75 bp, synthetic construct
  source 1..75: mol_type = other DNA
acttgaaagcacagaaaaacgcacaggaccggatcatcaaaaagggcaaggctttattaaatgctttcctgagaa

SEQ ID NO: 700847 - DNA, 75 bp, synthetic construct
  source 1..75: mol_type = other DNA
ttacatctgattattccggcagaagcgattttagatcacgcagaaagcgtgcaaaaactgcggctggcgggatgt

SEQ ID NO: 700848 - DNA, 75 bp, synthetic construct
  source 1..75: mol_type = other DNA
taattaccctgcctcatcccctgcttcacctcgtcagtttaggtttagtctcattcatctttacccttttctcgc

SEQ ID NO: 700849 - DNA, 75 bp, synthetic construct
  source 1..75: mol_type = other DNA
gagaacatttacagtgccgacacctcacgttccgcgattgaacaagatgtggtgttgcactgtcggagcggcggc

SEQ ID NO: 700850 - DNA, 75 bp, synthetic construct
  source 1..75: mol_type = other DNA
gaatgacagcgccgggcatgcggcgggtgacgctttactgcgcgaactggcgtcgttgatgctgagtatgctgcg

SEQ ID NO: 700851 - DNA, 75 bp, synthetic construct
  source 1..75: mol_type = other DNA
tggctgcatgattttaacgttcgctggcgcgtcaccgacgcaggttttgaagtctttgcgctggaaccgcgttaa

SEQ ID NO: 700852 - DNA, 75 bp, synthetic construct
  source 1..75: mol_type = other DNA
tccttttcgtctttcatcaaacgatggaaggcggctggcgtccgactgtgcgtccaccgcgcctcggcggtaacg

SEQ ID NO: 700853 - DNA, 75 bp, synthetic construct
  source 1..75: mol_type = other DNA
ctgcctttaatctgggatgcagaaatcttatgtggttcagggataagaaccgtaactaccaccgcaccactatct

SEQ ID NO: 700854 - DNA, 75 bp, synthetic construct
  source 1..75: mol_type = other DNA
tatatcatcgtcgccacctacctgccgctcatggcgaaagacgcgggccagcctgtgttgacggctcacctctgg

SEQ ID NO: 700855 - DNA, 75 bp, synthetic construct
  source 1..75: mol_type = other DNA
caccttgaacagctcgacagcgtagggagtgccgccgtggtgtgccaccagggacagctgtatgcctttatcact

SEQ ID NO: 700856 - DNA, 75 bp, synthetic construct
  source 1..75: mol_type = other DNA
tccttttcgtctttcatcaaacgatggaaggcggctggcgtccgactgtgcgtccgcctcgtcttggcggtaatg

SEQ ID NO: 700857 - DNA, 75 bp, synthetic construct
  source 1..75: mol_type = other DNA
cgccagctgagttatagcgcctcccatgatgctctgactcacctggctaaccgcaccagtttcgagaaacaactg

SEQ ID NO: 700858 - DNA, 75 bp, synthetic construct
  source 1..75: mol_type = other DNA
ttatcagtgcgattaatgactaccactttatgtgggaaggccgtgtgcatcgggtaggtgccagcgcagggatta

SEQ ID NO: 700859 - DNA, 75 bp, synthetic construct
  source 1..75: mol_type = other DNA
atggcgacgttgtctgggcgctgcttgcggtctcattagtgcgccacgccgatggcacgccactctactttatcg

SEQ ID NO: 700860 - DNA, 75 bp, synthetic construct
  source 1..75: mol_type = other DNA
ggggttctccattgctccccacaaactccggaccagcccggaagcgcaaatccgcattgccacatgggaggactg

SEQ ID NO: 700861 - DNA, 75 bp, synthetic construct
  source 1..75: mol_type = other DNA
tgctacgccgcgtacatacctgatgagccatatgccgtggctaccgtttttgctgatcctgctgcccgccaacat

SEQ ID NO: 700862 - DNA, 75 bp, synthetic construct
  source 1..75: mol_type = other DNA
gttttatcgctacacgcattatcagtgccgtgaatgactatcactttatatgggaaggccgggtacatcgggtag

SEQ ID NO: 700863 - DNA, 75 bp, synthetic construct
  source 1..75: mol_type = other DNA
atcacccctgactggaggctgtttagcgaagacctaaaagtctggttaattatcgatcatctggaatataacagg

SEQ ID NO: 700864 - DNA, 75 bp, synthetic construct
  source 1..75: mol_type = other DNA
tcatcaccagttgagcgatttctggagaaacacccggatgcgcatacctggaatgtaccgaagcgacagtgggga

SEQ ID NO: 700865 - DNA, 75 bp, synthetic construct
  source 1..75: mol_type = other DNA
atgggccaatgacgtgcggacaatgcggatgctggatggcagaactcacagacaaatttgtgaaatgtttgggcg

SEQ ID NO: 700866 - DNA, 75 bp, synthetic construct
  source 1..75: mol_type = other DNA
caggccgccagtgatgatggtgaggtatcacgccccagagaacctaactggacgacctgggcgaatgatgtgcgc

SEQ ID NO: 700867 - DNA, 75 bp, synthetic construct
  source 1..75: mol_type = other DNA
tagagagtacaaacacagattgtcaataacgccggatatatcgaagcaattcgacaaagaaataagatctatttt

SEQ ID NO: 700868 - DNA, 75 bp, synthetic construct
  source 1..75: mol_type = other DNA
aacgttgggcacaattgaataccgatcattgtttggtagttacagcctgaccgttgacgacacggtatttgcgat

SEQ ID NO: 700869 - DNA, 75 bp, synthetic construct
  source 1..75: mol_type = other DNA
ggcgttacgtatacttggggcaaaaatgtgttggttgcgactgcggcgagcaaaacagtctggtgacagaaaaga

SEQ ID NO: 700870 - DNA, 75 bp, synthetic construct
  source 1..75: mol_type = other DNA
gttgacccctcaaattttgatggatcaaccattgataaaaaacaacctgataggggggcgatggttggccccgat

SEQ ID NO: 700871 - DNA, 75 bp, synthetic construct
  source 1..75: mol_type = other DNA
gtcgtcaccaacaaccacgttgttgataacgcgacggtgattaaagtccaactgagcgatggccgtaagttcgac

SEQ ID NO: 700872 - DNA, 75 bp, synthetic construct
  source 1..75: mol_type = other DNA
ttcggtgatgattctccgttctgccaggaaggttctccgttccagagttctccgttctgccagggtggccagggc

SEQ ID NO: 700873 - DNA, 75 bp, synthetic construct
  source 1..75: mol_type = other DNA
caaccgctcagtttattgaatggctggattcccgtggtgcatttaatcatccgtactggatgtgcaaatgttcat

SEQ ID NO: 700874 - DNA, 75 bp, synthetic construct
  source 1..75: mol_type = other DNA
cccgtcaaatattgacccctcaacggttggcccgtcaaattttgatggatcaactgttgataaaaaactgccgat

SEQ ID NO: 700875 - DNA, 75 bp, synthetic construct
  source 1..75: mol_type = other DNA
gcgcgtgaggcatataaaccgaaaagaaaaattagcccggcaaaaaatgacccgttaacagttgaccagtcaaat

SEQ ID NO: 700876 - DNA, 75 bp, synthetic construct
  source 1..75: mol_type = other DNA
aactcgacgatgctcgacacattgcagacctgtacaagcacgctgtagccgccttctcccaccgccgcgatatga

SEQ ID NO: 700877 - DNA, 75 bp, synthetic construct
  source 1..75: mol_type = other DNA
cctgcgcccatcagcgccgagatccgcaaagtgcatcagtatctgactttttcggtgaataccccggcgcagctg

SEQ ID NO: 700878 - DNA, 75 bp, synthetic construct
  source 1..75: mol_type = other DNA
atgttgagttttgccagtggctgacgcaggagcacggcgtagcggcgattccgctgtcggtgttttgcgccgatc

SEQ ID NO: 700879 - DNA, 75 bp, synthetic construct
  source 1..75: mol_type = other DNA
cgtgctggcgcatccgcaattgcgtgagcgagcggtggcggtgtcatcgtttggcaagacctatcacatgaccgg

SEQ ID NO: 700880 - DNA, 75 bp, synthetic construct
  source 1..75: mol_type = other DNA
acctgtcacaaggctttcccgattttgatggtccgcgctatttgcaggaacggctggcgtaccatgtttctcagg

SEQ ID NO: 700881 - DNA, 75 bp, synthetic construct
  source 1..75: mol_type = other DNA
attcttgtgaatgcattacgagagagcagactggagatcttaccctgtgaaggcacttactttttgctggtggat

SEQ ID NO: 700882 - DNA, 75 bp, synthetic construct
  source 1..75: mol_type = other DNA
tgcgctgcaaccgccgtattttcgcgtggactggcaggagtttgccgctttgttaagcgatcgtacccgtctggt

SEQ ID NO: 700883 - DNA, 75 bp, synthetic construct
  source 1..75: mol_type = other DNA
acggcagaagttggatgaagcacggcacatcgcagacatatacaaacatgctgtcgccgccttttcgcatcgccg

SEQ ID NO: 700884 - DNA, 75 bp, synthetic construct
  source 1..75: mol_type = other DNA
gagtctgtactggacgctaaggttaaaacaaacccacagtatctatctaaacgtcagaagttggatgacgcacgg

SEQ ID NO: 700885 - DNA, 75 bp, synthetic construct
  source 1..75: mol_type = other DNA
taatgtctgatctcgagtttgaccgagacaatctggaggaagtctggcgtagacaaccccgccttttaatggagt

SEQ ID NO: 700886 - DNA, 75 bp, synthetic construct
  source 1..75: mol_type = other DNA
gggcttcataacatgccaccgctgatgctggccggtttgcgctttatgctggtcgcttttccggccatctttttg

SEQ ID NO: 700887 - DNA, 75 bp, synthetic construct
  source 1..75: mol_type = other DNA
caatcccagggatggcaaagccatatttttttcaaccgtaaacagcagagcgcccaaatctatcggcgtacgctg

SEQ ID NO: 700888 - DNA, 75 bp, synthetic construct
  source 1..75: mol_type = other DNA
gttgtgcatgggaggtgggttatgcctgggctttagggatgccggtgcatctgattacaacagattttctcttat

SEQ ID NO: 700889 - DNA, 75 bp, synthetic construct
  source 1..75: mol_type = other DNA
atacctatagctgcccggcgctactgaaagagtggctggaccgggtattaagccgtggttttgccagcgggccgg

SEQ ID NO: 700890 - DNA, 75 bp, synthetic construct
  source 1..75: mol_type = other DNA
gatatttgggcacaagcggtaatgtgaaaaatccgctctgttcagccagtgataaatattgctatcgcgataaca

SEQ ID NO: 700891 - DNA, 75 bp, synthetic construct
  source 1..75: mol_type = other DNA
gatatctgggtaccagcggtaacgtgaaaaatccgctctgttcggtgagcgacaaatattgctatcgcgataaca

SEQ ID NO: 700892 - DNA, 75 bp, synthetic construct
  source 1..75: mol_type = other DNA
cgtcggggcgatttatcgcgttaccgattgggccgacgttaaccttagctatgaacgtggcaacacctttatgtt

SEQ ID NO: 700893 - DNA, 75 bp, synthetic construct
  source 1..75: mol_type = other DNA
aagaggctggaattaagcatatcgcgactattcttaccccacaaaacgtgaaggcaattagtcgatattctccag

SEQ ID NO: 700894 - DNA, 75 bp, synthetic construct
  source 1..75: mol_type = other DNA
atggctctaaggcgttgcagggttcagcaaaaagtggaacaggtcagttccataaaataataagcgccctacctg

SEQ ID NO: 700895 - DNA, 75 bp, synthetic construct
  source 1..75: mol_type = other DNA
ctaaaattgccgctctgacagtgcgtgacgacgcccgtctggaactggccgctgacttttgcggcctgtttctga

SEQ ID NO: 700896 - DNA, 75 bp, synthetic construct
  source 1..75: mol_type = other DNA
cggcgctgtggcaatggttaccagagtttgcttcgcgttgtcgtcagtatgacagctttggtttttacgcggcac

SEQ ID NO: 700897 - DNA, 75 bp, synthetic construct
  source 1..75: mol_type = other DNA
gtgcgcagatggctgaatggttttcgttgctgaaaagcgaaccgccgctcactgcggcggtgaatgagctggaaa

SEQ ID NO: 700898 - DNA, 75 bp, synthetic construct
  source 1..75: mol_type = other DNA
ggctatgccacgatcacgaatgtttcgaaagaggagtacggcgaaggggacttcaccaaaggcgtgtatgtctct

SEQ ID NO: 700899 - DNA, 75 bp, synthetic construct
  source 1..75: mol_type = other DNA
tggcttctataagagagatcattactcaggcgcacgataacgggaccgggatgccgttgtcggttgaggtagcct

SEQ ID NO: 700900 - DNA, 75 bp, synthetic construct
  source 1..75: mol_type = other DNA
acgtgcgtaccagacagtacagcagcgtcgaagcgttctctggcgaccaaacgtataaagataaagccttcgatc

SEQ ID NO: 700901 - DNA, 75 bp, synthetic construct
  source 1..75: mol_type = other DNA
ctgctacggcgaaacgtatcctgcgcctatcgggccgtcgcaatcagatttcggcggcgtcggtttgttgcaaac

SEQ ID NO: 700902 - DNA, 75 bp, synthetic construct
  source 1..75: mol_type = other DNA
ctgctatggcgaaacgtatccagcgcccatcgggccgtcgcaatcggatttcggcggcgtcggtctgttacaaac

SEQ ID NO: 700903 - DNA, 75 bp, synthetic construct
  source 1..75: mol_type = other DNA
cccgcattgttggcggtacattttggggctgacggcacccagcgataattttatacgccgctcgttataccatct

SEQ ID NO: 700904 - DNA, 75 bp, synthetic construct
  source 1..75: mol_type = other DNA
gggcagtatctggcaggggataaaggcggcacgctggagatcgccaaacgctttgatagcggcgtggtggtgggt

SEQ ID NO: 700905 - DNA, 75 bp, synthetic construct
  source 1..75: mol_type = other DNA
caggactcgcacttaccgcgcgttcgtacccatgtgcgcgagtatgtgcagaacgatgtctatgtgaataacctg

SEQ ID NO: 700906 - DNA, 75 bp, synthetic construct
  source 1..75: mol_type = other DNA
ggaaaacttttacatgtatcagctgggcgtgatgggaacggcggatttgtggctgacggaccatctgctgaccac

SEQ ID NO: 700907 - DNA, 75 bp, synthetic construct
  source 1..75: mol_type = other DNA
cattcggtggtggcgaatcagttaacgctgttgaaatacaacgccggactggccgatccgcagatccaggcgaaa

SEQ ID NO: 700908 - DNA, 75 bp, synthetic construct
  source 1..75: mol_type = other DNA
gtaatcctgatggtgttgttcaacatcccgggctgcgaaaatgcgtaccagcaaatggaagaattactctttgaa

SEQ ID NO: 700909 - DNA, 75 bp, synthetic construct
  source 1..75: mol_type = other DNA
gtttgctgcgcgttgccatcggtatgatagctttggtttttacgcggcactaagccagttgttgcttgcgataac

SEQ ID NO: 700910 - DNA, 75 bp, synthetic construct
  source 1..75: mol_type = other DNA
tcattcttaatagcttcacaaaagctcgcaacatctacctgttgcagtgcacctcagcttatccaacaccgactg

SEQ ID NO: 700911 - DNA, 75 bp, synthetic construct
  source 1..75: mol_type = other DNA
tcgtggagtcgtgctgcccacacatgcccagatttccactacatcatcacaaaatggggtgaaggtgatcgcaga

SEQ ID NO: 700912 - DNA, 75 bp, synthetic construct
  source 1..75: mol_type = other DNA
tcggcgcactggctgtgaagccgtctggtttgagttttgagcaggcgatgcaaactcgtgtcttccagccactca

SEQ ID NO: 700913 - DNA, 75 bp, synthetic construct
  source 1..75: mol_type = other DNA
gcactggcggtgaaaccatccggtttgagctttgaacaggcgatgcaaactcgtgttttccagccactcaaactc

SEQ ID NO: 700914 - DNA, 75 bp, synthetic construct
  source 1..75: mol_type = other DNA
gggatcacactattacatctcgcaacctacactgctggcggcctgccattgcaggtgccggatgaggtgaaatcc

SEQ ID NO: 700915 - DNA, 75 bp, synthetic construct
  source 1..75: mol_type = other DNA
atggaaagcttcgaaactgaacaaatgattcaatatgctttctacataaatatcgtaataacgactggtttggca

SEQ ID NO: 700916 - DNA, 75 bp, synthetic construct
  source 1..75: mol_type = other DNA
accagtattccctacggtcggggcctgcgcaaccagccagtatacgtgctaaatgcgcaactggaggaatgtccg

SEQ ID NO: 700917 - DNA, 75 bp, synthetic construct
  source 1..75: mol_type = other DNA
aggcgatctgcgtgctgttaaccctcgccagcagctctcctttattactcatcatcagcagtattggttttggcg

SEQ ID NO: 700918 - DNA, 75 bp, synthetic construct
  source 1..75: mol_type = other DNA
tataccctatactcctgagtcggcagattttctgattcaacgttttttctctgaaactatccatattgaaagtgc

SEQ ID NO: 700919 - DNA, 75 bp, synthetic construct
  source 1..75: mol_type = other DNA
accagatatgatcaagctaccatcaactatatctgaacataaagattatttggctgctgttgcttctgattttac

SEQ ID NO: 700920 - DNA, 75 bp, synthetic construct
  source 1..75: mol_type = other DNA
aaagaaactacaagcattagtagattttattagtaactgtgcttttctaatcctttcaattgccacagcttatat

SEQ ID NO: 700921 - DNA, 75 bp, synthetic construct
  source 1..75: mol_type = other DNA
gtgatttatcagggcaagccttattactttacctggggctatgcggacgtggaaaaaaatcggcccgtcacgcag

SEQ ID NO: 700922 - DNA, 75 bp, synthetic construct
  source 1..75: mol_type = other DNA
ttgagcgctttactgcgcttttcgatgcgcaccatatgaacattgcagaactggtatcgcgcacgcaacctgctg

SEQ ID NO: 700923 - DNA, 75 bp, synthetic construct
  source 1..75: mol_type = other DNA
atggcattaaaagcaagcaaacagaaccgttctgattgttgtatgcatgttttttttatgctttccttaagagct

SEQ ID NO: 700924 - DNA, 75 bp, synthetic construct
  source 1..75: mol_type = other DNA
cattgagatgaaagcggcagcagcatctggtgagctggctaatgccaagatggcagcagcggctgatggggtaat

SEQ ID NO: 700925 - DNA, 75 bp, synthetic construct
  source 1..75: mol_type = other DNA
acgttacctcaacagtattaaatgcaattgcaaactcaacgtcgggtgccattgttggtggagcaggtgggggca

SEQ ID NO: 700926 - DNA, 75 bp, synthetic construct
  source 1..75: mol_type = other DNA
cgcattgctcagatgctgtcttctggtgatcaatccactcaaaaccaatcgcagccagaagaacaatctctggta

SEQ ID NO: 700927 - DNA, 75 bp, synthetic construct
  source 1..75: mol_type = other DNA
aagatgctatctcgcatggtgtacgtggtggcaaagctgatgcagcaggaattaaccatatcgcagggatactta

SEQ ID NO: 700928 - DNA, 75 bp, synthetic construct
  source 1..75: mol_type = other DNA
cgctggctgcaaagcaatatgaatccccaggagatcaaagacaaaactcttcagcaaggtatccaactggcgcaa

SEQ ID NO: 700929 - DNA, 75 bp, synthetic construct
  source 1..75: mol_type = other DNA
tacaatctaacgcatcgccaatgtaaatccggcccgcctatggcgggccgttttgtatgggaaccagaccttatg

SEQ ID NO: 700930 - DNA, 75 bp, synthetic construct
  source 1..75: mol_type = other DNA
gggctgggaaatgctggactggccggtaaatcctgacatcatcattaacggcagtgacaataaaattgcactggc

SEQ ID NO: 700931 - DNA, 75 bp, synthetic construct
  source 1..75: mol_type = other DNA
atgcggggtatctggctggcagtctgctattttcgtttggcgcatttcaccagcatcgcgcctgcgcccatttct

SEQ ID NO: 700932 - DNA, 75 bp, synthetic construct
  source 1..75: mol_type = other DNA
ttgccctgccgggcattgtgacggggctggcgctgttaaccgcgtttaaaactatcaatctggagcccggttttt

SEQ ID NO: 700933 - DNA, 75 bp, synthetic construct
  source 1..75: mol_type = other DNA
tacggcccccgcgggcgagattttatcgttcacgttgattttccggcagaagtcatccaggcatggcaaacgctg

SEQ ID NO: 700934 - DNA, 75 bp, synthetic construct
  source 1..75: mol_type = other DNA
gatgcgcagcgggtgaacttttaccttgccgggcgcgcgccgcacacaccggtagataccgcgtcattgctggag

SEQ ID NO: 700935 - DNA, 75 bp, synthetic construct
  source 1..75: mol_type = other DNA
agccggaaaacgtagtggcacatgcggatattgcgccgcagcgcaaagacgatccggggccgttattcccctggc

SEQ ID NO: 700936 - DNA, 75 bp, synthetic construct
  source 1..75: mol_type = other DNA
gccagacgctgaaccagccccgcttcctgctgaagaaatcgaggcagaacacgacgccagcccattggttgacga

SEQ ID NO: 700937 - DNA, 75 bp, synthetic construct
  source 1..75: mol_type = other DNA
tattgttcgccagcagcggctgaaattaagcctgtccggacggctggcaataaaaattattgcagaaccaccgga

SEQ ID NO: 700938 - DNA, 75 bp, synthetic construct
  source 1..75: mol_type = other DNA
tgttcgccagcagcggttgaaattaaacctgtccggaaggctggcgataaagattattgcagagccaccggataa

SEQ ID NO: 700939 - DNA, 75 bp, synthetic construct
  source 1..75: mol_type = other DNA
acccgccgacggtgaatacctactggcgacgtcatggcaatacgtatttcatctcggaagccggaaagcgttatc

SEQ ID NO: 700940 - DNA, 75 bp, synthetic construct
  source 1..75: mol_type = other DNA
atcgccgggctgtggcgcttattgttcgccagcagcggctgaaattaagcctgtccggaaggctggcgataaagg

SEQ ID NO: 700941 - DNA, 75 bp, synthetic construct
  source 1..75: mol_type = other DNA
actggcgacgtcgtggcagcacatattttgtatcaaaagccggtgagcgttatcgccgggctgtggcgcttattg

SEQ ID NO: 700942 - DNA, 75 bp, synthetic construct
  source 1..75: mol_type = other DNA
caacgctaagtgaagacccggatctcgcctcacaagcggacgttcgttttcatctggcgattgccgaagcctcac

SEQ ID NO: 700943 - DNA, 75 bp, synthetic construct
  source 1..75: mol_type = other DNA
gcgtgatctgcctgttcgataccgaatttggcccgatggcgcagattctggtcggtgcgacgattgttggcagca

SEQ ID NO: 700944 - DNA, 75 bp, synthetic construct
  source 1..75: mol_type = other DNA
gcgacgtcgtggcagcacatattttatatcaaaagccggtgagcgttatcgccggacagtggcgcttattgttcg

SEQ ID NO: 700945 - DNA, 75 bp, synthetic construct
  source 1..75: mol_type = other DNA
ggaaagccagtatctggtggacgtctgggggtgaagatttaccccataatgcttgaagggcaggtcaaaaaatga

SEQ ID NO: 700946 - DNA, 75 bp, synthetic construct
  source 1..75: mol_type = other DNA
gccgggctgtggcgcttattgttcgccagcagcggctgaaattaaacctgtccggaaggctggcgataaaggtga

SEQ ID NO: 700947 - DNA, 75 bp, synthetic construct
  source 1..75: mol_type = other DNA
cggttgctttacagccgcacggcatcggttttcttgaaccggggattcagattgccaccattgaccattccatgt

SEQ ID NO: 700948 - DNA, 75 bp, synthetic construct
  source 1..75: mol_type = other DNA
cagtgctgaaagataaattcatctgcgatcgtccgctggaagtccgtccggtggagtttcataacccactgaaag

SEQ ID NO: 700949 - DNA, 75 bp, synthetic construct
  source 1..75: mol_type = other DNA
caaatggtagcgtgccggatgatctgcgcgttcatcagtatctgctcggttacgcttctgatcttaacttcctgc

SEQ ID NO: 700950 - DNA, 75 bp, synthetic construct
  source 1..75: mol_type = other DNA
ccgaaagagcgttgcaaaaccaccatcaacctggtgccggaaaacgaagtgcttaacgtgctggaaggcgaagac

SEQ ID NO: 700951 - DNA, 75 bp, synthetic construct
  source 1..75: mol_type = other DNA
taaaggcgatgaagaccgcattttaccgccagttgataaaggcgactctctgacgttagttgaattgacgccggc

SEQ ID NO: 700952 - DNA, 75 bp, synthetic construct
  source 1..75: mol_type = other DNA
tgccttacccgccgacggtgaacacctactggcgacgtcgtggcagcacatattttgtgtcaaaagccggtgagc

SEQ ID NO: 700953 - DNA, 75 bp, synthetic construct
  source 1..75: mol_type = other DNA
acccgccgacggtgaacacttactggcgacgccgtggcagcacatattttgtatcaaaagccggtgagcgttatc

SEQ ID NO: 700954 - DNA, 75 bp, synthetic construct
  source 1..75: mol_type = other DNA
gtttgatgaaattaatatagtgcgcggtcagcctgttcctggtgggcggctgggcgtgaagatttacgaaataat

SEQ ID NO: 700955 - DNA, 75 bp, synthetic construct
  source 1..75: mol_type = other DNA
gtatcaaaagccggtgagcgttatcgccgggatgtggcgcttattgttcgtcagcagcgactgaaattaaatctg

SEQ ID NO: 700956 - DNA, 75 bp, synthetic construct
  source 1..75: mol_type = other DNA
gatttgtacgcggagagttttacacccaggatggcgtgttagttgcctcgaccgttcaggaaggggtaatgcgta

SEQ ID NO: 700957 - DNA, 75 bp, synthetic construct
  source 1..75: mol_type = other DNA
gcagtttgatgaaatcaatattgtacgtggtcagcttgttcctggtggtcggttgggtgtgaagatttacaaaat

SEQ ID NO: 700958 - DNA, 75 bp, synthetic construct
  source 1..75: mol_type = other DNA
atgactgaacgcatagaatttgttttgccttacccgccgacggtgaacacctactggcgacgtcgtggcagtaca

SEQ ID NO: 700959 - DNA, 75 bp, synthetic construct
  source 1..75: mol_type = other DNA
gttatcgccgggctgtggcgcttattgttcgccagcagcggctgaaattaagcctgtccggaaggctggcgataa

SEQ ID NO: 700960 - DNA, 75 bp, synthetic construct
  source 1..75: mol_type = other DNA
tttaaaagtttgacgctcaaagaattaaactttgtaatgaattacgtgttcactcttgagacttggtattcattt

SEQ ID NO: 700961 - DNA, 75 bp, synthetic construct
  source 1..75: mol_type = other DNA
tcaaagaattaaacttcgtaatgaattacgtgttcactcttgagacttggtattcatttttcgtcttgcgacgtt

SEQ ID NO: 700962 - DNA, 75 bp, synthetic construct
  source 1..75: mol_type = other DNA
aatttaaaagtttgatgctcaaagaattaaacttcgtaatgaattacgtgttcactcttgagacttggtattcat

SEQ ID NO: 700963 - DNA, 75 bp, synthetic construct
  source 1..75: mol_type = other DNA
accgtacaacgtctggacccgatttatgtcgatctcacgcagtcggtgcaggatttcttgcgcatgaaagaagag

SEQ ID NO: 700964 - DNA, 75 bp, synthetic construct
  source 1..75: mol_type = other DNA
gctggcgatcgggtgatcgtttccggtttgcaacgcatacatccgggtatcaaagcacgcgcaatttcctccagc

SEQ ID NO: 700965 - DNA, 75 bp, synthetic construct
  source 1..75: mol_type = other DNA
gtgttgttagtgccgcaagaaggagtcacacataacgcccagggtaaagcgacagcgctcattttagataaagat

SEQ ID NO: 700966 - DNA, 75 bp, synthetic construct
  source 1..75: mol_type = other DNA
atacgctaatgtcacctcgcccattactggcgtcagcggaaaatcgtcggtgaccgtcggcgcattagtcaccgc

SEQ ID NO: 700967 - DNA, 75 bp, synthetic construct
  source 1..75: mol_type = other DNA
ttagccgtcaggattacgacaccgcgcgcacccagctgaatgaagcagaagccaatgtcaccgtcgccaaagcgg

SEQ ID NO: 700968 - DNA, 75 bp, synthetic construct
  source 1..75: mol_type = other DNA
taaaagtttgatgctcaaagaattaaacttcgtaatgaattacgtgttcactcttgagacttggtattcattttt

SEQ ID NO: 700969 - DNA, 75 bp, synthetic construct
  source 1..75: mol_type = other DNA
cgcacattgcggtaatggggatggagcgtattgcccccacttttgccgaggttgatgtattgattaccatgctgg

SEQ ID NO: 700970 - DNA, 75 bp, synthetic construct
  source 1..75: mol_type = other DNA
tcggcgcgaatcgacaaaaaatggtcgatgagttaggccactgggaagaatggcgcgatcgtgccagccagatcc

SEQ ID NO: 700971 - DNA, 75 bp, synthetic construct
  source 1..75: mol_type = other DNA
aattgaagatccgatcatgcgcaaagcggtggcaaacgcgcagcagcgtattggggcaaatcggcaaaaaatggt

SEQ ID NO: 700972 - DNA, 75 bp, synthetic construct
  source 1..75: mol_type = other DNA
atgactgaacgcatagaatttgttttgccttacccgccgacggtgaatacctactggcgacgtcgtggcagcaca

SEQ ID NO: 700973 - DNA, 75 bp, synthetic construct
  source 1..75: mol_type = other DNA
gcgccgccgcgacctggacaatatcctgaaggcaccactggatgcactgacacatgcaggactgcttatcgacga

SEQ ID NO: 700974 - DNA, 75 bp, synthetic construct
  source 1..75: mol_type = other DNA
cgatgatccggattacagtttcgatattctggaagctcgctacgccatagaagccagcaccgcgtggcatgcagc

SEQ ID NO: 700975 - DNA, 75 bp, synthetic construct
  source 1..75: mol_type = other DNA
caggcagcgcccctgagacactggatacgcttaaagagctggctgacgctctcggtaatgatccaaactttgcga

SEQ ID NO: 700976 - DNA, 75 bp, synthetic construct
  source 1..75: mol_type = other DNA
atgaacgaatatcagtttgtgctcccatacccgccgtcggtgaatacctactggcgaagacggggaagccaatat

SEQ ID NO: 700977 - DNA, 75 bp, synthetic construct
  source 1..75: mol_type = other DNA
ctttggtgcgggatgggattgtcctacgccagaagaaattcgtactttgatgcagatagcagagctaacaggaag

SEQ ID NO: 700978 - DNA, 75 bp, synthetic construct
  source 1..75: mol_type = other DNA
ctgctggcctggttatcaaggctgttcaggcctactccgaacgagtgaaacctgactgggaggcagaagcagcgg

SEQ ID NO: 700979 - DNA, 75 bp, synthetic construct
  source 1..75: mol_type = other DNA
agacaacccagacgccgtttaccacacaaacgcttaataacatgctctcacagctgggaattaccgttccgacgg

SEQ ID NO: 700980 - DNA, 75 bp, synthetic construct
  source 1..75: mol_type = other DNA
tgccgccaatactgatttagaggggctattgagtatgtttgagcatgacagaacccactattccaagatggtggc

SEQ ID NO: 700981 - DNA, 75 bp, synthetic construct
  source 1..75: mol_type = other DNA
gaagcggctgacttaattgttaaaggtatggaaggcgcaatcaacgcgaagaccgtaacctatgacttcgaacgt

SEQ ID NO: 700982 - DNA, 75 bp, synthetic construct
  source 1..75: mol_type = other DNA
ttcgagcgtctgatggaaggcgctaaactgctgaaatgttcagaatttggtgatgcgatcatcaagaacatgtaa

SEQ ID NO: 700983 - DNA, 75 bp, synthetic construct
  source 1..75: mol_type = other DNA
gtcgtttggcagcgttgatcccgtccgaagcaggggccgacccgttcaaatcatttggatggcaggcactgaaca

SEQ ID NO: 700984 - DNA, 75 bp, synthetic construct
  source 1..75: mol_type = other DNA
atgagagatattcagtatgctcgcctgactctttttagcggtgatacggagggtgctgtaaaactgataaatgac

SEQ ID NO: 700985 - DNA, 75 bp, synthetic construct
  source 1..75: mol_type = other DNA
cagctgcggcaggttcaaaaacagcggctgcgtcgtctgccagtgccgcgtcaacaagtgccgggcaggcctcag

SEQ ID NO: 700986 - DNA, 75 bp, synthetic construct
  source 1..75: mol_type = other DNA
gatctttatcagagcgattgttcagagagcagggggttgataccaaaattttgctgggccattcgaatcaaaaaa

SEQ ID NO: 700987 - DNA, 75 bp, synthetic construct
  source 1..75: mol_type = other DNA
gccattggttcgttgcttttatccgatctcaccgccgtggccggtgaccgctataactatggtgttgaaaatcgt

SEQ ID NO: 700988 - DNA, 75 bp, synthetic construct
  source 1..75: mol_type = other DNA
cagcgagcctgtattgccgccggtagtcctgagcgctttgtgtattttcatccaggttttccagagcattcagta

SEQ ID NO: 700989 - DNA, 75 bp, synthetic construct
  source 1..75: mol_type = other DNA
agacaaggaacttaaggataatgcgcagcgagcctgtattgccgccggtagtcctgagcgctttgtgtattttca

SEQ ID NO: 700990 - DNA, 75 bp, synthetic construct
  source 1..75: mol_type = other DNA
aagcggctgacctgattgttaaaggtatggaaggcgcaatcaatgcgaagaccgtaacctatgacttcgaacgtc

SEQ ID NO: 700991 - DNA, 75 bp, synthetic construct
  source 1..75: mol_type = other DNA
caaccattgataaaaaacagtcggataggggggcgatggttggccccgatccgtcagtattaaaacctgatccgt

SEQ ID NO: 700992 - DNA, 75 bp, synthetic construct
  source 1..75: mol_type = other DNA
ccacatacgcaatatttgcttgagtcggatattgataaatatatccctgtgggtttcccgcttccgtggccgcag

SEQ ID NO: 700993 - DNA, 75 bp, synthetic construct
  source 1..75: mol_type = other DNA
ttcattgggcatgccgccgtggtatgcgcgaactcgatatttcaatcatgccgtttttcgaacatgagtacgaca

SEQ ID NO: 700994 - DNA, 75 bp, synthetic construct
  source 1..75: mol_type = other DNA
gccaggtgaaacgcggcgagctgggtattatgggaaccgaactgaactccgaactggcgaaagcgatgaaagttg

SEQ ID NO: 700995 - DNA, 75 bp, synthetic construct
  source 1..75: mol_type = other DNA
gaagatttagcgtgtgcgcagtggatctgggggcgaatcgtgagtctttacgagcaggccgccagcgatgatggc

SEQ ID NO: 700996 - DNA, 75 bp, synthetic construct
  source 1..75: mol_type = other DNA
gtgggccaatgatgtgcgcacaatgcggatgctggatggaagaagtcacagacaaatttgcgaaatgttcagtcg

SEQ ID NO: 700997 - DNA, 75 bp, synthetic construct
  source 1..75: mol_type = other DNA
gacttcgaacgtctgatggaaggcgctaagctgctgaaatgttcagagtttggtgaggcgatcatcaagaacatg

SEQ ID NO: 700998 - DNA, 75 bp, synthetic construct
  source 1..75: mol_type = other DNA
gacttcgaacgtctgatggaaggcgctaagctgctgaaatgttcagagtttggtgacgcgatcatcaagaagatg

SEQ ID NO: 700999 - DNA, 75 bp, synthetic construct
  source 1..75: mol_type = other DNA
tgattgttaaaggtatggaaggcgcaatcaacgccaagaccgtaacctatgacttcgagcgtctgatggaaggcg

SEQ ID NO: 701000 - DNA, 75 bp, synthetic construct
  source 1..75: mol_type = other DNA
tggggaaattttgattcccgctatgtgaaagatgttcgcctgggtacgcgagttgttcaattgatggcgcgaggt

SEQ ID NO: 701001 - DNA, 75 bp, synthetic construct
  source 1..75: mol_type = other DNA
atgagctggttattcgcttggggcgttcgccaatacagcgttgtgtgaatcatatttctgaaccggataccgaaa

SEQ ID NO: 701002 - DNA, 75 bp, synthetic construct
  source 1..75: mol_type = other DNA
caccacaacggtgatggcaacgcaggattacgttgatgacaaaattgcagagcacgaacagtcacgacgtcaccc

SEQ ID NO: 701003 - DNA, 75 bp, synthetic construct
  source 1..75: mol_type = other DNA
cggtaaggaatggaaaaactggtcatttgatgaccagttttgcagaggggttttgcagaggttttgcagagaaaa

SEQ ID NO: 701004 - DNA, 75 bp, synthetic construct
  source 1..75: mol_type = other DNA
ctgaaggcaccactggatgcactgacacatgcaggactgcttatcgatgacgagcagtttgacgaaatcaatata

SEQ ID NO: 701005 - DNA, 75 bp, synthetic construct
  source 1..75: mol_type = other DNA
caacgctcagcgaagacccggacctcgcctcacaagcagacgttcgttttcatctggcgattgccgaggcctcac

SEQ ID NO: 701006 - DNA, 75 bp, synthetic construct
  source 1..75: mol_type = other DNA
gatgatggcgcatcttagttttgtccacaccaccataaaacgattcgatgaagatcaggcacgccgcgcacgcat

SEQ ID NO: 701007 - DNA, 75 bp, synthetic construct
  source 1..75: mol_type = other DNA
atctcggaggagggaaagcgttatcgccgggctgtggcgcttattgtttgccagcagcggctgaaattaagcctg

SEQ ID NO: 701008 - DNA, 75 bp, synthetic construct
  source 1..75: mol_type = other DNA
cgcatgccggactacttatagacgacgagcagtttgatgaaatcaatattgtgcgcggtcagctcgttcctggtg

SEQ ID NO: 701009 - DNA, 75 bp, synthetic construct
  source 1..75: mol_type = other DNA
gtacgcggtaagctcgttcctggtggtcggctgggcgtgaagatttgcgaaattagaggtgatagttatggggcg

SEQ ID NO: 701010 - DNA, 75 bp, synthetic construct
  source 1..75: mol_type = other DNA
tatcgcttccgcgaccgtttaccagaaaaattgcgttatctggctgatgcgccacagcaagatccagaaggtaat

SEQ ID NO: 701011 - DNA, 75 bp, synthetic construct
  source 1..75: mol_type = other DNA
cgctttagccgtaaaaccaaacagcaatatgtctcttcggaaaaagacggaaaggcgactggctggtcagcattt

SEQ ID NO: 701012 - DNA, 75 bp, synthetic construct
  source 1..75: mol_type = other DNA
gctgaaaccaacgcgctgcgcgccaaacgtcgttgcccgaaatgcggtacagctatggacagctatctcatcgat

SEQ ID NO: 701013 - DNA, 75 bp, synthetic construct
  source 1..75: mol_type = other DNA
cgggagtgttaatggacgatgagcagtttgatgaaatcaatattgtacgtggccagccagtatcaggtggacggc

SEQ ID NO: 701014 - DNA, 75 bp, synthetic construct
  source 1..75: mol_type = other DNA
cggggttgcttatcgacgacgagcagtttgatgaaatcaatattgtgcgcggactgcctgttcctggtggtcggt

SEQ ID NO: 701015 - DNA, 75 bp, synthetic construct
  source 1..75: mol_type = other DNA
gatgataaaggcaataatttctttagccagtttgagcagcaacaccgctgcgccagttgccctgcgggacattaa

SEQ ID NO: 701016 - DNA, 75 bp, synthetic construct
  source 1..75: mol_type = other DNA
gtatcaaaagtcggtgagcgttatcgccgtgatgtggcgcttattgttcgccagcagcaactgaaattaaacctg

SEQ ID NO: 701017 - DNA, 75 bp, synthetic construct
  source 1..75: mol_type = other DNA
cacggaatcgcaaacgcaccgtgaaatggcatccgggctatctatgccggttggttttaaaaacggcaccgacgg

SEQ ID NO: 701018 - DNA, 75 bp, synthetic construct
  source 1..75: mol_type = other DNA
tatcgccgtcagcctgcggtggcagaatccgtggttgctcaaatcaaagatggcaatcgctcaattattggtctg

SEQ ID NO: 701019 - DNA, 75 bp, synthetic construct
  source 1..75: mol_type = other DNA
gttgcaggaccagcgttacgaaactggagagataaaactcaatacgctcaagcagaaaaacgccccacttaacgt

SEQ ID NO: 701020 - DNA, 75 bp, synthetic construct
  source 1..75: mol_type = other DNA
tttccatttttctgaataattacagaaaaattcaacaggaaagatatgagaacggagagatcaaactcagcacgc

SEQ ID NO: 701021 - DNA, 75 bp, synthetic construct
  source 1..75: mol_type = other DNA
gctcactctgcaggagaaaattattcgtgataccggtggttcatcaaccgtttctgtttttctgaatagttaccg

SEQ ID NO: 701022 - DNA, 75 bp, synthetic construct
  source 1..75: mol_type = other DNA
tgggaaatgaccgatgccttgctgcgtgagattcatcaggatctgaacgggcagctgacggcacgcgtggcttaa

SEQ ID NO: 701023 - DNA, 75 bp, synthetic construct
  source 1..75: mol_type = other DNA
cgcgcttgataataaaataaaaaaggagtgttttagttcacctcaagatgataaccttgttctggggttggtatc

SEQ ID NO: 701024 - DNA, 75 bp, synthetic construct
  source 1..75: mol_type = other DNA
taataataaaataaaacagaagtgttttaattcacgtcaagatgataaccttgttctggggttggtatcgaaatg

SEQ ID NO: 701025 - DNA, 75 bp, synthetic construct
  source 1..75: mol_type = other DNA
gcaatttaataaagcaggatatggttttcgatttcattgattttaacattcagcaatgcatccacaatgaagatt

SEQ ID NO: 701026 - DNA, 75 bp, synthetic construct
  source 1..75: mol_type = other DNA
caccctggatgatgtagtgtcatcctgtcgcgattgcgttcttagtccgtggttattgcaccaccatcatgctaa

SEQ ID NO: 701027 - DNA, 75 bp, synthetic construct
  source 1..75: mol_type = other DNA
gatctttatcagagcgattgttcagagagcagggaattgatacccaaattttgggtgatgctgccaacttactga

SEQ ID NO: 701028 - DNA, 75 bp, synthetic construct
  source 1..75: mol_type = other DNA
tggttcagcttagtagtgcaaccaatagcgcatctgaaacgcaggctgcaacgccgaaagcagtaaaggccgcgt

SEQ ID NO: 701029 - DNA, 75 bp, synthetic construct
  source 1..75: mol_type = other DNA
ccagacatgaaaatgtcctacttccacaccttgcttgccgaggtttgcaccggtgtggctcctgaagttaacgct

SEQ ID NO: 701030 - DNA, 75 bp, synthetic construct
  source 1..75: mol_type = other DNA
tgctgctggatacgctgatcgcacagttgatcgcccttctccagcgcgataaatcgcgcaagtttatcgcccagc

SEQ ID NO: 701031 - DNA, 75 bp, synthetic construct
  source 1..75: mol_type = other DNA
tgaagcttttaaccgctatctcagtgaattgtggggggatttgcgggaatggctgaaagcggatatcaacagtga

SEQ ID NO: 701032 - DNA, 75 bp, synthetic construct
  source 1..75: mol_type = other DNA
cagccaggatgaaaggcactatcatcatagatgagcctggctttatacattttcttgaaacgggtgagatcccag

SEQ ID NO: 701033 - DNA, 75 bp, synthetic construct
  source 1..75: mol_type = other DNA
atgacaataagttttagtgctgttccgtcgaatacgctggtgccgttgttttacgccgagatggacaattctgcg

SEQ ID NO: 701034 - DNA, 75 bp, synthetic construct
  source 1..75: mol_type = other DNA
ggacgcgaggcacacgcgctgcgtgactatctgccggatgcctttgggccgaaagatctggagattaaaacgctg

SEQ ID NO: 701035 - DNA, 75 bp, synthetic construct
  source 1..75: mol_type = other DNA
taaagacggtcgaattttcagcggcagctacgctgaaacgccgcattcaacccgactctgccaccgttgcaggga

SEQ ID NO: 701036 - DNA, 75 bp, synthetic construct
  source 1..75: mol_type = other DNA
accagatgtccgcagtgcttaacgagcttaaaatggtgatggatcaagagcaacaacatctctctatggggcaga

SEQ ID NO: 701037 - DNA, 75 bp, synthetic construct
  source 1..75: mol_type = other DNA
aaatgttgaaaccacatcaggaacccacgctgtacggggcaaacggtcaaacctcaacgtcccaccgcggcggta

SEQ ID NO: 701038 - DNA, 75 bp, synthetic construct
  source 1..75: mol_type = other DNA
atgacgcgtcttgcagagatcctcgatcagatgttcgctgtgcttaatgatctcaaaacggtaatggatcaagag

SEQ ID NO: 701039 - DNA, 75 bp, synthetic construct
  source 1..75: mol_type = other DNA
cgcgcaccgcgtcgcgcctgagttttccgcattcctgacgcgccacatcagcgatacggtaaaaagctgggatgc

SEQ ID NO: 701040 - DNA, 75 bp, synthetic construct
  source 1..75: mol_type = other DNA
atgaccaaaaacgatcgccatcaggtgctgctggatacgctgatcgcacagttgatcgccctgcttcagcgcgat

SEQ ID NO: 701041 - DNA, 75 bp, synthetic construct
  source 1..75: mol_type = other DNA
accagatgtccgcagtgcttaacgatcttaaaacggtgatggagcaagagctgcaacatctctctatggggcaga

SEQ ID NO: 701042 - DNA, 75 bp, synthetic construct
  source 1..75: mol_type = other DNA
gacgcaaaaatcctccatcgccagccgaaatatctcgggccatcggtcatgattgggccgtttagtgagcatggc

SEQ ID NO: 701043 - DNA, 75 bp, synthetic construct
  source 1..75: mol_type = other DNA
agctggcaaatgatggtatcttcactgccgcaacccggaagtctggtgaaaaatcagcaggcggttgtggctgtt

SEQ ID NO: 701044 - DNA, 75 bp, synthetic construct
  source 1..75: mol_type = other DNA
accccggcggttatcaaaggggagctgctggcgacttaccgacagatggagcgcgccgggatcgtagaaaattac

SEQ ID NO: 701045 - DNA, 75 bp, synthetic construct
  source 1..75: mol_type = other DNA
tcactggtgctgatgccgtccgctgattacgcaaagcagatttgtggtcccggtagtcagcttgctcgcatggtt

SEQ ID NO: 701046 - DNA, 75 bp, synthetic construct
  source 1..75: mol_type = other DNA
ctttttaagcagtacctggttgtggagcgtgatgccagcgatccgaaccgcctgaacacgctgttcccgcctgac

SEQ ID NO: 701047 - DNA, 75 bp, synthetic construct
  source 1..75: mol_type = other DNA
atcaccagtaagtacgggcgtcacaagcttgccagtgacggtacccgctttggtcccggtcaggcgattgtcacc

SEQ ID NO: 701048 - DNA, 75 bp, synthetic construct
  source 1..75: mol_type = other DNA
tgctggggcgcgacaaacagcacgccgaacgctgcgcgctgattgacgcgctgatgcagcaaacccgccattttc

SEQ ID NO: 701049 - DNA, 75 bp, synthetic construct
  source 1..75: mol_type = other DNA
aaagcctggtgcgctgctcatagtagattttgggggcacgcccgttgacgggtctttggtgctggggtctgaggt

SEQ ID NO: 701050 - DNA, 75 bp, synthetic construct
  source 1..75: mol_type = other DNA
ttctccgtatttgtttttctcgccggactcttaaaattggctgtttattgttgcttatagcaggagcgaccattt

SEQ ID NO: 701051 - DNA, 75 bp, synthetic construct
  source 1..75: mol_type = other DNA
gcagctgacctggagcgatgtcaacgcagttccggcgcgtaacgtgggcttattgctgggggccaggccgggtaa

SEQ ID NO: 701052 - DNA, 75 bp, synthetic construct
  source 1..75: mol_type = other DNA
tatgtcgcggcaaatcgagttaaatatcggcaaagatctccagtttatccgtgtcaacggtacgctggttggcgg

SEQ ID NO: 701053 - DNA, 75 bp, synthetic construct
  source 1..75: mol_type = other DNA
acgctggtcggcggttgtattggtctgatgttgtatttgttgtctcagctcccgagcttattccccttcggcaat

SEQ ID NO: 701054 - DNA, 75 bp, synthetic construct
  source 1..75: mol_type = other DNA
acagaccctgctgtctcatggcgtggcaacggcgtatgtcgaaagcggggtgctgcgcattcagcgtgatgtcac

SEQ ID NO: 701055 - DNA, 75 bp, synthetic construct
  source 1..75: mol_type = other DNA
gctgtacgacaaagtgttcgtcaagccgttcctgggtattgcctggttgctgaaacgcgatccgctgaactcaat

SEQ ID NO: 701056 - DNA, 75 bp, synthetic construct
  source 1..75: mol_type = other DNA
tgtcttcgagcaatattacggcgatgaagtcgccctttttggtacggataatttggagaaagatccctacgcggt

SEQ ID NO: 701057 - DNA, 75 bp, synthetic construct
  source 1..75: mol_type = other DNA
acgtcggaacgaaggagtttgatatttcaaaggtttccgaggtagattctgttgatgatttactcattgataatg

SEQ ID NO: 701058 - DNA, 75 bp, synthetic construct
  source 1..75: mol_type = other DNA
gaggcgtcaatggatcttggggccaatggctggcaaaccttccgctacgtagtgttgccgaatctcagttcggcg

SEQ ID NO: 701059 - DNA, 75 bp, synthetic construct
  source 1..75: mol_type = other DNA
tggcgctggaagatgaaaaaggcaatcggcagagctccggtgtggtggaaatcaccgttcaacaggaccgtaaaa

SEQ ID NO: 701060 - DNA, 75 bp, synthetic construct
  source 1..75: mol_type = other DNA
ctttggcgacaacactgaccgtaacggtaatgtcttgccgcaggataatctcagcccgcagctgtttgatgccaa

SEQ ID NO: 701061 - DNA, 75 bp, synthetic construct
  source 1..75: mol_type = other DNA
taaaatagagcttatcgtcaataacattgccgatgcgcctgccgagaataaccacagccatgaagccagcgctca

SEQ ID NO: 701062 - DNA, 75 bp, synthetic construct
  source 1..75: mol_type = other DNA
tgtgaagccaggggggcatgggcaccatcagttgctgcggcggctgaaaaatggaaccggagagcaggagatgaa

SEQ ID NO: 701063 - DNA, 75 bp, synthetic construct
  source 1..75: mol_type = other DNA
atcacaactggatgagttgcaaatctgggatgcgctgaatgacgtgctgaaatggtcgcgcctctacggcggcgc

SEQ ID NO: 701064 - DNA, 75 bp, synthetic construct
  source 1..75: mol_type = other DNA
tcaccatggaagtccacgacgttccggcgattgttgccgccgtgcgcaatgtggtgccagatgccatcattatgg

SEQ ID NO: 701065 - DNA, 75 bp, synthetic construct
  source 1..75: mol_type = other DNA
cagctaccgttttgtttatcctaccaattttttcgtttgcaaacgacatatgttttaagaatttaataaatgagg

SEQ ID NO: 701066 - DNA, 75 bp, synthetic construct
  source 1..75: mol_type = other DNA
atgactgctttttttcagttcctgagtgcatttttagatgcgcctgttattagccagattctggcgatcatcctc

SEQ ID NO: 701067 - DNA, 75 bp, synthetic construct
  source 1..75: mol_type = other DNA
cttgatgcggccttcactttctcatgccaggccgagatgattatttttgagttatcactgcgttcgttagcttga

SEQ ID NO: 701068 - DNA, 75 bp, synthetic construct
  source 1..75: mol_type = other DNA
gaatctcaggccagaagctatctgcaaagtcaaatcacctcaaccgcacaatcttatattgaagacactctctct

SEQ ID NO: 701069 - DNA, 75 bp, synthetic construct
  source 1..75: mol_type = other DNA
gtaaccattctgcgtggcctgccagaaattctggtggtgctgtttatctattttggctcctcgcagctgctgctg

SEQ ID NO: 701070 - DNA, 75 bp, synthetic construct
  source 1..75: mol_type = other DNA
ggtatgcagtcacatgttgcgtcgcaggagaaagcgactgacccggaaatcgccgcactttctgaccgaatttcc

SEQ ID NO: 701071 - DNA, 75 bp, synthetic construct
  source 1..75: mol_type = other DNA
cggtatctgtaaatggtgttgtgtatgaaggaaaggggaaaattatttccatattaaataatgaagtcattattg

SEQ ID NO: 701072 - DNA, 75 bp, synthetic construct
  source 1..75: mol_type = other DNA
ttttgccattgattggcttcgtcctgctggcgttctcccgtgggcgctggtctgaaaacgtctcggcgatcgtgg

SEQ ID NO: 701073 - DNA, 75 bp, synthetic construct
  source 1..75: mol_type = other DNA
aacagaacatcttcaagatgggcggtctgcgtaaatctattccgctggtttatctctgcttcctggtgggcggcg

SEQ ID NO: 701074 - DNA, 75 bp, synthetic construct
  source 1..75: mol_type = other DNA
gacttcttcgctaacggcgagcaggcatacagccagccgctgtggacgtggatgtcggtaggcgactttaacatc

SEQ ID NO: 701075 - DNA, 75 bp, synthetic construct
  source 1..75: mol_type = other DNA
taaaaattgcagaactgccaacgccggaacatggacaggtcgaatatggtgatacggaggttaacgggctgcgtg

SEQ ID NO: 701076 - DNA, 75 bp, synthetic construct
  source 1..75: mol_type = other DNA
gctttacgacgcgcaggacaaacgagtgacgttaaccaacaagccctgctcgaccgataacccctgcgtttttat

SEQ ID NO: 701077 - DNA, 75 bp, synthetic construct
  source 1..75: mol_type = other DNA
cccgaagaagccgtcggtctggaaaaatgtaagtggaccattaacgcactcattaatcatcattacaaaatcgtt

SEQ ID NO: 701078 - DNA, 75 bp, synthetic construct
  source 1..75: mol_type = other DNA
tatccagcactgccactatggcgcttaccgtggataacaccatggtaatggccacagtggattacgtggatgaca

SEQ ID NO: 701079 - DNA, 75 bp, synthetic construct
  source 1..75: mol_type = other DNA
agcgttggaaaattatggcgccgccactgtcgcctggctcgcgggtcctgatagccctcattcgggtctatcaac

SEQ ID NO: 701080 - DNA, 75 bp, synthetic construct
  source 1..75: mol_type = other DNA
ccggaagggggtaaggcgctggtggcggtgaatctcgccagtgaagagccgtaccataatgcgctcaatgaaaaa

SEQ ID NO: 701081 - DNA, 75 bp, synthetic construct
  source 1..75: mol_type = other DNA
tttgaccgtaacggcaggtccgccggtatctggctgaacccgctgaccacggatgacggaaacgggctgcgggga

SEQ ID NO: 701082 - DNA, 75 bp, synthetic construct
  source 1..75: mol_type = other DNA
agcagcatgtgcaggtgtacaccgataaccgtcagggctggacggatgccattaacaatgccgtacagaaaggaa

SEQ ID NO: 701083 - DNA, 75 bp, synthetic construct
  source 1..75: mol_type = other DNA
gagcggctgttcagtacggcacgggaactgcgggacgtggcggcaggccgtgccgttctccgccaggcgggactt

SEQ ID NO: 701084 - DNA, 75 bp, synthetic construct
  source 1..75: mol_type = other DNA
cactgccggcgtttgaccgtaacggcaggtcagcaggtatctggctgaacccactgaccacggatgacggaaacg

SEQ ID NO: 701085 - DNA, 75 bp, synthetic construct
  source 1..75: mol_type = other DNA
catgatgcacgggaaaaggcaggtgagctggggaaagagcaggtcatggtgcctgtcctgaacacagcgaatata

SEQ ID NO: 701086 - DNA, 75 bp, synthetic construct
  source 1..75: mol_type = other DNA
ttgcacccgggcgcaaatatccgcagccgtatgtggcactgccggcttttgaccgtaacggcaagtcagctggta

SEQ ID NO: 701087 - DNA, 75 bp, synthetic construct
  source 1..75: mol_type = other DNA
gttgggcaaaaaattgacaatataagtctggatgaattcgcaaaggcattaaaaagtgttttggcgagaatatga

SEQ ID NO: 701088 - DNA, 75 bp, synthetic construct
  source 1..75: mol_type = other DNA
tcagcagcaatcataaaagatgcttatatcgcaataactcctgacacctcaatattacatatggcaagtgcctat

SEQ ID NO: 701089 - DNA, 75 bp, synthetic construct
  source 1..75: mol_type = other DNA
gtcgttgggcaaaaaattgatcatataagtttggatgaattcggaaaggcgctaaaaagtgctttggagagagta

SEQ ID NO: 701090 - DNA, 75 bp, synthetic construct
  source 1..75: mol_type = other DNA
gcgccattgagctttatttcaaatatggtaagaagctggctcccgtcgttcgcgaactgggctacccttcgaaaa

SEQ ID NO: 701091 - DNA, 75 bp, synthetic construct
  source 1..75: mol_type = other DNA
tatgacatgggcatttatgatgcgtgaggcgggttttccagcagtcaggccaatatatgaattgaatcgccacgg

SEQ ID NO: 701092 - DNA, 75 bp, synthetic construct
  source 1..75: mol_type = other DNA
gtattgcatttagttactacgattataaagcttataattttaatattgaaaaaacagactttgttgtcatacata

SEQ ID NO: 701093 - DNA, 75 bp, synthetic construct
  source 1..75: mol_type = other DNA
cagttcgtggccctgcagggcagccgtaacggcaagagcctgctggcggataacatgcaggagggcgtccggatt

SEQ ID NO: 701094 - DNA, 75 bp, synthetic construct
  source 1..75: mol_type = other DNA
gcgggccggtgagacattgctggaaaccgctatcagtctgcagaaagccgggcttcacacgccggcacagcaggc

SEQ ID NO: 701095 - DNA, 75 bp, synthetic construct
  source 1..75: mol_type = other DNA
ggaacagcccacgatgtgtttgaaccgaaaccggaccgggaggtcatgaatgcagagcggctgttcagtacggcg

SEQ ID NO: 701096 - DNA, 75 bp, synthetic construct
  source 1..75: mol_type = other DNA
tgcccgtgataatcctgacagcggtgtggtggtgagaattgccggtgaaggtcgtccgtggaatcccggtgccat

SEQ ID NO: 701097 - DNA, 75 bp, synthetic construct
  source 1..75: mol_type = other DNA
cctttggaacagattgtgcaccggcaacctgttacccgcactggagtggtgaatgaaaatggcgtggtgtattcc

SEQ ID NO: 701098 - DNA, 75 bp, synthetic construct
  source 1..75: mol_type = other DNA
gctgaataaggccagcggaactctggccatgattgttcatgcgcctgtacagcaaaagctgaaaacagcggaagg

SEQ ID NO: 701099 - DNA, 75 bp, synthetic construct
  source 1..75: mol_type = other DNA
aaacaggcacccagtattttgtcactaaaggtactggataccttgccggtctgcgttcagtgttggccgcaaacc

SEQ ID NO: 701100 - DNA, 75 bp, synthetic construct
  source 1..75: mol_type = other DNA
cacagcgtccccctgagaagacaagatggcggaggcataaactttgactggctggatggttcatcgtccggttct

SEQ ID NO: 701101 - DNA, 75 bp, synthetic construct
  source 1..75: mol_type = other DNA
atcgctgctgaccgtcgctcgcagatgaacctgaagcaggatgaacggctgtccggtgaactgataaccggacgt

SEQ ID NO: 701102 - DNA, 75 bp, synthetic construct
  source 1..75: mol_type = other DNA
gacggtcggcatactgccgccggaaaatggtgtgattgaacgggcacgcgccggtatcgatgaggccatcagccg

SEQ ID NO: 701103 - DNA, 75 bp, synthetic construct
  source 1..75: mol_type = other DNA
ggctttgagtcagcctacgtggccctgtcgcgtatgaagcagcatgtgcaggtgtacaccgataaccgtcagggc

SEQ ID NO: 701104 - DNA, 75 bp, synthetic construct
  source 1..75: mol_type = other DNA
gatggccatgttaggtggcgataagcgcctgattgatgcacacaaccaggccgtggactttgctgtccgtcaggt

SEQ ID NO: 701105 - DNA, 75 bp, synthetic construct
  source 1..75: mol_type = other DNA
gatggccatgctcgggggggacaaacgtcttattgaagcacataaccaggccgtggattttgccgtccgtcaggg

SEQ ID NO: 701106 - DNA, 75 bp, synthetic construct
  source 1..75: mol_type = other DNA
aggcgatgcgtaaaaagaacctgaaaacgatgatatttatcagtcagttgaaagcaaaaacgaattttcaggttg

SEQ ID NO: 701107 - DNA, 75 bp, synthetic construct
  source 1..75: mol_type = other DNA
tggcattcattttgtataacaaaactgatttaaaaagcgtgacttttgaagccatttggaaacaagagagcatga

SEQ ID NO: 701108 - DNA, 75 bp, synthetic construct
  source 1..75: mol_type = other DNA
gtttggggaaaaccatatcaccattatttcgcaagaatttcataaccaacgcgccatctggctggcaaaacagta

SEQ ID NO: 701109 - DNA, 75 bp, synthetic construct
  source 1..75: mol_type = other DNA
ttcgtcgcgtttgtttttcccgccggattcttaagattgcctgtttactgttgcttgtagcaggcgcgacggttt

SEQ ID NO: 701110 - DNA, 75 bp, synthetic construct
  source 1..75: mol_type = other DNA
gcgtattaaaaacgataacgtgaattctgcttttttccagaccagtgtccgtgtctggcctcagtatggccgtgt

SEQ ID NO: 701111 - DNA, 75 bp, synthetic construct
  source 1..75: mol_type = other DNA
ttgctgtggccagtgttgatgtaaatggcaatatcactgatttacggcctaaagggtcgctaaatgagcaggtgg

SEQ ID NO: 701112 - DNA, 75 bp, synthetic construct
  source 1..75: mol_type = other DNA
actatgcacgccagatttgtggtgcgggaagtcagctggcgcgtatggtcgaggcttatcgccagaccgacccgt

SEQ ID NO: 701113 - DNA, 75 bp, synthetic construct
  source 1..75: mol_type = other DNA
catgcaggcacatgatgtctgcgtaacaacgatgacaacgttactggctccctggaatatccgtcctgccgtttt

SEQ ID NO: 701114 - DNA, 75 bp, synthetic construct
  source 1..75: mol_type = other DNA
agcgtgatgccagcgatccgaaccgcctgaacacgctgttcccgcctgactatgttaaccagttccgtcttcagt

SEQ ID NO: 701115 - DNA, 75 bp, synthetic construct
  source 1..75: mol_type = other DNA
aggcagaaaaaagagattaataatgccattatttatccggtactttcgttatatccggtcagaatggatatggaa

SEQ ID NO: 701116 - DNA, 75 bp, synthetic construct
  source 1..75: mol_type = other DNA
acgtgggtttattgttgggggcgaggccgggtaatcgctactttacccgacgcattgataccgccgcagagttgt

SEQ ID NO: 701117 - DNA, 75 bp, synthetic construct
  source 1..75: mol_type = other DNA
aaagcgttgtcgaaattagaaaacttgatattagtaaagagccctggccatttaattatgtgacagaaacatgca

SEQ ID NO: 701118 - DNA, 75 bp, synthetic construct
  source 1..75: mol_type = other DNA
ggcaataatcataattacgatggaaaaagcgttgtcgaaattagaaaacttgatattagtaaagaggctttgttg

SEQ ID NO: 701119 - DNA, 75 bp, synthetic construct
  source 1..75: mol_type = other DNA
cgtcatctcatctggtcagtgaatgaaaccatcagctacctgtcaggcttctttgaactgcaaccgggcgatcta

SEQ ID NO: 701120 - DNA, 75 bp, synthetic construct
  source 1..75: mol_type = other DNA
gtacgtattattatcgcgctcggcgtggcagggctcattgttactcaggggaccgacctttctgccgggcgtcag

SEQ ID NO: 701121 - DNA, 75 bp, synthetic construct
  source 1..75: mol_type = other DNA
ctcttttttgcagcagatggcgctggcgtttattgccctgcgcctgaatgtctcaccggaaatcgtcgatgcttc

SEQ ID NO: 701122 - DNA, 75 bp, synthetic construct
  source 1..75: mol_type = other DNA
aagttattctggctgaagaagcgaagcgtattaaaaacgataacgtgaactcagcctttttccagaccagtgttc

SEQ ID NO: 701123 - DNA, 75 bp, synthetic construct
  source 1..75: mol_type = other DNA
atgtttttagcatcattgttgagacgtattgcatttagttactacgattataaagcttataatttcaatattgaa

SEQ ID NO: 701124 - DNA, 75 bp, synthetic construct
  source 1..75: mol_type = other DNA
ggaagcggcgaaagtttctggcgttaacgtcggcctgaatctgttgatgatttatgcgctgtctggcgtgttcta

SEQ ID NO: 701125 - DNA, 75 bp, synthetic construct
  source 1..75: mol_type = other DNA
attgcgctgggaagcttccgtctctcttacatcaccttctacgcgctgattgctgtcgtgtttgtctgggtgtta

SEQ ID NO: 701126 - DNA, 75 bp, synthetic construct
  source 1..75: mol_type = other DNA
ccaatggcgtttaatgccccctttgccgtgtcacagaacagtgccgatgcctcttatttacagcagatggcactg

SEQ ID NO: 701127 - DNA, 75 bp, synthetic construct
  source 1..75: mol_type = other DNA
accgcccgcgaaattgagcttagcagcaatggtggcgtagccgctgatggccagttacgtggctctgcgtggggc

SEQ ID NO: 701128 - DNA, 75 bp, synthetic construct
  source 1..75: mol_type = other DNA
taaaaagggcagcgatatcccgctggaaaacgcccatgaatatgtctggggttatgccacggggcttgatatgac

SEQ ID NO: 701129 - DNA, 75 bp, synthetic construct
  source 1..75: mol_type = other DNA
acgctggacacgctgaaagaattagccgcagccattaacaatgatccgaaattcagtaccaccattaacaatgcg

SEQ ID NO: 701130 - DNA, 75 bp, synthetic construct
  source 1..75: mol_type = other DNA
ttctcagcctctctgttaacgtcattcagggggtgaataactaccgtcttcagaatgagcaacgcactgccgtga

SEQ ID NO: 701131 - DNA, 75 bp, synthetic construct
  source 1..75: mol_type = other DNA
ggaaattcgtggtgtgcttaaaacctggattggtgattcaaaacctttcactgatattaaacattacatccttat

SEQ ID NO: 701132 - DNA, 75 bp, synthetic construct
  source 1..75: mol_type = other DNA
aaatcatcaccccctgggcgacgaaggtagctgagaacttcaccgcagacatagcgcgccagaatgaaaagcagt

SEQ ID NO: 701133 - DNA, 75 bp, synthetic construct
  source 1..75: mol_type = other DNA
tctatatactaatcggtgggctgatatacgcattaagtcgatatattttgcgagctaatgcagaaatggcctggt

SEQ ID NO: 701134 - DNA, 75 bp, synthetic construct
  source 1..75: mol_type = other DNA
gcagcggtacagggactgggtggcggtaatctgagtgcagtcctggcaggtggtgcagcaccgtatattgctgaa

SEQ ID NO: 701135 - DNA, 75 bp, synthetic construct
  source 1..75: mol_type = other DNA
tgtcgaatggggccgaccccctacgcttgacggcatgaccggtcatgctggcgagctcccgaactgtcgctgtta

SEQ ID NO: 701136 - DNA, 75 bp, synthetic construct
  source 1..75: mol_type = other DNA
tggaacgctacagtgaaatcatcaccccctgggcgacaaaggtcgcggaaaactttactgcggacctaacccggc

SEQ ID NO: 701137 - DNA, 75 bp, synthetic construct
  source 1..75: mol_type = other DNA
cggcatgacaggtcacgctggcgagttcccgaattgtcgctgttataaagaaattgtttttcccacctcccattc

SEQ ID NO: 701138 - DNA, 75 bp, synthetic construct
  source 1..75: mol_type = other DNA
ttggcggtttttgctattttgtttgttgtctcatatattaaacaaataagatacataatatatagagtaaatgct

SEQ ID NO: 701139 - DNA, 75 bp, synthetic construct
  source 1..75: mol_type = other DNA
ctactgatagactcaggttggatgtcagaatcgctatagatttcttgctatatatgtatttttcaatgaaaatga

SEQ ID NO: 701140 - DNA, 75 bp, synthetic construct
  source 1..75: mol_type = other DNA
cacttggtttaatgtttgctgtttgtatctactcgttcgtaaaagcaatgacttatgaatttttaggttggcaat

SEQ ID NO: 701141 - DNA, 75 bp, synthetic construct
  source 1..75: mol_type = other DNA
agcttgaggcagcaggaaaaccgtttacggaacaggatgtggcacagcgggcctgcaataacggtatggcggcct

SEQ ID NO: 701142 - DNA, 75 bp, synthetic construct
  source 1..75: mol_type = other DNA
ctcggtgtcgatgaagttattgccaaagttttcgatgtcaatgagccactgagtcacatcaatcaggcaaaactc

SEQ ID NO: 701143 - DNA, 75 bp, synthetic construct
  source 1..75: mol_type = other DNA
atactgcccgactgaaaaatctcggcgttgaggaagttgtcgccaaagttttcgatgtcaatgtgccactgagtc

SEQ ID NO: 701144 - DNA, 75 bp, synthetic construct
  source 1..75: mol_type = other DNA
cggtattgatgttccgccagttatggggtcatgcagtaccgatctcaaagtagggattggcgggctggaagggcg

SEQ ID NO: 701145 - DNA, 75 bp, synthetic construct
  source 1..75: mol_type = other DNA
atgatcgaagcctacaaaatacttattaataacgcgttgcagcgttaccacttcgaacttgcaaaccggggcgta

SEQ ID NO: 701146 - DNA, 75 bp, synthetic construct
  source 1..75: mol_type = other DNA
tgctgaactgacaccggggcctgccaacgttgatgcggtggaaaaactcgcgcgggcgatgtacccgtcaacggc

SEQ ID NO: 701147 - DNA, 75 bp, synthetic construct
  source 1..75: mol_type = other DNA
agaaattaaaggaaaaaggtgccggtcaactaatgccattgctgttatctggcgttggaattataatattctttg

SEQ ID NO: 701148 - DNA, 75 bp, synthetic construct
  source 1..75: mol_type = other DNA
aacttagggtagttgataccgggatcactgaaggtgaattcgagtatctatctgttgatcatccagctctgggac

SEQ ID NO: 701149 - DNA, 75 bp, synthetic construct
  source 1..75: mol_type = other DNA
cctgcatttgaaaatggtcatgctggaaaaagccagtgagcgcttttcggtatcgccgacttacttcaactcaac

SEQ ID NO: 701150 - DNA, 75 bp, synthetic construct
  source 1..75: mol_type = other DNA
aacagtaaggttcgccgaacaaaaaccgagctatggttcaaagagagcttactcaatcagcatcacatcccacta

SEQ ID NO: 701151 - DNA, 75 bp, synthetic construct
  source 1..75: mol_type = other DNA
cagggcgcggatgatagcccgcactgagataggccgcgcaactaccgcattaactcaggctcgggcgctgtcagt

SEQ ID NO: 701152 - DNA, 75 bp, synthetic construct
  source 1..75: mol_type = other DNA
ggttgcgaagcgcggctggatgataacgccgtctggaccggctggcgcttgccgatgaaagcaggccagcgttta

SEQ ID NO: 701153 - DNA, 75 bp, synthetic construct
  source 1..75: mol_type = other DNA
gccttgccggggccggaatatcatgagttcgatcgcgcctcgcaggatgcattctggcgttcgccctggcagctt

SEQ ID NO: 701154 - DNA, 75 bp, synthetic construct
  source 1..75: mol_type = other DNA
agtcgcccaggcatggcagacgctgaaacacgacgctgtacttattgaagcgatggaaagtcgttcgctacgtta

SEQ ID NO: 701155 - DNA, 75 bp, synthetic construct
  source 1..75: mol_type = other DNA
tgttgctttattcaaaaatatacagcacaaataatggtaaatggttatatgaatttgtataaagagattttaaat

SEQ ID NO: 701156 - DNA, 75 bp, synthetic construct
  source 1..75: mol_type = other DNA
cctcaggctgccagaatctggacggattattacaatgatgtggaatcgaagctggggggattggggcctttaaga

SEQ ID NO: 701157 - DNA, 75 bp, synthetic construct
  source 1..75: mol_type = other DNA
cagccgggggcacagtcttccgaacaaaccaccttaccctccggattacaaatcggtacgggggtacgcccggtc

SEQ ID NO: 701158 - DNA, 75 bp, synthetic construct
  source 1..75: mol_type = other DNA
tgcattatgtcgtggttgagcgggatgaaaagtacatggcgaattttgacgagatggtgccggagttcatcgaaa

SEQ ID NO: 701159 - DNA, 75 bp, synthetic construct
  source 1..75: mol_type = other DNA
atgacacctgacattatcctgcaacgcaccggaatcgacgtgagagccgtcgaacagggagatgatgagtggcac

SEQ ID NO: 701160 - DNA, 75 bp, synthetic construct
  source 1..75: mol_type = other DNA
cttaggtagcgtgggcatgacgcaggcgcggcaggttatcagtcagcttgaacatgaaagcagtcagcctgcgcc

SEQ ID NO: 701161 - DNA, 75 bp, synthetic construct
  source 1..75: mol_type = other DNA
tgtggctttgaagacagtaactatttttcggtggtgtttacccgggaaaccgggatgacgcccagccagtggcgt

SEQ ID NO: 701162 - DNA, 75 bp, synthetic construct
  source 1..75: mol_type = other DNA
ccagcatagccgcctgttaatcagtgatatttcgaatgtggctttgaagatagtaactatttttcggtggtgttt

SEQ ID NO: 701163 - DNA, 75 bp, synthetic construct
  source 1..75: mol_type = other DNA
tcacctctcgcgacttcatgaaatttcggcttggcggtttcgaagccatcaagtctgcgtacatggcccaggtgc

SEQ ID NO: 701164 - DNA, 75 bp, synthetic construct
  source 1..75: mol_type = other DNA
ggaccggcatagatgtgtccaccgtagagcaaggtgatgaagcatgggccaaattaaggctcggagttattactg

SEQ ID NO: 701165 - DNA, 75 bp, synthetic construct
  source 1..75: mol_type = other DNA
attgatgcaaaaaccagctttgagatgggcgaagtatttcttaatttccgtgacgatccgcaattgcgcgtcgct

SEQ ID NO: 701166 - DNA, 75 bp, synthetic construct
  source 1..75: mol_type = other DNA
tcccctgttctaagagcgttattgtggcgctgatgttctctgtggctggcggaggggcatccgctcaagagtctc

SEQ ID NO: 701167 - DNA, 75 bp, synthetic construct
  source 1..75: mol_type = other DNA
cagcgcgtgatggttatggatttgaggctgactggtcagagttttataccacaacacgcaagccatcagcaggag

SEQ ID NO: 701168 - DNA, 75 bp, synthetic construct
  source 1..75: mol_type = other DNA
acaggacgccaccacagcgagaaaaggccttgtccagctcagtagcgccaccaacagtgattctgaaacgcttgc

SEQ ID NO: 701169 - DNA, 75 bp, synthetic construct
  source 1..75: mol_type = other DNA
agaagaggcgctgcgttgggggatagtcaaccgcgtggttagccaggcggaactgatggataacgcccgcgaact

SEQ ID NO: 701170 - DNA, 75 bp, synthetic construct
  source 1..75: mol_type = other DNA
ccgctggcaattgcggcactgaaagagatctatcgcaccaccagcgaaatgccggttgaagaagcatatcgctat

SEQ ID NO: 701171 - DNA, 75 bp, synthetic construct
  source 1..75: mol_type = other DNA
agcttcgccctgccggaagccaaactgggcatcgttcctgacagcggcggcgtgctgcgtctgccgaagatcctg

SEQ ID NO: 701172 - DNA, 75 bp, synthetic construct
  source 1..75: mol_type = other DNA
agaagaggcgctgcgttggggggtagtcaaccgcgtggttagccaggcggagctgatggataacgcccgcgaact

SEQ ID NO: 701173 - DNA, 75 bp, synthetic construct
  source 1..75: mol_type = other DNA
ttgcgggtttaaccgaaatttttaatctcgacaaaccggtcatcgccgccgtgaacggatatgcctttggcggcg

SEQ ID NO: 701174 - DNA, 75 bp, synthetic construct
  source 1..75: mol_type = other DNA
tggacagcgacagctatcagttgctcaaggcatacgacgtaaatatctccggtctggtcagtacgaccatgcaga

SEQ ID NO: 701175 - DNA, 75 bp, synthetic construct
  source 1..75: mol_type = other DNA
acgctggcaggctgaaaatcaggaaggaatggccgaggttgcccgctttattgagatgaacggttcattcgccga

SEQ ID NO: 701176 - DNA, 75 bp, synthetic construct
  source 1..75: mol_type = other DNA
gtagactcgtcgcctgacgcactgaatacgttgaacgagttagcggcggcgctgggaaacgacccgaattttgcg

SEQ ID NO: 701177 - DNA, 75 bp, synthetic construct
  source 1..75: mol_type = other DNA
tggaatgggctgaacatgaagcagagcggggaaacggatcagagccttacttttcacaggtctttgacagggtac

SEQ ID NO: 701178 - DNA, 75 bp, synthetic construct
  source 1..75: mol_type = other DNA
atgaaggaggaattattcattgactatgtcgatattgaatggtgtcttcgggctgcaagtaaaaagtttaacttt

SEQ ID NO: 701179 - DNA, 75 bp, synthetic construct
  source 1..75: mol_type = other DNA
acattgccattgagcaggggcaaaagacgccggagaacttcaaaagcgagctgccaacgtttgtggcccatttca

SEQ ID NO: 701180 - DNA, 75 bp, synthetic construct
  source 1..75: mol_type = other DNA
caatattacggtgatgaagttgcgctattcggcaccgataacctggaaaaaaatccccaggcgttaaccgtcgga

SEQ ID NO: 701181 - DNA, 75 bp, synthetic construct
  source 1..75: mol_type = other DNA
gggggggaatatattttatgattatgatttcacccgcggacatcgccgtttaggcttaggaacagaagcctggac

SEQ ID NO: 701182 - DNA, 75 bp, synthetic construct
  source 1..75: mol_type = other DNA
gcccaggctgatggtgtcgatggcgtggtgatggatcttgatatcactgacagttttggtgatgacacggatcgt

SEQ ID NO: 701183 - DNA, 75 bp, synthetic construct
  source 1..75: mol_type = other DNA
atcagaatctccgggctcccgtacccatgacatgggcatttatgatgcgtgaggcgggttttccagcagtcaggc

SEQ ID NO: 701184 - DNA, 75 bp, synthetic construct
  source 1..75: mol_type = other DNA
acgctggaaagcagaaaatcgggaagggatggctgaggtcgcccggtttattgaaatgaacggctcttttgccga

SEQ ID NO: 701185 - DNA, 75 bp, synthetic construct
  source 1..75: mol_type = other DNA
ccggagctggccgtaggtctggaaaaatgcaagtggacgattaacgctctcattaataaccactacaaaatcgtc

SEQ ID NO: 701186 - DNA, 75 bp, synthetic construct
  source 1..75: mol_type = other DNA
gggctgcctggctgcatcccaaaattcaggtgaagactctgcgccagcgcattgccgcaagactgcgcgcgttgc

SEQ ID NO: 701187 - DNA, 75 bp, synthetic construct
  source 1..75: mol_type = other DNA
agacaaaatcaccgtcttcagcctggcgcaagactttgataacagcagcaccccaggcttccttgtggaagattg

SEQ ID NO: 701188 - DNA, 75 bp, synthetic construct
  source 1..75: mol_type = other DNA
gattaaaaagctgcgtgaaattatcgccatgggcggtaaaccattcgaagcgctggttaaacaaatggagttagt

SEQ ID NO: 701189 - DNA, 75 bp, synthetic construct
  source 1..75: mol_type = other DNA
tctgggagatgtcggacactgaccgggcgacaatggccagcaacgtggccaccgccctggcgactgccgtgcgcg

SEQ ID NO: 701190 - DNA, 75 bp, synthetic construct
  source 1..75: mol_type = other DNA
ccgcctatgaaccgagtcaggatttctgtagcaaaatcctcagcaaactgggcgtaacgacatcgtggtttgatc

SEQ ID NO: 701191 - DNA, 75 bp, synthetic construct
  source 1..75: mol_type = other DNA
cgcgagttaaccaccctgctctgcctggcagtaaaggccacgaattctggaaacgagactttacaggtagcagcg

SEQ ID NO: 701192 - DNA, 75 bp, synthetic construct
  source 1..75: mol_type = other DNA
ccttaaccttgcgcgttatgtcgcttggcgaaccggatgagaaaggtcgtcgccgtccggttgaaaccaacgaaa

SEQ ID NO: 701193 - DNA, 75 bp, synthetic construct
  source 1..75: mol_type = other DNA
tctcttttgatgaatatgaccctaagtgtcttcctgcaatccagtataaagagcttactcagaaaattattctgc

SEQ ID NO: 701194 - DNA, 75 bp, synthetic construct
  source 1..75: mol_type = other DNA
agtcatactctaaattgttcggagataaggagcctgaaaaaatggacaacaatcttgatgaagttgtttcccagg

SEQ ID NO: 701195 - DNA, 75 bp, synthetic construct
  source 1..75: mol_type = other DNA
ccgcactttgtcaggctgcgttggcagcagctaaacttgcgaagatcccgaaaccaccaagccaggcagtatatg

SEQ ID NO: 701196 - DNA, 75 bp, synthetic construct
  source 1..75: mol_type = other DNA
gcgctaaaaagcccgttgcgactgctgacgggtataacaatttcgctgccaaacttggtggttacactgccaata

SEQ ID NO: 701197 - DNA, 75 bp, synthetic construct
  source 1..75: mol_type = other DNA
cagggagaacaggtgacgaccaacgttcttttgcgtcagattctggctgaggtgatcaaggcaaacagccagaaa

SEQ ID NO: 701198 - DNA, 75 bp, synthetic construct
  source 1..75: mol_type = other DNA
acccattgaacttcccggcgggcgcttctttattggtgctaccagtgaactaaatgaaattaactatcgcaacag

SEQ ID NO: 701199 - DNA, 75 bp, synthetic construct
  source 1..75: mol_type = other DNA
caacaccatcaccgagggtaacaataatcactggaatctggtgttgcctgcctggcaatacagctctgatcaagc

SEQ ID NO: 701200 - DNA, 75 bp, synthetic construct
  source 1..75: mol_type = other DNA
atgcttttaattcaacctagatttggccttagcatcaaaaaagggcacatgtttggtgagaaagagtcacaacga

SEQ ID NO: 701201 - DNA, 75 bp, synthetic construct
  source 1..75: mol_type = other DNA
gacaaagaagcacaggaagaattaaaaagcattgtggcagaactgtttaacggttctgacattatcgaaccttat

SEQ ID NO: 701202 - DNA, 75 bp, synthetic construct
  source 1..75: mol_type = other DNA
tgaatgccgggcaggtttttgctgttcgtctggcacgttttattggttgcacgcaaaagcggaatattgatggag

SEQ ID NO: 701203 - DNA, 75 bp, synthetic construct
  source 1..75: mol_type = other DNA
acagtaaaatcaatggcgggaataatcagagcacaattacaggttcttgatcctgacgagtatatcacgactgat

SEQ ID NO: 701204 - DNA, 75 bp, synthetic construct
  source 1..75: mol_type = other DNA
gccttagcatcaaaaaatggcacatgtttggcgagaaagagtctcaacgaaaaatggtgcttatcaagttgccat

SEQ ID NO: 701205 - DNA, 75 bp, synthetic construct
  source 1..75: mol_type = other DNA
cgcagttcgtcaggcaaagagaaaggccaatatgacatacatgaaggcgtatcaaaaagcatggaaagaacaccg

SEQ ID NO: 701206 - DNA, 75 bp, synthetic construct
  source 1..75: mol_type = other DNA
cataaatgcttcggctcgctggggctggcgctggaagaaggtctgacgctaaccaatctgaccgaaagccagttt

SEQ ID NO: 701207 - DNA, 75 bp, synthetic construct
  source 1..75: mol_type = other DNA
gtaagcaaccctgcgcaatacgaaatcgaacttacgaaaccacacagtcgtctcaagtcagcagttaccttattg

SEQ ID NO: 701208 - DNA, 75 bp, synthetic construct
  source 1..75: mol_type = other DNA
taaaatatgagctgcattgcttacccaattaccatcacgtcttttttttcctggcgcctgctgctgcaccgaaca

SEQ ID NO: 701209 - DNA, 75 bp, synthetic construct
  source 1..75: mol_type = other DNA
cgttccacgccacgcgggtaatggattttggctccagcttgttagatatggcggtggcgcaagagcagcaatatg

SEQ ID NO: 701210 - DNA, 75 bp, synthetic construct
  source 1..75: mol_type = other DNA
atgttgattacccgatctggcaagttgatgcgctggtcgttggtagcggcgcagcaggattacgtgcggcagttg

SEQ ID NO: 701211 - DNA, 75 bp, synthetic construct
  source 1..75: mol_type = other DNA
accgtgtattaacggtatttactttgaaaaaaactggccagactttttaggtaatgctgccaacttactgattta

SEQ ID NO: 701212 - DNA, 75 bp, synthetic construct
  source 1..75: mol_type = other DNA
tcgtctcaaatcaccattggactggagtctgatggtttgattacctggctgacggagctgaacttctcccctgcc

SEQ ID NO: 701213 - DNA, 75 bp, synthetic construct
  source 1..75: mol_type = other DNA
agcgcgttccggcattcaaaggcatcctcaacgaatgggattccctcgtcgctctgttgaagtctgaaatgaaga

SEQ ID NO: 701214 - DNA, 75 bp, synthetic construct
  source 1..75: mol_type = other DNA
atgagcgataaattcggcgaagggcgcgatccatatctctacccgggtctcgatatcatgcataacaagctcaac

SEQ ID NO: 701215 - DNA, 75 bp, synthetic construct
  source 1..75: mol_type = other DNA
agctcagtagtgccaccaacagcacgtctgaaacactggccgcgacatcgaaagcggttaaggtggtaatggatg

SEQ ID NO: 701216 - DNA, 75 bp, synthetic construct
  source 1..75: mol_type = other DNA
atttccaggttagagcttgagggaatagaaaaacgggcagttgagcgttttctcaaacgtgagacgaaacgacag

SEQ ID NO: 701217 - DNA, 75 bp, synthetic construct
  source 1..75: mol_type = other DNA
attctctcgttgctctgttgaagtctgaaatgaagatacacggaaacaaagcaccagagacttacagaagaatta

SEQ ID NO: 701218 - DNA, 75 bp, synthetic construct
  source 1..75: mol_type = other DNA
tcgactggcgatgttggcatcagtagcgcaactcttgcctcaatcgcatgtggactgaaaaagaatatctatggt

SEQ ID NO: 701219 - DNA, 75 bp, synthetic construct
  source 1..75: mol_type = other DNA
cggcatcgtttaacgaatttatctctatgctgccgaagtttaataaggagctgacgcgcaaactttttaaattgc

SEQ ID NO: 701220 - DNA, 75 bp, synthetic construct
  source 1..75: mol_type = other DNA
gcagattcccatgttgctgttaaaattgatcatatgacatacagttttcctttcaatacaaagcggcctgatgtt

SEQ ID NO: 701221 - DNA, 75 bp, synthetic construct
  source 1..75: mol_type = other DNA
cttatgttgtttcttttgattatccatcatcttattcctcagtgttcttaagattaagatcattgatgtatgata

SEQ ID NO: 701222 - DNA, 75 bp, synthetic construct
  source 1..75: mol_type = other DNA
cgggattacaccgcgcacttaaaggcgtttcgcattatctggcgttaaagacgctactcagtttatggacgggtg

SEQ ID NO: 701223 - DNA, 75 bp, synthetic construct
  source 1..75: mol_type = other DNA
atggaaacccctcaacccgataaaacgggcatgcacattctgctcaagttggcctcgctggtagtgatcctcgcg

SEQ ID NO: 701224 - DNA, 75 bp, synthetic construct
  source 1..75: mol_type = other DNA
ctggtatgcatattctgctgaaactggcctctctggtggtgatcctcgcgggtattcacgctgcggcagatatca

SEQ ID NO: 701225 - DNA, 75 bp, synthetic construct
  source 1..75: mol_type = other DNA
aaacaccaactttgcttaatgataatttgtttcataaacaattttatcgggttttagatattctaagtgaaggac

SEQ ID NO: 701226 - DNA, 75 bp, synthetic construct
  source 1..75: mol_type = other DNA
taactcgcttgcacagactaacactcgcgtaactcttaccgctcagtacaagaaaggcaggacagagacgaaagc

SEQ ID NO: 701227 - DNA, 75 bp, synthetic construct
  source 1..75: mol_type = other DNA
cgtgatggttataacgaaacaacgttggaggcgttcgggtgcacttcacgcgggcaagcgtaccgcgctggcaaa

SEQ ID NO: 701228 - DNA, 75 bp, synthetic construct
  source 1..75: mol_type = other DNA
aaacaccaacattattaaacgataacctgtatcataaacagttttatcgtgttttagacattctcagcgaggggc

SEQ ID NO: 701229 - DNA, 75 bp, synthetic construct
  source 1..75: mol_type = other DNA
tcagatctcaaacgtggaacacgcagtggctgacgaggccagcgcccgcgctgaagccattaacggtgtgaatgc

SEQ ID NO: 701230 - DNA, 75 bp, synthetic construct
  source 1..75: mol_type = other DNA
ggcccgcgacgcaattcacttcacccctggggatattatcgagatactcgacaataaccgcgcaggcgctcgttt

SEQ ID NO: 701231 - DNA, 75 bp, synthetic construct
  source 1..75: mol_type = other DNA
ccgatcagcagaacaacgctcaccactgataccagttatgagttttattactcaggtgaaacacagatcaccgac

SEQ ID NO: 701232 - DNA, 75 bp, synthetic construct
  source 1..75: mol_type = other DNA
acaaccgcaccggcatcgggttacccgattttatatatgcttgacggtaacgcagttatggaccgcctggatgac

SEQ ID NO: 701233 - DNA, 75 bp, synthetic construct
  source 1..75: mol_type = other DNA
cacgcccgcataaagcgattttctttcatctttcttgccttacccttatctgtagtgcgcaagtttatgcgaagc

SEQ ID NO: 701234 - DNA, 75 bp, synthetic construct
  source 1..75: mol_type = other DNA
ttgattctgaatatatcgcggctggcgacaccatcagcttacttgatagcgatggtaaatttaaaaaacaccaga

SEQ ID NO: 701235 - DNA, 75 bp, synthetic construct
  source 1..75: mol_type = other DNA
ataacacatcggttatgatgatgattgatgtcaagccttcatcttcttctgcgtggacgcttgttaaagatgtca

SEQ ID NO: 701236 - DNA, 75 bp, synthetic construct
  source 1..75: mol_type = other DNA
cgttgaccgtttcgtgcttatgactgcggcaggtggctcctatcagaccccgttctatgttactaacggtgcttg

SEQ ID NO: 701237 - DNA, 75 bp, synthetic construct
  source 1..75: mol_type = other DNA
gacttttggcggcatgaacacggggcacacctattacgtttatattcgtacacgtaacgcttttggcgtgtcaga

SEQ ID NO: 701238 - DNA, 75 bp, synthetic construct
  source 1..75: mol_type = other DNA
gtgtattcacccgttcgagccttgcccgcgctgagtgctacaacgccgtgattgtatcctggactgatccgggta

SEQ ID NO: 701239 - DNA, 75 bp, synthetic construct
  source 1..75: mol_type = other DNA
aagcggtgaaggagcaatgaaatggacgaacacaactatctcagtaaaagatggtaatggcgtgttacgcgtcca

SEQ ID NO: 701240 - DNA, 75 bp, synthetic construct
  source 1..75: mol_type = other DNA
tttattaaggacgcatcaatcaccaacgcgaaaataggttcttacatccagtcaaataactatgtttccggcagc

SEQ ID NO: 701241 - DNA, 75 bp, synthetic construct
  source 1..75: mol_type = other DNA
caagcattacagaatggtcacaggctatggcaacggctgacgaggcactatcaagcaagatcgatcaactaacag

SEQ ID NO: 701242 - DNA, 75 bp, synthetic construct
  source 1..75: mol_type = other DNA
ttccgtggtatcgcgttatgggacgggcagcgccttactgtgatgattgatgcgccgcaggatccaattgctacc

SEQ ID NO: 701243 - DNA, 75 bp, synthetic construct
  source 1..75: mol_type = other DNA
taactctctcgcgcagaccaacacgcgggttacgctcactgcacagtacaagaaagggcaatcagaaacaaacgc

SEQ ID NO: 701244 - DNA, 75 bp, synthetic construct
  source 1..75: mol_type = other DNA
tgcgctttttctggtttaaaagcatcagatatcatcgggaaaatatattgtcctcaaacatcatcatctgaagga

SEQ ID NO: 701245 - DNA, 75 bp, synthetic construct
  source 1..75: mol_type = other DNA
atcctaacgttacgcgcgttcgcctgaatatcggcgtcgattcacttgtacaatctgacgagcaaagcaatcaac

SEQ ID NO: 701246 - DNA, 75 bp, synthetic construct
  source 1..75: mol_type = other DNA
tgacaaaaacagcgatgatataaatcagaccaaagcaagcctgcaaaacgcttcgattgcgcttattaataactc

SEQ ID NO: 701247 - DNA, 75 bp, synthetic construct
  source 1..75: mol_type = other DNA
aggcgtatttcaggcgaccgtgtacccgataagcaaaaccacgcttactaccgatacgtcatatgaattctacta

SEQ ID NO: 701248 - DNA, 75 bp, synthetic construct
  source 1..75: mol_type = other DNA
cggattcaaacaggcatacagtaataaccccgcctggatattccgctatctggttaaaaacaagcgtttcggcct

SEQ ID NO: 701249 - DNA, 75 bp, synthetic construct
  source 1..75: mol_type = other DNA
gcgcggaggctatagcatcacttgaagccaatattaatgaaaacatttcagcaaaaataacagatatatcaacgg

SEQ ID NO: 701250 - DNA, 75 bp, synthetic construct
  source 1..75: mol_type = other DNA
aattaagcggttgcccgatagatgccaacggtttttgcccaatggttaagtttgatagcgtattgaatgaagcgg

SEQ ID NO: 701251 - DNA, 75 bp, synthetic construct
  source 1..75: mol_type = other DNA
aacgctgttgcgcatgaactggacccgatcgtggcgaaacgcgtgcgtcatatcctgactgaaaacgcccgtacc

SEQ ID NO: 701252 - DNA, 75 bp, synthetic construct
  source 1..75: mol_type = other DNA
ttgtcgcacatgaaaactatcaatgggctaactacgttcgtggcgtggtgaaacatctgcaactgcgtaacaaca

SEQ ID NO: 701253 - DNA, 75 bp, synthetic construct
  source 1..75: mol_type = other DNA
atcatgccttgttgatcgattgccgctcactgggcaccaaagccgtttctatgccgaaaggtgtggcggttgtta

SEQ ID NO: 701254 - DNA, 75 bp, synthetic construct
  source 1..75: mol_type = other DNA
cagtgcggcgcgtaactataacggtacctacagtgcccagcggcaggagctggtcgagtccaccgacgggtatct

SEQ ID NO: 701255 - DNA, 75 bp, synthetic construct
  source 1..75: mol_type = other DNA
gcgcgatgtcaccattgaagagttcaacgccgtagcgcatgaactggatccgatcgtcgcaaaacgcgtgcgtca

SEQ ID NO: 701256 - DNA, 75 bp, synthetic construct
  source 1..75: mol_type = other DNA
atcatgcattattgctcgactgccgctcactggggactaaagctgtttccatgccgaaaggtgtggcggtggtga

SEQ ID NO: 701257 - DNA, 75 bp, synthetic construct
  source 1..75: mol_type = other DNA
atgccgaaaggtgtggctgtcgtcatcatcaacagtaacttcaaacgtaccctggttggcagcgaatacaacacc

SEQ ID NO: 701258 - DNA, 75 bp, synthetic construct
  source 1..75: mol_type = other DNA
atgaacaagaaaaccaaacgtacttttacccctgaattcaggctggaatgtgcacagctaattgttgataagggc

SEQ ID NO: 701259 - DNA, 75 bp, synthetic construct
  source 1..75: mol_type = other DNA
tgcacagctgattgttgataagagctactcgtatcggcaagccagtgaatcaatgaatgtcggttctaccacgct

SEQ ID NO: 701260 - DNA, 75 bp, synthetic construct
  source 1..75: mol_type = other DNA
ctcactggggaccaaagcagtttccatgccgaaaggcgtagctgtggtcatcatcaacagtaacttcaaacgtac

SEQ ID NO: 701261 - DNA, 75 bp, synthetic construct
  source 1..75: mol_type = other DNA
cgatcgtggcgaaacgcgtgcgtcatatcctgactgaaaacgcccgcaccgttgaagctgccagcgcgctggagc

SEQ ID NO: 701262 - DNA, 75 bp, synthetic construct
  source 1..75: mol_type = other DNA
atgcgcgatgatttcgaaatcaccgtgccgcaaattgacactctggtagaaatcgtaaaagctgtgattggcgac

SEQ ID NO: 701263 - DNA, 75 bp, synthetic construct
  source 1..75: mol_type = other DNA
ggaagcataataagctttttctgcttctgccggtgggatatggcccagcctttccagcaatcgtcgattgttata

SEQ ID NO: 701264 - DNA, 75 bp, synthetic construct
  source 1..75: mol_type = other DNA
cttattacaggcggttcgcgctgaattcccggaggtcgttatctatcttcatgaaaatagtggtgcagtgcttaa

SEQ ID NO: 701265 - DNA, 75 bp, synthetic construct
  source 1..75: mol_type = other DNA
ccctctcttgcaacaacggctgaagattatctggatgtctctctggaaggtattacacgcggaatgacttgttgc

SEQ ID NO: 701266 - DNA, 75 bp, synthetic construct
  source 1..75: mol_type = other DNA
aaaggccgcaggctgttacccctgcggccggtttcgggcgcatattgccatcacggcagcctgacgcccgttttc

SEQ ID NO: 701267 - DNA, 75 bp, synthetic construct
  source 1..75: mol_type = other DNA
gaacgatacagccgcactgcgattaacaacatcaaaaaattctggtcgctgacggcgaaaggctgcatgttcggc

SEQ ID NO: 701268 - DNA, 75 bp, synthetic construct
  source 1..75: mol_type = other DNA
gtaccgcgattaacaacatcaaaaaattctggtcgctgacggcgaaaggctgcatgttcggcaagaacatcacca

SEQ ID NO: 701269 - DNA, 75 bp, synthetic construct
  source 1..75: mol_type = other DNA
gcgagcaggcccgctttctggatatcaatcatgacctggtgataggcgtgtttgacaagctggaggagcgggtga

SEQ ID NO: 701270 - DNA, 75 bp, synthetic construct
  source 1..75: mol_type = other DNA
tcacccctgaattcaggctggaatgtgcacagctgattgttgataagggctactcatatcgacaagccagtgaag

SEQ ID NO: 701271 - DNA, 75 bp, synthetic construct
  source 1..75: mol_type = other DNA
caagttcgccgtctggaggaacaaaatacgatattaaaaaaggctacaaccgcgctcttgatgtccgactcactg

SEQ ID NO: 701272 - DNA, 75 bp, synthetic construct
  source 1..75: mol_type = other DNA
acgccttctgcatcaccactcacatcagagcagcaacgtattcgtgagctggaaaagcaggttcgtcgtctggag

SEQ ID NO: 701273 - DNA, 75 bp, synthetic construct
  source 1..75: mol_type = other DNA
aaacacgtccggtagatttaatcctgccgctgcaaaatcagcttccacaactacaacaaattgtcggcgtggaca

SEQ ID NO: 701274 - DNA, 75 bp, synthetic construct
  source 1..75: mol_type = other DNA
atgcgtattgagatctgcatagccaaagagaaaatgactaaaatgccaaacggtgctgtggatgcgttacaagga

SEQ ID NO: 701275 - DNA, 75 bp, synthetic construct
  source 1..75: mol_type = other DNA
aacggtattgctgtactgccggtgaccggcacgctggtgcaccggctgggggggagtgcggccattttccggaat

SEQ ID NO: 701276 - DNA, 75 bp, synthetic construct
  source 1..75: mol_type = other DNA
tggactgaaagcagataacgatccgatgaacacaagtgcagggattacttttgggctggaggcaaatccggtgtc

SEQ ID NO: 701277 - DNA, 75 bp, synthetic construct
  source 1..75: mol_type = other DNA
cgccgcctgattgtctcgatgaccttactggcggcatgcggcatgttgattaccgccagcagtcagtcgctggcg

SEQ ID NO: 701278 - DNA, 75 bp, synthetic construct
  source 1..75: mol_type = other DNA
aagtggtcggcaccattatgagcgggctgctgttggggatcttgctggcacggaccgttgccggattgctggcga

SEQ ID NO: 701279 - DNA, 75 bp, synthetic construct
  source 1..75: mol_type = other DNA
gtctcctatgacagttatcagaatgcctttatcgacctgaaaaatggtcgtattgatggggtatttggtgacaca

SEQ ID NO: 701280 - DNA, 75 bp, synthetic construct
  source 1..75: mol_type = other DNA
agcaggtgctgtttaccaccccatactatgacaactctgccctgtttgtgggtcagcaaggcaaatacaccagtg

SEQ ID NO: 701281 - DNA, 75 bp, synthetic construct
  source 1..75: mol_type = other DNA
cagagcacttgagatctgggaggaccgggttaataactatcaacagcaaacaggcaataatgttgtcaatctgtt

SEQ ID NO: 701282 - DNA, 75 bp, synthetic construct
  source 1..75: mol_type = other DNA
gtactggcgctgattatcggcattctggtgctggacctcaccgtgcagggcgtgcatatcactaaccagacggta

SEQ ID NO: 701283 - DNA, 75 bp, synthetic construct
  source 1..75: mol_type = other DNA
ttcatatgcgggtaaaagttcgaaatacttaatgtctttactggatgaaaaaagtggctttgccccttttaaaat

SEQ ID NO: 701284 - DNA, 75 bp, synthetic construct
  source 1..75: mol_type = other DNA
attcattaagcaattatggggaagagttgatgacttacatgtagttaagcttaatgagttagcttcttctgaaaa

SEQ ID NO: 701285 - DNA, 75 bp, synthetic construct
  source 1..75: mol_type = other DNA
ggttccgttttcagtatgtttatgcacgataagatactacgcacccgtgcggtactgggctgcctgacttttgcc

SEQ ID NO: 701286 - DNA, 75 bp, synthetic construct
  source 1..75: mol_type = other DNA
ccacctcaactacccacagttgttgggttccgttttcagcatgtttatcaacgataagatcctcgcacccgcgca

SEQ ID NO: 701287 - DNA, 75 bp, synthetic construct
  source 1..75: mol_type = other DNA
acctcggcggctggcgtaccgtcttctgggttgcatcggtgttaatggcactgatagcgctggcgttatggcgcg

SEQ ID NO: 701288 - DNA, 75 bp, synthetic construct
  source 1..75: mol_type = other DNA
gggggaatgtcggtgtgcaactaggtgataaaggctatagcgatactcagggcatgctgggagtgaaatatagct

SEQ ID NO: 701289 - DNA, 75 bp, synthetic construct
  source 1..75: mol_type = other DNA
tggcagatgaaattgaaaatatctacagcgatctggagcagttgagccgggtaattatggaagggcatcagggcg

SEQ ID NO: 701290 - DNA, 75 bp, synthetic construct
  source 1..75: mol_type = other DNA
gatggatacccagcgtgcgctcaacttcctggtgcgcaaagcgcgcttaccgggtgggcaactggagcaggcgcg

SEQ ID NO: 701291 - DNA, 75 bp, synthetic construct
  source 1..75: mol_type = other DNA
ccctggcgcgattatctttatgatcctcgcgggtctggcgccgtatctgtactttaagcggaagaactggctgta

SEQ ID NO: 701292 - DNA, 75 bp, synthetic construct
  source 1..75: mol_type = other DNA
cagaactgaagtggagtttcggctacccaggcgcgattatctttatgattctcgcgggtctggcaccgtatctgt

SEQ ID NO: 701293 - DNA, 75 bp, synthetic construct
  source 1..75: mol_type = other DNA
ggcatttaccatccgtgatggtcgcctgtttactctgcgtgagcgcgagctgcctgcattccgtctgtatcgtat

SEQ ID NO: 701294 - DNA, 75 bp, synthetic construct
  source 1..75: mol_type = other DNA
tctcggtggtatccgtcgtgttcctgccgccaacgctggttgcttccagctacgggatgaactttgagtttatgc

SEQ ID NO: 701295 - DNA, 75 bp, synthetic construct
  source 1..75: mol_type = other DNA
accggaaagacggaacacgcattgaaacggaaggcgacggaaacgtgcaaacgcgacttggggtgaaaacctacc

SEQ ID NO: 701296 - DNA, 75 bp, synthetic construct
  source 1..75: mol_type = other DNA
cccaggcgcgattatctttatgatcctcgcgggcctggcaccgtatctgtactttaagcggaagaactggctgta

SEQ ID NO: 701297 - DNA, 75 bp, synthetic construct
  source 1..75: mol_type = other DNA
agaactgaagtggagcttcggctaccctgccgcgattatctttatgatcctcgcgggcctggcaccgtatctgta

SEQ ID NO: 701298 - DNA, 75 bp, synthetic construct
  source 1..75: mol_type = other DNA
tggaagatatcggctggaaagtgcgcctgtgtctgatggatacccagcgtgcgctcaacttcctggtgcgtaaag

SEQ ID NO: 701299 - DNA, 75 bp, synthetic construct
  source 1..75: mol_type = other DNA
acagttggcagatgaaattgaaaacatctacagcgatctggagcagttgagccgggtaattatggaagggcatca

SEQ ID NO: 701300 - DNA, 75 bp, synthetic construct
  source 1..75: mol_type = other DNA
ctggcaatccagtccacgtcacagaaatggacaatgccgcagaggactggcaaacggcaatgatccgctttatta

SEQ ID NO: 701301 - DNA, 75 bp, synthetic construct
  source 1..75: mol_type = other DNA
gccatatcgtatactaacaaagcaagcgatgaactgaaaaagagatgtttaaaggctactccaaattcaaaatca

SEQ ID NO: 701302 - DNA, 75 bp, synthetic construct
  source 1..75: mol_type = other DNA
acgcttcagggggaaatatttctccagcgcgaggggcatatccaacaacaaatggggggaataaatgccgcgcaa

SEQ ID NO: 701303 - DNA, 75 bp, synthetic construct
  source 1..75: mol_type = other DNA
taggcaaacatgaggtaagaatagactcattagaggtatcaagcgaaaacgtcgataacgaactggcacagacaa

SEQ ID NO: 701304 - DNA, 75 bp, synthetic construct
  source 1..75: mol_type = other DNA
gccaccgacaacaacggcaaaaaatacgcaacaggcatgtctcttggcctgactggtagcgggactaacgttcaa

SEQ ID NO: 701305 - DNA, 75 bp, synthetic construct
  source 1..75: mol_type = other DNA
aatcactgagaatgcagacccgggataacctggaacgtatggtggttatcaaggcgttcatcgcggtgcgggtgc

SEQ ID NO: 701306 - DNA, 75 bp, synthetic construct
  source 1..75: mol_type = other DNA
ccccggttgggtagtcatgtgggatggctggttcagacttcaggatatggttgagggttacctggtgatggagtc

SEQ ID NO: 701307 - DNA, 75 bp, synthetic construct
  source 1..75: mol_type = other DNA
ttacatgagatagtttctcaatgtgaacattgcgatgaaattcgcaatattaaaaatgatatattgcttgatgaa

SEQ ID NO: 701308 - DNA, 75 bp, synthetic construct
  source 1..75: mol_type = other DNA
caaacaggcggtagtcgatgaaggcgcaatcttcgaaatcagtagcgacacgctaaatcacttccgtgtcccgaa

SEQ ID NO: 701309 - DNA, 75 bp, synthetic construct
  source 1..75: mol_type = other DNA
actggacaatatcgccgggatgttcagaggtatggcgctatgggacggacaacgccttacggtgatgatcgatgc

SEQ ID NO: 701310 - DNA, 75 bp, synthetic construct
  source 1..75: mol_type = other DNA
cttgatgctggcagctacacgcttggtattcgcggtcgtaatgacactggcatgaagggtgcggaaagtattgtg

SEQ ID NO: 701311 - DNA, 75 bp, synthetic construct
  source 1..75: mol_type = other DNA
tcatggccggattcagtcgtagtaatggatgtcatccatgatgactggaagataaaagaggaagccaatgagaaa

SEQ ID NO: 701312 - DNA, 75 bp, synthetic construct
  source 1..75: mol_type = other DNA
gaaacaaaccacggtagacattgaccaggctgttaccgacctgaaggagtcaaccgccgatctggaagaacgtgt

SEQ ID NO: 701313 - DNA, 75 bp, synthetic construct
  source 1..75: mol_type = other DNA
gacgcagggaattacacgttgggtattcgcgggcgtaatgacactggcatgaagggggcggaaagtattgtagat

SEQ ID NO: 701314 - DNA, 75 bp, synthetic construct
  source 1..75: mol_type = other DNA
gtcagccattacgagcgacgctggctgatagaggaataccacaaggcgtggaaaagtggtggtacatgtgtggaa

SEQ ID NO: 701315 - DNA, 75 bp, synthetic construct
  source 1..75: mol_type = other DNA
agatagatgatgaaaatgaagatcggcgttttatctctgaagcaggcttggctggtggaatagccagtgcaacag

SEQ ID NO: 701316 - DNA, 75 bp, synthetic construct
  source 1..75: mol_type = other DNA
gctttatttggcaccggcacacagtcacgctatgccagccgtggctttgtgagttctttgttcggcccgtcattc

SEQ ID NO: 701317 - DNA, 75 bp, synthetic construct
  source 1..75: mol_type = other DNA
atgaataccagtgtgggtattacgttcggtcttgaagtaaatccggtatcggccataccgaaacagtcttcggcg

SEQ ID NO: 701318 - DNA, 75 bp, synthetic construct
  source 1..75: mol_type = other DNA
attaataccagcgtgggtatcacgtttggtcttgaagttaacccggtctcggccataccgaaacagtcttcggcg

SEQ ID NO: 701319 - DNA, 75 bp, synthetic construct
  source 1..75: mol_type = other DNA
ccacccgcacacacaaagcccgacgggaaaaccgttctgccgaccagctcagtaagtacggggcggtttctctgc

SEQ ID NO: 701320 - DNA, 75 bp, synthetic construct
  source 1..75: mol_type = other DNA
tgcccgccgccaggagcgcccattcctgccgtcgccgggccagttcgtagcctggtgcaagcagagcggcggcgc

SEQ ID NO: 701321 - DNA, 75 bp, synthetic construct
  source 1..75: mol_type = other DNA
gcagagcaggaaaagctggcgaaggcgcgcgaagccgatctgcgcgatattctggcgcttcgcgatcgcctcgtc

SEQ ID NO: 701322 - DNA, 75 bp, synthetic construct
  source 1..75: mol_type = other DNA
ctggatctgatggacgggcatttttgccctcagttcaccgtcggaccctgggctatcacgcaattaccagcgcag

SEQ ID NO: 701323 - DNA, 75 bp, synthetic construct
  source 1..75: mol_type = other DNA
gttacgggaagtgcctgaaaaaataaaggcgaaatatgacgaaagtgtggcaaatctgaaagcacgttatgagag

SEQ ID NO: 701324 - DNA, 75 bp, synthetic construct
  source 1..75: mol_type = other DNA
gaaattgcagcggatatcgtaattaataaaattactggtgctaaggttccacaggattttgtcagcgtattttct

SEQ ID NO: 701325 - DNA, 75 bp, synthetic construct
  source 1..75: mol_type = other DNA
gccaggcaagctatttcccacgcatatataaagttggaaaaataatcagtgaacgcgataaatttcgacgtattt

SEQ ID NO: 701326 - DNA, 75 bp, synthetic construct
  source 1..75: mol_type = other DNA
attaaaagcaagtcatgttggtgcgtttgccttagggaaaacaggaagcaccgttgcgaatgataaagcagttgg

SEQ ID NO: 701327 - DNA, 75 bp, synthetic construct
  source 1..75: mol_type = other DNA
actcaaggtttattacaggtattcgccttggcggtctgtcatctgttcagacatggaatggtcccggctggtctg

SEQ ID NO: 701328 - DNA, 75 bp, synthetic construct
  source 1..75: mol_type = other DNA
ggcaatgccgctactgcaacaaagctgaaaacagcacgaaaaattgctggagttggttttgatggttctagcgat

SEQ ID NO: 701329 - DNA, 75 bp, synthetic construct
  source 1..75: mol_type = other DNA
atggaatggacctggttggtctgataagtcaggttatgttgttaccggttccgttaactcaaatagagatgaact

SEQ ID NO: 701330 - DNA, 75 bp, synthetic construct
  source 1..75: mol_type = other DNA
cgcgcttcctgctggcaaacctgaacggttttgatccggcaaaagatatggtgaaaccggaagagatggtggtac

SEQ ID NO: 701331 - DNA, 75 bp, synthetic construct
  source 1..75: mol_type = other DNA
cgaaggcctgtttggtctggccgatgatgaggaatttaatgattccttctgggatgatgttcgttacatcaaaga

SEQ ID NO: 701332 - DNA, 75 bp, synthetic construct
  source 1..75: mol_type = other DNA
ggcggttggcgttgtacaacagttgcgtactgacgtgatggatgctgcgctacgccagccattaagtgagtttga

SEQ ID NO: 701333 - DNA, 75 bp, synthetic construct
  source 1..75: mol_type = other DNA
gacggtcgtccattaaattcgctaagtcacagcgcattacgtcagggcgtggcgatggtgcagcaagatccggtg

SEQ ID NO: 701334 - DNA, 75 bp, synthetic construct
  source 1..75: mol_type = other DNA
ccggtcgtgctggtggtgatggtgatataccagcgttacagtacgccgattgtccgccgtgtgcgcgcctatctg

SEQ ID NO: 701335 - DNA, 75 bp, synthetic construct
  source 1..75: mol_type = other DNA
atacccaaatcgcaagcacggctttcgttatggctgcgattgccgcccttgtagattcgtcacctgatgcactga

SEQ ID NO: 701336 - DNA, 75 bp, synthetic construct
  source 1..75: mol_type = other DNA
tgactaaagcgcttgcgggtaagcaaccgaaagatgccaccctgacggcgctggccgggcttgctactgcggcag

SEQ ID NO: 701337 - DNA, 75 bp, synthetic construct
  source 1..75: mol_type = other DNA
cgctgaacgagctggctgcggcgttgggcaacgacccgaattttgcgaccaccatgactaacgcgcttgcgggta

SEQ ID NO: 701338 - DNA, 75 bp, synthetic construct
  source 1..75: mol_type = other DNA
gaagggtacagaggaaaatgtattgcacaatacacaaaaaccctctgaccctgaaccgcatgaaagtgaaaaggt

SEQ ID NO: 701339 - DNA, 75 bp, synthetic construct
  source 1..75: mol_type = other DNA
tgctcgcctgcagccagctgggtaagcggacaaattctcacggtctccggtggtggggtacaggagctcaattaa

SEQ ID NO: 701340 - DNA, 75 bp, synthetic construct
  source 1..75: mol_type = other DNA
gatgcagcgctgttcctttgttctccggcagccagttggataagcggacaaattctcactgtctctggtggtggg

SEQ ID NO: 701341 - DNA, 75 bp, synthetic construct
  source 1..75: mol_type = other DNA
tcctgctgacgcgcctgatggctcaagtcgccctacgctgtcgctgagtgcactgctgaaacagtatggtatccg

SEQ ID NO: 701342 - DNA, 75 bp, synthetic construct
  source 1..75: mol_type = other DNA
ttcgatctttattccagtaataccgttcggactattcaatcagcgacctggttttctgctggaaaaaaactgacg

SEQ ID NO: 701343 - DNA, 75 bp, synthetic construct
  source 1..75: mol_type = other DNA
gaagggaaacgcacgtttacagaatttattcgtgaaggtgtgggtgttcatgcgtttaacggcgaaatctttgtg

SEQ ID NO: 701344 - DNA, 75 bp, synthetic construct
  source 1..75: mol_type = other DNA
aacgcggcgctgtttctgtgttcacctgctgccagttggataagcgggcaaatactcaccgtatccggcggtggg

SEQ ID NO: 701345 - DNA, 75 bp, synthetic construct
  source 1..75: mol_type = other DNA
acacccagaatttgggtgttgacccggtgagtgtgattcatgggggaaatgaacggggaacgtatgtctgtaagg

SEQ ID NO: 701346 - DNA, 75 bp, synthetic construct
  source 1..75: mol_type = other DNA
attcaggggcgcaatggtgggacgtatgtctgtaaagagctggtctatgcatatgcaatgtggatcagcccggca

SEQ ID NO: 701347 - DNA, 75 bp, synthetic construct
  source 1..75: mol_type = other DNA
ggatcgttgaacaacgcgaacgatacagtcgtaccgcgattaacaacatcaaaaaattctggtcgctgaccgcga

SEQ ID NO: 701348 - DNA, 75 bp, synthetic construct
  source 1..75: mol_type = other DNA
tggtatccgcctgacggctaatcaggcatatcaccagatggcgaagctggggatcgttgaacaacgcgaacgata

SEQ ID NO: 701349 - DNA, 75 bp, synthetic construct
  source 1..75: mol_type = other DNA
gcgcactgcgcgataaaaaatatggcggctggtatgcctgcgtgaatgacgagggcgtggtggatgcctccaaac

SEQ ID NO: 701350 - DNA, 75 bp, synthetic construct
  source 1..75: mol_type = other DNA
aacatggtgggagtactgcattaagtacctgatggactatgaaaatggttcctggtggcaggagctggatgcgga

SEQ ID NO: 701351 - DNA, 75 bp, synthetic construct
  source 1..75: mol_type = other DNA
tataccagcgttacagtacgccgattgtccgccgtgtgcgcgcctatctggcggatatcaacgacggctttaacg

SEQ ID NO: 701352 - DNA, 75 bp, synthetic construct
  source 1..75: mol_type = other DNA
aatgatttctggtgccggaccctctccttcagcccgaacaaaccccggcactatgaacgttatctgcagcgtatg

SEQ ID NO: 701353 - DNA, 75 bp, synthetic construct
  source 1..75: mol_type = other DNA
aaatcggcgcataccgaacttctgagattagacaggaagagaaaatcactactcgaaaaatttattgaagaactc

SEQ ID NO: 701354 - DNA, 75 bp, synthetic construct
  source 1..75: mol_type = other DNA
acgatttaattcagtatctgaacaccattaatacattaaaacaatatccaacgatgtctgaatacaaagaggaat

SEQ ID NO: 701355 - DNA, 75 bp, synthetic construct
  source 1..75: mol_type = other DNA
aaattttcgccggagagaatgttctgcacgcagcaacagcccgtatagaatgggtttttgaaacttttccgtctg

SEQ ID NO: 701356 - DNA, 75 bp, synthetic construct
  source 1..75: mol_type = other DNA
gatgggttttactacaccatgtatccattatatgactggaaagcccgtgatatctggatatataacgccagaact

SEQ ID NO: 701357 - DNA, 75 bp, synthetic construct
  source 1..75: mol_type = other DNA
gtaagggactgtggctttaccatgttctggagccggaaacctgggccaggatgtgtgagcgggtgtcaggtgctg

SEQ ID NO: 701358 - DNA, 75 bp, synthetic construct
  source 1..75: mol_type = other DNA
attgcccgcaagaaaaaacgtcgtttctcggtactgttcattgactgggaagctcagtatcagtgcaccattcag

SEQ ID NO: 701359 - DNA, 75 bp, synthetic construct
  source 1..75: mol_type = other DNA
tggctgaaaatgttctttcagcggccatacagcgtattgaatgggtattttcaacgttttcctctgtctgcctct

SEQ ID NO: 701360 - DNA, 75 bp, synthetic construct
  source 1..75: mol_type = other DNA
atgatttaattcagtatctgaacaccatcaaagcattaaaaaaatatccaacgatgtctgaatacagagatgaat

SEQ ID NO: 701361 - DNA, 75 bp, synthetic construct
  source 1..75: mol_type = other DNA
ttggtcctgaacagcgtaagggactgtggctttaccatgttctggagccggaaacctgggccaggatgtgtgaac

SEQ ID NO: 701362 - DNA, 75 bp, synthetic construct
  source 1..75: mol_type = other DNA
aagaggccattacagacatgacgtattttcccttttaccggtatgccatgacgtttgaagaatttgttccggcat

SEQ ID NO: 701363 - DNA, 75 bp, synthetic construct
  source 1..75: mol_type = other DNA
gtggcagaggtagccctcaggaagaaacgtcgtttctctgtattattcattgactgggaagctcagtaccagtgc

SEQ ID NO: 701364 - DNA, 75 bp, synthetic construct
  source 1..75: mol_type = other DNA
ttgcggcggcggcagaagtcagtgggccgctgcttatcagctattttatcgacaatatggtagcgaaaaataacc

SEQ ID NO: 701365 - DNA, 75 bp, synthetic construct
  source 1..75: mol_type = other DNA
ggccggtattccgctgcaccgacctcgttctgtcaaacaggccagagaagtggctgactgtattctcacgaggaa

SEQ ID NO: 701366 - DNA, 75 bp, synthetic construct
  source 1..75: mol_type = other DNA
atctggaaggttcagaccagcaccgtggctggttcatgtcctctctgatgctctctaccgcgatgaagggcaaag

SEQ ID NO: 701367 - DNA, 75 bp, synthetic construct
  source 1..75: mol_type = other DNA
attctttgtggcttgttgatgctgtttggcttctccgccagcggcaccattgaagtgggcgtgctgtatgcgttt

SEQ ID NO: 701368 - DNA, 75 bp, synthetic construct
  source 1..75: mol_type = other DNA
ggcaatggtgcagcaagatccggtggtgctggcggataccttcctcgccaacgtgacgctggggcgtgatatctc

SEQ ID NO: 701369 - DNA, 75 bp, synthetic construct
  source 1..75: mol_type = other DNA
taactttgtggcgctggtggggcataccggcagtggcaaaagtaccctcgccagtttattgatgggctattaccc

SEQ ID NO: 701370 - DNA, 75 bp, synthetic construct
  source 1..75: mol_type = other DNA
gatctggttgaaagcgtaatgcagcgtatcggcgtgaccgattacaccattctcggcacggtaaaaggtgcagag

SEQ ID NO: 701371 - DNA, 75 bp, synthetic construct
  source 1..75: mol_type = other DNA
tggttcgctggatggcaccaatcctctccttcaccgctgatgaagtgtggggctatctgccgggcgaacgtgaaa

SEQ ID NO: 701372 - DNA, 75 bp, synthetic construct
  source 1..75: mol_type = other DNA
tacgccgcagtggttcgtcagcatggatcagaaaggtctgcgtgcgcagtcactgaaagagatcaaaggcgtgca

SEQ ID NO: 701373 - DNA, 75 bp, synthetic construct
  source 1..75: mol_type = other DNA
ctgttcgtgcataaagacacggaagagctgcatccgcgtaccctcgaactgatggaagaagtggctaaacgcgtg

SEQ ID NO: 701374 - DNA, 75 bp, synthetic construct
  source 1..75: mol_type = other DNA
agctatcgtcgtattcgtaacaccgcgcgcttcctgctggcaaacctgaacggtttcgatccggcaaaagatatg

SEQ ID NO: 701375 - DNA, 75 bp, synthetic construct
  source 1..75: mol_type = other DNA
tggcgctgctgcaggaaaaaggcgcgctgctgcacgttgagaaaatgcagcacagctatccgtgctgctggcgtc

SEQ ID NO: 701376 - DNA, 75 bp, synthetic construct
  source 1..75: mol_type = other DNA
ggtgaacttcgacaaacaccccctgcatcatccactctccatctacgactcattctgcagaaggcggcgcgttga

SEQ ID NO: 701377 - DNA, 75 bp, synthetic construct
  source 1..75: mol_type = other DNA
gagaggatgacccgcaggttccccgccagttgcgacagtcacgtcatcgtcgtccgttaccggcacatcttcccc

SEQ ID NO: 701378 - DNA, 75 bp, synthetic construct
  source 1..75: mol_type = other DNA
atgggtatttcagtacgagcgctgctgcgtaaaaacgttgaaccttacgagcaactgggtcttgcagaagataaa

SEQ ID NO: 701379 - DNA, 75 bp, synthetic construct
  source 1..75: mol_type = other DNA
agatgcgcaaaaaggcgcgttcagcaaggaagatggcgagaaagtggttgatgattcgggtaaacgattaaaata

SEQ ID NO: 701380 - DNA, 75 bp, synthetic construct
  source 1..75: mol_type = other DNA
taaccgtccgattgtggtgacgccgctgggaactcgcctgtgccgcccttcagaagtggtgctggaaattctgcc

SEQ ID NO: 701381 - DNA, 75 bp, synthetic construct
  source 1..75: mol_type = other DNA
ggatgcgcagaaaggggctttcactaaggaagacggtgaaaaagtcgttgatgaagcaggaaaacggctgaaata

SEQ ID NO: 701382 - DNA, 75 bp, synthetic construct
  source 1..75: mol_type = other DNA
tgcgtaaaaacgtcgagccgtatgaggaactgggccttgcagaagataaatttactgacgatcggttaatcgact

SEQ ID NO: 701383 - DNA, 75 bp, synthetic construct
  source 1..75: mol_type = other DNA
atgagcaacatcacgatctatcacaacccggcctgcggcacgtcgcgtaatacgctggagatgatccgcaacagc

SEQ ID NO: 701384 - DNA, 75 bp, synthetic construct
  source 1..75: mol_type = other DNA
aagagtatgacgtgcatcctggagaaaatctggtgaacttcgcccccctgcattatccactctccatctatgact

SEQ ID NO: 701385 - DNA, 75 bp, synthetic construct
  source 1..75: mol_type = other DNA
attaagcgttaccgaaccggcgacagtcggggaggttgcgcagaatacttacctttcacgcgaacgctgccagtt

SEQ ID NO: 701386 - DNA, 75 bp, synthetic construct
  source 1..75: mol_type = other DNA
aaaccgccagagtggtgtttaatgaattaagtgccaccgcaccggcgacagtcggggagattgcacagaatacgt

SEQ ID NO: 701387 - DNA, 75 bp, synthetic construct
  source 1..75: mol_type = other DNA
taagccgagagaaatgccagctcatcctgacgcagctggttatggcggggttatcagattaccagtttggatgtt

SEQ ID NO: 701388 - DNA, 75 bp, synthetic construct
  source 1..75: mol_type = other DNA
gttgcgtttgttctgacgggggagtcattcctgcgctcaccagcatttagcgtgccggagtccgcccagcgttgg

SEQ ID NO: 701389 - DNA, 75 bp, synthetic construct
  source 1..75: mol_type = other DNA
ctttcacgcgaacgctgccagttaatactgactcagcttgttatggcgggtctggcagattatcagttcggttgt

SEQ ID NO: 701390 - DNA, 75 bp, synthetic construct
  source 1..75: mol_type = other DNA
gctaaaacagcaggatatgaccgaaactgccagagtggtgtttaatgaattaagcgtcaccgaaccggcgaccgt

SEQ ID NO: 701391 - DNA, 75 bp, synthetic construct
  source 1..75: mol_type = other DNA
ggcgtttagtgcggatatacccaatttcgatctttattccagtaacacggtgcgaactattcagtcggcgacctg

SEQ ID NO: 701392 - DNA, 75 bp, synthetic construct
  source 1..75: mol_type = other DNA
ctcctctaatcaatgcttgtcagacaaaacaggcattacggtgaaaggtgctcagaatgcccgtgaactgggcaa

SEQ ID NO: 701393 - DNA, 75 bp, synthetic construct
  source 1..75: mol_type = other DNA
cagcagcgcccggttatcgttatgtttcgtcatgcagagcgttgcgatcgttccggcaacccatgtttatcagat

SEQ ID NO: 701394 - DNA, 75 bp, synthetic construct
  source 1..75: mol_type = other DNA
aagaagcaaaagcggtttttaacgaactcagcgcttcaccagcgacagctggggaaattgcacagaatacgcacc

SEQ ID NO: 701395 - DNA, 75 bp, synthetic construct
  source 1..75: mol_type = other DNA
gtgcaaataaccgaagcattattttcagagccgggagacatccggcgttttgttcagcaggcggtggaccactgg

SEQ ID NO: 701396 - DNA, 75 bp, synthetic construct
  source 1..75: mol_type = other DNA
gaagggaaacgcacgtttacagaatttatacgtgaaggtgtgggagttcatgcgtttaacggcgaaatctttgtg

SEQ ID NO: 701397 - DNA, 75 bp, synthetic construct
  source 1..75: mol_type = other DNA
gtgataagtgctggcggacaatgccgggtggaaaagcgttttcaggtcgcccggggtgatacatctggccagtat

SEQ ID NO: 701398 - DNA, 75 bp, synthetic construct
  source 1..75: mol_type = other DNA
cacactggagatgatccgcaacagcggcaacgaaccgacaataatttattatctcgatactcccccgacccgtga

SEQ ID NO: 701399 - DNA, 75 bp, synthetic construct
  source 1..75: mol_type = other DNA
ggacccgcagcagggcgcgtttaccaaagaggacggcgaagccgtcattgatgagcacgggaaccgcgtcagcca

SEQ ID NO: 701400 - DNA, 75 bp, synthetic construct
  source 1..75: mol_type = other DNA
atgggcatttccgtccgggctttgctgcgtaagaacgtcgagccgtatgaggaactgggtcttgcagaagataaa

SEQ ID NO: 701401 - DNA, 75 bp, synthetic construct
  source 1..75: mol_type = other DNA
taatcggccgattgtagttacgccgcttggcactcgtctttgccgtccttcagaaatagtgctcaatattctacc

SEQ ID NO: 701402 - DNA, 75 bp, synthetic construct
  source 1..75: mol_type = other DNA
atgagcaacattaccatttatcacaacccggcctgcggtacgtcacgcaatacccttgaaatgatccgtaacagc

SEQ ID NO: 701403 - DNA, 75 bp, synthetic construct
  source 1..75: mol_type = other DNA
aaaccgccagagtggtgtttaatgaattaagcgtcaccgaaccggcgaccgtcgaggaaattgcgcagaacactt

SEQ ID NO: 701404 - DNA, 75 bp, synthetic construct
  source 1..75: mol_type = other DNA
acctttcacacgaacgctgccagttaatactgacccagcttgttatggcgggtctggcagattatcagttcggtt

SEQ ID NO: 701405 - DNA, 75 bp, synthetic construct
  source 1..75: mol_type = other DNA
acccagcctgcggcacgtcgcgtaatacgctggagatgatccgcaacagcggtatcgagccgaccgttattcttt

SEQ ID NO: 701406 - DNA, 75 bp, synthetic construct
  source 1..75: mol_type = other DNA
ggtacagagccgaccgttattcattatcttgaaaccccaccatcacgagctgagctggtaaaactcattgcggat

SEQ ID NO: 701407 - DNA, 75 bp, synthetic construct
  source 1..75: mol_type = other DNA
ggtacagagccgaacgttattcattatcttgagaccccaccatcacgagatgaactggtaaaactcattgcggat

SEQ ID NO: 701408 - DNA, 75 bp, synthetic construct
  source 1..75: mol_type = other DNA
tgaactggcgcgcattaccggactgagtgcctctgcaacgtcacagcatctggcacggatgcgtgacgaagggct

SEQ ID NO: 701409 - DNA, 75 bp, synthetic construct
  source 1..75: mol_type = other DNA
gaacatttacagaaatactatcatacaaatactattgacttactcatatccacgcatccagatagcgaccatgct

SEQ ID NO: 701410 - DNA, 75 bp, synthetic construct
  source 1..75: mol_type = other DNA
ttatgattctggttgtggtcatggtgttgttccttttaacccgcttcccaacctgtaaagtggcacagacaagtc

SEQ ID NO: 701411 - DNA, 75 bp, synthetic construct
  source 1..75: mol_type = other DNA
tctgctggagcaagaaccggaagcgttcctgcaaagcggcgcgcaggcagacgatagtgaagtggctgagataga

SEQ ID NO: 701412 - DNA, 75 bp, synthetic construct
  source 1..75: mol_type = other DNA
gcgatgactataaactcgggcgtttatgcggtcgttattttctggcaaccgtcggtaaaatgctaaccgaaaaag

SEQ ID NO: 701413 - DNA, 75 bp, synthetic construct
  source 1..75: mol_type = other DNA
ttggtaatattgcgccgttgtcgctaaggccgttccagcctggacgaatagctctggtgtgcgaaggcggcggac

SEQ ID NO: 701414 - DNA, 75 bp, synthetic construct
  source 1..75: mol_type = other DNA
cgttagtagcaatcatcatagccttagctggatgtgctttgccagataaagacggcgacttcggagcttatgttc

SEQ ID NO: 701415 - DNA, 75 bp, synthetic construct
  source 1..75: mol_type = other DNA
tcaacgaacgtgatgcttcaaacttcatggtctatagctttgcctgcttctttattggcaagtttatagccaaca

SEQ ID NO: 701416 - DNA, 75 bp, synthetic construct
  source 1..75: mol_type = other DNA
gttttatcacccgcaactgcccgcagaaatgcctacctggccgtacgccgtcgcgctggtgattgaagctggcga

SEQ ID NO: 701417 - DNA, 75 bp, synthetic construct
  source 1..75: mol_type = other DNA
cgataataacttcccgttttcctccagccgctggcctaatatggcggatgacaatgagtttattctactggatgt

SEQ ID NO: 701418 - DNA, 75 bp, synthetic construct
  source 1..75: mol_type = other DNA
tctggtggttgttccggtaggtcatcacagcgttgaagattttaacgctacgctgccgaaatctcgtctgccgca

SEQ ID NO: 701419 - DNA, 75 bp, synthetic construct
  source 1..75: mol_type = other DNA
atggatattatttctgtcgccttaaagcgtcattccactaaggcattcgatgccaacaaaaaacttaccccagaa

SEQ ID NO: 701420 - DNA, 75 bp, synthetic construct
  source 1..75: mol_type = other DNA
tctgtgcaaaaaccgcgatggacgatgcctggctgaaacaggttgttgaccaggaagatgccgatggccgctttg

SEQ ID NO: 701421 - DNA, 75 bp, synthetic construct
  source 1..75: mol_type = other DNA
attccgcctgcgccagtcgccaacgatacgctggttgccggggtgagtgacgctccgcaggcgaatgacccgaca

SEQ ID NO: 701422 - DNA, 75 bp, synthetic construct
  source 1..75: mol_type = other DNA
atctggtggggcagccagcggatttacataatgcgcaactggtgattggtcaggaggtcgatacctcgctgtcca

SEQ ID NO: 701423 - DNA, 75 bp, synthetic construct
  source 1..75: mol_type = other DNA
tttgcgcgacctgggtacaccaatggaaatggtcgatcagatggggatgagttacgcgatggcgtatccattcgg

SEQ ID NO: 701424 - DNA, 75 bp, synthetic construct
  source 1..75: mol_type = other DNA
ccaaaaaactgggcctgaccaacactaccttccagacggtgcacggtctggatgcgccggggcagttcagtaccg

SEQ ID NO: 701425 - DNA, 75 bp, synthetic construct
  source 1..75: mol_type = other DNA
aggattcccggcggcgttgaagctggggctggcgggtggtccgctgattatggcgctgatccttggacgtatcgg

SEQ ID NO: 701426 - DNA, 75 bp, synthetic construct
  source 1..75: mol_type = other DNA
ggggtcgaactggtcgccagtggcgatatcagcctgcagttcggcgatatcctcaacctggtggggcgtccgtcc

SEQ ID NO: 701427 - DNA, 75 bp, synthetic construct
  source 1..75: mol_type = other DNA
ttctccggcgcggtcaccaatacgccagcgctgggcgcaggtcagcagatcttacgcgacctcggcacaccgatg

SEQ ID NO: 701428 - DNA, 75 bp, synthetic construct
  source 1..75: mol_type = other DNA
attggtctggaagatgcgctgactgccagttcccccccccgccatgagtcggttgggggcggcggtaagtactgg

SEQ ID NO: 701429 - DNA, 75 bp, synthetic construct
  source 1..75: mol_type = other DNA
aaaatggccgaaatggactatatcgacatgcgtctggctgagaatgtctggaacggcgaagttatcctggcggaa

SEQ ID NO: 701430 - DNA, 75 bp, synthetic construct
  source 1..75: mol_type = other DNA
gctggatgagtttatgcgcgcgcagtttaatcctttcgatctctattttggcacgtccgccggggcgcagaacct

SEQ ID NO: 701431 - DNA, 75 bp, synthetic construct
  source 1..75: mol_type = other DNA
aaaggtcaggttgtcgggaccattgatttccagcttaacggtaaatccattgagcagcgtccgctgatcgtgatg

SEQ ID NO: 701432 - DNA, 75 bp, synthetic construct
  source 1..75: mol_type = other DNA
gggatataatctggttgcttcggctacccagggcgatatgcgtttaatctccgtagtgctgggggcgaaaactga

SEQ ID NO: 701433 - DNA, 75 bp, synthetic construct
  source 1..75: mol_type = other DNA
gagggcggattctttggtcggatatgggactttgtgatgatgaaatttcatcaatggttcggcagctggttctct

SEQ ID NO: 701434 - DNA, 75 bp, synthetic construct
  source 1..75: mol_type = other DNA
tgtgccgatgcaattcgggctttacgcggcggcgggcaacccgcccaggcgctggaaattctcaccccacgagaa

SEQ ID NO: 701435 - DNA, 75 bp, synthetic construct
  source 1..75: mol_type = other DNA
cttcaaatatcaccccacctccggacgtcaacggtctgaaaaaggatccatccttaagtctgtacgccattcctg

SEQ ID NO: 701436 - DNA, 75 bp, synthetic construct
  source 1..75: mol_type = other DNA
cactgttaattacccagcatatgccgcccggtttcacccgctcttttgccgacagacttaataagctgtgccaga

SEQ ID NO: 701437 - DNA, 75 bp, synthetic construct
  source 1..75: mol_type = other DNA
tggaactggcgcgcagcggcgcgaactatcaaatcaaaattcacgatggcccggcggttaaccgccatcgaccgt

SEQ ID NO: 701438 - DNA, 75 bp, synthetic construct
  source 1..75: mol_type = other DNA
taatccaaccgcagatccaaatcagcacttcccggatgagatgtggttcatcgaacagaagactctcgaaaccca

SEQ ID NO: 701439 - DNA, 75 bp, synthetic construct
  source 1..75: mol_type = other DNA
caggtctccaactttgccggaactgtctccgctgaagttcaggcaaacgacgatctggtaggttgccgcatcatc

SEQ ID NO: 701440 - DNA, 75 bp, synthetic construct
  source 1..75: mol_type = other DNA
ttcactggaggaataaccgccccccccaaacagcagatagtctgcagccggtcctttagagagcgcgtcacgaca

SEQ ID NO: 701441 - DNA, 75 bp, synthetic construct
  source 1..75: mol_type = other DNA
tgccgtttattatggttcccattgttaactgtgccattggttacttctttgtttcgatggaaattattccaccgg

SEQ ID NO: 701442 - DNA, 75 bp, synthetic construct
  source 1..75: mol_type = other DNA
attgtacttaaccccatcatgatggtgccgtttattatggttcccattgttaactgtgccattggttacttcttt

SEQ ID NO: 701443 - DNA, 75 bp, synthetic construct
  source 1..75: mol_type = other DNA
tagcttatgccgttccatggactacgccgggaccattaatcgcttttctcggtacaggaggtaactggttagctc

SEQ ID NO: 701444 - DNA, 75 bp, synthetic construct
  source 1..75: mol_type = other DNA
aaggtgcgtacggcgtcaagggcgagcctcgcggcgcataaaccattatcggctccggcaacactgaaggcgggg

SEQ ID NO: 701445 - DNA, 75 bp, synthetic construct
  source 1..75: mol_type = other DNA
ggcgtatagcgaaatgattgctgaaaaggtgcgtacggcagcaaaggcgagccttgcagcacataagccattgtc

SEQ ID NO: 701446 - DNA, 75 bp, synthetic construct
  source 1..75: mol_type = other DNA
taaatatcatgtcaattatgattgctttcctggtcgccaggaatatggcgattagctatgagcaagatgatcttt

SEQ ID NO: 701447 - DNA, 75 bp, synthetic construct
  source 1..75: mol_type = other DNA
ttacctgcattacaaataaagagagcaaaactcgcgcttataatatttattctctggctatgtctctttctcgca

SEQ ID NO: 701448 - DNA, 75 bp, synthetic construct
  source 1..75: mol_type = other DNA
acaataaaagatgatgtgttttgcactcttcatgattactataaccacaataatgaaacgaaatccactattgac

SEQ ID NO: 701449 - DNA, 75 bp, synthetic construct
  source 1..75: mol_type = other DNA
taatgatatgtatagttttagcaataccttctgcaattatcgttttattctttcacttttatcaaaacatcacca

SEQ ID NO: 701450 - DNA, 75 bp, synthetic construct
  source 1..75: mol_type = other DNA
cagtacattcacaattacgacatattttcagcgtcatggggagttggtatatttgttactataatagtactgagc

SEQ ID NO: 701451 - DNA, 75 bp, synthetic construct
  source 1..75: mol_type = other DNA
tggtaactcccgtagccagcgtaccggaagaacgcggtatttttgcacggcgcagcggtgattttaaagcacgcc

SEQ ID NO: 701452 - DNA, 75 bp, synthetic construct
  source 1..75: mol_type = other DNA
acgccggatctggaactggcgcgtcgctttgcacaagctatccacgcgaaatatccgggcaaactgctggcttat

SEQ ID NO: 701453 - DNA, 75 bp, synthetic construct
  source 1..75: mol_type = other DNA
cagatacagggtattacctcattaacagtgcttttggtaatggaagtacgttggggtatctgcctctaaatttct

SEQ ID NO: 701454 - DNA, 75 bp, synthetic construct
  source 1..75: mol_type = other DNA
ttatactcactctctggatgtgtttgttcttcacattaacatcccgttattttgttatgctttctgatgcatgga

SEQ ID NO: 701455 - DNA, 75 bp, synthetic construct
  source 1..75: mol_type = other DNA
atgaatttattttttgacaaaaaagcactcgaaatcatcagagatattatcagggaaacaatgctgggtaatgta

SEQ ID NO: 701456 - DNA, 75 bp, synthetic construct
  source 1..75: mol_type = other DNA
tctctggctatgtctctttctcgcattagccattcgttattttattatgttttctgatgcatggagcaaccagta

SEQ ID NO: 701457 - DNA, 75 bp, synthetic construct
  source 1..75: mol_type = other DNA
attactgcccgccagacaaacgggagtccatgcccgattgtcacattaccactcgcactggcatgcaggttatcc

SEQ ID NO: 701458 - DNA, 75 bp, synthetic construct
  source 1..75: mol_type = other DNA
acgccgatgcctgattttataccgtccgcgttgtttaacgacctctgcctgccggagttacagattaacctgcta

SEQ ID NO: 701459 - DNA, 75 bp, synthetic construct
  source 1..75: mol_type = other DNA
ttgatgggctggagtcgcaggaggcggtactgctcacttggggtaacacacaaggttttttcactgagaccgagc

SEQ ID NO: 701460 - DNA, 75 bp, synthetic construct
  source 1..75: mol_type = other DNA
gcgatgatgctggtcagacgctgactaccgattgggtgcaatggaaccgtctggacgaagacgagcagtatcgcg

SEQ ID NO: 701461 - DNA, 75 bp, synthetic construct
  source 1..75: mol_type = other DNA
atggcttactctgttcaaaagtcgcgcctggcaaaggttgcgggtgtatcgcttgttctgttactcgcagcctgt

SEQ ID NO: 701462 - DNA, 75 bp, synthetic construct
  source 1..75: mol_type = other DNA
cgcgagcgatccaggcctggcatccggtgactataaactgcaggttggcgatttagataaccgcagcagcctaca

SEQ ID NO: 701463 - DNA, 75 bp, synthetic construct
  source 1..75: mol_type = other DNA
ttttgacccgcatgtcaccgttagcgccgcgcattgggcaatactggctgcaactgcccgccacgtttggtccac

SEQ ID NO: 701464 - DNA, 75 bp, synthetic construct
  source 1..75: mol_type = other DNA
aaacgctatccagtgcggtatcgtttagcgcgaaatcgttcaccagcaaccttatcagcgacattctggatagag

SEQ ID NO: 701465 - DNA, 75 bp, synthetic construct
  source 1..75: mol_type = other DNA
tgtgcgttcagacgaacaggctgaagcactgccggaagcgtatgaaccgattgaggttaacgaattcggtgaaat

SEQ ID NO: 701466 - DNA, 75 bp, synthetic construct
  source 1..75: mol_type = other DNA
ctgggaacacgtaaacggacgcatttagcctcaaatcttgcggaattccttaaccaacttaagcctcttctgtaa

SEQ ID NO: 701467 - DNA, 75 bp, synthetic construct
  source 1..75: mol_type = other DNA
ggtaatctcggtgtgtaatctctcaggcgaagtatgcaaagagacactgggaacgcgtaaacgggcgcatttagc

SEQ ID NO: 701468 - DNA, 75 bp, synthetic construct
  source 1..75: mol_type = other DNA
cgatgcctggcatgaacagtataaaagctggccgttaagtgaggagctgtatggcgttccttcgccatgcattat

SEQ ID NO: 701469 - DNA, 75 bp, synthetic construct
  source 1..75: mol_type = other DNA
ttgctacgtcaacagtatcccacagtgaaaggatttgaacgtaccttcccttcgctatgctttgcactggctacg

SEQ ID NO: 701470 - DNA, 75 bp, synthetic construct
  source 1..75: mol_type = other DNA
tgatggaatatactatcgatattcctagaatcgtggttttgccagaacgtgaagtcaattacgggtttaatgatt

SEQ ID NO: 701471 - DNA, 75 bp, synthetic construct
  source 1..75: mol_type = other DNA
gagcgatgattgcttggttatacttaaccggacgcagccgccattttttcgtgctagctccaaacctgaccatct

SEQ ID NO: 701472 - DNA, 75 bp, synthetic construct
  source 1..75: mol_type = other DNA
accaccacgccttatctttttttacatacgccagatattgcccaggcaccggaactggtacataccctttgggaa

SEQ ID NO: 701473 - DNA, 75 bp, synthetic construct
  source 1..75: mol_type = other DNA
tcgggttatctgacgcatcgcttaaccggcgagtttaaagataatatcgccaactattttggtcagtggccggtg

SEQ ID NO: 701474 - DNA, 75 bp, synthetic construct
  source 1..75: mol_type = other DNA
gacgatttatgggcatcattatgttttgccggtcacgatttgatgagccagtttgccgggaataaagaagatatt

SEQ ID NO: 701475 - DNA, 75 bp, synthetic construct
  source 1..75: mol_type = other DNA
tctcatccttacctcatgttccttatatccatgatgtaatgaactcggctaatcatcgttcatataaaaaatatt

SEQ ID NO: 701476 - DNA, 75 bp, synthetic construct
  source 1..75: mol_type = other DNA
ggcaaccttactacggcaaagcgtttactgctgccgaaacccacagtatcggtaaatctatccttgcgcaggcgg

SEQ ID NO: 701477 - DNA, 75 bp, synthetic construct
  source 1..75: mol_type = other DNA
acttgctgtgcggcaccggtcgcggcggggatgcgtcgccaacaggtgtcgatgggcggggcgctggcattctgg

SEQ ID NO: 701478 - DNA, 75 bp, synthetic construct
  source 1..75: mol_type = other DNA
ctggtcttatgtgaagaaatacttgaaacgactaagctggagatcactatagcagttatgaattatgaaactcta

SEQ ID NO: 701479 - DNA, 75 bp, synthetic construct
  source 1..75: mol_type = other DNA
agaggttttttctttagaaattatgagttctggatatcatgcgttgctagcaaagtctgtggccagtggtctatc

SEQ ID NO: 701480 - DNA, 75 bp, synthetic construct
  source 1..75: mol_type = other DNA
agacggcagcattatggatagcgccttatattgataatcaggatgtttatcatcagccatccagcgtgttctttg

SEQ ID NO: 701481 - DNA, 75 bp, synthetic construct
  source 1..75: mol_type = other DNA
gtgaaggttaacaaaaagaaactggcggaaatttttgagtgcgatgtcagaacaatcactggctggcaaagtcag

SEQ ID NO: 701482 - DNA, 75 bp, synthetic construct
  source 1..75: mol_type = other DNA
aataatagatgccaagatagaaaaaaatcaaataatgttcaaatttagaataattaataaaacatcagaagcact

SEQ ID NO: 701483 - DNA, 75 bp, synthetic construct
  source 1..75: mol_type = other DNA
atgtggaatttgttaatgataatggatatcttatggaaaaaccgaaagaaagggttgaagttcctgcaaattcag

SEQ ID NO: 701484 - DNA, 75 bp, synthetic construct
  source 1..75: mol_type = other DNA
gagtcaagaggtttatttcgtcgtgctgcaacggtgtggatggaggcattccgtgaaagccactcccagtcagaa

SEQ ID NO: 701485 - DNA, 75 bp, synthetic construct
  source 1..75: mol_type = other DNA
tggcaaccccagccgtttaccggagagcaaaatgtgaacgcggttgaacgagcttttgatattgtgatacagcct

SEQ ID NO: 701486 - DNA, 75 bp, synthetic construct
  source 1..75: mol_type = other DNA
ctacgaagaagcctcaccacaaccctgtgccatgactctacggccttttgaggctgtctggtggttacagaagta

SEQ ID NO: 701487 - DNA, 75 bp, synthetic construct
  source 1..75: mol_type = other DNA
ttctttcgatattctgactgctgtacataaacattactctgttgacgagtggcaagcgtttatcaacaattcttc

SEQ ID NO: 701488 - DNA, 75 bp, synthetic construct
  source 1..75: mol_type = other DNA
tcggtggtttgcgttccgcttgtacttacgttggggcttcacgtctgaaagagctgaccaagcgcaccacgttta

SEQ ID NO: 701489 - DNA, 75 bp, synthetic construct
  source 1..75: mol_type = other DNA
tggaaaaagtgggcatgaaagtgaccgacagtacccgctcacagggcagcatggccgtgacttataagcctctgt

SEQ ID NO: 701490 - DNA, 75 bp, synthetic construct
  source 1..75: mol_type = other DNA
acaacgaatggcagttaattaaaaacaataataccgcggcgtcactggcgttcagcggtacattgttgggttacg

SEQ ID NO: 701491 - DNA, 75 bp, synthetic construct
  source 1..75: mol_type = other DNA
cttttagcgcctattttattatcggcgtagctatggtgattatctttctttttatctattccaaaattactccgc

SEQ ID NO: 701492 - DNA, 75 bp, synthetic construct
  source 1..75: mol_type = other DNA
acgttcatgaagacaaggttgacgagtttatcgaagtttttcgccagaaccacctgggctctgtacaggaagaag

SEQ ID NO: 701493 - DNA, 75 bp, synthetic construct
  source 1..75: mol_type = other DNA
tgcatctggtggggcagccagcggatttgcataatgcacaactggtgattggtcaggaggtcgacacctcactgt

SEQ ID NO: 701494 - DNA, 75 bp, synthetic construct
  source 1..75: mol_type = other DNA
tcttacgccacggtgtatccattagtcatgtttctgcgcatcatcacaccacagttacttgcggtgcttttctgg

SEQ ID NO: 701495 - DNA, 75 bp, synthetic construct
  source 1..75: mol_type = other DNA
aagacgcagtggcgttccataaaaccccccccccactacaaaacctgtgtcgcgaaactggaatctttaatgacc

SEQ ID NO: 701496 - DNA, 75 bp, synthetic construct
  source 1..75: mol_type = other DNA
agccacgcaagcaccttaaaatcaccatcatacactaaatcagtaagttggcagcattacccattgttgggttac

SEQ ID NO: 701497 - DNA, 75 bp, synthetic construct
  source 1..75: mol_type = other DNA
cagccccggactgtatttcccggaatcgttataatgatgcagaagttactgaaattctgaaaccattatttcacg

SEQ ID NO: 701498 - DNA, 75 bp, synthetic construct
  source 1..75: mol_type = other DNA
gtttattgatccgaaaggtcatacactgacccaaagccagaacgacgcgctggtcgcggtcttccaggcagcgtt

SEQ ID NO: 701499 - DNA, 75 bp, synthetic construct
  source 1..75: mol_type = other DNA
ttgtttttctgttcgtgatgaccatctttaacagccgcttcgtccgccgcattggcgcgttaaatatgttccgct

SEQ ID NO: 701500 - DNA, 75 bp, synthetic construct
  source 1..75: mol_type = other DNA
ctgagtacttatattctgggctttgcgttggggcagttaatctacgggccgatggcagatagcttcgggcgtaag

SEQ ID NO: 701501 - DNA, 75 bp, synthetic construct
  source 1..75: mol_type = other DNA
gcgtcgtcagccatttcacattcgtaccactattggtaactttgcggcgctgttccgccataaacgtgtcctgag

SEQ ID NO: 701502 - DNA, 75 bp, synthetic construct
  source 1..75: mol_type = other DNA
ttcaaccaccgatgacgccgtatactggcaaccccagccgtttaccggtgaacaaaatgtaaacgcggttgaacg

SEQ ID NO: 701503 - DNA, 75 bp, synthetic construct
  source 1..75: mol_type = other DNA
ttatatgctggccagcggtttcagctttgccggaatgttctcgttcttaagcgccggaccgtttgtctacattga

SEQ ID NO: 701504 - DNA, 75 bp, synthetic construct
  source 1..75: mol_type = other DNA
attggcgcgttaaatatgttccgctcggggttgtggatacagtttattatggcagcgtggatggtcatcagtgcg

SEQ ID NO: 701505 - DNA, 75 bp, synthetic construct
  source 1..75: mol_type = other DNA
cctgtcagtgtttaaatgagtttgctgaagcttcggcaatcatgcaagtaattcgccaggctggtcaggatatga

SEQ ID NO: 701506 - DNA, 75 bp, synthetic construct
  source 1..75: mol_type = other DNA
atgaaattgtttaacgtcattgaagctgtacttaactgcctgtatctggcggccgggctgtgggactggctggag

SEQ ID NO: 701507 - DNA, 75 bp, synthetic construct
  source 1..75: mol_type = other DNA
gcgatgacgctggtcagacgctgactatcgattgggtgcaatggaatcgtctggatgaagacgagcagtatcgcg

SEQ ID NO: 701508 - DNA, 75 bp, synthetic construct
  source 1..75: mol_type = other DNA
ccggtggttcttggcggcacgctggtgtttgccgcggcggcagtggcatgcgcgttggcacaaaccatcgatcaa

SEQ ID NO: 701509 - DNA, 75 bp, synthetic construct
  source 1..75: mol_type = other DNA
attaacaatagctgtggtaacaatctcgcatggaataatttagagcagatcctaaatgacctcggcgggggcgct

SEQ ID NO: 701510 - DNA, 75 bp, synthetic construct
  source 1..75: mol_type = other DNA
tgaagcttcggcaatcatgcaagtaattcgccaggctggtcaggatatgatttgtagctcgggtgaaaccaaaaa

SEQ ID NO: 701511 - DNA, 75 bp, synthetic construct
  source 1..75: mol_type = other DNA
aaatcaatcggatccgctacgagctggaattaatggcagttactctggctgttgaaaacctcaccccgcaagacc

SEQ ID NO: 701512 - DNA, 75 bp, synthetic construct
  source 1..75: mol_type = other DNA
ttcacaactttgccgaagatattttacgtatcggctttaacggggccagcgtggccgaaaactcagatccggaaa

SEQ ID NO: 701513 - DNA, 75 bp, synthetic construct
  source 1..75: mol_type = other DNA
cgcccttgggaatccggagctgtatgcagcgatcgacgaatcagccgtcacaatcgtaaatgcaaaagggaaaga

SEQ ID NO: 701514 - DNA, 75 bp, synthetic construct
  source 1..75: mol_type = other DNA
ttatagaatgggggaattttattatgaataacgtcattactgtgcagcagaatgctccggataatgttattcata

SEQ ID NO: 701515 - DNA, 75 bp, synthetic construct
  source 1..75: mol_type = other DNA
cgctgcgatccgctatggcttctttatttacggtagtgcggatgaatatttcacctacgcgttactgttcctcgg

SEQ ID NO: 701516 - DNA, 75 bp, synthetic construct
  source 1..75: mol_type = other DNA
cggtgatgattgccattatcgccgtgctgttcatgatttttttccgcgaatccgacaacgaaattacggctatca

SEQ ID NO: 701517 - DNA, 75 bp, synthetic construct
  source 1..75: mol_type = other DNA
cccaggccgagggaatgctgcaaagttttaccgcagccctggctaaatcttatggcgtgcgcgacacctcaaaga

SEQ ID NO: 701518 - DNA, 75 bp, synthetic construct
  source 1..75: mol_type = other DNA
tggtaatgattacagtctggtcgagaccgactcatgcgccgcactcacctggcagttgctttctgtctgggcgaa

SEQ ID NO: 701519 - DNA, 75 bp, synthetic construct
  source 1..75: mol_type = other DNA
ttgcgccgtggaatatgacgcactctacggttcgtttgacaacattgaactggcaggactgccatcacctgaaca

SEQ ID NO: 701520 - DNA, 75 bp, synthetic construct
  source 1..75: mol_type = other DNA
tttctgaaagaaatttctatgctgtcggttaaccagattaaaggcgcggttgttgaagctggcgtttctaaactt

SEQ ID NO: 701521 - DNA, 75 bp, synthetic construct
  source 1..75: mol_type = other DNA
ttcgagtcatcctggtggcgtatgcagggctatgcgctggaaattcccgcgctgtacgccgcgatcgatgaagct

SEQ ID NO: 701522 - DNA, 75 bp, synthetic construct
  source 1..75: mol_type = other DNA
gttcttcactggcaaacagcgtgatgttgctaccggtggccgtgttgaccgcttcaacaagcgtttcaacatccc

SEQ ID NO: 701523 - DNA, 75 bp, synthetic construct
  source 1..75: mol_type = other DNA
tgtaggaaaaaaccggattgtcgtcagcgtcaaatcaaaagcaggtgcggggttgtatatcgaatcccgatcagg

SEQ ID NO: 701524 - DNA, 75 bp, synthetic construct
  source 1..75: mol_type = other DNA
aaaaacgagcagtggttgactatatttcaggtatgatggatacatttgcagtcaaggaatgggaaactcactgtc

SEQ ID NO: 701525 - DNA, 75 bp, synthetic construct
  source 1..75: mol_type = other DNA
aactcaatggacggaaataaacagggctgttgagtatggcaaaagtcagggtgttaaggtaactcaggtgaaata

SEQ ID NO: 701526 - DNA, 75 bp, synthetic construct
  source 1..75: mol_type = other DNA
ccatcaatgatctttaacagagatatacagctcgttattcctgctgacacaactaaaacacagtggacagaaata

SEQ ID NO: 701527 - DNA, 75 bp, synthetic construct
  source 1..75: mol_type = other DNA
atgatgatctgtacggcatcatccgtgcggctaaaaaaggcaaaaaaaccttcattttgcatgatggccctcctt

SEQ ID NO: 701528 - DNA, 75 bp, synthetic construct
  source 1..75: mol_type = other DNA
ccgtgctgctggcgtcacaaaacgccgatcatcttccgcgcgacgccgcagtggttcgtcagcatggatcagaaa

SEQ ID NO: 701529 - DNA, 75 bp, synthetic construct
  source 1..75: mol_type = other DNA
tttctggatatgactcgccgtatgtgcctggctgggactgtcatggtctgccaatcgaactgaaagtagagcaag

SEQ ID NO: 701530 - DNA, 75 bp, synthetic construct
  source 1..75: mol_type = other DNA
cggtagatgtgttgttccattctgtcgccaaacaggcggggcgtaatgcggttggggtgatcctgaccggtatgg

SEQ ID NO: 701531 - DNA, 75 bp, synthetic construct
  source 1..75: mol_type = other DNA
tggtttatttatctcatcccggcgctggtggcgtttgctctgccgccacgtaccggtacgacagcgtctcgctcc

SEQ ID NO: 701532 - DNA, 75 bp, synthetic construct
  source 1..75: mol_type = other DNA
acattacaggaatgagctttggctttcgcgcattatgcgaagagtggaatatcgcgcaaaaaccgtatctgcgca

SEQ ID NO: 701533 - DNA, 75 bp, synthetic construct
  source 1..75: mol_type = other DNA
ctgatgcccgtttaccaaagaactttaagacctttgattactatgatggtgctaccaaaactgctaccagtgtaa

SEQ ID NO: 701534 - DNA, 75 bp, synthetic construct
  source 1..75: mol_type = other DNA
ttatcgcgtttgtggaagatccggacggttacaaaattgagttaatcgaagagaaagacgccggtcgcggtctgg

SEQ ID NO: 701535 - DNA, 75 bp, synthetic construct
  source 1..75: mol_type = other DNA
acaggaactgtttgaaggtatcgtggcggtgatcgccgtggtgatccttacctggatggttttctggatgcgcaa

SEQ ID NO: 701536 - DNA, 75 bp, synthetic construct
  source 1..75: mol_type = other DNA
cagcttattggccgccagattgctggccgtaccgtgtacaccccgccgtttatgccggaggggcgccttatcgtc

SEQ ID NO: 701537 - DNA, 75 bp, synthetic construct
  source 1..75: mol_type = other DNA
atgtgttatctctggccgatttcttccgtaccgcctcaaccattggtgagcgtgatggtacgcaggtcgagatga

SEQ ID NO: 701538 - DNA, 75 bp, synthetic construct
  source 1..75: mol_type = other DNA
tacctgattgtgccgggttttctgcaaaacgtgctgggattatcgccaaaaaatgatatccgtttaatttcggcg

SEQ ID NO: 701539 - DNA, 75 bp, synthetic construct
  source 1..75: mol_type = other DNA
gttatgcgcctggacgcagggatcacacaggaagtattgaagctatatattgtgaaccgccccggaaatcctgga

SEQ ID NO: 701540 - DNA, 75 bp, synthetic construct
  source 1..75: mol_type = other DNA
ctggcggcaaacatcgccaatgccgatacccctggttatcaggcgcgcgatatagattttgccagcgaacttaaa

SEQ ID NO: 701541 - DNA, 75 bp, synthetic construct
  source 1..75: mol_type = other DNA
agagtcatgcaacgtggacgggatgaaacccgcgtggtcgctctgacgttgacttcgacgcagcacattccggcg

SEQ ID NO: 701542 - DNA, 75 bp, synthetic construct
  source 1..75: mol_type = other DNA
tggcaacagaaaagcctgaggttgttgccaaagcacagaaagcggccactgagatgttactgaacatccacttgg

SEQ ID NO: 701543 - DNA, 75 bp, synthetic construct
  source 1..75: mol_type = other DNA
ccgcgtctgtcgtggtgctatgtaccgcaccggatgaagcgacagcccaggatttagccgccaaagtgctggcgg

SEQ ID NO: 701544 - DNA, 75 bp, synthetic construct
  source 1..75: mol_type = other DNA
atggatgatttaaaaacaaatgccaacctcctaaaatactggaaccttacacgcggtggtaatcgtacatctctt

SEQ ID NO: 701545 - DNA, 75 bp, synthetic construct
  source 1..75: mol_type = other DNA
gatgcaaaggtgtccgactgggacgaagctcaagagctggttgtcgagcctttggtacaaggggaccgaaatgag

SEQ ID NO: 701546 - DNA, 75 bp, synthetic construct
  source 1..75: mol_type = other DNA
taacgcgctataactcccgctacagtgacagacctttcgcggaaaaacgcgatattgaagacggctttaagcata

SEQ ID NO: 701547 - DNA, 75 bp, synthetic construct
  source 1..75: mol_type = other DNA
atgcttgatgaaaaaagttcgaataccgcgtctgtcgtggtgctatgtacggcaccggatgaagcgacagcccag

SEQ ID NO: 701548 - DNA, 75 bp, synthetic construct
  source 1..75: mol_type = other DNA
gatttagccgccaaagtgctggcggaaaaactggcggcctgcgcgaccttgatccccggcgctacctctctctat

SEQ ID NO: 701549 - DNA, 75 bp, synthetic construct
  source 1..75: mol_type = other DNA
caaacatccttgaggagcttaaaaagcagaacgtaaaggcctcaaaaggtacaaagttgtttcaggggctgacgc

SEQ ID NO: 701550 - DNA, 75 bp, synthetic construct
  source 1..75: mol_type = other DNA
ggtgccgatctggtcgcagctgaacaataccgactgtatcaggcagcagaccgtccgactgaaaaaatcgcggcg

SEQ ID NO: 701551 - DNA, 75 bp, synthetic construct
  source 1..75: mol_type = other DNA
gatgtgggcgatcgcaaacagttcgaaaactcatactggcgttacgaggggtacgccctgggcgatccggattta

SEQ ID NO: 701552 - DNA, 75 bp, synthetic construct
  source 1..75: mol_type = other DNA
gggaaatcaagcgatcgtttcttttcgctgaccgagccacgcagtattgctctgcgtaaagccctgctggaaagc

SEQ ID NO: 701553 - DNA, 75 bp, synthetic construct
  source 1..75: mol_type = other DNA
catcggctggcacaaaatcgttaaagaccgttcatctgagcagattatttctgatgccgtcactatcggcgcgtc

SEQ ID NO: 701554 - DNA, 75 bp, synthetic construct
  source 1..75: mol_type = other DNA
gccgtcctgctgttatcccgccgtttatgccgggtaaacgtatggtcgtcacgccactttctaatttgcacatct

SEQ ID NO: 701555 - DNA, 75 bp, synthetic construct
  source 1..75: mol_type = other DNA
tacaacctggtccaggcgtttaccacacaggcttttgcgctggatatgctgcgtattggttttaacggtaagagc

SEQ ID NO: 701556 - DNA, 75 bp, synthetic construct
  source 1..75: mol_type = other DNA
aaataccccaatgaattccctcagtttgcgcctgacaacccacaaaactgtatcagaaatgttaattcgttttta

SEQ ID NO: 701557 - DNA, 75 bp, synthetic construct
  source 1..75: mol_type = other DNA
aggcgcaggcctgggtatttcagtaccgggggtatcaccgcgccgcagcggcggccatggtgaaggatatcccgg

SEQ ID NO: 701558 - DNA, 75 bp, synthetic construct
  source 1..75: mol_type = other DNA
ttgatgaactcagaactgtttacggtctgagaacaggagagttttttgaaatgctgattacagaaaaatatcttg

SEQ ID NO: 701559 - DNA, 75 bp, synthetic construct
  source 1..75: mol_type = other DNA
cgtttcgaaaacaactatctgcgcatggaaggttacgccgtggagcacgacgaaatttacgcggcctacgacaaa

SEQ ID NO: 701560 - DNA, 75 bp, synthetic construct
  source 1..75: mol_type = other DNA
ttgcgcctgacaacccacaaaattgtatcaggaatgttaatttatttttaaaggaaaagtattgtaatgtttcac

SEQ ID NO: 701561 - DNA, 75 bp, synthetic construct
  source 1..75: mol_type = other DNA
atccatcatcccataacgaacgaataaaagtaatcatttcatattttgattcctgccattctttaattaataaaa

SEQ ID NO: 701562 - DNA, 75 bp, synthetic construct
  source 1..75: mol_type = other DNA
gcgcgcgacgggagccagttactggatgtctggcgcgcagcgtgccgccagtcggggatcgtagcgttgctgttt

SEQ ID NO: 701563 - DNA, 75 bp, synthetic construct
  source 1..75: mol_type = other DNA
ttttgccgctggtgggagtctggtgttatctgctggatggcatgtttattggcgcaacgcgcgccgccgaaatgc

SEQ ID NO: 701564 - DNA, 75 bp, synthetic construct
  source 1..75: mol_type = other DNA
ttactcaccttcaccgcctatgcgttggatggctttgcctacgccgttgaagcgcattctggtcaggcgtatggc

SEQ ID NO: 701565 - DNA, 75 bp, synthetic construct
  source 1..75: mol_type = other DNA
tccggcgcagacaactgatcgacgccacgctggaagcaataaatgaagtgggcatgcacgatgcaacgatcgcgc

SEQ ID NO: 701566 - DNA, 75 bp, synthetic construct
  source 1..75: mol_type = other DNA
gatgtctggctggtgatggggctgcatatgaacgtgcagggcgctgcgctggcgacggttattgcggaatatgca

SEQ ID NO: 701567 - DNA, 75 bp, synthetic construct
  source 1..75: mol_type = other DNA
tgtggctggcgttaaccgtctttctggcgctgcgcgggctttctctggcggctatctggcgtcgtcactggcgca

SEQ ID NO: 701568 - DNA, 75 bp, synthetic construct
  source 1..75: mol_type = other DNA
tagctactgcggcaggctgctgaccaaatacgcccttaagctgtcgctgatgttttttgtgcgctccagcgagtt

SEQ ID NO: 701569 - DNA, 75 bp, synthetic construct
  source 1..75: mol_type = other DNA
gaaaaacggacagacgttcagccaggtcgccactaactggcatggcgagcataaacgctggtctgaacattacgc

SEQ ID NO: 701570 - DNA, 75 bp, synthetic construct
  source 1..75: mol_type = other DNA
tatgagcgacaacactgtgaataaggcgctacgcgtgatgggctatgacaccaaaaaagacgtctgtgggcatgg

SEQ ID NO: 701571 - DNA, 75 bp, synthetic construct
  source 1..75: mol_type = other DNA
ggtgtacctgggcggcgtggcggttggcgcaacggcgaccagctttctctttatgctgttgctgtttttgcgcat

SEQ ID NO: 701572 - DNA, 75 bp, synthetic construct
  source 1..75: mol_type = other DNA
gtgcgccagtaattttgttagtggtcggcaatatcctcaacattgtgctggatgtctggctggtgatggggctgc

SEQ ID NO: 701573 - DNA, 75 bp, synthetic construct
  source 1..75: mol_type = other DNA
ggaggatttgttattcacgttgcgcaaggtagagagtaaaggctttctggaaatcaccgcgcggctgaaaaacta

SEQ ID NO: 701574 - DNA, 75 bp, synthetic construct
  source 1..75: mol_type = other DNA
agtggtacagcacttacacctgtggagtttaaatatcttcagcttttagctggggaacatccagaatacgtcctg

SEQ ID NO: 701575 - DNA, 75 bp, synthetic construct
  source 1..75: mol_type = other DNA
cgcgctaccggcacgccagcgattcaggtgaacaccggtaaaggttgccatcttgacgcacagatgatcgccgac

SEQ ID NO: 701576 - DNA, 75 bp, synthetic construct
  source 1..75: mol_type = other DNA
aggtgaagacaaaccgctgaaatatccgcagatgtttgccgccgcctcgctgatgctgctcaacaaagttgacct

SEQ ID NO: 701577 - DNA, 75 bp, synthetic construct
  source 1..75: mol_type = other DNA
cgttggcaacctggtgtgcccggccagcttcgatctgggtgagaaacataaagtggcggtgctttccgttaccga

SEQ ID NO: 701578 - DNA, 75 bp, synthetic construct
  source 1..75: mol_type = other DNA
aaacatgttgcagcggtgagagatggattcgtttttacgtttccaattatcatggcaagttcattaattatatta

SEQ ID NO: 701579 - DNA, 75 bp, synthetic construct
  source 1..75: mol_type = other DNA
ggtataaaagacacgcatctgatttctgcccaacaagaaacgccaaagctttctgtcgtactcagtggtatcatt

SEQ ID NO: 701580 - DNA, 75 bp, synthetic construct
  source 1..75: mol_type = other DNA
aaccgtgaacgatgccgcacgcattcgcgctaccggcacgccagcgattcaggtgaacaccggtaaaggctgcca

SEQ ID NO: 701581 - DNA, 75 bp, synthetic construct
  source 1..75: mol_type = other DNA
gataatggatttatttctgaagatggcacacataaagagcttatctccaaaaaagacagtttatatgcatattta

SEQ ID NO: 701582 - DNA, 75 bp, synthetic construct
  source 1..75: mol_type = other DNA
aataatgaaaaatatgtcaagaatatgtaagaacagaaccgtaattattattgcacacaggttgtcaactgtaaa

SEQ ID NO: 701583 - DNA, 75 bp, synthetic construct
  source 1..75: mol_type = other DNA
atgctaactgaaaacacaccagaaaacattaagcgtctgcggaaaaaaattggcctgacacagaaagaatgtgcc

SEQ ID NO: 701584 - DNA, 75 bp, synthetic construct
  source 1..75: mol_type = other DNA
aagtcaatccagaaattgaaatcatccttatttccgccaccagcggtgaagggatggaccagtggctgaactggc

SEQ ID NO: 701585 - DNA, 75 bp, synthetic construct
  source 1..75: mol_type = other DNA
gctgccgtatctcaatttcgacgttgagaaatgcatcgcctgcgcccgcgaagtcaatccagaaattgaaatcat

SEQ ID NO: 701586 - DNA, 75 bp, synthetic construct
  source 1..75: mol_type = other DNA
tattcttctgacggtaatgttattttgaataatattaatttatacatatcaaagggggatgttatcggtatagtt

SEQ ID NO: 701587 - DNA, 75 bp, synthetic construct
  source 1..75: mol_type = other DNA
acgctttgcccgctggagtgaaatcgactggcagcaaaagctgtgggtgatcccggaagaacgcgagcagatcga

SEQ ID NO: 701588 - DNA, 75 bp, synthetic construct
  source 1..75: mol_type = other DNA
gcctctattgtaattaataattctttgacattttttaaattgcacacaaaagttgaggggagtgggaagtatctt

SEQ ID NO: 701589 - DNA, 75 bp, synthetic construct
  source 1..75: mol_type = other DNA
tgaatggcatatggctcgtgcacgtaaccatattcatgttctggaagagaacatgtcgctgttgatggaacaggc

SEQ ID NO: 701590 - DNA, 75 bp, synthetic construct
  source 1..75: mol_type = other DNA
aaaaatcctgagttttttatccgcaatgcgcgcgcagtagaagcgatacgtgtgccgcatccggtacgcggcacc

SEQ ID NO: 701591 - DNA, 75 bp, synthetic construct
  source 1..75: mol_type = other DNA
gaaagagggcttaccctctcaccagaaaagacacgaatcacacacatcagtgatggattcgactttctgggtatg

SEQ ID NO: 701592 - DNA, 75 bp, synthetic construct
  source 1..75: mol_type = other DNA
ggcctgttattgcaagggcagtggctggatgcctccattcaactcactggtgcgctgggcggggggtacaaacgc

SEQ ID NO: 701593 - DNA, 75 bp, synthetic construct
  source 1..75: mol_type = other DNA
aatggcaaggactacaatgttgaagttgcagatctttataaaaatggagagattattgctgtaaagatatcagat

SEQ ID NO: 701594 - DNA, 75 bp, synthetic construct
  source 1..75: mol_type = other DNA
tcaaaaccgaagccaacatcatccgtgcgctgggcaaaattatcggcaacggccatctgcacaaaggtgctaaac

SEQ ID NO: 701595 - DNA, 75 bp, synthetic construct
  source 1..75: mol_type = other DNA
gcgtacctggggcgtaccgatgtcactgttcgtgcacaaagacactgaagagctgcatccgcgtactctcgaact

SEQ ID NO: 701596 - DNA, 75 bp, synthetic construct
  source 1..75: mol_type = other DNA
ttctgcgctggcggaagcggaagttgagtattacgacaaaacttctccgtccatcgacgttgctttccaggcagt

SEQ ID NO: 701597 - DNA, 75 bp, synthetic construct
  source 1..75: mol_type = other DNA
ggttacctgccgggcgaacgtgaaaaatacgtctttaccggtgagtggtacgaaggtctgtttggtctggctgac

SEQ ID NO: 701598 - DNA, 75 bp, synthetic construct
  source 1..75: mol_type = other DNA
cacgcttcctgctggcaaacctcaatggtttcgatccggcaaaagatatggtgaaaccggaagagatggtggtac

SEQ ID NO: 701599 - DNA, 75 bp, synthetic construct
  source 1..75: mol_type = other DNA
gtatcggcgttaccgaatacaccatcctcggcacggtgaaaggtgcggagctggaactgctgcgctttacccatc

SEQ ID NO: 701600 - DNA, 75 bp, synthetic construct
  source 1..75: mol_type = other DNA
agtgtcgcgcaacgtcaaagtgcaactggagcaggcagtcgatagcgcattgcagcgtggaaatcatcatggctg

SEQ ID NO: 701601 - DNA, 75 bp, synthetic construct
  source 1..75: mol_type = other DNA
aacgatggagagattattcactatcgtggtgctgagccgctcggattatatgcagtcattactggctccgttaaa

SEQ ID NO: 701602 - DNA, 75 bp, synthetic construct
  source 1..75: mol_type = other DNA
atggaattgcagtacatgttgatcgtcgtaatgacagtgtaaatattgaaaatggtgcaataattgttaattgta

SEQ ID NO: 701603 - DNA, 75 bp, synthetic construct
  source 1..75: mol_type = other DNA
agcaggagagatattcaggtgcacatataatacaaagaatcacggtatttcattcggggaggggtgtatctatct

SEQ ID NO: 701604 - DNA, 75 bp, synthetic construct
  source 1..75: mol_type = other DNA
ttatgagtaccgtgatgtcagggctttctgcgaaggcacgagaggggcactccatcgaacaactctgtgcaacag

SEQ ID NO: 701605 - DNA, 75 bp, synthetic construct
  source 1..75: mol_type = other DNA
ccgagtctctacgcggcttttggcagtaaggctgggttatttagccgtgtactcaatgaatatgtcggtacggaa

SEQ ID NO: 701606 - DNA, 75 bp, synthetic construct
  source 1..75: mol_type = other DNA
cgaaatgcctttacgatgttacatgactgtcacgaacggtgcaatagtgatccacacccaacgcctgaaatcaga

SEQ ID NO: 701607 - DNA, 75 bp, synthetic construct
  source 1..75: mol_type = other DNA
tgccaacctgaatgtctgggggaatgtgggcgttcaggttgccgataggggatataatgacacctctgcaatggt

SEQ ID NO: 701608 - DNA, 75 bp, synthetic construct
  source 1..75: mol_type = other DNA
tcggttttgacccgcataccatgcaagtggtctcaacagatttcgatgaacaggcccgtcaggcgtttaaaaatt

SEQ ID NO: 701609 - DNA, 75 bp, synthetic construct
  source 1..75: mol_type = other DNA
cgttttatgcgtgataatgtagaagatattaatatctataatttatcagatgatacagctatttcttacgatgta

SEQ ID NO: 701610 - DNA, 75 bp, synthetic construct
  source 1..75: mol_type = other DNA
cggaaatgatgagagccgttcagattagaagtgagcttggagggtatgccacttccaatctatctggtgcataca

SEQ ID NO: 701611 - DNA, 75 bp, synthetic construct
  source 1..75: mol_type = other DNA
cctggatggttttctggatgcgcaaagtgtcgcgcaacgtcaaagtacaactggagcaggcagtcgatagcgcat

SEQ ID NO: 701612 - DNA, 75 bp, synthetic construct
  source 1..75: mol_type = other DNA
agaaaaccatcagtcaggtgctccatttatcatgggatttggctcttctggaactatcagtcaggacggttatcc

SEQ ID NO: 701613 - DNA, 75 bp, synthetic construct
  source 1..75: mol_type = other DNA
gcgattttgcgccaacagttttcgtccgttgtctcacggctggagacgttgaaccaaacctatatgcaacagata

SEQ ID NO: 701614 - DNA, 75 bp, synthetic construct
  source 1..75: mol_type = other DNA
ggagaagtaagccactgtaaggtaaagcaacaccttcgtcagctttggattatctataagtgtgtataccgctaa

SEQ ID NO: 701615 - DNA, 75 bp, synthetic construct
  source 1..75: mol_type = other DNA
aagaaatcggatttatggagaggtaagacactgtaaggtaaaacaacaccttcgtcagctttggattatctataa

SEQ ID NO: 701616 - DNA, 75 bp, synthetic construct
  source 1..75: mol_type = other DNA
aaagtccaacattctacgtcagaaaatacttgtaaataaaattactcaacttgagaagaatcttgatcaactgaa

SEQ ID NO: 701617 - DNA, 75 bp, synthetic construct
  source 1..75: mol_type = other DNA
attacctggtgccattcaggatattgaagccttattagcaagacatcagggagaacttgcgctgctgacacagga

SEQ ID NO: 701618 - DNA, 75 bp, synthetic construct
  source 1..75: mol_type = other DNA
tctccgccagcatctgacggcgcaaaattttatggaggtgaacgtacaggtttcctccgaagggcagtcgcagca

SEQ ID NO: 701619 - DNA, 75 bp, synthetic construct
  source 1..75: mol_type = other DNA
agattctttccaccaatggacgcatgcatgaggttcttctcgtgcgtgatatgaagctttttgctggtaacgcca

SEQ ID NO: 701620 - DNA, 75 bp, synthetic construct
  source 1..75: mol_type = other DNA
cggtgactggaatcagggtgcaaggggcaaaattacccaatgcgtttgttccaccgaaaagtgacgtaacagtgt

SEQ ID NO: 701621 - DNA, 75 bp, synthetic construct
  source 1..75: mol_type = other DNA
ccttcgcgcctcctttgccgcgcccgcgaccggaacagtgacggtcagtctggggcgttatcagggattaatacc

SEQ ID NO: 701622 - DNA, 75 bp, synthetic construct
  source 1..75: mol_type = other DNA
tcccgtcaatggagagaatgtggatttaagtaagctcacctcagcacggctggcaacgttgtgtgaggcagaaga

SEQ ID NO: 701623 - DNA, 75 bp, synthetic construct
  source 1..75: mol_type = other DNA
actgctggggtttccggatgtctgggttcgtcatgaagagcttgatgatgttctgaaaaagcaacaacagaatga

SEQ ID NO: 701624 - DNA, 75 bp, synthetic construct
  source 1..75: mol_type = other DNA
agtgtagtgaacttttttagaggggcttacagtgcgactccaccagatttacgtcctgtagtgaaaaaaattcag

SEQ ID NO: 701625 - DNA, 75 bp, synthetic construct
  source 1..75: mol_type = other DNA
actcttagagatatcgcactcatcaaaattgataagatctgccaacgttttgaacaggcatctgatcagatgtat

SEQ ID NO: 701626 - DNA, 75 bp, synthetic construct
  source 1..75: mol_type = other DNA
atctgtgggccggaaggctgcaaaaaatgggctgcccgagggaaaaaattgccgtatcgcgcatgggcgtggaca

SEQ ID NO: 701627 - DNA, 75 bp, synthetic construct
  source 1..75: mol_type = other DNA
aaaaagcctttgccggggtggtcaatcgcattctcgacgaagggtatcaggtgattgcgctctccacctgtacgg

SEQ ID NO: 701628 - DNA, 75 bp, synthetic construct
  source 1..75: mol_type = other DNA
ttcatcgtaaaaatacctggcaggcgctcaacctcaaacgctatggtgctgagtcgcgaaacctgattttgtctg

SEQ ID NO: 701629 - DNA, 75 bp, synthetic construct
  source 1..75: mol_type = other DNA
caggatgagcaatttaaccaactggcgaactatgtctttggtcactgcgacgcgctgatcctgcgcgaatcggtc

SEQ ID NO: 701630 - DNA, 75 bp, synthetic construct
  source 1..75: mol_type = other DNA
actggcaccgttcgacaaacgtctcggcaccactcaacaagcgtatgaaaaagcctttgccggggtggtcaatcg

SEQ ID NO: 701631 - DNA, 75 bp, synthetic construct
  source 1..75: mol_type = other DNA
gccgtcagtcgtgagcgtcagacaggaatgcagatggtgcagtctgtgcttgagcgcatcggggaggcgaaatga

SEQ ID NO: 701632 - DNA, 75 bp, synthetic construct
  source 1..75: mol_type = other DNA
attacacccgtcagaaaatacagatattttataaatacattcctgcaatcgaaatggtttaagtcttatataaac

SEQ ID NO: 701633 - DNA, 75 bp, synthetic construct
  source 1..75: mol_type = other DNA
gcatgccattgaaagtgagctcatccttatcaatacagcgtcacaatcctcacctgtattttctgagtcgatgca

SEQ ID NO: 701634 - DNA, 75 bp, synthetic construct
  source 1..75: mol_type = other DNA
atgtgacaagtctggtgcaagggatatagatgcaatacttaacagaacggttcttcctgtccttgctagatgttt

SEQ ID NO: 701635 - DNA, 75 bp, synthetic construct
  source 1..75: mol_type = other DNA
gctgtcagtcgtgagcgttatacaggaatgcagatggtgcaatctgtgcttgaacgcatcggggaggtgaaatga

SEQ ID NO: 701636 - DNA, 75 bp, synthetic construct
  source 1..75: mol_type = other DNA
atgaaattactgattctgggcaaccacacttgcggcaaccgcggcgacagcgccatcctgcgcggcttacttgat

SEQ ID NO: 701637 - DNA, 75 bp, synthetic construct
  source 1..75: mol_type = other DNA
catttattagacggcagcctgcaagcgatggttgcggataccttaggccagcttccggagctgaatacacgactt

SEQ ID NO: 701638 - DNA, 75 bp, synthetic construct
  source 1..75: mol_type = other DNA
ctggtgctgctgcgcgtttatctgggctggcgctgtcaggcccgtctgcaactgacgctgcccgtcagcctgttg

SEQ ID NO: 701639 - DNA, 75 bp, synthetic construct
  source 1..75: mol_type = other DNA
cgaacctgaaaaaacgaatgccagtgctgctgagaaccaaaaagctgctgaagatgacgatatcatccgtctggt

SEQ ID NO: 701640 - DNA, 75 bp, synthetic construct
  source 1..75: mol_type = other DNA
ttctttgggttttatactgaccattcactattctaaaaaagttaggaaatatattctgactgaacaaaaaaatgc

SEQ ID NO: 701641 - DNA, 75 bp, synthetic construct
  source 1..75: mol_type = other DNA
ctttgctatcattgccactgattggcatggcaaaggactctggttatggcaataccgaatggggtatgaccccaa

SEQ ID NO: 701642 - DNA, 75 bp, synthetic construct
  source 1..75: mol_type = other DNA
cgaaccagagaaagcagacaagaagacgataaaagacttagagtcaaaatcggttgaagacgaagatattattcg

SEQ ID NO: 701643 - DNA, 75 bp, synthetic construct
  source 1..75: mol_type = other DNA
cgaaccagagaaagcagacaaaaagacgatgaaagacttagagtcaaaatcggttgaagacgaagatattattcg

SEQ ID NO: 701644 - DNA, 75 bp, synthetic construct
  source 1..75: mol_type = other DNA
cgaaccagagaaagcagacaaaaagacgattaaagactgagagtcaaaatcggttgaagacgaagatattattcg

SEQ ID NO: 701645 - DNA, 75 bp, synthetic construct
  source 1..75: mol_type = other DNA
tcccggcgttaaggcgctgacggatattagttttgactgctatgccggtcaggttcatgcgttgatgggtgaaaa

SEQ ID NO: 701646 - DNA, 75 bp, synthetic construct
  source 1..75: mol_type = other DNA
gggtttggcttgttaatgaaaacgaaagggattcgaatagaaccccttgaaaattactttgcaacaaaaagcatt

SEQ ID NO: 701647 - DNA, 75 bp, synthetic construct
  source 1..75: mol_type = other DNA
caacaaaatatcaattatcattaatttattcacaggtgaggtagagtgcgtgcgccggacacggataagaatccg

SEQ ID NO: 701648 - DNA, 75 bp, synthetic construct
  source 1..75: mol_type = other DNA
tggcgccgggaaatcaacgctcttaaaaattctgagcggtaattacgcgccaaccacgggttctgtggtgattaa

SEQ ID NO: 701649 - DNA, 75 bp, synthetic construct
  source 1..75: mol_type = other DNA
tggcaaccacgagcttatggtgaagagcgtctgcgactggatgcagtaaaagcgcccggcgtgcgtacgccagtt

SEQ ID NO: 701650 - DNA, 75 bp, synthetic construct
  source 1..75: mol_type = other DNA
tcagcgatgccatcaccgtctttaaagacgggcgttatgtcaaaacctttaccgatatgcagcaggttaaccacg

SEQ ID NO: 701651 - DNA, 75 bp, synthetic construct
  source 1..75: mol_type = other DNA
cgaaccagagaaagcagacaagaagacgattaaagactaagagtcaaaatcggttgaagacgaagatattattcg

SEQ ID NO: 701652 - DNA, 75 bp, synthetic construct
  source 1..75: mol_type = other DNA
ctgcccatgttcagccggtatttgccgtgctcgatccggtttatacctacaccctgccgccgcgtcaggtggcta

SEQ ID NO: 701653 - DNA, 75 bp, synthetic construct
  source 1..75: mol_type = other DNA
atcggacgtgagctggggctggttgacgatgaacgttgggcgcgctttaacgagaaactcgaaaatatcgagcgt

SEQ ID NO: 701654 - DNA, 75 bp, synthetic construct
  source 1..75: mol_type = other DNA
tactgtccgtcgatcgaagacaaagtcatgcgcttcgccgacagaaatcagcatcagatcttccttgaaccggaa

SEQ ID NO: 701655 - DNA, 75 bp, synthetic construct
  source 1..75: mol_type = other DNA
aatggattttagataaatgtacctgtattatagttacaagtcctgtttatgggcagtcttctccaactttgcaac

SEQ ID NO: 701656 - DNA, 75 bp, synthetic construct
  source 1..75: mol_type = other DNA
aactggaagagcacggtatgacccaactgggtgaaaatcatgacattacgctggatgtcagccgccgcatatacg

SEQ ID NO: 701657 - DNA, 75 bp, synthetic construct
  source 1..75: mol_type = other DNA
cggttcagaatccaacgcaggcgcggtgatctcccgtaaaaccacaggcgacaagcaggcgttccattctgccca

SEQ ID NO: 701658 - DNA, 75 bp, synthetic construct
  source 1..75: mol_type = other DNA
ggcgcaaatataactacccggcgtcgtttgaagcaggtgcagtggatgacatttcccgttgcctgctgggactca

SEQ ID NO: 701659 - DNA, 75 bp, synthetic construct
  source 1..75: mol_type = other DNA
acttagacggcaccttattgaccccgaaaaagaccctgcttccctcatctatagaagcactggctcgcgctcgcg

SEQ ID NO: 701660 - DNA, 75 bp, synthetic construct
  source 1..75: mol_type = other DNA
catttttgcagcatcagaaaatgtcagcgtatgattcaatgagaaaaaataatcttttcatacaaaattttgttg

SEQ ID NO: 701661 - DNA, 75 bp, synthetic construct
  source 1..75: mol_type = other DNA
ctatcgacttcagcgtgctggcgcaacagcatggcgataacccaatgccggtattctcgtttatgggtaatgcgt

SEQ ID NO: 701662 - DNA, 75 bp, synthetic construct
  source 1..75: mol_type = other DNA
ggcgatccgccgtccattccgctctctcgtcgtttacgcgaattgccgctgcgcgttggtcgtctgaaaaccggt

SEQ ID NO: 701663 - DNA, 75 bp, synthetic construct
  source 1..75: mol_type = other DNA
tcgcgctacccgagctcaggcggatcgtgtgctctaccgtcaggcggtacgtacggcgctggagaaccaaccgaa

SEQ ID NO: 701664 - DNA, 75 bp, synthetic construct
  source 1..75: mol_type = other DNA
gacgttagcattgttgaccagtgccagaaaaccgctgatgtagttcgggcgctgctggatgagctggaaagaaac

SEQ ID NO: 701665 - DNA, 75 bp, synthetic construct
  source 1..75: mol_type = other DNA
gcacgatgttcacccattagggccgcagtcggcgaaaattttttgtgagtttcaccggagtatcgtgaacagatg

SEQ ID NO: 701666 - DNA, 75 bp, synthetic construct
  source 1..75: mol_type = other DNA
aaccttgccgggcactccgctgaaattgagcagctgactaagatcgagccgggcgagctgtataacggcaccaaa

SEQ ID NO: 701667 - DNA, 75 bp, synthetic construct
  source 1..75: mol_type = other DNA
acgctgcacgcctttttgcattattcacggatgatgaaaaccgccgacgaggctcttcgcgacggcgctcagttc

SEQ ID NO: 701668 - DNA, 75 bp, synthetic construct
  source 1..75: mol_type = other DNA
aaaatatgggcaggtggaaacacgtctcttttgtccgcagccagatagcccggcgacgctattttatttgcatgg

SEQ ID NO: 701669 - DNA, 75 bp, synthetic construct
  source 1..75: mol_type = other DNA
cgcctttttgcattattcacggatgatgaaaaccgccaacgatgctctacgcgacggcgctcgattctttagcaa

SEQ ID NO: 701670 - DNA, 75 bp, synthetic construct
  source 1..75: mol_type = other DNA
acttacaggcacaggagagcgaacgaaaacaggcggtccaaaaacgaatcgagggaaaaaaacaacgacgagaac

SEQ ID NO: 701671 - DNA, 75 bp, synthetic construct
  source 1..75: mol_type = other DNA
ctactgatcgaagcaggactggtagacacaaaaacaggcgagctatgctataaaaaagacaggatattacaggca

SEQ ID NO: 701672 - DNA, 75 bp, synthetic construct
  source 1..75: mol_type = other DNA
ccatgattcttttgttccgttgcctttacctggctgaaaccacacccggaaagattctggtgttgtgctacaaca

SEQ ID NO: 701673 - DNA, 75 bp, synthetic construct
  source 1..75: mol_type = other DNA
tcaggacggagcgaaagacctgtgtaaatcggatgatgctgtaggcggtaacgccatggcagttgccagcctcga

SEQ ID NO: 701674 - DNA, 75 bp, synthetic construct
  source 1..75: mol_type = other DNA
tgtcaacctgaccggtaaagtgaccattccgggatcggataacgaatactacaaagtgacgttagacacggcgac

SEQ ID NO: 701675 - DNA, 75 bp, synthetic construct
  source 1..75: mol_type = other DNA
ttattgacctgatcgacaacgaagccggactcacagaacaggaacgcaaacttctccacgtactggcaacagcgg

SEQ ID NO: 701676 - DNA, 75 bp, synthetic construct
  source 1..75: mol_type = other DNA
ttctggaccttatttctgctgaaatgaagaccgttgtgaatactcttcagccggatttaccgccctggcccgcaa

SEQ ID NO: 701677 - DNA, 75 bp, synthetic construct
  source 1..75: mol_type = other DNA
ttcaaatttctggccggaccagtaaccgtgctggcactgctggatgaacgggaaagaaaccagcaatacataaaa

SEQ ID NO: 701678 - DNA, 75 bp, synthetic construct
  source 1..75: mol_type = other DNA
tggctgacagcgattgagatgtacaaaccaactgtgcgcatcgtggaagttaatgtgccacgcgtcgctggcatt

SEQ ID NO: 701679 - DNA, 75 bp, synthetic construct
  source 1..75: mol_type = other DNA
agcaacacacgggccgcagctgatatctacttccaactggtcgaggaatgcgaaattcctgctggcggatctctg

SEQ ID NO: 701680 - DNA, 75 bp, synthetic construct
  source 1..75: mol_type = other DNA
gtgagcaagattgactatcaggcactgcgtgaggcggcagagaaagcaacgtgtggcgagtggtcgctcgaatat

SEQ ID NO: 701681 - DNA, 75 bp, synthetic construct
  source 1..75: mol_type = other DNA
gctgactggctgacagcgattgagatgtacaaaccaacagtgcgcatcgtggaagttaatgtgccacgcgccgca

SEQ ID NO: 701682 - DNA, 75 bp, synthetic construct
  source 1..75: mol_type = other DNA
gagaacgaggatattgcgcttacggttgggaagctgcgcgttgagcttgaagcagcaaaatcaaaactcaacgag

SEQ ID NO: 701683 - DNA, 75 bp, synthetic construct
  source 1..75: mol_type = other DNA
gaaatagaaattgcgatgaaagctattggcgtgccggttcaatggactaatggcgatgcagaaaagcatatgacc

SEQ ID NO: 701684 - DNA, 75 bp, synthetic construct
  source 1..75: mol_type = other DNA
acacaaatatcgatgctatgtgccgaattgcagaggtggaggcgcgggaaataaaaccagccaaaggcgaagttc

SEQ ID NO: 701685 - DNA, 75 bp, synthetic construct
  source 1..75: mol_type = other DNA
aaatgcagatgagcgacaagtcatgatacctaaagaaaatggcagttggctttacctgattgacctagaacacgc

SEQ ID NO: 701686 - DNA, 75 bp, synthetic construct
  source 1..75: mol_type = other DNA
tgtcgttgtctctggttttactggttgcgggaaaagcgccattgccggggaaatagaaattgcgatgaaagctat

SEQ ID NO: 701687 - DNA, 75 bp, synthetic construct
  source 1..75: mol_type = other DNA
ttcaaatttctggccggaccagaaaccgtgctggcactgctggatgaactggaaagaaaccagcaatacatcaaa

SEQ ID NO: 701688 - DNA, 75 bp, synthetic construct
  source 1..75: mol_type = other DNA
tgcgtaaagcagcgcaactggcaacacaaggtgaatgggttgcatttatttcgacgggtactggtacgtatgcgg

SEQ ID NO: 701689 - DNA, 75 bp, synthetic construct
  source 1..75: mol_type = other DNA
gccttgtctggtacgatatcccggtgggacggaaaaaccggcatccggattttgtcattattgacccggagaacg

SEQ ID NO: 701690 - DNA, 75 bp, synthetic construct
  source 1..75: mol_type = other DNA
ataaatgcttcagtgcactggaagaggccgtgaacagcggaaaaatcacccgaaccggatatgatgctgtactgg

SEQ ID NO: 701691 - DNA, 75 bp, synthetic construct
  source 1..75: mol_type = other DNA
tgcgccaggtaaatcaggagcaggtcacgctggaaaccgacggtcttctgaaatcagaaatcaatccgctggtac

SEQ ID NO: 701692 - DNA, 75 bp, synthetic construct
  source 1..75: mol_type = other DNA
aggctatccgcgcagtagcgctgggcgttgtggtgactgcgttagtacaagccgttcttggtgggatcggtctgg

SEQ ID NO: 701693 - DNA, 75 bp, synthetic construct
  source 1..75: mol_type = other DNA
ggcggcgctctcttacgccactgtctatccgttagtgatgttcctgcgcattatcaccccccaattactggcggt

SEQ ID NO: 701694 - DNA, 75 bp, synthetic construct
  source 1..75: mol_type = other DNA
gattctggtgttgtgctacaacattaccctggccagctatctgcgggaatgcattgaagccagagggttggcgtc

SEQ ID NO: 701695 - DNA, 75 bp, synthetic construct
  source 1..75: mol_type = other DNA
ttcgcttgccagtgtggggattcaggcgcagggacgtacttccgtcctgccggtaaattaccgtaatacgaaacg

SEQ ID NO: 701696 - DNA, 75 bp, synthetic construct
  source 1..75: mol_type = other DNA
tgatgaggtcatggcgtaccggtttggcattattgctgagtcactgagtcctcactggattattgaaaatctccg

SEQ ID NO: 701697 - DNA, 75 bp, synthetic construct
  source 1..75: mol_type = other DNA
atgggaaatctagatgttgtatctgcggtagatttttacttagaaaaagcattttatatatttggattcataatg

SEQ ID NO: 701698 - DNA, 75 bp, synthetic construct
  source 1..75: mol_type = other DNA
ttcccagcgaattccatgtaaaagatacgtgggaaaactataaaatcgcagcaagtttcatatcaagacgctatc

SEQ ID NO: 701699 - DNA, 75 bp, synthetic construct
  source 1..75: mol_type = other DNA
tggcacaaggcattcgccattttgcaacccgtctggcaggcgttcgtggagatgccgccgtgctgctggcggcac

SEQ ID NO: 701700 - DNA, 75 bp, synthetic construct
  source 1..75: mol_type = other DNA
actggcgcggtgaacaggtggcacaaggcattcgccattttgcaacccgtctggcaggcgttcgcggagatgccg

SEQ ID NO: 701701 - DNA, 75 bp, synthetic construct
  source 1..75: mol_type = other DNA
tttgctcacggtgttaatgatcctctcctgccttgtccaacttggcccgctgccggtgctgattccggcgatcat

SEQ ID NO: 701702 - DNA, 75 bp, synthetic construct
  source 1..75: mol_type = other DNA
agggaaggcaagaagacatactcgcgacgtaaggatgtggtgcatttactgacgtaccagagcagcaaggggctg

SEQ ID NO: 701703 - DNA, 75 bp, synthetic construct
  source 1..75: mol_type = other DNA
cgactcaatctttccgctgaaaggaaaatccaggagccttatgtctgtattgccgtgcagtctaccgcacaggca

SEQ ID NO: 701704 - DNA, 75 bp, synthetic construct
  source 1..75: mol_type = other DNA
agtggcatgttaatatcattgatgatgattcaggaaatattttattttcatgcgatacgtccggagggtgggtaa

SEQ ID NO: 701705 - DNA, 75 bp, synthetic construct
  source 1..75: mol_type = other DNA
atgaatctgaagggtaagcatgttttaatatcatttccaacaggaacgctgggagatattattgcatggtttcac

SEQ ID NO: 701706 - DNA, 75 bp, synthetic construct
  source 1..75: mol_type = other DNA
acaaaatgacggccggtataagggacggctgaatctggcatgggcgtatggtgtggtgtttacccgcatgacccg

SEQ ID NO: 701707 - DNA, 75 bp, synthetic construct
  source 1..75: mol_type = other DNA
gtctggaatcacatcccgaacggcgcggaggatttcactggcgcgctgccgctacagcaacgggtggatttgctt

SEQ ID NO: 701708 - DNA, 75 bp, synthetic construct
  source 1..75: mol_type = other DNA
ccggcttattacagggaaacaggtatgtggtgtgattagaacgcttcattcatatttaaccaatcatgacaggat

SEQ ID NO: 701709 - DNA, 75 bp, synthetic construct
  source 1..75: mol_type = other DNA
atgaagtgacgccagcagagtttgatgccctgctgcttccaggtggccattcaccagattatctgcgtggtgata

SEQ ID NO: 701710 - DNA, 75 bp, synthetic construct
  source 1..75: mol_type = other DNA
cagctggttaccagccggacaccggacgatctgccagcgtttaaccgcgaggcgttacgcctgctcggtgcctga

SEQ ID NO: 701711 - DNA, 75 bp, synthetic construct
  source 1..75: mol_type = other DNA
ccgaaacgcattctgcactttgcttatgcattctcccgcgagtattttgaaaaacatcagaaccgtgaaatacca

SEQ ID NO: 701712 - DNA, 75 bp, synthetic construct
  source 1..75: mol_type = other DNA
tggaataatggtctagggtgggctgaagtggtcagatacttaaaggaacttgggtatcgggttttgtgtattgac

SEQ ID NO: 701713 - DNA, 75 bp, synthetic construct
  source 1..75: mol_type = other DNA
ccattgaaaagcaagcgggtaaaacggtgaaaggaaaaaaaggggaagccagcgtgactatcgataaatccatcg

SEQ ID NO: 701714 - DNA, 75 bp, synthetic construct
  source 1..75: mol_type = other DNA
cgggcgcggaattttacgatcaggaagtggtggtcgataaagatcagctggttaccagccggacaccggacgatc

SEQ ID NO: 701715 - DNA, 75 bp, synthetic construct
  source 1..75: mol_type = other DNA
atgaacttccgagttacaggtgaatggaatggagagccattcaacagggttatcgaagcagaggacatcaacgac

SEQ ID NO: 701716 - DNA, 75 bp, synthetic construct
  source 1..75: mol_type = other DNA
atgcacttccgagtcacaggtgcatggaatggagaaccattcaacagagttatcgaagcagagaacatcaatgac

SEQ ID NO: 701717 - DNA, 75 bp, synthetic construct
  source 1..75: mol_type = other DNA
taggtaaaaccgaactctgtaaggcgctggcgaattttatgttcgacagtgacgaggcgatggttcgtatcgata

SEQ ID NO: 701718 - DNA, 75 bp, synthetic construct
  source 1..75: mol_type = other DNA
tgaagcccggatgaatgcttcgacagggggaatgttgcagcgtcggcggcacgcacatcgtcgcgtggcggcggc

SEQ ID NO: 701719 - DNA, 75 bp, synthetic construct
  source 1..75: mol_type = other DNA
gcaaatcgttatgtcgagcaacaactgctgctggcggcagatcgcgtccgcgaaggaagcagcttgcgcgccgcg

SEQ ID NO: 701720 - DNA, 75 bp, synthetic construct
  source 1..75: mol_type = other DNA
attaaagacagcgaggtcacacgccgaatttttaatcatggcgtgacagccttgcgtgccttagccgcaaaacag

SEQ ID NO: 701721 - DNA, 75 bp, synthetic construct
  source 1..75: mol_type = other DNA
atgaagaaaaaacaaaagaaattgtaaataaacttccgggttatgtcgttaagatttttgaagaaaagatggata

SEQ ID NO: 701722 - DNA, 75 bp, synthetic construct
  source 1..75: mol_type = other DNA
ggtttaaatgagccggttacgaatgacatgaacgtactaaaaaaacttatgcagcgtctgtgcggttgcggaaag

SEQ ID NO: 701723 - DNA, 75 bp, synthetic construct
  source 1..75: mol_type = other DNA
caggagcgttttggcgaactggattatgcgcacatgaaagagctggtgctgggagtggttagtcacaacttccgc

SEQ ID NO: 701724 - DNA, 75 bp, synthetic construct
  source 1..75: mol_type = other DNA
aaagaacgtcagtactccgagttagaagaagagtggaaagcagagaaggcatcgctttctggtacgcagaccatt

SEQ ID NO: 701725 - DNA, 75 bp, synthetic construct
  source 1..75: mol_type = other DNA
actgaagatgtcaccatcaacggcaaatctttcatcaaacacactcatagggacggcgacaatgagaatacatca

SEQ ID NO: 701726 - DNA, 75 bp, synthetic construct
  source 1..75: mol_type = other DNA
ggcgtttactggctggcgggattgctggcgcttctggtgctggggcaacggctacttaaaaaatcctactatgcg

SEQ ID NO: 701727 - DNA, 75 bp, synthetic construct
  source 1..75: mol_type = other DNA
gcacaaatcacgcaatatgcccgccaactggccagctcgccttctattatcgacaaccgatcgcgccagcatctg

SEQ ID NO: 701728 - DNA, 75 bp, synthetic construct
  source 1..75: mol_type = other DNA
gacacgtcactgtttacggttgaatcaatacgctggcgaagctgctatgaggtggaaaaactccctgaagaacag

SEQ ID NO: 701729 - DNA, 75 bp, synthetic construct
  source 1..75: mol_type = other DNA
aatggcagtcctgcttgttttgccgcctgtatggattcatcaaatgaatataaaaaaatcagcacccttctgcgc

SEQ ID NO: 701730 - DNA, 75 bp, synthetic construct
  source 1..75: mol_type = other DNA
ttggatgtcttcgctgcggaagcagacctcgctgctgcgctggcctgtacagcggcttcgccagccttcgttgtg

SEQ ID NO: 701731 - DNA, 75 bp, synthetic construct
  source 1..75: mol_type = other DNA
ggtttccgacgctttcgcgttcgtttcggatgtcttcgctgcggaagctgtcctcgctgctgccgtggcctgctc

SEQ ID NO: 701732 - DNA, 75 bp, synthetic construct
  source 1..75: mol_type = other DNA
gccgttgccgaggaagctgcgctgctggcgctcgaggctgcgctcgtttctgatgattttgccgcctcttttgaa

SEQ ID NO: 701733 - DNA, 75 bp, synthetic construct
  source 1..75: mol_type = other DNA
atgcacttccgagtcacaggtgaatggaggaatggagagccatttaacagagttatcgaagcagagaacatcaac

SEQ ID NO: 701734 - DNA, 75 bp, synthetic construct
  source 1..75: mol_type = other DNA
catccccgcgtctttgattccctgttttgttcgatggtggctgccggagaaaaatccgggcatctcgacgtggtg

SEQ ID NO: 701735 - DNA, 75 bp, synthetic construct
  source 1..75: mol_type = other DNA
caatacgctggcgaagcagctatgaggtggaaaaactacctgaagagtacacaaaaagttcaactgcagaacttt

SEQ ID NO: 701736 - DNA, 75 bp, synthetic construct
  source 1..75: mol_type = other DNA
ccggtaatgtcatttttttatgagcatcccgaagagtataagcagcatctaacccacgaaggtgagtttaaacca

SEQ ID NO: 701737 - DNA, 75 bp, synthetic construct
  source 1..75: mol_type = other DNA
ggaatggagagccattcaacagggttatcgaaacagagaacatcaacgactgctatgaccactggataatatggg

SEQ ID NO: 701738 - DNA, 75 bp, synthetic construct
  source 1..75: mol_type = other DNA
tgcagtcgcttacagcacaactgcgactgggaccggcagacatcctggagtcagatgagaatggtattattccgg

SEQ ID NO: 701739 - DNA, 75 bp, synthetic construct
  source 1..75: mol_type = other DNA
atacagtgtgtggtaagaccgctgcaaatcctgcgtgctgacgggaggtgggaaaatattggcgggatgaagtaa

SEQ ID NO: 701740 - DNA, 75 bp, synthetic construct
  source 1..75: mol_type = other DNA
tggatacagataaaaagcagatacagtgtgtggtaagaccgctgcaaatcctgcgtgctgacgggacgtgggaaa

SEQ ID NO: 701741 - DNA, 75 bp, synthetic construct
  source 1..75: mol_type = other DNA
tggttggtcgctctatggtggcgcgctgggggatgaaaactaccaatctgccgcacttggcgttggtcgcgattt

SEQ ID NO: 701742 - DNA, 75 bp, synthetic construct
  source 1..75: mol_type = other DNA
acttatgcagcgtctgtgtggttgcggaaagcatgatgactgtgaacacgggcagtcgcttacagtacaactgcg

SEQ ID NO: 701743 - DNA, 75 bp, synthetic construct
  source 1..75: mol_type = other DNA
tgatggccgtgaacacgtgcagtcgcttacagcacagctgcgactgggaccggcagacattctggagtccgatga

SEQ ID NO: 701744 - DNA, 75 bp, synthetic construct
  source 1..75: mol_type = other DNA
atgaatattttgagaaagcttatggagcgtctgtgtggttgcggaaagcatgatgacagtgaaaacggggagtta

SEQ ID NO: 701745 - DNA, 75 bp, synthetic construct
  source 1..75: mol_type = other DNA
tttcaggcgccagcaaaggtgctgaaattaccggaagtgcaaattcatgaaatcgttagtcactgtgcgagaatg

SEQ ID NO: 701746 - DNA, 75 bp, synthetic construct
  source 1..75: mol_type = other DNA
attttcaggcggcagcaaaggtgctgaaattcccggaagtgcaaattcaggaaatcatcagtaactgtgcgagaa

SEQ ID NO: 701747 - DNA, 75 bp, synthetic construct
  source 1..75: mol_type = other DNA
attttcaggcggcagcaaaggtgctgaaattcccggaagtgcaaattcaggaaatcataagtaactgtgcgagac

SEQ ID NO: 701748 - DNA, 75 bp, synthetic construct
  source 1..75: mol_type = other DNA
taatcacgcaggtggtgatactggatgcggataaaaagcagatacagtgtgtggtaagaccgctgcaaatcctgc

SEQ ID NO: 701749 - DNA, 75 bp, synthetic construct
  source 1..75: mol_type = other DNA
tttcaggcgccagcaaaggtgctgaaattaccggaagtgcagattcatgagatcgttagtcactctgcgagaatg

SEQ ID NO: 701750 - DNA, 75 bp, synthetic construct
  source 1..75: mol_type = other DNA
tttcaggcgccagcaaaggtgctgaaattaccggaagtgcacattcatgatatcgttagtcactttgcgagaatg

SEQ ID NO: 701751 - DNA, 75 bp, synthetic construct
  source 1..75: mol_type = other DNA
gaaagcatgatgaccgtgaacacggggagttacttacagcacaactgcgtctgggaccggcagacattctggagt

SEQ ID NO: 701752 - DNA, 75 bp, synthetic construct
  source 1..75: mol_type = other DNA
cttacagcacagctgcgactggggccggcagacatcctggagtcagatgagaatggcattatcccggagcaggac

SEQ ID NO: 701753 - DNA, 75 bp, synthetic construct
  source 1..75: mol_type = other DNA
ataccgaaaaggcctttgaatatatcgccggcgcgccacaggagcagaaggataatccgcttattaatattctgg

SEQ ID NO: 701754 - DNA, 75 bp, synthetic construct
  source 1..75: mol_type = other DNA
actggatgcagataaaaagcagatacagtgtgtggtaagaccgctgcaaatcctgcgtgctgacgggacgtggga

SEQ ID NO: 701755 - DNA, 75 bp, synthetic construct
  source 1..75: mol_type = other DNA
gaatggcattattccggagcaggacagggtaatcacgcaggtggtgatactggatgcagataaaaagcagataca

SEQ ID NO: 701756 - DNA, 75 bp, synthetic construct
  source 1..75: mol_type = other DNA
ccggcagacatcctggagtccgatgagaatggtattatcccggagcaggacagggtaatcacgcaggtggtgata

SEQ ID NO: 701757 - DNA, 75 bp, synthetic construct
  source 1..75: mol_type = other DNA
tggatgaagtgggcagtgatacaggcagaacaggagaatgacatgaacatactaaaaaaacttatgcagcgtctg

SEQ ID NO: 701758 - DNA, 75 bp, synthetic construct
  source 1..75: mol_type = other DNA
ttagcagctatttaggtgaggacaaaaatgcatggctggaatgggacagttgcgcgctgatgtatgccagtaacg

SEQ ID NO: 701759 - DNA, 75 bp, synthetic construct
  source 1..75: mol_type = other DNA
attccctgcaggcaacacagcttcagtcggccattgtgaaggcgatgtatgcagcgacgattgaaagtgaccttg

SEQ ID NO: 701760 - DNA, 75 bp, synthetic construct
  source 1..75: mol_type = other DNA
ttccggagcaggacagggtaatcacacaggtggtgatactggatgaaccgccccgggtttcctggagagtgtttt

SEQ ID NO: 701761 - DNA, 75 bp, synthetic construct
  source 1..75: mol_type = other DNA
tgcgcgctgatgtatgccagtaacgcgcaggatgcgatcccgacgcttattgatcagggtgataatgatcagttt

SEQ ID NO: 701762 - DNA, 75 bp, synthetic construct
  source 1..75: mol_type = other DNA
tgtgcgctgatgtatgccagtaacgcgcaggatgcgatcccgacgcttatcgatcagggtgataatgatcagttt

SEQ ID NO: 701763 - DNA, 75 bp, synthetic construct
  source 1..75: mol_type = other DNA
accggtacccgtactcacaagccttttacgtttaccaaagaaatcgatgcctccagcccgtatctctacaaagct

SEQ ID NO: 701764 - DNA, 75 bp, synthetic construct
  source 1..75: mol_type = other DNA
gagaagatcatcgaacgctccgtggatgaagctgctaacagcgacatcgtggataaacttgtcgctgaactgtaa

SEQ ID NO: 701765 - DNA, 75 bp, synthetic construct
  source 1..75: mol_type = other DNA
aaaaacgtcaaaaagaaattgctgacggtcttgcttccgcagaacgagcacataaggaccttgaccttgcaaagg

SEQ ID NO: 701766 - DNA, 75 bp, synthetic construct
  source 1..75: mol_type = other DNA
atcgagttgcgccagaaacaatacgagtactaccgtgatttactgttcagtttcccgaaaccagaagccgccagc

SEQ ID NO: 701767 - DNA, 75 bp, synthetic construct
  source 1..75: mol_type = other DNA
ataatgattgtgaaacgggaattgccgaaaaattatatacccacaaaaaatgcattttacatcgggctgtttatg

SEQ ID NO: 701768 - DNA, 75 bp, synthetic construct
  source 1..75: mol_type = other DNA
tcctgtttaccaaggaaattgattcttccagcccctacctttacaaggcggtgaccacggggcagaccctgaagt

SEQ ID NO: 701769 - DNA, 75 bp, synthetic construct
  source 1..75: mol_type = other DNA
atgactgagaaagatttagaggggttcattgaagtgcgtcacgccgttgacgcagttccatacccaaaattcgcc

SEQ ID NO: 701770 - DNA, 75 bp, synthetic construct
  source 1..75: mol_type = other DNA
ccaaaagcgcgcgcgggtgaaaagctggtttttgttcctgagttcaatcgaggcgtacgtgaggcgttttataac

SEQ ID NO: 701771 - DNA, 75 bp, synthetic construct
  source 1..75: mol_type = other DNA
cacgctgggctgcggttttgccgaagattacccggaagagcaacaaccggtaacgcgtaaagagggcgattatct

SEQ ID NO: 701772 - DNA, 75 bp, synthetic construct
  source 1..75: mol_type = other DNA
agcggggtatgttagtgatgatgcacaaacatacatcaaatataaagcatacagagctactcttgattacaagtt

SEQ ID NO: 701773 - DNA, 75 bp, synthetic construct
  source 1..75: mol_type = other DNA
actgaaaaatatttcagacggtgaattaattcaaccccttttaactgctgtaaaattggctacggaagagttgag

SEQ ID NO: 701774 - DNA, 75 bp, synthetic construct
  source 1..75: mol_type = other DNA
tctgaattagatttagaaccaaaaagcaatgactttcatgtaaattcgacaggtgaacaggttgaaaatatagaa

SEQ ID NO: 701775 - DNA, 75 bp, synthetic construct
  source 1..75: mol_type = other DNA
atttaaaccctaagtatgtctcatatttttttcaaacagaacaattccaaaatcaaaaaagacagtatattactg

SEQ ID NO: 701776 - DNA, 75 bp, synthetic construct
  source 1..75: mol_type = other DNA
atctcagtctcaggtagctaaggttcttaacctctctgtaaggactgttagcagacactggaccaagaccctgta

SEQ ID NO: 701777 - DNA, 75 bp, synthetic construct
  source 1..75: mol_type = other DNA
gggagaggccagccgcttgcgatttgttccgcaagacactaatggtgtcaccattggtacaatttcggagataaa

SEQ ID NO: 701778 - DNA, 75 bp, synthetic construct
  source 1..75: mol_type = other DNA
acagccgttgacagagttattgaacagttttccctaaacaagaagattgatcgcctattcataactaacaaaata

SEQ ID NO: 701779 - DNA, 75 bp, synthetic construct
  source 1..75: mol_type = other DNA
aagattttgaatgtcaactagctccgtgtgatgagatttttgtttatagaaaatgtgttgatggcaatcaaattg

SEQ ID NO: 701780 - DNA, 75 bp, synthetic construct
  source 1..75: mol_type = other DNA
gattatttgatgaaaaaagtaatgaggactaactatttatcagaaataagagattctgaactaatgttacgtctc

SEQ ID NO: 701781 - DNA, 75 bp, synthetic construct
  source 1..75: mol_type = other DNA
atgctgtttacggtgaagaaaggcaacaaagaagagacgcagtctgggctgaacaactacgcccgcgtggtggag

SEQ ID NO: 701782 - DNA, 75 bp, synthetic construct
  source 1..75: mol_type = other DNA
tctggaacaatttcttggtactaacggacaacgtattccttacattatcagcatcgcgggtagcgttgcggtggg

SEQ ID NO: 701783 - DNA, 75 bp, synthetic construct
  source 1..75: mol_type = other DNA
ccactcgcgagcgcgccagtttaatcctaacgaagagtgctaatcatgcggtagaagaagtcagactacgcaaat

SEQ ID NO: 701784 - DNA, 75 bp, synthetic construct
  source 1..75: mol_type = other DNA
aatcccaatcccctgcccggataatccggaaaaatcccttgccatccagtctgaaatcgttcggattctggataa

SEQ ID NO: 701785 - DNA, 75 bp, synthetic construct
  source 1..75: mol_type = other DNA
ggcaaaatcatcggctatgaaaatggttacatcatgtgatgataataaaaccttactgaaatatgtttactattg

SEQ ID NO: 701786 - DNA, 75 bp, synthetic construct
  source 1..75: mol_type = other DNA
gcgaggaacggcaattacccaaaaacagacaacaccaggagaaataccagtagttgccaatggaccaattcctac

SEQ ID NO: 701787 - DNA, 75 bp, synthetic construct
  source 1..75: mol_type = other DNA
tttgtttccgatctaaaatcgggagtgccaaacgttacagcaccggtttactcgcatcttatttatgatgtgatc

SEQ ID NO: 701788 - DNA, 75 bp, synthetic construct
  source 1..75: mol_type = other DNA
cagcactgcgttttattgttgaaggcaaaggggcattcaccgccgttgatggcgaacgcacgccaatgaatgagg

SEQ ID NO: 701789 - DNA, 75 bp, synthetic construct
  source 1..75: mol_type = other DNA
cttgtctggtcgcctcatcttttgaagcagacgcagatgatgccgatgacgccgctgaaccagcggacgatgcgg

SEQ ID NO: 701790 - DNA, 75 bp, synthetic construct
  source 1..75: mol_type = other DNA
tatctttctgcagacgtttctcagcattgtcattggctgcttttactgcctttggcgttgctgccagcgtttcag

SEQ ID NO: 701791 - DNA, 75 bp, synthetic construct
  source 1..75: mol_type = other DNA
gtgactcggaagtgctgttagtcgcactgctgagctgtactaccccctttttcgtcgtgctcgcatcctcaagcg

SEQ ID NO: 701792 - DNA, 75 bp, synthetic construct
  source 1..75: mol_type = other DNA
cgtgccgaggtggcagcttctgacgcctttgtggtcgcggcggatgcagaagtggccgcagatttttgtgatgct

SEQ ID NO: 701793 - DNA, 75 bp, synthetic construct
  source 1..75: mol_type = other DNA
gcaggaaaagatctggaggaaagcgatcggctgtaccgctacagcgttccgggaagacccgatttaaacagaatg

SEQ ID NO: 701794 - DNA, 75 bp, synthetic construct
  source 1..75: mol_type = other DNA
tggctgctgattgttgtgacgctgccgcattcgtttctgacgtttttgccgcagcggcacgtggtggccgccgcg

SEQ ID NO: 701795 - DNA, 75 bp, synthetic construct
  source 1..75: mol_type = other DNA
cttgttgacgctgcactggcagacgacgcagccgctgtttttgagcctgccgcagctgaggcgctctgtcccgct

SEQ ID NO: 701796 - DNA, 75 bp, synthetic construct
  source 1..75: mol_type = other DNA
ctgctgacgcctgtctggtcgcctcatcttttgaagcagacgcagatgatgccgatgacgccgccgaactggcgg

SEQ ID NO: 701797 - DNA, 75 bp, synthetic construct
  source 1..75: mol_type = other DNA
tcagaggtttttgctgcagaagcagacctcgctgctgcagtggcttgctcagtggctttgccagctttcgttgtg

SEQ ID NO: 701798 - DNA, 75 bp, synthetic construct
  source 1..75: mol_type = other DNA
cgcagccgaggcgctctgtcccgctgccgtttcagaagacctggcgttcgtctctgacgtttttgccgccttcgc

SEQ ID NO: 701799 - DNA, 75 bp, synthetic construct
  source 1..75: mol_type = other DNA
agcagacgccgatgatgccgatgacgccgccgaactggcggacgatgcggcagccgtttttgaggattctgcgct

SEQ ID NO: 701800 - DNA, 75 bp, synthetic construct
  source 1..75: mol_type = other DNA
ggccgccgcgctttttgaggactctgcagcggcagcactttttgatgcttcagtggcctttgttgatgccgttcc

SEQ ID NO: 701801 - DNA, 75 bp, synthetic construct
  source 1..75: mol_type = other DNA
gccgtttcagaagacttagcgtttgtctcagacgtctttgccgccttcgcggaatttcctgccgccgttgccgag

SEQ ID NO: 701802 - DNA, 75 bp, synthetic construct
  source 1..75: mol_type = other DNA
attaaatgtcttacagagcgggatggattatccgcacgacccgcatcatgtttttgtttctgatttcgtcgattt

SEQ ID NO: 701803 - DNA, 75 bp, synthetic construct
  source 1..75: mol_type = other DNA
tgaagaagaaaggcttcccggaatcgtatgatatgcatcgcctggtgaagtttgtttccgatctcaaatccggcg

SEQ ID NO: 701804 - DNA, 75 bp, synthetic construct
  source 1..75: mol_type = other DNA
atcgatgctacttccagcggcactatcgatatcagcgatggtacggttttgcgtctgaccgggcaggatacttcc

SEQ ID NO: 701805 - DNA, 75 bp, synthetic construct
  source 1..75: mol_type = other DNA
aaacgcccaacgctacctgtgcgccagcgtactggaattatcaggagatccgcccgctgctgctgaagagcggca

SEQ ID NO: 701806 - DNA, 75 bp, synthetic construct
  source 1..75: mol_type = other DNA
gccgcgttatgccgccaatatgttgccgctgcgccatcagacggggaactcttcgccgatctttaactatcgtta

SEQ ID NO: 701807 - DNA, 75 bp, synthetic construct
  source 1..75: mol_type = other DNA
agcgtactggaattatcaggagatccgcccgttgttgctggaaagtggcagcctgattggcgcgaaagaggcggt

SEQ ID NO: 701808 - DNA, 75 bp, synthetic construct
  source 1..75: mol_type = other DNA
ccttatttatctggcgcgggtcgtctggtattgaaagatactttgatgctggctggcgcagtcatgataatggcc

SEQ ID NO: 701809 - DNA, 75 bp, synthetic construct
  source 1..75: mol_type = other DNA
ataccgaaaaggcctttgaatatatcgcgggggcaccacagggtcagcaggataatccgctcattaatattctgg

SEQ ID NO: 701810 - DNA, 75 bp, synthetic construct
  source 1..75: mol_type = other DNA
gtgtccttgtggctttagcaggctctttttttgatgagcagttagttaatgaaattaactcgcaactaggtattt

SEQ ID NO: 701811 - DNA, 75 bp, synthetic construct
  source 1..75: mol_type = other DNA
ccattacgggtattggtgagccgacatctacaggcattaaagtggttgatttcgcagccgatccaacgcaatttc

SEQ ID NO: 701812 - DNA, 75 bp, synthetic construct
  source 1..75: mol_type = other DNA
gactcagcaagtgaccaactggtattgaacggtaatactgctggcaacacggccgtggtaattaaccccattacg

SEQ ID NO: 701813 - DNA, 75 bp, synthetic construct
  source 1..75: mol_type = other DNA
atggaaaaatacctgcacctgttaagtcggggggataaagttggcctgacattgattcgactgagcattgcgatt

SEQ ID NO: 701814 - DNA, 75 bp, synthetic construct
  source 1..75: mol_type = other DNA
attgcggaatgtcatgttaactgcctggttgaaacagatattcaggcttatgcaaacgctgaatttattgctgcc

SEQ ID NO: 701815 - DNA, 75 bp, synthetic construct
  source 1..75: mol_type = other DNA
cgggacatggcccgggcggatatcttcgattacattgaagtgttctacaaccggacccggcgccacagtcatctg

SEQ ID NO: 701816 - DNA, 75 bp, synthetic construct
  source 1..75: mol_type = other DNA
actttcgtacatttttgatgatttttctggtatcgttagttcttattagtgcaaaaataaagtcgaatggcctgt

SEQ ID NO: 701817 - DNA, 75 bp, synthetic construct
  source 1..75: mol_type = other DNA
actttcctacatttttgatgttctttctggtatcgttagttcttattagtgcaaaaataaagtcgaatggcctgt

SEQ ID NO: 701818 - DNA, 75 bp, synthetic construct
  source 1..75: mol_type = other DNA
cggtccgctgagcgctgaggttcaccctgacgaagtcgataactggctggcgctggactggcgactggaggagta

SEQ ID NO: 701819 - DNA, 75 bp, synthetic construct
  source 1..75: mol_type = other DNA
gctgcacaacccggtctcggcgcgtgataaagataaccagcgtctgctgatgcttatccgcgactcatattcact

SEQ ID NO: 701820 - DNA, 75 bp, synthetic construct
  source 1..75: mol_type = other DNA
agtactacccatcctgtcgaatgtagtcactgcaaagcggatatacagcaacttgatgtgaagcgttatttacag

SEQ ID NO: 701821 - DNA, 75 bp, synthetic construct
  source 1..75: mol_type = other DNA
tgcattacgtaagctctctccagactggcatcttcaacttccactcgttctccccgaagcgaatgctgcagagat

SEQ ID NO: 701822 - DNA, 75 bp, synthetic construct
  source 1..75: mol_type = other DNA
tgatgcgcagcgtattgaaaacggcatgaaacgtgccgtgatgctctttgaacgtgcggaatactgggaagagcg

SEQ ID NO: 701823 - DNA, 75 bp, synthetic construct
  source 1..75: mol_type = other DNA
actttcttacatttttgatgatgtttctggtatcgttagttcttattagtgcaaaaataaagtcgaatggcctgt

SEQ ID NO: 701824 - DNA, 75 bp, synthetic construct
  source 1..75: mol_type = other DNA
aatacaaaatgaataatggcttatccttgctggatctggacttgttcagaggtatttcgagtaattaccgcgtgg

SEQ ID NO: 701825 - DNA, 75 bp, synthetic construct
  source 1..75: mol_type = other DNA
ggttactggttgatataaaaaattctgttgtttttcctgcaaatagaatagacgaactggttgttgatgctattt

SEQ ID NO: 701826 - DNA, 75 bp, synthetic construct
  source 1..75: mol_type = other DNA
gcgcgcagcgtgaggctgaaaagcttgcggcgaagaacggcgctgaacatgctcctgcccagcaggaacagcagc

SEQ ID NO: 701827 - DNA, 75 bp, synthetic construct
  source 1..75: mol_type = other DNA
caaagatgacatctgctacgccacgactaaccgtcaggaagcggtacgcgccctggcagagcaggcggaagtggt

SEQ ID NO: 701828 - DNA, 75 bp, synthetic construct
  source 1..75: mol_type = other DNA
atgcagatcctgttggccaacccgcgtggtttttgtgccgggggagaccgcgctatcagcattgttgaaaacgcg

SEQ ID NO: 701829 - DNA, 75 bp, synthetic construct
  source 1..75: mol_type = other DNA
atgttgccggtcttcttgcaaccttggtttgggagaaggttcggcattacccgttggcgtgcctgttccgtggcc

SEQ ID NO: 701830 - DNA, 75 bp, synthetic construct
  source 1..75: mol_type = other DNA
cgaaaagccgcgatttgacggtgtttgatgccacctgtccgctggtgaccaaagtgcatatggaagtcgcccgcg

SEQ ID NO: 701831 - DNA, 75 bp, synthetic construct
  source 1..75: mol_type = other DNA
gatgtgatcgatgcgttgcgtaaacgctttccgaaaattgtcgggccgcgcaaagatgacatttgctacgccacc

SEQ ID NO: 701832 - DNA, 75 bp, synthetic construct
  source 1..75: mol_type = other DNA
gcttggcggtggcgaagccattccgctggaaggccgcgaagaaaatatcgttttcgaagtgccgaaagagctgcg

SEQ ID NO: 701833 - DNA, 75 bp, synthetic construct
  source 1..75: mol_type = other DNA
gcacaggcacttgatgaagtggaaagactggccgcgatgatcccgcccggtcagcccattcttgtggggcatcac

SEQ ID NO: 701834 - DNA, 75 bp, synthetic construct
  source 1..75: mol_type = other DNA
tgacgcccgatcgcatcacggactacaaagcgccatcggcagaagaggccgccgtcgccagagaggccgcgaagc

SEQ ID NO: 701835 - DNA, 75 bp, synthetic construct
  source 1..75: mol_type = other DNA
tcctgacccggaatcgtctgtgcgaagtccggctgaaggacggatacagggaagttacggcaacaatggcttacg

SEQ ID NO: 701836 - DNA, 75 bp, synthetic construct
  source 1..75: mol_type = other DNA
gccatcacgctgaaaatcgacccgtcggtggtactggcgacccgtaaatacgtggatgataaagtcctggaatta

SEQ ID NO: 701837 - DNA, 75 bp, synthetic construct
  source 1..75: mol_type = other DNA
gtgtggaaattgaattcaataaacagatagtatctgtttgcttcaactcagtaaaagatgctcttgtatatacat

SEQ ID NO: 701838 - DNA, 75 bp, synthetic construct
  source 1..75: mol_type = other DNA
caacggggcggtgagttcagtcacaacgccgaattacagttttctcgggtacagcggcacgatgaaagtgacgcc

SEQ ID NO: 701839 - DNA, 75 bp, synthetic construct
  source 1..75: mol_type = other DNA
ctggctggggatgcgggagaccgcagcaaaaagttttgtcgatgaggtggaggcggcctggtcggaatacgcaga

SEQ ID NO: 701840 - DNA, 75 bp, synthetic construct
  source 1..75: mol_type = other DNA
tgattttaaggccaaagtcttcagttatatcgaccgtgtcgtgttctggaagctggctcactggctggcccgcaa

SEQ ID NO: 701841 - DNA, 75 bp, synthetic construct
  source 1..75: mol_type = other DNA
ccaccatgctggccgttatcaacgaacctgtcggcggtgaacatgatgccgcccccttcagtgttacggagttct

SEQ ID NO: 701842 - DNA, 75 bp, synthetic construct
  source 1..75: mol_type = other DNA
acggcgaccttgcgtgggcaaccatgcttgctgtcattaacgaaccgattggcggcgaaggagaaaacgagcgtt

SEQ ID NO: 701843 - DNA, 75 bp, synthetic construct
  source 1..75: mol_type = other DNA
gaccgtcagcacattcatcatttaatcatgcgcgctggctttacttctcgtcaggcatttgtgctgattaccctt

SEQ ID NO: 701844 - DNA, 75 bp, synthetic construct
  source 1..75: mol_type = other DNA
ctatgaacgcaataccacaccgaagctggctcaggagaaaaatctggcggcgttccgtggttactcctgtgatac

SEQ ID NO: 701845 - DNA, 75 bp, synthetic construct
  source 1..75: mol_type = other DNA
cgtttgctggatatccagcagaagaaagtggagagggcgacaggtgttgatttgccgagttatggtggcgttgtc

SEQ ID NO: 701846 - DNA, 75 bp, synthetic construct
  source 1..75: mol_type = other DNA
gcggtggcgtactgccgctatgccgatgatttttgtcctcatcgtcaaaggcaccaaagcacaggcggaagccat

SEQ ID NO: 701847 - DNA, 75 bp, synthetic construct
  source 1..75: mol_type = other DNA
gtagccattatttcttatccggcactacaatcggtggttgcgcgcgttgatggttttaagaaagggttaagcgat

SEQ ID NO: 701848 - DNA, 75 bp, synthetic construct
  source 1..75: mol_type = other DNA
ggcttgatgctatcggtgcctgtgagcgtgccggaattactgacaggatgatcctgaaatcccgccagattgggg

SEQ ID NO: 701849 - DNA, 75 bp, synthetic construct
  source 1..75: mol_type = other DNA
cgaatactgcaacactgatgcagaacacggggacaaaatttgccggcaggattgtcagcgagggtagtacggcca

SEQ ID NO: 701850 - DNA, 75 bp, synthetic construct
  source 1..75: mol_type = other DNA
atgccgcagcacagggcgttatggtgtggctatctggccagacgctttggacgtgaagacgatgtggaagtcatt

SEQ ID NO: 701851 - DNA, 75 bp, synthetic construct
  source 1..75: mol_type = other DNA
tgaccgtcagcatattcaccatttgatcatgcgtgccgggtttacttcccgccaggcgtttgtgctgattaccct

SEQ ID NO: 701852 - DNA, 75 bp, synthetic construct
  source 1..75: mol_type = other DNA
gcagatgtaccgcgcgacctactcaccggatgacaacaaactgcgcctgtatgccgtgtcacgtcttgacccgga

SEQ ID NO: 701853 - DNA, 75 bp, synthetic construct
  source 1..75: mol_type = other DNA
tcgagccggtggaggacgggcagacccgtggggcgaatcagttttacagcgtcatggaacggctgaagatgctag

SEQ ID NO: 701854 - DNA, 75 bp, synthetic construct
  source 1..75: mol_type = other DNA
aaatcgttgagaaaggcaaaaccgctccgcgagttacgcttcaatatatcgaaagcatcattcttgaagagcatt

SEQ ID NO: 701855 - DNA, 75 bp, synthetic construct
  source 1..75: mol_type = other DNA
acaatggacaataatttccgtctggtgaatgtgtatatcaccgacatgaaaattacggaaatcccacagaaataa

SEQ ID NO: 701856 - DNA, 75 bp, synthetic construct
  source 1..75: mol_type = other DNA
tcgagccggtggaggacgggcagacccgtggggcaaatcagttttacagcgtcatggaacggctgaagatgctgg

SEQ ID NO: 701857 - DNA, 75 bp, synthetic construct
  source 1..75: mol_type = other DNA
aagtataaagaacgtccggatgttcgctggcgtcgtatcaaaaaaatcgaagctgatttgcgcaaggctgaaaag

SEQ ID NO: 701858 - DNA, 75 bp, synthetic construct
  source 1..75: mol_type = other DNA
agggaggagtatcggggtgtgctcgaaggcagtctgaaactcaggctgaacatggataagactaaaatcacccat

SEQ ID NO: 701859 - DNA, 75 bp, synthetic construct
  source 1..75: mol_type = other DNA
agcaaagtcgatatggctgaacaactcaaccgaaaactgaaaggctggccatgttctatcagttcgttgatttta

SEQ ID NO: 701860 - DNA, 75 bp, synthetic construct
  source 1..75: mol_type = other DNA
gccaccatacaggccgctgttggcatcattatgatggtgttcggcaaactttatctcagtagccttggctatatt

SEQ ID NO: 701861 - DNA, 75 bp, synthetic construct
  source 1..75: mol_type = other DNA
ggtggtgtaaatcaccgaaaccgggtcagagcaaaacgtgggttttatttgtcacgaacggtgcaatagtgatcc

SEQ ID NO: 701862 - DNA, 75 bp, synthetic construct
  source 1..75: mol_type = other DNA
ttgataatcagcgaaatgcaacgcaagcttgccacatggacagcaaccgccccgtccggacggattacacggctg

SEQ ID NO: 701863 - DNA, 75 bp, synthetic construct
  source 1..75: mol_type = other DNA
gattttcatacgctctcgtatggcttccggcctgaacgcagcgtccatcacgcgatccgcacggtgaaattacag

SEQ ID NO: 701864 - DNA, 75 bp, synthetic construct
  source 1..75: mol_type = other DNA
tcgcctgaagggttttactacaccatgtatccgctgtatgactggaaaactcgtgatatctggatatatcacacc

SEQ ID NO: 701865 - DNA, 75 bp, synthetic construct
  source 1..75: mol_type = other DNA
aagcggtgcctattttgccctgcgtaagcgtatcgtgaagccgcctcatcatacctggcgcagttacgcgatgtt

SEQ ID NO: 701866 - DNA, 75 bp, synthetic construct
  source 1..75: mol_type = other DNA
gtggctttaccatgttctggagccggaaacctgggccaggatgtgtgagcgggtgtcgggtgctgccagcggggc

SEQ ID NO: 701867 - DNA, 75 bp, synthetic construct
  source 1..75: mol_type = other DNA
gaagggaaacgcacgtttacagaatttatgcgtgaaggtgtgggggttcatgcgtttaacggcgaaatctttgtg

SEQ ID NO: 701868 - DNA, 75 bp, synthetic construct
  source 1..75: mol_type = other DNA
gaagggaaacgcacgtttactgaatttattcgtgaaggtgtgggagttcatgcgtttaacggcgaaatctttgtg

SEQ ID NO: 701869 - DNA, 75 bp, synthetic construct
  source 1..75: mol_type = other DNA
gaagggaaacgcacgtttactgaatttatgcgtgaaggtgtgggtgttcatgcgtttaacggcgaaatctttgtg

SEQ ID NO: 701870 - DNA, 75 bp, synthetic construct
  source 1..75: mol_type = other DNA
cgtatatcaaaacctgatcatcatacttggcgaagctatgcaatgtttttgttgaatgtaatgccagaaaaaacg

SEQ ID NO: 701871 - DNA, 75 bp, synthetic construct
  source 1..75: mol_type = other DNA
acggcagaacattaccgtaacaaaattgctgtctacctgcgctggtatcagacccggggctttccggatgacatt

SEQ ID NO: 701872 - DNA, 75 bp, synthetic construct
  source 1..75: mol_type = other DNA
gctttatgggactggtatctcagcgcaaactgagatatgccgatgataagccctggaccacggcatcgcctgaag

SEQ ID NO: 701873 - DNA, 75 bp, synthetic construct
  source 1..75: mol_type = other DNA
gaagggaaacgcacgtttaccgaatttatccgtgaaggtgtgggagttcatgcgtttaacggcgaaatctttgtg

SEQ ID NO: 701874 - DNA, 75 bp, synthetic construct
  source 1..75: mol_type = other DNA
ctgccaggaatttattgatctgaatccaaaagcaatgaccccggttgcgtggtggatgctgcatgaagaaacagt

SEQ ID NO: 701875 - DNA, 75 bp, synthetic construct
  source 1..75: mol_type = other DNA
atgaagaaacggtttataaaggtggcgatactgtaaccttaaatgaaactgacctgactcagatccctaaagtga

SEQ ID NO: 701876 - DNA, 75 bp, synthetic construct
  source 1..75: mol_type = other DNA
cctgcgctggtatcagacgcggggcttcccggatgacatcccggatgaacaggagaatgacttggggagccggga

SEQ ID NO: 701877 - DNA, 75 bp, synthetic construct
  source 1..75: mol_type = other DNA
atgtttgcagtttcatcaagacgcgtgctgccgggctttaccttaagcctcggcaccagtctgctgtttgtgtgc

SEQ ID NO: 701878 - DNA, 75 bp, synthetic construct
  source 1..75: mol_type = other DNA
tggcccgcaggaaaaaacgtcgtttctctgtactgtttattgactgggaggctcagtaccagtgcaccattgaac

SEQ ID NO: 701879 - DNA, 75 bp, synthetic construct
  source 1..75: mol_type = other DNA
attaccgtaataaaattgctgtttacttgcgctggtatcagacgcggggcttcccggatgatatccctgatgaac

SEQ ID NO: 701880 - DNA, 75 bp, synthetic construct
  source 1..75: mol_type = other DNA
tgcagccggtgctggaagagttaggcccggaatatgaagaggcggcagaaacgctcggcgcaacatgctggcaga

SEQ ID NO: 701881 - DNA, 75 bp, synthetic construct
  source 1..75: mol_type = other DNA
atgtttgccgttgcctccaggcgtgtgctgccggggtttaccttaagcctcggcaccagtctgctgtttgtctgc

SEQ ID NO: 701882 - DNA, 75 bp, synthetic construct
  source 1..75: mol_type = other DNA
gaagggaaacgcacgtttacagaatttatccgtgaaggtgtgggcgttcatgcgtttaacggcgaaatctttgtg

SEQ ID NO: 701883 - DNA, 75 bp, synthetic construct
  source 1..75: mol_type = other DNA
cgtaccgttacgcaacatgcgtgtctgtgaaccttttggtcctgaacaacgtaagggactgtggctttaccatgt

SEQ ID NO: 701884 - DNA, 75 bp, synthetic construct
  source 1..75: mol_type = other DNA
tttgccaggccaaaggggattacaccgaaaatcggcagattgcagaacaggaacgtcagcgttgcaaggcaatgg

SEQ ID NO: 701885 - DNA, 75 bp, synthetic construct
  source 1..75: mol_type = other DNA
ctgaccacggtaaacggtgtctcgcagtttcagccggagtggatatgttgggaatcaggcgtgggctgggttcgc

SEQ ID NO: 701886 - DNA, 75 bp, synthetic construct
  source 1..75: mol_type = other DNA
ccgaacaaaccccggcactatgaacgttatctgcagcgtatgaaggaaaggaggaatgaatgggggattctgtga

SEQ ID NO: 701887 - DNA, 75 bp, synthetic construct
  source 1..75: mol_type = other DNA
gttctggagccggaaacctgggccaggatgtgtgaacgggtgtcaggtgctgccagcggggcgctttatgccaat

SEQ ID NO: 701888 - DNA, 75 bp, synthetic construct
  source 1..75: mol_type = other DNA
gaagggaaacgcacgtttacggaatttatgcgtgaaggtgtgggagttcatgcgtttaacggcgaaatctttgtg

SEQ ID NO: 701889 - DNA, 75 bp, synthetic construct
  source 1..75: mol_type = other DNA
cttccgccaccgttaatattttttatcagcacaagaaaaataaaggtatgcattctttattatctccgcttgtat

SEQ ID NO: 701890 - DNA, 75 bp, synthetic construct
  source 1..75: mol_type = other DNA
gccagaacagattctaaatatatcgacttcatttcattttcctttgaagcagtaagcactcattgcccaccacca

SEQ ID NO: 701891 - DNA, 75 bp, synthetic construct
  source 1..75: mol_type = other DNA
gggaattgttccacttcagtgaaggggaatttgggcacggctacgcaatttgcctctcatgtggtcgggcagaat

SEQ ID NO: 701892 - DNA, 75 bp, synthetic construct
  source 1..75: mol_type = other DNA
aaatgctgatgcgattggcttccctgccggtgatgcactggcgaacttcttctcccagtttggttacgtctgtgc

SEQ ID NO: 701893 - DNA, 75 bp, synthetic construct
  source 1..75: mol_type = other DNA
ggttgcggacttgatgcgcgatgctgaaaagcttgatggtttatccccaacgacaatagcaaacagactttcacg

SEQ ID NO: 701894 - DNA, 75 bp, synthetic construct
  source 1..75: mol_type = other DNA
cagccatgcttctgccggatccgtacgtggtccggcgtttttttcgccgggggattcactggctgcgtctgctga

SEQ ID NO: 701895 - DNA, 75 bp, synthetic construct
  source 1..75: mol_type = other DNA
aacatccaacgttattaaatcagataatataaattcctcatggagtaaggtgttacctggttttaaaccagaaaa

SEQ ID NO: 701896 - DNA, 75 bp, synthetic construct
  source 1..75: mol_type = other DNA
ggaaagactggccgcgatgatcccgcccggtcagcccattctcgtggggcatcacagcgaacgccgcgcccgtcg

SEQ ID NO: 701897 - DNA, 75 bp, synthetic construct
  source 1..75: mol_type = other DNA
gctggaaggtcgtgaagaaaacattgttttcgaagtgccgaaagagctgcgtgtcgatattcgtgaagtcgatta

SEQ ID NO: 701898 - DNA, 75 bp, synthetic construct
  source 1..75: mol_type = other DNA
tggatattggtggtatgagtttggtggcaatgaacaacgttcctccagctccggcaaattatttgcagcgtgcag

SEQ ID NO: 701899 - DNA, 75 bp, synthetic construct
  source 1..75: mol_type = other DNA
tcagcatcagcaacgctgggttaaccactatcagaaccgcctgatctatgagcgtgccatgctggacgaaagcgg

SEQ ID NO: 701900 - DNA, 75 bp, synthetic construct
  source 1..75: mol_type = other DNA
agcgggccagtgaatccgcacaggcacttgatgaagtggaaagactggccgcgatgatcccgcccggtcagccca

SEQ ID NO: 701901 - DNA, 75 bp, synthetic construct
  source 1..75: mol_type = other DNA
tgttacggaaggcgacagcagtaaccatcagtggcagatgctggttccaaaaaaatccgcctcctgcgccatctt

SEQ ID NO: 701902 - DNA, 75 bp, synthetic construct
  source 1..75: mol_type = other DNA
cgccattaaaaaggagaatgttggcaaattttctctgcggggcgtttgtgtttctgacggaaatacgaaggagga

SEQ ID NO: 701903 - DNA, 75 bp, synthetic construct
  source 1..75: mol_type = other DNA
ccaccacgcttaaacaactacgtcagcagcgcggctggagtctttcgcgactggcagaagcgacgggcgtttcta

SEQ ID NO: 701904 - DNA, 75 bp, synthetic construct
  source 1..75: mol_type = other DNA
gtcgtcattgatggacaacttgatctgtgcgttgatggtgaatggcagagccttaattgtggggaaggcgttcga

SEQ ID NO: 701905 - DNA, 75 bp, synthetic construct
  source 1..75: mol_type = other DNA
cggatggcgatgtcgccgccagcgtgctgacctgctggcaggataatccttacgacgtgatgtacaccatcggtg

SEQ ID NO: 701906 - DNA, 75 bp, synthetic construct
  source 1..75: mol_type = other DNA
agagtggttatcggtgagggggaaattgaccatgcgccgatgctgtggattggcgaagaggttggtaaaggtgat

SEQ ID NO: 701907 - DNA, 75 bp, synthetic construct
  source 1..75: mol_type = other DNA
cgcgctgaaaaaagaaaacgtgggggaatttgctctccgtggcatctgcatctccccggagaataaacaagacat

SEQ ID NO: 701908 - DNA, 75 bp, synthetic construct
  source 1..75: mol_type = other DNA
ttactggcaaacctgcgtgcgcgggtgaacggttttatggcgatagaagttccggcaactcaggtttccgtgtcg

SEQ ID NO: 701909 - DNA, 75 bp, synthetic construct
  source 1..75: mol_type = other DNA
gacaagctgtcggaggatggcgcgtacacctggacactgtggcggccctataaatgctgtccgcgccgggggcaa

SEQ ID NO: 701910 - DNA, 75 bp, synthetic construct
  source 1..75: mol_type = other DNA
atgcgatcccaattaatctctatgctgctatgcgctgttttccccctcagggcgattaccacgccggagatcgca

SEQ ID NO: 701911 - DNA, 75 bp, synthetic construct
  source 1..75: mol_type = other DNA
atggaaaatctcgctcactatttatccgccacgcttaaatatcttcgtcagcaacgaggctggagtctttctcga

SEQ ID NO: 701912 - DNA, 75 bp, synthetic construct
  source 1..75: mol_type = other DNA
aaggggcaggtggtaactacgaccagcggctggaccagctactggggcatgaagttacgtctgtggcgggcagcc

SEQ ID NO: 701913 - DNA, 75 bp, synthetic construct
  source 1..75: mol_type = other DNA
agttctccagaacacctttcggacgttacacaacggatagcccacacagtgcggaaagatttcgtagagagtttt

SEQ ID NO: 701914 - DNA, 75 bp, synthetic construct
  source 1..75: mol_type = other DNA
ttgttggagatgcccagctttctaccccatgcactgacagcatcataaacagcattgcaacaggcattcgcatca

SEQ ID NO: 701915 - DNA, 75 bp, synthetic construct
  source 1..75: mol_type = other DNA
cacgggaaataaaaccagccaaaggcgaagttcttgtcgttgtatctggttttactggttgcggaaaaagcgcca

SEQ ID NO: 701916 - DNA, 75 bp, synthetic construct
  source 1..75: mol_type = other DNA
ggtagggaagctgcgtgttgagctggaagccgcagagaacaaccttattgatagtgagtgccatgttgctgaact

SEQ ID NO: 701917 - DNA, 75 bp, synthetic construct
  source 1..75: mol_type = other DNA
agctcgctgctgaactacattatcgggatggttatcgcctttggcgtcgcctttgtcgtctccctggtactgaaa

SEQ ID NO: 701918 - DNA, 75 bp, synthetic construct
  source 1..75: mol_type = other DNA
tcacttcagacggtgtcccagttatttgtatctggctcatgcccgatatatggcgaccttactctgaactgacgt

SEQ ID NO: 701919 - DNA, 75 bp, synthetic construct
  source 1..75: mol_type = other DNA
atattttattaatggatgaagccttctcggcgctcgatccattaattcgcaccgagatgcaggatgagctggtaa

SEQ ID NO: 701920 - DNA, 75 bp, synthetic construct
  source 1..75: mol_type = other DNA
cggcttcggcccgcgttcggcactgaaattattgcaggatgaagatcgcgaatatggctacgtcatcgaacgcgg

SEQ ID NO: 701921 - DNA, 75 bp, synthetic construct
  source 1..75: mol_type = other DNA
atccacaatggtacgccttctcaattgcctgattgaacccacccgcgggcaagtgctgattgatggtgtggatat

SEQ ID NO: 701922 - DNA, 75 bp, synthetic construct
  source 1..75: mol_type = other DNA
atacctaaagaaaatggctgttggctttacctgattgacctagaacacgcattacgcgtcgctgacattcgcatc

SEQ ID NO: 701923 - DNA, 75 bp, synthetic construct
  source 1..75: mol_type = other DNA
atctctataaaatatttggcgagcatccacaacgggctttcaaatatatcgaaaaaggactttcaaaagaacaaa

SEQ ID NO: 701924 - DNA, 75 bp, synthetic construct
  source 1..75: mol_type = other DNA
aatatggctacgttatcgaacgcggtaataagtttgtcggcgcagtctccatcgattcgcttaaaaccgcgggtg

SEQ ID NO: 701925 - DNA, 75 bp, synthetic construct
  source 1..75: mol_type = other DNA
tggtgccggtaaatcaacactcttaaaaatccttagcggcaactatgcgccaaccacgggttctgtcgcaattag

SEQ ID NO: 701926 - DNA, 75 bp, synthetic construct
  source 1..75: mol_type = other DNA
gtcttggtggctcatttggtaataccgccgagaatatcattaccagtggtgtatccattgtggacggaaaactgg

SEQ ID NO: 701927 - DNA, 75 bp, synthetic construct
  source 1..75: mol_type = other DNA
acaacgcatcacacaaacctgtcatatcccggtacgaatcagcgccgatgtctggacctatctgaacggtacagg

SEQ ID NO: 701928 - DNA, 75 bp, synthetic construct
  source 1..75: mol_type = other DNA
tgactggcgtggacatgcattggcgtaaaactcttgcaagacatcagacagaggatctaaccctccgttggagga

SEQ ID NO: 701929 - DNA, 75 bp, synthetic construct
  source 1..75: mol_type = other DNA
actggcacggcctgttattcactctgccggagcatcaggaggcgctacgcaacgtcatgcagcgttacgcaacag

SEQ ID NO: 701930 - DNA, 75 bp, synthetic construct
  source 1..75: mol_type = other DNA
aagtaaagcccagctaccaaatgtggatctgaaaaccatcaatcagaccgtggacctgaaatccgggcagacggt

SEQ ID NO: 701931 - DNA, 75 bp, synthetic construct
  source 1..75: mol_type = other DNA
caatcactctaccctcggccttttccgcaatgttagggattactgaagccgctatttttggtatcaaccttcgtt

SEQ ID NO: 701932 - DNA, 75 bp, synthetic construct
  source 1..75: mol_type = other DNA
gcgaataatgctgatcaccatattcgttcgctcaatatcaaaacgccgggagcggagcaattaatcatgaatctc

SEQ ID NO: 701933 - DNA, 75 bp, synthetic construct
  source 1..75: mol_type = other DNA
taacaccctggcgattggcgggaacgaagaggctgcgcgtctggcgggtgtaccggttgttcgcaccaaaattat

SEQ ID NO: 701934 - DNA, 75 bp, synthetic construct
  source 1..75: mol_type = other DNA
atcgatattcgtaaaccgagccacgccattgccgcaggcatgatgctctgcccggaagatcgcaaagcggaaggc

SEQ ID NO: 701935 - DNA, 75 bp, synthetic construct
  source 1..75: mol_type = other DNA
gacgagctaaccggcaagactggcaagcaaccgcgctttgagcttaagccaatagatccggctttggggagtgct

SEQ ID NO: 701936 - DNA, 75 bp, synthetic construct
  source 1..75: mol_type = other DNA
tacagcattcgggcatcgtaaccataaatggaacggagcaagcccacgcaaaacacagaactaccttaatcacgt

SEQ ID NO: 701937 - DNA, 75 bp, synthetic construct
  source 1..75: mol_type = other DNA
ttggcggatttaatgacaacgccgtgaaggcagcaaacgatgccggatttcacctggcggtgacaaccatgaaag

SEQ ID NO: 701938 - DNA, 75 bp, synthetic construct
  source 1..75: mol_type = other DNA
atctacaatggtacgtcttctcaatcgcctgattgaacccacccgtggacaagtgctaattgacggcatcgatat

SEQ ID NO: 701939 - DNA, 75 bp, synthetic construct
  source 1..75: mol_type = other DNA
acagcaattgagatgtacaaaccaactgtgcgcattgtggaagttaatgtgccacgcgtcgctggcgttcgcatc

SEQ ID NO: 701940 - DNA, 75 bp, synthetic construct
  source 1..75: mol_type = other DNA
gttttactggttgcggaaaaagcgccatcgccggggaaatagaaatcgcgatgaaggctattggtgtaccggttc

SEQ ID NO: 701941 - DNA, 75 bp, synthetic construct
  source 1..75: mol_type = other DNA
actgcgtgttgagcttgaagcagaaaaacagcgggcaaaggttctatttatggaaaatgctcggcttaagtcagg

SEQ ID NO: 701942 - DNA, 75 bp, synthetic construct
  source 1..75: mol_type = other DNA
gtgaaatcagcccggcatatcgccaaaaactgctttctcttggcatatgccgccctcgcccgtctgcgtaatgag

SEQ ID NO: 701943 - DNA, 75 bp, synthetic construct
  source 1..75: mol_type = other DNA
caagccgtggctggatgggcttctccatcctgtgggggctgaatatcgcttactcgctggcaacattgttctatc

SEQ ID NO: 701944 - DNA, 75 bp, synthetic construct
  source 1..75: mol_type = other DNA
gagttcaatccggcagaatttaacctcggtgaagagctgttcagtgcgatagatgaaacctggcagagcctgaaa

SEQ ID NO: 701945 - DNA, 75 bp, synthetic construct
  source 1..75: mol_type = other DNA
tgcgtgaggcggcagaacgtgcaattccggcaatggaacgcctgttaatgttgccagctgatgatgatttgttaa

SEQ ID NO: 701946 - DNA, 75 bp, synthetic construct
  source 1..75: mol_type = other DNA
aatgcctgaaaagaaccagaacgtgcttatttcggtgaatttcgatagtgatctggttgagccgctaatatgctc

SEQ ID NO: 701947 - DNA, 75 bp, synthetic construct
  source 1..75: mol_type = other DNA
gaacgaggatattgcgctaacggtagggaagctgttaatcgaaaacggtcagcttgttgccgatacgctacgcca

SEQ ID NO: 701948 - DNA, 75 bp, synthetic construct
  source 1..75: mol_type = other DNA
aacgaggaaattgcgctaacggttgggaagctgcgagttgagcttgaggagacaaaatcaaaactcaacgagcag

SEQ ID NO: 701949 - DNA, 75 bp, synthetic construct
  source 1..75: mol_type = other DNA
gcagatgttttcctgctggctggaagaggcacttcttcgggggattatccgtccgccacgggcgcgttttgattt

SEQ ID NO: 701950 - DNA, 75 bp, synthetic construct
  source 1..75: mol_type = other DNA
tgatgtacctgttcctctccttccttgaggactccggctatatggcgcgtgcggcgtttgtgatggaccgtctga

SEQ ID NO: 701951 - DNA, 75 bp, synthetic construct
  source 1..75: mol_type = other DNA
gtgagtaaaattaattaccaggcactgcgtgaggcagcagaacgtgcaattccagcaatggaacgcctgttaatg

SEQ ID NO: 701952 - DNA, 75 bp, synthetic construct
  source 1..75: mol_type = other DNA
tttcaaccctgaagtagtgcaggcgctgctggatgaacgggaaagaaaccagcaatacataaaacgccgcgatca

SEQ ID NO: 701953 - DNA, 75 bp, synthetic construct
  source 1..75: mol_type = other DNA
attgagatgtacaaaccaactgtgcgcatcgtggaagttaatgtgccacgcgcccctggcattcgcatcaaagga

SEQ ID NO: 701954 - DNA, 75 bp, synthetic construct
  source 1..75: mol_type = other DNA
gaccaacagtatgtcggcatcatttcgaaaggaatgctgctgcgcgctttagatcgtgagggggtaaataatggc

SEQ ID NO: 701955 - DNA, 75 bp, synthetic construct
  source 1..75: mol_type = other DNA
gatcgcgaatatggctacgttatcgaacgcggtaataagtttgtcggcgcagtctccatcgattcgcttaaaacc

SEQ ID NO: 701956 - DNA, 75 bp, synthetic construct
  source 1..75: mol_type = other DNA
gtgagcgaaattaactctcaggcactgcgtgaggcggcagtagcaattgaaacagtagcaacgcctcaaaaattg

SEQ ID NO: 701957 - DNA, 75 bp, synthetic construct
  source 1..75: mol_type = other DNA
ttgatgcgctgtcggcacgtcttggctgcccggtgatcccgctggtttccacgcgtggtcgcggtattgaagccc

SEQ ID NO: 701958 - DNA, 75 bp, synthetic construct
  source 1..75: mol_type = other DNA
ctatgccggtgaagcgtcgcagcatctggatgccgccctcgcccgtctgcgtaatgaaatggacgatccggcatt

SEQ ID NO: 701959 - DNA, 75 bp, synthetic construct
  source 1..75: mol_type = other DNA
agccgattggcgtgcatgaagataactggcaggcaacggttggcctgtttacaggcgcaatggcgaaagaagtgg

SEQ ID NO: 701960 - DNA, 75 bp, synthetic construct
  source 1..75: mol_type = other DNA
gaagcgcagcagctgcttacagctacctgattttcgttctgctgtatgtaccgtgtatctcggtgatgggggcca

SEQ ID NO: 701961 - DNA, 75 bp, synthetic construct
  source 1..75: mol_type = other DNA
tgtttgacgtcggttccgtggcactctttgtgcatggtattcagtggattggctacacgctccacttccctgact

SEQ ID NO: 701962 - DNA, 75 bp, synthetic construct
  source 1..75: mol_type = other DNA
acggcgacgaaaggaagttctgctggtggtgcaactgacagtcgcaatgatctggagcttgaaggactgaggctt

SEQ ID NO: 701963 - DNA, 75 bp, synthetic construct
  source 1..75: mol_type = other DNA
agccaggcacgtttcacggcgaaaggcgtgcgctggattggtggactgtgggcagaacacattgccagggggcag

SEQ ID NO: 701964 - DNA, 75 bp, synthetic construct
  source 1..75: mol_type = other DNA
gtgctgacacctcggcaccagcacattgctgccgggcggtttgaagtgaaaactggcactacgagcgaaacaaac

SEQ ID NO: 701965 - DNA, 75 bp, synthetic construct
  source 1..75: mol_type = other DNA
gggaaactctcgaaatggttcaaagatacgcccacctttcagccgggcatctcaccgagcacgcgagcaaaatcg

SEQ ID NO: 701966 - DNA, 75 bp, synthetic construct
  source 1..75: mol_type = other DNA
gaaaaaataatggaggcggtagacgggatggaaaaccgccgccatcgcctgaactgggagatgagccgggacagg

SEQ ID NO: 701967 - DNA, 75 bp, synthetic construct
  source 1..75: mol_type = other DNA
tggctgttgaatggggatggattgacagggcgccaaaaatatcaacaccacgcgttaagaatggacgcattagat

SEQ ID NO: 701968 - DNA, 75 bp, synthetic construct
  source 1..75: mol_type = other DNA
gttgtcttggctatacttcaccggatggtggaattaacgaaaacaacaactggtgccacatcccgcaggcaagag

SEQ ID NO: 701969 - DNA, 75 bp, synthetic construct
  source 1..75: mol_type = other DNA
cattctgcataccaaaggttcgcactttaactacacccagcgttacccgcgcagctttgcgcagtggaagccgga

SEQ ID NO: 701970 - DNA, 75 bp, synthetic construct
  source 1..75: mol_type = other DNA
gggattacccaatttccgtttatctatcttatatgatgcgggttagggggctatcccgcaaagattcaattgcgc

SEQ ID NO: 701971 - DNA, 75 bp, synthetic construct
  source 1..75: mol_type = other DNA
cagcctcaacaaccacaacaggacagacagttttcaggtaattcgccatctccgggcaataccacaccgtccggc

SEQ ID NO: 701972 - DNA, 75 bp, synthetic construct
  source 1..75: mol_type = other DNA
ggacccggatattcgctatatgccaaactgcggggcggtggcctacattgcgctggccacatccgaaacctggcg

SEQ ID NO: 701973 - DNA, 75 bp, synthetic construct
  source 1..75: mol_type = other DNA
aaatatctggaaaatccggtcaatgcgcaggcatttgcgcagctgaaaaaagaagccgacatgaaagtgccacgc

SEQ ID NO: 701974 - DNA, 75 bp, synthetic construct
  source 1..75: mol_type = other DNA
gaagtgggtcgttgtggtggcattgctcctggtggcaatcgtcggcaactacctttatcgcgacattatgctgcc

SEQ ID NO: 701975 - DNA, 75 bp, synthetic construct
  source 1..75: mol_type = other DNA
ctcgctccgggagtggacgatgggaacggatcccgcgtgaacttcccaccgggcgtccggccatgctgcatattt

SEQ ID NO: 701976 - DNA, 75 bp, synthetic construct
  source 1..75: mol_type = other DNA
gtggaagaaaaaatgccaccatcggttgcacaaacaatggagcgtatatttacttcaaacctccagaatgaggct

SEQ ID NO: 701977 - DNA, 75 bp, synthetic construct
  source 1..75: mol_type = other DNA
atgatacagatatctctgcccggggaaacagcctgtggaacaaggcagttcacatcatcaataccacatcccggg

SEQ ID NO: 701978 - DNA, 75 bp, synthetic construct
  source 1..75: mol_type = other DNA
ggaaggcgttccggtcgtatcgcatgttgcgaccgataactatgcgggaggcgttgaagcaggcaagttaatggg

SEQ ID NO: 701979 - DNA, 75 bp, synthetic construct
  source 1..75: mol_type = other DNA
cgcactggcagcggttatagcggcgaaatctgcgcataacgacaatatcaaaattatcggttttgatggcatgaa

SEQ ID NO: 701980 - DNA, 75 bp, synthetic construct
  source 1..75: mol_type = other DNA
catctttatccgggggattcactgaatctgcagacagcgcagaatgcagataatggtttctctgaactggaaaag

SEQ ID NO: 701981 - DNA, 75 bp, synthetic construct
  source 1..75: mol_type = other DNA
attacattgcagaactgaaagaaagcggcaaatatcgagcgccggcttccaaagccaaaacaaaatccgccaccc

SEQ ID NO: 701982 - DNA, 75 bp, synthetic construct
  source 1..75: mol_type = other DNA
aagaatgcctacctcgcggtaatgactgacaacttcaatacagaagttaaatcattttcggtcaatgtgtatgtg

SEQ ID NO: 701983 - DNA, 75 bp, synthetic construct
  source 1..75: mol_type = other DNA
gctgcgtgcgctggccgtagtaattctaattgctgcagcgggtggtgtcgcgctgttaacgacaaaaggtaaagc

SEQ ID NO: 701984 - DNA, 75 bp, synthetic construct
  source 1..75: mol_type = other DNA
cctatctgaggacggagaccagaaacacgtatacatcgcgctttacagaagtggcaatggcgttcgccagcattt

SEQ ID NO: 701985 - DNA, 75 bp, synthetic construct
  source 1..75: mol_type = other DNA
ggtatcttcatgacgttggtgacgggtatgtcgaatgcagatcgagagagggtagggaagttttattcttgcttg

SEQ ID NO: 701986 - DNA, 75 bp, synthetic construct
  source 1..75: mol_type = other DNA
cgtcttcaccgctaatgatggcaaagttgactgcaccttcttgaaggatttttcagagaaaggaggcaatctggc

SEQ ID NO: 701987 - DNA, 75 bp, synthetic construct
  source 1..75: mol_type = other DNA
tgattagctaccgtccgaactggcgctggctggggatgcgggagaccgcagcaaaaagctttgtcgatgaggtgg

SEQ ID NO: 701988 - DNA, 75 bp, synthetic construct
  source 1..75: mol_type = other DNA
ggtaatgattggcggcagcattctggcggttatcttgttgattgttgtgatgattggcgaaaaacgtcgccatca

SEQ ID NO: 701989 - DNA, 75 bp, synthetic construct
  source 1..75: mol_type = other DNA
agagtacaaaaatgattatccggacgactataacgaaaaagcggaacaggagctgaccgcgaagcaaatcttcat

SEQ ID NO: 701990 - DNA, 75 bp, synthetic construct
  source 1..75: mol_type = other DNA
cggtggtggtattccgccgctgttattcttgctggggatggcctggttcaatgactggcacgcggcgctttatat

SEQ ID NO: 701991 - DNA, 75 bp, synthetic construct
  source 1..75: mol_type = other DNA
ggacgacaaaaccccgaaggacttcaaagaaattgacctgctggcgcgccagcttgaccgctttgaacggcatga

SEQ ID NO: 701992 - DNA, 75 bp, synthetic construct
  source 1..75: mol_type = other DNA
aacggcaagctgggcggggataacatctggcgccagatagtcacgctggaagacgccgtgaagctcggcttcgat

SEQ ID NO: 701993 - DNA, 75 bp, synthetic construct
  source 1..75: mol_type = other DNA
ggcgagcgcgattgttggctacaccgtggacttcttcggctgggatggcggctttatggtaatgattggcggcag

SEQ ID NO: 701994 - DNA, 75 bp, synthetic construct
  source 1..75: mol_type = other DNA
gagcgggtcacgcagtcgattgatgcgcggctggttcagctgacctcaaaagctgaaaagagcggcggtgatttt

SEQ ID NO: 701995 - DNA, 75 bp, synthetic construct
  source 1..75: mol_type = other DNA
tgaccttgataccgaaaaggcctttgaatatatcgccggtgcgccgcaggggcagaaggataatccgcttattaa

SEQ ID NO: 701996 - DNA, 75 bp, synthetic construct
  source 1..75: mol_type = other DNA
gaggaagacatcagaaaccacaaatcaaatcagcgtgtttcacctgctgatcagtttgagatgcttgcattaagc

SEQ ID NO: 701997 - DNA, 75 bp, synthetic construct
  source 1..75: mol_type = other DNA
ctgggcctacttcttctatgagtatgcgggcattccgggcaccctgctgtgcggctggatgtcggataaagtctt

SEQ ID NO: 701998 - DNA, 75 bp, synthetic construct
  source 1..75: mol_type = other DNA
ccgaacaaactgctgtggtatatcgccatcgccaacgtgttcgttttacggcatcctcgactggtcaccgactta

SEQ ID NO: 701999 - DNA, 75 bp, synthetic construct
  source 1..75: mol_type = other DNA
ttccagtggcgcggaactgcattttctggggacatccgccgcgactgcacagtcatatacgggcaatctgtattt

SEQ ID NO: 702000 - DNA, 75 bp, synthetic construct
  source 1..75: mol_type = other DNA
gagcgccaccagttacgcggcatggagtacgaagagcaggccaattttattaaagagatcaccacccgctacaac

SEQ ID NO: 702001 - DNA, 75 bp, synthetic construct
  source 1..75: mol_type = other DNA
gcattgggtttgtgcggtgccacatcaatggatttcaccctgcccgtgcttcagcggacaggcgggctggagatg

SEQ ID NO: 702002 - DNA, 75 bp, synthetic construct
  source 1..75: mol_type = other DNA
ccagcgaaccggcggcttagagatgatcccggcggcgattgttcacggctttattcttagcctgttagtgccgat

SEQ ID NO: 702003 - DNA, 75 bp, synthetic construct
  source 1..75: mol_type = other DNA
cgggagattgatgtgtcccaccacgccctgaagagtggcgtgctgtgccccgacagtgcgtggcggcaaatcgtg

SEQ ID NO: 702004 - DNA, 75 bp, synthetic construct
  source 1..75: mol_type = other DNA
atcagtgagcgggtgctaccggtactgaatggcagtggcgtcagtgtttcgtcacttccacaggacagggcattc

SEQ ID NO: 702005 - DNA, 75 bp, synthetic construct
  source 1..75: mol_type = other DNA
tggcgattctgcattattccgccgtcagcattaccattattttactctgcaatattattgcgttgttgtggctgg

SEQ ID NO: 702006 - DNA, 75 bp, synthetic construct
  source 1..75: mol_type = other DNA
gatgtgtctcattcgaacctgaaagggggcgtgctcttcccggataaaacatggcggcagattgtcaccattgag

SEQ ID NO: 702007 - DNA, 75 bp, synthetic construct
  source 1..75: mol_type = other DNA
cgaccctgaaagggcttacccgtacctacttttcaacgccatcgggtgaaacgcatgaagcttatcagttctgga

SEQ ID NO: 702008 - DNA, 75 bp, synthetic construct
  source 1..75: mol_type = other DNA
accgtagtgaacaggcgttagtgtcagcattcaacgccgtcaggaaaatcaccaccgccggtggacaaattacct

SEQ ID NO: 702009 - DNA, 75 bp, synthetic construct
  source 1..75: mol_type = other DNA
tcagggttcaggggatggagtttgaacagcaggccgcactgattgaggaatacacccaaaaatataacgtgaaac

SEQ ID NO: 702010 - DNA, 75 bp, synthetic construct
  source 1..75: mol_type = other DNA
gtgatggtgaggcggccttcagcctgaatgcgctcatcggctgcggcgtggatggttacgatgaatggcctgact

SEQ ID NO: 702011 - DNA, 75 bp, synthetic construct
  source 1..75: mol_type = other DNA
gggcgttttcgtaccgtggagacggtcagggtacagggtatggagtttgaacagcaggcggccctgattgaggaa

SEQ ID NO: 702012 - DNA, 75 bp, synthetic construct
  source 1..75: mol_type = other DNA
acctgctgtgcggctccggtcgcggcgggaatgcggcgtcaacaggtatcgatggggggcgcgctggcattctgg

SEQ ID NO: 702013 - DNA, 75 bp, synthetic construct
  source 1..75: mol_type = other DNA
tgaattggcggtattttactcagctgccgaccatcgtcttgcagagctgactatgaataagctatatgacaagat

SEQ ID NO: 702014 - DNA, 75 bp, synthetic construct
  source 1..75: mol_type = other DNA
tatatttaatgctggcaggaataaagccaatctgaagctggctgaaattcgccagcaacagtcggtggttaatta

SEQ ID NO: 702015 - DNA, 75 bp, synthetic construct
  source 1..75: mol_type = other DNA
gatgcgctttattgcattaaccgggaaaagcagcacacggtgaaagtcctctcggcaagcagttatagtcctgat

SEQ ID NO: 702016 - DNA, 75 bp, synthetic construct
  source 1..75: mol_type = other DNA
atgaaatataaaacacttagccaggtacatactgaagcgatgcatgatcctgaatatcgtgcagcgtatgaggct

SEQ ID NO: 702017 - DNA, 75 bp, synthetic construct
  source 1..75: mol_type = other DNA
tcctgggtgcgatctctggtgcgcatcacgttcaccagatggctgaacactacggtgttccggtgatcctgcata

SEQ ID NO: 702018 - DNA, 75 bp, synthetic construct
  source 1..75: mol_type = other DNA
aaagaaaacaacttcgcactgccagcagtaaactgcgtcggtactgactccatcaacgccgtactggaaaccgca

SEQ ID NO: 702019 - DNA, 75 bp, synthetic construct
  source 1..75: mol_type = other DNA
ttgcaagggcgctggtgttgataaaattaaatttaaaagtgtcagtgggacagggcagattattcatgtatacac

SEQ ID NO: 702020 - DNA, 75 bp, synthetic construct
  source 1..75: mol_type = other DNA
cgtctgcagcgtgagcgtctgcaggctgtggagcgggacatggttcgtgaccttaaccgcgagaaaaccctcggg

SEQ ID NO: 702021 - DNA, 75 bp, synthetic construct
  source 1..75: mol_type = other DNA
ggtcagcccgcgacgctctacgaggcgctggtgaaggactataccggacggaccccggaggcacagtcgcagacg

SEQ ID NO: 702022 - DNA, 75 bp, synthetic construct
  source 1..75: mol_type = other DNA
gctgcgataaacaagataacaaacatatacttgtgctctgcgatgtcgggggggcgataaaaatgatcgctgaag

SEQ ID NO: 702023 - DNA, 75 bp, synthetic construct
  source 1..75: mol_type = other DNA
attttactcagccgcagatcaccgcctcgccgaattgaccatgaataaactgtacgacaagatcccttcctcagt

SEQ ID NO: 702024 - DNA, 75 bp, synthetic construct
  source 1..75: mol_type = other DNA
tggctgtatcagttccgtcgttgttcatcccgggagacgctggaaaaagtgatttcccacacacgttataaactt

SEQ ID NO: 702025 - DNA, 75 bp, synthetic construct
  source 1..75: mol_type = other DNA
ctaccatttcacgcatggaaaagaacgcatcacgtatgagtattgatacactggtacgctatgccagagcctgtg

SEQ ID NO: 702026 - DNA, 75 bp, synthetic construct
  source 1..75: mol_type = other DNA
atcttgttgcagcgcccggatattatggaagctgaacacgcgttaatggcggctaatgccaatattggcgccgca

SEQ ID NO: 702027 - DNA, 75 bp, synthetic construct
  source 1..75: mol_type = other DNA
ttgataatcaggtgaagacgctgattagcgaggcgctggtgaataaccgggatttgcgcatggcgacgctgaaag

SEQ ID NO: 702028 - DNA, 75 bp, synthetic construct
  source 1..75: mol_type = other DNA
gaacgttctttatttgcaacccgacaaactttacttgacctgaattatgcccgtcaggttaacgaaatttcttta

SEQ ID NO: 702029 - DNA, 75 bp, synthetic construct
  source 1..75: mol_type = other DNA
ggcgtcagcgaagtgagcttcacggagtttgcggctgaaaaaggctacgaactggaagagagcttcccggcagac

SEQ ID NO: 702030 - DNA, 75 bp, synthetic construct
  source 1..75: mol_type = other DNA
aaaccgtcgttgagatggtggcagaactgcatcgggtctatagcgccaaaaataaagcttacggcttgtttagcg

SEQ ID NO: 702031 - DNA, 75 bp, synthetic construct
  source 1..75: mol_type = other DNA
ctaatgatgggtgggtaatacctggtgcgtcgtggataccatcacactggatgccgctaccagaaccgccgcagg

SEQ ID NO: 702032 - DNA, 75 bp, synthetic construct
  source 1..75: mol_type = other DNA
gggaaaagtgagtccccataatggcattgattattccatgcccatgaacacgaaaatagtcagcgtcatcgacgg

SEQ ID NO: 702033 - DNA, 75 bp, synthetic construct
  source 1..75: mol_type = other DNA
atgtattctaccgatgtcgtaaaagaaaatgcttacctttcagccacccgctcggggctggaatcgaacgagatc

SEQ ID NO: 702034 - DNA, 75 bp, synthetic construct
  source 1..75: mol_type = other DNA
catcactaaagccagcatcgacacactgacgcgctacgctcacgcctgcggtattaaaaaaccagtcattgccct

SEQ ID NO: 702035 - DNA, 75 bp, synthetic construct
  source 1..75: mol_type = other DNA
tggctggtatcagggggaatatatttgctgttatgccaccctgagtgatgtgaataaccagccccaaataacata

SEQ ID NO: 702036 - DNA, 75 bp, synthetic construct
  source 1..75: mol_type = other DNA
gctgaacgagcctggcgcgatccggcagagatgatcgttattagttattcgactaatgttccttccggctacgac

SEQ ID NO: 702037 - DNA, 75 bp, synthetic construct
  source 1..75: mol_type = other DNA
atgacaattgactatcaggcactgcgtgaaaaggcagagaaagcaactaaaggaagctacatcgtagggcataca

SEQ ID NO: 702038 - DNA, 75 bp, synthetic construct
  source 1..75: mol_type = other DNA
gacggacctgaccgccggacagcgggcggcgacccggatgattctggagagcacggaccggttcacggtggttca

SEQ ID NO: 702039 - DNA, 75 bp, synthetic construct
  source 1..75: mol_type = other DNA
tcagaacagatgatgcacggaagtgcctcttccgacgaaatatttaaggctgaaaaagcggcagcaaaagcagca

SEQ ID NO: 702040 - DNA, 75 bp, synthetic construct
  source 1..75: mol_type = other DNA
ttctacattaccggctgcaagagcaaatcactccccggaacttatatttcattgtctggcgcgcctacaacatac

SEQ ID NO: 702041 - DNA, 75 bp, synthetic construct
  source 1..75: mol_type = other DNA
acgttattcgtttaaggaggtttcagcagtaagcctgaatggtgttgccggaggtaacggtttttgtatcgacag

SEQ ID NO: 702042 - DNA, 75 bp, synthetic construct
  source 1..75: mol_type = other DNA
gtctacgaaacgaaaacgggagcagccatttatatttctgaacttggcgcattacctccagacgtgacagccatt

SEQ ID NO: 702043 - DNA, 75 bp, synthetic construct
  source 1..75: mol_type = other DNA
tacagacattgcacctccagatattccggtgggttttgccgccgttttcaatgcagatgaaatgaaatgggatct

SEQ ID NO: 702044 - DNA, 75 bp, synthetic construct
  source 1..75: mol_type = other DNA
cgctaaccaataaaagtgccgccgaagtcggcaagtatctgcaaatggtgaaagagaaaaatggggagttattac

SEQ ID NO: 702045 - DNA, 75 bp, synthetic construct
  source 1..75: mol_type = other DNA
acgccaactgtaattttgcgaaatgttttcctcgaaaggaaagggaacgctgtaacatcccgggctgaacgggtt

SEQ ID NO: 702046 - DNA, 75 bp, synthetic construct
  source 1..75: mol_type = other DNA
ggttaccggcgcatctggcagttattacgtcgggagggccttcacgtcaaccacaagcgggtataccgcatttat

SEQ ID NO: 702047 - DNA, 75 bp, synthetic construct
  source 1..75: mol_type = other DNA
agaacggcagaacgttcgccagcaggtttatagctactgtaatgagcaattgcaggcgggcgaagagatcgagct

SEQ ID NO: 702048 - DNA, 75 bp, synthetic construct
  source 1..75: mol_type = other DNA
ccgttcagcttcacgctttcgaatggagagggggcatacactttcagtttcccgaaggttcagatgtcaggtgaa

SEQ ID NO: 702049 - DNA, 75 bp, synthetic construct
  source 1..75: mol_type = other DNA
cgactggggagtacggagaacaggcaacagtttttttcaacgtcgatttcgcgttctgaggaagtcttacctgac

SEQ ID NO: 702050 - DNA, 75 bp, synthetic construct
  source 1..75: mol_type = other DNA
tactcaatattgttgctaatatattaattcagaataaaacagtggcaattttgtccaataataactcagctgtca

SEQ ID NO: 702051 - DNA, 75 bp, synthetic construct
  source 1..75: mol_type = other DNA
aaagagaaaaatggtgagttattacaagtcgacaatgagttgacgcagaaacttgctgataagcagcttgaaatt

SEQ ID NO: 702052 - DNA, 75 bp, synthetic construct
  source 1..75: mol_type = other DNA
acggctggccattctggggaaaattccggaaacccggctgaaggggggcgatacggttcaggtgctgaaagcgga

SEQ ID NO: 702053 - DNA, 75 bp, synthetic construct
  source 1..75: mol_type = other DNA
cacggaaagtgcacaggcacaaacgttgattattacccacctgaatgatgaccgtcgggtgctgaaccgtatgat

SEQ ID NO: 702054 - DNA, 75 bp, synthetic construct
  source 1..75: mol_type = other DNA
ctgggcgcaagtggtccgcagtacgtgatggtgccaaagaagcatgcagatcaactgcgtgaatctctggcttca

SEQ ID NO: 702055 - DNA, 75 bp, synthetic construct
  source 1..75: mol_type = other DNA
accgaccagctgccgcccatcgcgtcgggccagccgttcaggctgacgcagcagcgcagcgccgccgacgttgcc

SEQ ID NO: 702056 - DNA, 75 bp, synthetic construct
  source 1..75: mol_type = other DNA
gtggtggtgcgtctggccggtgatgaccgcccctggaaccccggggccatgaccggcgggcgggtatgggctgaa

SEQ ID NO: 702057 - DNA, 75 bp, synthetic construct
  source 1..75: mol_type = other DNA
agcaatccccgcatatccggttgtcaggtcagagtggtaaggcacctgctttacactttcgcccgcggtcagtga

SEQ ID NO: 702058 - DNA, 75 bp, synthetic construct
  source 1..75: mol_type = other DNA
ttatctccgcttgctttcattatattatcttctatgccagtattcgctttgcgcgttagtgagctttttgctatt

SEQ ID NO: 702059 - DNA, 75 bp, synthetic construct
  source 1..75: mol_type = other DNA
acaatatgcaaaaaacaaaaatatcatgagttttgtgatgttgattgtcctcgcatcgacatttcatatcactgc

SEQ ID NO: 702060 - DNA, 75 bp, synthetic construct
  source 1..75: mol_type = other DNA
ccgaacaggcagtgccagcttcggctcgaccagaaagtttcactgcgcaaaatgtccgctatgcgctttcgctgc

SEQ ID NO: 702061 - DNA, 75 bp, synthetic construct
  source 1..75: mol_type = other DNA
aaagatgtgatgcgctggaacagcgatactgcgaatctgcaaccaggcgataagctgacgttgtttgtgaaaaac

SEQ ID NO: 702062 - DNA, 75 bp, synthetic construct
  source 1..75: mol_type = other DNA
tagcagggcaagttaaaaaacgtaacatgcctatggaactggtactactccccatagtggagagcgcttttgatc

SEQ ID NO: 702063 - DNA, 75 bp, synthetic construct
  source 1..75: mol_type = other DNA
ttcgcacagtacgtagttcgcggcttaatcctgctggcagcggtgattttcgaccgttacaagcaaaaagcgaaa

SEQ ID NO: 702064 - DNA, 75 bp, synthetic construct
  source 1..75: mol_type = other DNA
gactctggcctgtctgctgcatccgacccccgcgctgagcggtttcccgcatcaggccgcgacccaggttattgc

SEQ ID NO: 702065 - DNA, 75 bp, synthetic construct
  source 1..75: mol_type = other DNA
atcctggcagccattcccccgtaaagaaaaacaagcttccgcgcgccgtttcacccgcagccaggcgctgaacgt

SEQ ID NO: 702066 - DNA, 75 bp, synthetic construct
  source 1..75: mol_type = other DNA
ggggcaatccccttcgatccacgtcaaccttcatcgctgtatattcccgaatcctggcagccattctcccgccag

SEQ ID NO: 702067 - DNA, 75 bp, synthetic construct
  source 1..75: mol_type = other DNA
gctcgaaaccgtggtgcgttatcaaaatcagacactcacgcagctggtgcaaaaagccgtgccacgcaactacga

SEQ ID NO: 702068 - DNA, 75 bp, synthetic construct
  source 1..75: mol_type = other DNA
agtatgcgtgaagccttaccgaaagatggcctgttcagcagcgagcatacccgactctacaccagtatgtatgac

SEQ ID NO: 702069 - DNA, 75 bp, synthetic construct
  source 1..75: mol_type = other DNA
gatgtttcgcccgctttgatgaaccggctgtgaacggggattcgcccgacagtcccttccagcaaaaactcaccg

SEQ ID NO: 702070 - DNA, 75 bp, synthetic construct
  source 1..75: mol_type = other DNA
aagaaatactacgatccgcgcgtatggctgcgtgccggtcagacttcgatgattgctcgtctggaaaaagcattc

SEQ ID NO: 702071 - DNA, 75 bp, synthetic construct
  source 1..75: mol_type = other DNA
tctgacgttccgcagggtgctgctatcctgggtgcgatctctggtgcgcatcacgtacaccagatggctgaacac

SEQ ID NO: 702072 - DNA, 75 bp, synthetic construct
  source 1..75: mol_type = other DNA
ggaagccaatatgctggcgcgtatcgtgctgggtggcatgactgcaaaacagtgggcgcaggcgaacggcatcac

SEQ ID NO: 702073 - DNA, 75 bp, synthetic construct
  source 1..75: mol_type = other DNA
ttgccctgcaaggctgggaggttaaatccctgcgcgcaggaaaagccaatatcagcgacagctatgtccttctgc

SEQ ID NO: 702074 - DNA, 75 bp, synthetic construct
  source 1..75: mol_type = other DNA
atttctcgtatcgttcttggtgggctaactgctaagcagtgggcgcggataaatggctattctggcgaacctcgc

SEQ ID NO: 702075 - DNA, 75 bp, synthetic construct
  source 1..75: mol_type = other DNA
ccaatgggcaacctgggaaggcgttctgaactactacaaagaaaacgaagcttacttgcaaggccagctgggcaa

SEQ ID NO: 702076 - DNA, 75 bp, synthetic construct
  source 1..75: mol_type = other DNA
caccaccgaatatgaaaatggcgaagcgaagaaagtaaaggcgaagttccgggtttacagctcatatcttgaagc

SEQ ID NO: 702077 - DNA, 75 bp, synthetic construct
  source 1..75: mol_type = other DNA
caaccagcgcgaactggactcattgtacggtcgcgtcaatcgagaaggctataccgtagtggcgctctccctgta

SEQ ID NO: 702078 - DNA, 75 bp, synthetic construct
  source 1..75: mol_type = other DNA
tgattcgccgcgttaccggatccagcaagacagcaggcaaacaggagaccacgcagccggacagcgtgatagccg

SEQ ID NO: 702079 - DNA, 75 bp, synthetic construct
  source 1..75: mol_type = other DNA
tagccgaaaattacgcgcgtgtggtggctgaggtgatgcgccgtgacggtattgagcttaacggcgtggatatgc

SEQ ID NO: 702080 - DNA, 75 bp, synthetic construct
  source 1..75: mol_type = other DNA
atagaacttaatggcgtggatatgcgcaacatacgaaccagagttcttgagttgctggcctaccgtcgccgcgtg

SEQ ID NO: 702081 - DNA, 75 bp, synthetic construct
  source 1..75: mol_type = other DNA
ggtaaaatacactttgcaggaaggtatgcctggtctggaaaatctggcattaattcctggttgtgtcggctcatc

SEQ ID NO: 702082 - DNA, 75 bp, synthetic construct
  source 1..75: mol_type = other DNA
cgccgcgtgcagatgtaccaggagaaagaaaaaattacttaccactggaagaagccggagcggttacgacgttaa

SEQ ID NO: 702083 - DNA, 75 bp, synthetic construct
  source 1..75: mol_type = other DNA
agcatgcgcgacgctttaccaaaagatggcctgttcagcagcgagcacactcgcctctataccagtatgtatgac

SEQ ID NO: 702084 - DNA, 75 bp, synthetic construct
  source 1..75: mol_type = other DNA
aaaaggccgtaccgcgtaattacgatgattcgctgccgggcgatagtaaagcgtttctcgcgcaactctcgttac

SEQ ID NO: 702085 - DNA, 75 bp, synthetic construct
  source 1..75: mol_type = other DNA
cccgcgctacgccgccgtgacgaccgccgcgagtgcggaacagggggcgcaggccctacaggacgcgggctatgc

SEQ ID NO: 702086 - DNA, 75 bp, synthetic construct
  source 1..75: mol_type = other DNA
cttgaacgtgaagagaaaaatgccaaagcccggttacgagcagccaggacagcaatactgtatgcggaaaatgac

SEQ ID NO: 702087 - DNA, 75 bp, synthetic construct
  source 1..75: mol_type = other DNA
tggtgacgggcttaaccattgatacggggaataatcaacaggtcctgttcacccgccagccggatggcagtttta

SEQ ID NO: 702088 - DNA, 75 bp, synthetic construct
  source 1..75: mol_type = other DNA
ccgctgccgccgatgcatcgtcgggggatcattattgccgccattatattggtggtcggatttctgcttccatct

SEQ ID NO: 702089 - DNA, 75 bp, synthetic construct
  source 1..75: mol_type = other DNA
atgaatactggatatacgcctgtacaggggcggggcttcgttcggcctgaaaaacagaatctgcaaaatttcgct

SEQ ID NO: 702090 - DNA, 75 bp, synthetic construct
  source 1..75: mol_type = other DNA
aagacaccggagaaaagaaccgacctgacactgattcgaaagttaccagacggagaaatacgccgctacgacagg

SEQ ID NO: 702091 - DNA, 75 bp, synthetic construct
  source 1..75: mol_type = other DNA
gagaaagcgacacaacatctggcagagagtatcaatgcggcaccgaccacgcgtcactattaccatcagtggttt

SEQ ID NO: 702092 - DNA, 75 bp, synthetic construct
  source 1..75: mol_type = other DNA
gcctcttcgaccgttccgacgggcggggagcatgctgattttttaagttggctggaaagtggaccacggcagata

SEQ ID NO: 702093 - DNA, 75 bp, synthetic construct
  source 1..75: mol_type = other DNA
gagagaacaaaaattgcaatatgtggtggacccatacatctccttgccttccggcgcgtaagaggctaacctaca

SEQ ID NO: 702094 - DNA, 75 bp, synthetic construct
  source 1..75: mol_type = other DNA
aagtaactgaagcaatcgaaactgaacttgaacatttacgagaccaacaagcaaataacgcagagttaatactac

SEQ ID NO: 702095 - DNA, 75 bp, synthetic construct
  source 1..75: mol_type = other DNA
tccgcttctgaatattttttctcatatcgacgtttgtttggagcaatagaattaacaaaagaaaacaatgcttca

SEQ ID NO: 702096 - DNA, 75 bp, synthetic construct
  source 1..75: mol_type = other DNA
tcccggaacttccccagcaaatcgccgcgttgtatgagtggttttctgcccgctgtcgctggaaggaaaaagcgt

SEQ ID NO: 702097 - DNA, 75 bp, synthetic construct
  source 1..75: mol_type = other DNA
tgacatgttcacgaccacctcgtttataacggtgcgcaggctcatgaaagaactgaccagtcccagttctttcat

SEQ ID NO: 702098 - DNA, 75 bp, synthetic construct
  source 1..75: mol_type = other DNA
acttcgatcgcgagtgtcgcaacaatgcaaacctcaacgaagcaaacgcacggttctggagtgaacaggatgaaa

SEQ ID NO: 702099 - DNA, 75 bp, synthetic construct
  source 1..75: mol_type = other DNA
ctcatctggcgctgacgcaggtcgcgcaacatctggcactattgcaaaaaatggatcaccgcccacaatctgctt

SEQ ID NO: 702100 - DNA, 75 bp, synthetic construct
  source 1..75: mol_type = other DNA
taacgcaacgaggcctactggtgcaggcgggtgaacagagcgagcaaatttttacccgctggcgtgctggggcgt

SEQ ID NO: 702101 - DNA, 75 bp, synthetic construct
  source 1..75: mol_type = other DNA
gcagcatctggcgctgctgcaaaaaatggatcaccgccagcactctgctttcccggagctcccccagcaaattgc

SEQ ID NO: 702102 - DNA, 75 bp, synthetic construct
  source 1..75: mol_type = other DNA
ttggcgacgataagcggctattctagatttttggggatgaggcctccgttacatagaaatgttaagaggcttgca

SEQ ID NO: 702103 - DNA, 75 bp, synthetic construct
  source 1..75: mol_type = other DNA
accagataactttcgcctcatggacccgttgccgccgatgcatcgccggggaatcattattgcggcaatagtgct

SEQ ID NO: 702104 - DNA, 75 bp, synthetic construct
  source 1..75: mol_type = other DNA
gaaaagcattcactatccgtaacgtacgggttatgcctgaatccattccggctggttttaaagcactggctgaca

SEQ ID NO: 702105 - DNA, 75 bp, synthetic construct
  source 1..75: mol_type = other DNA
ccacaattcaggcactgcgaatcgcgctggatggtatagagcggagtgccgccatgcttcagagtcagggggaag

SEQ ID NO: 702106 - DNA, 75 bp, synthetic construct
  source 1..75: mol_type = other DNA
cagctacaggcacatttagtgacgccgcaaaacgatccggatcaggtcgccccggtcgcgccggaacctattcag

SEQ ID NO: 702107 - DNA, 75 bp, synthetic construct
  source 1..75: mol_type = other DNA
gcttaaccattgatacgggaaataatcagcaagtcctgttcacccgccaacctgatggtaatttcatccgcgcac

SEQ ID NO: 702108 - DNA, 75 bp, synthetic construct
  source 1..75: mol_type = other DNA
aaccaatcttcagacagcctgcttgccaatgtgtttcgtatcgcactggcatcactggaagcagagccagtggcg

SEQ ID NO: 702109 - DNA, 75 bp, synthetic construct
  source 1..75: mol_type = other DNA
atggttgtttccggcctgcatggcatgatttgcgcttttaaacgggagatccagagtgctgattggctatgtaag

SEQ ID NO: 702110 - DNA, 75 bp, synthetic construct
  source 1..75: mol_type = other DNA
tatgagtgattcttgtctgagaaaacaattaaacaaagagaacttaacctttaaaaaaatcatgttagatataaa

SEQ ID NO: 702111 - DNA, 75 bp, synthetic construct
  source 1..75: mol_type = other DNA
gcttttgacgtatcaacgcgaacactctactggtggcgccggttactgcgcaccggtggtccagaagcactaatt

SEQ ID NO: 702112 - DNA, 75 bp, synthetic construct
  source 1..75: mol_type = other DNA
tcgtgtggcggattcagtaggacgctttgctggttttactcatgttatggttgttggcggtggtgccagccttgt

SEQ ID NO: 702113 - DNA, 75 bp, synthetic construct
  source 1..75: mol_type = other DNA
cagctttcgaattgcaaggcccggcgcaaaacacgctgccgccgtgctctggacaagccttcccggcagataaca

SEQ ID NO: 702114 - DNA, 75 bp, synthetic construct
  source 1..75: mol_type = other DNA
gcaaaacgcgctgccgccgtgctctggacaagcttttccggcagataacaatggctatgcgccgccaccgtgtcg

SEQ ID NO: 702115 - DNA, 75 bp, synthetic construct
  source 1..75: mol_type = other DNA
acctgcatgtggaactgctggggcgcggctttgcctggctggatacgggcacccacgacagcctgatggacgcat

SEQ ID NO: 702116 - DNA, 75 bp, synthetic construct
  source 1..75: mol_type = other DNA
cagggtatatgccgtcgagttccgaaccgacagacggtaatgccgaagatatttttacagcgagttttgcaacaa

SEQ ID NO: 702117 - DNA, 75 bp, synthetic construct
  source 1..75: mol_type = other DNA
caaaaatttatctgaaatcaaagataaaggcgcggcggcgcaaaaaacggcgcgggaaaatatcggcgtcaatct

SEQ ID NO: 702118 - DNA, 75 bp, synthetic construct
  source 1..75: mol_type = other DNA
ggccattccgggatggcagtttctgacacagccatcaccggcggagcagcaactcagggcgctgctgacaccctc

SEQ ID NO: 702119 - DNA, 75 bp, synthetic construct
  source 1..75: mol_type = other DNA
ggggttcgcttggttggatacgggaacacatgatagccttattgaagcttctcaatttgttcatactatcgaaaa

SEQ ID NO: 702120 - DNA, 75 bp, synthetic construct
  source 1..75: mol_type = other DNA
acccacgacagcctgatggacgcatcacagttcattcacaccattgagaagcgccaggggatgaaggtcgcgtgc

SEQ ID NO: 702121 - DNA, 75 bp, synthetic construct
  source 1..75: mol_type = other DNA
atgaaacagaaaaattctggctttactgccagcggctccgttcggcctgaaatccgccccggcgatattttccgg

SEQ ID NO: 702122 - DNA, 75 bp, synthetic construct
  source 1..75: mol_type = other DNA
ctgccagtggcaaaactcaacccgaatttatgcgcggggatatttaccgcgataagtacggcggcatcgtgatga

SEQ ID NO: 702123 - DNA, 75 bp, synthetic construct
  source 1..75: mol_type = other DNA
gcaggccgtaccacgtcgtagcccaaccagcaacaacaaagcaaaggcgcatgttaaggccatgaagaagacgat

SEQ ID NO: 702124 - DNA, 75 bp, synthetic construct
  source 1..75: mol_type = other DNA
caatacctcaacccgcaaaactacctgtggggtgactttgctgccgctgccgtgatgtctgcattaccgatcacc

SEQ ID NO: 702125 - DNA, 75 bp, synthetic construct
  source 1..75: mol_type = other DNA
caggccttccgccttgtcctgttgccattatctgtaccgattctggcggtggtgttcatcctgtcgtttatcgct

SEQ ID NO: 702126 - DNA, 75 bp, synthetic construct
  source 1..75: mol_type = other DNA
tgaacaggctgatgggcgcattacgccaccgccgttcccggtactgctgtggctgtggaactcagtaaaggtcgc

SEQ ID NO: 702127 - DNA, 75 bp, synthetic construct
  source 1..75: mol_type = other DNA
cacgactggcagaactacccccggcatacaacctgcaacgcagtgcgcagctgctgcagcaactgagggtacttt

SEQ ID NO: 702128 - DNA, 75 bp, synthetic construct
  source 1..75: mol_type = other DNA
gtcgggtaatgggggtggcaaataaaggctggatgcgtggtgaaccgcaggacggtggctggatcggctggatga

SEQ ID NO: 702129 - DNA, 75 bp, synthetic construct
  source 1..75: mol_type = other DNA
ggtctggatgataacggttcgttgctgctggatttcggcccacgccagttcaccgtcagctttgatgaaacctta

SEQ ID NO: 702130 - DNA, 75 bp, synthetic construct
  source 1..75: mol_type = other DNA
ccatcgaaagaaagctgggcgttcactgcgttaggtgttctcggtaacgacgacaccgctcgcaaactgacgcca

SEQ ID NO: 702131 - DNA, 75 bp, synthetic construct
  source 1..75: mol_type = other DNA
gaccatcacttccacagtgatacaaatagccgtatccaacagctttcactcactaaaatgggagcggagaaaaaa

SEQ ID NO: 702132 - DNA, 75 bp, synthetic construct
  source 1..75: mol_type = other DNA
gtggcccgatgggtgactgcggtctgactggtcgtaaaattatcgttgatacctacggcggcatggcgcgtcacg

SEQ ID NO: 702133 - DNA, 75 bp, synthetic construct
  source 1..75: mol_type = other DNA
gctttttgccgactacgaactgttaccaccgttccgccagcttgatcgtaacagttacgcgctgacagaagccga

SEQ ID NO: 702134 - DNA, 75 bp, synthetic construct
  source 1..75: mol_type = other DNA
agagaagctccatatttgatattaaacggttttttcttttttattttacagttaggcactctggcaacatggagt

SEQ ID NO: 702135 - DNA, 75 bp, synthetic construct
  source 1..75: mol_type = other DNA
tacaaaagttaacatacatgctaaaagagaagctccatatttgatattaaatggttttttctttttattttacag

SEQ ID NO: 702136 - DNA, 75 bp, synthetic construct
  source 1..75: mol_type = other DNA
atatgatacatcaagtgctttaggtagagaacaggaaaggtacaggattatatccttgtctgttatttcaagttt

SEQ ID NO: 702137 - DNA, 75 bp, synthetic construct
  source 1..75: mol_type = other DNA
aattatgcagatagcagcaaggacagttatagaaggaataacgacaaatttagtttacgtctgcgtaaacattta

SEQ ID NO: 702138 - DNA, 75 bp, synthetic construct
  source 1..75: mol_type = other DNA
aatatgtcgacctcggcggtgttgccggtacagtgcagagcgtgcagattttctctacgactatgcgcaccgcag

SEQ ID NO: 702139 - DNA, 75 bp, synthetic construct
  source 1..75: mol_type = other DNA
gcgagtttgatgccgcaggtatcagcttcccgtatccgcaaatggatgtgaactttaagcgggtaaaagaacaat

SEQ ID NO: 702140 - DNA, 75 bp, synthetic construct
  source 1..75: mol_type = other DNA
ttgccagaattaatcgaaggcatggaagtttccattgatgtaagcacttgtgatgctgatttaggtaatcgctat

SEQ ID NO: 702141 - DNA, 75 bp, synthetic construct
  source 1..75: mol_type = other DNA
cccgtctcggtgatccgcgtcgtacacgacgccttgtgtcactggcctcttctctcgctcagcatgcaggtcttt

SEQ ID NO: 702142 - DNA, 75 bp, synthetic construct
  source 1..75: mol_type = other DNA
gtgccgtgaaatgttgcaaaacagcccgatggcactgcgctgcctgaaagctgcgctgaatgccgactgtgacgg

SEQ ID NO: 702143 - DNA, 75 bp, synthetic construct
  source 1..75: mol_type = other DNA
tccggcgtacatcacctgaatgtgctggacttccagcgtcagatccgtacctgtccgaaaccggttgtcgcgatg

SEQ ID NO: 702144 - DNA, 75 bp, synthetic construct
  source 1..75: mol_type = other DNA
ggtatggcgagatgatgaagcggattttagcggctaaaggtgatgaagttgcttttcgtgatgatggtgtttacg

SEQ ID NO: 702145 - DNA, 75 bp, synthetic construct
  source 1..75: mol_type = other DNA
atggactcacattgccattactgttcagtattaaatataaattcccaggttcatttgattccaaacaaattgtag

SEQ ID NO: 702146 - DNA, 75 bp, synthetic construct
  source 1..75: mol_type = other DNA
gagattgcgaatgttaatttaggggttttgtcaacagcttctaaaactaacggagcacaggtcatttttaaacta

SEQ ID NO: 702147 - DNA, 75 bp, synthetic construct
  source 1..75: mol_type = other DNA
ctgcacataagacgctactgctgcgcgtacaggaaatggtggataactggcataagagcgtaaggagccgcgcgc

SEQ ID NO: 702148 - DNA, 75 bp, synthetic construct
  source 1..75: mol_type = other DNA
ttgatatggacccgagctgctcactctttaccaccggtcagtgcatcagcgagccagatttattgacttctactc

SEQ ID NO: 702149 - DNA, 75 bp, synthetic construct
  source 1..75: mol_type = other DNA
tggatatggatccgacctgttcactgtttacgacagggcaatgtctgggggaacccgacctactggcatctaccc

SEQ ID NO: 702150 - DNA, 75 bp, synthetic construct
  source 1..75: mol_type = other DNA
ggcaatgccaccatgctgttctacatgacagaagaaggtcaggaaggtcgcaacgccttcaaccagaaacgtcag

SEQ ID NO: 702151 - DNA, 75 bp, synthetic construct
  source 1..75: mol_type = other DNA
atgaacagtacacaccactatgagcagttgattgaaatttttaatagctgctttgccgatgaatttaatacccgt

SEQ ID NO: 702152 - DNA, 75 bp, synthetic construct
  source 1..75: mol_type = other DNA
gtggtaccggtagtcgtttatggccgatgtcgcgcgagttatatccaaagcaatttctgcgtctctatgggcagc

SEQ ID NO: 702153 - DNA, 75 bp, synthetic construct
  source 1..75: mol_type = other DNA
aatgcttctgccgcgtgctaaccggttactgcaactcgccagcgtaaaaagaatgctggatgaagctctcaggaa

SEQ ID NO: 702154 - DNA, 75 bp, synthetic construct
  source 1..75: mol_type = other DNA
cgtgcccgcaaagccaatggagccaggcgctggcgcagtatctggaaacctgcatcgcccggcacgacgccctct

SEQ ID NO: 702155 - DNA, 75 bp, synthetic construct
  source 1..75: mol_type = other DNA
ccgatccatccgcaaatcaaccagttgattggtgattttacctccgtcacgctggttgattttaacttctcagcg

SEQ ID NO: 702156 - DNA, 75 bp, synthetic construct
  source 1..75: mol_type = other DNA
ctcgaccagatgatcgatgagtatgtcgggtgcatccgtcgtcagcagcctcacggcccttatgtgctggcgggt

SEQ ID NO: 702157 - DNA, 75 bp, synthetic construct
  source 1..75: mol_type = other DNA
ggcgacggtgaggaaaccctgtttgtcttccacgcttcagacggcgatatcagcgcctggctgccgctcgctagc

SEQ ID NO: 702158 - DNA, 75 bp, synthetic construct
  source 1..75: mol_type = other DNA
taaaccggagagggattgccagggctaaccttcaggatctgttcagccattcgacgctgagcgacttctgcgccc

SEQ ID NO: 702159 - DNA, 75 bp, synthetic construct
  source 1..75: mol_type = other DNA
gctcagagaaaaaggggcgcgacgcatcgccctgctggcgccgcgcgtggatgagtcatggctacgcgacgtgga

SEQ ID NO: 702160 - DNA, 75 bp, synthetic construct
  source 1..75: mol_type = other DNA
gtcaaaattgcgcttgaacaaacagcgggaggtcaaagcatcgccgttctgttaagcgatctcaataaagagtga

SEQ ID NO: 702161 - DNA, 75 bp, synthetic construct
  source 1..75: mol_type = other DNA
gcacctgctggcacatcgcaaatttttgctgggaagttttttgctgctggcggcaacgctggtagtcatggcctg

SEQ ID NO: 702162 - DNA, 75 bp, synthetic construct
  source 1..75: mol_type = other DNA
atgcttaatgcgttgttaattgtgggcgcgctgctgggattagttctgacgcacctgctggcacatcgcaaattt

SEQ ID NO: 702163 - DNA, 75 bp, synthetic construct
  source 1..75: mol_type = other DNA
ccgacaggttcatgcctgggcaatctcgatccgcagcggctttccaaagtcaccgcggatggcgaatggttaagt

SEQ ID NO: 702164 - DNA, 75 bp, synthetic construct
  source 1..75: mol_type = other DNA
tgggtcactgccgcagatgatgaagccattgtggatggtaatttaataaccgcgactacctggatggggcatcca

SEQ ID NO: 702165 - DNA, 75 bp, synthetic construct
  source 1..75: mol_type = other DNA
gcgatttctctgaagactatgaagtcatggtgccatggcaggcattaaacatgttaggtttcagagtggatgtag

SEQ ID NO: 702166 - DNA, 75 bp, synthetic construct
  source 1..75: mol_type = other DNA
tggaaggggaattaccgtcgccgatcaacccgccttccggttgtgttttccgtacccgttgcccgattgccggtc

SEQ ID NO: 702167 - DNA, 75 bp, synthetic construct
  source 1..75: mol_type = other DNA
aaattctatgattttgattcgaaaaattatgctgcaataacagtttttaagttaagtaaactccaagacagttaa

SEQ ID NO: 702168 - DNA, 75 bp, synthetic construct
  source 1..75: mol_type = other DNA
gacccattattgaaaaattagtggtactagagccaattacctttctcgataacattccggaactgcgtgttaacc

SEQ ID NO: 702169 - DNA, 75 bp, synthetic construct
  source 1..75: mol_type = other DNA
catcctcctagttcaggacgcagagccaaacttcgatgtaaatggcaactctccggtaattccggatggttggat

SEQ ID NO: 702170 - DNA, 75 bp, synthetic construct
  source 1..75: mol_type = other DNA
cttataccaaagccttgatgtcggcggtgccaattcctgatccggatctggagaagaacaaatccatccagttac

SEQ ID NO: 702171 - DNA, 75 bp, synthetic construct
  source 1..75: mol_type = other DNA
aagtcctcctcgaaatcgccgatctgaaagtgcactttgaaatcaaagatggcaaacagtggttctggcaaccgc

SEQ ID NO: 702172 - DNA, 75 bp, synthetic construct
  source 1..75: mol_type = other DNA
atgcaagagaaaagcgacaacgttgtcagtcactatgtctttgaagcgcccgtgcggatatggcactggctgacg

SEQ ID NO: 702173 - DNA, 75 bp, synthetic construct
  source 1..75: mol_type = other DNA
agcgccattatcaatagcggatatgaatatccggcgaaaaaaatcaccatcaacctggctccagccgatctgcca

SEQ ID NO: 702174 - DNA, 75 bp, synthetic construct
  source 1..75: mol_type = other DNA
ccggataccgccttgcatgcatactgttcaggacagagtaaaaaacgtgattcgccatgggggttgatttttccg

SEQ ID NO: 702175 - DNA, 75 bp, synthetic construct
  source 1..75: mol_type = other DNA
cactggggaaatgcgctaacggcgacgctgcaaacagaaaaacgcccgctatgcctttccctggcgcgccaggcg

SEQ ID NO: 702176 - DNA, 75 bp, synthetic construct
  source 1..75: mol_type = other DNA
atgaatatcgtacttgtgacaataaatcaggaccatgccgcaatagcgagctggctggcggcgcaggatttcagc

SEQ ID NO: 702177 - DNA, 75 bp, synthetic construct
  source 1..75: mol_type = other DNA
gtgttatgcatggcggtgttgatggtcaccggttactttatcggcaagccgctaccttccgtcagcggcgaggcg

SEQ ID NO: 702178 - DNA, 75 bp, synthetic construct
  source 1..75: mol_type = other DNA
tggcgactggttgtgcgaaacggcagcgaaagacaacaagctgatggcgattactccggcgatgcgtgaaggttc

SEQ ID NO: 702179 - DNA, 75 bp, synthetic construct
  source 1..75: mol_type = other DNA
cgatctccgaaaacgtcggcgcgctcaacaatcatctggcgcaattactttccggtaagctttactcttccctgc

SEQ ID NO: 702180 - DNA, 75 bp, synthetic construct
  source 1..75: mol_type = other DNA
aaggtcgtggttatgaaccggcagaaaaagacccaatcactttccacgccgtgcctaaatttgatccctccagcg

SEQ ID NO: 702181 - DNA, 75 bp, synthetic construct
  source 1..75: mol_type = other DNA
acgccattatgggcggcgcgggcagtggcgtgaacgaagtgctgatggctcatcgtaaaccggtgccggtactga

SEQ ID NO: 702182 - DNA, 75 bp, synthetic construct
  source 1..75: mol_type = other DNA
gagaacgaggatattgcgctaacggtagggaagctgagagttgagctggaagccgcagagaagcgcattgcagaa

SEQ ID NO: 702183 - DNA, 75 bp, synthetic construct
  source 1..75: mol_type = other DNA
ccgagcgatgaaaacgaatgtcgccagatgctctataccggctatcactataacgatggcccgtccgcggtgcgc

SEQ ID NO: 702184 - DNA, 75 bp, synthetic construct
  source 1..75: mol_type = other DNA
caggaagaaatgcgcgccgaactcggcctcgatgccgccggtatggaagccaaaatcaaagcctggctggcataa

SEQ ID NO: 702185 - DNA, 75 bp, synthetic construct
  source 1..75: mol_type = other DNA
tataccggaaatggtcattatgactccgagcgatgaaaacgaatgtcgccagatgctctataccggctatcacta

SEQ ID NO: 702186 - DNA, 75 bp, synthetic construct
  source 1..75: mol_type = other DNA
tttgccgccggtctggcgattggtggctacaaaccgatcgtggcaatttactccaccttcctgcaacgcgcctat

SEQ ID NO: 702187 - DNA, 75 bp, synthetic construct
  source 1..75: mol_type = other DNA
tgatcaggtgctgcatgacgtggcgattcaaaagctcccggtcctgttcgccatcgaccgcgcgggcattgttgg

SEQ ID NO: 702188 - DNA, 75 bp, synthetic construct
  source 1..75: mol_type = other DNA
cgaccctggcactggtcgactccacccaggagttacgcctgttgccgaaagagagtttaccgaaactctgcgacg

SEQ ID NO: 702189 - DNA, 75 bp, synthetic construct
  source 1..75: mol_type = other DNA
ctccaccttcctgcaacgcgcctatgatcaggtgctgcatgacgtggcgattcaaaaactcccggtcctgttcgc

SEQ ID NO: 702190 - DNA, 75 bp, synthetic construct
  source 1..75: mol_type = other DNA
ggcgactggttgtgcgaaacggcagcgaaagataacaagctgatggcgattactccggcgatgcgtgaaggttcc

SEQ ID NO: 702191 - DNA, 75 bp, synthetic construct
  source 1..75: mol_type = other DNA
ttccggtgaagcctcattatctctggtcatcacggcaaaaggaaaccatacccgtaatttttcaaatctcaggga

SEQ ID NO: 702192 - DNA, 75 bp, synthetic construct
  source 1..75: mol_type = other DNA
aagtagaccgcattcagtgtaacgacaccggaaaacacacctacgaaacgcttgtttacctctataaaggaaagc

SEQ ID NO: 702193 - DNA, 75 bp, synthetic construct
  source 1..75: mol_type = other DNA
atggctgctgagtgatgctattcaccgggttgtcaatgtggctgaacaggttggcattaaggctgttatggcgca

SEQ ID NO: 702194 - DNA, 75 bp, synthetic construct
  source 1..75: mol_type = other DNA
atgatgacgccagagcgttttatgagcgttttggttttgtccagtcagttgtggcacctgacaccttattttata

SEQ ID NO: 702195 - DNA, 75 bp, synthetic construct
  source 1..75: mol_type = other DNA
cggaacaaagcgcagttacagagtgacagctgatgcactgggccgctgggcttaccattgccatctgctctatca

SEQ ID NO: 702196 - DNA, 75 bp, synthetic construct
  source 1..75: mol_type = other DNA
atgttgtctgactggaccgatgaaaatcctcacagcctgctgaaaaaattaaaaaaacagtcggattactacaat

SEQ ID NO: 702197 - DNA, 75 bp, synthetic construct
  source 1..75: mol_type = other DNA
cttgcttacctctataaaggaaagccaacaccgctaaaatatagcgatgtgttacatcgagcagggtgctctgaa

SEQ ID NO: 702198 - DNA, 75 bp, synthetic construct
  source 1..75: mol_type = other DNA
gacccattcaaaattatcaccacaccaccgccgggtgatttttacatcttagagaatgataaatgggtatatgac

SEQ ID NO: 702199 - DNA, 75 bp, synthetic construct
  source 1..75: mol_type = other DNA
agactacatcgtgatcgaaggtcatcatttccacagtgacgcaaacagccgcattcaacaaatgacgctggcaag

SEQ ID NO: 702200 - DNA, 75 bp, synthetic construct
  source 1..75: mol_type = other DNA
aatcaaggcgctacgcgatgaagtcactgccgattatatcattatcggcgactatcactttcacagcgatgccag

SEQ ID NO: 702201 - DNA, 75 bp, synthetic construct
  source 1..75: mol_type = other DNA
gcagataacggaaatgatgttcatgaaaaaaaacccgcgcggcctgcatgggatgttttcaatgatttcgataaa

SEQ ID NO: 702202 - DNA, 75 bp, synthetic construct
  source 1..75: mol_type = other DNA
cgcgctgggaattgataatccgcaaagaaataaaggcgcattgacccgcgccattcgcaaaaaactgaatggcac

SEQ ID NO: 702203 - DNA, 75 bp, synthetic construct
  source 1..75: mol_type = other DNA
tataaaagcacatagggacgccgtcaccgccgattacatcgtgatcgacgggaatcgcttccatagcgacgctaa

SEQ ID NO: 702204 - DNA, 75 bp, synthetic construct
  source 1..75: mol_type = other DNA
atgaaaatgaatccgactgacctcgcggatgtcagtggctacacctacacctatctcatgaacgggcaggccccg

SEQ ID NO: 702205 - DNA, 75 bp, synthetic construct
  source 1..75: mol_type = other DNA
ctgtatgccactccggaagtgagcaaattcccggtatccgaactggcggaagatcagctgaacgatgaatcccgc

SEQ ID NO: 702206 - DNA, 75 bp, synthetic construct
  source 1..75: mol_type = other DNA
aacaactggcgcagctgtatgccgatccgaacaagaaagtcatctcctactggacgatgggcttcaaccagcata

SEQ ID NO: 702207 - DNA, 75 bp, synthetic construct
  source 1..75: mol_type = other DNA
gtcgtggcgacaaagtaaaagtggtttctcgccgtggtgaggttatctcgattgtcgaaacgcgtggtcgtaacc

SEQ ID NO: 702208 - DNA, 75 bp, synthetic construct
  source 1..75: mol_type = other DNA
atggtttcacctacaaaaaaccgtcaggcgtcccccataaattcagtgaagagaaacaaaggcaattcattgaat

SEQ ID NO: 702209 - DNA, 75 bp, synthetic construct
  source 1..75: mol_type = other DNA
ggcgggtgaacagagcgagcaaatttttacccgctggcgtgctggggcgtataacgcctggtcgttgcctgggcg

SEQ ID NO: 702210 - DNA, 75 bp, synthetic construct
  source 1..75: mol_type = other DNA
tcagggcgacccggacgcaccggttaaccgtggcctgaactgcattaagggctatttcctgcccaaaatcatgta

SEQ ID NO: 702211 - DNA, 75 bp, synthetic construct
  source 1..75: mol_type = other DNA
tggttcgggacgtgttaagtcgtatgaacagccttcagagtacagcacctgccacaacggcagtcagttctgtcc

SEQ ID NO: 702212 - DNA, 75 bp, synthetic construct
  source 1..75: mol_type = other DNA
gcccgtttgatttcgacgaagatgtaaaaaaaatagccgcgataaataaatatatccatgcgaaatttgagaggc

SEQ ID NO: 702213 - DNA, 75 bp, synthetic construct
  source 1..75: mol_type = other DNA
cgggactctggccacaagagaggggttaagtgctgccgttcccgctctcgatcctcgtcctcttctgaccatgga

SEQ ID NO: 702214 - DNA, 75 bp, synthetic construct
  source 1..75: mol_type = other DNA
atgtcacaggtgtttgcaagaaggttaaagacaaagaaaaagactacaccaaagacgagatcggccagttcaccg

SEQ ID NO: 702215 - DNA, 75 bp, synthetic construct
  source 1..75: mol_type = other DNA
tgtggcagccgggcaacggcattgtttaacaacaaaaacaagccatccgatttggtcggcaggaaggagtatctt

SEQ ID NO: 702216 - DNA, 75 bp, synthetic construct
  source 1..75: mol_type = other DNA
cacggtgaacgccgggtttgtccgcgagtcggcagaggtataccagcagagaaataagctgcgtaaaggcagtca

SEQ ID NO: 702217 - DNA, 75 bp, synthetic construct
  source 1..75: mol_type = other DNA
gtgacggagaagcgttcctgtttggcgcaaacatcacgccaatggcagtggcctccacgcatgtggtgtgcgatc

SEQ ID NO: 702218 - DNA, 75 bp, synthetic construct
  source 1..75: mol_type = other DNA
gctatggtgaattgctgacgctgcctaacgctgaccgtgtgaatccagagaattcaattcatctgactatggcag

SEQ ID NO: 702219 - DNA, 75 bp, synthetic construct
  source 1..75: mol_type = other DNA
gttgctaatctgcaggctgacacgctctccgcccgtcaggatgctgtccgtctgagcgaaaatgacgagggtggc

SEQ ID NO: 702220 - DNA, 75 bp, synthetic construct
  source 1..75: mol_type = other DNA
tgtcacagggaaagctaccggtaatgtgacagtttataacgctggtaccgtagacttgaaagatgcaaaaacagc

SEQ ID NO: 702221 - DNA, 75 bp, synthetic construct
  source 1..75: mol_type = other DNA
tggaatttatggggatgcagttgccaggctcttcttttgttcatccggattctccgctgcgcgatgctttgaccg

SEQ ID NO: 702222 - DNA, 75 bp, synthetic construct
  source 1..75: mol_type = other DNA
tgctgtgatgtacggtgaatctcacaacatgaattccgacgacggtgatgttgtgaacaaaacacaaaacttcga

SEQ ID NO: 702223 - DNA, 75 bp, synthetic construct
  source 1..75: mol_type = other DNA
cattaagccggggcagttggttctgcttgaagcctttggcggtggatttacctggggctccgcgctggttcgttt

SEQ ID NO: 702224 - DNA, 75 bp, synthetic construct
  source 1..75: mol_type = other DNA
gtggagcatgacagcggggtgatccgctttgccggagaggagattcgttcgctgccggtgctggagttgcgccgc

SEQ ID NO: 702225 - DNA, 75 bp, synthetic construct
  source 1..75: mol_type = other DNA
taccctgaagatgattaaccgcctggtggagcatgacagtggtgtgatccgctttgccggagaagaaattcgctc

SEQ ID NO: 702226 - DNA, 75 bp, synthetic construct
  source 1..75: mol_type = other DNA
gtgctgccggtggtgaacacgcagggccagccttgcggcacgctgcattttcaggatctgctggtggaggcgtaa

SEQ ID NO: 702227 - DNA, 75 bp, synthetic construct
  source 1..75: mol_type = other DNA
aaaagggtagcgtattggatggttttaacggtgatgcaacagacaacattacccttgctggctcaaatattatta

SEQ ID NO: 702228 - DNA, 75 bp, synthetic construct
  source 1..75: mol_type = other DNA
gcgctgaaggtgaggcgttgatagaagagatgacgcttcgcgatgcgctctcactgtttgttgcccgaggatgcg

SEQ ID NO: 702229 - DNA, 75 bp, synthetic construct
  source 1..75: mol_type = other DNA
agagatgacgctacgtgatgcgctctcattgtttgtcgctcgtggttgtgaagtgttgccggtggttgacgatca

SEQ ID NO: 702230 - DNA, 75 bp, synthetic construct
  source 1..75: mol_type = other DNA
actaaccacacaatgcacctggtggcgatggcgcgtgcggcgggtattcagattaactgggatgacttctctgat

SEQ ID NO: 702231 - DNA, 75 bp, synthetic construct
  source 1..75: mol_type = other DNA
tgaagtcagtaataatggcgttgtcgatctcggcacagtgacgctggactattttgctgacaatgtgaccccgac

SEQ ID NO: 702232 - DNA, 75 bp, synthetic construct
  source 1..75: mol_type = other DNA
ttattcccgtatgcagcgagtgaataatgcccttcctcccgaatcagggatggtgagaagtcaggttattgttaa

SEQ ID NO: 702233 - DNA, 75 bp, synthetic construct
  source 1..75: mol_type = other DNA
ttattcccgtatgcagcgagtgaataatgcccttcctccagaatcaggtatggtgagaagccaggttgttgttaa

SEQ ID NO: 702234 - DNA, 75 bp, synthetic construct
  source 1..75: mol_type = other DNA
cgaggcgcgccgcgtccgttacccgatacgctggcgacaatgacgcctcaggcctataacagcattcaatacgac

SEQ ID NO: 702235 - DNA, 75 bp, synthetic construct
  source 1..75: mol_type = other DNA
gaaacatggctgtatcagtatttccctccagcaccggataagcgccagtatgttgacgatcgcgtgatgaactaa

SEQ ID NO: 702236 - DNA, 75 bp, synthetic construct
  source 1..75: mol_type = other DNA
atcaaatttttagtaatgaatatgaacagcaggctaccggggcgaaaaacgtcggcattgtgatattttcggccc

SEQ ID NO: 702237 - DNA, 75 bp, synthetic construct
  source 1..75: mol_type = other DNA
atgaaacgcgttatcgtgatgatgctggcagcactgaccaccttcggaacgggattgcaggccagtgataaatac

SEQ ID NO: 702238 - DNA, 75 bp, synthetic construct
  source 1..75: mol_type = other DNA
aacactgactctggatgttgaggttaccgaacataagccttctgtggagtgggtggaaacctgcccgtttaataa

SEQ ID NO: 702239 - DNA, 75 bp, synthetic construct
  source 1..75: mol_type = other DNA
tttgaaagccaacatgacgttatgcctgcctttgaagcgggtttgctggatcgcgattgtgtggttgttgtccgt

SEQ ID NO: 702240 - DNA, 75 bp, synthetic construct
  source 1..75: mol_type = other DNA
tacgttttttggggctggcagcagcccttattacgcctttcggctatgcaggtcaggatgtggatctcaccgcga

SEQ ID NO: 702241 - DNA, 75 bp, synthetic construct
  source 1..75: mol_type = other DNA
aaatcccggacagtggtgttctgacgcagaaagtgaaagagcagattgctgaccagctgaaacaggcaggacagt

SEQ ID NO: 702242 - DNA, 75 bp, synthetic construct
  source 1..75: mol_type = other DNA
tcaaagacctttgaattttttaaaagtatggcctctgtgcaggtgacaataacactgactctggatgttgagata

SEQ ID NO: 702243 - DNA, 75 bp, synthetic construct
  source 1..75: mol_type = other DNA
aagtgctgccggtggtgaacacgcaggggcagccttgcggcacactgcattttcaggatctactggtggaggcgt

SEQ ID NO: 702244 - DNA, 75 bp, synthetic construct
  source 1..75: mol_type = other DNA
ggatttcgggaaatttttcctgatgcacagtacgtttctgttccggttgctgatggcggcgaaggaacggtggaa

SEQ ID NO: 702245 - DNA, 75 bp, synthetic construct
  source 1..75: mol_type = other DNA
gacgctgcgatactttgttgcataaatcaaaggctgtccccggaaacaacccgtgtggttccggtcagcgagtct

SEQ ID NO: 702246 - DNA, 75 bp, synthetic construct
  source 1..75: mol_type = other DNA
attccatgttgatgagggacatccgcacatcattctggcggcaaaccctgatatcaatgaatttcgtaaattaat

SEQ ID NO: 702247 - DNA, 75 bp, synthetic construct
  source 1..75: mol_type = other DNA
gtgttgcagcatgtgttctcaatgccagttctgtgaataatattgagcctgcactattactgtcagttatgaccg

SEQ ID NO: 702248 - DNA, 75 bp, synthetic construct
  source 1..75: mol_type = other DNA
cgtttcttggtgcagagctaaagagcggcattgagattgtgactacggcgttgaatctggaagaacatattcacg

SEQ ID NO: 702249 - DNA, 75 bp, synthetic construct
  source 1..75: mol_type = other DNA
ccacttcacgcggcacaggcgagttaatcctgcaggcgctggagagcggcgcgacaaacattattatcggcattg

SEQ ID NO: 702250 - DNA, 75 bp, synthetic construct
  source 1..75: mol_type = other DNA
ggatgcgcaggtgcgtaaagagctgcgtcgctggctgcgtcaacttcatgaagagctgaaattcaccagtgtgtt

SEQ ID NO: 702251 - DNA, 75 bp, synthetic construct
  source 1..75: mol_type = other DNA
cgtgaaccggcgactcgttttgtgctggagtttatgggcgaggtaaaccgcctgcagggaaccattcgcggcggg

SEQ ID NO: 702252 - DNA, 75 bp, synthetic construct
  source 1..75: mol_type = other DNA
atcgtttgttcgtcgggctgcaacatgcgcggctgtataacggcgacgagcgtattgaaacccgcgatgaggaac

SEQ ID NO: 702253 - DNA, 75 bp, synthetic construct
  source 1..75: mol_type = other DNA
tccccggaccttatacaaggtgctctgcaccgaatgtcctggtctcagctggcaaaagccgcggaagagtcgaca

SEQ ID NO: 702254 - DNA, 75 bp, synthetic construct
  source 1..75: mol_type = other DNA
atgacatccccggaccttatacaaggtgatctgcaccgaatgtcctggtctcaactggcaaaagccgcggaagag

SEQ ID NO: 702255 - DNA, 75 bp, synthetic construct
  source 1..75: mol_type = other DNA
tttactgagagctcagatcaactttccagggcaacagatcgcgtacccggtttgccggccagtcctggatatgtt

SEQ ID NO: 702256 - DNA, 75 bp, synthetic construct
  source 1..75: mol_type = other DNA
ctttcatttattccactgtattttcattttaaaagaataaatcaacgactgaagacccagaagaagatcgttgag

SEQ ID NO: 702257 - DNA, 75 bp, synthetic construct
  source 1..75: mol_type = other DNA
aggataaagctcaacactttattacctcggcaatgctttctgccgccgggaacgaatatgcgcaacatcagggga

SEQ ID NO: 702258 - DNA, 75 bp, synthetic construct
  source 1..75: mol_type = other DNA
gggatgagccgggatcgcagtgccatgtttggattgatgttctctgtcagtttgggggcgtcaaaagagctttgg

SEQ ID NO: 702259 - DNA, 75 bp, synthetic construct
  source 1..75: mol_type = other DNA
cttttcattcaaatttgggtaaagcgcagcgagaaaatcatcgccacggaaacaggcagtgtctggtcgccgaaa

SEQ ID NO: 702260 - DNA, 75 bp, synthetic construct
  source 1..75: mol_type = other DNA
atcatggtgaagtggtgcagcagggcaatccgctggcgatgcttacccgtccggcgaatgattttgtgcgccagt

SEQ ID NO: 702261 - DNA, 75 bp, synthetic construct
  source 1..75: mol_type = other DNA
aactgttcggcgcacaaaaagccgttaacgatctcaatctcaattttcaggaagggagtttttcggtgctgattg

SEQ ID NO: 702262 - DNA, 75 bp, synthetic construct
  source 1..75: mol_type = other DNA
gctgaacgaattcccggagctgaaaggtgtgcgcgatctcaccgaacaccagcgcggcgaacactcctactacta

SEQ ID NO: 702263 - DNA, 75 bp, synthetic construct
  source 1..75: mol_type = other DNA
aaagggccgcagagaaaatcagcgccagtcagtcagccggagcaaaaacagaagccccactcattccggaacaac

SEQ ID NO: 702264 - DNA, 75 bp, synthetic construct
  source 1..75: mol_type = other DNA
aattatcaccggaagagcaggcagcactggacaaatcgatggaaaaagagcgcgcggaaatggagaaaattctgg

SEQ ID NO: 702265 - DNA, 75 bp, synthetic construct
  source 1..75: mol_type = other DNA
cggtttttattataccagaacgcatgacagattttactactgggcatggttttggttatttatatctttcattcc

SEQ ID NO: 702266 - DNA, 75 bp, synthetic construct
  source 1..75: mol_type = other DNA
ctagcggttttattgccattcctttagtgaataacgtgacgctggtggtgctcttttttgcccttattaactgcg

SEQ ID NO: 702267 - DNA, 75 bp, synthetic construct
  source 1..75: mol_type = other DNA
ctggcttggtgctgcgattaacccattagtgagtggcatagtgcttaccagtctgccgcctttctcgctgtttat

SEQ ID NO: 702268 - DNA, 75 bp, synthetic construct
  source 1..75: mol_type = other DNA
tgtacttctgtacggcggtctgtgtgctgtatcttctttcgggtgggtacagggctgtgcgcgatttctggcgca

SEQ ID NO: 702269 - DNA, 75 bp, synthetic construct
  source 1..75: mol_type = other DNA
gttaataggatatgtgttttttttacttcttatgtatcttttcccagaattttacttatttaaaaaaatagtagg

SEQ ID NO: 702270 - DNA, 75 bp, synthetic construct
  source 1..75: mol_type = other DNA
atcccgaaatcagcgttccttattctttagaagcagagcaggcggtgttaggagggctgatgctggcaaatgagg

SEQ ID NO: 702271 - DNA, 75 bp, synthetic construct
  source 1..75: mol_type = other DNA
ctatgctgttgattttttgtcagacctgcgagtattcttcatgattcgtcttaagcttaaccaggttaagcagcc

SEQ ID NO: 702272 - DNA, 75 bp, synthetic construct
  source 1..75: mol_type = other DNA
cagcatttcggcccattgatgatgcttctctggcgcgtaatcccttccgcgtttttacctcattactccgccttg

SEQ ID NO: 702273 - DNA, 75 bp, synthetic construct
  source 1..75: mol_type = other DNA
aactggtagctgatgtgaatctggctgtgctggaaaacaatcctcaactgcacgaaaaaatggtaaatgcagacg

SEQ ID NO: 702274 - DNA, 75 bp, synthetic construct
  source 1..75: mol_type = other DNA
tatggattttctgagtcaattttatatgggcaaataacatacatatctaatttgatttcgaacaaaaaatataat

SEQ ID NO: 702275 - DNA, 75 bp, synthetic construct
  source 1..75: mol_type = other DNA
tggttattctgccgtcatcgggtgagcgttatttaagcactgcattgtttgccgatcttttcactgagaaagaac

SEQ ID NO: 702276 - DNA, 75 bp, synthetic construct
  source 1..75: mol_type = other DNA
tcactaacgccgtatttcacaataacatcgctaatgacggcaaaggcggtgcaatttataccatcaataatgacg

SEQ ID NO: 702277 - DNA, 75 bp, synthetic construct
  source 1..75: mol_type = other DNA
accagcggtggcgcagtatttttgcagcacagtgctgaatttacgatatcaccacaaaatgaaacagggatgacc

SEQ ID NO: 702278 - DNA, 75 bp, synthetic construct
  source 1..75: mol_type = other DNA
aaactaacctattgctgcatacccctaaaatcagcaatatcttccctgagctaaccagcactgagctggttactt

SEQ ID NO: 702279 - DNA, 75 bp, synthetic construct
  source 1..75: mol_type = other DNA
gcattagagcatcgccagcgatgtgaatcgtttaaatgggaagatggagccgatgagcaaggacgcctaaccgta

SEQ ID NO: 702280 - DNA, 75 bp, synthetic construct
  source 1..75: mol_type = other DNA
atatttgcctgaccaaatttatagcgctgaaaattttgtaagacgcaatagaattcaagctgcgctgtgcacatc

SEQ ID NO: 702281 - DNA, 75 bp, synthetic construct
  source 1..75: mol_type = other DNA
cccggtgagctattacgatctctcgcaggcgggggtgccggtacattcgacagcatttcggcccattgatgatgc

SEQ ID NO: 702282 - DNA, 75 bp, synthetic construct
  source 1..75: mol_type = other DNA
actgtttctcaggccgcgtgggtggtcagggacggggagcgggtggaccttcagataaatcatctgcctctgtac

SEQ ID NO: 702283 - DNA, 75 bp, synthetic construct
  source 1..75: mol_type = other DNA
gtgatgatgcaggaaagatacagcgccagctcgataaatacagtgtctatcagcatctgtcacgccagtcgcaat

SEQ ID NO: 702284 - DNA, 75 bp, synthetic construct
  source 1..75: mol_type = other DNA
aaaaaaacattgtctggcgttatgaaaatttttcactggagtggcagtcggccattacgcaggccatcaacttga

SEQ ID NO: 702285 - DNA, 75 bp, synthetic construct
  source 1..75: mol_type = other DNA
tcgatcaactgctggggccggagggtcaacccgctaacccgcaactgattgagaagtggctggcgcaactgaaaa

SEQ ID NO: 702286 - DNA, 75 bp, synthetic construct
  source 1..75: mol_type = other DNA
ttctggggcgactggggctcccgttgttcttgacgcttcgtttgcggcgggcaggccagcggcaactattggtga

SEQ ID NO: 702287 - DNA, 75 bp, synthetic construct
  source 1..75: mol_type = other DNA
gtggcggattacatcacgatgttcccgttctgtctgaagccgaaatgaccattgttcttgaaaaattcaaaacgt

SEQ ID NO: 702288 - DNA, 75 bp, synthetic construct
  source 1..75: mol_type = other DNA
ccccggctgtcatattaaccacctgacgccacgtactctggatatagacagagttcagtcaatgatgcctgagtg

SEQ ID NO: 702289 - DNA, 75 bp, synthetic construct
  source 1..75: mol_type = other DNA
aactcatcgaaaacgaaaccttgcgccagaaggcggcggagattttacatcagcgcgatatctttaccccgcgtt

SEQ ID NO: 702290 - DNA, 75 bp, synthetic construct
  source 1..75: mol_type = other DNA
ataccgcgcgctttggtgaaattgagcagcgtggcgtggcattaacgccgaaagggcgacaactgtatgatgatc

SEQ ID NO: 702291 - DNA, 75 bp, synthetic construct
  source 1..75: mol_type = other DNA
ctttgaacaggcgttgggctgcccggtttttgatgagttccggctctatcaggaagcggaagaacgcagtaaacg

SEQ ID NO: 702292 - DNA, 75 bp, synthetic construct
  source 1..75: mol_type = other DNA
aaagggcggcggttgtatgacgatttactgcgtaaggctggaaccgggcaggataatcttacgcatcagttgcat

SEQ ID NO: 702293 - DNA, 75 bp, synthetic construct
  source 1..75: mol_type = other DNA
taaagcactggaagagacggtgtgttgtttgcggggcagaaacagggcacgcataccgcgcgctttggtgaaatt

SEQ ID NO: 702294 - DNA, 75 bp, synthetic construct
  source 1..75: mol_type = other DNA
gggctggcgcggctgattaatgacattcctcttcccggtatagcgggcgttgaacgcgtactctttcgtatactt

SEQ ID NO: 702295 - DNA, 75 bp, synthetic construct
  source 1..75: mol_type = other DNA
atgacccttacggtgacggtattccgttctgagggggtgacgatggtacatgaccgcatagcggaggaactcgag

SEQ ID NO: 702296 - DNA, 75 bp, synthetic construct
  source 1..75: mol_type = other DNA
cagagaaagcaatcaaagcgggcgacgaactggcgtttcagtatcgtctttactggagtgcacagcctcccgttc

SEQ ID NO: 702297 - DNA, 75 bp, synthetic construct
  source 1..75: mol_type = other DNA
gtcagggcgacgctatcagtgaaacatggctgtatcagtatttcccgccagcgccggataaacgtcagtatgttg

SEQ ID NO: 702298 - DNA, 75 bp, synthetic construct
  source 1..75: mol_type = other DNA
cagaggccaccggagccgccagaggagaactacgcagacctgaggaaagcagtaaaccgcacttacgcagaaatg

SEQ ID NO: 702299 - DNA, 75 bp, synthetic construct
  source 1..75: mol_type = other DNA
aaattgcagatgaagtaaaatcacttacatatttgattccttcagaaaaaaaagagatgtggatatataaaaaca

SEQ ID NO: 702300 - DNA, 75 bp, synthetic construct
  source 1..75: mol_type = other DNA
attgactctttatttttaaaaaagttaaataatgtgcgaaatcaaaataaatttccaatcgatgtaaaagaaacg

SEQ ID NO: 702301 - DNA, 75 bp, synthetic construct
  source 1..75: mol_type = other DNA
attctttcatatgggcatggggttccgccgccgcgtacggatgttttctgttgatccggcaacgcatctggcgcg

SEQ ID NO: 702302 - DNA, 75 bp, synthetic construct
  source 1..75: mol_type = other DNA
gactttaccgccttctggtttgatacggtaaaaccgggggcaaccacctttaccgtttatgcgttgctcgatagc

SEQ ID NO: 702303 - DNA, 75 bp, synthetic construct
  source 1..75: mol_type = other DNA
tactggagtgcgcaaccgcctgttcattgcccattagcgcgcgttatggcgacgcgtaccggcatgggcggtttc

SEQ ID NO: 702304 - DNA, 75 bp, synthetic construct
  source 1..75: mol_type = other DNA
ctggtataacaaacgcccaagtctgtgggtggaaccgcgtaacaagtggggtaagggcactatcggtttgatgga

SEQ ID NO: 702305 - DNA, 75 bp, synthetic construct
  source 1..75: mol_type = other DNA
ggtgattatggatgtcgaaaatcacctgtatgcgcgtaaagacattaaacaactgggcatcgcgccgatgaccag

SEQ ID NO: 702306 - DNA, 75 bp, synthetic construct
  source 1..75: mol_type = other DNA
cactgtttacgcgttgcttgatagcgcaagcatcaccggagcttacaagttcaccattcattgtgagaagagtca

SEQ ID NO: 702307 - DNA, 75 bp, synthetic construct
  source 1..75: mol_type = other DNA
attccgcgaatcaattcctagcctgatgcttatttttatcattattggcggtattatcgcaggggtatttacgcc

SEQ ID NO: 702308 - DNA, 75 bp, synthetic construct
  source 1..75: mol_type = other DNA
caatgtgattgggtttttgcgtggagtttcggaagagatccgtcgttcaaccagagagcatagagatcaaggtga

SEQ ID NO: 702309 - DNA, 75 bp, synthetic construct
  source 1..75: mol_type = other DNA
taataccgttgatatcaccggtaatattctggtggataaagatcaaaccgcagataacgcggtagattatttcta

SEQ ID NO: 702310 - DNA, 75 bp, synthetic construct
  source 1..75: mol_type = other DNA
ggttaacggcgacgaagccaccgtaaacaataacggcagcaccaccgttgacggcaaggattccacgggcaccga

SEQ ID NO: 702311 - DNA, 75 bp, synthetic construct
  source 1..75: mol_type = other DNA
gcgaagtggtggtcgttgccgataaatatggcgtgcgaattaccgatattattacgccttccgagcggatgcgtc

SEQ ID NO: 702312 - DNA, 75 bp, synthetic construct
  source 1..75: mol_type = other DNA
gatccgtcgtggcgctggacggtctggcgggcgaaccgctggatattctgatcaacggttatttaattgctcagg

SEQ ID NO: 702313 - DNA, 75 bp, synthetic construct
  source 1..75: mol_type = other DNA
gcgaagttgtcgtagtcgctgataaatatggcgtgcggatcaccgatatcattactccgtctgagcgaatgcgtc

SEQ ID NO: 702314 - DNA, 75 bp, synthetic construct
  source 1..75: mol_type = other DNA
cgcaggttaacggtgatgaagccaccgtaaacaataacggtaaaaccaccgttgatggtcagggctcgaccggca

SEQ ID NO: 702315 - DNA, 75 bp, synthetic construct
  source 1..75: mol_type = other DNA
ggtacactggatgtcagcggaagtgcggtcacgagtagcgtcagcgacctagacgctagcgctacggtgcgcacg

SEQ ID NO: 702316 - DNA, 75 bp, synthetic construct
  source 1..75: mol_type = other DNA
tgacaacgccatcagtaacggcggcaccggcacgcaggttaacggtgatgaagccaccgtgaacaataacggtaa

SEQ ID NO: 702317 - DNA, 75 bp, synthetic construct
  source 1..75: mol_type = other DNA
aacaacactggaaaaaccatcgtcgacggcaaaggcgccaccggaactgaaatcgcgggtaacaacgcggtggtg

SEQ ID NO: 702318 - DNA, 75 bp, synthetic construct
  source 1..75: mol_type = other DNA
cctgtattgcattagctctgagtggtcagggttgggaggcagatatcacagaggtagaaaccaccacaggtgaaa

SEQ ID NO: 702319 - DNA, 75 bp, synthetic construct
  source 1..75: mol_type = other DNA
aacgcggtggtgaaccaggacggcgagctggatgtgagcggcggcggtcacgggattgatatcaccggcgacagc

SEQ ID NO: 702320 - DNA, 75 bp, synthetic construct
  source 1..75: mol_type = other DNA
gggcgcgtgttccttgcccactgcgccatgcacgaagacaacccgttcagctattgcgataactacttttactat

SEQ ID NO: 702321 - DNA, 75 bp, synthetic construct
  source 1..75: mol_type = other DNA
tcgcgtgaaagctggcctacgggcaaagaggtggtattcgcgctaacattttcaccccaacagaagcaggtgcag

SEQ ID NO: 702322 - DNA, 75 bp, synthetic construct
  source 1..75: mol_type = other DNA
tctgggtgtagcgaatattctcgtcagcaccatgatgggcggtgtcagtgcctctaaccttgcagatgcagcaat

SEQ ID NO: 702323 - DNA, 75 bp, synthetic construct
  source 1..75: mol_type = other DNA
gtcgaggcactggaaaacctggacccggattcactgactccgcgtcaggcgctggagtggatttatcgcttgaag

SEQ ID NO: 702324 - DNA, 75 bp, synthetic construct
  source 1..75: mol_type = other DNA
tagaaaatgtcgatagtgcaccagtacaggcgctgcgtgaaaaaatgggcgaatttgccgaactgcgcgacctgc

SEQ ID NO: 702325 - DNA, 75 bp, synthetic construct
  source 1..75: mol_type = other DNA
ctatcactatggaacgtgagcaggacagcatcattatggatgctgcgacgcgtcgtaacctggaaattacccaga

SEQ ID NO: 702326 - DNA, 75 bp, synthetic construct
  source 1..75: mol_type = other DNA
cgcccagcagcgttatctggcgtcgctgcaaattactttgcaacgggcgcgggcattatatcagcacggcgcagt

SEQ ID NO: 702327 - DNA, 75 bp, synthetic construct
  source 1..75: mol_type = other DNA
cctctactggcggctctactattaatgctaatgctggtgacatatatcccggcgatttcactgttcctggtttaa

SEQ ID NO: 702328 - DNA, 75 bp, synthetic construct
  source 1..75: mol_type = other DNA
tttaatagttcgtttattgttatatctaaacgaagctatgctaattttaatccagaaaagtatccaaaattcaaa

SEQ ID NO: 702329 - DNA, 75 bp, synthetic construct
  source 1..75: mol_type = other DNA
ttggcatcatcatgatcttcaacctgtcgattggcgcattcacgccaccggtaggtaccgtgatgctgctggtat

SEQ ID NO: 702330 - DNA, 75 bp, synthetic construct
  source 1..75: mol_type = other DNA
tctgaccgatgccgaccgctacccacagctcaatggcgagggcagcggcagctggagcggcaatcttaaagggaa

SEQ ID NO: 702331 - DNA, 75 bp, synthetic construct
  source 1..75: mol_type = other DNA
atcttattgcagcgcccggatattatggaagctgaacacgcgttaatggcggctaatgccaatattggtgctgca

SEQ ID NO: 702332 - DNA, 75 bp, synthetic construct
  source 1..75: mol_type = other DNA
cgatggaacgtgagcaggacagcatcattatggatgccgcaacgcgtcgtaatctggaaatcacccagaatctgg

SEQ ID NO: 702333 - DNA, 75 bp, synthetic construct
  source 1..75: mol_type = other DNA
aagagtacgaagataaagttctcacctcaaaaggcaaagcactggcactggaaaaacagctttatgaagagctgt

SEQ ID NO: 702334 - DNA, 75 bp, synthetic construct
  source 1..75: mol_type = other DNA
gtaccggcctggacacgctgaaagttggctttaatgcggtgcacggctactacattcaaatcagccgtgggcaaa

SEQ ID NO: 702335 - DNA, 75 bp, synthetic construct
  source 1..75: mol_type = other DNA
gaaaacctcgacccggattcactgactccgcgtcaggcgctggagtggatttatcgcttgaagagtctggtgtaa

SEQ ID NO: 702336 - DNA, 75 bp, synthetic construct
  source 1..75: mol_type = other DNA
tacgccagaaatggttgagcaactggacaataatctggcgcattatgcggcggtgatccgaaatcaacttgggaa

SEQ ID NO: 702337 - DNA, 75 bp, synthetic construct
  source 1..75: mol_type = other DNA
aacccgctgaacctgtcgccgcagcgtcgcatgttgatcattaccggtccgaacatgggcggtaaaagtacctat

SEQ ID NO: 702338 - DNA, 75 bp, synthetic construct
  source 1..75: mol_type = other DNA
atgcgccagaccgcactgattgcgctgatggcctacatcggcagctatgtaccggcacaaaaagtcgagattgga

SEQ ID NO: 702339 - DNA, 75 bp, synthetic construct
  source 1..75: mol_type = other DNA
gtcgaagcgctggaaaatcttgacccggattcacttaccccgcgtcaggcgctggaatggatttatcgcttgaag

SEQ ID NO: 702340 - DNA, 75 bp, synthetic construct
  source 1..75: mol_type = other DNA
gccacccactatttcgagctgacccagttaccggagaaaatggaaggcgtcgccaacgtgcatctcgatgcactg

SEQ ID NO: 702341 - DNA, 75 bp, synthetic construct
  source 1..75: mol_type = other DNA
tggctttaatgcggtgcacggctactacattcagatcagccgtgggcaaagccatctggcaccgattaactacat

SEQ ID NO: 702342 - DNA, 75 bp, synthetic construct
  source 1..75: mol_type = other DNA
gaaaccgccaatattttacataacgccaccgaatatagtctggtgttgatggatgagatcgggcgtggaacgtcc

SEQ ID NO: 702343 - DNA, 75 bp, synthetic construct
  source 1..75: mol_type = other DNA
agttccgggcgttttcgtctgagcgaaccggctgaccgcgaaacgatggcagcagaactgcaacgcaccaatccg

SEQ ID NO: 702344 - DNA, 75 bp, synthetic construct
  source 1..75: mol_type = other DNA
cgccaacgtgcatctcgatgcactggagcacggcgacaccattgcctttatgcatagcgtgcaggatggcgcggc

SEQ ID NO: 702345 - DNA, 75 bp, synthetic construct
  source 1..75: mol_type = other DNA
atgctgtttcaggtaatttcaatggaagcgccattctatccattagtattctttaatgttatctattttgataaa

SEQ ID NO: 702346 - DNA, 75 bp, synthetic construct
  source 1..75: mol_type = other DNA
gattgcatctattttgtccattacaaatggttcttccaggaatgcaatttcggaagtatataaatttttcggtat

SEQ ID NO: 702347 - DNA, 75 bp, synthetic construct
  source 1..75: mol_type = other DNA
tgattattggttctttaacaggttgcgctagtgtgccaccattgaatttttcaacacctaacgtgggagttagcc

SEQ ID NO: 702348 - DNA, 75 bp, synthetic construct
  source 1..75: mol_type = other DNA
gaaaacatcaatacaaaaatgcctgtcaggagcatacgtgtttgccgaatctgctcgagcgtcagttcgctgtac

SEQ ID NO: 702349 - DNA, 75 bp, synthetic construct
  source 1..75: mol_type = other DNA
ttaccttattccagagaaagactttgataagctctcacctgtattacctctacctgtttctgctgattatcatga

SEQ ID NO: 702350 - DNA, 75 bp, synthetic construct
  source 1..75: mol_type = other DNA
tcacaccacaaaatgatcctgatcaggtggctccggtcgctccagaaccgatacaggaaggccaaccggaagagc

SEQ ID NO: 702351 - DNA, 75 bp, synthetic construct
  source 1..75: mol_type = other DNA
taaatttggaattaatgaactgttctataaaatcaaattaactggagcaaagataagcgacattcatgtctctat

SEQ ID NO: 702352 - DNA, 75 bp, synthetic construct
  source 1..75: mol_type = other DNA
ggtgatgcgccgtgacggtattgagcttaacggcgtggatatgcgcaacatacgaaccagagtccttgagttgct

SEQ ID NO: 702353 - DNA, 75 bp, synthetic construct
  source 1..75: mol_type = other DNA
ccagcagcatgacgaacaggccacacagccggacagcgtgaccgctgaaaattatgtgcgtgttgtagcggaagt

SEQ ID NO: 702354 - DNA, 75 bp, synthetic construct
  source 1..75: mol_type = other DNA
gcgacggagaagcgttcctgtttggcgcaaacatcacgccaatggctgtggcttctacgcatgtggtgtgcgatc

SEQ ID NO: 702355 - DNA, 75 bp, synthetic construct
  source 1..75: mol_type = other DNA
ctgcgattaatccgtcgcgttgccggaatcagccagcaggctgacgaacaggccacgcagccggacagcgtgacc

SEQ ID NO: 702356 - DNA, 75 bp, synthetic construct
  source 1..75: mol_type = other DNA
aacggacaggattgcttagtcatccgcaccaaagtggtggctatactggcagctaggcggaggcagggacaacgc

SEQ ID NO: 702357 - DNA, 75 bp, synthetic construct
  source 1..75: mol_type = other DNA
aatgatgtggatatgcgcaacatacggatccgcgttctggaaatgctggcataccgtcgccgcgtggagatgtat

SEQ ID NO: 702358 - DNA, 75 bp, synthetic construct
  source 1..75: mol_type = other DNA
ccgaaatatgggcaagagcctggatgccagttttatacacatatatcagatcaatacagtccgttttacacctgc

SEQ ID NO: 702359 - DNA, 75 bp, synthetic construct
  source 1..75: mol_type = other DNA
gttatgtactgggttgtatgtgatacccgccgcgcaatgtatcagcgccagcttagcgagattgaggttgagaaa

SEQ ID NO: 702360 - DNA, 75 bp, synthetic construct
  source 1..75: mol_type = other DNA
cccttgggggaataacaccggcgcagtggctgatggaggaatacaggcggggaaaggcggcaggatttatcaagt

SEQ ID NO: 702361 - DNA, 75 bp, synthetic construct
  source 1..75: mol_type = other DNA
gccagagcatgagcacactcgggaatgcctgggtcgatctgctacgcatcacgttatgggtgctagtccctgtgg

SEQ ID NO: 702362 - DNA, 75 bp, synthetic construct
  source 1..75: mol_type = other DNA
gaacttttacaacactggggtgagcaaggttataaagtcatctttcatgcccccctaattttacctttatcccgc

SEQ ID NO: 702363 - DNA, 75 bp, synthetic construct
  source 1..75: mol_type = other DNA
ctataaaaaactttagatcttgcaaagatattgatatcaatttttcttcattcacgcctttaatcggttacaaca

SEQ ID NO: 702364 - DNA, 75 bp, synthetic construct
  source 1..75: mol_type = other DNA
acgccgccacccttgggggaataacaccggcgcagtggctgatggaggaatacaggcggggaaaggcggcaggat

SEQ ID NO: 702365 - DNA, 75 bp, synthetic construct
  source 1..75: mol_type = other DNA
taatggatacactgaatgctaaagagggcagaggaacactctattttgccgggcaggggatccagcaacaatggc

SEQ ID NO: 702366 - DNA, 75 bp, synthetic construct
  source 1..75: mol_type = other DNA
gggctagcgtggctgattaatgatattcctcttcctggtacgacgggcgttgaacgcgtactctttagcgcgctt

SEQ ID NO: 702367 - DNA, 75 bp, synthetic construct
  source 1..75: mol_type = other DNA
gccgtgcagaccctgcgtgagatgaacgccgacaacctgcgcaaggtgccggccgatgcacccacggccttcatc

SEQ ID NO: 702368 - DNA, 75 bp, synthetic construct
  source 1..75: mol_type = other DNA
ccgggctgaatgacatcgcaaaggatctggatgcgcttagccgcgcagaaaacaataaggttctgcgtgatgcca

SEQ ID NO: 702369 - DNA, 75 bp, synthetic construct
  source 1..75: mol_type = other DNA
ctcagcagtgggaacatctctttcctacaccttcctgcactttattatttatcgtatcgtaggtggacttgctgt

SEQ ID NO: 702370 - DNA, 75 bp, synthetic construct
  source 1..75: mol_type = other DNA
tgattctgggctgcatgatcgctatactgcaacaggtaacaggggttaacgtcatgatgtattacgcgccaatcg

SEQ ID NO: 702371 - DNA, 75 bp, synthetic construct
  source 1..75: mol_type = other DNA
gtgttaccgaaagagagggcgctatctttcctgcctgccgaccgtttaacgctgcaacttaaagctgaaatggga

SEQ ID NO: 702372 - DNA, 75 bp, synthetic construct
  source 1..75: mol_type = other DNA
atggtatcgtgcgcgttgcagaaagcgtcattcctgaaattaaacatcaggatgaggtgcgggtacgcaaaatat

SEQ ID NO: 702373 - DNA, 75 bp, synthetic construct
  source 1..75: mol_type = other DNA
aatatctcaaaatgcacggcggcagtcacaatgccagcacggcaccgtatcgcacggctttctatctggaagttg

SEQ ID NO: 702374 - DNA, 75 bp, synthetic construct
  source 1..75: mol_type = other DNA
cattattgttgtttgttgccctttgggcacccttaagtcaggcagaaacgggatggcagccgattcaggaaacca

SEQ ID NO: 702375 - DNA, 75 bp, synthetic construct
  source 1..75: mol_type = other DNA
ggcattatcattcattacgtcccggcgctgccgcgtaaagtgttgcgcgtagagtttcgtattgataacaactcg

SEQ ID NO: 702376 - DNA, 75 bp, synthetic construct
  source 1..75: mol_type = other DNA
ctgctgcaaaccaacccgcagtggcaatccattttcgacacttacggtgtgctgccgcgccacccatcacagctt

SEQ ID NO: 702377 - DNA, 75 bp, synthetic construct
  source 1..75: mol_type = other DNA
gcgtctgggcaactttattaacggtgaattgtggggccgcgttgacccgaacttcccgtttgccatgctgttccc

SEQ ID NO: 702378 - DNA, 75 bp, synthetic construct
  source 1..75: mol_type = other DNA
ctggtttgagcagaccaagtacgcaattggtcagttgccgatcgaccattaccgttcttcattagacgaaagtgg

SEQ ID NO: 702379 - DNA, 75 bp, synthetic construct
  source 1..75: mol_type = other DNA
cggcagcgtgtctgatgactgaagctccgagctttgccaacccgactgctctggctgagctgagcattcaggttg

SEQ ID NO: 702380 - DNA, 75 bp, synthetic construct
  source 1..75: mol_type = other DNA
tgtctgatgactgaagcaccgagctttgctaacccgactgcactggctgagctgagcattcaggttgtgaagaag

SEQ ID NO: 702381 - DNA, 75 bp, synthetic construct
  source 1..75: mol_type = other DNA
acttactttatgcgggcttcctcggcgttttccttggtggacgtattggttatgttctgttctacaacttcccac

SEQ ID NO: 702382 - DNA, 75 bp, synthetic construct
  source 1..75: mol_type = other DNA
cgcaccgctttctatctggaagtcgaaaatgatgcactgcctggcgcagtagatcgtctggcagatgccattgca

SEQ ID NO: 702383 - DNA, 75 bp, synthetic construct
  source 1..75: mol_type = other DNA
gccggtacaggtactggaagccagcccgaaaggtcactacacccaattagtggtgcagccgctggggtggtacaa

SEQ ID NO: 702384 - DNA, 75 bp, synthetic construct
  source 1..75: mol_type = other DNA
taacaatactcatgggactattgttatcgccttcggtatttgcaacggatgttaatgtcgattttaccgctaccg

SEQ ID NO: 702385 - DNA, 75 bp, synthetic construct
  source 1..75: mol_type = other DNA
atgataaaaatagcaccctataaattcgcgatactgacagggatactgttatctccaggtgtatttgctaccgat

SEQ ID NO: 702386 - DNA, 75 bp, synthetic construct
  source 1..75: mol_type = other DNA
cacgcagttgctggagatggttcagcttgcgcatctggcggatcgttatccggcgcagctttccggcggtcagaa

SEQ ID NO: 702387 - DNA, 75 bp, synthetic construct
  source 1..75: mol_type = other DNA
tggggccgtccggttccgggaaaaccacgctgctgcggattatcgccgggctggagcatcaaaccagcgggcata

SEQ ID NO: 702388 - DNA, 75 bp, synthetic construct
  source 1..75: mol_type = other DNA
aagagctgaaattcaccagcgtgttcgtgacccacgaccaggaagaagcgaccgaagtagccgatcgtgtagtgg

SEQ ID NO: 702389 - DNA, 75 bp, synthetic construct
  source 1..75: mol_type = other DNA
ccatggacagcgcccgcaatcaggtgatgtttgcgctcaatgattatcttgccgggctggcgcttgatcagttaa

SEQ ID NO: 702390 - DNA, 75 bp, synthetic construct
  source 1..75: mol_type = other DNA
ccttaagtcaggcagaaacgggatggcagccgattcaggaaaccatccgtaaaagtgataaagataaccgccagt

SEQ ID NO: 702391 - DNA, 75 bp, synthetic construct
  source 1..75: mol_type = other DNA
actgcgggcgatgaagccagaagaatttgcgcaaattcagcaggcggttatcactcagatgttgcaggcgcccca

SEQ ID NO: 702392 - DNA, 75 bp, synthetic construct
  source 1..75: mol_type = other DNA
atcaaccaccgattatattggtatgggtataaaaagaattgatactgatgattcaacatttttaaccccaaacag

SEQ ID NO: 702393 - DNA, 75 bp, synthetic construct
  source 1..75: mol_type = other DNA
agatgactgtcgcactgcgtgaaacaagtgtagggaaaggtgttccaggcaagtttcgcgcactggcaactttta

SEQ ID NO: 702394 - DNA, 75 bp, synthetic construct
  source 1..75: mol_type = other DNA
atgaaacatttttaaaaccaaacagcgcagaaaaaatacgctggagtgcaacagaaattagtaccacaggtctgg

SEQ ID NO: 702395 - DNA, 75 bp, synthetic construct
  source 1..75: mol_type = other DNA
gaagaactcggcaattacattaagccgaaacgtgacgatctttttggctatgcagctacggtgcagttgcaaagc

SEQ ID NO: 702396 - DNA, 75 bp, synthetic construct
  source 1..75: mol_type = other DNA
tgaatgcggaagggatcatttctcagcttgatgcgcgtgcactcgagttgctggtggaagcctacaccgaatacc

SEQ ID NO: 702397 - DNA, 75 bp, synthetic construct
  source 1..75: mol_type = other DNA
actcaaagcggacggggcgatcctcgtcgatttctgggcagaggggtgcggtccgtgcaaaatgatcgccccgat

SEQ ID NO: 702398 - DNA, 75 bp, synthetic construct
  source 1..75: mol_type = other DNA
ggttgctgaaagtgaaaaaaaactgacggggcgttctttgcccgatatattcaaagttttaatgagtgaaacacc

SEQ ID NO: 702399 - DNA, 75 bp, synthetic construct
  source 1..75: mol_type = other DNA
catcgtttgagcgcaatgacctgacgatgaccggtgattacagcaaccagcatattgtgccgatgaagcaggctg

SEQ ID NO: 702400 - DNA, 75 bp, synthetic construct
  source 1..75: mol_type = other DNA
gagaagcagttacagcttctgaccgcacatccggcacaccgtttacacagtcagcttaactatgcggaactgcgt

SEQ ID NO: 702401 - DNA, 75 bp, synthetic construct
  source 1..75: mol_type = other DNA
aaaccgctaaaaaggatgaaaaaggtctccctaaaattccgcaacatttaggggcgcaggggaagtactggttca

SEQ ID NO: 702402 - DNA, 75 bp, synthetic construct
  source 1..75: mol_type = other DNA
caatccgtagcgttgccgcagtggcggcacaacatgcagaaatccttgttcccgaatggctgcccgaaggtaaac

SEQ ID NO: 702403 - DNA, 75 bp, synthetic construct
  source 1..75: mol_type = other DNA
atgtaatgacccgcgaacaacgggaggcgcaacgggtgcgggtacaggccgcagaacaggaggcggccagactcc

SEQ ID NO: 702404 - DNA, 75 bp, synthetic construct
  source 1..75: mol_type = other DNA
gagagaatgaaatgttattcttatttaagaatatcggcggatgccgtccttctgcacagtctctggaaataaagc

SEQ ID NO: 702405 - DNA, 75 bp, synthetic construct
  source 1..75: mol_type = other DNA
taaagccctgcatgaagcgaatgcggttggtcaggttgcgggcggtgttccggcgatgtgtgatggtgtcaccca

SEQ ID NO: 702406 - DNA, 75 bp, synthetic construct
  source 1..75: mol_type = other DNA
acccgacaaacgatgaattcataatttatggcgctccatctaattacttacttgatacctgcaacatttacaaca

SEQ ID NO: 702407 - DNA, 75 bp, synthetic construct
  source 1..75: mol_type = other DNA
atgaaaatcgtaatcgccccagactcttataaagaaagtttatctgccagcgaggttgcgcaggcgatagaaaaa

SEQ ID NO: 702408 - DNA, 75 bp, synthetic construct
  source 1..75: mol_type = other DNA
tatctctactaatgttgtacttaatggtgatgtttctgtcggagaagaaacttttgttggtagctgtactgttgt

SEQ ID NO: 702409 - DNA, 75 bp, synthetic construct
  source 1..75: mol_type = other DNA
gatcccgttttaaaaagaaaattaaagaaaatgggacacgatgttttttgcgaagttatgtcctattatatttca

SEQ ID NO: 702410 - DNA, 75 bp, synthetic construct
  source 1..75: mol_type = other DNA
ctatggctgaggcaattttaaaaaaagaggtttcggaaagaagaacgagtgttaatgatattaggacacagctaa

SEQ ID NO: 702411 - DNA, 75 bp, synthetic construct
  source 1..75: mol_type = other DNA
cagatcatctctatttgttaatcagcagacaggacagaaaatgaaaaacttctggaatcagctgattaagaccgg

SEQ ID NO: 702412 - DNA, 75 bp, synthetic construct
  source 1..75: mol_type = other DNA
atgataagcatcgtaaaacgtaacggccaaacagagccgttatccgaagaaaaatacaaccgcgtcgtaatgtat

SEQ ID NO: 702413 - DNA, 75 bp, synthetic construct
  source 1..75: mol_type = other DNA
gcaactgattgcggataaccgtcctgatgaggttatgcttcgctggtctgaaatcagaaaaatgcgtgattccgg

SEQ ID NO: 702414 - DNA, 75 bp, synthetic construct
  source 1..75: mol_type = other DNA
ataggcagcgaattgcaacattaactccgaagacagctaaacatattacagagaccgaagagggtactagtgaat

SEQ ID NO: 702415 - DNA, 75 bp, synthetic construct
  source 1..75: mol_type = other DNA
ttacgatattgatgaaggcgaaatcctgatggatggtcacgatctgcgcgagtataccctggcgtcgttgcgtaa

SEQ ID NO: 702416 - DNA, 75 bp, synthetic construct
  source 1..75: mol_type = other DNA
gggcgttctgggtcgggtaagtcgactatcgccagcctgattacccgtttttacgatattgaggaaggcgagatc

SEQ ID NO: 702417 - DNA, 75 bp, synthetic construct
  source 1..75: mol_type = other DNA
tcaacaattgttggctctggatcagtagtaatacgaaatattcctaataatgtcgttgttgcaggagcaccgaca

SEQ ID NO: 702418 - DNA, 75 bp, synthetic construct
  source 1..75: mol_type = other DNA
tatccggggcgtgaagttcccgctctgcgtaacatcaacctaaaaattccggcagggaaaacggtcgctctggtc

SEQ ID NO: 702419 - DNA, 75 bp, synthetic construct
  source 1..75: mol_type = other DNA
attttacgtggtatcaccagctatgtctccagctactgtatctcctgggtatcaggaaaggtggtaatgactatg

SEQ ID NO: 702420 - DNA, 75 bp, synthetic construct
  source 1..75: mol_type = other DNA
ttaccgttgttttctcttcaatgattgcactgatgcgtccgctgaaatcgctgaccaacgttaacgcccagttcc

SEQ ID NO: 702421 - DNA, 75 bp, synthetic construct
  source 1..75: mol_type = other DNA
gtcttgccggacatcactttattagcgaaagccccgaagcctggcgatggttacttgcatcggcggcatttcctg

SEQ ID NO: 702422 - DNA, 75 bp, synthetic construct
  source 1..75: mol_type = other DNA
actattggtctggaagatgcgctgactgccagcctgatgcttaatgcgttgttaattgtgggcgcgctgctggga

SEQ ID NO: 702423 - DNA, 75 bp, synthetic construct
  source 1..75: mol_type = other DNA
cggcattggtctgggaggcgattactcagtaggtcacaccttgctggctgaattttccccgcgccgccatcgcgg

SEQ ID NO: 702424 - DNA, 75 bp, synthetic construct
  source 1..75: mol_type = other DNA
ggattaattgctatagagcagcctgagctacatattcatcccgctttacaactcgctgtaggtgatctgtttacc

SEQ ID NO: 702425 - DNA, 75 bp, synthetic construct
  source 1..75: mol_type = other DNA
attctcaaggaattatgacgtttttcttgtcaatagctacagcatgtactattcatcaggctctcttcaagagag

SEQ ID NO: 702426 - DNA, 75 bp, synthetic construct
  source 1..75: mol_type = other DNA
aatcatatcaggcgcatggcctctgcaatggcgggcgaaacagtttacgactacatgttcggtgaattaaagact

SEQ ID NO: 702427 - DNA, 75 bp, synthetic construct
  source 1..75: mol_type = other DNA
atgcaactgacgccgtttatggcgggaatgatcggcggctcggcgctccttggtttgttccttggcagcctggtt

SEQ ID NO: 702428 - DNA, 75 bp, synthetic construct
  source 1..75: mol_type = other DNA
atttaccgcttaaccgttttcactgtcgaattgctgcgctcactttcggcgcacacctgaccgacggttatgttc

SEQ ID NO: 702429 - DNA, 75 bp, synthetic construct
  source 1..75: mol_type = other DNA
ctgacgccgtttatggcaggaatgatcggcggctcggcgctactgggtttgtttcttggcagtctggttttgggg

SEQ ID NO: 702430 - DNA, 75 bp, synthetic construct
  source 1..75: mol_type = other DNA
tcagcttacgcctgtcatgcaactgacgccgtttatggcgggaatgatcggcggctcggcgctgcttggcctgtt

SEQ ID NO: 702431 - DNA, 75 bp, synthetic construct
  source 1..75: mol_type = other DNA
gatgaagtggcaacggcgacccataaacacatcaaaaccttgttctcttcgcgctactggcggcgcacagcgttt

SEQ ID NO: 702432 - DNA, 75 bp, synthetic construct
  source 1..75: mol_type = other DNA
gctgattgatgggcaaacggtagcagaaaaagcgcaaaagctatggcaggactatttacgccaaaggatgcagcc

SEQ ID NO: 702433 - DNA, 75 bp, synthetic construct
  source 1..75: mol_type = other DNA
agaaaggggtgatgtatgagaaagcagggcacgtaattaccgggcttggtattgtcggtgaagtcgatggtgatg

SEQ ID NO: 702434 - DNA, 75 bp, synthetic construct
  source 1..75: mol_type = other DNA
aaatcgatggctgacggcgtgaaactgattaacgccgtgcaggacgtttatctcgatagcaaaattactatcgcc

SEQ ID NO: 702435 - DNA, 75 bp, synthetic construct
  source 1..75: mol_type = other DNA
catctggcggcgaccattggcgcggacatcgtcaaacagaaaatggcggaaaataacggcggctataaagcgatt

SEQ ID NO: 702436 - DNA, 75 bp, synthetic construct
  source 1..75: mol_type = other DNA
gaatacctacgatcaaacgctgtatgccagcgtggagcaggcgttcaacatgggcgcggtggcggttggtgcgac

SEQ ID NO: 702437 - DNA, 75 bp, synthetic construct
  source 1..75: mol_type = other DNA
gcggcacgccgatccttggtatcgtgcttggcgtaacgctggtttctccacaactgatgaacgcctatctgctcg

SEQ ID NO: 702438 - DNA, 75 bp, synthetic construct
  source 1..75: mol_type = other DNA
tcgaccagttgattgaactggtcggcgggcgcgacaatatcgcgacggtgagccactgtattacacgcctgcgct

SEQ ID NO: 702439 - DNA, 75 bp, synthetic construct
  source 1..75: mol_type = other DNA
tggcatgttcagcatcgctaaagtaggctatcaggcacaggtgatcccggcactgctggccgggctggcgcttgg

SEQ ID NO: 702440 - DNA, 75 bp, synthetic construct
  source 1..75: mol_type = other DNA
ttattaataatatgttctctcccttcgttggctattttactggtattgagcgtaatgatataacagctggcataa

SEQ ID NO: 702441 - DNA, 75 bp, synthetic construct
  source 1..75: mol_type = other DNA
aaaactctttgtctaatataataaatggattttcaaatgtaattcttggaatagtgatctctccagttttactgc

SEQ ID NO: 702442 - DNA, 75 bp, synthetic construct
  source 1..75: mol_type = other DNA
atgacatttcgttatccggtgttgtggacattcctgttaatgatgttcgctttcagtgttcagggggaaccgtct

SEQ ID NO: 702443 - DNA, 75 bp, synthetic construct
  source 1..75: mol_type = other DNA
atgaccagagataaaatcatttttatcgcaccattattggcattgttaactgggtgtaattctgttagctcacag

SEQ ID NO: 702444 - DNA, 75 bp, synthetic construct
  source 1..75: mol_type = other DNA
tcgcaccattattggcattgttaactgggtgtaattctgttagctcacagtatgctgattcggataagactgaat

SEQ ID NO: 702445 - DNA, 75 bp, synthetic construct
  source 1..75: mol_type = other DNA
gcaaaagtaaaaacggaatcggccacaacgggtgacctggtatcagtagaaacgctggccaccctgcatattgac

SEQ ID NO: 702446 - DNA, 75 bp, synthetic construct
  source 1..75: mol_type = other DNA
gctatgggcaccagaaactaaagccctcccgctggtggcggcgggaaatgtaggaggtgcgaatgaacattctgt

SEQ ID NO: 702447 - DNA, 75 bp, synthetic construct
  source 1..75: mol_type = other DNA
caatctggtagaaggttcaccgattaagctgattgatggcggaaaacaaaaacgctgctttactgatatccggga

SEQ ID NO: 702448 - DNA, 75 bp, synthetic construct
  source 1..75: mol_type = other DNA
gcgtatggcgaaaaagaaggtttacagttcaccctcttccgtccgtttaactggatggggccaaggctggataac

SEQ ID NO: 702449 - DNA, 75 bp, synthetic construct
  source 1..75: mol_type = other DNA
ccacaacatggtgcgtgccgttgccgatccctggcctggcgcctttagctatgttggcaatcagaaatttacagt

SEQ ID NO: 702450 - DNA, 75 bp, synthetic construct
  source 1..75: mol_type = other DNA
acatgtgctgtggcagtcgcatgttctggttcgataagaatgacgaccgggcgatatttagcgacatcagaaagg

SEQ ID NO: 702451 - DNA, 75 bp, synthetic construct
  source 1..75: mol_type = other DNA
gccgacttccgcgcgctgccgttcgctgacgcctctttccccattgtcgtgtttgacccgccgcatcttgaacga

SEQ ID NO: 702452 - DNA, 75 bp, synthetic construct
  source 1..75: mol_type = other DNA
acggcaaaggatatcaggacgtagagcatcgtaaaccgagcatccgcaatgcccgccgctgcctggactgggaac

SEQ ID NO: 702453 - DNA, 75 bp, synthetic construct
  source 1..75: mol_type = other DNA
atgttggcaatcagaaattcaccgtctggtcgtcgcgtgttcatcctcatgccagcaaagcacagccggggagcg

SEQ ID NO: 702454 - DNA, 75 bp, synthetic construct
  source 1..75: mol_type = other DNA
ctggccgtacgtgccgaacgtgagcaattgaaagtggaactggcgaaactggaaacgcagatggcaggttatctg

SEQ ID NO: 702455 - DNA, 75 bp, synthetic construct
  source 1..75: mol_type = other DNA
tcagttgctggaagacttcgccggtgaagatctcaacctgaagccgagtcgtgtcggtacgctggacgttatcgg

SEQ ID NO: 702456 - DNA, 75 bp, synthetic construct
  source 1..75: mol_type = other DNA
acccgccattaaacacggtaatattctggaaatcgcccagcgcgaaaacgaagccacctgttttggtcgcagaac

SEQ ID NO: 702457 - DNA, 75 bp, synthetic construct
  source 1..75: mol_type = other DNA
atgggatgcctcggtattgaagccctgctggctgccggttacgaaattagcgccatttttacccatactgataat

SEQ ID NO: 702458 - DNA, 75 bp, synthetic construct
  source 1..75: mol_type = other DNA
atgtcgtcttgccgctggtggcgatagccacgccgattgaatatacccgcaacccgctgcgcgtatttgaactcg

SEQ ID NO: 702459 - DNA, 75 bp, synthetic construct
  source 1..75: mol_type = other DNA
cacactgattaccgctggcgtcatgatgtgggggctgggtgagccggtgggtgcgttgactaacagcctgaccca

SEQ ID NO: 702460 - DNA, 75 bp, synthetic construct
  source 1..75: mol_type = other DNA
cgtgtcacgcataaatccctgttcgacggtacgttacagggcattcatcgcaccgataaaccggcgttcagcttc

SEQ ID NO: 702461 - DNA, 75 bp, synthetic construct
  source 1..75: mol_type = other DNA
ccatgttgtggcttatgattttggtgccaagcgcaacatcctgcgcatgttggtggatagaggctgccgtctgac

SEQ ID NO: 702462 - DNA, 75 bp, synthetic construct
  source 1..75: mol_type = other DNA
tgcatctggactctcatttgatggagacccgccaacattccatgaactgcgtagcctgtcggcgagactataccg

SEQ ID NO: 702463 - DNA, 75 bp, synthetic construct
  source 1..75: mol_type = other DNA
tttccccgcgccgccatcgcggtattttgctgggcgcattcagcgtggtgtggaccgtaggctatgtgctggcaa

SEQ ID NO: 702464 - DNA, 75 bp, synthetic construct
  source 1..75: mol_type = other DNA
gcaaatttttgctgggaagttttttgctgctggcggcaacgctggtcgtgatggcctgtttgccttccggcagtt

SEQ ID NO: 702465 - DNA, 75 bp, synthetic construct
  source 1..75: mol_type = other DNA
caaaaaaagaagacgagttgccgttccacgtcgtggcttatgatttcggcgccaaacgcaacatcctgcgcatgt

SEQ ID NO: 702466 - DNA, 75 bp, synthetic construct
  source 1..75: mol_type = other DNA
atcatgatcggttctgtgtgtggagcggttaccgcagcgctggtgggggcgcagtgttatgccggttggggtggc

SEQ ID NO: 702467 - DNA, 75 bp, synthetic construct
  source 1..75: mol_type = other DNA
cataaagttctgcgctcggtgatgccaatcttcatcattccgatcgtcggcacactgattaccgcaggcatcatg

SEQ ID NO: 702468 - DNA, 75 bp, synthetic construct
  source 1..75: mol_type = other DNA
atatcggtgtcgcgggcttaacgctgatggtgcctttccttgctgcttacatcggttattccattgcggaacgtt

SEQ ID NO: 702469 - DNA, 75 bp, synthetic construct
  source 1..75: mol_type = other DNA
agatacctggcgtgatgatttacggcagggattcaaagaagcctttcgtgtgttgtggccatacggcgttctgat

SEQ ID NO: 702470 - DNA, 75 bp, synthetic construct
  source 1..75: mol_type = other DNA
ccaacgcgaaaccagttatcagccagcgtaccggcaagaacgataaaacacactggattatttttgtgaaggagg

SEQ ID NO: 702471 - DNA, 75 bp, synthetic construct
  source 1..75: mol_type = other DNA
gcgcgtgaccgtcttaacgagatggggatcgtgctggaagatggcccgcaaggaaccacctggcgtcgtaagtaa

SEQ ID NO: 702472 - DNA, 75 bp, synthetic construct
  source 1..75: mol_type = other DNA
agagatgaacaaaaccagaaagcagcagaggcatccccgtcagaaggcggggaaaacgatgccgtatacgggcag

SEQ ID NO: 702473 - DNA, 75 bp, synthetic construct
  source 1..75: mol_type = other DNA
cagttgtcatccccggacctgtcccggcgctgggacaccattctgtttgatgaggcacaggacgccaatccggtg

SEQ ID NO: 702474 - DNA, 75 bp, synthetic construct
  source 1..75: mol_type = other DNA
tgacagcagaatgctgtatctggcttataaccgttctgtacgcgatgaggctgagcgtaaatttccgtttaatgt

SEQ ID NO: 702475 - DNA, 75 bp, synthetic construct
  source 1..75: mol_type = other DNA
tctggcgatacattctgactaacaccaccgttcagtgcgtcacatcgttcgctgcacgcaaattccgccacggtc

SEQ ID NO: 702476 - DNA, 75 bp, synthetic construct
  source 1..75: mol_type = other DNA
agcaacaacggtgatggatacgactacaagcctgaatgccgttacttcgaggtgaacgtgcacgggcagttcggc

SEQ ID NO: 702477 - DNA, 75 bp, synthetic construct
  source 1..75: mol_type = other DNA
ttgaagaatataaatatattgcaaaatccacgaaggatgtggagatgaatcagtcccttcggcttctggagttgt

SEQ ID NO: 702478 - DNA, 75 bp, synthetic construct
  source 1..75: mol_type = other DNA
catggtttttgtgtggcaaatcctgttgatgtggttgaacatttgcttccacagcaatcaagaggacgtgatgaa

SEQ ID NO: 702479 - DNA, 75 bp, synthetic construct
  source 1..75: mol_type = other DNA
attttcataagcgggtatggactatacctgcagaaagaatgaaagccaggatacagcatcgtgttcctttatccc

SEQ ID NO: 702480 - DNA, 75 bp, synthetic construct
  source 1..75: mol_type = other DNA
gcaaggcatatcaaacctgatgacaaaccattgccccatgggggaattacaggactgactcttcatccttcttca

SEQ ID NO: 702481 - DNA, 75 bp, synthetic construct
  source 1..75: mol_type = other DNA
aatagagccatccgtgacgaagccgaacaaaagtttcccttcaacgttgaatgcaaaacctcccatcaacgggtc

SEQ ID NO: 702482 - DNA, 75 bp, synthetic construct
  source 1..75: mol_type = other DNA
ttgagaataataacctgctttattattaccttactcttatcgaaagcatgggctgtagatattcccatcaacata

SEQ ID NO: 702483 - DNA, 75 bp, synthetic construct
  source 1..75: mol_type = other DNA
catgccagataaataacagtaatcctgttgatgttgattttggtaatatcagggtgagtgaacttgacacaaagg

SEQ ID NO: 702484 - DNA, 75 bp, synthetic construct
  source 1..75: mol_type = other DNA
tacttcaaaggcgtgaatgacgtgacattttacagcgccacacgcgaagaactaatcgaattcctgaatcacggg

SEQ ID NO: 702485 - DNA, 75 bp, synthetic construct
  source 1..75: mol_type = other DNA
tggtgaactttatctctcatggcacgcgtaaagacgagccgacacagtcttctgatcctggcagccagccaaaca

SEQ ID NO: 702486 - DNA, 75 bp, synthetic construct
  source 1..75: mol_type = other DNA
ctggataaagagaaaaatgagctgacctacgggttccagagtgcgcaaaagcacaaggcggaagcagcgcattaa

SEQ ID NO: 702487 - DNA, 75 bp, synthetic construct
  source 1..75: mol_type = other DNA
cgtcggtaaaaccgccattgcggaaggtcttgcctggcgtattgttcagggcgatgtaccggaagtgatggctga

SEQ ID NO: 702488 - DNA, 75 bp, synthetic construct
  source 1..75: mol_type = other DNA
tgtggtctaactggttgcaaccaaccacatcaaatgggttatattgtaaaaacatctagtggcattgaaaccaac

SEQ ID NO: 702489 - DNA, 75 bp, synthetic construct
  source 1..75: mol_type = other DNA
aacctgcttcctattgcaaataagataaaatactcatcaacagcagacgagattgagcttcgtgatttcgaaagt

SEQ ID NO: 702490 - DNA, 75 bp, synthetic construct
  source 1..75: mol_type = other DNA
ctgaatcagcttgcgcgagtgggcggaatcgacccactgattggtcgtgagaaggagctggagcgtgctattcag

SEQ ID NO: 702491 - DNA, 75 bp, synthetic construct
  source 1..75: mol_type = other DNA
gcgtgaaaccatcaacgaaacttacgatctggaatacggcaccgatcaactggagatccacgttgatgccatcaa

SEQ ID NO: 702492 - DNA, 75 bp, synthetic construct
  source 1..75: mol_type = other DNA
gatctcggcggcgaacagcgtctcgaaaaacagggcattaccagctacagccttgtcccgttcccgggccattaa

SEQ ID NO: 702493 - DNA, 75 bp, synthetic construct
  source 1..75: mol_type = other DNA
atgattacattcaaaccaacgcgaaacatcgacctgatcgaagcagtaggaaatcaccctgacattatcgccggg

SEQ ID NO: 702494 - DNA, 75 bp, synthetic construct
  source 1..75: mol_type = other DNA
ttgatgagatccacaccattatcggtgcgggggcagcgtctggtggtcaggttgatgcggctaacctaatcaaac

SEQ ID NO: 702495 - DNA, 75 bp, synthetic construct
  source 1..75: mol_type = other DNA
accgtcgagcacttgttactggcattgctcagtaatccgtctgctcgggaggcgctggaagcatgttccgtggat

SEQ ID NO: 702496 - DNA, 75 bp, synthetic construct
  source 1..75: mol_type = other DNA
tggtcttatccaccaggataacagcaccgatgcgatggaggagatcaagaagatctttacaccggaattccgtaa

SEQ ID NO: 702497 - DNA, 75 bp, synthetic construct
  source 1..75: mol_type = other DNA
cgagctgatttacggacgattgttaaagaagggtttgcgcaagagaagaaaattaatgaccagcaagccgtgtac

SEQ ID NO: 702498 - DNA, 75 bp, synthetic construct
  source 1..75: mol_type = other DNA
attcaggcgggtactgataccgaactcaacgttgccgattacttcaaggcaaacaatatgaagtacacaccagtg

SEQ ID NO: 702499 - DNA, 75 bp, synthetic construct
  source 1..75: mol_type = other DNA
ctcgacaaaatggcctttatgggcaacctcaccgaagcctggggccacaacgacagcgggttatcggtccgctta

SEQ ID NO: 702500 - DNA, 75 bp, synthetic construct
  source 1..75: mol_type = other DNA
ccctgaagcgatctactattctccggcaaatcgctttgtggctgattttattggcgccgccaatatcgatacggc

SEQ ID NO: 702501 - DNA, 75 bp, synthetic construct
  source 1..75: mol_type = other DNA
aaggcacctattgctatttacttgctggatgaagcacaagatctccgccgagaaacgtctgaattagtacaggtt

SEQ ID NO: 702502 - DNA, 75 bp, synthetic construct
  source 1..75: mol_type = other DNA
ccaataccgactggaattaaccttacgcgatgcgaagcagagtgaagaactggctaatacaattcttcatcagaa

SEQ ID NO: 702503 - DNA, 75 bp, synthetic construct
  source 1..75: mol_type = other DNA
ataaagcggggctaaaaagcgcgaaagaactggatggcgctaccgtctgtattcaggcggggactgataccgaac

SEQ ID NO: 702504 - DNA, 75 bp, synthetic construct
  source 1..75: mol_type = other DNA
ccggctgatgccacctgtacgggcattttccgttgtaatgcgccttggtgccgtcctttcggggactccgtcagt

SEQ ID NO: 702505 - DNA, 75 bp, synthetic construct
  source 1..75: mol_type = other DNA
tagtcctgcacgccctggtggccgttgccacgttgctgtggttgctgtggtgtttcatcccggcaggcaatgttt

SEQ ID NO: 702506 - DNA, 75 bp, synthetic construct
  source 1..75: mol_type = other DNA
gctggctgattgtggtcagtggtcacacggacaataccggtgacccgcagcgcaaccaggtcctgtccctgaagc

SEQ ID NO: 702507 - DNA, 75 bp, synthetic construct
  source 1..75: mol_type = other DNA
gcgagccacgaagtggcgagtaatcctctatcaccgaccaaattcgaaaagcctgctcaacgagcaggctttttt

SEQ ID NO: 702508 - DNA, 75 bp, synthetic construct
  source 1..75: mol_type = other DNA
cgttgcgccagcaacggcccgcagggcgagccacgaagtggcgagtaatcctctatcaccgaccaaattcgaaaa

SEQ ID NO: 702509 - DNA, 75 bp, synthetic construct
  source 1..75: mol_type = other DNA
aatacattgacgaagatggtgcgaaagtggtggttccggcagccattgcgccagacatcaacgataagatccggg

SEQ ID NO: 702510 - DNA, 75 bp, synthetic construct
  source 1..75: mol_type = other DNA
atgctgcggagagcgcccttaaagtactggaatctttcaggaatgactggagtcggcattacgaacagtatggta

SEQ ID NO: 702511 - DNA, 75 bp, synthetic construct
  source 1..75: mol_type = other DNA
caaggcatatcaaacctgatgacaaaccattgcctcatgggggaattacagggctgacccttcatccttcttcag

SEQ ID NO: 702512 - DNA, 75 bp, synthetic construct
  source 1..75: mol_type = other DNA
tacagcaacccgctcgggcgaagccaggggaatgcgctgggctgaaattgattttcataagcggatatggactat

SEQ ID NO: 702513 - DNA, 75 bp, synthetic construct
  source 1..75: mol_type = other DNA
aaaagggtatcagcctaaaaatgacttggctaataatggttttcaaccttcgaagcaaacttcccagccagctcc

SEQ ID NO: 702514 - DNA, 75 bp, synthetic construct
  source 1..75: mol_type = other DNA
actgggtaatgagtccaattgattacaaaaaatatagagctttcacatatttatcaggaaatatcttggatgacg

SEQ ID NO: 702515 - DNA, 75 bp, synthetic construct
  source 1..75: mol_type = other DNA
gctttttgtggcgaccagtgtgtataccgatgaaccttataatgttacccgcgcactgttattaatggtgatact

SEQ ID NO: 702516 - DNA, 75 bp, synthetic construct
  source 1..75: mol_type = other DNA
agctgaaaaagttgttatcccaacatttgccgatgcagccatgcgtgtacatgcagaattgtcaccgggatggga

SEQ ID NO: 702517 - DNA, 75 bp, synthetic construct
  source 1..75: mol_type = other DNA
caggggttttgccagcagccgcttgcagcagtggatagccaggggacagataccccgagcgcccaatcgggacgc

SEQ ID NO: 702518 - DNA, 75 bp, synthetic construct
  source 1..75: mol_type = other DNA
cgcctctgagcgtttgaccgctcaacccacctacaatacatatccggatgaggtaaaagcttcggccatcaatga

SEQ ID NO: 702519 - DNA, 75 bp, synthetic construct
  source 1..75: mol_type = other DNA
tgccaaagtttgttttacgagaaatgaaaactcttctggcgatccaccggcgtctaccccaagaaggtgtggctt

SEQ ID NO: 702520 - DNA, 75 bp, synthetic construct
  source 1..75: mol_type = other DNA
aaaaaagcacataagttgaaaatgaaaagagcacaaagattacttgagaaaatggcatgtgaccgggtttcacca

SEQ ID NO: 702521 - DNA, 75 bp, synthetic construct
  source 1..75: mol_type = other DNA
actacggcaaacagggctgcaccagcgcgctgccggaacacttcttcctgcagcgctacaaatccgcttacgccg

SEQ ID NO: 702522 - DNA, 75 bp, synthetic construct
  source 1..75: mol_type = other DNA
tacgatacgggtatttcaagtgcaggattcttgttagccgataacccgctggggaaatcgaatgccaatgatcta

SEQ ID NO: 702523 - DNA, 75 bp, synthetic construct
  source 1..75: mol_type = other DNA
aggcagtgaattgtcgatgacctttaattttcatcacctgaaagtcgattatcccggtggtgaaaaatggacgct

SEQ ID NO: 702524 - DNA, 75 bp, synthetic construct
  source 1..75: mol_type = other DNA
agggaatgcacaacatcgcgtggaatgccttgttctggtgtaaccatgaccagccacgcattgtttctcgttttg

SEQ ID NO: 702525 - DNA, 75 bp, synthetic construct
  source 1..75: mol_type = other DNA
cccgcgatccgcaagtctttgctgctggcgatattgttgagggtgacaaaaccgtggtctatgccgtgaaaaccg

SEQ ID NO: 702526 - DNA, 75 bp, synthetic construct
  source 1..75: mol_type = other DNA
gtgaatatcgacaccacgataacaatcgatacggccctaaataccggtctggcacttttcggttggctttacatc

SEQ ID NO: 702527 - DNA, 75 bp, synthetic construct
  source 1..75: mol_type = other DNA
accatgcgcaaagatttaattgccgctggtgtcgatccagctgatattgttctcgactacgcaggttttcgaacc

SEQ ID NO: 702528 - DNA, 75 bp, synthetic construct
  source 1..75: mol_type = other DNA
accatgcgcaaagatttaatcgctgctggtgtcgacccatcagatattgttctcgattacgcaggctttcgtacg

SEQ ID NO: 702529 - DNA, 75 bp, synthetic construct
  source 1..75: mol_type = other DNA
atgccgcaacaaaattatctggatgaactcactccggcttttacgcctttactggcgattaaagaagcctctcgc

SEQ ID NO: 702530 - DNA, 75 bp, synthetic construct
  source 1..75: mol_type = other DNA
cacattgaatgttcggcaatgaactgcaagcagctgggtaaccactttgatatccacggcggcggttcagacctg

SEQ ID NO: 702531 - DNA, 75 bp, synthetic construct
  source 1..75: mol_type = other DNA
tcagaaaaagaccttttaaaaatcgattatgtaaaaaaagtaagctgttcggaagaagcaaacaatgtttacaac

SEQ ID NO: 702532 - DNA, 75 bp, synthetic construct
  source 1..75: mol_type = other DNA
cgcgcgaagagttagatgaatttccggcaagcaagaaagagttcaccagcacccagaaattgggggtatcgatta

SEQ ID NO: 702533 - DNA, 75 bp, synthetic construct
  source 1..75: mol_type = other DNA
ggcaagcgaaaaagagtttgccagcgcccgggagctgggcgtttcgatcatcgatggattcacgccagtagccgt

SEQ ID NO: 702534 - DNA, 75 bp, synthetic construct
  source 1..75: mol_type = other DNA
catgttcgtttaccgggcgaactgacgatggcggcagataaaattattctcgccgtcggtcagcatgccagactg

SEQ ID NO: 702535 - DNA, 75 bp, synthetic construct
  source 1..75: mol_type = other DNA
ttcagccttatcagggagtatttttagtatattagcaatgccattaggtattcttgtcgccagtttattttttat

SEQ ID NO: 702536 - DNA, 75 bp, synthetic construct
  source 1..75: mol_type = other DNA
gtggctacttcacgccaggatcgtataccgtttctgctcatgtcccgttgggagcggtggttggtgcgacgccag

SEQ ID NO: 702537 - DNA, 75 bp, synthetic construct
  source 1..75: mol_type = other DNA
caaaagaaatgagatctcttccacctaaaggcatgggatggaaaaatgccatagataaaatgaagataggtgaaa

SEQ ID NO: 702538 - DNA, 75 bp, synthetic construct
  source 1..75: mol_type = other DNA
atagataaattgaagataggtgaaataagtggtttttttaatacgcttcactctccaaaagttaaagcaagatat

SEQ ID NO: 702539 - DNA, 75 bp, synthetic construct
  source 1..75: mol_type = other DNA
cgtgctttcgttcctttgccttgacgcttatcaaagcgtgcaattaccgcaaccgaacctcggcgtgcgcactaa

SEQ ID NO: 702540 - DNA, 75 bp, synthetic construct
  source 1..75: mol_type = other DNA
tgttgcgctccaccagcagcgcgcgttatttcgcaggtttcccgaccggctataccgcactgctcggcgggttaa

SEQ ID NO: 702541 - DNA, 75 bp, synthetic construct
  source 1..75: mol_type = other DNA
ctcccgccataacgccgaacataagccgcagacgttctggcaggcgtgccagttattctggtacatgaacatcat

SEQ ID NO: 702542 - DNA, 75 bp, synthetic construct
  source 1..75: mol_type = other DNA
aagtcggtgcaaggaagccaatccaccctgacagtagccggtaaaaaacgtttaatcacccagagcgatatccgc

SEQ ID NO: 702543 - DNA, 75 bp, synthetic construct
  source 1..75: mol_type = other DNA
ctggcgggttatcagttgtgggtaaatttttctcacagcgccagccagtcggcgctgaaatctgtctgcatggat

SEQ ID NO: 702544 - DNA, 75 bp, synthetic construct
  source 1..75: mol_type = other DNA
ttcttaccgctgaaggtatccacacaccttacggactgcttgatatcaacaaagcactggaaatgctcgatgaag

SEQ ID NO: 702545 - DNA, 75 bp, synthetic construct
  source 1..75: mol_type = other DNA
aatattgtcaaagaaaattgatggaataataggtggccccccttgtcaaggctacagccgaatggggcattctga

SEQ ID NO: 702546 - DNA, 75 bp, synthetic construct
  source 1..75: mol_type = other DNA
tgcccgcaattttccaaatactaaaattataaatggcgatatttcattattgggagaatctgaatggaactcaat

SEQ ID NO: 702547 - DNA, 75 bp, synthetic construct
  source 1..75: mol_type = other DNA
caccagagatgcccaaaaaagagaggatttgcgtaaaaaactggagtctctggagcggcaaaagaaatccttacg

SEQ ID NO: 702548 - DNA, 75 bp, synthetic construct
  source 1..75: mol_type = other DNA
agaagaagcaaacaatgtttataactgcattgtcgatgcctcgattagcaatatgaaacagacaaagcctgttaa

SEQ ID NO: 702549 - DNA, 75 bp, synthetic construct
  source 1..75: mol_type = other DNA
ggcggcggccatggccctttcctccgttagcgtcattgcaaatgcgttgcgtctgaaaagtgtcaggctcgggaa

SEQ ID NO: 702550 - DNA, 75 bp, synthetic construct
  source 1..75: mol_type = other DNA
tgatacctgccgtcagtaatttcaatgccccgtcggggaaaggtgtctcaggcgatgtcgaaggtcaacgggttg

SEQ ID NO: 702551 - DNA, 75 bp, synthetic construct
  source 1..75: mol_type = other DNA
gtgtcggtcctgattattgcctgcccctgcgcactggggctggccacaccgatgtcgataatggtgggggtaggc

SEQ ID NO: 702552 - DNA, 75 bp, synthetic construct
  source 1..75: mol_type = other DNA
tcactcattgaagtagacaagcgtgcaggcatgcccaatgcaatgagcctacaactggcttatagcggtgatcac

SEQ ID NO: 702553 - DNA, 75 bp, synthetic construct
  source 1..75: mol_type = other DNA
aattactcagcttccaagtgggatcagcgataccgtgaatttacgaccttgctacaacaaacctcaactttttct

SEQ ID NO: 702554 - DNA, 75 bp, synthetic construct
  source 1..75: mol_type = other DNA
gaagcagtcgcacggaaactgggaatagatgaggttgaagccggaattctgccggatggtgtcaatgacggatga

SEQ ID NO: 702555 - DNA, 75 bp, synthetic construct
  source 1..75: mol_type = other DNA
accaccacgatcaccacgaagtcagcccagaccagataaaacagcctcaccatcaggcggagaaagatatttctg

SEQ ID NO: 702556 - DNA, 75 bp, synthetic construct
  source 1..75: mol_type = other DNA
taccggaagcacagggcggtttttttagccgctggggcagggcgctatggacgcttttctggagtacgatcccgg

SEQ ID NO: 702557 - DNA, 75 bp, synthetic construct
  source 1..75: mol_type = other DNA
cgggaatgcgtcgccaacaggtgtcgatgggcggtgcgctggcattctggatgggcaatccgttgttaaacccgg

SEQ ID NO: 702558 - DNA, 75 bp, synthetic construct
  source 1..75: mol_type = other DNA
ggagatacgccgtagtggtcccggaagctgtcctgtctgtggaatggcactggagccgctcgtagctacggcatc

SEQ ID NO: 702559 - DNA, 75 bp, synthetic construct
  source 1..75: mol_type = other DNA
ttacctctttctcagggagtttagtctccaggattcccggggcggttcagtagcctgggtttacagcgtcattgc

SEQ ID NO: 702560 - DNA, 75 bp, synthetic construct
  source 1..75: mol_type = other DNA
cagtaccgccacaatacaacacatggctgcaactgcttctggcctctccagtcgtgttgtactgcggctggccat

SEQ ID NO: 702561 - DNA, 75 bp, synthetic construct
  source 1..75: mol_type = other DNA
cggtattgccagtattcgtcagggcgttccatcattagcagaatatcagcaaagcctcccattgcttagagaact

SEQ ID NO: 702562 - DNA, 75 bp, synthetic construct
  source 1..75: mol_type = other DNA
caggtcttggcggtactctgttcgatccgccgcgttcggcactggtggtcaaattgatccgcccgcaacagcgtg

SEQ ID NO: 702563 - DNA, 75 bp, synthetic construct
  source 1..75: mol_type = other DNA
attggcatcttcactttccttgcgctgggttggcagtttagtcagaaacgcgccgcgcgtcgtttgctggaacgc

SEQ ID NO: 702564 - DNA, 75 bp, synthetic construct
  source 1..75: mol_type = other DNA
cgtgcgtacgccagtccgcgaaggcatggcccgcgtgatgcgcgataaacgttttgtcacctatgttctgacgct

SEQ ID NO: 702565 - DNA, 75 bp, synthetic construct
  source 1..75: mol_type = other DNA
cgcaattgccgaccgctttggcgcaaaaccgatgatcgtcaccggaatgctgatgcgcgccgcgggatttgccac

SEQ ID NO: 702566 - DNA, 75 bp, synthetic construct
  source 1..75: mol_type = other DNA
ggccattggtggcgctattggctatatcggcggcggttggctgtttgatctgggaaagtcggcacaacaaccaga

SEQ ID NO: 702567 - DNA, 75 bp, synthetic construct
  source 1..75: mol_type = other DNA
tgggtaaatcggcgcagcaaccagaactaccgtggataatgttgggcattattggcattatcaccttcgttgcga

SEQ ID NO: 702568 - DNA, 75 bp, synthetic construct
  source 1..75: mol_type = other DNA
gtgcgggataacgcttatcaggattatcttgcgcatcttgaaggctttaatatcgaatggctggcgcatgatgaa

SEQ ID NO: 702569 - DNA, 75 bp, synthetic construct
  source 1..75: mol_type = other DNA
agcacttccatctcggtttggtactgaccggaaattggttacagaaaaactatgaattgaaacaagccatacacg

SEQ ID NO: 702570 - DNA, 75 bp, synthetic construct
  source 1..75: mol_type = other DNA
ccatccagcgttttgcggttgttacgttccaccaatcttacggctatgaagaatttattgaaggtatgcgtgcac

SEQ ID NO: 702571 - DNA, 75 bp, synthetic construct
  source 1..75: mol_type = other DNA
aaagtcgttaagaatttaagccgtcgctttgaagcggaacagtatgacccacagcgggtacgtgcagcggcttac

SEQ ID NO: 702572 - DNA, 75 bp, synthetic construct
  source 1..75: mol_type = other DNA
gtggcaggtccgcgcggttcgctggtggtgccagaggattacgcgtatcagctgtatgtctgcgatgaatccgga

SEQ ID NO: 702573 - DNA, 75 bp, synthetic construct
  source 1..75: mol_type = other DNA
gagcgcatcagcgccggttttcagcgcattgtcctcggcggcgaggcgctggacggttttacgtcgcgcggcttt

SEQ ID NO: 702574 - DNA, 75 bp, synthetic construct
  source 1..75: mol_type = other DNA
gggtattcggtaatgcaacgggtggacgtcgtggtgcgattttgggtgccttcgctcaaggcttgcttattacct

SEQ ID NO: 702575 - DNA, 75 bp, synthetic construct
  source 1..75: mol_type = other DNA
ggttctgatgacgttgccatcggccacttctcaacattatcttatgtattggccggtttcatcggcagcaagttt

SEQ ID NO: 702576 - DNA, 75 bp, synthetic construct
  source 1..75: mol_type = other DNA
gcgtctctacactgcgctgcgcggcacagataaaaccgttgcgcctgccggtggcgaagcgtttgaagcgcgctt

SEQ ID NO: 702577 - DNA, 75 bp, synthetic construct
  source 1..75: mol_type = other DNA
ctgcagttaagaactggcatgagcggatccgttcgcgccctgccaccgtgcaggcactgctaaaatcacaactcg

SEQ ID NO: 702578 - DNA, 75 bp, synthetic construct
  source 1..75: mol_type = other DNA
cgccaaatggtcacaaaattacgttgtttctcgaagaagcaggactggattatcgcttgattaaggtagacctgg

SEQ ID NO: 702579 - DNA, 75 bp, synthetic construct
  source 1..75: mol_type = other DNA
cggcagtcaagaactggtatgagcgaattcgttcgcgccctgccgccgggcaggcactgctaaaagcacaactcg

SEQ ID NO: 702580 - DNA, 75 bp, synthetic construct
  source 1..75: mol_type = other DNA
atcgttgccaatagacgtgctgaaaatcgacaaaatgttcgttgaaggcttgccagaagatagcagcatgattac

SEQ ID NO: 702581 - DNA, 75 bp, synthetic construct
  source 1..75: mol_type = other DNA
ttgggaattgccggatgggctaatcgatcgaattgagtcctgtggactgatggttaccgttggtcattgggtgct

SEQ ID NO: 702582 - DNA, 75 bp, synthetic construct
  source 1..75: mol_type = other DNA
ggtactgtcgccacgtatgatcctcgcacaggtcagtggttacgactttgctgttatcgccaatggcgtgcagga

SEQ ID NO: 702583 - DNA, 75 bp, synthetic construct
  source 1..75: mol_type = other DNA
gccgatccgtgggccattatccctatgaaaatcccctactggcggcctaagtcaaaccttatgcctgtgcacact

SEQ ID NO: 702584 - DNA, 75 bp, synthetic construct
  source 1..75: mol_type = other DNA
gggccaggaggtgattgttgatttcctgaacggagacccggaccagccggtggtcatggggcggacgtaccatga

SEQ ID NO: 702585 - DNA, 75 bp, synthetic construct
  source 1..75: mol_type = other DNA
gtcacagggcagagtaattcaccgaagctgtggccgggaacgcggtttacgctgacgggacatccgcagaagatg

SEQ ID NO: 702586 - DNA, 75 bp, synthetic construct
  source 1..75: mol_type = other DNA
tgaacgcgccgccacattacagtggttattctggcaggttggcggcctggggccgatgctcgggcaaaatcatca

SEQ ID NO: 702587 - DNA, 75 bp, synthetic construct
  source 1..75: mol_type = other DNA
agtgcggatacctataaagactttatccttaccatgctgttccttaagtacatttcggatgtctggcaggatcac

SEQ ID NO: 702588 - DNA, 75 bp, synthetic construct
  source 1..75: mol_type = other DNA
aactttgccgccagcggtgggcaaaaagccggggaattctataccccgccggaagtctcggacctgattgctgaa

SEQ ID NO: 702589 - DNA, 75 bp, synthetic construct
  source 1..75: mol_type = other DNA
gtgactggacatgcagcaatcctcgacatgtgctgtggcagtcgcatgttctggttcgataagaatgacgaccgg

SEQ ID NO: 702590 - DNA, 75 bp, synthetic construct
  source 1..75: mol_type = other DNA
gaagatcttaacctgaagccaagccgtgtcggtatgctggacattatcggtaatgcctatgaatatctgatcaaa

SEQ ID NO: 702591 - DNA, 75 bp, synthetic construct
  source 1..75: mol_type = other DNA
tggggccatgacgaggccgagaacgataagtttggtcgtttccgtcggggtgtgccaccgaaaaccaaaggcgat

SEQ ID NO: 702592 - DNA, 75 bp, synthetic construct
  source 1..75: mol_type = other DNA
catttcagatgtctggcaggatcactatgacgaatacaaagaacagtatggcgatgcgccggaactgattgaagc

SEQ ID NO: 702593 - DNA, 75 bp, synthetic construct
  source 1..75: mol_type = other DNA
tgaggaagaggacgagatcgatttgctggccgtgcgtaaagagcgagagcaactgaaggtggaactggcgaaact

SEQ ID NO: 702594 - DNA, 75 bp, synthetic construct
  source 1..75: mol_type = other DNA
ccatctgtgacccagcctgtggttctggctcattattaatgaagtgcgggcgtaaaatcgtctccgggcataaca

SEQ ID NO: 702595 - DNA, 75 bp, synthetic construct
  source 1..75: mol_type = other DNA
cggcagtaaaaaactggtatgaacgaatccgctcacgtcctgctaccgggcaggcgctactaaaagcacaagtaa

SEQ ID NO: 702596 - DNA, 75 bp, synthetic construct
  source 1..75: mol_type = other DNA
tgaagaagaggatgagattgacctgctggcggtgcgagcagagcgtgagcaactgaaggtggaactggcgaagct

SEQ ID NO: 702597 - DNA, 75 bp, synthetic construct
  source 1..75: mol_type = other DNA
tacgatgaatataaaaaacagtatggtgatgcaccagaactcattgaagccatgatggcgaatgaacgtttcgta

SEQ ID NO: 702598 - DNA, 75 bp, synthetic construct
  source 1..75: mol_type = other DNA
ctgccgaaaagtgccagcttttatactctttacgagcgtcgctatgagccgggaaacggcgagcgtattgatcag

SEQ ID NO: 702599 - DNA, 75 bp, synthetic construct
  source 1..75: mol_type = other DNA
tggttaccgtcggtcactgggtgctggaagagtcctgtcgattgcttgctgcctggcaagagcgcggcattatgc

SEQ ID NO: 702600 - DNA, 75 bp, synthetic construct
  source 1..75: mol_type = other DNA
gcactaacgccttgatcgacacgccgttcctgatgaaaaccgccgaaaccattcgcctcggcaccggtattccgc

SEQ ID NO: 702601 - DNA, 75 bp, synthetic construct
  source 1..75: mol_type = other DNA
aaccgaacctgggtgtgcgcactaacgccttgatcgacacgccgttcctgatgaaaaccgcagaaaccatccgcc

SEQ ID NO: 702602 - DNA, 75 bp, synthetic construct
  source 1..75: mol_type = other DNA
atgacgaatcgtatctctcgcctcaaaactgcactgtttgccaatacccgtgaaatctcgctggagcgggcgctg

SEQ ID NO: 702603 - DNA, 75 bp, synthetic construct
  source 1..75: mol_type = other DNA
gatgtgcaaatgcctggcaccgtcctcggacatatcacaccacaagccgcactggcgacacatttcccggcagga

SEQ ID NO: 702604 - DNA, 75 bp, synthetic construct
  source 1..75: mol_type = other DNA
ctatgaaggttgcgttctctaatggcatgataaacaaattatgcaaaagttttttttatagtcatggtaaggagc

SEQ ID NO: 702605 - DNA, 75 bp, synthetic construct
  source 1..75: mol_type = other DNA
gacattctggcaggcgtgtcagttgttctggtacatgaacatcattctgcaatacgaatccaacgccagctcgct

SEQ ID NO: 702606 - DNA, 75 bp, synthetic construct
  source 1..75: mol_type = other DNA
aaacacattttgcgttacgccgaactggcggaaacgatggcggcaagctgcactgatgcccagcgtcgcgaagaa

SEQ ID NO: 702607 - DNA, 75 bp, synthetic construct
  source 1..75: mol_type = other DNA
ccgggcgaaagcaacagcgtatatccttgaacacgttgaaatttcgattcgtgatgaagaactgattgccggtaa

SEQ ID NO: 702608 - DNA, 75 bp, synthetic construct
  source 1..75: mol_type = other DNA
gtatctaccgcgaagagctgttcccatactgggaaaaacgctcgatgaaagatttcattaacgggcagatgacgg

SEQ ID NO: 702609 - DNA, 75 bp, synthetic construct
  source 1..75: mol_type = other DNA
acggccgcttcgccggagaacaactggctgatggtggtttgtcaccaatgttgggtcaggacggacaagggccaa

SEQ ID NO: 702610 - DNA, 75 bp, synthetic construct
  source 1..75: mol_type = other DNA
tttgctatcagcgaagaagataaacgtatctaccgcgaagagttgttcccgtactgggaaaaacgttcgatgaaa

SEQ ID NO: 702611 - DNA, 75 bp, synthetic construct
  source 1..75: mol_type = other DNA
ttcgccattagtgaagaagataaacgtatctatcgcgaagagttattcccgtactgggaaaaacgctcgatgaaa

SEQ ID NO: 702612 - DNA, 75 bp, synthetic construct
  source 1..75: mol_type = other DNA
tggttgcgcgacatgttgggcgagtcgttaattcaggatgccagagcacaggatctttcgccggaagatttgctc

SEQ ID NO: 702613 - DNA, 75 bp, synthetic construct
  source 1..75: mol_type = other DNA
cctgctctcgattgcccggtcgtcttcccttacgcacctaacgctgtactggttggtttcctgagtagctttgct

SEQ ID NO: 702614 - DNA, 75 bp, synthetic construct
  source 1..75: mol_type = other DNA
ataacttcttcaataatgatctctcgcctcgagaggcattggatggaaaacatgccagtatctttgatcgccact

SEQ ID NO: 702615 - DNA, 75 bp, synthetic construct
  source 1..75: mol_type = other DNA
gcctatttccgttaccagcaagtgcatcggcccacgggaacaaagaatgaaagtaaggccctacgtgcggttgag

SEQ ID NO: 702616 - DNA, 75 bp, synthetic construct
  source 1..75: mol_type = other DNA
ctggctggcaaaagcgggcgttggtattgcccagggcttcctttttgctcgcccactccctattgaaatcttcga

SEQ ID NO: 702617 - DNA, 75 bp, synthetic construct
  source 1..75: mol_type = other DNA
actgatattacatcctttacgtaatattgctcgcgaactaaacgccattccaccgcaagagattgttggtcatca

SEQ ID NO: 702618 - DNA, 75 bp, synthetic construct
  source 1..75: mol_type = other DNA
tgacgctggtggaaaaactcaaatcggtactgtcgccacgtatgatcctcgcgcagattagcggttatgactttg

SEQ ID NO: 702619 - DNA, 75 bp, synthetic construct
  source 1..75: mol_type = other DNA
ctgaacattcgcatttcggctcatggaacacataccacccagattgaaatcgtcacggatgaagcgcgttcagcg

SEQ ID NO: 702620 - DNA, 75 bp, synthetic construct
  source 1..75: mol_type = other DNA
gatcttgaagatgcggtagagaaaagaatatttaccgttgagcagctttatcatcatttgcacgaggcgtggggc

SEQ ID NO: 702621 - DNA, 75 bp, synthetic construct
  source 1..75: mol_type = other DNA
tgtagggcttggcttgtacccggattacgcaactgctgttgacaaaatggttcgcgtgaaagacatctttatgcc

SEQ ID NO: 702622 - DNA, 75 bp, synthetic construct
  source 1..75: mol_type = other DNA
cggctggtgaagtcggaacgattattttcgcttgctgaaacggctgtggcaagcggcgagatgggggctgaccgc

SEQ ID NO: 702623 - DNA, 75 bp, synthetic construct
  source 1..75: mol_type = other DNA
gtttcatggaaaccgaggctgcctgccggttgaattgcacaaaccaacccataatttttttaacaatgatcttac

SEQ ID NO: 702624 - DNA, 75 bp, synthetic construct
  source 1..75: mol_type = other DNA
cgtctggagaagtcggagcgactattttttcttgctgacgcagcggtagatagtggcgagataggaattgatcgc

SEQ ID NO: 702625 - DNA, 75 bp, synthetic construct
  source 1..75: mol_type = other DNA
atacgaaatatcaaacccacaatagattatctatcttctaccatcgaaaatagtaaaaattccaattactccgga

SEQ ID NO: 702626 - DNA, 75 bp, synthetic construct
  source 1..75: mol_type = other DNA
aggtgtctacaacgccaaccagttgacctctcccgcgagtgatgaatttgaccttgtgcgcggctggcagcaatt

SEQ ID NO: 702627 - DNA, 75 bp, synthetic construct
  source 1..75: mol_type = other DNA
ggccggcatacggtacgcagcaggcgagtagtgcttttcagtttgcacaggcgctgatagcagaaggccatgagc

SEQ ID NO: 702628 - DNA, 75 bp, synthetic construct
  source 1..75: mol_type = other DNA
gagtagtgcttttcagtttgcgcaggcgctgatagcagaaggccatgagttaagcagcgtctttttctatcggga

SEQ ID NO: 702629 - DNA, 75 bp, synthetic construct
  source 1..75: mol_type = other DNA
aaacaggaagcggcagcgccggctccggcagcaaaagctgaagctccggcagcagcaccggctgcgaaagcggaa

SEQ ID NO: 702630 - DNA, 75 bp, synthetic construct
  source 1..75: mol_type = other DNA
ccgcatgttactcacttcgacaaaacagatatcaccgagctggaagcgttccgtaaacagcagaacgaagaagcg

SEQ ID NO: 702631 - DNA, 75 bp, synthetic construct
  source 1..75: mol_type = other DNA
acctcaccggcaagcgatgaatttgaccttgtgcgtggctggcaacaactgaatacacaacatggtgtggcgctg

SEQ ID NO: 702632 - DNA, 75 bp, synthetic construct
  source 1..75: mol_type = other DNA
tatctcgtttcaggttgaaattgaaacggcagaaccaaatcacacaagcacaacgatagtcgggctggatgctgg

SEQ ID NO: 702633 - DNA, 75 bp, synthetic construct
  source 1..75: mol_type = other DNA
aaccgcctgtcacaaagtcaattcagatgccaggtatgtggatatacagcgaacgccgatgtaaatggcgctcgt

SEQ ID NO: 702634 - DNA, 75 bp, synthetic construct
  source 1..75: mol_type = other DNA
tcgaaatggcgatcagccatattaaatcgcagctgcgtgccaccggagaacgcgaagtacccagcaaaatgatcg

SEQ ID NO: 702635 - DNA, 75 bp, synthetic construct
  source 1..75: mol_type = other DNA
aattatttttttaaaggtggggtgattgcaaaaatgcattttaaaatgataacgtctccctacagtgtatctatg

SEQ ID NO: 702636 - DNA, 75 bp, synthetic construct
  source 1..75: mol_type = other DNA
ttatgctgtcaaccgaaagggatgctgaaatgaacactaagcatctgaataacgaggaatttaagcgttataaag

SEQ ID NO: 702637 - DNA, 75 bp, synthetic construct
  source 1..75: mol_type = other DNA
gaacactaagcatctgaataacgaggaatttaagcgttataaagttcttggccgcgtagttagtgttgtcaactg

SEQ ID NO: 702638 - DNA, 75 bp, synthetic construct
  source 1..75: mol_type = other DNA
ttgttccggtattcaaagacgtcaacaagaaaggcatcatcgagctgtctcgcgagctgatgactatttctaaga

SEQ ID NO: 702639 - DNA, 75 bp, synthetic construct
  source 1..75: mol_type = other DNA
ctatataaccgcaacgtctatgatgatgcggaagagtctggtcgttctatctttgaaatgaccggtagcgagcgc

SEQ ID NO: 702640 - DNA, 75 bp, synthetic construct
  source 1..75: mol_type = other DNA
ggtcaaacggtagagacctggaaccgggacggcggcacaagtactgaacaggcgtataaaaatatcccgttctac

SEQ ID NO: 702641 - DNA, 75 bp, synthetic construct
  source 1..75: mol_type = other DNA
atgcgaaaaataaaaacaaaaatctacttgcctacagctttgacaggaaacatggataaacactatatccctgtt

SEQ ID NO: 702642 - DNA, 75 bp, synthetic construct
  source 1..75: mol_type = other DNA
gcggtaggaaaggcgtcagctatatagatgattgtatatctcatcgtaataaatcaattatcattcaagaagata

SEQ ID NO: 702643 - DNA, 75 bp, synthetic construct
  source 1..75: mol_type = other DNA
gtgaattattaaagatacatgagcttattaaacagcgtattttttctaagatatcacttccagagtatattactg

SEQ ID NO: 702644 - DNA, 75 bp, synthetic construct
  source 1..75: mol_type = other DNA
atgcgtgatttcaaagatgagagttttatcagccagtttctgtcaccgaaagtgatgcgtgatttccgcttcttc

SEQ ID NO: 702645 - DNA, 75 bp, synthetic construct
  source 1..75: mol_type = other DNA
atgtgaacggcgttccgcttcgtgagagtctcagctacaacgggggcggtggcaggatttggcgggcaaatggct

SEQ ID NO: 702646 - DNA, 75 bp, synthetic construct
  source 1..75: mol_type = other DNA
ccgcacagtgcgctacgcagtcaggtacgcggggcgattattcccggcctgctgggcgttggtgaaccgctgatt

SEQ ID NO: 702647 - DNA, 75 bp, synthetic construct
  source 1..75: mol_type = other DNA
tgctggcgggattctggtggcatgggtttgcgggtttattttcaccacgctctttggctgccgtaacgtcaatct

SEQ ID NO: 702648 - DNA, 75 bp, synthetic construct
  source 1..75: mol_type = other DNA
gcggctacggcttcggactgaagaaagagatcaccggcgtgctgggtcgttaccccacgcaggaagaggcgcaga

SEQ ID NO: 702649 - DNA, 75 bp, synthetic construct
  source 1..75: mol_type = other DNA
gattgtaatgaaaagaacattacaacaaatattagggggggcaccatttattatcagtggtgcctgtggaatgtt

SEQ ID NO: 702650 - DNA, 75 bp, synthetic construct
  source 1..75: mol_type = other DNA
ctgacgataacgccagaaatcgccgcagagcacgcagacaggctcaacgtgaacaggcaatgcaagagcagcaac

SEQ ID NO: 702651 - DNA, 75 bp, synthetic construct
  source 1..75: mol_type = other DNA
tatccgttttgcctctgtctaccgcagtttcgaagatatcaaagaatttggcgaagagatcgcgcgcctggagga

SEQ ID NO: 702652 - DNA, 75 bp, synthetic construct
  source 1..75: mol_type = other DNA
tatgggcaaagccgtgcggattcaggaagaacctgacggctgcctctctggcagttgtaaaagctgcccggaagg

SEQ ID NO: 702653 - DNA, 75 bp, synthetic construct
  source 1..75: mol_type = other DNA
ccgatagcaagggcaactggcaaccggtaggtgccactattgacccagcagtactttttatcgaccgctgcctgc

SEQ ID NO: 702654 - DNA, 75 bp, synthetic construct
  source 1..75: mol_type = other DNA
ctctgggctacgtggtgaaaaacaacatcgaagattataacgccggtgtcgcaaacgatctggataagattgtct

SEQ ID NO: 702655 - DNA, 75 bp, synthetic construct
  source 1..75: mol_type = other DNA
aatctctctccaggaggagaaagcccggcagaaaagtcgtgaagagtatctgcaaagtcaggttaatatgctgtg

SEQ ID NO: 702656 - DNA, 75 bp, synthetic construct
  source 1..75: mol_type = other DNA
atggcttcgctcatccaggtgcgtgatttgctggcgttacggggccgtatggaagcggcccaaatcagccagacg

SEQ ID NO: 702657 - DNA, 75 bp, synthetic construct
  source 1..75: mol_type = other DNA
gaagaacctgatggctgcctctctggcagttgtaaaagctgcccggaaggaaaagcctgtctgcgtgagtggtgg

SEQ ID NO: 702658 - DNA, 75 bp, synthetic construct
  source 1..75: mol_type = other DNA
ataaattctgaaaaatatctaataaaatcaatttattataatttatttggtggcgaagattctaataaaaaacca

SEQ ID NO: 702659 - DNA, 75 bp, synthetic construct
  source 1..75: mol_type = other DNA
gcggtaagaattcaacggagaaaaattgcaaaataacaatcggtaataacaataaagataatattatttttaata

SEQ ID NO: 702660 - DNA, 75 bp, synthetic construct
  source 1..75: mol_type = other DNA
tggaactcttaatataccgattaatgcgacgtttaagtcaaaaaaaccagagcctggcccatttaaagatagtgt

SEQ ID NO: 702661 - DNA, 75 bp, synthetic construct
  source 1..75: mol_type = other DNA
acaaccagcagatgcgcggtgtggcgcgcgtgcagggcgaaattccggaaaatgccgacctgaaaacgctggtcg

SEQ ID NO: 702662 - DNA, 75 bp, synthetic construct
  source 1..75: mol_type = other DNA
atgccgcaacatgaccaattacatcgctatctgtttgaaaactttgccgtacgcggcgaactggtaaccgtttcg

SEQ ID NO: 702663 - DNA, 75 bp, synthetic construct
  source 1..75: mol_type = other DNA
ttttattcattgtaacactggttgtcattgccttaataatcatcacattgcttcgctggatacagcatttgacct

SEQ ID NO: 702664 - DNA, 75 bp, synthetic construct
  source 1..75: mol_type = other DNA
atttttgcccgtaaatatattaccgagtgcgaagaacgttatggcgttgatgaagtagaacggcttctggactcg

SEQ ID NO: 702665 - DNA, 75 bp, synthetic construct
  source 1..75: mol_type = other DNA
ccaggatattaaacggatttgtcagtcgccaacggaagaagacaaatactggttcccggatatcgccggttccga

SEQ ID NO: 702666 - DNA, 75 bp, synthetic construct
  source 1..75: mol_type = other DNA
gaagcctatgagcgaatgctgcgaggtgatgtgaaatatcgttttgttatcgataatcgcacactaacagactga

SEQ ID NO: 702667 - DNA, 75 bp, synthetic construct
  source 1..75: mol_type = other DNA
cgatatccaccaggtccgttccgagtgggcggggacggtttatccctgcgtgccgggccatgaaattgtagggcg

SEQ ID NO: 702668 - DNA, 75 bp, synthetic construct
  source 1..75: mol_type = other DNA
gcgtcaccctggtctgtccgtactgcagtcagcatttttcggcagatgtgcccgttatggaattctcccgccctg

SEQ ID NO: 702669 - DNA, 75 bp, synthetic construct
  source 1..75: mol_type = other DNA
agaaaggtatcaccaccctgaagttcagcgacgccagcgtcatttcctccggtaagtaccgcgtaccagccgtcc

SEQ ID NO: 702670 - DNA, 75 bp, synthetic construct
  source 1..75: mol_type = other DNA
ggcctatgaaatcgtcattaactctaacccgtgtatcgcttacctgatggaagagaacactatcaccatgcaggc

SEQ ID NO: 702671 - DNA, 75 bp, synthetic construct
  source 1..75: mol_type = other DNA
tatgttgaagagtcgatttatcgcccgctcggcctgacgcatacggtgtttaatccgctgctgaaaggctttaaa

SEQ ID NO: 702672 - DNA, 75 bp, synthetic construct
  source 1..75: mol_type = other DNA
gatcggattgcgaaatatattccagggtttgccgataacccaaatgacaccattaaaggcaaaaacacgttgcgg

SEQ ID NO: 702673 - DNA, 75 bp, synthetic construct
  source 1..75: mol_type = other DNA
taagggcgtatgataaatgtttgtgttattttgacgacctgaaaaacaataagcgcaagagaagacgaatagcca

SEQ ID NO: 702674 - DNA, 75 bp, synthetic construct
  source 1..75: mol_type = other DNA
taagagcttacgataaggctttaatggtttttgatgatttgcgacgcaataagcgtgagcgtcgtaaatgggcgc

SEQ ID NO: 702675 - DNA, 75 bp, synthetic construct
  source 1..75: mol_type = other DNA
tatcccggcgtaaacctgctgatcattaaagataatcagattgtgtatcgcaaagcctggggagcggcgaaaaag

SEQ ID NO: 702676 - DNA, 75 bp, synthetic construct
  source 1..75: mol_type = other DNA
ctgacctgctgcatcacagcggcggtttcccggcggacccacaatatccgaataaagcggtcgcgggcgcgttat

SEQ ID NO: 702677 - DNA, 75 bp, synthetic construct
  source 1..75: mol_type = other DNA
atgaataaacaatcttggctgcttaacctcagcctgttgaaaacgcacccggcgtttcgcgcagtattcctcgct

SEQ ID NO: 702678 - DNA, 75 bp, synthetic construct
  source 1..75: mol_type = other DNA
gcagatcgctatgagcgcaaaaaagtgattctgctggcgcgcggcacttgtggcattggttttattggcctgtgt

SEQ ID NO: 702679 - DNA, 75 bp, synthetic construct
  source 1..75: mol_type = other DNA
gttgttgttgctggtactggtagagttgcgtcgttttcgccagacgccgccgcaggtgacagcgtctgacagtta

SEQ ID NO: 702680 - DNA, 75 bp, synthetic construct
  source 1..75: mol_type = other DNA
aaatcctggttcgctcagttcgctgaacacctatctaatcttttctccctgaatgaaaaaattaaggccaataaa

SEQ ID NO: 702681 - DNA, 75 bp, synthetic construct
  source 1..75: mol_type = other DNA
cttggcgttacggcgcttctggcggcgactccggcattagttgggcgtgaaaatttaatgcaggccggggcaatc

SEQ ID NO: 702682 - DNA, 75 bp, synthetic construct
  source 1..75: mol_type = other DNA
caatgctgcaaacgcaaacgccggaagcaatgttagggcgaattaacggtttgtggacggcacaaaacgtgacgg

SEQ ID NO: 702683 - DNA, 75 bp, synthetic construct
  source 1..75: mol_type = other DNA
atacgccgtctgtagattctggatcagggactttgccggaagtgaaacctgatccaacaccaaacccggagccga

SEQ ID NO: 702684 - DNA, 75 bp, synthetic construct
  source 1..75: mol_type = other DNA
atcgtttcgccaacgatgtgcagatctccattggtgacgcgcactcgggttatccggtgatgaacagcagcttct

SEQ ID NO: 702685 - DNA, 75 bp, synthetic construct
  source 1..75: mol_type = other DNA
tgtgactgtcaccgtggcgctggccgacgacctgaccggacgtgagaagcatgaagtcgcgctgaaccgtccgcc

SEQ ID NO: 702686 - DNA, 75 bp, synthetic construct
  source 1..75: mol_type = other DNA
ggcggcaagaattactgtgctgaatccaacggtaacgctgccgacacgctgatgctgtgtgcctcctgggtcgcc

SEQ ID NO: 702687 - DNA, 75 bp, synthetic construct
  source 1..75: mol_type = other DNA
agtctactggtctgtgggctccggctcagaaagagttcaccatcgagtctaccgcgtcagtccctgtgacggtca

SEQ ID NO: 702688 - DNA, 75 bp, synthetic construct
  source 1..75: mol_type = other DNA
ctgtataagcaaatcggtctgacaccggacgagttcaaaaagctggtcaatgaagaggtggaaaacaatgctgcg

SEQ ID NO: 702689 - DNA, 75 bp, synthetic construct
  source 1..75: mol_type = other DNA
gaatgaaaaaattaaggccaataaatcggagggtgaacccatgcctttgaccaaagaagaacgcgccgaactggt

SEQ ID NO: 702690 - DNA, 75 bp, synthetic construct
  source 1..75: mol_type = other DNA
caccacgacgtgcgttataccgcaaaagcggtgcgtgcggcggtagagctggcggtgaaatacattaacgatcgt

SEQ ID NO: 702691 - DNA, 75 bp, synthetic construct
  source 1..75: mol_type = other DNA
tggtcttcggtcaggataaagccattgaggcgctgactgaagccattaagatggcgcgtgcaggtttaggtcacg

SEQ ID NO: 702692 - DNA, 75 bp, synthetic construct
  source 1..75: mol_type = other DNA
gcgcgagcaccgtcatgagttgatgaccgtcgagcacttgttactggcgctgctcagtaacccatctgcccggga

SEQ ID NO: 702693 - DNA, 75 bp, synthetic construct
  source 1..75: mol_type = other DNA
gtcagcttgggaagaaatgacctgcttattcgcaccttccttagtttttccatcgctttctttactggggtgtga

SEQ ID NO: 702694 - DNA, 75 bp, synthetic construct
  source 1..75: mol_type = other DNA
agcttcatctgtgcacacagccatatcagcttttcctgcctggattcagtcatccatttatcgctgtactgtctg

SEQ ID NO: 702695 - DNA, 75 bp, synthetic construct
  source 1..75: mol_type = other DNA
tttctaattatcaaatactgactgatgcaaaaagaataaaaattagacattgtcatataaatccgcatgaagact

SEQ ID NO: 702696 - DNA, 75 bp, synthetic construct
  source 1..75: mol_type = other DNA
aaaccctgacctgcgcaccgtcgatgtgttaattcgtcgtttacgccataaactcagcgcggatttactggtgac

SEQ ID NO: 702697 - DNA, 75 bp, synthetic construct
  source 1..75: mol_type = other DNA
aaatccctgggtaaagcaactccgctagccgccaacacagcaagtgaagacaaaaaaggtgaagtccctgacttt

SEQ ID NO: 702698 - DNA, 75 bp, synthetic construct
  source 1..75: mol_type = other DNA
gaaatcctggtttactcaattcgctgaacacctatccgatttattcatcctgaaagaaaaaatccaggccaataa

SEQ ID NO: 702699 - DNA, 75 bp, synthetic construct
  source 1..75: mol_type = other DNA
gttgatgcggctaacctgatcaaaccgttgctctccagcggtaaaattcgcgtaattggttcgacaacctatcag

SEQ ID NO: 702700 - DNA, 75 bp, synthetic construct
  source 1..75: mol_type = other DNA
catggcgatttttaatctgccgatgcatctgtttctctcctggccgctggataaagacctgataaaccacgtcac

SEQ ID NO: 702701 - DNA, 75 bp, synthetic construct
  source 1..75: mol_type = other DNA
tgagcgaatgcctgaaaagggccagaatgtgcttatttcggtgaatttcgatagctccctggttgaaccgctaat

SEQ ID NO: 702702 - DNA, 75 bp, synthetic construct
  source 1..75: mol_type = other DNA
gggcaggctaaagagattgatacggcgatttgtaaatccctcgggggctgcaactctcaacgttggttctcgttg

SEQ ID NO: 702703 - DNA, 75 bp, synthetic construct
  source 1..75: mol_type = other DNA
ttgagcatttaagtagctatggcgatctcgatccgcaggaaatgccgctgctgatccttaacggctttgagtatg

SEQ ID NO: 702704 - DNA, 75 bp, synthetic construct
  source 1..75: mol_type = other DNA
tgaccagctatggcaatctgaatccagatgaagttcctctgttgatcctcaatggctttgaatacgtcacacaat

SEQ ID NO: 702705 - DNA, 75 bp, synthetic construct
  source 1..75: mol_type = other DNA
gtatccgaaccgcgttcgtcagcagcgcgcaacgggcatttgggtctatgaacgttatcctgccgtagatggtgc

SEQ ID NO: 702706 - DNA, 75 bp, synthetic construct
  source 1..75: mol_type = other DNA
tacagcgagcgtgaagggatgaaaggctggaacctgttccagttgatgcaccgtaaagcacgcggcgatgaggtt

SEQ ID NO: 702707 - DNA, 75 bp, synthetic construct
  source 1..75: mol_type = other DNA
gaatgaagaggtggaaaacaatgccgccactgataaagcgccgtctacccatacgtctccggtcgtgccagccac

SEQ ID NO: 702708 - DNA, 75 bp, synthetic construct
  source 1..75: mol_type = other DNA
aggaagagagcgcatctggctttgtacgtctgcttgatgccgcaggtttgtcgatggcgcttaacaagtcggtag

SEQ ID NO: 702709 - DNA, 75 bp, synthetic construct
  source 1..75: mol_type = other DNA
aacgatctggacacctttgccagctcgatgaatgacttctacggtcgtgatgaaacgagcggtaagcaccggatg

SEQ ID NO: 702710 - DNA, 75 bp, synthetic construct
  source 1..75: mol_type = other DNA
cagacggtgcgctgccatacaccatcgatagtaagacaggggaagttaagtggaaatatcagattgataacaaac

SEQ ID NO: 702711 - DNA, 75 bp, synthetic construct
  source 1..75: mol_type = other DNA
agccaacttcacctttactggcgtggtaaaagcgccgttctataaagacggcgaatggaaaaacgctctgaactc

SEQ ID NO: 702712 - DNA, 75 bp, synthetic construct
  source 1..75: mol_type = other DNA
ggcttacaacacgctcgcgtcactcgatctgccgaaaccgaagcaagggccggaaaccattaataaggttaccga

SEQ ID NO: 702713 - DNA, 75 bp, synthetic construct
  source 1..75: mol_type = other DNA
gcggttgaaaaagtgtcgtttagtcttgaggacgcgcaagaactggcggcttccgacaacaagaaaagcaatgcg

SEQ ID NO: 702714 - DNA, 75 bp, synthetic construct
  source 1..75: mol_type = other DNA
tacagcgagcgtgaagggatgaaaggctggaacctgttccagttgatgcatcgtaaagcacgcggcgatgaggtc

SEQ ID NO: 702715 - DNA, 75 bp, synthetic construct
  source 1..75: mol_type = other DNA
aacatcgtttcgccaacgatgtgcagatctccatcggtgatgcgcactcgggttatccggtaatgaacagcagct

SEQ ID NO: 702716 - DNA, 75 bp, synthetic construct
  source 1..75: mol_type = other DNA
ttacaacacgctcgcgtcactcgatctgccgaaaccggaacagggaccggaaaccattaatcaggttaccgagca

SEQ ID NO: 702717 - DNA, 75 bp, synthetic construct
  source 1..75: mol_type = other DNA
agcgatcgtgaagggatgaaaggctggaacctgttccagttgatgcaccgtaaagcacgcggcgatgatgttggt

SEQ ID NO: 702718 - DNA, 75 bp, synthetic construct
  source 1..75: mol_type = other DNA
gcggtgtgagccagtcggcgtacaacacgctggcgtcactcaagctgccgaaaccggaacagggaccggaaacca

SEQ ID NO: 702719 - DNA, 75 bp, synthetic construct
  source 1..75: mol_type = other DNA
tctttgccgagtatcccaacgtgattaacgagattatcaatctctcgttgtccaatggcgctacgctggatgaag

SEQ ID NO: 702720 - DNA, 75 bp, synthetic construct
  source 1..75: mol_type = other DNA
gcaaataagaaaactaatgcggtttcgctggttacgtccagtaatagttgccctgctgatgcagaacagatctgt

SEQ ID NO: 702721 - DNA, 75 bp, synthetic construct
  source 1..75: mol_type = other DNA
gaagctgcgtgtagcctgcgtgcggttgacaaagagtcgtttagcttggaggatgcactggagttggcggattct

SEQ ID NO: 702722 - DNA, 75 bp, synthetic construct
  source 1..75: mol_type = other DNA
gcacgagctttatttccgtaccaatggtcgcaaaggtgagcgtctgagcagcgtcgatctggaacgtctgtacca

SEQ ID NO: 702723 - DNA, 75 bp, synthetic construct
  source 1..75: mol_type = other DNA
gtcggcttacaacacgctcgcggcgatgcacctgtcgaaaccggaaaaagggccggaaaccattaataaggttac

SEQ ID NO: 702724 - DNA, 75 bp, synthetic construct
  source 1..75: mol_type = other DNA
cttaatctgccgaaaccgcagcaagggccggaaaccattaatcaggttaccgagcataagatgtcagctgagtaa

SEQ ID NO: 702725 - DNA, 75 bp, synthetic construct
  source 1..75: mol_type = other DNA
cgcgaaaccgccaccttcaacctgccgtttatttcgctggggcaagtgggcgatggcaagctgatggttatcggt

SEQ ID NO: 702726 - DNA, 75 bp, synthetic construct
  source 1..75: mol_type = other DNA
acggaagcgccttctcttgttgagccggaaaacgttacgcgcgataccgccacctttaacctgccgtttatttcg

SEQ ID NO: 702727 - DNA, 75 bp, synthetic construct
  source 1..75: mol_type = other DNA
ccgaacggttacagctgggaaggcggtgttgataaaaacggtcagtgtacgcgtaacagtgattctaatgatatg

SEQ ID NO: 702728 - DNA, 75 bp, synthetic construct
  source 1..75: mol_type = other DNA
gcggcgaagaaacacaattgatcggcgcgcgagctctggctccttcctctctttatgttatgcccggtacgcatt

SEQ ID NO: 702729 - DNA, 75 bp, synthetic construct
  source 1..75: mol_type = other DNA
aacgtctgttggcgacaatatctggattattcccggattatgcgtctctcatgacgataaccacaatgtgatgcg

SEQ ID NO: 702730 - DNA, 75 bp, synthetic construct
  source 1..75: mol_type = other DNA
atgtcgaggttaaatggtgggatgaatctgggtattggaatagttggacggaacttaactcagatatctttgccg

SEQ ID NO: 702731 - DNA, 75 bp, synthetic construct
  source 1..75: mol_type = other DNA
cgagcaatatacgcacgccagtctggaagcggcgatcaaagcgcgttttggtgaacaggcgcgttttcatacctg

SEQ ID NO: 702732 - DNA, 75 bp, synthetic construct
  source 1..75: mol_type = other DNA
catttactgaacgctgggttgcaatgaagcacatttttctacagcttgatagccaagctttattgcttttaacga

SEQ ID NO: 702733 - DNA, 75 bp, synthetic construct
  source 1..75: mol_type = other DNA
gcgtggttgctgtggagttacagcgaaagtgttcgctgggaacatcaggtcaccataacgcagtgggcatggagc

SEQ ID NO: 702734 - DNA, 75 bp, synthetic construct
  source 1..75: mol_type = other DNA
ttctctgcctttacgccggatattaaagctgcgccgctattaggtgaacataccgctgctgtattgcaggagctg

SEQ ID NO: 702735 - DNA, 75 bp, synthetic construct
  source 1..75: mol_type = other DNA
acagcggaaggcaaagaggtaatggaaaagctgatccgcgaagctgatatcttagtcgagaactttcatccaggg

SEQ ID NO: 702736 - DNA, 75 bp, synthetic construct
  source 1..75: mol_type = other DNA
acgcactttgaacaggttgctgacctttacgaaatgcaatttgatgacggacgcacttgtgcctttcatactgat

SEQ ID NO: 702737 - DNA, 75 bp, synthetic construct
  source 1..75: mol_type = other DNA
agttttcgacatcatcatggcggcgggctttgctgtctcttgaagagcatcataaagcctggttgttgtggtgtt

SEQ ID NO: 702738 - DNA, 75 bp, synthetic construct
  source 1..75: mol_type = other DNA
gtccaatgaaattctctgcctttacgccggatattaaagctgcgccgctattaggtgaacataccgctgctgtat

SEQ ID NO: 702739 - DNA, 75 bp, synthetic construct
  source 1..75: mol_type = other DNA
cgccaaagtggcagtgttgtcgaagtggaacaaccgttacgtggaaaatatctgacagttggttgtccaatgaaa

SEQ ID NO: 702740 - DNA, 75 bp, synthetic construct
  source 1..75: mol_type = other DNA
cgagcaatatacgcatgccagtctggaagctgcgattaaagcgcgttttggtgaacaggcacgttttcacacctg

SEQ ID NO: 702741 - DNA, 75 bp, synthetic construct
  source 1..75: mol_type = other DNA
cggcggtttcggctctaaacaagacattctgctggaagaagtgtgcgcatgggcaacctgcgtgaccgggcgccc

SEQ ID NO: 702742 - DNA, 75 bp, synthetic construct
  source 1..75: mol_type = other DNA
gcaattgccaccgcaattcacgatgcctgcggcatctggctacgcgaatggcatttcacaccggagaaaatactt

SEQ ID NO: 702743 - DNA, 75 bp, synthetic construct
  source 1..75: mol_type = other DNA
tcaagtcattgaactggctattgcgcgtaaaaataacccgcgtgccacgattgacatcgcccccactttccgtaa

SEQ ID NO: 702744 - DNA, 75 bp, synthetic construct
  source 1..75: mol_type = other DNA
aacgccaggcatcgtccgcggtaagaaaggagaagtcagtttcgaagaaatcgcccataaaggagaaacaggtac

SEQ ID NO: 702745 - DNA, 75 bp, synthetic construct
  source 1..75: mol_type = other DNA
atggcgcaccgaaaggtaacttcgctatcaccatggcgttagcggagctggccgaacagttgcaaattgaccaac

SEQ ID NO: 702746 - DNA, 75 bp, synthetic construct
  source 1..75: mol_type = other DNA
atgattatccactttactttaaatggcgcgccccaggcgctaaccgttaatcctggcgaaaacgtgcaaaagctg

SEQ ID NO: 702747 - DNA, 75 bp, synthetic construct
  source 1..75: mol_type = other DNA
ggcggttctgtctcttgaagaacatcataaagtctggttgttgtggtgttatggcggaaacatttactgggagca

SEQ ID NO: 702748 - DNA, 75 bp, synthetic construct
  source 1..75: mol_type = other DNA
gcgcgaagaaggtggccggcaaaacgatggagcgcctgaagaagcttgtctggctcgcggctcaggacgtgaaag

SEQ ID NO: 702749 - DNA, 75 bp, synthetic construct
  source 1..75: mol_type = other DNA
tgtaattatcagcctgtataagggactcgactccaaggcgctacttcatgtttcgcgatcacgttcacaacaaaa

SEQ ID NO: 702750 - DNA, 75 bp, synthetic construct
  source 1..75: mol_type = other DNA
cgccgacctccgttccttccgccgccagctgcgcactggaagagatcctgcgtcagggtcgcgagatgatccaat

SEQ ID NO: 702751 - DNA, 75 bp, synthetic construct
  source 1..75: mol_type = other DNA
tgcaatgaaacacatttttcatcagctggatagcgaagctttattgtttgcggcgagaacacgttcgaaacaaaa

SEQ ID NO: 702752 - DNA, 75 bp, synthetic construct
  source 1..75: mol_type = other DNA
cttgatagcgaagctttattgcttgtaacgagaacacgttcaaaacaaaagacgacattttcacagcaaagtatt

SEQ ID NO: 702753 - DNA, 75 bp, synthetic construct
  source 1..75: mol_type = other DNA
acgagctggcagggcgtaagacctatgaataccagaagctggcattactggtgggagtgacatcaaaaaactggt

SEQ ID NO: 702754 - DNA, 75 bp, synthetic construct
  source 1..75: mol_type = other DNA
actacttacgacaaacccgaaagctccagtgagattcaaatttttatttaacgatgccacacctgcagctattaa

SEQ ID NO: 702755 - DNA, 75 bp, synthetic construct
  source 1..75: mol_type = other DNA
ccacaacgaatgaacggctgaaagtgttactggctgcgtctccaaaagcaccggtccggttaaggcagatataca

SEQ ID NO: 702756 - DNA, 75 bp, synthetic construct
  source 1..75: mol_type = other DNA
taatacgctatattctcaaaatagaatactcacagaaaagaaaggtaagacagtatttatagccgtagcaggctc

SEQ ID NO: 702757 - DNA, 75 bp, synthetic construct
  source 1..75: mol_type = other DNA
cgccaacagccgacctggaagatgaccgcccttccctgccagatgaagtggcgctcggcgtgagctatgacaata

SEQ ID NO: 702758 - DNA, 75 bp, synthetic construct
  source 1..75: mol_type = other DNA
tcgtccgtcactgccggatgaagtcgcgcttggcgtcacttatgacaacattgatgactatctggaagggaaaac

SEQ ID NO: 702759 - DNA, 75 bp, synthetic construct
  source 1..75: mol_type = other DNA
agtgtcgattttctgaaaagctacctgcaaacttatccgttcattaaatcactggtgctcgggatcagcggcggt

SEQ ID NO: 702760 - DNA, 75 bp, synthetic construct
  source 1..75: mol_type = other DNA
gttggattgtttgaaggctttaattcacttggcaaaaagaaagatcgtgaaattttactatcaagaataatcctt

SEQ ID NO: 702761 - DNA, 75 bp, synthetic construct
  source 1..75: mol_type = other DNA
aagattatatgcgcaaattattatggatactcgcgatgaactacaggctttcatacaggcatgtagcgtgttaaa

SEQ ID NO: 702762 - DNA, 75 bp, synthetic construct
  source 1..75: mol_type = other DNA
acgaaaaggatgcacttacgcagaggacatattcgcaggaaaaataacaaactaatatggatcagaccagcaatg

SEQ ID NO: 702763 - DNA, 75 bp, synthetic construct
  source 1..75: mol_type = other DNA
gatgaactttattggtggataaataattattgtattcgactcaatgcatcttggatcactaaaaatacagtgctc

SEQ ID NO: 702764 - DNA, 75 bp, synthetic construct
  source 1..75: mol_type = other DNA
aaaattatttgataagtacacgcatgctcttaatacctggcgaagtgatgaagcaatttttaattttgaaagaaa

SEQ ID NO: 702765 - DNA, 75 bp, synthetic construct
  source 1..75: mol_type = other DNA
aaatgcaatttatgaagtggaacagcatacgcaggcccctcaaggtttgattgctgcttctgctcttggggtaat

SEQ ID NO: 702766 - DNA, 75 bp, synthetic construct
  source 1..75: mol_type = other DNA
ggtattgaattaagcgatttcgttcgcggcaatgaaaaagcgcgtgagcggatgaaagcgcaatacagcattgca

SEQ ID NO: 702767 - DNA, 75 bp, synthetic construct
  source 1..75: mol_type = other DNA
ttgccgttggctgtatggtcgatagctgtatgcactgcgaccagtgtgagcagggcgaagagcagtattgccgcc

SEQ ID NO: 702768 - DNA, 75 bp, synthetic construct
  source 1..75: mol_type = other DNA
ttctttattgtggcgtttgtcactcagatttacatacagttaatggtgactgggggcctcagccttatccgttaa

SEQ ID NO: 702769 - DNA, 75 bp, synthetic construct
  source 1..75: mol_type = other DNA
ccgcgcgtcaccataccttcttcgaaatgctgggtaacttcagcttcggcgactatttcaaacacgatgccattc

SEQ ID NO: 702770 - DNA, 75 bp, synthetic construct
  source 1..75: mol_type = other DNA
aaaaaagtgggcgtggtcggcatcggcggtctgggacatatggggattaaactggcccacgcgatggggggcgca

SEQ ID NO: 702771 - DNA, 75 bp, synthetic construct
  source 1..75: mol_type = other DNA
atgaagatcaaagctgttggtgcatattccgctaaacaaccacttgaaccgatggatatcacccggcgtgaaccg

SEQ ID NO: 702772 - DNA, 75 bp, synthetic construct
  source 1..75: mol_type = other DNA
cggcgatcccgctcggcgcggctattggtgcgttaaccagcgggaagctggcacatagtgcgcgaccagggttat

SEQ ID NO: 702773 - DNA, 75 bp, synthetic construct
  source 1..75: mol_type = other DNA
gcggtgggtataatcccaaagtcagaggagcctttcacatggctgtatccgcacgcccttactttgtctggcgct

SEQ ID NO: 702774 - DNA, 75 bp, synthetic construct
  source 1..75: mol_type = other DNA
caccacggcgctggtggttcttatcctctgcttttgcagggaggtaagaatatttttcgcacaaatcgttctgcc

SEQ ID NO: 702775 - DNA, 75 bp, synthetic construct
  source 1..75: mol_type = other DNA
atgagtagttggtgttgtagttgtcgtaaaaatttctcatcgtctggtgataaatccatacttatttcctgtaca

SEQ ID NO: 702776 - DNA, 75 bp, synthetic construct
  source 1..75: mol_type = other DNA
aaggtgctgcgcttcgacttctcacacaacgaagcgatgaaaccagaagagattcgtgcggtcgaagacctggtg

SEQ ID NO: 702777 - DNA, 75 bp, synthetic construct
  source 1..75: mol_type = other DNA
atgcgcttacggggaagcgtatttctcacgcgggagaggacatggcacagattgatttccgaaaaaaataactgg

SEQ ID NO: 702778 - DNA, 75 bp, synthetic construct
  source 1..75: mol_type = other DNA
gttttatcaaattatcgcgctggcggccctgtacggcgcgaatatccgcatgatgcaggaatgacaggcaaaaca

SEQ ID NO: 702779 - DNA, 75 bp, synthetic construct
  source 1..75: mol_type = other DNA
tgtggctgatacgcacacattaacgtacgttttcgttccattggccctcacccccgataacgacccaggtagcgc

SEQ ID NO: 702780 - DNA, 75 bp, synthetic construct
  source 1..75: mol_type = other DNA
cgaacggcgacaagctgggtagcgtgccgaaaatgggcgctgatgaaacccgcgccgctatcgacgccgccaacc

SEQ ID NO: 702781 - DNA, 75 bp, synthetic construct
  source 1..75: mol_type = other DNA
tccgccagcaggcgttgattaacggggaatggctggacgccaacaatggcgaggtcatcgacgtcaccaatccgg

SEQ ID NO: 702782 - DNA, 75 bp, synthetic construct
  source 1..75: mol_type = other DNA
gcacctactattcttgatatctataactctaattaccatgacaacgtaataagttttattgaaaatattgaaaaa

SEQ ID NO: 702783 - DNA, 75 bp, synthetic construct
  source 1..75: mol_type = other DNA
cttcagtgttaaaaagaataaggagaaaaaggtttctccgtgcaaacgcaagcaaaaagtcaaccgaacacaaaa

SEQ ID NO: 702784 - DNA, 75 bp, synthetic construct
  source 1..75: mol_type = other DNA
cctctggtcaggcgctggtgctgggcatggatctgaaagagagttccggtaaagcgcgccagcatctcggctata

SEQ ID NO: 702785 - DNA, 75 bp, synthetic construct
  source 1..75: mol_type = other DNA
gtggcaaaaaacgtctgaaccgtgaaatgaaagggaagtttggcagtgcggattatgcagaggaagaactggtag

SEQ ID NO: 702786 - DNA, 75 bp, synthetic construct
  source 1..75: mol_type = other DNA
atgacgatttccctgcataaccagactaccgcccctaacaccgcagtggcgaccagcgtatccccgctggacccg

SEQ ID NO: 702787 - DNA, 75 bp, synthetic construct
  source 1..75: mol_type = other DNA
tcgcttcgctgatgcagctaacttctacgctaccggcctgcatgagcttgttcactggactggtgcaaaacatcg

SEQ ID NO: 702788 - DNA, 75 bp, synthetic construct
  source 1..75: mol_type = other DNA
agcatcattgaagcgctggaagccggtgtaaaaccgtgggtgtgtccgtgggttcgcggtgggcaggccgcagga

SEQ ID NO: 702789 - DNA, 75 bp, synthetic construct
  source 1..75: mol_type = other DNA
cgaccgatgaactgccattaggttttaaacagcggctggcgctggcctgttcgctgatgcatgaaccggacattc

SEQ ID NO: 702790 - DNA, 75 bp, synthetic construct
  source 1..75: mol_type = other DNA
tgatctatacgacaagcaaaagaacaacattaaaaataaatggtggtgttttgcagcaataatgaataataaatt

SEQ ID NO: 702791 - DNA, 75 bp, synthetic construct
  source 1..75: mol_type = other DNA
ttgcggttaaagcactaggatccagcctcaccacactaagtctgatacgcatcatcaaaaaactcgccacacttg

SEQ ID NO: 702792 - DNA, 75 bp, synthetic construct
  source 1..75: mol_type = other DNA
tccgcgtttcagtaactggcgcaggtgagggttttggccgcataaagctacgctatgacccatcaaaagccatta

SEQ ID NO: 702793 - DNA, 75 bp, synthetic construct
  source 1..75: mol_type = other DNA
ttggtaacgactactggagtggcaactgttcgatttatgaggaatacacgcgggtccaagtcagtaatccagacg

SEQ ID NO: 702794 - DNA, 75 bp, synthetic construct
  source 1..75: mol_type = other DNA
cctgtctgaataaacagtatggtgttacgttgcagattggcggttctgaccagtggggtaacatcacctctggta

SEQ ID NO: 702795 - DNA, 75 bp, synthetic construct
  source 1..75: mol_type = other DNA
ccgctgatcactaaagcagatggcaccaaatttggtaaaactgaaggcggcgcagtctggttggatccgaagaaa

SEQ ID NO: 702796 - DNA, 75 bp, synthetic construct
  source 1..75: mol_type = other DNA
tctggatcaacaccgctgatgccgacgtttaccgcttcctgaagttcttcactttcatgagcattgaagagatca

SEQ ID NO: 702797 - DNA, 75 bp, synthetic construct
  source 1..75: mol_type = other DNA
tggccaaaatctgacgcctgtcgattctgcggctaatttagctaatttgatttcagttaagacaacgacacccat

SEQ ID NO: 702798 - DNA, 75 bp, synthetic construct
  source 1..75: mol_type = other DNA
ttttataaaccatccgagcagttgggggttcgattcggcgatgggctaattgggcaaataccgccagaaggctcg

SEQ ID NO: 702799 - DNA, 75 bp, synthetic construct
  source 1..75: mol_type = other DNA
aataaatggtggtgctttgctgcaattatgaacaacaagttaatattactaatttgtgacctcggtgtcggtata

SEQ ID NO: 702800 - DNA, 75 bp, synthetic construct
  source 1..75: mol_type = other DNA
tccgcgtttcagtaagtggcgaaggtgagggttttggccgcataaaactccgctatgacccatcgaaagccatta

SEQ ID NO: 702801 - DNA, 75 bp, synthetic construct
  source 1..75: mol_type = other DNA
tctaactcattcaagtcaaactctggaactgttcaggatggcactatttcaatgcctacgttgaaagatggtcag

SEQ ID NO: 702802 - DNA, 75 bp, synthetic construct
  source 1..75: mol_type = other DNA
gatggtaagaccacgcagtggtcttccagcactatgttccggttagccggtagtaaaagccaggtctacgttgag

SEQ ID NO: 702803 - DNA, 75 bp, synthetic construct
  source 1..75: mol_type = other DNA
ggttcgcaagggtgaacatggcacaacagccattttctatacgaccctggaaaaggaaaacgacgccggagaggt

SEQ ID NO: 702804 - DNA, 75 bp, synthetic construct
  source 1..75: mol_type = other DNA
ggcagttctgtctcttgaagaacaccataaagcctggttgctgtggtgttacagcggcagcatttgctgggaaca

SEQ ID NO: 702805 - DNA, 75 bp, synthetic construct
  source 1..75: mol_type = other DNA
cggcattatgcagtacgggtatcggatagtggaagatatggcaagcgggttgtcgcattatctcgccgatcaagg

SEQ ID NO: 702806 - DNA, 75 bp, synthetic construct
  source 1..75: mol_type = other DNA
caggtgaccaccggcattatgcagtacgggtatcggatagtggaagatatggcaagcgggttgtcgcattatctc

SEQ ID NO: 702807 - DNA, 75 bp, synthetic construct
  source 1..75: mol_type = other DNA
gccataattatgcgaactactggcgtgagatgtgcgacatttttaagaatcttgatacagaatccttgatttgca

SEQ ID NO: 702808 - DNA, 75 bp, synthetic construct
  source 1..75: mol_type = other DNA
gtaccagaaaaattgcaggaaaaactctggtgcgcctgaagacgttgatctggttggcggcgcaggcggtaaaag

SEQ ID NO: 702809 - DNA, 75 bp, synthetic construct
  source 1..75: mol_type = other DNA
ctggatagcgaagctttattgtttgcggcgagaacacgttcgaaacaaaagacggtattgtctaggcaaggtatt

SEQ ID NO: 702810 - DNA, 75 bp, synthetic construct
  source 1..75: mol_type = other DNA
attccggtaaagcggtaaaaccgatcgccctgcgctttattcagcaaatgcgcacccatccagaactgcgcgatt

SEQ ID NO: 702811 - DNA, 75 bp, synthetic construct
  source 1..75: mol_type = other DNA
taaatgtgttggctgtggacgctgttatatttcctgttacgacggcggtcaccaggcgatggaatggagcgagaa

SEQ ID NO: 702812 - DNA, 75 bp, synthetic construct
  source 1..75: mol_type = other DNA
agcgaggtgaagcaaaaaatggttaacccggatggaccgccgatgagcggcagccagtgccgcgctaagggttcc

SEQ ID NO: 702813 - DNA, 75 bp, synthetic construct
  source 1..75: mol_type = other DNA
ttgattcattgcaggagatagttggcctggcgaatcataatattgtcccggcggaagatttagaccgcagttata

SEQ ID NO: 702814 - DNA, 75 bp, synthetic construct
  source 1..75: mol_type = other DNA
gtggtcacgtctgcccggtgggttgtattgagcttggggaagtgaagtttaagaagggagagaaagaacactctg

SEQ ID NO: 702815 - DNA, 75 bp, synthetic construct
  source 1..75: mol_type = other DNA
gtggtcacgtctgcccggtgggttgtattgatctcggagaagtgaagtttaagaaaggcgagaaagaacacccgg

SEQ ID NO: 702816 - DNA, 75 bp, synthetic construct
  source 1..75: mol_type = other DNA
atgcacaatttgatactggtacatacaaacgaaagaagccgcgcattctggatgtggtaactggcaagatgatta

SEQ ID NO: 702817 - DNA, 75 bp, synthetic construct
  source 1..75: mol_type = other DNA
gatggctgatcttggcattgagggagaggtacaacatgaaagctatattgcttcctggctgaaagagctgaaaaa

SEQ ID NO: 702818 - DNA, 75 bp, synthetic construct
  source 1..75: mol_type = other DNA
cggaaaaaatccgccaaccgctgattgctggcgggctggtatgcgatgaagaagatgcgcgtaatgcgattaacg

SEQ ID NO: 702819 - DNA, 75 bp, synthetic construct
  source 1..75: mol_type = other DNA
gaagatgcgcgtaatgcgattaacgcgggtgttgtggcgctttccaccacgaatactggggtctggacgttagcg

SEQ ID NO: 702820 - DNA, 75 bp, synthetic construct
  source 1..75: mol_type = other DNA
ctggctgaaagcgctgaagggagacaagcgctacatctttaaagcggcggcagcggcctcaaaagcgcaccgctg

SEQ ID NO: 702821 - DNA, 75 bp, synthetic construct
  source 1..75: mol_type = other DNA
gaccgttaccgacaacatcattgcagcacttgaaagcggtgtaaaaccgtggtcctgtccgtggcaacgcgtatc

SEQ ID NO: 702822 - DNA, 75 bp, synthetic construct
  source 1..75: mol_type = other DNA
gctattttttacaccacgctggagaaggaaaacgacgccggagaagttgaacatatcccgatgctgaaaaccttc

SEQ ID NO: 702823 - DNA, 75 bp, synthetic construct
  source 1..75: mol_type = other DNA
caggtgtgcgcattgcaaagaaaacggtagatcgcctgcgtcagctcatctggctggcggctcagaatgaaaaag

SEQ ID NO: 702824 - DNA, 75 bp, synthetic construct
  source 1..75: mol_type = other DNA
atcctgacggccagccgatgagcggcaaccagtcccgcgctaagggctcgtctatcgcgctggtgggcccggtag

SEQ ID NO: 702825 - DNA, 75 bp, synthetic construct
  source 1..75: mol_type = other DNA
gtgagctggctgggcgtgaaacttatgaatatcaggaactggcattactggcgggagtaaaaacaaaaaactggt

SEQ ID NO: 702826 - DNA, 75 bp, synthetic construct
  source 1..75: mol_type = other DNA
tggcctctggcgcaaaaggtattccggagacacagaaatatccggacgtttattgctggatcccgcttttctcca

SEQ ID NO: 702827 - DNA, 75 bp, synthetic construct
  source 1..75: mol_type = other DNA
tacgtcagcagctcattgtggcgaccgcagacctcagcggggcgacgaaagggcagctggtagctttcgccgaaa

SEQ ID NO: 702828 - DNA, 75 bp, synthetic construct
  source 1..75: mol_type = other DNA
gacgaagaaagcgagaagtgggtgccggttgataacccaccgatccccggcaaacagtcacacgcaaagggctca

SEQ ID NO: 702829 - DNA, 75 bp, synthetic construct
  source 1..75: mol_type = other DNA
cgttcagtgatttcgcccgcgatcgccgtggagtgtgcgatccggaagcccgttgcctcgctggtaatccttggt

SEQ ID NO: 702830 - DNA, 75 bp, synthetic construct
  source 1..75: mol_type = other DNA
tgtggccgaagcgatggaggtgctgggcggcattggttattgcgaggagagcgagctgccgcggctttaccggga

SEQ ID NO: 702831 - DNA, 75 bp, synthetic construct
  source 1..75: mol_type = other DNA
gatggcatatgggggcagataaaaggatatgtagaccagcttaatgcagggaatggcttgtcacaggaagcgagg

SEQ ID NO: 702832 - DNA, 75 bp, synthetic construct
  source 1..75: mol_type = other DNA
caggttatgacacatatgttagtgagcgaaaatcaggaagcgacagcaataagtccggtttctcgtctttatggg

SEQ ID NO: 702833 - DNA, 75 bp, synthetic construct
  source 1..75: mol_type = other DNA
gaacaattatcttttttaaatcagcaaatcatgtgtttttttatgatggttggtccaagagtaagcgtacagcct

SEQ ID NO: 702834 - DNA, 75 bp, synthetic construct
  source 1..75: mol_type = other DNA
caacttgagaaagggcgattggatgaaagcatccgtcaggctgatatggagaatgcgagaggatgggcaaatatc

SEQ ID NO: 702835 - DNA, 75 bp, synthetic construct
  source 1..75: mol_type = other DNA
aaggtggtaatgggcagacaaaagctgcgccaagttggatatcagaaggcgcgacggcaacgaaccctaaaactg

SEQ ID NO: 702836 - DNA, 75 bp, synthetic construct
  source 1..75: mol_type = other DNA
atgcctttagatttaagtaacaccttagttattggcatcagtgcaactgcgctttttgacatgagtgaatccgat

SEQ ID NO: 702837 - DNA, 75 bp, synthetic construct
  source 1..75: mol_type = other DNA
ctacgatgaatatatgcgtcgtgtgaatgataccaatcagaattatagtcaaattggcaatgctttacagggaat

SEQ ID NO: 702838 - DNA, 75 bp, synthetic construct
  source 1..75: mol_type = other DNA
ttgcttctcaaaacaagcagttagaagccagcttgaaagatttggatactgctttagatctgggcttaatctctc

SEQ ID NO: 702839 - DNA, 75 bp, synthetic construct
  source 1..75: mol_type = other DNA
gtggtaatgggcagacaaaagctgcgccaagtgggatatcagaaggcgcgacggcaacgaaccctaaaactggtc

SEQ ID NO: 702840 - DNA, 75 bp, synthetic construct
  source 1..75: mol_type = other DNA
agggcaagtgcgcattgcttttgacggcgacgcggtacttttttccgatcaaagcgaactggtttataagaccca

SEQ ID NO: 702841 - DNA, 75 bp, synthetic construct
  source 1..75: mol_type = other DNA
tagttattggcatcagcgcgactgcgctttttgatatgagtgaatcagatcgcatgtttcgcgaaacctttgcga

SEQ ID NO: 702842 - DNA, 75 bp, synthetic construct
  source 1..75: mol_type = other DNA
cgatgttgcggatatctttccttatgcttcgtcactgtgggtcggtgatggggcgacgttcgttactggcgcgga

SEQ ID NO: 702843 - DNA, 75 bp, synthetic construct
  source 1..75: mol_type = other DNA
ctgcgtccactggtcgcgcactgcttcaagggcttactgctggccgggcaattcaggggatgcgtcaaacttctc

SEQ ID NO: 702844 - DNA, 75 bp, synthetic construct
  source 1..75: mol_type = other DNA
cagtctgcaaaatggcgtcgctggcgatacgctcacggtaaacggtgattacaccggcggcggtacgttgtttct

SEQ ID NO: 702845 - DNA, 75 bp, synthetic construct
  source 1..75: mol_type = other DNA
ttaataccaaccttgaaactgacagcctgacctatcttgccgacgtgacggttaatggtgatctgaccaatacgt

SEQ ID NO: 702846 - DNA, 75 bp, synthetic construct
  source 1..75: mol_type = other DNA
tgcactggtgctatggtgtgctgaaaacgcagttaccattcgacgctgaacacaaccaacaaagttattataaaa

SEQ ID NO: 702847 - DNA, 75 bp, synthetic construct
  source 1..75: mol_type = other DNA
aacagatgtatacgaagttatgccagaggggaaagtcaaagatgtgtgctattggagcattaatgcgaaaacttg

SEQ ID NO: 702848 - DNA, 75 bp, synthetic construct
  source 1..75: mol_type = other DNA
accgctgtggattcggtggggcgtggcaaagagcgcagggtcaatcagcggttcactgccatggtcagccactac

SEQ ID NO: 702849 - DNA, 75 bp, synthetic construct
  source 1..75: mol_type = other DNA
gacgatccgcagtcgatcgtgttaaacggcggtgtgctcgatctctctgatttctccacctggcagagcggcaca

SEQ ID NO: 702850 - DNA, 75 bp, synthetic construct
  source 1..75: mol_type = other DNA
gtgttatcggcggacgttatcattacacggcggcagggcaactggctcagcatgaagacacttctacggtgcagc

SEQ ID NO: 702851 - DNA, 75 bp, synthetic construct
  source 1..75: mol_type = other DNA
acgactggtatctgcgatcgcaagaagtaacgccgccatcgccacctgatccagacccggacccaacacccgatc

SEQ ID NO: 702852 - DNA, 75 bp, synthetic construct
  source 1..75: mol_type = other DNA
gcggcactatcgacatcagcgatggtacggttttgcgcctgaccgggcaggatacttccgtcgcccttaatgcct

SEQ ID NO: 702853 - DNA, 75 bp, synthetic construct
  source 1..75: mol_type = other DNA
gattagtggcagtggcggcacggtaattggtcagcaggatgttgtcgatctctacggcggagacgaactgcatat

SEQ ID NO: 702854 - DNA, 75 bp, synthetic construct
  source 1..75: mol_type = other DNA
gcggtgctttcgctggaaggcgacgcggcagatcttgccgctctccaggacgatccgcagtcgatcgtgttaaac

SEQ ID NO: 702855 - DNA, 75 bp, synthetic construct
  source 1..75: mol_type = other DNA
atgacaagacatgtagtaacaatagaaggggataatgacggtttaaggaaaagtaccaaccaagcgattgacatg

SEQ ID NO: 702856 - DNA, 75 bp, synthetic construct
  source 1..75: mol_type = other DNA
tctggtactgggtaacccgtcccatacagcaactaactgaaaatgtcagcgggatagagcaggacagtattagtg

SEQ ID NO: 702857 - DNA, 75 bp, synthetic construct
  source 1..75: mol_type = other DNA
ttttacagggagaggaacttaatgctcttactgatgcagcctggacaaaggcactatggaatgcactgtactggt

SEQ ID NO: 702858 - DNA, 75 bp, synthetic construct
  source 1..75: mol_type = other DNA
gatctgaaaggatatctgtatattattttacagggagaggaacttaatgctcttactgatgcagcctggacaaag

SEQ ID NO: 702859 - DNA, 75 bp, synthetic construct
  source 1..75: mol_type = other DNA
cggataagtcgaaggattattttcttaaaaacccaatgatgtcagaaaaacgcagacagccggttgagaagatag

SEQ ID NO: 702860 - DNA, 75 bp, synthetic construct
  source 1..75: mol_type = other DNA
tattctggctgcaaaaggcatgaagctgattgatgatgcctcattccagtccactttagatattaagcgccaata

SEQ ID NO: 702861 - DNA, 75 bp, synthetic construct
  source 1..75: mol_type = other DNA
gcgtagtgaacacagaatacgggtattacgcgcaatgctggtctgaaggtcaagggtggcttggtgatgatatca

SEQ ID NO: 702862 - DNA, 75 bp, synthetic construct
  source 1..75: mol_type = other DNA
ccggtacgcaaaatgatcatgggacacgcgaagaaaattgggctgatcaacttgctgaaagatggcattaaggga

SEQ ID NO: 702863 - DNA, 75 bp, synthetic construct
  source 1..75: mol_type = other DNA
agagttggtggaggaattggtgcgagtattcgacaaagtgaaaacagtaataatcagccggaaattaacggttct

SEQ ID NO: 702864 - DNA, 75 bp, synthetic construct
  source 1..75: mol_type = other DNA
gcaggatacggcgcagcgagcgtataacagggaaataccagcaggcgatacaggcagcaacggcagcggtacagg

SEQ ID NO: 702865 - DNA, 75 bp, synthetic construct
  source 1..75: mol_type = other DNA
agcatggtgcgataaaacctcaactggagcaattttctgtctgtgaacttattcaggatgtggctcagaaattcg

SEQ ID NO: 702866 - DNA, 75 bp, synthetic construct
  source 1..75: mol_type = other DNA
acatgtggcgttcatatttacagcagtaatctgtatggcaatgcaatggtacagcgtttatctgcagggctggcg

SEQ ID NO: 702867 - DNA, 75 bp, synthetic construct
  source 1..75: mol_type = other DNA
taacatcacttctggggtatctggaaaccctgtcaatgaaggcagattctctatcatcagaggactaccataaat

SEQ ID NO: 702868 - DNA, 75 bp, synthetic construct
  source 1..75: mol_type = other DNA
agtggctaaaggacaatatgccccggcttttgactcaggcaatggataatccgacccctgaaaatttatcacggt

SEQ ID NO: 702869 - DNA, 75 bp, synthetic construct
  source 1..75: mol_type = other DNA
cgctatttgtgctgctggttgcctggaacattttcgccaataacaaactcgctgccaaagtgcaggagaagagcg

SEQ ID NO: 702870 - DNA, 75 bp, synthetic construct
  source 1..75: mol_type = other DNA
ggtttaagcgcaacctatggacaaacaggaaataaggttgcagccggagccgtccagtcagtcattggtgtcact

SEQ ID NO: 702871 - DNA, 75 bp, synthetic construct
  source 1..75: mol_type = other DNA
tatggacaaacaggaaacaaagtttcagccggaaccgtccagtcagtcattggtgtcacttttatctatgaataa

SEQ ID NO: 702872 - DNA, 75 bp, synthetic construct
  source 1..75: mol_type = other DNA
gaagaatataataaattctctaaaaatatggatacccttaccgataacttaaagggtatggctgcaaatgcacta

SEQ ID NO: 702873 - DNA, 75 bp, synthetic construct
  source 1..75: mol_type = other DNA
attgttctgggcggtggtgccactgttctggttggttctttaaatccgctgggtagtatgtttgaacatgccttt

SEQ ID NO: 702874 - DNA, 75 bp, synthetic construct
  source 1..75: mol_type = other DNA
ttgtctacgccatcattatggccatcaccttcgctgctggcgtatttatcattctgcaaggtgtacgtttaattc

SEQ ID NO: 702875 - DNA, 75 bp, synthetic construct
  source 1..75: mol_type = other DNA
cgcggcacgaccctgaaatggcgactgaccgattctcatatgcagtacggaattttgctggcgactctgccgcag

SEQ ID NO: 702876 - DNA, 75 bp, synthetic construct
  source 1..75: mol_type = other DNA
tcaccctggttaatcaggttgcgcttattgtgttgctttctactgctattggactggcagggatggcggtttctg

SEQ ID NO: 702877 - DNA, 75 bp, synthetic construct
  source 1..75: mol_type = other DNA
gcttttgactcaggcaatggataatccgacccctgaaaatttatcacggttttatacagcgcaacgtttaatgtt

SEQ ID NO: 702878 - DNA, 75 bp, synthetic construct
  source 1..75: mol_type = other DNA
gtattggagcaggtacaacctctgtttatgttaatctcgaccctgtaatacagccgggccagaatctggttgtag

SEQ ID NO: 702879 - DNA, 75 bp, synthetic construct
  source 1..75: mol_type = other DNA
tgtttgaacgtcgcaccctgccttatcagtcgatgcagcactcgaagaattaccgctgggcgtctaatgaccggg

SEQ ID NO: 702880 - DNA, 75 bp, synthetic construct
  source 1..75: mol_type = other DNA
gaaggccgggcgtggccgttgctggatggcaccggcatgatttacggcatgtatgtcatcagcagggtgagtgaa

SEQ ID NO: 702881 - DNA, 75 bp, synthetic construct
  source 1..75: mol_type = other DNA
tttcaacgtcttcttcgtttacgcggtttactgtggcctgacattcttcattccattcctgaaaaacatctatct

SEQ ID NO: 702882 - DNA, 75 bp, synthetic construct
  source 1..75: mol_type = other DNA
gaaaatgaactccttaaagaagccgttgaatacgggcgtgcaaaaaagtggatagcgcacgcgcccttattgccc

SEQ ID NO: 702883 - DNA, 75 bp, synthetic construct
  source 1..75: mol_type = other DNA
tctggcgtcccgtaacgctggctttattaataagcgttttgacggtgtgctggcaggcgaactggctgacccgca

SEQ ID NO: 702884 - DNA, 75 bp, synthetic construct
  source 1..75: mol_type = other DNA
cgaccatagccgggtggaaaggatcgccacggaaaagctgcaaatgcagcatgttgatccgtcacaagaaaatat

SEQ ID NO: 702885 - DNA, 75 bp, synthetic construct
  source 1..75: mol_type = other DNA
tattctttgcgcccattggcgaagcgaaaattgctgaaaataaaacaggtgcggcgatggcgttggggagtttta

SEQ ID NO: 702886 - DNA, 75 bp, synthetic construct
  source 1..75: mol_type = other DNA
atgctcacgaaaaagaaatgggcgttatttagtctattaacattgtgtggcggtacaatttataaattaccgtcg

SEQ ID NO: 702887 - DNA, 75 bp, synthetic construct
  source 1..75: mol_type = other DNA
tgacaactatcactcgacgcacagcgaagagaatcgccagttgtcagaacttatctactctcgtctgaaagaaaa

SEQ ID NO: 702888 - DNA, 75 bp, synthetic construct
  source 1..75: mol_type = other DNA
cgacaattaccactctacgcacagcgaagagaaccgtcagctgtcagagcttatatacagccgcctgaaagagaa

SEQ ID NO: 702889 - DNA, 75 bp, synthetic construct
  source 1..75: mol_type = other DNA
tctcagctgtacgatccggaaaaaggcatgttccttccggaccgttttgtgaaaggcacctgcccgaaatgtaaa

SEQ ID NO: 702890 - DNA, 75 bp, synthetic construct
  source 1..75: mol_type = other DNA
ctggcccgctggcagatgatccgattcaggaaaccattacctttgacgacttcgctaaagttgacctgcgcgtgg

SEQ ID NO: 702891 - DNA, 75 bp, synthetic construct
  source 1..75: mol_type = other DNA
ttctacgtctggctagatgcgccgattggctatatgggttctttcaagaatctgtgcgacaagcgcggcgacagc

SEQ ID NO: 702892 - DNA, 75 bp, synthetic construct
  source 1..75: mol_type = other DNA
gcgcttcggtatctccgaaggcatggtaatggctgctggtcctggcgggaaagatatcttcctgctaagcccgga

SEQ ID NO: 702893 - DNA, 75 bp, synthetic construct
  source 1..75: mol_type = other DNA
ctgctgtggccgcaggagaacaggtcgttccggcctctgaacttgctgctgccatgaagcagattaaagaactcc

SEQ ID NO: 702894 - DNA, 75 bp, synthetic construct
  source 1..75: mol_type = other DNA
tgcctcatggcgcttcgctttatttaccgatggaagggcttaacagctatcgccatgccattgcgccgctgctgt

SEQ ID NO: 702895 - DNA, 75 bp, synthetic construct
  source 1..75: mol_type = other DNA
aaaaacattgcctgcccgcagtattgtgctactgcatccgtgctgtcataacccaacgggcgccgatctcaccaa

SEQ ID NO: 702896 - DNA, 75 bp, synthetic construct
  source 1..75: mol_type = other DNA
ctggcgacccgattctttcgcttatggagcgttttaaagaagaccctcgcagcgacaaagtgaatttgagtatcg

SEQ ID NO: 702897 - DNA, 75 bp, synthetic construct
  source 1..75: mol_type = other DNA
gagttacagcgcttgctgggtaagaaaaccatggaagttgagatcctcaaagaagcggtggagtatggtcagtcg

SEQ ID NO: 702898 - DNA, 75 bp, synthetic construct
  source 1..75: mol_type = other DNA
attcgaagtaagtacttacccctggtatgacgaagcgactaacggcgtgcgctttaatgacctgttggcgatgct

SEQ ID NO: 702899 - DNA, 75 bp, synthetic construct
  source 1..75: mol_type = other DNA
acccaacgggtgccgatctcactaatgaccagtgggatgcggtgattgaaattctcaaagcccgcgagcttatcc

SEQ ID NO: 702900 - DNA, 75 bp, synthetic construct
  source 1..75: mol_type = other DNA
ggaaaatgaactcctcaaagaagcctttgaatatggacgggcaaaaaagtggatagcgcacgcgcccttattgcc

SEQ ID NO: 702901 - DNA, 75 bp, synthetic construct
  source 1..75: mol_type = other DNA
gaagacgttgttcctgcttctgaactggccgctgcaataaagcagattaatcagcttcagcgtttactgggcaag

SEQ ID NO: 702902 - DNA, 75 bp, synthetic construct
  source 1..75: mol_type = other DNA
tcgttgcccggcaacatggtgtagcagccagccagttatttctctggcgtaagcaataccaggaaagaaatctta

SEQ ID NO: 702903 - DNA, 75 bp, synthetic construct
  source 1..75: mol_type = other DNA
ttggtgcggaccatccagtactgcaacaacagcgcgtagcaaccattcaaacccttggcggctcaggggcattga

SEQ ID NO: 702904 - DNA, 75 bp, synthetic construct
  source 1..75: mol_type = other DNA
gctgattgccgaaaatggcgcagtgatccagcttgctgaacaatggcaggatatagacggttttccacgcatcat

SEQ ID NO: 702905 - DNA, 75 bp, synthetic construct
  source 1..75: mol_type = other DNA
caactggattatcgcgacctatcaacaattgcaggcaaacgcccaaccacacttggcctgggcgatgggccaaac

SEQ ID NO: 702906 - DNA, 75 bp, synthetic construct
  source 1..75: mol_type = other DNA
tcgagccgaaatcagtggtttctggcgctacaccggtaatgcgtgattccgaacacttcttctttgatctgcctt

SEQ ID NO: 702907 - DNA, 75 bp, synthetic construct
  source 1..75: mol_type = other DNA
gctttacgcaccaatgtgtgacgcatttggcacaaatggcgacagattttacttgaatagttgcgcggaaagtgc

SEQ ID NO: 702908 - DNA, 75 bp, synthetic construct
  source 1..75: mol_type = other DNA
tctggcgttttgctcggacgatgaaggcctgaagattgacggtgtgatcgcctcggtgctgatgaataatgatta

SEQ ID NO: 702909 - DNA, 75 bp, synthetic construct
  source 1..75: mol_type = other DNA
ggtcttatatcggcggtggtagtggtgggaacatgtttaaccagcttctggcatccgggaaaatcaccaaaacgg

SEQ ID NO: 702910 - DNA, 75 bp, synthetic construct
  source 1..75: mol_type = other DNA
gtttaatcagctcccgggatcagaacaagcacgcatgattgatctgttcgaaatccgtcttcaagagcttgatga

SEQ ID NO: 702911 - DNA, 75 bp, synthetic construct
  source 1..75: mol_type = other DNA
tctagccagtattggtcagcagttaggaacggctgaatcccttgaactggggcggctggcgaatgtgaatccgcc

SEQ ID NO: 702912 - DNA, 75 bp, synthetic construct
  source 1..75: mol_type = other DNA
ggcggctggcgaatgtgaatccgcctgaattattgcgctacgatgcgcaaggacgccgtctggacgatgtgcgtt

SEQ ID NO: 702913 - DNA, 75 bp, synthetic construct
  source 1..75: mol_type = other DNA
cggcgccggattctgctgacacccgggcattacctcggaaactggtcatatcgtctgcgccatgttcaggaacag

SEQ ID NO: 702914 - DNA, 75 bp, synthetic construct
  source 1..75: mol_type = other DNA
gtgtggccagaatgatggcacagatgcagctggggaatgtgacgacgctgtttgagaacaagccctttatcacgc

SEQ ID NO: 702915 - DNA, 75 bp, synthetic construct
  source 1..75: mol_type = other DNA
attggcaactcattgtgtaatgagcgacgccgggtgctgctgacgcccgggcattacctcggaaactggtcatat

SEQ ID NO: 702916 - DNA, 75 bp, synthetic construct
  source 1..75: mol_type = other DNA
tactctggaaagcatctggatacagggtaagttgcgcatgtggggccgctggtcttatatcggcggtggtagtgg

SEQ ID NO: 702917 - DNA, 75 bp, synthetic construct
  source 1..75: mol_type = other DNA
catggcgcatttgcttgcccatgtcattgagggactggagcagggattctgcgactttctgggcagcgtgttcat

SEQ ID NO: 702918 - DNA, 75 bp, synthetic construct
  source 1..75: mol_type = other DNA
gtgattttctggggagtgtgttcatgcaactggaactgggggataaataccggagtcagtttttcacgccctgga

SEQ ID NO: 702919 - DNA, 75 bp, synthetic construct
  source 1..75: mol_type = other DNA
gttggtcaggttcttctcgtattgctaactacgaagctggcaccaggagtgtgggggctgaggatgcgatcatcc

SEQ ID NO: 702920 - DNA, 75 bp, synthetic construct
  source 1..75: mol_type = other DNA
aacagtacaggacgtcatgctgggagcggtggtacgccccttcggcagcgagcttccgatatcgccagtggaatg

SEQ ID NO: 702921 - DNA, 75 bp, synthetic construct
  source 1..75: mol_type = other DNA
taaaggccgaatatcggtgaaggaaagcgaccagcgttggtgttctgatggctttgagttcggttgcgatgatgg

SEQ ID NO: 702922 - DNA, 75 bp, synthetic construct
  source 1..75: mol_type = other DNA
cagcgggaacataaaggccgaatatcggtgaaggaaagcgaccagcgttggtgttccgatggctttgagttcggt

SEQ ID NO: 702923 - DNA, 75 bp, synthetic construct
  source 1..75: mol_type = other DNA
gccatgaagcagattaaagaactccagcgcctgctcggtaaaaaacgatggaaaatgaactccttaaagaagccg

SEQ ID NO: 702924 - DNA, 75 bp, synthetic construct
  source 1..75: mol_type = other DNA
agccagccagttatttctctggcgtaagcaataccaggaaggaagtcttactgcttgtcgccgccggagaacagg

SEQ ID NO: 702925 - DNA, 75 bp, synthetic construct
  source 1..75: mol_type = other DNA
agccagccagctatttctctggcgcaagcaataccaggagggaagtcttactgctgtggccgcaggagaacaggt

SEQ ID NO: 702926 - DNA, 75 bp, synthetic construct
  source 1..75: mol_type = other DNA
cggaagccaatatgctggcgcgtatcgtgctgggtggcatgactgcaaaacagtgggcgcaggtgaacggcatca

SEQ ID NO: 702927 - DNA, 75 bp, synthetic construct
  source 1..75: mol_type = other DNA
gtgcttgtaaagattgcgatgcaattgctcattttaacgggagtaaggccaggggaattgaggcaagcggagtgg

SEQ ID NO: 702928 - DNA, 75 bp, synthetic construct
  source 1..75: mol_type = other DNA
gagggtatcgctcgcgaatggtatgaaaagcggatcgacaggtggtcatcgtcatacgccgaggaaatgatcgag

SEQ ID NO: 702929 - DNA, 75 bp, synthetic construct
  source 1..75: mol_type = other DNA
tatgtatttcgcagctatgaattctacaggatgcagattaacagcacttggtgtttattataaaaaacttgcaca

SEQ ID NO: 702930 - DNA, 75 bp, synthetic construct
  source 1..75: mol_type = other DNA
ttgaaagtatgtttaataactataagtgttattatgattttcttctaactcataatgagattagttttgctaatg

SEQ ID NO: 702931 - DNA, 75 bp, synthetic construct
  source 1..75: mol_type = other DNA
cgttatgccatcgccaccggacgagccactgtcaatccggcatctgaactgaccagtacgctggcggcaccaaaa

SEQ ID NO: 702932 - DNA, 75 bp, synthetic construct
  source 1..75: mol_type = other DNA
gagccatattacggtaatagtgcgtccatgaagcttcttactcccactcaggattcccgcgacatcatcaacgcc

SEQ ID NO: 702933 - DNA, 75 bp, synthetic construct
  source 1..75: mol_type = other DNA
cgttttacgcatcatgcgagacggtgtttcggcccgatttgagagggcggccagtagttgttctctcgaataatg

SEQ ID NO: 702934 - DNA, 75 bp, synthetic construct
  source 1..75: mol_type = other DNA
gagtcatgctggctgatttcacaccatcgggtatagcgcagccgggattatttgatgagatccagccccataaaa

SEQ ID NO: 702935 - DNA, 75 bp, synthetic construct
  source 1..75: mol_type = other DNA
agccggcattatgctgggcgacttcttcagccagggcgtggcccagctaaacctgttcgatgacagtgctccccg

SEQ ID NO: 702936 - DNA, 75 bp, synthetic construct
  source 1..75: mol_type = other DNA
taatgtggtactggagcgaaccgtgcgggagctacgcggagagccatgtctcggtcttgaggagttcgcgccggt

SEQ ID NO: 702937 - DNA, 75 bp, synthetic construct
  source 1..75: mol_type = other DNA
agtacgaacagatgcgccaggccatttgcagctatgcggcacgtggcgccgaaaagcttcgcggcgagcatcagt

SEQ ID NO: 702938 - DNA, 75 bp, synthetic construct
  source 1..75: mol_type = other DNA
acgccagaacctctgcctatgaagcaccatcggttaaacgcacatggtatcagtgccagaatcttgaatgttcct

SEQ ID NO: 702939 - DNA, 75 bp, synthetic construct
  source 1..75: mol_type = other DNA
atggccaatctctacgacctgaaaaagttcgacttaaatcttcttgtcatctttgagtgcatttataaacactta

SEQ ID NO: 702940 - DNA, 75 bp, synthetic construct
  source 1..75: mol_type = other DNA
taaagctttacatttcctataataaatcttctttaaataatttggtgttctcccgatttattgaccgtctaaatg

SEQ ID NO: 702941 - DNA, 75 bp, synthetic construct
  source 1..75: mol_type = other DNA
tatcggtaatgccagcacaatgctggggtatgtttctgatgcgatgaaagtggtggattctgccgtatcggatgc

SEQ ID NO: 702942 - DNA, 75 bp, synthetic construct
  source 1..75: mol_type = other DNA
cccacatcaggtgcggcgacggcgcagacgctgatgtcatcctgttctgcactggatgactgcatcagtgacagt

SEQ ID NO: 702943 - DNA, 75 bp, synthetic construct
  source 1..75: mol_type = other DNA
gatctcgggcgtgccacgcgacggctgacgattaatgcgtatctcgttggtgatgattacgcagagcagcgcgac

SEQ ID NO: 702944 - DNA, 75 bp, synthetic construct
  source 1..75: mol_type = other DNA
cggttaagttgctcactccgacacaggatagccgggatatcattgcagcagcgacaaggagtctggatgcaatat

SEQ ID NO: 702945 - DNA, 75 bp, synthetic construct
  source 1..75: mol_type = other DNA
aggatggtcagccggttgagggacagactactgacactttcagtaagccaggtgcgcagtccgtgataagggggc

SEQ ID NO: 702946 - DNA, 75 bp, synthetic construct
  source 1..75: mol_type = other DNA
gtgctgtttccgtccggtaagggctttaagttccgtaagcgtcgtctcagcaccgtctggcagatcctgaaattc

SEQ ID NO: 702947 - DNA, 75 bp, synthetic construct
  source 1..75: mol_type = other DNA
caccgccggtcagaaacaggatattgatgtgaccacgctctgctccacggagcaggagaacatcaacggtctggg

SEQ ID NO: 702948 - DNA, 75 bp, synthetic construct
  source 1..75: mol_type = other DNA
cacgctctgctccaccgagcaggagaacatcaacggtctgggggcgtcgtctgagatttccatgtcgggtaattt

SEQ ID NO: 702949 - DNA, 75 bp, synthetic construct
  source 1..75: mol_type = other DNA
cgtgcgggttttttattatcaggaggcagaatgtctgctttgtatgaacgctcacagctgacgcaggtgatgatt

SEQ ID NO: 702950 - DNA, 75 bp, synthetic construct
  source 1..75: mol_type = other DNA
ggggaacgccgccttataaacacgcctggaagaaggatggtcagccggtagagggacagactactgacactttca

SEQ ID NO: 702951 - DNA, 75 bp, synthetic construct
  source 1..75: mol_type = other DNA
gcagccctaccagtcgacgaagtttggggcgtaggccgacgaatcgcaaagaaccttgaaagcatgggtatcaaa

SEQ ID NO: 702952 - DNA, 75 bp, synthetic construct
  source 1..75: mol_type = other DNA
ccgtattacggcaatagcgcttcggtaaaactgctcataccgactcaggatagcagagatatcatcagtgccgcg

SEQ ID NO: 702953 - DNA, 75 bp, synthetic construct
  source 1..75: mol_type = other DNA
gaattgttacgtgaagccgtatgcgaatacgcaacccgtgccactgagaagcttcgcaaagaacagcagcaagcc

SEQ ID NO: 702954 - DNA, 75 bp, synthetic construct
  source 1..75: mol_type = other DNA
gaaccggtatcagaaacacgtgcccgtgcagatgcactgaagacggggctggcagaggcttatggtcatgccggg

SEQ ID NO: 702955 - DNA, 75 bp, synthetic construct
  source 1..75: mol_type = other DNA
taaaaatatttttattaaaaatggcgtgcaatgttttttctttcctgctgggtgctttcatactttcagcaccgt

SEQ ID NO: 702956 - DNA, 75 bp, synthetic construct
  source 1..75: mol_type = other DNA
acgaagaaatgcgccaggctatctgtagttatgcggtccgagcagcagagaaacttcgtaatgagcatcagcatt

SEQ ID NO: 702957 - DNA, 75 bp, synthetic construct
  source 1..75: mol_type = other DNA
gtgagcgaattagcaattatcgaaattgcgccagatatggcgccaagcatttacgtagaaaacggtctggaaaag

SEQ ID NO: 702958 - DNA, 75 bp, synthetic construct
  source 1..75: mol_type = other DNA
gtgatggctgctggtcctggtgggaaagatatcttcctgttaagcccggatgctggtgctaaacctggtcaccag

SEQ ID NO: 702959 - DNA, 75 bp, synthetic construct
  source 1..75: mol_type = other DNA
gctgctggccctggcggaaaagatatcttcctgttaagcccggatgctggtgctaaaccaggccaccaagttaag

SEQ ID NO: 702960 - DNA, 75 bp, synthetic construct
  source 1..75: mol_type = other DNA
aatccgttcaaggcactgtataaccgtatcgatatgaaacaggtggaagcactggtggaagcatccaaagaagaa

SEQ ID NO: 702961 - DNA, 75 bp, synthetic construct
  source 1..75: mol_type = other DNA
cgtcgcgtgggataaaacaacgcatgacttccccagcgtgactggcgatacccgctcgttgcgtccgttaggtca

SEQ ID NO: 702962 - DNA, 75 bp, synthetic construct
  source 1..75: mol_type = other DNA
tggttcaattcattcagtagtgtatgacaacataattgggcgatatgttcctagaattgatatagcgttaaatga

SEQ ID NO: 702963 - DNA, 75 bp, synthetic construct
  source 1..75: mol_type = other DNA
ggcctgcaacagtgggatatctcccgcgatgcgccttacttcggttttgaaattccgaacgcgccgggcaaatat

SEQ ID NO: 702964 - DNA, 75 bp, synthetic construct
  source 1..75: mol_type = other DNA
cggccacgaggtcaacttcatctgcgccgacgatgcccacggcacaccgatcatgctgaaagctcagcagcttgg

SEQ ID NO: 702965 - DNA, 75 bp, synthetic construct
  source 1..75: mol_type = other DNA
atgagttaccgcgaactgtataaaccagatgaaaaaccgttagcgattatggttccggcatggaatgaaacgggc

SEQ ID NO: 702966 - DNA, 75 bp, synthetic construct
  source 1..75: mol_type = other DNA
atgcaggcacctgtgataaccgcagccctgctggtcagcccggtgctgatggcctgtctgatgctctgcctgctg

SEQ ID NO: 702967 - DNA, 75 bp, synthetic construct
  source 1..75: mol_type = other DNA
actacaccgcgaagctctcttcacgcatcgatgatatcgacctgaacctggaagattttgttcagcgtgtgaatg

SEQ ID NO: 702968 - DNA, 75 bp, synthetic construct
  source 1..75: mol_type = other DNA
gaggatttcgttcagcgcgtgaatgccgatatcgttaacaaagtggttaacctggcctcccgtaacgcgggcttt

SEQ ID NO: 702969 - DNA, 75 bp, synthetic construct
  source 1..75: mol_type = other DNA
cggaactgacctgggatggtatccagcaaccgctgttgggccataaagtgaatccgttcaaagcgctgtataacc

SEQ ID NO: 702970 - DNA, 75 bp, synthetic construct
  source 1..75: mol_type = other DNA
acgaccccgatactcagcgtgatgttgacgaagtgtgcgctcgcttcccgaacgtgcataaggtagtctgcgcgc

SEQ ID NO: 702971 - DNA, 75 bp, synthetic construct
  source 1..75: mol_type = other DNA
gatgtgaccacgctctgctccacagagcaggagaacatcaacggtctgggggcgtcgtctgagatttccatgtcg

SEQ ID NO: 702972 - DNA, 75 bp, synthetic construct
  source 1..75: mol_type = other DNA
agcgatttctgcggtttcggtatcgcggatttcaccgaccatcgccatctgaaagtagaagagcgtttcaaaggt

SEQ ID NO: 702973 - DNA, 75 bp, synthetic construct
  source 1..75: mol_type = other DNA
atgatatcgttgacaccgtgactctgacccgccgttacgttgacttctcctatgtcgatggtaacgaatatgtct

SEQ ID NO: 702974 - DNA, 75 bp, synthetic construct
  source 1..75: mol_type = other DNA
gtcttaacgtgctgcgcctgctaaaccagccctggtttacatcggctaaaggcaaccacgaagcgatggcgcttg

SEQ ID NO: 702975 - DNA, 75 bp, synthetic construct
  source 1..75: mol_type = other DNA
aaaataaacggtgccgacttctttatatttggtcatatgatgtttgataacattcagacgttcgctaaccagatt

SEQ ID NO: 702976 - DNA, 75 bp, synthetic construct
  source 1..75: mol_type = other DNA
ctttacaatttttgtctggcgcaatcattgtagtttgcttgctcgtgatttttacatcgttaatcaatatgtatc

SEQ ID NO: 702977 - DNA, 75 bp, synthetic construct
  source 1..75: mol_type = other DNA
ctatcgaacaagatttgataaaagatatactaaattcccagccgggttcaggttgtaaaaatagatccagaaacc

SEQ ID NO: 702978 - DNA, 75 bp, synthetic construct
  source 1..75: mol_type = other DNA
tgttcatttgcattggttcgccatgctgattttgttataactgtagatactgccattgtacatttagccagtgca

SEQ ID NO: 702979 - DNA, 75 bp, synthetic construct
  source 1..75: mol_type = other DNA
ataaggtagtctgcgcgcgtcctggccccaccagcaaagccgactgtctgaacaacgtgctggacgccatcaccc

SEQ ID NO: 702980 - DNA, 75 bp, synthetic construct
  source 1..75: mol_type = other DNA
tttctgccggagcgaaacttgaaatggcggttgaggctgcgggtggtgtgccgccttattcttatgtctggaaga

SEQ ID NO: 702981 - DNA, 75 bp, synthetic construct
  source 1..75: mol_type = other DNA
tctatctttgctctgggtattatgccgtacatttcggcatcaattattatccagttgctgacggtggtccatcca

SEQ ID NO: 702982 - DNA, 75 bp, synthetic construct
  source 1..75: mol_type = other DNA
cctcgtgttgctgttgattgcagtattagtatttgcagtgacgttctttgttgtatttgttgagcgtggtcaacg

SEQ ID NO: 702983 - DNA, 75 bp, synthetic construct
  source 1..75: mol_type = other DNA
gactggctcgcccgtgtgcgccaacaacaaccacaggcagcaaaaatcaacagctatcagcactttctacgtttc

SEQ ID NO: 702984 - DNA, 75 bp, synthetic construct
  source 1..75: mol_type = other DNA
atcaaccacaggcggcaaaactcaacagctatcagcactttctacgtttcggtaatgccatgctcgacaaaatcg

SEQ ID NO: 702985 - DNA, 75 bp, synthetic construct
  source 1..75: mol_type = other DNA
gcgatccgcgcggcaaattgctgctggcctcgcatcttggcgatgtggaagtgtgccgggcgctggcaaaaattc

SEQ ID NO: 702986 - DNA, 75 bp, synthetic construct
  source 1..75: mol_type = other DNA
ggaaacgcaattgctgcgggtattcaatataaaacatcagcaaatacaaatgtgcgccttaacgtctcatgggat

SEQ ID NO: 702987 - DNA, 75 bp, synthetic construct
  source 1..75: mol_type = other DNA
aatgtcggtatccaaattttggaccgtacgggtgaggtattaatacttgatggtgccacttttagcgctaaaact

SEQ ID NO: 702988 - DNA, 75 bp, synthetic construct
  source 1..75: mol_type = other DNA
ccatcttcactttcgttgtggcgctgaagaaagttttgccacagccggtgaatggcttcctttcatgaaaatcat

SEQ ID NO: 702989 - DNA, 75 bp, synthetic construct
  source 1..75: mol_type = other DNA
ttaacggtatcaaaaacaaatgggagtcgctcaaatccagtgtaaccggaatgggtgacagcatcagtggctggt

SEQ ID NO: 702990 - DNA, 75 bp, synthetic construct
  source 1..75: mol_type = other DNA
ttttaataccgcgtggcaatggggagagcgcgaagaacaggcagtaaaagaattaggcaaacttattcaagaaca

SEQ ID NO: 702991 - DNA, 75 bp, synthetic construct
  source 1..75: mol_type = other DNA
ttttaataccgcgtggcagtggggagaacgtgaagaacaggcggttaaacaattaggcaaacttattcaagaacg

SEQ ID NO: 702992 - DNA, 75 bp, synthetic construct
  source 1..75: mol_type = other DNA
cgggcagcctcgttcgcggttttatgagcgctgcacgtgccgttctctggattgggcgagcgctgatgatgaatc

SEQ ID NO: 702993 - DNA, 75 bp, synthetic construct
  source 1..75: mol_type = other DNA
ccatcggtctcgttatcaccgctgtcgcggcagcagcttaccttatctaccgcaactggggggctgtcagtggtt

SEQ ID NO: 702994 - DNA, 75 bp, synthetic construct
  source 1..75: mol_type = other DNA
gatcgtataaaaattaaattagatgattttcctgaacttccgaagaaagaagaaattgaagttatggcgataata

SEQ ID NO: 702995 - DNA, 75 bp, synthetic construct
  source 1..75: mol_type = other DNA
ctgttttattgtgcttatctgctggtagtgcatatgcagattgtgagtattaccttacaggtaataaggaaactc

SEQ ID NO: 702996 - DNA, 75 bp, synthetic construct
  source 1..75: mol_type = other DNA
gtgagtgaactgagcgaggcagagaagcagacggtctcgacactggcaacggttgctgccagcctggccggtggt

SEQ ID NO: 702997 - DNA, 75 bp, synthetic construct
  source 1..75: mol_type = other DNA
tgacctatatcgatgagttttcagaactgcatggcaaagatgttccggtgcgtgaagccctcgccggacaggtgc

SEQ ID NO: 702998 - DNA, 75 bp, synthetic construct
  source 1..75: mol_type = other DNA
gtggcaatatggtcgatcaggactggatggattccagtaaccccggaacctggacagatgaaagtaggcaccctg

SEQ ID NO: 702999 - DNA, 75 bp, synthetic construct
  source 1..75: mol_type = other DNA
aaacagtaataatcagccggaaattaacggttctggtagtaccgaactaatctcttggcctataaaaaaggacta

SEQ ID NO: 703000 - DNA, 75 bp, synthetic construct
  source 1..75: mol_type = other DNA
gcttatgattattctggtgctatatcgacaggtattttttcagttgaagggagtattggtaaagacggctttgga

SEQ ID NO: 703001 - DNA, 75 bp, synthetic construct
  source 1..75: mol_type = other DNA
tgtctgagcttgtgccgcctcgcgtacagcaggatgcttccctggcttttgatctcagtggtaaaggagtcacta

SEQ ID NO: 703002 - DNA, 75 bp, synthetic construct
  source 1..75: mol_type = other DNA
cgataccttttcgactgcggttcgacaaaaatctcgctggatcatcggcattgttttccagggctttaaaaccca

SEQ ID NO: 703003 - DNA, 75 bp, synthetic construct
  source 1..75: mol_type = other DNA
cagcttttgctgttgctggcgtatgaaagtttgtggcccaatgcctggcatttcctttctatttttagcggcagc

SEQ ID NO: 703004 - DNA, 75 bp, synthetic construct
  source 1..75: mol_type = other DNA
aaggggcaatcagtaactttgtcagcttcctcgcgatgctggtgatgctccagcttttgctgttgctggcgtatg

SEQ ID NO: 703005 - DNA, 75 bp, synthetic construct
  source 1..75: mol_type = other DNA
ctggggcaacctgattaactttatggccaactggcgcgcgttgaaacaggttcttcagcacggcgacccgcgtcg

SEQ ID NO: 703006 - DNA, 75 bp, synthetic construct
  source 1..75: mol_type = other DNA
acaattcaacgcgaattacaagtttcgatgcaatcactattactcaaagcaggtttaaacacagaacaggttgcg

SEQ ID NO: 703007 - DNA, 75 bp, synthetic construct
  source 1..75: mol_type = other DNA
ttgacgtgcaaagtcttaccgaagattacgacattggtttccgcctgaaagagaaaggaatgacggagatttttg

SEQ ID NO: 703008 - DNA, 75 bp, synthetic construct
  source 1..75: mol_type = other DNA
ctgattgaagatgacgtctacagcgaactttacttcggacgggaaaaaccgctgcccgcaaaagcgtgggatcgc

SEQ ID NO: 703009 - DNA, 75 bp, synthetic construct
  source 1..75: mol_type = other DNA
tcgatcgaggattggcagcagttatcaaggattgtcaacgcctggcagcaggcgacagccagcggcaaacatatt

SEQ ID NO: 703010 - DNA, 75 bp, synthetic construct
  source 1..75: mol_type = other DNA
gtactaaacagttcttttattcataacaatgagattaagcaggctccctacatccttatacctaaagaatatgat

SEQ ID NO: 703011 - DNA, 75 bp, synthetic construct
  source 1..75: mol_type = other DNA
tagtaaagaatcctggttaataatctgtgatagtcagttgggccatttaatgcgcagcatgtttcagggacgccg

SEQ ID NO: 703012 - DNA, 75 bp, synthetic construct
  source 1..75: mol_type = other DNA
tatcgcgagatccgtgccggtgctctcagggcagccgataacgatttgcttgccagtgcgtatgatcagcggctg

SEQ ID NO: 703013 - DNA, 75 bp, synthetic construct
  source 1..75: mol_type = other DNA
tatctcggcgttgatctgccagcgaagttcaccgacttcggtggccatcttatcgacggcctgattaacggcatc

SEQ ID NO: 703014 - DNA, 75 bp, synthetic construct
  source 1..75: mol_type = other DNA
caggcggcctctatacccgcttatggtatgacaacgtcagcagtactgcgctccatcgccagcacaacatgaagg

SEQ ID NO: 703015 - DNA, 75 bp, synthetic construct
  source 1..75: mol_type = other DNA
atgcattcgaaactggcgatggaaatatgtggcttgccagcggtggtgactggtttttcgatttaaatgattcag

SEQ ID NO: 703016 - DNA, 75 bp, synthetic construct
  source 1..75: mol_type = other DNA
catccagacgttcgctaatcaggtttatattgatacgggttcgccggaaagcaggcggctgtcgttttataaaat

SEQ ID NO: 703017 - DNA, 75 bp, synthetic construct
  source 1..75: mol_type = other DNA
cctgttccgcgtaactacggtgctgcctctgatgtggcggttacccgacacactcagtacacattatgggacaaa

SEQ ID NO: 703018 - DNA, 75 bp, synthetic construct
  source 1..75: mol_type = other DNA
taaaatatgtcatcgcacatgcagattatccgggtaatgaatatcactttggcaaagaaatcgcggaaagcgaat

SEQ ID NO: 703019 - DNA, 75 bp, synthetic construct
  source 1..75: mol_type = other DNA
taaaatatatcatcgcacatgcagattacccaggagataaatatcagtttggtaaagaaatagcggaaagtgaat

SEQ ID NO: 703020 - DNA, 75 bp, synthetic construct
  source 1..75: mol_type = other DNA
ttaatggcgagttacaacaaataaacggcgctgattattttatatttggacatatgatgtttgataacattcaga

SEQ ID NO: 703021 - DNA, 75 bp, synthetic construct
  source 1..75: mol_type = other DNA
atcagcaggtcatggcatttatccgcccgatgctggcaaatatggatcgatatcgcgaaatacgggccggtgcac

SEQ ID NO: 703022 - DNA, 75 bp, synthetic construct
  source 1..75: mol_type = other DNA
tgatgattggcggtattgtcgggagcagcttccgttccgccgtcagcggcacacggcgggcgctggattctctcg

SEQ ID NO: 703023 - DNA, 75 bp, synthetic construct
  source 1..75: mol_type = other DNA
gatggtgccggatgtaccgaaagtaccacccgtattagagcgctatatgcgcggcgaccttaccttatccagagg

SEQ ID NO: 703024 - DNA, 75 bp, synthetic construct
  source 1..75: mol_type = other DNA
ccggcgcttgttcagggtgtggcaaaaaccgtgggcgcactgctggggctgaagatcgccactgtcgggctgaaa

SEQ ID NO: 703025 - DNA, 75 bp, synthetic construct
  source 1..75: mol_type = other DNA
ctgattgaagatgacgtttacagcgaactttattttggacgggaaaaaccgctgcctgcgaaagcgtgggatcgc

SEQ ID NO: 703026 - DNA, 75 bp, synthetic construct
  source 1..75: mol_type = other DNA
ggtggcgacggatgttaacgaagggatcgaccttcaggcgctggaacttgcgttgcaggcgtgcccggtaaaagc

SEQ ID NO: 703027 - DNA, 75 bp, synthetic construct
  source 1..75: mol_type = other DNA
tatttttgagatgttgcaggccagtcgcgatccgtcggtagtgccgtttgcttcagcctttcccgatccgcggct

SEQ ID NO: 703028 - DNA, 75 bp, synthetic construct
  source 1..75: mol_type = other DNA
tcgccgagccgcgtgtttatgggctttggtgacaacatcgcgcagggtgccgctatcggcctgcagcgtaccaca

SEQ ID NO: 703029 - DNA, 75 bp, synthetic construct
  source 1..75: mol_type = other DNA
acagaacgttatggtcaactgggttcttcccggatgcagcatctcaacagcgagttgctgcgggtaagccgcacc

SEQ ID NO: 703030 - DNA, 75 bp, synthetic construct
  source 1..75: mol_type = other DNA
tctcagcgataccgtcaggtatcccgcctgccatgcctccggtcttgccggggcagcatattgcggagtcaatgt

SEQ ID NO: 703031 - DNA, 75 bp, synthetic construct
  source 1..75: mol_type = other DNA
ttgctggtttaggtatcgacctgatggggtctcttgcaaattataaagcagctggaatctctcccattgaaggta

SEQ ID NO: 703032 - DNA, 75 bp, synthetic construct
  source 1..75: mol_type = other DNA
ttggtgacaatatcgcgcagggtgccgccattggcctgcaacggaccactccgcttgctgcactggccgggcagc

SEQ ID NO: 703033 - DNA, 75 bp, synthetic construct
  source 1..75: mol_type = other DNA
gagtcgctcaaaactaccgtcacagacatgggcgacagtgttggcggctggtttaaggaaaagctgggcattcat

SEQ ID NO: 703034 - DNA, 75 bp, synthetic construct
  source 1..75: mol_type = other DNA
ccggggatggggagtaagcttagtcagccgttgtctccgggtgtcgcgtgcgcagttgcacgtaattctcagacg

SEQ ID NO: 703035 - DNA, 75 bp, synthetic construct
  source 1..75: mol_type = other DNA
acggtgccggcggcgctgccggggaagggtgtaacgaaaaaagcagccttcattactccagggattcagaaggct

SEQ ID NO: 703036 - DNA, 75 bp, synthetic construct
  source 1..75: mol_type = other DNA
gcactataaaatgcaaccggtgggttatgcgcatgattgtcagttggtggaaaaactccccgttgaagagtggga

SEQ ID NO: 703037 - DNA, 75 bp, synthetic construct
  source 1..75: mol_type = other DNA
gttttgcatccctttagtgtcggtaacttactgttcctgaattaccatccgcaaagtgagctggtggtgaacaga

SEQ ID NO: 703038 - DNA, 75 bp, synthetic construct
  source 1..75: mol_type = other DNA
tctggccggacaaatgaaagcggtaaaaattacttctcaggcaattgttgatttaattgcccagggacatgaggt

SEQ ID NO: 703039 - DNA, 75 bp, synthetic construct
  source 1..75: mol_type = other DNA
cttaagggaagagctgctttctcgtggtattaataaacctgtagcaacgctggttactcaggtcgaagtcgacgc

SEQ ID NO: 703040 - DNA, 75 bp, synthetic construct
  source 1..75: mol_type = other DNA
aagggggtaacgaaaaagcagtcttcattactccaggagtcagaaggctgaaaggagtttatgagatttactttt

SEQ ID NO: 703041 - DNA, 75 bp, synthetic construct
  source 1..75: mol_type = other DNA
gaaaaactccccgttgaagagtgggatatcccactgcctgcggtggttacaccgtcgaaagtctgggagtggtga

SEQ ID NO: 703042 - DNA, 75 bp, synthetic construct
  source 1..75: mol_type = other DNA
ttgccggtgccaccggacgtgatgcagaccttcttcccgaatatcccggtggccacaccgaccaccttcctggtc

SEQ ID NO: 703043 - DNA, 75 bp, synthetic construct
  source 1..75: mol_type = other DNA
cgtgcaggcctccacccgggatgaaatagagcgactctggaatccgcagggtatggccgcgcagcctgcacaacc

SEQ ID NO: 703044 - DNA, 75 bp, synthetic construct
  source 1..75: mol_type = other DNA
gtagaaaaactgccggtggagaagtgggatattccactgcctgcggtggttacaccgtcgaaagtctgggagtgg

SEQ ID NO: 703045 - DNA, 75 bp, synthetic construct
  source 1..75: mol_type = other DNA
cagttttgcatccctttagtgccggtaatttgctgttcctgaattaccatccgcaaagtgaactggtgatgaaca

SEQ ID NO: 703046 - DNA, 75 bp, synthetic construct
  source 1..75: mol_type = other DNA
gtagaaaaactccccgttgaagagtgggatattccacttcctgcagtagttacgccgtcgaaagtctgggagtgg

SEQ ID NO: 703047 - DNA, 75 bp, synthetic construct
  source 1..75: mol_type = other DNA
gcactcgccaatgctgccgatgtctgtctgtgttgccttaagccagggttatattggttacgatctacaaaacgc

SEQ ID NO: 703048 - DNA, 75 bp, synthetic construct
  source 1..75: mol_type = other DNA
ctgacgaagaggtgaagaaactgcgggcggaagtgacagcgttagcggttgaggcggaatcagctatcgccgtcc

SEQ ID NO: 703049 - DNA, 75 bp, synthetic construct
  source 1..75: mol_type = other DNA
atgggacgcaccaaatcaccggttagcactgaactgaacgccgagataccgctgtctgatgatctcaacgtcagc

SEQ ID NO: 703050 - DNA, 75 bp, synthetic construct
  source 1..75: mol_type = other DNA
caaaaaatggcccaagctgctctgaagtttttatctccagagctgacatcaaaagcgaaaacgttttcgcatttg

SEQ ID NO: 703051 - DNA, 75 bp, synthetic construct
  source 1..75: mol_type = other DNA
agggaatatctatgccagcgaatcactgtttgcggcggggatccatccggatcggctggcgtcatcactgtcgct

SEQ ID NO: 703052 - DNA, 75 bp, synthetic construct
  source 1..75: mol_type = other DNA
aacttccccctgaaaagcatgaccatgtggatttggtgatgagcaacggtaaagtgctgcgctacaccgatccgc

SEQ ID NO: 703053 - DNA, 75 bp, synthetic construct
  source 1..75: mol_type = other DNA
gtaagtgtgatgcagctggttgcaccgctggtcatttttgtacccgtatttgcctttctcggcgtcaatggcgta

SEQ ID NO: 703054 - DNA, 75 bp, synthetic construct
  source 1..75: mol_type = other DNA
taccctcggtactgcagcctgcccgccgtaccatatcgcgtttgtgattggcggtacgtctgcggaaaccaacct

SEQ ID NO: 703055 - DNA, 75 bp, synthetic construct
  source 1..75: mol_type = other DNA
gctacatacggcggtcagtttacgcttacagaagaactgctttctcgtggcattaataaacctgtagcaacgctg

SEQ ID NO: 703056 - DNA, 75 bp, synthetic construct
  source 1..75: mol_type = other DNA
tcgttgcttcgccaaaaccggttgatatcattgaaaaagaaacggttaaagctctggtagatgccggacaggtgg

SEQ ID NO: 703057 - DNA, 75 bp, synthetic construct
  source 1..75: mol_type = other DNA
cagacgaagaactgaaaaaattgcgggcggaagtgacggcattagcggttgaggcggaatctgccatcgccgtcc

SEQ ID NO: 703058 - DNA, 75 bp, synthetic construct
  source 1..75: mol_type = other DNA
tgaagcggctcgacagagaaatgcgcacgttatttatgacgctggatcagttggatcgtgcgtcgattaccgcgc

SEQ ID NO: 703059 - DNA, 75 bp, synthetic construct
  source 1..75: mol_type = other DNA
gccgacgcccagcgccgcgttctgtccgataagaatgacaaaattgacaaactctccaccctgctcgccaaaaag

SEQ ID NO: 703060 - DNA, 75 bp, synthetic construct
  source 1..75: mol_type = other DNA
acggatgctgccggttttatggcgcggatggataccgttctgcagatgtacggagggaaaaaaggtgcgaaataa

SEQ ID NO: 703061 - DNA, 75 bp, synthetic construct
  source 1..75: mol_type = other DNA
gtaataaccgcaagattcacgctcgtaagttcctgtctacgccagagggaaaagcctggctagagcgtaaacaga

SEQ ID NO: 703062 - DNA, 75 bp, synthetic construct
  source 1..75: mol_type = other DNA
ttggcgataaaatagggcgaaaaataacacttatctggacgctggctattgtcggttgctccacatttttgattg

SEQ ID NO: 703063 - DNA, 75 bp, synthetic construct
  source 1..75: mol_type = other DNA
ggaatgatccaaaaaacccgatgacagaatcgtctgttatggagctgtttcgcaaacaaaccaataaaaatctgg

SEQ ID NO: 703064 - DNA, 75 bp, synthetic construct
  source 1..75: mol_type = other DNA
tttatgggcgacggctgcctgatggaaggtatttcccacgaagtctgttcgctggcaggcacgctgggactgggc

SEQ ID NO: 703065 - DNA, 75 bp, synthetic construct
  source 1..75: mol_type = other DNA
gtccactattctctcaggaatttcaggatctgccagacggtgctgagacgacgcttacatttatctgcctgttat

SEQ ID NO: 703066 - DNA, 75 bp, synthetic construct
  source 1..75: mol_type = other DNA
cgcgccggtaagcgcgtatatcttccagttttgcatccctttagtgccggtaatttgctgttcctgaattaccat

SEQ ID NO: 703067 - DNA, 75 bp, synthetic construct
  source 1..75: mol_type = other DNA
ttcaaatcctgaattacgtgcggtggcagaagtatatgcctcggatgatgcgagaaataagtttattcatgattt

SEQ ID NO: 703068 - DNA, 75 bp, synthetic construct
  source 1..75: mol_type = other DNA
cgcatgatccgtctgtcctgcatccgttgatgatgtttacgacggatattgctcttaaagttgatcctgaatata

SEQ ID NO: 703069 - DNA, 75 bp, synthetic construct
  source 1..75: mol_type = other DNA
cctgcagaatcatttatctggcaggatcctcttcctgcggcggattatacaatgattgatggtaaagacattaag

SEQ ID NO: 703070 - DNA, 75 bp, synthetic construct
  source 1..75: mol_type = other DNA
aactggaacgcgtggtatgtggtcagtactcctacgaaatgcaggagcttgcgtattcggccctctgctgcatta

SEQ ID NO: 703071 - DNA, 75 bp, synthetic construct
  source 1..75: mol_type = other DNA
accggcaacggtaaagatactatcactagtggtctggaaggtgcttggtccacctctcctacgcaattcacgatg

SEQ ID NO: 703072 - DNA, 75 bp, synthetic construct
  source 1..75: mol_type = other DNA
gacggaaagaaagtgtcgttggctgatttaattgttctttcgggtaatgctgcaatcgaagatgcggccagaaaa

SEQ ID NO: 703073 - DNA, 75 bp, synthetic construct
  source 1..75: mol_type = other DNA
tcagatggctgcttaaaaaaagaacaaatggttgtgtccgctattgccagtacacctcaaactgagttctcatgg

SEQ ID NO: 703074 - DNA, 75 bp, synthetic construct
  source 1..75: mol_type = other DNA
ttttctttgcaatatctttaattaacggttgctcaacatctgggaaccaaaaaataaaaaatgaaacagctcaaa

SEQ ID NO: 703075 - DNA, 75 bp, synthetic construct
  source 1..75: mol_type = other DNA
accgcattaggtgagcccgaaaccaagactacacttgatagtggaaatgaagaatggacttattcgatggataac

SEQ ID NO: 703076 - DNA, 75 bp, synthetic construct
  source 1..75: mol_type = other DNA
ctggaaatcgaatttaaaggcgaaaccgtcagcaagtggacgttctctgaaaacaacagcaagatgaaaaccggc

SEQ ID NO: 703077 - DNA, 75 bp, synthetic construct
  source 1..75: mol_type = other DNA
cagcgcgaaacttgccggtatgtgccctgtccagaccgaccagcatgttcttaatgtcgtgtcgcatcagataca

SEQ ID NO: 703078 - DNA, 75 bp, synthetic construct
  source 1..75: mol_type = other DNA
gttgtcctgctttttctggccagctgtacacaggcatccacacgtgcggaaatcgagcgactctggcatccggag

SEQ ID NO: 703079 - DNA, 75 bp, synthetic construct
  source 1..75: mol_type = other DNA
acagctggcacagcagtacggcttttccgtttttcctacaccctggatggtcagggggatacggcctttcctgaa

SEQ ID NO: 703080 - DNA, 75 bp, synthetic construct
  source 1..75: mol_type = other DNA
ttggtgaaggcaatattggccatgatgctttccgctggatcatgcaggatgatcgcttcgacggtattccgctga

SEQ ID NO: 703081 - DNA, 75 bp, synthetic construct
  source 1..75: mol_type = other DNA
gtgctgctggcggtctggcaaatgccgcaattcgcgccgccgaaatcgacgcaaccgcgtttgccttgttcacca

SEQ ID NO: 703082 - DNA, 75 bp, synthetic construct
  source 1..75: mol_type = other DNA
tttcaattattatgcctgcgtataattcgcagtatacaataaaagatactatacaatctgttttaaaacaaacat

SEQ ID NO: 703083 - DNA, 75 bp, synthetic construct
  source 1..75: mol_type = other DNA
cttgaaatcgacttcaagggagagactgtaagtaaatggactttttcctctgacaataacaacaccaaaactggc

SEQ ID NO: 703084 - DNA, 75 bp, synthetic construct
  source 1..75: mol_type = other DNA
acttagggtttaaattcgaacatctcgcggcgattatcgacggcgtggaagataaatcccgcgtcggcgtctgca

SEQ ID NO: 703085 - DNA, 75 bp, synthetic construct
  source 1..75: mol_type = other DNA
gaattcaaagccgcctgtgaaaaatatcactacacgtcggcgcaaattcttccccacgacagttatctgattaac

SEQ ID NO: 703086 - DNA, 75 bp, synthetic construct
  source 1..75: mol_type = other DNA
cggcgtggaatatttgctgatgctgggcttcttcatcgcgtttgcggtgaaaatgccggtggtaccgctgcatgg

SEQ ID NO: 703087 - DNA, 75 bp, synthetic construct
  source 1..75: mol_type = other DNA
agctgctgaatacgccgatgtctcacggtgtggaatacctgttgatgctgggcttctttatcgcgtttgcggtga

SEQ ID NO: 703088 - DNA, 75 bp, synthetic construct
  source 1..75: mol_type = other DNA
gctgggggttatcggtattttctacggtgcgtggatggcctttaatcagtacgatattaaacgtctgattgccta

SEQ ID NO: 703089 - DNA, 75 bp, synthetic construct
  source 1..75: mol_type = other DNA
ctctgccagcgcctcggcattgatcaggttccggcacgggtgacagccgcctccggcgaacgcttcctgaaggtg

SEQ ID NO: 703090 - DNA, 75 bp, synthetic construct
  source 1..75: mol_type = other DNA
aacttgatcgctttgctatgcatgtttttattcttccttttccttcagtaaaagcatttagggctagtttaatta

SEQ ID NO: 703091 - DNA, 75 bp, synthetic construct
  source 1..75: mol_type = other DNA
ctggttaccggatgcgcactcccaggcaccgaccgccggttccgttgacctcgcggggatcttgctgaaaaccgc

SEQ ID NO: 703092 - DNA, 75 bp, synthetic construct
  source 1..75: mol_type = other DNA
ggcgcaccttgctgttacagggtgcggcgttaacggcggcggcgttgttgcagtcgctgccctggctttggcacg

SEQ ID NO: 703093 - DNA, 75 bp, synthetic construct
  source 1..75: mol_type = other DNA
atggctgctgatttactggctaacgcaggcggtcggtttaacccatttttccttattgatgatcggtagtttact

SEQ ID NO: 703094 - DNA, 75 bp, synthetic construct
  source 1..75: mol_type = other DNA
ctctgccagcgcctcggcattgatcaggtcccggcatgggtgagcgccgttcccggcgatcgcttcctgaaggtg

SEQ ID NO: 703095 - DNA, 75 bp, synthetic construct
  source 1..75: mol_type = other DNA
tgcgctgattgccagccagacatggcgcgatcatccggtagatttattgctctcgcttctggtgcaaagtttgac

SEQ ID NO: 703096 - DNA, 75 bp, synthetic construct
  source 1..75: mol_type = other DNA
caggcggtcggtttaacccatttctccttattgatgatcggtagtttactgacgttattgcccgtggcgctgatc

SEQ ID NO: 703097 - DNA, 75 bp, synthetic construct
  source 1..75: mol_type = other DNA
gcactgggcggcacgttgacgatttcctgtctgcacggtacacgcgtcagtgtttctttaccccaacgttatgtg

SEQ ID NO: 703098 - DNA, 75 bp, synthetic construct
  source 1..75: mol_type = other DNA
aattaacattgtggagttttctccgggagacatacacagtgtcaaatgcttgtctcctcgtgctctcatgatgga

SEQ ID NO: 703099 - DNA, 75 bp, synthetic construct
  source 1..75: mol_type = other DNA
gctatcgcccgagcgctgatgatggaaccgcaggtgttgctgtttgatgagccgaccgccgcactggacccggaa

SEQ ID NO: 703100 - DNA, 75 bp, synthetic construct
  source 1..75: mol_type = other DNA
caaaacctgattgaagcgccctgccgtgtactggggttgagtaaagatcaggcgctggcccgtgcagaaaaactg

SEQ ID NO: 703101 - DNA, 75 bp, synthetic construct
  source 1..75: mol_type = other DNA
atgagtattcaattaaacggcattaattgcttctacggcgcgcatcaggcgctgttcgatatcacgctggattgc

SEQ ID NO: 703102 - DNA, 75 bp, synthetic construct
  source 1..75: mol_type = other DNA
gatgtcgatgattttgttgcgtcagcggttgttttgtatgaccagatgaatcgcggcggcccggcagggaatgct

SEQ ID NO: 703103 - DNA, 75 bp, synthetic construct
  source 1..75: mol_type = other DNA
aaaaaatgcaggctctgttaccggcgatcgaaaaggcgatgccgcctttgctggtggcccgtatgcgcagccaca

SEQ ID NO: 703104 - DNA, 75 bp, synthetic construct
  source 1..75: mol_type = other DNA
tttactattaatgatacttcgtcattgtttataaactggaatcgtattaagtctgtatccttaccacagattagt

SEQ ID NO: 703105 - DNA, 75 bp, synthetic construct
  source 1..75: mol_type = other DNA
ggtgaagagacattccgggggttcatgtcaaaacacgccaatgtggaaattggtcttgccctgcgttctgaccgc

SEQ ID NO: 703106 - DNA, 75 bp, synthetic construct
  source 1..75: mol_type = other DNA
ggagacccgcgaatggctgggctggggccatgcctgggcacatgaaaccgcggtggccagacgaaaaagtgaggc

SEQ ID NO: 703107 - DNA, 75 bp, synthetic construct
  source 1..75: mol_type = other DNA
gtggctgtttggcaagcagtacaaagcggaagacatgctacgtgaagccatcggcgggcttgcctcccgtccgga

SEQ ID NO: 703108 - DNA, 75 bp, synthetic construct
  source 1..75: mol_type = other DNA
ttatatggtggctatttgtatcactacttgaatattttagtattcagtataaaacatggtcaataataccagtta

SEQ ID NO: 703109 - DNA, 75 bp, synthetic construct
  source 1..75: mol_type = other DNA
ctgtaactggacgagaagcagcaaaagcctatgctataggtaattcttggcgtgaagctgcaatatttttcagaa

SEQ ID NO: 703110 - DNA, 75 bp, synthetic construct
  source 1..75: mol_type = other DNA
cagggcctaaaggcacggttttacatcagacgttggtggctgctttggtgaaaaatggtttaagcatgaacgatg

SEQ ID NO: 703111 - DNA, 75 bp, synthetic construct
  source 1..75: mol_type = other DNA
gttttatcaaattatcgcgctggtggccctgtacggcgcgaatatccgcatgatgcaggaatggcaggcaaaaca

SEQ ID NO: 703112 - DNA, 75 bp, synthetic construct
  source 1..75: mol_type = other DNA
aaaagttgagtaaagaagaagcgcgtattgactggtcactttcggcagcacagcttgaacgctgcattcgcgctt

SEQ ID NO: 703113 - DNA, 75 bp, synthetic construct
  source 1..75: mol_type = other DNA
gttgtcgattaatgaggtggataaaggagattccctaattgtaaaattgttaatgagaaaactgaaacagtactg

SEQ ID NO: 703114 - DNA, 75 bp, synthetic construct
  source 1..75: mol_type = other DNA
tgaaaattattgaggcacggttaagcgcacttacaaatcaccagacaaagtcattgaagcttaaaccggttgcgt

SEQ ID NO: 703115 - DNA, 75 bp, synthetic construct
  source 1..75: mol_type = other DNA
atgttatggttgtcgtcgcctatgggctgattctgcctaaagctgtgctggagatgccacgtctcggctgtatca

SEQ ID NO: 703116 - DNA, 75 bp, synthetic construct
  source 1..75: mol_type = other DNA
ttgcgggtacacctgactttgcagcacgtcatctcgacgcgctgttgtcttctggtcataacgtcgttggcgtgt

SEQ ID NO: 703117 - DNA, 75 bp, synthetic construct
  source 1..75: mol_type = other DNA
aagaaagcgatgagcgcgcaagacctcctgaattctcgtcgggaatggtttgttccgggcaaccgtctggcctga

SEQ ID NO: 703118 - DNA, 75 bp, synthetic construct
  source 1..75: mol_type = other DNA
gcacttaagcgatctgttccgtcattccgcgcagcaaatgggcgttacggcaggcctgacgctacccattttcga

SEQ ID NO: 703119 - DNA, 75 bp, synthetic construct
  source 1..75: mol_type = other DNA
gcgaaaatcaaccgcgaaggtatctggatcgaaaaactggaacacaacccaggccagtacattccagaagaactg

SEQ ID NO: 703120 - DNA, 75 bp, synthetic construct
  source 1..75: mol_type = other DNA
ttagcgatgatttcaacggcgaatacctgcatcagaaatgcgcgaagaaaaagacagcgattaaaccctggctga

SEQ ID NO: 703121 - DNA, 75 bp, synthetic construct
  source 1..75: mol_type = other DNA
cgggcgaacggtctgctcttgcaggggcagtggctggatgcctccgttcaactcaccggcgcgctgggtgggggc

SEQ ID NO: 703122 - DNA, 75 bp, synthetic construct
  source 1..75: mol_type = other DNA
agcgggccaatggcctgttattgcaagggcagtggctggatgcttccattcaactcaccggtgcgctgggcgggg

SEQ ID NO: 703123 - DNA, 75 bp, synthetic construct
  source 1..75: mol_type = other DNA
cctatgcatgaaacacgccaggctttaagccagcaaacgcccgccacacatgttgacaccgcattaccggtatct

SEQ ID NO: 703124 - DNA, 75 bp, synthetic construct
  source 1..75: mol_type = other DNA
gacctgcttctgggtaattcgcaatataaaattcatatccacagggaaataatattatctaattattatcaacag

SEQ ID NO: 703125 - DNA, 75 bp, synthetic construct
  source 1..75: mol_type = other DNA
ttaaggagcgggtgatccgtaacagtctgcggccccctgccgtgcccggtatcggacgcacagagaaatacggga

SEQ ID NO: 703126 - DNA, 75 bp, synthetic construct
  source 1..75: mol_type = other DNA
aggacgcggacaaactcaccaatgatgagtggaaactcatcctcgccaagaagaaaggtaaagggaagcccttca

SEQ ID NO: 703127 - DNA, 75 bp, synthetic construct
  source 1..75: mol_type = other DNA
cgggccaagtacatgcttggcaaaatcgacggcaagtttgtcaggtcagaacaggcaatcgagttccgtgagcag

SEQ ID NO: 703128 - DNA, 75 bp, synthetic construct
  source 1..75: mol_type = other DNA
ttgttcgacattagctagggcatccagtgaagacacaaggggattttctccacttccttctgcctggcgcctggc

SEQ ID NO: 703129 - DNA, 75 bp, synthetic construct
  source 1..75: mol_type = other DNA
ttaaggagcgggtgatccgtaacagtctgcggccccctgccgtgcccggtatcggacgcacggagaaatacggaa

SEQ ID NO: 703130 - DNA, 75 bp, synthetic construct
  source 1..75: mol_type = other DNA
ttaaggagcgggtgatccgtaacagtctgcggccccctgccgtgcccggtatcggacgcactgagaaatacggta

SEQ ID NO: 703131 - DNA, 75 bp, synthetic construct
  source 1..75: mol_type = other DNA
gggatggagacttggtggtacgattaagaccacagagcgcaagcttgcagagggtgtgcttattcatggcggaca

SEQ ID NO: 703132 - DNA, 75 bp, synthetic construct
  source 1..75: mol_type = other DNA
tgacaaaggcatattgcgcaccccaaaaaaagagattgcatatgccagctacgacaatataccaactgtcacaat

SEQ ID NO: 703133 - DNA, 75 bp, synthetic construct
  source 1..75: mol_type = other DNA
gaaaaggatttttttaatattctgaaaaagaaaaaaggaagcattcgctggagtaaaacatttgatgcccgtaaa

SEQ ID NO: 703134 - DNA, 75 bp, synthetic construct
  source 1..75: mol_type = other DNA
ggctgccgctggtgatttgcctacagtcatgattgacggtcggaagttcaattgcgttgccagtatagccagagc

SEQ ID NO: 703135 - DNA, 75 bp, synthetic construct
  source 1..75: mol_type = other DNA
atgccctggcgatttttaaacaactgcggattgtggatgcaccgggtagcccgacgttcggggagtcctgtgcac

SEQ ID NO: 703136 - DNA, 75 bp, synthetic construct
  source 1..75: mol_type = other DNA
acgttaaattatgactttatgctgagtgaagtaagtaaaataaaaagaaatcttgcagcgcgaggtattaatttt

SEQ ID NO: 703137 - DNA, 75 bp, synthetic construct
  source 1..75: mol_type = other DNA
actggtgttgaacggcaatacctcaggtaacacgaccgtggtggttaaccccattaccggcattggtgaaccgac

SEQ ID NO: 703138 - DNA, 75 bp, synthetic construct
  source 1..75: mol_type = other DNA
ggggtaatcaccaaaacaggttccggcgatctggtacttaatgcagataacaatgactttactggtgagatgcag

SEQ ID NO: 703139 - DNA, 75 bp, synthetic construct
  source 1..75: mol_type = other DNA
acagtgataaccagggcgacagccgctcgaatatgaccggaactcgcgccgataaccagaaccacggttatgccg

SEQ ID NO: 703140 - DNA, 75 bp, synthetic construct
  source 1..75: mol_type = other DNA
gttgatttcgcagctgatcccacgcagtttcaaaacaatgcgcagttcagtctggcaggaagcggctacgtcaat

SEQ ID NO: 703141 - DNA, 75 bp, synthetic construct
  source 1..75: mol_type = other DNA
gcgccgataaccagaaccacggttatgccgttgggctgacctcaagctggtttcagcacggtaatcagaagcagg

SEQ ID NO: 703142 - DNA, 75 bp, synthetic construct
  source 1..75: mol_type = other DNA
tgatccaacacccgacccggctccagcccctacgcctgcctaccagccggtgttgaatgccaaagttggtggata

SEQ ID NO: 703143 - DNA, 75 bp, synthetic construct
  source 1..75: mol_type = other DNA
agtcagcggcagcagcggaacggttatcggcagtcaggatgtggtagatcttgcaggtggaaacgatatgcatat

SEQ ID NO: 703144 - DNA, 75 bp, synthetic construct
  source 1..75: mol_type = other DNA
gctgatgaatgttggcgatgatcgttgccagagtaatccacaaaattgctatggactgatggtcggcagtatcag

SEQ ID NO: 703145 - DNA, 75 bp, synthetic construct
  source 1..75: mol_type = other DNA
aatcaaaaaggccacgatctgtttgaagcaactctccatgcctgtcgtcagcgtttacgcccaattctgatgact

SEQ ID NO: 703146 - DNA, 75 bp, synthetic construct
  source 1..75: mol_type = other DNA
agagcggcacatcatacaacgatggccttgaagtcagcggcagcagcggaacggttatcggcagtcaggatgtgg

SEQ ID NO: 703147 - DNA, 75 bp, synthetic construct
  source 1..75: mol_type = other DNA
attcatgccagggatatgatatcaaagcgagttgtcaggccagcaggcaaagcctttcaggcattacgcaggact

SEQ ID NO: 703148 - DNA, 75 bp, synthetic construct
  source 1..75: mol_type = other DNA
cacgccaaccctggatctgaattattatcaccatccccattcggcggaaattgaagacgatggcagcaatatcag

SEQ ID NO: 703149 - DNA, 75 bp, synthetic construct
  source 1..75: mol_type = other DNA
gcactatcagtgacgatgcggtgaagcaacggggtgaaataaaagtgggaataacgggcaatatcagtcagcgag

SEQ ID NO: 703150 - DNA, 75 bp, synthetic construct
  source 1..75: mol_type = other DNA
cgtggtaagcccggcggggggatgttccacagcggtagtaatgccgatatcagtttttatcataactctgtttac

SEQ ID NO: 703151 - DNA, 75 bp, synthetic construct
  source 1..75: mol_type = other DNA
gtgtggtgcggtgatgtaacctatatctggacgggtaagcgctgggcgtacctcgccgttgttctcgacctgttc

SEQ ID NO: 703152 - DNA, 75 bp, synthetic construct
  source 1..75: mol_type = other DNA
tgcgatcacaaactatatcgtcgggtattacagctcgctaaggccgcatgactataacggtggattacctccaaa

SEQ ID NO: 703153 - DNA, 75 bp, synthetic construct
  source 1..75: mol_type = other DNA
caaatcaggtgtggtgcggtgatgtgacctatagtgtgcccggagttcagggcgggcatggatgcttaaatgaac

SEQ ID NO: 703154 - DNA, 75 bp, synthetic construct
  source 1..75: mol_type = other DNA
caaatcaggtgtggtgcggtgatcttacttatagtgtgcccggagttcagggcgggcatggatgcttaaatgaac

SEQ ID NO: 703155 - DNA, 75 bp, synthetic construct
  source 1..75: mol_type = other DNA
gtcgcagcaactccctgatgaatgtcggagatacgcattgccaggacgatccgcaagactgctacggtctgacga

SEQ ID NO: 703156 - DNA, 75 bp, synthetic construct
  source 1..75: mol_type = other DNA
acggttatgccgttgggctgacctcaagctggtatcagcacggtaatcagaagcagggggcctggctggatagct

SEQ ID NO: 703157 - DNA, 75 bp, synthetic construct
  source 1..75: mol_type = other DNA
gtggtttaacaatgatgtttccgaacaagacgatggcgcggatcattaccactcgtcggggattatcgcctcgct

SEQ ID NO: 703158 - DNA, 75 bp, synthetic construct
  source 1..75: mol_type = other DNA
tggacgggtaagcgctgggcgtacctcgccgttgttctcgacctgttcgcaagaaaaccagtgggctgggccatg

SEQ ID NO: 703159 - DNA, 75 bp, synthetic construct
  source 1..75: mol_type = other DNA
gagttcacaataattaataacaccacgtttacagataatattgctgaaggttacggtggcgcaatttatagcagt

SEQ ID NO: 703160 - DNA, 75 bp, synthetic construct
  source 1..75: mol_type = other DNA
tccgccgcagcctgcgctggatcatgatttatgtcctgctgcttggcggcatggtgttcctgttcctgcgtctgc

SEQ ID NO: 703161 - DNA, 75 bp, synthetic construct
  source 1..75: mol_type = other DNA
gtggagccaaaatgacgggtgctctcattcagatgggtggcgtacccaagactatgacagtgcgtggtattccat

SEQ ID NO: 703162 - DNA, 75 bp, synthetic construct
  source 1..75: mol_type = other DNA
atataatggtgggttaccaccaaacgaatcggaaaaccgatactggaaaaactctaacgtggtggccagtttttg

SEQ ID NO: 703163 - DNA, 75 bp, synthetic construct
  source 1..75: mol_type = other DNA
gataacagcccgatggaacgtttttttagaagcctgaaaacggagtgggtaccggataatggatacgctaatttt

SEQ ID NO: 703164 - DNA, 75 bp, synthetic construct
  source 1..75: mol_type = other DNA
ggtgactgttggtttgtttgctaaccgtggcgcggacgttgcgctgattggcacacctgacggtgtcaaaactat

SEQ ID NO: 703165 - DNA, 75 bp, synthetic construct
  source 1..75: mol_type = other DNA
ttttgatctcaacgaagtcgacagccttggcatctacgttgatggcgcagatgaaatcaacggccacatgcaaat

SEQ ID NO: 703166 - DNA, 75 bp, synthetic construct
  source 1..75: mol_type = other DNA
gacctcatcaatataacggtggtttgacgccgaatgaatcagaacgattgttctggaaaaactctaaagccgtgg

SEQ ID NO: 703167 - DNA, 75 bp, synthetic construct
  source 1..75: mol_type = other DNA
ccgctgtcgccgccggagaacaggttgttcctgcctctgaacttgctgccgccatgaagcagattaaagaactcc

SEQ ID NO: 703168 - DNA, 75 bp, synthetic construct
  source 1..75: mol_type = other DNA
gtgtggtgcggtgatgtgacctatatctggacgggtaagcgctgggcgtacctcgccgttgttctcaacctgttc

SEQ ID NO: 703169 - DNA, 75 bp, synthetic construct
  source 1..75: mol_type = other DNA
ctgggccatgtcgttctcgccggacagcaagctcaccatgaaatcgctggaaatggcatgggaaacccgtggtaa

SEQ ID NO: 703170 - DNA, 75 bp, synthetic construct
  source 1..75: mol_type = other DNA
attgcagccagagaaaaagggcataatgaaatactttcagtaggacgggttcagacaccagttcttggactggtc

SEQ ID NO: 703171 - DNA, 75 bp, synthetic construct
  source 1..75: mol_type = other DNA
agttactgtggagataccggatcaggcagagtatgagtcggcgtggaaactgctgggataacagcccaatggagc

SEQ ID NO: 703172 - DNA, 75 bp, synthetic construct
  source 1..75: mol_type = other DNA
aagcgacgctccacgcctgccgtcagcgtttacgtccgattctgatgacctctctggcctttatcttcggcgtat

SEQ ID NO: 703173 - DNA, 75 bp, synthetic construct
  source 1..75: mol_type = other DNA
aggaccacgctggagcaggtcacgatgcgctgatggcagcacgtaaccagttgctggcgctggcggcggaaaacc

SEQ ID NO: 703174 - DNA, 75 bp, synthetic construct
  source 1..75: mol_type = other DNA
gcgaacgcgacagtaagaccggcacctcatttgccattatcgagcgtgcaacgaaggcgtttaacaagattaaag

SEQ ID NO: 703175 - DNA, 75 bp, synthetic construct
  source 1..75: mol_type = other DNA
acgcgacagtaagaccggcacctcgtttgccattatcgagcgtgcaacgaaggcgtttaacaagattaaagaagc

SEQ ID NO: 703176 - DNA, 75 bp, synthetic construct
  source 1..75: mol_type = other DNA
tgcgtatctggctggacccggcaaaactcaacagcttccagatgacagccaaagatgtcaccgacgccattgagt

SEQ ID NO: 703177 - DNA, 75 bp, synthetic construct
  source 1..75: mol_type = other DNA
gacgaagcggtacagcaggtacagaaccagttgcagtcagccatgcgtaagctgccgcaggcggtacaaaatcag

SEQ ID NO: 703178 - DNA, 75 bp, synthetic construct
  source 1..75: mol_type = other DNA
atgggcgatccctggttcaaacaaaaagatctgtttcgtcgctgtggcgtggtttgctttagcagtaattatgag

SEQ ID NO: 703179 - DNA, 75 bp, synthetic construct
  source 1..75: mol_type = other DNA
tccgggatgaagatatcaccaaaagcctataactgttcaaatgaacgatgtggattccgattgtggggtactcag

SEQ ID NO: 703180 - DNA, 75 bp, synthetic construct
  source 1..75: mol_type = other DNA
cgatgaaaagcgacgatttcagtaagcaaaaactggcggaatatcgtcagcatcttgagagtggcccgctgcgcg

SEQ ID NO: 703181 - DNA, 75 bp, synthetic construct
  source 1..75: mol_type = other DNA
aagcctccattgaagacgtggtgaaaacgctgctggaagctatcgccctggttttccttgttatgtatctgttcc

SEQ ID NO: 703182 - DNA, 75 bp, synthetic construct
  source 1..75: mol_type = other DNA
tgtgcgagtgaccgctaactatcccggcgcatcggcccagacgctggaaaacaccgtgacccaggttatcgagca

SEQ ID NO: 703183 - DNA, 75 bp, synthetic construct
  source 1..75: mol_type = other DNA
gtgaaccctgtttgcaactggaagagtttgcaccgacgaagcaggaaattatctgttcccgctcgtttggtgaac

SEQ ID NO: 703184 - DNA, 75 bp, synthetic construct
  source 1..75: mol_type = other DNA
gcggggctttatcatcgcgcggggaaaaatgacatcaacgaactggtgaacctgcctgacgtcatagggatggag

SEQ ID NO: 703185 - DNA, 75 bp, synthetic construct
  source 1..75: mol_type = other DNA
gatgtgcagcaatgctataccgccaaagagcgccgtttactgcaacataccagtgcgcagcttcatgcaggcgag

SEQ ID NO: 703186 - DNA, 75 bp, synthetic construct
  source 1..75: mol_type = other DNA
agcagtaaagcggcaaaagagaaaaagccacgaccagtaaagagggctgagtatgcttctgacaatggaagagat

SEQ ID NO: 703187 - DNA, 75 bp, synthetic construct
  source 1..75: mol_type = other DNA
aacggatgctcagggctttatggcccggctcgataccttatttcagatgatggagacaccgaaaaatggacaagg

SEQ ID NO: 703188 - DNA, 75 bp, synthetic construct
  source 1..75: mol_type = other DNA
tttgcttgtacatttctatggcaggggcttaactttgctttggctgttggaaatggcttgctggaagcgaaaagc

SEQ ID NO: 703189 - DNA, 75 bp, synthetic construct
  source 1..75: mol_type = other DNA
ggccacagccatgatgtgaccggcgttcaaagcggcaacagcacgatcacgtcgaagaaaccaaatccgggttaa

SEQ ID NO: 703190 - DNA, 75 bp, synthetic construct
  source 1..75: mol_type = other DNA
gtaaaggcatgcgaaaccgctcctgattttgctatccctagctggggtgtgctggtggcgagcaatgccgttaat

SEQ ID NO: 703191 - DNA, 75 bp, synthetic construct
  source 1..75: mol_type = other DNA
tttatctggtctgcaccgccagactgtcgtggcaagactgaaaaacattcgtcccgctggtggacatgacaaact

SEQ ID NO: 703192 - DNA, 75 bp, synthetic construct
  source 1..75: mol_type = other DNA
accggcaagcgatgtcaggcgggaatttgccatctgggcaaaagcagttgtgcaggtgctggaaacattaccgga

SEQ ID NO: 703193 - DNA, 75 bp, synthetic construct
  source 1..75: mol_type = other DNA
tattatcaaatttggtggtggcggtgttcatgtccctgcagagccagagccagagccagagccagagccagcggt

SEQ ID NO: 703194 - DNA, 75 bp, synthetic construct
  source 1..75: mol_type = other DNA
gctgccactgagcgcgaagcacgtgcacagctgccgcacgcacatctgatttttgtcgcccgtattcgccagggg

SEQ ID NO: 703195 - DNA, 75 bp, synthetic construct
  source 1..75: mol_type = other DNA
tccggttttgactgcatggtctgcgcccctcacttatcccgaaaaaacagggggagcggggtaaaaccgacaccg

SEQ ID NO: 703196 - DNA, 75 bp, synthetic construct
  source 1..75: mol_type = other DNA
aagaggtgtttgatctcatccgtgatcacatcagccagacaggtatgccgccgacgcgtgcggaaatcgcgcagc

SEQ ID NO: 703197 - DNA, 75 bp, synthetic construct
  source 1..75: mol_type = other DNA
atttccgtttggtctgcgtctggggctaatgctgcaatgcccgcgcggatactggccggtgttgctgggcgcgga

SEQ ID NO: 703198 - DNA, 75 bp, synthetic construct
  source 1..75: mol_type = other DNA
aaaaacggcctgggcttcagcatcatcatttcgtgtcactgattatcgcggagggaataatggtgcccgtattcg

SEQ ID NO: 703199 - DNA, 75 bp, synthetic construct
  source 1..75: mol_type = other DNA
ccgaaagaaacattcatctggcaggatcttctgccttctgccgattacagcatgattgataacaaggatattcag

SEQ ID NO: 703200 - DNA, 75 bp, synthetic construct
  source 1..75: mol_type = other DNA
ataagaaaataaccacccgtttcctgaatgatccaaaagcttttgagcaggcattcgcaagagcatggtttaaac

SEQ ID NO: 703201 - DNA, 75 bp, synthetic construct
  source 1..75: mol_type = other DNA
ggcattaacggcggcggcgttgttgcagtcgctgccctggctttggcacggcaaagagtcgtggaatgcgctgtt

SEQ ID NO: 703202 - DNA, 75 bp, synthetic construct
  source 1..75: mol_type = other DNA
caggcggtcggtttaacccatttcttcttattgatgatcggtagtttactgacgttactgcccgtggcgctgatc

SEQ ID NO: 703203 - DNA, 75 bp, synthetic construct
  source 1..75: mol_type = other DNA
tttcagtcattggcgtgcatcaggatggcggttttagtgagtatttgagcgtgccggtggcgaacattttgcccg

SEQ ID NO: 703204 - DNA, 75 bp, synthetic construct
  source 1..75: mol_type = other DNA
cgcccggtgtcgcggaatatgtgactatggaggattcgggaatgtctgttgttgcacctgctgtatacgttggaa

SEQ ID NO: 703205 - DNA, 75 bp, synthetic construct
  source 1..75: mol_type = other DNA
ggaataaggacgtcgccgccggctccgcttttacccggccatgcggggcatggccttgtgggttttcaggtatga

SEQ ID NO: 703206 - DNA, 75 bp, synthetic construct
  source 1..75: mol_type = other DNA
atgataaaaaaaaaccttcctgttttaattcttctggcgctgtcggggagtctttcttccgccgtggctgctgat

SEQ ID NO: 703207 - DNA, 75 bp, synthetic construct
  source 1..75: mol_type = other DNA
ctgggcgcggcggcaatcgctaaagccgatggcgcacaggtggtggtggcggataccagtccggcgcgccgtgaa

SEQ ID NO: 703208 - DNA, 75 bp, synthetic construct
  source 1..75: mol_type = other DNA
tgttaacccatcgctacccgttcgccacgctggcagaaacctacgagcgtgatgtgattaacaatcgtgagttga

SEQ ID NO: 703209 - DNA, 75 bp, synthetic construct
  source 1..75: mol_type = other DNA
tggagtattaatgatcgtcatcccggaatgatccgcgtgaatgaaggaggagcacacgtagacgtagaaatctgg

SEQ ID NO: 703210 - DNA, 75 bp, synthetic construct
  source 1..75: mol_type = other DNA
tcgatatttacagtcgcaaaattattgctgctgaggtatttgccagcgaatctggaaaacatgcagcagaactac

SEQ ID NO: 703211 - DNA, 75 bp, synthetic construct
  source 1..75: mol_type = other DNA
gaaaacatgcagcagaactactccagcgggcagtatggaatgaaaaatgttcatccaacaatctggtactccatt

SEQ ID NO: 703212 - DNA, 75 bp, synthetic construct
  source 1..75: mol_type = other DNA
gaaaatggcaactggatttatcggactgacttagagcacgtactacgtgttgcagggattcgaattaaaggagac

SEQ ID NO: 703213 - DNA, 75 bp, synthetic construct
  source 1..75: mol_type = other DNA
ctatgctgtatggtttaaagagatcgataacgtaggcaacgggatcgcacagggcaaagtgaatacaaacagatt

SEQ ID NO: 703214 - DNA, 75 bp, synthetic construct
  source 1..75: mol_type = other DNA
atcccgatttggtcgttgattgcggcaatacggatgaaacctggatctcccaggcacggcaggttagcgaacaga

SEQ ID NO: 703215 - DNA, 75 bp, synthetic construct
  source 1..75: mol_type = other DNA
gctttagttttcacaaccattccgaatgaagataatattcaaccacttaaggtctcaaccaaagcctcggtactg

SEQ ID NO: 703216 - DNA, 75 bp, synthetic construct
  source 1..75: mol_type = other DNA
cttgttgaaggttcgttcagtggtaaatgtatgcaattacactcccggacctttcaggtgaatgccacgaatgaa

SEQ ID NO: 703217 - DNA, 75 bp, synthetic construct
  source 1..75: mol_type = other DNA
ctttcaggtgaatgccacgaatgaagagctaaccgttgagtgtacgatgaatgccgctaaatgccgcaacgatga

SEQ ID NO: 703218 - DNA, 75 bp, synthetic construct
  source 1..75: mol_type = other DNA
cagagtatgagccggcgcggaaactgctgggataacagcccaatggaacgcttcttcaggagtctgaagaacgaa

SEQ ID NO: 703219 - DNA, 75 bp, synthetic construct
  source 1..75: mol_type = other DNA
ctgacttagaacatgcactacgtgttgctggcattcgcatcaaaggagagcgatgtggaaataaaaccagaagat

SEQ ID NO: 703220 - DNA, 75 bp, synthetic construct
  source 1..75: mol_type = other DNA
gcagcgcaacctggcactggcattgtttcagcgcgtcatggcgcactgtcctgaacagtatctgaaaatggccgc

SEQ ID NO: 703221 - DNA, 75 bp, synthetic construct
  source 1..75: mol_type = other DNA
tgtgcggggataatcaaaaacgatacacaccggggtttaccgcgttaacggagcgcggcgttgtcccctcatggt

SEQ ID NO: 703222 - DNA, 75 bp, synthetic construct
  source 1..75: mol_type = other DNA
ttatcgtcaacaatctggtgagatgggaccagtggggatttcatcttatcagtggaatgcaggcagatcgcctgg

SEQ ID NO: 703223 - DNA, 75 bp, synthetic construct
  source 1..75: mol_type = other DNA
cgaagcatgtgatcattactggcggcggttcgaacagcgatctgtttatgcaaatttttgccgacgtgttcaacc

SEQ ID NO: 703224 - DNA, 75 bp, synthetic construct
  source 1..75: mol_type = other DNA
ggcgcattactctttaagtaccgccgcacaatacagtaatagcggcgagtcggttgtgttccgttatgccgcgct

SEQ ID NO: 703225 - DNA, 75 bp, synthetic construct
  source 1..75: mol_type = other DNA
acaacgtttaaacgatacccagtatgaagcccgggttccagtgagcaattcctttgcgcctaacatcacttttag

SEQ ID NO: 703226 - DNA, 75 bp, synthetic construct
  source 1..75: mol_type = other DNA
caccaacagaaatagtgaaatatttttatgacaaaccggaaaacgataacgtaaaagagagaaaaacaattgaga

SEQ ID NO: 703227 - DNA, 75 bp, synthetic construct
  source 1..75: mol_type = other DNA
agtacttcatgatggattacttcaacggcggcgaaatgtgcccgcgcatgaccaaaggtaaagatccctactacg

SEQ ID NO: 703228 - DNA, 75 bp, synthetic construct
  source 1..75: mol_type = other DNA
tacgaagtgatgctgcgtatgggccagtacttcatgatggattacttcaacggcggcgaaatgtgcccgcgcatg

SEQ ID NO: 703229 - DNA, 75 bp, synthetic construct
  source 1..75: mol_type = other DNA
tctcgcagtcactcgcctcagaacattctctggaaagtctggttcggcaacttctggagatgctggaaatggtca

SEQ ID NO: 703230 - DNA, 75 bp, synthetic construct
  source 1..75: mol_type = other DNA
ttccggataattacaaagatacaacaaaccaaaaaataaccaacccatttggggaggaatattctgagatcaagt

SEQ ID NO: 703231 - DNA, 75 bp, synthetic construct
  source 1..75: mol_type = other DNA
aatacgaaaaaggtctatctttgattgaatctgcaatggtgcttgcgcttgctgcaaccgttaccgcaggtgtga

SEQ ID NO: 703232 - DNA, 75 bp, synthetic construct
  source 1..75: mol_type = other DNA
tttacagttattcgccggactgattgcacaatatattcaaaaagaggcgctggttgaacagctgcgcgaagccaa

SEQ ID NO: 703233 - DNA, 75 bp, synthetic construct
  source 1..75: mol_type = other DNA
attaatcaatgatcgtttcggtcataatgctggcgatctgtttcttattcaggttggcgaacgtcttaatacgct

SEQ ID NO: 703234 - DNA, 75 bp, synthetic construct
  source 1..75: mol_type = other DNA
catctgaaacgtaaggcaattattgcttttatcgacctggataacttcaaattaatcaacgaccgatttggccac

SEQ ID NO: 703235 - DNA, 75 bp, synthetic construct
  source 1..75: mol_type = other DNA
gtaccaaaaggcagtgcagccggtgataccctgacactgacggtcaccagaccggacggcacgacggacacagtg

SEQ ID NO: 703236 - DNA, 75 bp, synthetic construct
  source 1..75: mol_type = other DNA
cctaaggaatatctttctgtttatcaggatggcagtaatttaagcttgggtaacgacaacaatattgacacagcc

SEQ ID NO: 703237 - DNA, 75 bp, synthetic construct
  source 1..75: mol_type = other DNA
tgtatgcgggtagttatatctttactgagtctggcgatgatattgttacgatcaaacgtactggtgtaacaaatg

SEQ ID NO: 703238 - DNA, 75 bp, synthetic construct
  source 1..75: mol_type = other DNA
ccgcggcattatctacgaccgtaacggtatccctctggcactcaaccgcactatctaccagatagaaatgatgcc

SEQ ID NO: 703239 - DNA, 75 bp, synthetic construct
  source 1..75: mol_type = other DNA
gagcacatgagtagagaacagcttgaactcatggcctaccttgagcaaagcaacacaaccctgattgatacgggg

SEQ ID NO: 703240 - DNA, 75 bp, synthetic construct
  source 1..75: mol_type = other DNA
atatgttcgagacgatgtacgcagaagaaggtattggcctggcggcaacccaggttgatatccatcaacgtatca

SEQ ID NO: 703241 - DNA, 75 bp, synthetic construct
  source 1..75: mol_type = other DNA
tgaagattttggcctgactccctaccaccaggagcaactggcaggcggaacaccggaagaaaaccgtgacatttt

SEQ ID NO: 703242 - DNA, 75 bp, synthetic construct
  source 1..75: mol_type = other DNA
ggatatttttaattttacagttgaaggtattggagcagatgattatatccttgacagaacaatgcttaggcctag

SEQ ID NO: 703243 - DNA, 75 bp, synthetic construct
  source 1..75: mol_type = other DNA
ttgttaatccatttaaaagagaaggcgaagaacagattactgatttcaatacaagtgttgtcgcatggaatggta

SEQ ID NO: 703244 - DNA, 75 bp, synthetic construct
  source 1..75: mol_type = other DNA
aaaactgatgtgttaccaacagtgagtattagcgttgagacaacatcaacagatgtcaatggtgatggttttact

SEQ ID NO: 703245 - DNA, 75 bp, synthetic construct
  source 1..75: mol_type = other DNA
gatgttttggctttataagcaccacgttacagcgaatcacatcactcttgctgcactggcgctttctcttcttac

SEQ ID NO: 703246 - DNA, 75 bp, synthetic construct
  source 1..75: mol_type = other DNA
cgcctttatcaccggcagcactggcgtgttatctgcccctgaaccgggggcgggcaaagaccggttatgagcagg

SEQ ID NO: 703247 - DNA, 75 bp, synthetic construct
  source 1..75: mol_type = other DNA
agttgcacgctttgccgtcaatcagtaccgttttccgggggtggaagtgaaaggctataaacgccgttactatcc

SEQ ID NO: 703248 - DNA, 75 bp, synthetic construct
  source 1..75: mol_type = other DNA
ctggtcgccgacggaagaattcaccgtttccgcagcgatggaagcgaacgtggtaaataatgcttatggttatac

SEQ ID NO: 703249 - DNA, 75 bp, synthetic construct
  source 1..75: mol_type = other DNA
tgctggaagaacgcctggaagcggcagaaatgcgggcagcaaaagcagaggggcaggtaaaacagctgcagacac

SEQ ID NO: 703250 - DNA, 75 bp, synthetic construct
  source 1..75: mol_type = other DNA
aacaagccgctgagatccgcgaaattaaagctgcccagggcaatacgccggttaatggacaggcaacggcggaat

SEQ ID NO: 703251 - DNA, 75 bp, synthetic construct
  source 1..75: mol_type = other DNA
tgggagtcaggctatgaggacgcatttgtctatgacctgggtgagtaccggctggtccttaagttttcacccggt

SEQ ID NO: 703252 - DNA, 75 bp, synthetic construct
  source 1..75: mol_type = other DNA
tgggcgagtaccggctggtccttaagttttcatccggttttaaccactacaatgttgatagcaaagcgctaatga

SEQ ID NO: 703253 - DNA, 75 bp, synthetic construct
  source 1..75: mol_type = other DNA
caactgaaagcgcccgaggcactggcccgactaaaagggctaaaaaaagatgccactcaggtgagcaaaaacctg

SEQ ID NO: 703254 - DNA, 75 bp, synthetic construct
  source 1..75: mol_type = other DNA
gctgacggtgcgggaagtctgggtacatttacggcaacggcaacaactgttaaagcaactgcgttagatggtatt

SEQ ID NO: 703255 - DNA, 75 bp, synthetic construct
  source 1..75: mol_type = other DNA
gggacggcaatgatactgttaccgtcactgatggtgcatataacacgactatttcactgggggcgggagatgatg

SEQ ID NO: 703256 - DNA, 75 bp, synthetic construct
  source 1..75: mol_type = other DNA
tgaaaactaacctgaccgaagtacaagtggcgcgctttgccgtcaatcagtaccgttttccgggtgttgaagtta

SEQ ID NO: 703257 - DNA, 75 bp, synthetic construct
  source 1..75: mol_type = other DNA
atggacaacttcaagcgtatagtaggtgaacaggcgaaaaagaggatcgaagcgtctcacattttaggggaccaa

SEQ ID NO: 703258 - DNA, 75 bp, synthetic construct
  source 1..75: mol_type = other DNA
gtgaacacggcagcggaggccatccgtgccctgtcgctgcaggtgccgggattcaggcagaaactgtatgaggga

SEQ ID NO: 703259 - DNA, 75 bp, synthetic construct
  source 1..75: mol_type = other DNA
taatggtcattcgtggtaacatgctggctaatacaagagtatatactggtgagggtaacgatacttttactatgg

SEQ ID NO: 703260 - DNA, 75 bp, synthetic construct
  source 1..75: mol_type = other DNA
atagaccaagacggattacttcgtgtcaaactattgtaccgtctcccaagcggactccggatacgctctttcaat

SEQ ID NO: 703261 - DNA, 75 bp, synthetic construct
  source 1..75: mol_type = other DNA
ctgttccatggctgctgccataacccaaccggtatcgaccctacgctggaacaatggcagacactggcacaactc

SEQ ID NO: 703262 - DNA, 75 bp, synthetic construct
  source 1..75: mol_type = other DNA
gacgctgaaaagtaacacaacgttcagcaacagtggtcagactattgcgaacggaaaccttacgctttccgttaa

SEQ ID NO: 703263 - DNA, 75 bp, synthetic construct
  source 1..75: mol_type = other DNA
ataccgcaggccagacgctggataacagacgcggtacgctgaacagcctgcaggaactgactgtcagtaccggag

SEQ ID NO: 703264 - DNA, 75 bp, synthetic construct
  source 1..75: mol_type = other DNA
aaggctgaacagtatctgctcgaaaatgaaaccaccaaaaactacctcggcattgacggcatccctgaatttggt

SEQ ID NO: 703265 - DNA, 75 bp, synthetic construct
  source 1..75: mol_type = other DNA
tgacttcgatgcactgattaacagcctgaacgaagctcaggctggcgacgtagtgctgttccatggctgctgcca

SEQ ID NO: 703266 - DNA, 75 bp, synthetic construct
  source 1..75: mol_type = other DNA
ggtcgcgtaaatgtggccgggatgacaccagataacatggctccgctgtgcgaagcgattgtggcagtgctgtaa

SEQ ID NO: 703267 - DNA, 75 bp, synthetic construct
  source 1..75: mol_type = other DNA
aaacgtcagtgtcagtggcgagcggcatgttacggactcaggcacatccacgtattactatcgtataaaaaagaa

SEQ ID NO: 703268 - DNA, 75 bp, synthetic construct
  source 1..75: mol_type = other DNA
gaaatatgggaactgctcatgcggaagttggtgtgatccagcaggcttttgataaaggaatgactcaaggccgtg

SEQ ID NO: 703269 - DNA, 75 bp, synthetic construct
  source 1..75: mol_type = other DNA
gggcttctattacatcagaaatgacggggactgaactacaaaaagtcattaatgataaattgaagaaaggagagc

SEQ ID NO: 703270 - DNA, 75 bp, synthetic construct
  source 1..75: mol_type = other DNA
tccggcagtgacatgacgctggatgtacagaacgggctactcagtaatcgcaacacgaagacacggggcggtata

SEQ ID NO: 703271 - DNA, 75 bp, synthetic construct
  source 1..75: mol_type = other DNA
gtaacgccggtcatattggtgcgcgggcaggggcggttaccctgacggctgacggacgtattgaaaacagtggca

SEQ ID NO: 703272 - DNA, 75 bp, synthetic construct
  source 1..75: mol_type = other DNA
tcagcattagcgccgtcacagaccggcatgtgcagacgcattcggtggagcagaaaacctccggtctgacgcttg

SEQ ID NO: 703273 - DNA, 75 bp, synthetic construct
  source 1..75: mol_type = other DNA
agccgtcaggcgataaaccggatatcagtgaactgtacgacgatacgaaaactcaggagctggtcagccggatac

SEQ ID NO: 703274 - DNA, 75 bp, synthetic construct
  source 1..75: mol_type = other DNA
atggttgtcggtggaggggcggagattgtggcacccgctatccgcgaagcctgcggagttaatgcgactttcatc

SEQ ID NO: 703275 - DNA, 75 bp, synthetic construct
  source 1..75: mol_type = other DNA
acgggttatgcctgaatccattccggctggctttaaagcactggctgacatgagtccgtttgaatccctgctgat

SEQ ID NO: 703276 - DNA, 75 bp, synthetic construct
  source 1..75: mol_type = other DNA
gggtttttcgggttacggttgtcggtggtggggcggagattgtggcacccactatccgcgaagcctgcggagtta

SEQ ID NO: 703277 - DNA, 75 bp, synthetic construct
  source 1..75: mol_type = other DNA
tggcaggtatcagccaggtgttttgcgatccacacgtaggcgtttccctgatggccgatgcagtactgtcggtga

SEQ ID NO: 703278 - DNA, 75 bp, synthetic construct
  source 1..75: mol_type = other DNA
tggccaccaacggtatgcgtaccagtcaccacatcgctaataccattatcgaacatcgccacgatgaagcctggc

SEQ ID NO: 703279 - DNA, 75 bp, synthetic construct
  source 1..75: mol_type = other DNA
ctgccactgagcgagtatttcgacacaaacgcccagccggatatgaccaacatcaaccgcaaaaaagcgaatgtt

SEQ ID NO: 703280 - DNA, 75 bp, synthetic construct
  source 1..75: mol_type = other DNA
caggagctgatcagccggatacgttcggcgtcccttgagcctgatattgagaaattcctcctgtgtgcggcagaa

SEQ ID NO: 703281 - DNA, 75 bp, synthetic construct
  source 1..75: mol_type = other DNA
cgtcacacggtgtttgatttcagcagaattgcggactattacgctcacgcccccgctgaaattcagcaccttttt

SEQ ID NO: 703282 - DNA, 75 bp, synthetic construct
  source 1..75: mol_type = other DNA
gactaatccggtgctgattgatgaaaagggcgaaattattgctggtcacggtcgcgttatggcggctgaagtgct

SEQ ID NO: 703283 - DNA, 75 bp, synthetic construct
  source 1..75: mol_type = other DNA
tggccactaacggtatgcgcaccagtcaccacatcgccaataccattatcgaacatcgccatgatgaagcctggc

SEQ ID NO: 703284 - DNA, 75 bp, synthetic construct
  source 1..75: mol_type = other DNA
gaatcgcggactattacgctcacgcccccgctgaaattcagagcctttttgaggaatcggctctggtgatcattg

SEQ ID NO: 703285 - DNA, 75 bp, synthetic construct
  source 1..75: mol_type = other DNA
ttttgatgtctccctgacaggcttcggcccgacagaaattgatgaactgttgacggatgttttgcccggtacagg

SEQ ID NO: 703286 - DNA, 75 bp, synthetic construct
  source 1..75: mol_type = other DNA
tttcgtgccagtgcggttggcagccatactacgctgtcacggatcattcgtatggtgcgccaggcccagagcagt

SEQ ID NO: 703287 - DNA, 75 bp, synthetic construct
  source 1..75: mol_type = other DNA
tttacgcacgaaagaacgtcagaaacaacttgtcgctgaaggcaagagccagaccatgaacagccgtcaccttac

SEQ ID NO: 703288 - DNA, 75 bp, synthetic construct
  source 1..75: mol_type = other DNA
aacgtagcgagaaaaatctggctggcgtaaagccacaactggtggcggttgtacgtcgtgcgctggcattgtcag

SEQ ID NO: 703289 - DNA, 75 bp, synthetic construct
  source 1..75: mol_type = other DNA
ccggagcggcaatggcgctctcgtcgatcaccgtagtgagtaacgccaaccggttgctgcggtttaaaccgaaag

SEQ ID NO: 703290 - DNA, 75 bp, synthetic construct
  source 1..75: mol_type = other DNA
accctggcagtgatggttttcgccggcggccatttttaccgtagtgcatggaaaagcctgctgaacggtgcagcg

SEQ ID NO: 703291 - DNA, 75 bp, synthetic construct
  source 1..75: mol_type = other DNA
gtattgcgatgggtggcggcagtgatgttgccattgaaaccgcggcgattaccctgatgcgccatagcctgatgg

SEQ ID NO: 703292 - DNA, 75 bp, synthetic construct
  source 1..75: mol_type = other DNA
tggtaccgcttttcggccccatcgttggcgcaattataggcgcatttgcctatcgcaaactgattggacgccatt

SEQ ID NO: 703293 - DNA, 75 bp, synthetic construct
  source 1..75: mol_type = other DNA
gtcgcagtgaaaaaaatctggagggcgtcaaaccacagctggttgctgtcgttcgccgtgcccttgagctgacgg

SEQ ID NO: 703294 - DNA, 75 bp, synthetic construct
  source 1..75: mol_type = other DNA
cagttggttgcagaaggtaagagccagaccatgaacagccgccacctgaccggtgatgcggtggatgttgtggcc

SEQ ID NO: 703295 - DNA, 75 bp, synthetic construct
  source 1..75: mol_type = other DNA
caggctttcgcagttgagatggtgattaccgctattctgatggggctgatcctggcgttaacggacgatggcaac

SEQ ID NO: 703296 - DNA, 75 bp, synthetic construct
  source 1..75: mol_type = other DNA
taccgcaaactgattggtcgccatttgccttgcgatatctgtgttgtggaagaaaaggagaccacaactccttca

SEQ ID NO: 703297 - DNA, 75 bp, synthetic construct
  source 1..75: mol_type = other DNA
tgatcctggcgttaacggacgatggcaacggtgtaccacgcggccctttggctcccttgctgattggtctactga

SEQ ID NO: 703298 - DNA, 75 bp, synthetic construct
  source 1..75: mol_type = other DNA
atactacgctgtcacggatcattcgcatggtgcgacaggcccagagcagcaagcctgaaatcggccaactggcgg

SEQ ID NO: 703299 - DNA, 75 bp, synthetic construct
  source 1..75: mol_type = other DNA
cctggctgattgccgcgagcatcatcgacctcgacaaccaatggctgcccgatgtttttactcagggcgtattgt

SEQ ID NO: 703300 - DNA, 75 bp, synthetic construct
  source 1..75: mol_type = other DNA
cgacctcgataaccaatggctccccgatgtctttactcagggcgtattgtggacggggctgattgcggcatgggc

SEQ ID NO: 703301 - DNA, 75 bp, synthetic construct
  source 1..75: mol_type = other DNA
aatggcggagtttcacggtgaaatgccgagtgcgcagtcaaaaataagcctggcgctgccacgctcgcactgtcc

SEQ ID NO: 703302 - DNA, 75 bp, synthetic construct
  source 1..75: mol_type = other DNA
atgaagatagagcaggaagtgctcaccacctggcctgccgatgccattgcccgggcggaagacgtggtgttgtgc

SEQ ID NO: 703303 - DNA, 75 bp, synthetic construct
  source 1..75: mol_type = other DNA
cctgctgatgccattgcccgggcggaagatgtggtgttgcgtctgtccgggatgagcgggcctgttcatgtggat

SEQ ID NO: 703304 - DNA, 75 bp, synthetic construct
  source 1..75: mol_type = other DNA
atgctgcggcctgatatatgccgttattacaaaaagaggatcaaccacactgccttttggaccgtgtttaagtct

SEQ ID NO: 703305 - DNA, 75 bp, synthetic construct
  source 1..75: mol_type = other DNA
aaatctgtaaaaattttagtcactgcccccatccagaaaggatctgtgggtattgcatatactgtagtgcaactc

SEQ ID NO: 703306 - DNA, 75 bp, synthetic construct
  source 1..75: mol_type = other DNA
atgaacgagcaaacccatcacgtaccaaaagacatcgagcggcttaaattcatgaatgacatagacggcggagat

SEQ ID NO: 703307 - DNA, 75 bp, synthetic construct
  source 1..75: mol_type = other DNA
agtacgcaatatccgaaacccatatttacgacatcatacgacgcctgagaaagaagcacgccaataaaatcacgc

SEQ ID NO: 703308 - DNA, 75 bp, synthetic construct
  source 1..75: mol_type = other DNA
gcggcctgatatatgccgttattacaaaaagaggatcaaccacgctgccttttggaccgtgtttaagtctgggcg

SEQ ID NO: 703309 - DNA, 75 bp, synthetic construct
  source 1..75: mol_type = other DNA
atgctttttgatgtttttcagcaataccccgtggcgatgcccatactggctaccgtcggaggattaatcatcggt

SEQ ID NO: 703310 - DNA, 75 bp, synthetic construct
  source 1..75: mol_type = other DNA
agcaccgaagtggcgaaaaataacgcgcttactgatgatgatttttctgcgggaaagttttcgacggcgagctga

SEQ ID NO: 703311 - DNA, 75 bp, synthetic construct
  source 1..75: mol_type = other DNA
atgtcgggtaaattcagattcagtcgtcgcagtgaaaaaaatctggagggcgtcaaaccacagctggttgctgtc

SEQ ID NO: 703312 - DNA, 75 bp, synthetic construct
  source 1..75: mol_type = other DNA
gccaaggcgggcattcaggggcttgtttatgctttggcagggtatgacagaacaaaagaagaggtaattcaagca

SEQ ID NO: 703313 - DNA, 75 bp, synthetic construct
  source 1..75: mol_type = other DNA
tttttagatgattttggcattgatgctgaatgttatgtactggatgacgagtcgaaaactgtcgttgttacgaaa

SEQ ID NO: 703314 - DNA, 75 bp, synthetic construct
  source 1..75: mol_type = other DNA
atgaaaatgcccaaaaggcccgcaacagggccggggcgttctcacgcccaaaacaaccagacacccatttcatca

SEQ ID NO: 703315 - DNA, 75 bp, synthetic construct
  source 1..75: mol_type = other DNA
gagagggatgctgtagggctggctctggcaacaggtacagtggcactactccccggtagtgctcaggctatgtgg

SEQ ID NO: 703316 - DNA, 75 bp, synthetic construct
  source 1..75: mol_type = other DNA
accgcatcaatgaaagcagggcttaaaggacttggttatgctattgcaggatatcgacctgaagtacaggaggtt

SEQ ID NO: 703317 - DNA, 75 bp, synthetic construct
  source 1..75: mol_type = other DNA
ccctgaactttatgagcattggtatcgtttgtatggtatagacaaaccagttagagggcgaccatgggcgtttaa

SEQ ID NO: 703318 - DNA, 75 bp, synthetic construct
  source 1..75: mol_type = other DNA
actgattgataaaccctctcttcataccgcaatagatcgttaccgcaatattgtaagagaggcaggaatgaacgg

SEQ ID NO: 703319 - DNA, 75 bp, synthetic construct
  source 1..75: mol_type = other DNA
atattaattgtctttttacctttcacattatatgtaatgtcgtttgagattttgttttttgctattagtgggcga

SEQ ID NO: 703320 - DNA, 75 bp, synthetic construct
  source 1..75: mol_type = other DNA
tacagttacgccgcaagtgccatgaaatatcatattatgaatggttacagttataaggaggcacttgcactgaca

SEQ ID NO: 703321 - DNA, 75 bp, synthetic construct
  source 1..75: mol_type = other DNA
ccagcaaatccagcaacaactggcgcaaaaccatctgacgctggcgctgttcaataccgctcctggggatgttaa

SEQ ID NO: 703322 - DNA, 75 bp, synthetic construct
  source 1..75: mol_type = other DNA
agggttggatcggttgtgaatacaaaccccgcggcctcaccgaagaagggcttggctggtttgacgcctggcgct

SEQ ID NO: 703323 - DNA, 75 bp, synthetic construct
  source 1..75: mol_type = other DNA
gtgtccagacgtgaaaaattattgaaacaggatttggttggtcatatccggaaagacagggggagtttcaagaag

SEQ ID NO: 703324 - DNA, 75 bp, synthetic construct
  source 1..75: mol_type = other DNA
atcctctgtctggtgcaatttcaaatggtatcggttctgctgccgggtatggtatcggtaaaggtgttacttggg

SEQ ID NO: 703325 - DNA, 75 bp, synthetic construct
  source 1..75: mol_type = other DNA
ggtgggcatttaatagccagtatatttaatggtcctggtgaaaaattaaacctgctaccaatggatggaaacctt

SEQ ID NO: 703326 - DNA, 75 bp, synthetic construct
  source 1..75: mol_type = other DNA
tcactttcgggtccatgagcggttcggcgagtgtgaacctcagccgggataaaatgcacagtaactacgacagtg

SEQ ID NO: 703327 - DNA, 75 bp, synthetic construct
  source 1..75: mol_type = other DNA
acagtggttctgtttatgcggggcaggatacgcagatacagagtgatggtgtattcacccatacaggctctgtgg

SEQ ID NO: 703328 - DNA, 75 bp, synthetic construct
  source 1..75: mol_type = other DNA
gcaggcgtttaagcaggctgccgcagagctgggaactgccatcgaatggggcggggactggaaaacactgaaaga

SEQ ID NO: 703329 - DNA, 75 bp, synthetic construct
  source 1..75: mol_type = other DNA
gcgcggtggtgtgcggttgtcagggcagatccagaatgatttgttactgcgggcgactggtggtgtgtgtttgta

SEQ ID NO: 703330 - DNA, 75 bp, synthetic construct
  source 1..75: mol_type = other DNA
atgtcgggtaaattcagattcagccgccgcagtgaaaaaaatctggagggcgtcaaaccacagctggttgctgtc

SEQ ID NO: 703331 - DNA, 75 bp, synthetic construct
  source 1..75: mol_type = other DNA
ggcagacaaactgcttaatgataagagtcaggttgttgcaggcggcctgctgaccattccgtcaggaagcgtgga

SEQ ID NO: 703332 - DNA, 75 bp, synthetic construct
  source 1..75: mol_type = other DNA
cagacaccacacagaaaggcagcacggtggggagtgttcacggtgatgtttcccttcaggcaggtaaccggttga

SEQ ID NO: 703333 - DNA, 75 bp, synthetic construct
  source 1..75: mol_type = other DNA
gagatattggcggttctataggatctgagctaggtggaaaagtaacagataaagtatctgaggaactcaagaaat

SEQ ID NO: 703334 - DNA, 75 bp, synthetic construct
  source 1..75: mol_type = other DNA
cctgaatacgacggtggagaccgtacaggcggcgaaatctgccggaaacagccggcttgaagccctgcagggggt

SEQ ID NO: 703335 - DNA, 75 bp, synthetic construct
  source 1..75: mol_type = other DNA
ggcggtgatgttagttttatccggggttatactttaaacggaactatagatgacaatcatatttcagttaatcaa

SEQ ID NO: 703336 - DNA, 75 bp, synthetic construct
  source 1..75: mol_type = other DNA
gtggccgtcagctggcgttttcgaaccgtgacggcgtggttaaggccgggcagtcagtatctgtggatgccggtc

SEQ ID NO: 703337 - DNA, 75 bp, synthetic construct
  source 1..75: mol_type = other DNA
atgtttccacaatgcaaattttcccgcgagtttctacatcctcgctactggctcacatggtttgggcttggtgta

SEQ ID NO: 703338 - DNA, 75 bp, synthetic construct
  source 1..75: mol_type = other DNA
atgagcagaaagaacctgtggcggtggcggccattgcaccgtctttatccacttccactcagaccagagtcagtg

SEQ ID NO: 703339 - DNA, 75 bp, synthetic construct
  source 1..75: mol_type = other DNA
atggttgaactggcatcacaacccggtgcttgtgtggcccagattgcacgagaaaatggcgtcaaagataatgtt

SEQ ID NO: 703340 - DNA, 75 bp, synthetic construct
  source 1..75: mol_type = other DNA
aatggggctttgccagccaatgatggcaacttatcgtccgcataataatcaattgatggaatgggtgcagacccg

SEQ ID NO: 703341 - DNA, 75 bp, synthetic construct
  source 1..75: mol_type = other DNA
acgtatcggcacgatggccagaccatttctgaaacgtcgcgaatccatcgcccgtaaaaaccttgaactttgctt

SEQ ID NO: 703342 - DNA, 75 bp, synthetic construct
  source 1..75: mol_type = other DNA
aaccggaatggcctggttctggcccgatcatcgcgtacgtaaatggtttgatgttgatggcctggataacctcaa

SEQ ID NO: 703343 - DNA, 75 bp, synthetic construct
  source 1..75: mol_type = other DNA
caatgataatgttattttcaaacggctcagactctggcaaaacgaagggcgtatatcgcgacgtcttccggtaat

SEQ ID NO: 703344 - DNA, 75 bp, synthetic construct
  source 1..75: mol_type = other DNA
atggaattactggactggcgaaaagaacctcgtaaaaagtattcgaatgaattcaaacttcgtatggttgaactg

SEQ ID NO: 703345 - DNA, 75 bp, synthetic construct
  source 1..75: mol_type = other DNA
cctgcaaggtggagttccgtcacggtaacatgatgctggaaaatccttcaccagagctgctcacggtgttgatcc

SEQ ID NO: 703346 - DNA, 75 bp, synthetic construct
  source 1..75: mol_type = other DNA
tcttccggtaacaacctcttctggcgctggcgttgaattattacctgtagagataacgcctgatgagccgaaaga

SEQ ID NO: 703347 - DNA, 75 bp, synthetic construct
  source 1..75: mol_type = other DNA
atggttaaactggcttcacaaccaggagcctctgttgcccgtattgcccgggagcacgatatcaatgataacctg

SEQ ID NO: 703348 - DNA, 75 bp, synthetic construct
  source 1..75: mol_type = other DNA
taacatgacgctggaaaatccatcgccagagctgctcacggtgttgatccgtgaactgagcgggaggggaagatg

SEQ ID NO: 703349 - DNA, 75 bp, synthetic construct
  source 1..75: mol_type = other DNA
attgagaaagagattatgcgtgcgccggagcagtatctctggatccaccgccgctttaaaacccgtcccgtgggc

SEQ ID NO: 703350 - DNA, 75 bp, synthetic construct
  source 1..75: mol_type = other DNA
ttcaggtggtaaacctgttctgagacgcatccttgatgcttacggtttttctatgcaaaaggagctgggtgattt

SEQ ID NO: 703351 - DNA, 75 bp, synthetic construct
  source 1..75: mol_type = other DNA
gaaaagcagtgctgcagcgcatccttgatgcgtatggcttcaccatgcaaaaacaactcggtgacttgcatgagc

SEQ ID NO: 703352 - DNA, 75 bp, synthetic construct
  source 1..75: mol_type = other DNA
catggcaaatggagggagggcggttctgcgtcggattctcgatgcgtatggttttactctgcaaaaagagcttgg

SEQ ID NO: 703353 - DNA, 75 bp, synthetic construct
  source 1..75: mol_type = other DNA
gaagatgcattcgacactatcgactttaccagaggcgggttaagagagaacgacaaagaagttgtttctatgatg

SEQ ID NO: 703354 - DNA, 75 bp, synthetic construct
  source 1..75: mol_type = other DNA
actagccatattcaaaacttcgccaccacagataattttgatgagtttatagagcaaatctacacatcgattgct

SEQ ID NO: 703355 - DNA, 75 bp, synthetic construct
  source 1..75: mol_type = other DNA
gcataataaaatcagcgattatgccggcgtgatttgcgagaacgactgctggattaaggaccagggcacttacaa

SEQ ID NO: 703356 - DNA, 75 bp, synthetic construct
  source 1..75: mol_type = other DNA
ttccatacatcgggtaccgtagacgtctgtctgtcatcattcatacgggttatctcattctatgggctgaatgct

SEQ ID NO: 703357 - DNA, 75 bp, synthetic construct
  source 1..75: mol_type = other DNA
cattcagaatcttactgaaaatgtgccatttgtgggcactggcaatcaatcctgtattcaggggctgtgtcacaa

SEQ ID NO: 703358 - DNA, 75 bp, synthetic construct
  source 1..75: mol_type = other DNA
atgcctcaggggacggaggcgtctgccatcattcatagggtcatctcattctatgggctgaatgctgctcagaat

SEQ ID NO: 703359 - DNA, 75 bp, synthetic construct
  source 1..75: mol_type = other DNA
aatggtttgggaaggggggacaccgccgactttcacgctgccagtaactttcattgctttgtttaacccatatac

SEQ ID NO: 703360 - DNA, 75 bp, synthetic construct
  source 1..75: mol_type = other DNA
ggaaaattgacactgacccggtaaatcctgaaaaccggattcaggtttatgtagagaatgaagacggttctcatg

SEQ ID NO: 703361 - DNA, 75 bp, synthetic construct
  source 1..75: mol_type = other DNA
ggtatcaatgcaggaattaactgtattgccagtattcgccaaacaatccaaaaaagaatatctgcgggaaactat

SEQ ID NO: 703362 - DNA, 75 bp, synthetic construct
  source 1..75: mol_type = other DNA
gacgctcgatatggggttgttacgaaataccgtgttgccggagacgttggatcacgcggtaatcgtgcatgaacc

SEQ ID NO: 703363 - DNA, 75 bp, synthetic construct
  source 1..75: mol_type = other DNA
gggaaatggctctgaagatatcaagagacctattggggcaggttgtgaaccgccccgggtttcctggagagtgtt

SEQ ID NO: 703364 - DNA, 75 bp, synthetic construct
  source 1..75: mol_type = other DNA
cttctcaaaggtaaacgatggtggcagtgcgcttggttcaatcgtgatgaaaataaagtcgtttttatcgtttgt

SEQ ID NO: 703365 - DNA, 75 bp, synthetic construct
  source 1..75: mol_type = other DNA
atcgaccagatggatgtgctcgacattctcctgcaaaacggtgagctaaaacccattaaagactggcctaaggta

SEQ ID NO: 703366 - DNA, 75 bp, synthetic construct
  source 1..75: mol_type = other DNA
atcctgatggcgattttcagcggcctgctgttcctgaccttaccgactgacggacagggcggaagcttcatggcg

SEQ ID NO: 703367 - DNA, 75 bp, synthetic construct
  source 1..75: mol_type = other DNA
cgatcgagaaagatgagatgaaccgggtattcatattcggtaaggttattgggagcatgccgcagacatacagaa

SEQ ID NO: 703368 - DNA, 75 bp, synthetic construct
  source 1..75: mol_type = other DNA
tgtttgggctgtccttcccaccgatattttttgaattgcttttatcactggcgattttctggctggtgcgccggg

SEQ ID NO: 703369 - DNA, 75 bp, synthetic construct
  source 1..75: mol_type = other DNA
cgggcggggtacagcgcaaagacagctaaccgtaccgcatccgaaaacctgtcaaaacctgacatacaattcaga

SEQ ID NO: 703370 - DNA, 75 bp, synthetic construct
  source 1..75: mol_type = other DNA
tggcgaagagataaccgatgagcaggggcgcacgatttacggattcgatgccaagggcgctgcggccgcattgaa

SEQ ID NO: 703371 - DNA, 75 bp, synthetic construct
  source 1..75: mol_type = other DNA
gcctcctttagacgttgtgcagttatctggcgtacatccggggattgagtttagtcaagggccaatagatcttat

SEQ ID NO: 703372 - DNA, 75 bp, synthetic construct
  source 1..75: mol_type = other DNA
atcgctcagtgagttgttcatgactcacccgccgctggataaacgtattgaagctctgcgtacgggtgaatacct

SEQ ID NO: 703373 - DNA, 75 bp, synthetic construct
  source 1..75: mol_type = other DNA
aggcggtaattgctcacgaaatcagccacatcgccaatggtgatatggtcaccatgacgctgattcagggcgtgg

SEQ ID NO: 703374 - DNA, 75 bp, synthetic construct
  source 1..75: mol_type = other DNA
accatgacgctgattcagggcgtggtgaacacctttgttatctttatttcccgtattctggcacaactggccgct

SEQ ID NO: 703375 - DNA, 75 bp, synthetic construct
  source 1..75: mol_type = other DNA
ccggtattctgattattccttgcgtctggctgggttttgccgtgcaggatacctccacgccttatagcgtcttca

SEQ ID NO: 703376 - DNA, 75 bp, synthetic construct
  source 1..75: mol_type = other DNA
ttatccacttccactcagaccagtgtcagtgccggctcctgcaaggtggagttccgtcacggtaacatgacgctg

SEQ ID NO: 703377 - DNA, 75 bp, synthetic construct
  source 1..75: mol_type = other DNA
ctcagactttggcaaaacgaagggcgtatatcgcggcgtcttccggtaacaacctcttctgacactggcgttgaa

SEQ ID NO: 703378 - DNA, 75 bp, synthetic construct
  source 1..75: mol_type = other DNA
gtatgtggctaaaatatggcagtgggctgatgccggttgtattacaacaggggccgcagggatggcagcgcgtaa

SEQ ID NO: 703379 - DNA, 75 bp, synthetic construct
  source 1..75: mol_type = other DNA
gtcgggacagggctgtatgacgatattctcgggctgatgagacgttacaatttgacgcccgtcatcactcaggag

SEQ ID NO: 703380 - DNA, 75 bp, synthetic construct
  source 1..75: mol_type = other DNA
tggcggtcttcgatcgggccgcgttaatgcttatctgcctgttttttctcatccgtatccgcctgtttcgcgaac

SEQ ID NO: 703381 - DNA, 75 bp, synthetic construct
  source 1..75: mol_type = other DNA
ccattacggtaaaatgatgctggaaaatccttcaccagagctgttcacggtgttgatccgtgagctgaccgggag

SEQ ID NO: 703382 - DNA, 75 bp, synthetic construct
  source 1..75: mol_type = other DNA
atggacatagccatcagcggcatagcctgctgaaaatgctcggtgttagcgtaaatcgtgacggtctggcgcagg

SEQ ID NO: 703383 - DNA, 75 bp, synthetic construct
  source 1..75: mol_type = other DNA
cgacgacgcgctgtatgattccctgcgcgaacttctccagcgccagcggatctgcatgattcgccgcgccagcga

SEQ ID NO: 703384 - DNA, 75 bp, synthetic construct
  source 1..75: mol_type = other DNA
cgctggtcatgctgagttcgcaggctctggctggcacagatatctccgtagttgaaaactcgcaaaccacacaga

SEQ ID NO: 703385 - DNA, 75 bp, synthetic construct
  source 1..75: mol_type = other DNA
accgctgacagccgcacagtctgtttccgggacaacccgaccggttcagattgaggcggggacatcggctgagag

SEQ ID NO: 703386 - DNA, 75 bp, synthetic construct
  source 1..75: mol_type = other DNA
atgagactgaaatccctgttactggtgatgctgatacctgtactggtacaggccgcagaccagaacacaaccatg

SEQ ID NO: 703387 - DNA, 75 bp, synthetic construct
  source 1..75: mol_type = other DNA
cacagcatacgcagagcaccacgcagtcgctgcaacagcaggctggccggtgggggctgagtgaggaggactggg

SEQ ID NO: 703388 - DNA, 75 bp, synthetic construct
  source 1..75: mol_type = other DNA
cgacggtggagaccgtacaggcggcgaaatctgccggaaacagccggcttgaagccctgcagggggtgaaggccg

SEQ ID NO: 703389 - DNA, 75 bp, synthetic construct
  source 1..75: mol_type = other DNA
gacaccgcaacagacagcacacagaaaggcagcacggtggggagtgttcacggtgatgtttcccttcaggcaggt

SEQ ID NO: 703390 - DNA, 75 bp, synthetic construct
  source 1..75: mol_type = other DNA
ccggtgcacagaatacccgctcgctggatgaataccataaagtgaccggcagcagcgggatgttatcgaaaacca

SEQ ID NO: 703391 - DNA, 75 bp, synthetic construct
  source 1..75: mol_type = other DNA
ttggtgatattggtggtggctttgtttctgagttaataaactacggtattaaaaattatcctactcctactaata

SEQ ID NO: 703392 - DNA, 75 bp, synthetic construct
  source 1..75: mol_type = other DNA
attgcgtccacggcaacggcagataaaaaccggctggataccggcacactgggcttcagtgatatcgaaaatcgt

SEQ ID NO: 703393 - DNA, 75 bp, synthetic construct
  source 1..75: mol_type = other DNA
cgcaggctggcggtgaaacggtgaaagtggatgccggtcgtcatctgacactgaccagtgagcaggacagtgacc

SEQ ID NO: 703394 - DNA, 75 bp, synthetic construct
  source 1..75: mol_type = other DNA
gtgaaaaccatgaccacagacccggttacgggtgaggtgaataaggctgcaaatgtggctgctcatgctgtggtg

SEQ ID NO: 703395 - DNA, 75 bp, synthetic construct
  source 1..75: mol_type = other DNA
gctgaataacgacaacggactgatttcagctgctgccggaacgggcaggataaaaacacagcagtctgtcagcaa

SEQ ID NO: 703396 - DNA, 75 bp, synthetic construct
  source 1..75: mol_type = other DNA
cagactgagaaaaaagccgctgatgcctcttcgcagccacaggtggcgctggatgtgtccagtcttggtggaatg

SEQ ID NO: 703397 - DNA, 75 bp, synthetic construct
  source 1..75: mol_type = other DNA
gatgcgaatggtgccgccacggggaaagccggtgtactgaataatcacagtgccactattgaagccgccggatat

SEQ ID NO: 703398 - DNA, 75 bp, synthetic construct
  source 1..75: mol_type = other DNA
aacccggtgatgtgaacagtgccggtgcgctgattgccggcagggacatggtgatgaagctggatggtgacctgt

SEQ ID NO: 703399 - DNA, 75 bp, synthetic construct
  source 1..75: mol_type = other DNA
cctgatttacagtgcaggcgatatgcatatcggtggcacgctggatgcgaatggcagcgccacaggtaaagccgg

SEQ ID NO: 703400 - DNA, 75 bp, synthetic construct
  source 1..75: mol_type = other DNA
acagtcaggtaagacgacagttgagaataatttccttggaacaacatcttcagacaagctcgacaaagccgttga

SEQ ID NO: 703401 - DNA, 75 bp, synthetic construct
  source 1..75: mol_type = other DNA
ttggtgagattggtaaccaggtggcagatattgccagaacggaaggacagatagccggtgagaaagcgaagcggg

SEQ ID NO: 703402 - DNA, 75 bp, synthetic construct
  source 1..75: mol_type = other DNA
aatatcacgaaagtgatcgtggatggatatcaggatggtgtaatgattgccggggcatggtatctggggcctgct

SEQ ID NO: 703403 - DNA, 75 bp, synthetic construct
  source 1..75: mol_type = other DNA
tgctgaccattccgtcaggaagcgtggaaaatgtcagtgtcagtggcgagcggcatgttacggactcaggaacat

SEQ ID NO: 703404 - DNA, 75 bp, synthetic construct
  source 1..75: mol_type = other DNA
gggccggtatgctgaataaccagcagggatttatggtgggtcagaaggatatgaccctgaacgccggaacgctcg

SEQ ID NO: 703405 - DNA, 75 bp, synthetic construct
  source 1..75: mol_type = other DNA
cggcctggccggtggtctggtgggagactcgggggcttcagcggtagccggcgcactgtcaggtaagacgactgt

SEQ ID NO: 703406 - DNA, 75 bp, synthetic construct
  source 1..75: mol_type = other DNA
cgtgtattagagcaagcaggtatagtgaatactgccagtaataacagcatgataatggataagttattggactca

SEQ ID NO: 703407 - DNA, 75 bp, synthetic construct
  source 1..75: mol_type = other DNA
atcagtccggtcttattcaggggaaaggcatcagcattaataccgcaggccagacgctggataacagaggcggta

SEQ ID NO: 703408 - DNA, 75 bp, synthetic construct
  source 1..75: mol_type = other DNA
ggctggtatgctgaataaccagcagggatttatggtgggtcagaaggatatgaccctgaacgccggaacgcttga

SEQ ID NO: 703409 - DNA, 75 bp, synthetic construct
  source 1..75: mol_type = other DNA
gcaggtggtgctgcgccgtatattgctgaaattatcaaacagaccaccccggatggtgcgggacgtgtggcagct

SEQ ID NO: 703410 - DNA, 75 bp, synthetic construct
  source 1..75: mol_type = other DNA
accatttgaactggaagcagagggtctgttagccatctgtattcagcatgagatggatcacctggtcgcaaactg

SEQ ID NO: 703411 - DNA, 75 bp, synthetic construct
  source 1..75: mol_type = other DNA
cggcaacccaggttgatatccatcaacgtatcattgttattgatgtttcggaaaaccgtgacgaacggctggtgt

SEQ ID NO: 703412 - DNA, 75 bp, synthetic construct
  source 1..75: mol_type = other DNA
tgacggatgttttgcccggtacaggaaatgaggaggacggcaacagagcttgtggaggactcgcaggccattgcc

SEQ ID NO: 703413 - DNA, 75 bp, synthetic construct
  source 1..75: mol_type = other DNA
acaatgtgcagactcagttgggtggcatggtggccgggaacccgtggctggctaagggagaggccagaatcattc

SEQ ID NO: 703414 - DNA, 75 bp, synthetic construct
  source 1..75: mol_type = other DNA
gcggcctgatatatgccgttattacaaaaaaaggatcaaccacactgccttttggaccgtgtttaagtctgggcg

SEQ ID NO: 703415 - DNA, 75 bp, synthetic construct
  source 1..75: mol_type = other DNA
gcgagatggctctcaggtcgtgaccctcaatcagggaacgcgcttcgaaggcactgcactgctgcgtgatttccg

SEQ ID NO: 703416 - DNA, 75 bp, synthetic construct
  source 1..75: mol_type = other DNA
ttgggtaaactgtataccgaaagtgaaattacggtaatgcatgcctgcggcctgagcaaagcggttctggtgaaa

SEQ ID NO: 703417 - DNA, 75 bp, synthetic construct
  source 1..75: mol_type = other DNA
ttcctcccttctattacatcattgcatgatcccgtcatgacaacacttatgtcaaactacaacaagacagcacca

SEQ ID NO: 703418 - DNA, 75 bp, synthetic construct
  source 1..75: mol_type = other DNA
ctggcttttcatcatctgctgttgcggctgccggtcgtggggcgcatatcgcgcggtctgaataccgcacgttat

SEQ ID NO: 703419 - DNA, 75 bp, synthetic construct
  source 1..75: mol_type = other DNA
gttgttatggtggccgttgctgcgcggcgtgattttgccgctgcgctcgccgcgtgtggcgaagctgtatgcctc

SEQ ID NO: 703420 - DNA, 75 bp, synthetic construct
  source 1..75: mol_type = other DNA
tgaagcactcagccccggcgttaagcctcattatctcttctccagccagtatcaggcactggctattgttgaaga

SEQ ID NO: 703421 - DNA, 75 bp, synthetic construct
  source 1..75: mol_type = other DNA
tggccacggcattccgtggccaaattgtccgcctctgggcgcttcgatatcccggaacccaatccgaagctgctg

SEQ ID NO: 703422 - DNA, 75 bp, synthetic construct
  source 1..75: mol_type = other DNA
tggccactgcattccgtggccaaattgtccgtctctgggcgcttcgatatcccggaactcaatccgaagcagctg

SEQ ID NO: 703423 - DNA, 75 bp, synthetic construct
  source 1..75: mol_type = other DNA
gcggtctgagcaaagcggtgctggtgaaagcggcaatgatccttgcggtgttcacggcaatcgtcgcggcggtta

SEQ ID NO: 703424 - DNA, 75 bp, synthetic construct
  source 1..75: mol_type = other DNA
atcatcattgccctatgtggcactgattgcttcactcagtggcttagtgtatgccgtcattatgagaaaccaatc

SEQ ID NO: 703425 - DNA, 75 bp, synthetic construct
  source 1..75: mol_type = other DNA
ggggggctggcggggtttgtgtctttttatactctccggtggctggccggtgttgtcctgcgcagggaagcgctg

SEQ ID NO: 703426 - DNA, 75 bp, synthetic construct
  source 1..75: mol_type = other DNA
ctcctttatggttcctatcttcggtggtcgtcgctggacggcgttcagcaccggtattctgattattccttgcgt

SEQ ID NO: 703427 - DNA, 75 bp, synthetic construct
  source 1..75: mol_type = other DNA
gtagctctgggtatgaagctgattgtaactcatgttacagtaacggttattgctatctcgaaggtgcaaaatgta

SEQ ID NO: 703428 - DNA, 75 bp, synthetic construct
  source 1..75: mol_type = other DNA
atctatgagcgtttgatgcaggtacaggagacaggtcgtcctcgggtggaaatgggtttcggcgtcggcactatt

SEQ ID NO: 703429 - DNA, 75 bp, synthetic construct
  source 1..75: mol_type = other DNA
caatgtttagcaaaaaaaatcgtaatacctcttcaacgtccggcaacgttgcctacgctttgtttgtgctgtttt

SEQ ID NO: 703430 - DNA, 75 bp, synthetic construct
  source 1..75: mol_type = other DNA
ctgggtatgaagctgtttgtaactcatgttacagtaacagccattactatctcgaaggtgcaaaatgtatattga

SEQ ID NO: 703431 - DNA, 75 bp, synthetic construct
  source 1..75: mol_type = other DNA
atgcgggtgttgcagttttatgtgatacagatagccagtgagcatattgcgccacttcaggatgctgtagacctg

SEQ ID NO: 703432 - DNA, 75 bp, synthetic construct
  source 1..75: mol_type = other DNA
gatggccgacagtcggcgtattattcaggttcatgtcaaaatcccggatgactcaccccagccgaagctggatga

SEQ ID NO: 703433 - DNA, 75 bp, synthetic construct
  source 1..75: mol_type = other DNA
ggcttccattgaagatttcaacgaagcgtttggcacccactttagcgatgaagaggttgacaccatcggtggtct

SEQ ID NO: 703434 - DNA, 75 bp, synthetic construct
  source 1..75: mol_type = other DNA
atcttccgtaaactgacgatggatcgcgtgaaagcagaaggcggttctgacgaacgtgccatgcgtgaagcggca

SEQ ID NO: 703435 - DNA, 75 bp, synthetic construct
  source 1..75: mol_type = other DNA
aggaaacaggtcgcccacgggtggaaattggtttaggtgtcggcaccatttttgggctgatcccgtttttagtag

SEQ ID NO: 703436 - DNA, 75 bp, synthetic construct
  source 1..75: mol_type = other DNA
tgcctcttcaacgcctggcaacattgcctatgcgttgtttgtgctgttttgcttttgggctggggcgcaattgct

SEQ ID NO: 703437 - DNA, 75 bp, synthetic construct
  source 1..75: mol_type = other DNA
gctctcagcgttaccacatggcgatcgtcattgacgaattcggtggggtttccggtctggtgaccattgaagaca

SEQ ID NO: 703438 - DNA, 75 bp, synthetic construct
  source 1..75: mol_type = other DNA
tttaaaaatggtggagggctttaccagttgtctccatcattaaatcaagatatgaggggggatgatgtctacgaa

SEQ ID NO: 703439 - DNA, 75 bp, synthetic construct
  source 1..75: mol_type = other DNA
ctaccttgtcgcggattattcgcatggtgcgccaggcccagagcagtaagccggaaatcggccaactggcggata

SEQ ID NO: 703440 - DNA, 75 bp, synthetic construct
  source 1..75: mol_type = other DNA
cctattccgcagcaaaaaggcgaaggcgatagtgtccatgccgggacggtggtgcaggacggcagcgtgctgttt

SEQ ID NO: 703441 - DNA, 75 bp, synthetic construct
  source 1..75: mol_type = other DNA
gtgtgccgctggctgaagtgcagccaggtatgttgctgcgcctgacgaccggtgatcgtgtgccggtagatggtg

SEQ ID NO: 703442 - DNA, 75 bp, synthetic construct
  source 1..75: mol_type = other DNA
gcgatgcccgtcgcgtgaaaaccatcgccgatcgcatcggctttatctcgattcacagccaggttactgatctac

SEQ ID NO: 703443 - DNA, 75 bp, synthetic construct
  source 1..75: mol_type = other DNA
gtgtttatggcaggcgttggtttaagcgccggtagcggcatcaataacggccttggtgcaattggcggtcaaatg

SEQ ID NO: 703444 - DNA, 75 bp, synthetic construct
  source 1..75: mol_type = other DNA
gatcacggttgcttccttaaccgcgtcatccgcagccagatagagatgccaatcgatgacaacgtggtgcttaat

SEQ ID NO: 703445 - DNA, 75 bp, synthetic construct
  source 1..75: mol_type = other DNA
gcagaagctaccggggggcttggctcaacagctaccagtaaccagttatcttccattgcgcccatgctttataac

SEQ ID NO: 703446 - DNA, 75 bp, synthetic construct
  source 1..75: mol_type = other DNA
tgtatctggcggcggcgaaagtgggcggcattgttgccaacaatacttatccggcagatttcatctaccagaaca

SEQ ID NO: 703447 - DNA, 75 bp, synthetic construct
  source 1..75: mol_type = other DNA
gaaggaattgcccttgctaaagaggctaagaagtataaaggaaagcaaaagaacaaagaattacacagtaaaatc

SEQ ID NO: 703448 - DNA, 75 bp, synthetic construct
  source 1..75: mol_type = other DNA
cgtctggcggcggcactggagcaaggttccagccatccgctggcgcgggcaatcctcgataaagcaggcgatatc

SEQ ID NO: 703449 - DNA, 75 bp, synthetic construct
  source 1..75: mol_type = other DNA
atgaccagcaagtcgatactaaagcgattgaagccgatatttcagctcaggcatcgcaaggagcaacgcctgtgc

SEQ ID NO: 703450 - DNA, 75 bp, synthetic construct
  source 1..75: mol_type = other DNA
gccgaagcgattaaacgtctgcaaagtcagggacgtcaggtggcgatggtgggcgatggcattaacgacgcgcca

SEQ ID NO: 703451 - DNA, 75 bp, synthetic construct
  source 1..75: mol_type = other DNA
tggtgccagtggttatctgcttcttgttcggtgcttatgtattgcgaatgaaccgcgcactgttgttcggcgcaa

SEQ ID NO: 703452 - DNA, 75 bp, synthetic construct
  source 1..75: mol_type = other DNA
aattagagaaagctgtattgcaattgctggctgataaaatctggattgctgaggacaaggctaatccggttccgg

SEQ ID NO: 703453 - DNA, 75 bp, synthetic construct
  source 1..75: mol_type = other DNA
caaagtatgaccttgaactggtaaatgattatcaggatctgggtgtatctgcgtttaagggtgctaactccaaaa

SEQ ID NO: 703454 - DNA, 75 bp, synthetic construct
  source 1..75: mol_type = other DNA
taaccattgaaggtgtgacatatgagttaaaggattattacccacgagtgatggaagatgccgagttctatcaac

SEQ ID NO: 703455 - DNA, 75 bp, synthetic construct
  source 1..75: mol_type = other DNA
tcgattatccgtaggggaataactatcgtaactggcatggatggtaaggtctatagcaaggaatcggttaatgcc

SEQ ID NO: 703456 - DNA, 75 bp, synthetic construct
  source 1..75: mol_type = other DNA
aaaacttgtttgtactggaatacatcgatggcaagacccagagagttgtaatagaaaattcaagaggaccgagga

SEQ ID NO: 703457 - DNA, 75 bp, synthetic construct
  source 1..75: mol_type = other DNA
accctttctgctatgacaggagcaacgaaggagctagccgatcagattactaccctcaatagcgagcgtgaaaca

SEQ ID NO: 703458 - DNA, 75 bp, synthetic construct
  source 1..75: mol_type = other DNA
ttgattgccgggttaattgtcagcctggtgcccgttgttatttgcttcctgtttggcgcttatgtgctgcgcatg

SEQ ID NO: 703459 - DNA, 75 bp, synthetic construct
  source 1..75: mol_type = other DNA
ttccagttcagtacattcagcttcggcatgggtaacgccgccggattgttattcgctggtattatgctgggcttt

SEQ ID NO: 703460 - DNA, 75 bp, synthetic construct
  source 1..75: mol_type = other DNA
tgatgggcgcacgcacctgcgcgccggcaatggagatcatcagtgatacagctcgcagtaacatcccggcgctgg

SEQ ID NO: 703461 - DNA, 75 bp, synthetic construct
  source 1..75: mol_type = other DNA
accatctataaccagattaaggtaatagaagagaacatgtattcagttgattctcaaggctgggagaagctagca

SEQ ID NO: 703462 - DNA, 75 bp, synthetic construct
  source 1..75: mol_type = other DNA
atcgcgtggatggctccgattatcgcgattatcgctatcaccaaatccttcctcggtcactacctgggcgcacgt

SEQ ID NO: 703463 - DNA, 75 bp, synthetic construct
  source 1..75: mol_type = other DNA
ctgatgctgctggctctgtacctgatcccgcagtggaacggcgcagcactggaaacgctgtctctggacactgca

SEQ ID NO: 703464 - DNA, 75 bp, synthetic construct
  source 1..75: mol_type = other DNA
atgtgattgcggcagggctacagtgtttcgcgtgaagaaagaaatgcttgccagtactggctgtattgagaactg

SEQ ID NO: 703465 - DNA, 75 bp, synthetic construct
  source 1..75: mol_type = other DNA
aaatggtaatgacggcgcggttcaactcaaaacaggtgctgttaacggggctaaagcgcaggcgctcactatcaa

SEQ ID NO: 703466 - DNA, 75 bp, synthetic construct
  source 1..75: mol_type = other DNA
ggcccgcaatggacacgccacgctcgcaaaaatgaagtggaccgtcttgaccaatggaatagcgaaacatggtta

SEQ ID NO: 703467 - DNA, 75 bp, synthetic construct
  source 1..75: mol_type = other DNA
taactcaaccgttgatttaacccttacaaagcaatcagggactggcaatcgttttgttttacagaactcaggtaa

SEQ ID NO: 703468 - DNA, 75 bp, synthetic construct
  source 1..75: mol_type = other DNA
ttccggtctatttgttggttcagatacaaaatcattgtattcgtacatttacagccaaagttctggcccgcaatg

SEQ ID NO: 703469 - DNA, 75 bp, synthetic construct
  source 1..75: mol_type = other DNA
cgtgaaacagatggtcgcgttaccgcgctggaagaagaaaacgcagaattaaaacaaagattatctgcaattgag

SEQ ID NO: 703470 - DNA, 75 bp, synthetic construct
  source 1..75: mol_type = other DNA
ttgattaaagaagctacccgacaagacgtcgcggtaacggtgctggaaacagaaacgggtcgctattctgacacg

SEQ ID NO: 703471 - DNA, 75 bp, synthetic construct
  source 1..75: mol_type = other DNA
cgaaagctggtgcggcactattcagtggatttgtccgagtccgtatcggcctcatcatgggtgcaaaaactggtt

SEQ ID NO: 703472 - DNA, 75 bp, synthetic construct
  source 1..75: mol_type = other DNA
gatcgctacgattctcacttattgccaggtgggcaaaaacgcggtttgttgattggcatgggaatgacggaaaag

SEQ ID NO: 703473 - DNA, 75 bp, synthetic construct
  source 1..75: mol_type = other DNA
gggtattgttggtactaacatcggtttgggatcatcaccgcgtggttgctctgacatctcaggaaatccatcagg

SEQ ID NO: 703474 - DNA, 75 bp, synthetic construct
  source 1..75: mol_type = other DNA
agccggaagcatggtacgcactgcatctgctgcttccggccacgctgaagaaatggatcaatacacgacaaaaag

SEQ ID NO: 703475 - DNA, 75 bp, synthetic construct
  source 1..75: mol_type = other DNA
acactgagatgattaactggtactttcctcggttacttaagatttatgagggcgaaaaaattattttgataattt

SEQ ID NO: 703476 - DNA, 75 bp, synthetic construct
  source 1..75: mol_type = other DNA
cggtacgagatataaaccggttattacaacgtttatcgacctcacacgaacaacggtggtttaccgccttgctta

SEQ ID NO: 703477 - DNA, 75 bp, synthetic construct
  source 1..75: mol_type = other DNA
gtggttatcgtcggcggtggcggtcagatggggcgcttgttcgagaagatgctgaccctctcgggttatcaggtg

SEQ ID NO: 703478 - DNA, 75 bp, synthetic construct
  source 1..75: mol_type = other DNA
gcctatttatgttccggagcgcgaggcatcgatgctggcctcgcggcgcgctgaggcggaagccctcggcgtgcc

SEQ ID NO: 703479 - DNA, 75 bp, synthetic construct
  source 1..75: mol_type = other DNA
tcggtgaaaaatggaccattacaggccatgctggcggcgcatgatggtccggtgctggggctacacccgatgttc

SEQ ID NO: 703480 - DNA, 75 bp, synthetic construct
  source 1..75: mol_type = other DNA
taaaggcgccagcgggcgaatttacctgggcatgattcagcaataccaggcgctcaccgacgcggccgcacaacc

SEQ ID NO: 703481 - DNA, 75 bp, synthetic construct
  source 1..75: mol_type = other DNA
tacagcaaccctgcttaccaggcgacgttgaccaacaagaacaccgaagatttgatgcgtgagcaaatcaatatc

SEQ ID NO: 703482 - DNA, 75 bp, synthetic construct
  source 1..75: mol_type = other DNA
ggtccggacagcggtagcctggcaaagcaagttgtggtctggtgtgatggacgtaagccggaagcataccaatgg

SEQ ID NO: 703483 - DNA, 75 bp, synthetic construct
  source 1..75: mol_type = other DNA
cctgtaaatccacatcagaaccagttccttgcccccttacggcgtggccagccacaaaattccttaaacgatcag

SEQ ID NO: 703484 - DNA, 75 bp, synthetic construct
  source 1..75: mol_type = other DNA
tggcatgcgtcgacgcagaccacgcgaacgggcatgcgccacatgaatggcgaaatcaaaacgggaagtgaagcc

SEQ ID NO: 703485 - DNA, 75 bp, synthetic construct
  source 1..75: mol_type = other DNA
agcccaccgccttttccatcagtttttcgcagaacttcagcgttccggcacctttacggggtgtaaacaccggat

SEQ ID NO: 703486 - DNA, 75 bp, synthetic construct
  source 1..75: mol_type = other DNA
ttcggcgattacgcacagcgttttcagagtgaaagccgcgtgttattgcgtcaggcgaatgacaatcgccagtaa

SEQ ID NO: 703487 - DNA, 75 bp, synthetic construct
  source 1..75: mol_type = other DNA
gtagtcattgttggtggcggcggtcagatggggcgcttgttcgagaagatgcttacgctgtctggctatcaggtg

SEQ ID NO: 703488 - DNA, 75 bp, synthetic construct
  source 1..75: mol_type = other DNA
cctattcatgtgaccgaacaggtcatcgccaaattaccacgtttaccgcaagactgtattctggtcgatctggca

SEQ ID NO: 703489 - DNA, 75 bp, synthetic construct
  source 1..75: mol_type = other DNA
tgcgaagcgaatccgtctaccgaccgtgaaaaaatcatggtgcttggcggcggcccgaaccgtatcggtcagggt

SEQ ID NO: 703490 - DNA, 75 bp, synthetic construct
  source 1..75: mol_type = other DNA
accgctggttcctggtacaaattgaagagctggtgcgcctggaagagaaagtcgcagaagtgggcatcactggcc

SEQ ID NO: 703491 - DNA, 75 bp, synthetic construct
  source 1..75: mol_type = other DNA
tgaacgctgaattcctgcgccagctgaaacgcaaaggctttgccgatgcgcgcttggcaaaactggcgggcgtac

SEQ ID NO: 703492 - DNA, 75 bp, synthetic construct
  source 1..75: mol_type = other DNA
caccctgaacggtggtttcgctaccgcgatggcgctgaatgccgatgcgactgaaaaagtaatttcggtgcagga

SEQ ID NO: 703493 - DNA, 75 bp, synthetic construct
  source 1..75: mol_type = other DNA
gctacccgctggtggtgcgtccgtcttacgttctcggcggtcgggcgatggaaatcgtctatgacgaagctgacc

SEQ ID NO: 703494 - DNA, 75 bp, synthetic construct
  source 1..75: mol_type = other DNA
tcaatggaagaagcactggcggttgctgctgacgtgggcttcccgtgcatcattcgccccagcttcactatgggc

SEQ ID NO: 703495 - DNA, 75 bp, synthetic construct
  source 1..75: mol_type = other DNA
cttcgagccggtaaccctggaagatgtgctggaaatcgtgcgtattgagaagccgaaaggcgttatcgttcagta

SEQ ID NO: 703496 - DNA, 75 bp, synthetic construct
  source 1..75: mol_type = other DNA
gcggttgccgctgaagttggcttcccgtgcattattcgcccatcctttaccatgggcggtagcggcggcggtatc

SEQ ID NO: 703497 - DNA, 75 bp, synthetic construct
  source 1..75: mol_type = other DNA
cgcttccagcacgcggttgaccgtctgaaactgaagcaaccggcgaacgccaccgttactgctattgagatggca

SEQ ID NO: 703498 - DNA, 75 bp, synthetic construct
  source 1..75: mol_type = other DNA
cccggaagccctgacaaaaatccgccgcgaactgaaagatgccggcgcagagcgtatctggtacatcgcagatgc

SEQ ID NO: 703499 - DNA, 75 bp, synthetic construct
  source 1..75: mol_type = other DNA
cgaccagtacaacctgcacccggtctacaaacgcgttgatacctgtgccgcagaatttgcgactgatactgcgta

SEQ ID NO: 703500 - DNA, 75 bp, synthetic construct
  source 1..75: mol_type = other DNA
cgcccgcggtctggatctctccccaaccaaagagttgctgattgatgagtcgctgatcggctggaaagagtacga

SEQ ID NO: 703501 - DNA, 75 bp, synthetic construct
  source 1..75: mol_type = other DNA
taaactttggcttgatgattaaccgcatcgtgcagcgggtgattttcgttactggctactacggcctgacgcagg

SEQ ID NO: 703502 - DNA, 75 bp, synthetic construct
  source 1..75: mol_type = other DNA
gcatgacgccgaagacgtaatttcaccgatggaattgcgtctgttcaactatctggtcgagcgtaaagatctgat

SEQ ID NO: 703503 - DNA, 75 bp, synthetic construct
  source 1..75: mol_type = other DNA
ccacaccggtgactctattactgtagcgccagcgcaaacactgaccgacaaagaataccaaatcatgcgtaacgc

SEQ ID NO: 703504 - DNA, 75 bp, synthetic construct
  source 1..75: mol_type = other DNA
atgattttggtgacctgctgcgccgtgaaggctgccgtggattttttattcacaccggtcgtacgggacctgcca

SEQ ID NO: 703505 - DNA, 75 bp, synthetic construct
  source 1..75: mol_type = other DNA
cgcaactgtcgtcgctgccggagggcggtgcaggcgtgaaatacctgcgaaaaattaacccgtatgtgtttgaag

SEQ ID NO: 703506 - DNA, 75 bp, synthetic construct
  source 1..75: mol_type = other DNA
ccccgataccttttcgactgcggttcgacaaaaatctcgctggatcatcggcattgttttccagggctttaaaac

SEQ ID NO: 703507 - DNA, 75 bp, synthetic construct
  source 1..75: mol_type = other DNA
atgccaaaacgtacagatataaaaagtatcctgattctgggtgcgggcccgattgttatcggccaggcgtgtgag

SEQ ID NO: 703508 - DNA, 75 bp, synthetic construct
  source 1..75: mol_type = other DNA
gcgaagcggaaatccgtaagctgcgtgaccaatatgacctgcacccggtctacaagtgcgtggatacctgtgcgg

SEQ ID NO: 703509 - DNA, 75 bp, synthetic construct
  source 1..75: mol_type = other DNA
tctgaccactcagatgaaatcggttggcgaagtgatggcgattggtcgcacgcagcaggaatccctgcaaaaagc

SEQ ID NO: 703510 - DNA, 75 bp, synthetic construct
  source 1..75: mol_type = other DNA
ctgctggaccacttcctcgatgacgcggtagaagtcgatgtggatgccatctgcgacggcgaaatggtgctgatt

SEQ ID NO: 703511 - DNA, 75 bp, synthetic construct
  source 1..75: mol_type = other DNA
acgcctcgctggcgctgcgtgaagacggttatgaaaccatcatggttaactgtaacccggaaaccgtttccaccg

SEQ ID NO: 703512 - DNA, 75 bp, synthetic construct
  source 1..75: mol_type = other DNA
gagcaggcgggcgtgcactccggtgactccgcatgttctctgccagcctacaccttaagtcaggaaattcaggat

SEQ ID NO: 703513 - DNA, 75 bp, synthetic construct
  source 1..75: mol_type = other DNA
cgtaacccctcatacagcggcgatggtggtcttgatggtcaggtggtgattaacggtgaacgctggctgatacag

SEQ ID NO: 703514 - DNA, 75 bp, synthetic construct
  source 1..75: mol_type = other DNA
gaaaagggaaaccgcagatgcgctgaagcgtcttcgcgatgccgggtttattactctggatttacgtacggtgga

SEQ ID NO: 703515 - DNA, 75 bp, synthetic construct
  source 1..75: mol_type = other DNA
gggatatcgcaagcgttttcagggagacaaactgcaaagaagctaccaggcgtttgctgagcagtttggtttcgg

SEQ ID NO: 703516 - DNA, 75 bp, synthetic construct
  source 1..75: mol_type = other DNA
cgtacacccgatacggtgccgggttcgttcaggcgcattgcgagcttctggaattcgacgggggaacgccaattg

SEQ ID NO: 703517 - DNA, 75 bp, synthetic construct
  source 1..75: mol_type = other DNA
cagagattactacagagattacaacggagactaaaaacactattgatgcatccgctgacgcgtctgcgccagcgc

SEQ ID NO: 703518 - DNA, 75 bp, synthetic construct
  source 1..75: mol_type = other DNA
cgtttgctgagcagtttggtttcgggaaaagggaaaccgcagatgcgctgaagcgtctgcgcgatgcagggttta

SEQ ID NO: 703519 - DNA, 75 bp, synthetic construct
  source 1..75: mol_type = other DNA
gtgcgagttcgttcaaaccgaccggaatattctccggagtttgagcaggcatggctggcatatcccaaacgtgct

SEQ ID NO: 703520 - DNA, 75 bp, synthetic construct
  source 1..75: mol_type = other DNA
tacatttcctataataaatcttctttaaataacctggtgttctcccgatttattgaccgcctaaatgagagtttt

SEQ ID NO: 703521 - DNA, 75 bp, synthetic construct
  source 1..75: mol_type = other DNA
gaaaatcactttttatcgccgttgaaagcagccttaaacaggatgggcctattgcaagtccaataaattcaggta

SEQ ID NO: 703522 - DNA, 75 bp, synthetic construct
  source 1..75: mol_type = other DNA
atcagccctgacggtaaaccgtacaaccggacaaaatttttatgggacggaatgcggctggcgcaggagaacagg

SEQ ID NO: 703523 - DNA, 75 bp, synthetic construct
  source 1..75: mol_type = other DNA
aatgcaggctacccaatcactgaaaccctgagcggcagcggcgacctgggccaggttctggtcgatgcaatcaag

SEQ ID NO: 703524 - DNA, 75 bp, synthetic construct
  source 1..75: mol_type = other DNA
ttcttcttgatcccgacttcatggacaccagtctggtttgtcaccggcaggttcagacggtagatgaggacaatt

SEQ ID NO: 703525 - DNA, 75 bp, synthetic construct
  source 1..75: mol_type = other DNA
tcacgaaaaacacagctcaggatatcccgttctctggcgtggtgacggttgaccgttctctggaagccagacgaa

SEQ ID NO: 703526 - DNA, 75 bp, synthetic construct
  source 1..75: mol_type = other DNA
ttactggcaacagccagccgctcacggaggtgggcgacagcgacaggtcgatgtcctggctggcctgggagccat

SEQ ID NO: 703527 - DNA, 75 bp, synthetic construct
  source 1..75: mol_type = other DNA
caggtagtgcaggagttgcactagggggtagtgcaggagattcacccagaaccagtcactcttttgaaccagtca

SEQ ID NO: 703528 - DNA, 75 bp, synthetic construct
  source 1..75: mol_type = other DNA
cacaggcaattgcggccatcaccacaccttcttctgtttcgccagaaagtaacagcaataatgcaatcagcgata

SEQ ID NO: 703529 - DNA, 75 bp, synthetic construct
  source 1..75: mol_type = other DNA
cgctgaccagtaccgccctgaatctgaacaagggagcaaatgctctggccagtcagagttttgtttctgacggtc

SEQ ID NO: 703530 - DNA, 75 bp, synthetic construct
  source 1..75: mol_type = other DNA
ctaatatctaaatcagcaggaattgatgaaattcaagtagacatagacgaacgatttatgaaccgtaaaatttcg

SEQ ID NO: 703531 - DNA, 75 bp, synthetic construct
  source 1..75: mol_type = other DNA
aaaccggagaccatgcttgatggtgtgagacgttatgccgcctgggtacgtgctacaggaaataccggcacacag

SEQ ID NO: 703532 - DNA, 75 bp, synthetic construct
  source 1..75: mol_type = other DNA
cgtgaggacccgtacttcaaagccagttacgacaacgtggactacagccagatcccggcaggattcagggggtga

SEQ ID NO: 703533 - DNA, 75 bp, synthetic construct
  source 1..75: mol_type = other DNA
acagaacttccgcagccattcactgtatgcaggtgcagaagtcggataccgttatcatctgacagatacgacgtt

SEQ ID NO: 703534 - DNA, 75 bp, synthetic construct
  source 1..75: mol_type = other DNA
aacattaattaacccgcaatatatagccagtgtaaaacataataaaggatatcagagcgtcagcttcggtgatgg

SEQ ID NO: 703535 - DNA, 75 bp, synthetic construct
  source 1..75: mol_type = other DNA
atgtaagctcaaatcccggcgttgcaacattaattaacccgcaatatatagccagtgtaaaacataataaaggat

SEQ ID NO: 703536 - DNA, 75 bp, synthetic construct
  source 1..75: mol_type = other DNA
tgctttacggtgtggggtacttaaatagacgtcaaaagactaaaaggggcattaatatactgattataagaggtt

SEQ ID NO: 703537 - DNA, 75 bp, synthetic construct
  source 1..75: mol_type = other DNA
aatggaaatttgacagcagcaccggcactggctctctgaaacagggttccgatgaatatgccatgcacgggcaaa

SEQ ID NO: 703538 - DNA, 75 bp, synthetic construct
  source 1..75: mol_type = other DNA
gtcattatatatttacaataacccatattcgcataccgtcgattattttatcctgaaaacaaacagttatggctg

SEQ ID NO: 703539 - DNA, 75 bp, synthetic construct
  source 1..75: mol_type = other DNA
gggggatggcagtattgcgctgggcagcagaacttttgctaaaggcgaattgtcagtatcgcttggttcggtgag

SEQ ID NO: 703540 - DNA, 75 bp, synthetic construct
  source 1..75: mol_type = other DNA
aatttacagcaaaagatgaattaaaagggattaattttgaccatgggtctcctattgctaaagggcgtaatgcta

SEQ ID NO: 703541 - DNA, 75 bp, synthetic construct
  source 1..75: mol_type = other DNA
cagcctctatcagtagctgtaggggcaatatcaagttcaacggggatggcgtcaacatctgttggtgccacttct

SEQ ID NO: 703542 - DNA, 75 bp, synthetic construct
  source 1..75: mol_type = other DNA
ggcttcttaaaacgctaaataaattcattgatcattccaaagactttacactggtagccgatgattttagtaaaa

SEQ ID NO: 703543 - DNA, 75 bp, synthetic construct
  source 1..75: mol_type = other DNA
atccaaagatatgctggctgagtttatctatcaatacagtggaaaaactaatgattcacgagtcgagaaatctaa

SEQ ID NO: 703544 - DNA, 75 bp, synthetic construct
  source 1..75: mol_type = other DNA
acactaattcagtttagaggtgctattgggagaacatatcatcggttatatgaacaggttcttcctctaaaagat

SEQ ID NO: 703545 - DNA, 75 bp, synthetic construct
  source 1..75: mol_type = other DNA
atgcctgatataaccccaaatgttgtaattgggatgccatcgcaactcttcacaatggctagctcttttaaaacc

SEQ ID NO: 703546 - DNA, 75 bp, synthetic construct
  source 1..75: mol_type = other DNA
cattccagcgaagaaggtgtgaacgcattgagtctcgtttaacagagcttgaattgataattaaaaaagcaaaag

SEQ ID NO: 703547 - DNA, 75 bp, synthetic construct
  source 1..75: mol_type = other DNA
gtaagagatgcgtttcttgcaaaggggatagatggaacaagatttggcttgctatgtcatgataaatgggatgat

SEQ ID NO: 703548 - DNA, 75 bp, synthetic construct
  source 1..75: mol_type = other DNA
ttattggtggtgatgacctgaaaatattacatggacataaatatggagaaaaagttattcctgatgactattccc

SEQ ID NO: 703549 - DNA, 75 bp, synthetic construct
  source 1..75: mol_type = other DNA
aaacctccgtgatttggccagcgcggtttttggtacaggtgggcagataacaacagttaatgataaaggcatcac

SEQ ID NO: 703550 - DNA, 75 bp, synthetic construct
  source 1..75: mol_type = other DNA
tgagcgttgggagcaataatactcccggcagcatcaaagttaacggggctgatggtaaggaggctgtgagtctga

SEQ ID NO: 703551 - DNA, 75 bp, synthetic construct
  source 1..75: mol_type = other DNA
ccgccagtccttgtgagttatgtgcaaaaaaagcatatcaactaggtataaaggaaattatttatatagatccat

SEQ ID NO: 703552 - DNA, 75 bp, synthetic construct
  source 1..75: mol_type = other DNA
gagcgtctggaagatggctcttatcggctgggggggcataaatggtttttctcggtgccgcaaagcgatgcgcat

SEQ ID NO: 703553 - DNA, 75 bp, synthetic construct
  source 1..75: mol_type = other DNA
aatacaggccagactttccagatcctgatattaaatcatgcccaaataaatgggcatcacgcaagatttacaaat

SEQ ID NO: 703554 - DNA, 75 bp, synthetic construct
  source 1..75: mol_type = other DNA
gtgaattgcatctcaatccggcgttacctgagcagtggcaacagttgtctttccctctgttctggcagggctgcg

SEQ ID NO: 703555 - DNA, 75 bp, synthetic construct
  source 1..75: mol_type = other DNA
cactgagggggatgtttcgacaagcccgtcggtggtgttcaacagcacatcaggaaatgtggaagtacaggaagg

SEQ ID NO: 703556 - DNA, 75 bp, synthetic construct
  source 1..75: mol_type = other DNA
ggcgagagaaaatcatccgggctactcttgaagccgtaaaactgtacggtatacatgctgttacgcatcgcaaaa

SEQ ID NO: 703557 - DNA, 75 bp, synthetic construct
  source 1..75: mol_type = other DNA
cctatgcacaaattggcgtcgaaagcgctgtgatgagcgccagccaacaacaactggtcaccatgttatttgacg

SEQ ID NO: 703558 - DNA, 75 bp, synthetic construct
  source 1..75: mol_type = other DNA
ttatgcaagttgcgtatacggtaaaattaaactctggttgtatatctagacaggtgggagctgtagtaactgatg

SEQ ID NO: 703559 - DNA, 75 bp, synthetic construct
  source 1..75: mol_type = other DNA
gctgtagtaactgatggtgataattcaataaaatcagttggttggaatgatgttgccaacggtcagattccttgc

SEQ ID NO: 703560 - DNA, 75 bp, synthetic construct
  source 1..75: mol_type = other DNA
tgaagttagttagaaaatttactaaagaattcaaagctgaactaaatgagataaactcaaatttatatgtttcag

SEQ ID NO: 703561 - DNA, 75 bp, synthetic construct
  source 1..75: mol_type = other DNA
gactcgtcattaagtaaagcaatccacggcattgttgccgcacgttgtggcctgttggcgcagggatatcacttc

SEQ ID NO: 703562 - DNA, 75 bp, synthetic construct
  source 1..75: mol_type = other DNA
tgttgaagataaaatatcttaaggtgataaaaaatcttcttaatcatgatgatgagattgactttaaaggcaggg

SEQ ID NO: 703563 - DNA, 75 bp, synthetic construct
  source 1..75: mol_type = other DNA
ggtaaaggagatggcgagtataatcatcttactaatcctaatgtaaaaaaatgcattgaaatttcagatatacat

SEQ ID NO: 703564 - DNA, 75 bp, synthetic construct
  source 1..75: mol_type = other DNA
atttgcatcagtacacacttgatggtgtttatcttggggtgcagcaaatacaggcaggtgcaggaagagcctatg

SEQ ID NO: 703565 - DNA, 75 bp, synthetic construct
  source 1..75: mol_type = other DNA
cgcctggttactgacgaaggtgaaaaaagcgtgccgctggcggaagtgcagccaggtatgttgctgcgcctgacg

SEQ ID NO: 703566 - DNA, 75 bp, synthetic construct
  source 1..75: mol_type = other DNA
ttctcatctattacagacagcaatttttatttatcattatcctataatcttctatcggcttatgaagcaaaaatg

SEQ ID NO: 703567 - DNA, 75 bp, synthetic construct
  source 1..75: mol_type = other DNA
gtactgcaggatatctcggaggcgttccagttcttcgattcgcaaaatgcccgggggcgcgatctggctcctcac

SEQ ID NO: 703568 - DNA, 75 bp, synthetic construct
  source 1..75: mol_type = other DNA
tattcttggcattctttttattttcaacaaaactccaagcaaaagattgtgttgttgatatcttttttcaaaaaa

SEQ ID NO: 703569 - DNA, 75 bp, synthetic construct
  source 1..75: mol_type = other DNA
acgatggatacgctggtggcgctgggaacgggtgtggcgtggctctattcgatgagcgtcaacctgtggccgcag

SEQ ID NO: 703570 - DNA, 75 bp, synthetic construct
  source 1..75: mol_type = other DNA
acgatggatacgctggtggcgctgggtactggcgtggcgtggctctattcgatgagcgttaacctgtggccgcag

SEQ ID NO: 703571 - DNA, 75 bp, synthetic construct
  source 1..75: mol_type = other DNA
actcaaatccagccagtgatatggccggtgctctatcgacaaccaaagcgcgacattaccccgctttaccctcta

SEQ ID NO: 703572 - DNA, 75 bp, synthetic construct
  source 1..75: mol_type = other DNA
ctacaaaatagccgacggcggcggtttgtatctcgaggtttcagccaaaggttctaaatactggcgcatgaaata

SEQ ID NO: 703573 - DNA, 75 bp, synthetic construct
  source 1..75: mol_type = other DNA
gtccgcgctgcgtatattcatacttctgagcatttggatgagcgtcgcttaatggtgcagtggtgggccgattat

SEQ ID NO: 703574 - DNA, 75 bp, synthetic construct
  source 1..75: mol_type = other DNA
caaaagacacaagcgatgcatatatctcaaatccacaatgagtatattagagagtctattaaactagatatatta

SEQ ID NO: 703575 - DNA, 75 bp, synthetic construct
  source 1..75: mol_type = other DNA
cttgcttttggtgtatatccaaccattagcttacaagacgccagagaaaaacgagacaacgccaaaaagttgtta

SEQ ID NO: 703576 - DNA, 75 bp, synthetic construct
  source 1..75: mol_type = other DNA
gccgcttccctgaattccttgctcgtcttgcggcataccgtggccgtgtaatgacacggattgcagttgagctat

SEQ ID NO: 703577 - DNA, 75 bp, synthetic construct
  source 1..75: mol_type = other DNA
attctctgttattgatactccgtcattcagcagtgttcagctgaacggtaatggaaaaaacggaaatgtaacgct

SEQ ID NO: 703578 - DNA, 75 bp, synthetic construct
  source 1..75: mol_type = other DNA
aagcggtgaagggaattacctgcatcgatcttagccgcgtgtcccgcgtcgataccggtggactggcgctgctgc

SEQ ID NO: 703579 - DNA, 75 bp, synthetic construct
  source 1..75: mol_type = other DNA
gcattttttcggcctgacggcgacggaagtcagttcccggcgacgcctggtcggtgttgtgacccggcaggggcg

SEQ ID NO: 703580 - DNA, 75 bp, synthetic construct
  source 1..75: mol_type = other DNA
cttctgaccttccgcatcaaccataccaacctgaacaccatgctggcgcaggcccgtcgtgagcagacccggaca

SEQ ID NO: 703581 - DNA, 75 bp, synthetic construct
  source 1..75: mol_type = other DNA
tgacgatgctgcttttgagagccttgaagaatctcatacagggaaagtaattgatctgcagggtagaacttttca

SEQ ID NO: 703582 - DNA, 75 bp, synthetic construct
  source 1..75: mol_type = other DNA
gcgttggctaatggtgcttttgggcgtaaagatactgcagttgcattctttgaagaagcattgaagcataacaac

SEQ ID NO: 703583 - DNA, 75 bp, synthetic construct
  source 1..75: mol_type = other DNA
ctaccgctttgggaaatgcgtgaggaagcggtgaaggggattacctgcatcgatcttagccgtgtgtcccgcgtg

SEQ ID NO: 703584 - DNA, 75 bp, synthetic construct
  source 1..75: mol_type = other DNA
taatgcggcaaatattggtgacctgaaaaatgctctccgggataacagtgctgcactggtgaatgctggctttgg

SEQ ID NO: 703585 - DNA, 75 bp, synthetic construct
  source 1..75: mol_type = other DNA
gaaaggggaacgtgtccatcggttctggctcactggataagcaagcgcaaaaagtaatggaagccaaggtcagaa

SEQ ID NO: 703586 - DNA, 75 bp, synthetic construct
  source 1..75: mol_type = other DNA
tatccgtggtgttggcgcatcggctgcggccatgagcgggatacctcaggcctatctgccgggtaaaagtctgat

SEQ ID NO: 703587 - DNA, 75 bp, synthetic construct
  source 1..75: mol_type = other DNA
tgcactgaaagaccagggaaataatgaggtcagacaggtgtcaggcagtgccatccagatcaccggtgatgacaa

SEQ ID NO: 703588 - DNA, 75 bp, synthetic construct
  source 1..75: mol_type = other DNA
tttccactaatggaaatgcaagtaacggggaagttgcagtaaaccaaggtgatgagaataaactagttactgcta

SEQ ID NO: 703589 - DNA, 75 bp, synthetic construct
  source 1..75: mol_type = other DNA
aatacggggacatatgccctgaacggtcagcctgttgcgggacgtaccggaaatgatacagctgtggtttctttt

SEQ ID NO: 703590 - DNA, 75 bp, synthetic construct
  source 1..75: mol_type = other DNA
atcaacacgggttgtgggattcagtgatgtcacccccacccttagtgtcagaaaagaggacgggaaaaaagagtg

SEQ ID NO: 703591 - DNA, 75 bp, synthetic construct
  source 1..75: mol_type = other DNA
aatcagtcagtgctgaatatcaatgatatattcaatggcggaatacaggcgaacaacagtaccgtgaatatctcc

SEQ ID NO: 703592 - DNA, 75 bp, synthetic construct
  source 1..75: mol_type = other DNA
accggaaccgacgttcgcaccgcaaaactgtacggcggtggagctgatggcgaaaacgctgcgtgaaagtgcgga

SEQ ID NO: 703593 - DNA, 75 bp, synthetic construct
  source 1..75: mol_type = other DNA
tggaagttgaacgctctgcatttggtaaatacaacacagatgatgcgataaacgctaatattcgttattcattct

SEQ ID NO: 703594 - DNA, 75 bp, synthetic construct
  source 1..75: mol_type = other DNA
gaagactgcagggccaaacatttaactggaacgacagtggaatggatgtctcaatgcgtcgtaacagcgttaatc

SEQ ID NO: 703595 - DNA, 75 bp, synthetic construct
  source 1..75: mol_type = other DNA
tggtcagcgcacctgaagcgacagctgataatctgttcagggcatcaacacgggttgtgggattcagtgatgtca

SEQ ID NO: 703596 - DNA, 75 bp, synthetic construct
  source 1..75: mol_type = other DNA
ggtaacggtgccgcagcggtcattgattcatgccagggatatgatatcaaagcgagctgtcaggccagcaggcaa

SEQ ID NO: 703597 - DNA, 75 bp, synthetic construct
  source 1..75: mol_type = other DNA
agcactatcagtgacgatgcggtgaagcaacggggtgaaataaaagtgggaataacgggcaatatcagtcagcga

SEQ ID NO: 703598 - DNA, 75 bp, synthetic construct
  source 1..75: mol_type = other DNA
gtagatacgcaatggggcgggttgatggcggatagtaccgggcaacaactggatagcgtaagcacgttgactaaa

SEQ ID NO: 703599 - DNA, 75 bp, synthetic construct
  source 1..75: mol_type = other DNA
tcataaagcacaaatccacgttgaagacaccgagcgtttccgcgcgattggtaacccggtaatgactccaactta

SEQ ID NO: 703600 - DNA, 75 bp, synthetic construct
  source 1..75: mol_type = other DNA
tatcataaagacgaaaaatggggctttgtcggcgcaccgctgcatgacccatgcaccatcgcctggctgttgaaa

SEQ ID NO: 703601 - DNA, 75 bp, synthetic construct
  source 1..75: mol_type = other DNA
caaaatgaaacagggatgaccctgttttctaataactcgattagtggcgaatataataatggcggagctatcttt

SEQ ID NO: 703602 - DNA, 75 bp, synthetic construct
  source 1..75: mol_type = other DNA
atggtgcacaactttacgcagttcgtgttggtgcgtatcggtatggggattggtgaagcgccgatgaacccatgc

SEQ ID NO: 703603 - DNA, 75 bp, synthetic construct
  source 1..75: mol_type = other DNA
agccccgcaggagcgcgacccgcagcttaaggacaaaatcacccgcgagctggcggtcatcgtgcgtcacctgat

SEQ ID NO: 703604 - DNA, 75 bp, synthetic construct
  source 1..75: mol_type = other DNA
gcactattcagtggatttgtctgagtccgtatcggcctcatcatgggcgcaaaaactggtttctgggcattgggc

SEQ ID NO: 703605 - DNA, 75 bp, synthetic construct
  source 1..75: mol_type = other DNA
acgcctcgcgcggtggtgaatgcggtaaaacgcgccgggttgtacgcccaaacgttaccagaacaactttctcaa

SEQ ID NO: 703606 - DNA, 75 bp, synthetic construct
  source 1..75: mol_type = other DNA
aactggccgtgatgttggttatatcggtcatcttgcttttcttggtcaacaaagttccgccgatgatttctggtc

SEQ ID NO: 703607 - DNA, 75 bp, synthetic construct
  source 1..75: mol_type = other DNA
gatcttcaccggctttttctggtggttgctgacgaatgcgaaccagggcatgaatatcgccggtacgattgttca

SEQ ID NO: 703608 - DNA, 75 bp, synthetic construct
  source 1..75: mol_type = other DNA
tagcaatattgaaagaagagttaatcggctgtgggttcacgcaggtgatgatccgtgccgtagttgaagtgtcga

SEQ ID NO: 703609 - DNA, 75 bp, synthetic construct
  source 1..75: mol_type = other DNA
tccattatgagacgctgcgttcgtcggggccgggcggtcaacatgtcaataaaaccgactcggcggtacgcgcca

SEQ ID NO: 703610 - DNA, 75 bp, synthetic construct
  source 1..75: mol_type = other DNA
atcatctgcggttgcgtcaccgcggcgggtgcactggcatacatcttcctggtccgtcagccgatcaacgaccca

SEQ ID NO: 703611 - DNA, 75 bp, synthetic construct
  source 1..75: mol_type = other DNA
atcatctgcggttgcgtcaccgcagcggggggcactggcgtacatcttcctggttcgtcagccgatcaacgaccc

SEQ ID NO: 703612 - DNA, 75 bp, synthetic construct
  source 1..75: mol_type = other DNA
cgaccagttcaccggcgcgaccattacgcctcgcgcggtggtgaatgcggtaaaacgcgccgggttgtacgccca

SEQ ID NO: 703613 - DNA, 75 bp, synthetic construct
  source 1..75: mol_type = other DNA
cgaccagttcaccggcgcgacgattactccccgcgcggtggttaatgcggtaaaacgcgccggattgtacgctca

SEQ ID NO: 703614 - DNA, 75 bp, synthetic construct
  source 1..75: mol_type = other DNA
gtgtatgcgattacgctgaaccgatgcccgatagtggattatcgttggtgtgtactccgggcaatgacgtggacg

SEQ ID NO: 703615 - DNA, 75 bp, synthetic construct
  source 1..75: mol_type = other DNA
gcaggtgatttatcagggcgtgcagcaggatgattttaccgccgctaaccatgcgcgcgtgtcacaatcgcaggg

SEQ ID NO: 703616 - DNA, 75 bp, synthetic construct
  source 1..75: mol_type = other DNA
caaacaaatccaggggagccttttaatttcgcaactgattacaatatttatgcagctggaaaagattctaaaaaa

SEQ ID NO: 703617 - DNA, 75 bp, synthetic construct
  source 1..75: mol_type = other DNA
tagaagaaaataatcttgaaagaagagctaatttaaatgaaatgcttacactgaatcgccacgggtttaacagac

SEQ ID NO: 703618 - DNA, 75 bp, synthetic construct
  source 1..75: mol_type = other DNA
aaaattgagtattttgtccccaaagaacgtaaaatcccactcgcaaaaaaaatagcgcaaatgagtgatgatgac

SEQ ID NO: 703619 - DNA, 75 bp, synthetic construct
  source 1..75: mol_type = other DNA
acgcgaagctgaccatcgatggtgaggtgctctatgaagtggaccttatcaacatggtggaaattgtggacggtg

SEQ ID NO: 703620 - DNA, 75 bp, synthetic construct
  source 1..75: mol_type = other DNA
gtggaaaaccggagaaagtagcgccaccaaagtcagcagcaccaacagttacgcgaagctgagcattaacggcga

SEQ ID NO: 703621 - DNA, 75 bp, synthetic construct
  source 1..75: mol_type = other DNA
ctgaccctgccgaaattcacccgcaagtttgagaagtatcgcggcggcggtatgccgggcgcggtggatgtggac

SEQ ID NO: 703622 - DNA, 75 bp, synthetic construct
  source 1..75: mol_type = other DNA
ggggtggtgaacgatgccctgagcggcattaatcagaaaatcgatggagtagtcacgcgcatggactcactggaa

SEQ ID NO: 703623 - DNA, 75 bp, synthetic construct
  source 1..75: mol_type = other DNA
aatatcagggcgatccgaacgtctggctaagtgctttcaaaattccggggcgtcgtctggcaaaaattaacactc

SEQ ID NO: 703624 - DNA, 75 bp, synthetic construct
  source 1..75: mol_type = other DNA
aacgcgccagcaccgttttctggtgaaaatgcgctggactaccgcaagcgtgcgctaatcgctatgcagaaacac

SEQ ID NO: 703625 - DNA, 75 bp, synthetic construct
  source 1..75: mol_type = other DNA
ctacacattctcctgcattttataatctctcaaaacaagatagatctgttaattgcatttttattgagaaagact

SEQ ID NO: 703626 - DNA, 75 bp, synthetic construct
  source 1..75: mol_type = other DNA
tatacgtagaaggtgccagtgataagattataattgaaaaggcaattaaagttttcatgcctgacagagtgaacg

SEQ ID NO: 703627 - DNA, 75 bp, synthetic construct
  source 1..75: mol_type = other DNA
aaattccagctcgttcaaatataagacagttacttaataatgtaaaatatgtttatattcctgcaattaaggata

SEQ ID NO: 703628 - DNA, 75 bp, synthetic construct
  source 1..75: mol_type = other DNA
aatgccgggtgcagtggatgtggaactgggactggatgacagtgcactggacacagaattttccattggtggtac

SEQ ID NO: 703629 - DNA, 75 bp, synthetic construct
  source 1..75: mol_type = other DNA
agaactggcagtggtcgaatccttcccaacgaagatcgaaggccgccagatgatcatggtgctcgctcctaagaa

SEQ ID NO: 703630 - DNA, 75 bp, synthetic construct
  source 1..75: mol_type = other DNA
aattaaaatcgtagcgcctggcggtctggatgtagttactccactggccgacttctcggcgaaagttacaattca

SEQ ID NO: 703631 - DNA, 75 bp, synthetic construct
  source 1..75: mol_type = other DNA
gatgcgttctgtatcgtcgggccccagtcacaggcgcagaaaatcagcggaatcagcacgggggccgctcaactg

SEQ ID NO: 703632 - DNA, 75 bp, synthetic construct
  source 1..75: mol_type = other DNA
atgcggattatttttctacgcaaggagtatttatctttactcccgtcaatgattgcatctcttttctctgttaac

SEQ ID NO: 703633 - DNA, 75 bp, synthetic construct
  source 1..75: mol_type = other DNA
aacaactggatagcgtaagcacgttgactaaaagtggcggcggtacgctggagttgaccgccagcggcactgcga

SEQ ID NO: 703634 - DNA, 75 bp, synthetic construct
  source 1..75: mol_type = other DNA
tgttgacactcgctcggctacaacaggtcagggcaggaatattgaaatgcgcgctgatggcgaaatacacgttga

SEQ ID NO: 703635 - DNA, 75 bp, synthetic construct
  source 1..75: mol_type = other DNA
acctgaacctgtttaacgacgggaacaactggatggggattgttgagtcaatcaccttgccaaagtattcacgca

SEQ ID NO: 703636 - DNA, 75 bp, synthetic construct
  source 1..75: mol_type = other DNA
ctggggctggatgacggcgcactggatacagaattttccattggcggtactgagctgctgctgtttaagcagatg

SEQ ID NO: 703637 - DNA, 75 bp, synthetic construct
  source 1..75: mol_type = other DNA
acgcgaagctgactatcaatggtgaggtgctctatgaggtggaccttatcaacatggtggaaattgtggacggcg

SEQ ID NO: 703638 - DNA, 75 bp, synthetic construct
  source 1..75: mol_type = other DNA
ggatgagtgtcttgtcgtttttgccgatcgttgtattgatttctggtggcagagcggcggaatacaggaaccggt

SEQ ID NO: 703639 - DNA, 75 bp, synthetic construct
  source 1..75: mol_type = other DNA
aaggggaaggaattcgtctgatcctgaaaatgggggggatgacgcgttttgattgcgccctgggtagccatgcca

SEQ ID NO: 703640 - DNA, 75 bp, synthetic construct
  source 1..75: mol_type = other DNA
gatcgttgtattgatttctggtggcagaacggcgggatacaggagcctgttgatgacagaatgcatgatttatcg

SEQ ID NO: 703641 - DNA, 75 bp, synthetic construct
  source 1..75: mol_type = other DNA
tcgtaagcagccttttactcgctgggtgatggcaatgggaataccgctaacccgggcggcgcttaatgccagtga

SEQ ID NO: 703642 - DNA, 75 bp, synthetic construct
  source 1..75: mol_type = other DNA
gaaaaactctgagttacaggccgttctcggtgtcggtaaagactcagctgatatggtggcgctccgcaaacaggc

SEQ ID NO: 703643 - DNA, 75 bp, synthetic construct
  source 1..75: mol_type = other DNA
atctgtcgaatgatgaaagccgcctgaaaaactctatcaatgaaactaccgcacaacttaaccgccagcatgaag

SEQ ID NO: 703644 - DNA, 75 bp, synthetic construct
  source 1..75: mol_type = other DNA
cgctatttgttaaagatgactgcccgccctgcgacagcctgctgcgtaccctgctggcgcaacagcgtccgctgg

SEQ ID NO: 703645 - DNA, 75 bp, synthetic construct
  source 1..75: mol_type = other DNA
ctcggcactggtcagaaagctgaatatgtgaaaaccatattcggcgaggaggctatgaaatccgcaagtgtgctg

SEQ ID NO: 703646 - DNA, 75 bp, synthetic construct
  source 1..75: mol_type = other DNA
tgttgctaaaaatgccggggtgagtcttgaacaagcggcggcgataaccggcacacttcacgataataacattag

SEQ ID NO: 703647 - DNA, 75 bp, synthetic construct
  source 1..75: mol_type = other DNA
acaaaagccgcctttcagctttctaatgacgcggctgtacatatcggtgatgttctttcaacaacgatgaacaaa

SEQ ID NO: 703648 - DNA, 75 bp, synthetic construct
  source 1..75: mol_type = other DNA
agaaatatgctggcagcttttcaaatgcgccttcaaaaactgaccgaattttactcagaatacgttgacccaata

SEQ ID NO: 703649 - DNA, 75 bp, synthetic construct
  source 1..75: mol_type = other DNA
agtaaagattccgcagccaaaattgcagaagcgacaaatgtttccctttcctggctactgacaggaaaagaagat

SEQ ID NO: 703650 - DNA, 75 bp, synthetic construct
  source 1..75: mol_type = other DNA
tcctgaccaatgtggcagtgaccccagccattgttgatggagtatttggtgcggatggtaagcactcggcagaag

SEQ ID NO: 703651 - DNA, 75 bp, synthetic construct
  source 1..75: mol_type = other DNA
acgcctcggcggcggaaagctgccgctattgctggaacaacagggggagcaatggcgtcccgtctctgcgccctg

SEQ ID NO: 703652 - DNA, 75 bp, synthetic construct
  source 1..75: mol_type = other DNA
atatgttcgagacgatgtacgcagaaaaagtattggcctggcggcaacccaggttgatatccatcaacgtatcat

SEQ ID NO: 703653 - DNA, 75 bp, synthetic construct
  source 1..75: mol_type = other DNA
ttggctactgacaggaaaagaagatacaaatagagaggcgcttgatgatgatgagaaagccctgcttgatgttta

SEQ ID NO: 703654 - DNA, 75 bp, synthetic construct
  source 1..75: mol_type = other DNA
gatggcgaccagagctatgcgcgtctgggttttaaaggcgaaacccaaattaacgatcaacttactggctacggt

SEQ ID NO: 703655 - DNA, 75 bp, synthetic construct
  source 1..75: mol_type = other DNA
ttaaatacaacagcctcaccgagtcggttaaacgccagcaacgcgagctgggtgccgccggtatcaatacccgca

SEQ ID NO: 703656 - DNA, 75 bp, synthetic construct
  source 1..75: mol_type = other DNA
cctggccggttatcaccggcatcaatgccatcatcgctgcagcaggcgcaatgggggcaattttcacgacggttg

SEQ ID NO: 703657 - DNA, 75 bp, synthetic construct
  source 1..75: mol_type = other DNA
taattcctgccctgctcggcgcaggtgctgcacatgcagccgaagtttataataaagacggcaacaaattagatc

SEQ ID NO: 703658 - DNA, 75 bp, synthetic construct
  source 1..75: mol_type = other DNA
gccgctcggtgcattcttctcgggcgtggtggagggactgaaagccgcctttgcaccggtgggggacatgtttac

SEQ ID NO: 703659 - DNA, 75 bp, synthetic construct
  source 1..75: mol_type = other DNA
agccagttcggcggcggcagtgctcatgactgccgcctcaaccggcaaacttgaccagctaacctccaccctgaa

SEQ ID NO: 703660 - DNA, 75 bp, synthetic construct
  source 1..75: mol_type = other DNA
cgttctgtcgacggtgatgaataaaactgctgccgatttcgacgggctgagcgatgcgctgacatacgccgcgcc

SEQ ID NO: 703661 - DNA, 75 bp, synthetic construct
  source 1..75: mol_type = other DNA
cgcagattattatcgccaaagggggcggcgatgcggcagccattcaggcgacgacaccggtcaccctcaatatgg

SEQ ID NO: 703662 - DNA, 75 bp, synthetic construct
  source 1..75: mol_type = other DNA
atattcgcgaaacacaaaaagggctgcgtgacctgaatggtcaggcgtcaaaaatcgacggctttcgtaaggcca

SEQ ID NO: 703663 - DNA, 75 bp, synthetic construct
  source 1..75: mol_type = other DNA
tatcaggcttatcagcctgtcacggctcccgctggtcgtacctatattgaccagagcagcccaacctatcaaatc

SEQ ID NO: 703664 - DNA, 75 bp, synthetic construct
  source 1..75: mol_type = other DNA
tatcaaaaaagaatccagcgacctcgaccagaccgcagcgaaagcgaataaagcgtccccgaatggcgggtatat

SEQ ID NO: 703665 - DNA, 75 bp, synthetic construct
  source 1..75: mol_type = other DNA
atcgaagaaacagccgcaatggtcggcgcactgcatgacgccaaaattacgggatcgatggcgggtacggggagc

SEQ ID NO: 703666 - DNA, 75 bp, synthetic construct
  source 1..75: mol_type = other DNA
gaaaaattccgagctgcaggccgtgctcggggtcgataagcagtcgccagaaatggaagcgctacgcaaacaggc

SEQ ID NO: 703667 - DNA, 75 bp, synthetic construct
  source 1..75: mol_type = other DNA
aacctggaaaccgcaacaacggctgaagttacaggtgctggcgtagtcaatgcagccaatgtcggcgcgaaagct

SEQ ID NO: 703668 - DNA, 75 bp, synthetic construct
  source 1..75: mol_type = other DNA
atcgctgacatgcagcagcgtcagcgtgatgttgctgcactcgatgcaaagtactcgagagaattagccaatgcg

SEQ ID NO: 703669 - DNA, 75 bp, synthetic construct
  source 1..75: mol_type = other DNA
agtgagctgaaactggcgaacgcaaccattactgatatgcagcagcgccagcgagatgtcgctgcgcttgatgcc

SEQ ID NO: 703670 - DNA, 75 bp, synthetic construct
  source 1..75: mol_type = other DNA
gattatttcaccctcagagagcgactgataataatgcaaaaacaacttgaaggggcacagctatacattcgagag

SEQ ID NO: 703671 - DNA, 75 bp, synthetic construct
  source 1..75: mol_type = other DNA
gcatggatgacaccgcggtattcgttaccgttgttggccagaaaaaagccaaaccaggtcaggacttcttcccac

SEQ ID NO: 703672 - DNA, 75 bp, synthetic construct
  source 1..75: mol_type = other DNA
ggtagagaggtcaccaactggcaaattttgttatttggcttaacaggtggtcttatcccctgcccggcagcaatt

SEQ ID NO: 703673 - DNA, 75 bp, synthetic construct
  source 1..75: mol_type = other DNA
gagcacgagcatgatcatgagcatcatcaccatcacgaacatggcgagtatcaggatgcccatgcacgagcccat

SEQ ID NO: 703674 - DNA, 75 bp, synthetic construct
  source 1..75: mol_type = other DNA
gatcatgcaggttgcgctgaatcaagctaaaggtgcgcgtctgcatatcctgggcgtcatggagcaggcgatcaa

SEQ ID NO: 703675 - DNA, 75 bp, synthetic construct
  source 1..75: mol_type = other DNA
gttgtactgtctgacattctgggtgacgaagaccatctgggcgatatggacttcaaagttgcgggttcccgcgac

SEQ ID NO: 703676 - DNA, 75 bp, synthetic construct
  source 1..75: mol_type = other DNA
tattccgttcaatggtccgattggtgctgcccgcgtaggttacatcaatgaccagtacgtactgaacccgactca

SEQ ID NO: 703677 - DNA, 75 bp, synthetic construct
  source 1..75: mol_type = other DNA
aaaaattcaccaatgtttatactgattatgaacacctaaatttttggagtactacacccagagagttattgataa

SEQ ID NO: 703678 - DNA, 75 bp, synthetic construct
  source 1..75: mol_type = other DNA
gggtgattcagtatgaagctgtgaatagtcagacgttccgacttctggaactgaacccgtttgaattgtgggtga

SEQ ID NO: 703679 - DNA, 75 bp, synthetic construct
  source 1..75: mol_type = other DNA
ttattgcgttgctggtggcctgcggtgcgttgtggcaggccaccagccattaccgtagtaacgccattacctaca

SEQ ID NO: 703680 - DNA, 75 bp, synthetic construct
  source 1..75: mol_type = other DNA
cgccagaaccagcggcgtcttgcctatgcatcagatgtttaccggatttacagcgggataaaaaacagcaagggg

SEQ ID NO: 703681 - DNA, 75 bp, synthetic construct
  source 1..75: mol_type = other DNA
ttaaaaacacagattcatcaaaaacccttcaggttactgttatgcctgaggtttcaagcaggttaggtattgagg

SEQ ID NO: 703682 - DNA, 75 bp, synthetic construct
  source 1..75: mol_type = other DNA
tcaaaaacacaaaagtaatagggtgtacatcagttgctcctgattctgtaaatgccggtcattttcaacatatag

SEQ ID NO: 703683 - DNA, 75 bp, synthetic construct
  source 1..75: mol_type = other DNA
tattgtcctgctggtagcctgtggtgtgcttagtctggggctgaatcattaccgcgataacgccatcacctacaa

SEQ ID NO: 703684 - DNA, 75 bp, synthetic construct
  source 1..75: mol_type = other DNA
agcgcagcgcgataaaaaagtcagagagctggaacaggcgaatgccaccataactgacatgcaggtgcgccagcg

SEQ ID NO: 703685 - DNA, 75 bp, synthetic construct
  source 1..75: mol_type = other DNA
acgaccggagccagcagcatgggcgatggagaaagcccaggacttacagcagatgctgaactcaattattaccgt

SEQ ID NO: 703686 - DNA, 75 bp, synthetic construct
  source 1..75: mol_type = other DNA
ttattaccgtctccgaagtggaatcgacaggataaccgcgcaggttgactacctgcaggaatacatcaggactca

SEQ ID NO: 703687 - DNA, 75 bp, synthetic construct
  source 1..75: mol_type = other DNA
ccgctctggttatctgcatcgtcgtctgtctgtcgtgggcggttaatcattaccgtgataatgcaatcgcctaca

SEQ ID NO: 703688 - DNA, 75 bp, synthetic construct
  source 1..75: mol_type = other DNA
tacggctatggcgatactcattattctggatgccaaatcggcataaagacaaacctttaggtgagcgactacgac

SEQ ID NO: 703689 - DNA, 75 bp, synthetic construct
  source 1..75: mol_type = other DNA
aaaaaatgccagaactgcctgaactggtttacgacagtttgcgccagggcaagtatttacagcacagtgttgata

SEQ ID NO: 703690 - DNA, 75 bp, synthetic construct
  source 1..75: mol_type = other DNA
aatccgctaacgcaatccagttgcggcgcaattttgaaaacagcccgatgctctacattccggaagtttaccctg

SEQ ID NO: 703691 - DNA, 75 bp, synthetic construct
  source 1..75: mol_type = other DNA
taacacaagtagccaaaaccctggtcgaaaccctaatcgaaggccaactgaccgagcggcaattgatcgaagccc

SEQ ID NO: 703692 - DNA, 75 bp, synthetic construct
  source 1..75: mol_type = other DNA
tggataaaagcttagaaaataagcttgctgattatttgctcaatgcgaggctggcttatcgttatgccaaatttt

SEQ ID NO: 703693 - DNA, 75 bp, synthetic construct
  source 1..75: mol_type = other DNA
aatatcggttttgatgattttattggtttagatactggtgttagccaagacgtatatcaggatgcgactaagtat

SEQ ID NO: 703694 - DNA, 75 bp, synthetic construct
  source 1..75: mol_type = other DNA
atgcgcctgctccctctcgttgccgcagcgactgcggcatttctggtcgttgcctgtagttctcccacaccgccg

SEQ ID NO: 703695 - DNA, 75 bp, synthetic construct
  source 1..75: mol_type = other DNA
ctggtatgagattgcccgttttgatcaccgctttgaacgtggactggaaaaagtcaccgcaacatacagcctgcg

SEQ ID NO: 703696 - DNA, 75 bp, synthetic construct
  source 1..75: mol_type = other DNA
cggtggtgcactggcactgactggtgtcatcggtgccattggcctcgtagcctggccggttatcaccggcatcaa

SEQ ID NO: 703697 - DNA, 75 bp, synthetic construct
  source 1..75: mol_type = other DNA
tgttaaatctgtttaatacggcgcgtcgcttcaatatggaagtgcagccgcaactggtgttactccagaaaaccc

SEQ ID NO: 703698 - DNA, 75 bp, synthetic construct
  source 1..75: mol_type = other DNA
ctggatgccgaatcggcataaagataaaccattaggcgagcggctacgactggcgctgcaagaactgggtcctgt

SEQ ID NO: 703699 - DNA, 75 bp, synthetic construct
  source 1..75: mol_type = other DNA
tcatgtacgtcagggacaatcgcgttattttctcggaattggcgctacgttagtattaagcggcacattcttgtt

SEQ ID NO: 703700 - DNA, 75 bp, synthetic construct
  source 1..75: mol_type = other DNA
tcaagcgattttaagtaaactgagcgctgagggttatgccatagaaggcgccacaccgctatttagcgatgtgga

SEQ ID NO: 703701 - DNA, 75 bp, synthetic construct
  source 1..75: mol_type = other DNA
ttatcattatagttgtagttatatctatgtatttttacaactttaatactggaaaagggttatctaaaagtactg

SEQ ID NO: 703702 - DNA, 75 bp, synthetic construct
  source 1..75: mol_type = other DNA
ccctatattgaattacgctggttagaccgtaacgtcgaaccgtatcaccgcgagcaaaaccagattcgtattggc

SEQ ID NO: 703703 - DNA, 75 bp, synthetic construct
  source 1..75: mol_type = other DNA
atgaaaaatattaatgcaataattttattatcttctctgacctctgcctcggtattcgctggcgcatacgtcgaa

SEQ ID NO: 703704 - DNA, 75 bp, synthetic construct
  source 1..75: mol_type = other DNA
aattaccgcattgcgttacggaagtatcaacactatcagcgtcaaacgtgtaccggacttgtgcagaaatcctcc

SEQ ID NO: 703705 - DNA, 75 bp, synthetic construct
  source 1..75: mol_type = other DNA
ttttttgagagttttaaccagagggtttttgaggaagctgtaggacggaaggttgaatttgttcaggataaccat

SEQ ID NO: 703706 - DNA, 75 bp, synthetic construct
  source 1..75: mol_type = other DNA
taatctctgtaaaagagattacaaaaaattcgcctttgtggtcacactatctggcgcgatatgttgattccggat

SEQ ID NO: 703707 - DNA, 75 bp, synthetic construct
  source 1..75: mol_type = other DNA
cgctgagcgactgcgcgctgtcgctgtcggagaaagatctgcaggcacatactctggccactgcagaagtttata

SEQ ID NO: 703708 - DNA, 75 bp, synthetic construct
  source 1..75: mol_type = other DNA
agaacggagcatcatctggaacgatccggagatcgggattgactggccggcgctgagcgattgcgcgctctcgct

SEQ ID NO: 703709 - DNA, 75 bp, synthetic construct
  source 1..75: mol_type = other DNA
ggcgattttaagtaaattgagcgctgaggggtatgccatagaaggggccacaccgctatttagcgatgtggatga

SEQ ID NO: 703710 - DNA, 75 bp, synthetic construct
  source 1..75: mol_type = other DNA
taaatgactttaatagcagcaatggaaaagatcatcactgggaaatcactaacaccttccgttatcgcattaatg

SEQ ID NO: 703711 - DNA, 75 bp, synthetic construct
  source 1..75: mol_type = other DNA
atttaaaccaaccgataaattaaccatccagcccggtggcttaattaatgataagagtatcggttcgggtggtgc

SEQ ID NO: 703712 - DNA, 75 bp, synthetic construct
  source 1..75: mol_type = other DNA
atgtcaatagccgctatttccatcctggtgggtggcggcctccctacgtttaaaaatggacttattatgaaaaag

SEQ ID NO: 703713 - DNA, 75 bp, synthetic construct
  source 1..75: mol_type = other DNA
tggacaaactgaccgctgcgtttaaagcctcagacgggaagaccgcagagctggtaaatatcatgcaggacaacc

SEQ ID NO: 703714 - DNA, 75 bp, synthetic construct
  source 1..75: mol_type = other DNA
tattccggcgaccagctcttatgcaggctatcaggcttatcagccggtcacggcaccggctggtcgctcttatgt

SEQ ID NO: 703715 - DNA, 75 bp, synthetic construct
  source 1..75: mol_type = other DNA
atcatcggcggcattggtctcgttgcgtggccggttgtcatggggattaatgccattatcgccgctgctggcgtg

SEQ ID NO: 703716 - DNA, 75 bp, synthetic construct
  source 1..75: mol_type = other DNA
gcgtgatttgaatggtcaggcatcgaaaatagacggttttcgtaaaaccagtgcgcaactggcggtaaccggcca

SEQ ID NO: 703717 - DNA, 75 bp, synthetic construct
  source 1..75: mol_type = other DNA
cggttcaatggcggggacgggaagccgtgccgtgttaagccgcctgcaggcaccgacgggaaaagcatgggatgc

SEQ ID NO: 703718 - DNA, 75 bp, synthetic construct
  source 1..75: mol_type = other DNA
gggcaggcactggctgacgcgctgatgctgccgcttaatgcgttcaacaaactgcgcagcggtattgactgggta

SEQ ID NO: 703719 - DNA, 75 bp, synthetic construct
  source 1..75: mol_type = other DNA
cggcaccggctggccgctcttatgtggaccagagtaaaaacgaatatcacatcagcctgacgggtggtactgcgc

SEQ ID NO: 703720 - DNA, 75 bp, synthetic construct
  source 1..75: mol_type = other DNA
acaagccagctttaagcgcaacaccctcggtacaggtcaaaaagccgagtatatgaaaacgatattcggcgagga

SEQ ID NO: 703721 - DNA, 75 bp, synthetic construct
  source 1..75: mol_type = other DNA
acaaaagccgcctttcagctttctaatgacgcggctgcacatattggtgatgttctttcaaccacgatgaacaaa

SEQ ID NO: 703722 - DNA, 75 bp, synthetic construct
  source 1..75: mol_type = other DNA
cggctcgatggcgggaacgggaagccgtgctgtcatgagtcgcctgcaggcaccgaccggcaaagcctatgacgc

SEQ ID NO: 703723 - DNA, 75 bp, synthetic construct
  source 1..75: mol_type = other DNA
tatcaacaaagaatccagctcacttgaccagactgcggcgaaagccaatgcagcgacgcagaacggttacagccc

SEQ ID NO: 703724 - DNA, 75 bp, synthetic construct
  source 1..75: mol_type = other DNA
gtaatgatttgcaggatgccttagaaaaatatgagcgtgagaaacgcgccaaagcccgcgcaagcatgatgcatg

SEQ ID NO: 703725 - DNA, 75 bp, synthetic construct
  source 1..75: mol_type = other DNA
gcgccagctcggtgacaacaccgccgcgtcggctgatgatgctgccggtgctcagattattattgcaaaggctgg

SEQ ID NO: 703726 - DNA, 75 bp, synthetic construct
  source 1..75: mol_type = other DNA
gggatgcctgggggttatcttgatatggaacctgaagacacaacagaatcttcgtcatcaagatctatggcatta

SEQ ID NO: 703727 - DNA, 75 bp, synthetic construct
  source 1..75: mol_type = other DNA
cgttggtcaccattctgaaagagattcaggccagctttgataaacacaagctgggaacgtctcagaagggggaat

SEQ ID NO: 703728 - DNA, 75 bp, synthetic construct
  source 1..75: mol_type = other DNA
gcaactggggttactcctcatgagttgcggccagatttgtaccccaacccaaccgacggtttacctgttggatgt

SEQ ID NO: 703729 - DNA, 75 bp, synthetic construct
  source 1..75: mol_type = other DNA
tggtgcccgtgttacgcaatgcgcaatcactctctttagtggaaattgaacggcaaattgccgaatacgccacac

SEQ ID NO: 703730 - DNA, 75 bp, synthetic construct
  source 1..75: mol_type = other DNA
gcctcggcggatgatgcagcagcagctcaaatcatcgtggctaaatcaggagcggataaaaatggcatcttggca

SEQ ID NO: 703731 - DNA, 75 bp, synthetic construct
  source 1..75: mol_type = other DNA
atatccgggaaacacaaaaatcactgcgcgagctgaacggtcaggcatcccgtattgagggattccgcaagacca

SEQ ID NO: 703732 - DNA, 75 bp, synthetic construct
  source 1..75: mol_type = other DNA
gcctcggcggatgatgcggccggtgcacagataatcatcgcgaaagcgggtggggatgttgatgccattcaggcg

SEQ ID NO: 703733 - DNA, 75 bp, synthetic construct
  source 1..75: mol_type = other DNA
aggcacgcaatggcaaattgccgctggaggcgttacagggcggcacgttctctatcaccaacggcggtacttttg

SEQ ID NO: 703734 - DNA, 75 bp, synthetic construct
  source 1..75: mol_type = other DNA
cacgatggcgtgttaagcaatattatcgtcagcgaaggtagcacggtcacgtccgcgcaactgttggcgcatctt

SEQ ID NO: 703735 - DNA, 75 bp, synthetic construct
  source 1..75: mol_type = other DNA
caaaacaacgccattcttaccacgtttaacgaagtgaacatgcaaagcgtgatggatttacgcgctcgctggaaa

SEQ ID NO: 703736 - DNA, 75 bp, synthetic construct
  source 1..75: mol_type = other DNA
caggatggcgtattaagcaatattatcgtcagtgaaggtagcacggtcacgtctgcacaactgttggcgcatctt

SEQ ID NO: 703737 - DNA, 75 bp, synthetic construct
  source 1..75: mol_type = other DNA
tacccgagtctgtcacggaaggcacgctgagtgcgtggtgtaaacaagaaggcgagcacgtaaaacgtgatgaag

SEQ ID NO: 703738 - DNA, 75 bp, synthetic construct
  source 1..75: mol_type = other DNA
cctttttctaaaaatcatattcacgttcccttataccctagtgtaataaaacatttgaaccttaactttatcaaa

SEQ ID NO: 703739 - DNA, 75 bp, synthetic construct
  source 1..75: mol_type = other DNA
acactggcggcgtggtttcgccacaatgtgcaaccgctggcaacgtcaaaggcgctgtttatccatcgaaatacg

SEQ ID NO: 703740 - DNA, 75 bp, synthetic construct
  source 1..75: mol_type = other DNA
ggcaactattttaccggtccaggcagtattgcccgctcttatcgtacggcgaaaacgacgatggtggtgggtaaa

SEQ ID NO: 703741 - DNA, 75 bp, synthetic construct
  source 1..75: mol_type = other DNA
acttactgactccgctgaacgggattatttccccctcagagagcgaatcgtcacagtgacgaagcaggtcggcta

SEQ ID NO: 703742 - DNA, 75 bp, synthetic construct
  source 1..75: mol_type = other DNA
ttattaccgtctccgaagtggaatcgacaggataaccgcgcaggttaactacttgcaggagtacatcaggacgca

SEQ ID NO: 703743 - DNA, 75 bp, synthetic construct
  source 1..75: mol_type = other DNA
gttcaacatcaatcgtttcagtcggcggacgctacgccagggtaaaccgatgacagaaaatcaggtgagttattt

SEQ ID NO: 703744 - DNA, 75 bp, synthetic construct
  source 1..75: mol_type = other DNA
agttacagcagttgcaaaatgcgttaaccacaccggaacgcaataatctggtggcgatagtctcgctgactgaaa

SEQ ID NO: 703745 - DNA, 75 bp, synthetic construct
  source 1..75: mol_type = other DNA
cttcacgcaagacaacacggaaggcagggaagatggatgcaccgagtaccacaccgcatgatgcggtgtttaaac

SEQ ID NO: 703746 - DNA, 75 bp, synthetic construct
  source 1..75: mol_type = other DNA
cgactggaaagcactggttgagcatggctttgatgacattgacccacaggggtacttcactggcaaacatccaaa

SEQ ID NO: 703747 - DNA, 75 bp, synthetic construct
  source 1..75: mol_type = other DNA
atcaacgtaatggatgcccgcgggcgaattatcggcagcggcgatcgtgagcgtattggtgaattgcacgaaggt

SEQ ID NO: 703748 - DNA, 75 bp, synthetic construct
  source 1..75: mol_type = other DNA
atgtgcaaccgctggcaacgtcaaaggcgttgtttattcatcgtaatactctggagtatcggcttaatcgtatat

SEQ ID NO: 703749 - DNA, 75 bp, synthetic construct
  source 1..75: mol_type = other DNA
cagcggatgccagaaagtcgctgctatttttatcaggatctgatgttacctgtgttactcgacagtttgcgtggc

SEQ ID NO: 703750 - DNA, 75 bp, synthetic construct
  source 1..75: mol_type = other DNA
tatttcacccttagagagcgaatcgtcacagtgactaaacagattagttatctgcagaactatatcgtcacccag

SEQ ID NO: 703751 - DNA, 75 bp, synthetic construct
  source 1..75: mol_type = other DNA
ttcactctcagagagcggttgatgatgatgcagaagcagctggaaggggcgcaggaatatatccgcactcagtgt

SEQ ID NO: 703752 - DNA, 75 bp, synthetic construct
  source 1..75: mol_type = other DNA
aacgccatcacttacaaagagcagcgcgataaaaaagtcagtgagctgaagctggcgaacgccaccattactgat

SEQ ID NO: 703753 - DNA, 75 bp, synthetic construct
  source 1..75: mol_type = other DNA
tgcatatgaaatatgccatcagcagctttaatgtaccgtctacgcaaatggcggcggcgacgtttgtgctggaag

SEQ ID NO: 703754 - DNA, 75 bp, synthetic construct
  source 1..75: mol_type = other DNA
gccccagacttactgacaccgctcaacgggattatttcgttctcagagagcgcatcgaaaccgtaactaaccaat

SEQ ID NO: 703755 - DNA, 75 bp, synthetic construct
  source 1..75: mol_type = other DNA
caggtcgatatccatcaacgtatcattgttattgatgtttcggaaaaccgtgacgaacggctggtgttaatcaat

SEQ ID NO: 703756 - DNA, 75 bp, synthetic construct
  source 1..75: mol_type = other DNA
aaggggattcagcagggaagacaggaagtaagtcaggaattcgccctgcgtcttctgagtaaaggaatgtctcgg

SEQ ID NO: 703757 - DNA, 75 bp, synthetic construct
  source 1..75: mol_type = other DNA
atcaaagacatgcaaacccgccagcgtgatgtcgctgcgctggatgcaaaatacaccggagaactggctgatgcc

SEQ ID NO: 703758 - DNA, 75 bp, synthetic construct
  source 1..75: mol_type = other DNA
tatttcaccctcagagaaagaatcgccacagtgatgaagcaggttggctatcttcaggaatatctaagcactcag

SEQ ID NO: 703759 - DNA, 75 bp, synthetic construct
  source 1..75: mol_type = other DNA
gcgctgtcgttatctgcctgctggtttctatgacatgggcgattaaccactaccgtagcaacgccatcacctaca

SEQ ID NO: 703760 - DNA, 75 bp, synthetic construct
  source 1..75: mol_type = other DNA
gcgctgtcgttatctgcctgctggtttccatggcctgggcgattaaccattaccgtgacaacgccatcaactaca

SEQ ID NO: 703761 - DNA, 75 bp, synthetic construct
  source 1..75: mol_type = other DNA
gacgctggcgcagtggtttgaagagaggggaagacaggaaggaagacaggaggtaagacaagaggtaagaaaaga

SEQ ID NO: 703762 - DNA, 75 bp, synthetic construct
  source 1..75: mol_type = other DNA
cacaaatcccctacacaggtaaaggtcagcaggaaatctctgacgaactcacccaagccacactgcaactggcaa

SEQ ID NO: 703763 - DNA, 75 bp, synthetic construct
  source 1..75: mol_type = other DNA
tctgccattctgaccgatgaaatcccgttagatgatgcactgctgcaattgcgggaatttatcgacgaaaactcc

SEQ ID NO: 703764 - DNA, 75 bp, synthetic construct
  source 1..75: mol_type = other DNA
ggatgaagaaacagaccagagcactgctgatattctccagccgtcagcagcacaaactgatgcagtggaaactga

SEQ ID NO: 703765 - DNA, 75 bp, synthetic construct
  source 1..75: mol_type = other DNA
ctacgaccgccagactatttttggccttgtccgtgagcgtccgatcgacattcacaaagatcccgtagcactgaa

SEQ ID NO: 703766 - DNA, 75 bp, synthetic construct
  source 1..75: mol_type = other DNA
agggcgatgacttgcacattgaaacgcaaaacgtagcaccaccggacagtcgcgtcgagctgatttccagcagcg

SEQ ID NO: 703767 - DNA, 75 bp, synthetic construct
  source 1..75: mol_type = other DNA
cggcaattaattcacagcgaacatgggcaaattgaaggtcatcttctggatttaccccgtcgcaatttaactgag

SEQ ID NO: 703768 - DNA, 75 bp, synthetic construct
  source 1..75: mol_type = other DNA
cgcaacataccaggaaatattcgatggagagaatcagcctgaagttcaggaaaatgatccggaggaaatggaagg

SEQ ID NO: 703769 - DNA, 75 bp, synthetic construct
  source 1..75: mol_type = other DNA
cgtcggcactgctttctgctacggcattctccgttaacgcagcaacagaactgacaccggagcaagcggcagcgg

SEQ ID NO: 703770 - DNA, 75 bp, synthetic construct
  source 1..75: mol_type = other DNA
gtgccgcgaagaaaggcgctaagtattaccatattacccgccagtggcaggaacgcggcaataatatgaccatca

SEQ ID NO: 703771 - DNA, 75 bp, synthetic construct
  source 1..75: mol_type = other DNA
attacgcttcggaagatcgcgacaacctacatagtctgctggagcgatttggcccccaacgagcccagtaccgac

SEQ ID NO: 703772 - DNA, 75 bp, synthetic construct
  source 1..75: mol_type = other DNA
accgaaaactcagcagcaaaaatcaaccctgtcactacagccattcgtcgcgaatacaggcagacatggaaaaca

SEQ ID NO: 703773 - DNA, 75 bp, synthetic construct
  source 1..75: mol_type = other DNA
caagcgggcttctcggcgatgacgagatgacgacttttgatggacacctcactgaagcaattatcaggactaaag

SEQ ID NO: 703774 - DNA, 75 bp, synthetic construct
  source 1..75: mol_type = other DNA
cctggctctatctgtacgactcgtatcgtgactggcgtaggtgttccgcagatcactgccgttgctgacgcagtt

SEQ ID NO: 703775 - DNA, 75 bp, synthetic construct
  source 1..75: mol_type = other DNA
tcaataatgaaaacttccgcgaccagttggcggccgcagatatcattgtcgccaataaatccgatcgtgcgaccc

SEQ ID NO: 703776 - DNA, 75 bp, synthetic construct
  source 1..75: mol_type = other DNA
cgtgagttaaacgaagaactgggcatcgaagcaactgtgggtgagtatgttgccagccatcagcgagaagtttcg

SEQ ID NO: 703777 - DNA, 75 bp, synthetic construct
  source 1..75: mol_type = other DNA
caaccagtaacgtgaataaacatattcaacgactgactgccttcaccgactggctggcacacaaacaaggtgtag

SEQ ID NO: 703778 - DNA, 75 bp, synthetic construct
  source 1..75: mol_type = other DNA
ccatcagcacatcccgctggaagaacgccaccgtagggtgtttcgcatttatacctttgatgaactgaaacacct

SEQ ID NO: 703779 - DNA, 75 bp, synthetic construct
  source 1..75: mol_type = other DNA
atgaaaatgattgaagttgttgccgccatcatcgaacgtgatggcaaaattttactcgcgcaacgccccgcccat

SEQ ID NO: 703780 - DNA, 75 bp, synthetic construct
  source 1..75: mol_type = other DNA
ccatcatcgaacgtgatggcaaaattttactcgcgcaacgctcctcccaaagcgatcaggcgggattatgggaat

SEQ ID NO: 703781 - DNA, 75 bp, synthetic construct
  source 1..75: mol_type = other DNA
tttactcgcgcaacgccccgcccatagcgatcaggcgggattatgggagtttgccggtggtaaagtcgagctgga

SEQ ID NO: 703782 - DNA, 75 bp, synthetic construct
  source 1..75: mol_type = other DNA
attgtccggtgttctgggtcttcgtctggagaatcacctgtgacggtaaaactgcgcctgactgtggctgcactc

SEQ ID NO: 703783 - DNA, 75 bp, synthetic construct
  source 1..75: mol_type = other DNA
atgcggtcattgtacatcacggttacttctggaaaggtgaatccccggtgattcgcggcatgaagcgtaaccgtt

SEQ ID NO: 703784 - DNA, 75 bp, synthetic construct
  source 1..75: mol_type = other DNA
gatggggtgctggtctgcggcattatggtattgctgtggccggtgataaaaagaaacagcctgcataatgcttga

SEQ ID NO: 703785 - DNA, 75 bp, synthetic construct
  source 1..75: mol_type = other DNA
gggatcaccagcgacgggctggcggcggtcttaaccccgaatgataaaatctttcctgcgcggtttgaaccatca

SEQ ID NO: 703786 - DNA, 75 bp, synthetic construct
  source 1..75: mol_type = other DNA
gggatcaccaacgacgggctggcggtggtgttaaccccggatgataaaatctttcctcctcggtttgaaccatca

SEQ ID NO: 703787 - DNA, 75 bp, synthetic construct
  source 1..75: mol_type = other DNA
aacccgatcccgttaccagtctattatcgccagccacctgctggcccgtacacgcaaacagtggatttatgtttt

SEQ ID NO: 703788 - DNA, 75 bp, synthetic construct
  source 1..75: mol_type = other DNA
cctgaaaccgctgtggcgggagctaagccgggtggtgcagcataatctgcaaaccgttctcggttatgacttgtt

SEQ ID NO: 703789 - DNA, 75 bp, synthetic construct
  source 1..75: mol_type = other DNA
tgcatatgaaatacgccatcagcagctttaatgtgccgtccacgcaaatggcggcggcaacgtttgtgctggaag

SEQ ID NO: 703790 - DNA, 75 bp, synthetic construct
  source 1..75: mol_type = other DNA
agcgctggcatggacaacggaccattactaccgtaacgctgtcacttacaaagagcagcgcgacaaaaacgccgg

SEQ ID NO: 703791 - DNA, 75 bp, synthetic construct
  source 1..75: mol_type = other DNA
atgcaaccggcccccgactggcagacaccgctgaacgggattatttcaccctcagagagcggttgatgatgatgc

SEQ ID NO: 703792 - DNA, 75 bp, synthetic construct
  source 1..75: mol_type = other DNA
tctggggctgaatcattaccgcgataacgccatcacctacaaagcgcagcgcgataaaaaagccagtgagctgga

SEQ ID NO: 703793 - DNA, 75 bp, synthetic construct
  source 1..75: mol_type = other DNA
gacaccgctgaacgggattatttcaccctcagagaacggttgatgacgatgcagaagcaactggaaggggcgcag

SEQ ID NO: 703794 - DNA, 75 bp, synthetic construct
  source 1..75: mol_type = other DNA
accatcgctgatatgcagaagcgtcaacgtgatgtagcagaactcgatgccagatatacaaaggagttagctaat

SEQ ID NO: 703795 - DNA, 75 bp, synthetic construct
  source 1..75: mol_type = other DNA
tcgctgcattcttcgttactgtcattggttcttttatctgttcagtgaatcattaccacaataaagccattgaat

SEQ ID NO: 703796 - DNA, 75 bp, synthetic construct
  source 1..75: mol_type = other DNA
tattacgcgcccgaaaggcggatttttactgtggatagaattgcctgaacaggtcgatatggtctgcgttgcgcg

SEQ ID NO: 703797 - DNA, 75 bp, synthetic construct
  source 1..75: mol_type = other DNA
atcacctacaaagcgcagcgcgataaaaaagccagagagctggagctggcaaacgcaaccattactgatatgcag

SEQ ID NO: 703798 - DNA, 75 bp, synthetic construct
  source 1..75: mol_type = other DNA
ccgccgatgtcgcgtccggtgcagcgcccggtggaaattaaccagtgggatcaggtgctgtatatgctggaggca

SEQ ID NO: 703799 - DNA, 75 bp, synthetic construct
  source 1..75: mol_type = other DNA
tgacttgttagccggtcagcgagtattgcgagagcagattgcccgcctgatgctcgacagcggctcggtggtcac

SEQ ID NO: 703800 - DNA, 75 bp, synthetic construct
  source 1..75: mol_type = other DNA
atcgctgacatgcaacagcgtcagcgtgatgttgctgcgctcgatgcaaagtactcgagagaattagccaatgcg

SEQ ID NO: 703801 - DNA, 75 bp, synthetic construct
  source 1..75: mol_type = other DNA
tgcgcttagtctggggctgaatcattaccgtgttcacgccatcatctacaaagagcagcgcgataaaaaagccag

SEQ ID NO: 703802 - DNA, 75 bp, synthetic construct
  source 1..75: mol_type = other DNA
gattttcatcaaagcagcgaaactgcgcggcgatgccctcgatcatctgttgatttttggtcctccggggttggg

SEQ ID NO: 703803 - DNA, 75 bp, synthetic construct
  source 1..75: mol_type = other DNA
ctggaaccttatttgattcagcaaggctttttgcagcgtacaccgcgcgggcgtatggcgacagtgcgggcgtgg

SEQ ID NO: 703804 - DNA, 75 bp, synthetic construct
  source 1..75: mol_type = other DNA
accacgaccacgaacatcaccacgcccacgaacatcatcaccatcacgagcatggcgaatatcaggatgcccacg

SEQ ID NO: 703805 - DNA, 75 bp, synthetic construct
  source 1..75: mol_type = other DNA
acgaccacgaccacgaccacgaccacgaacatcatcaccatcatgaacatggcgacaacgaagagtatcaggatg

SEQ ID NO: 703806 - DNA, 75 bp, synthetic construct
  source 1..75: mol_type = other DNA
ggcgagtatcaggatgcccatgcacgagcccatgccaatgacattaaacgacgctttgatggtagagaggtcacc

SEQ ID NO: 703807 - DNA, 75 bp, synthetic construct
  source 1..75: mol_type = other DNA
attactgacatgcagatacgccagcgtgatgttgctgcactcgatgcaaaatacctgaaggagttagctgatgcg

SEQ ID NO: 703808 - DNA, 75 bp, synthetic construct
  source 1..75: mol_type = other DNA
ctcggtatcagagacggaatcatcagcgacctggctgcattgagaatgcttcaggaatatatccgcactcagtgt

SEQ ID NO: 703809 - DNA, 75 bp, synthetic construct
  source 1..75: mol_type = other DNA
attactgacattcaggtgcgtcagcgtgatgttgctgcactcgatgctaaatacacgaaggaattagctgatgcg

SEQ ID NO: 703810 - DNA, 75 bp, synthetic construct
  source 1..75: mol_type = other DNA
gctgaaaatgaaactctgcgtgctgatgttgccgctggtcgtaagcgcctgcgcatcaacgccaactgtccaggc

SEQ ID NO: 703811 - DNA, 75 bp, synthetic construct
  source 1..75: mol_type = other DNA
tgggattatttcatcctcagagaacggttgatgacaatgcagaagcagctggaaggggcgcaggaatatatcagc

SEQ ID NO: 703812 - DNA, 75 bp, synthetic construct
  source 1..75: mol_type = other DNA
ctggggctgaatcattaccgcgataacgccataatctacaaagagcagcgcgataaaaaagccagtgagctggag

SEQ ID NO: 703813 - DNA, 75 bp, synthetic construct
  source 1..75: mol_type = other DNA
atgagcagagtaaccgcgattatctacgttctggttatttgcctcatcgtttgcctttcatgggctgttaatcat

SEQ ID NO: 703814 - DNA, 75 bp, synthetic construct
  source 1..75: mol_type = other DNA
tcgcaccaggcgtggcaatgcctcatgcgcgaccggaatgtggggcgcttaaaaccgggatgtctttgacattac

SEQ ID NO: 703815 - DNA, 75 bp, synthetic construct
  source 1..75: mol_type = other DNA
tgcgcttactctggggctgaatcattaccgtgataacgccattacctacaaagcccagcgcgacaaaaatgtcag

SEQ ID NO: 703816 - DNA, 75 bp, synthetic construct
  source 1..75: mol_type = other DNA
tattaccgcctccgaagtgggatcgacaagataactgcacaggttaactatttgcaggagtacatcaagacacag

SEQ ID NO: 703817 - DNA, 75 bp, synthetic construct
  source 1..75: mol_type = other DNA
tgctaacgcgactatcgaaagtctccgtgctgatgtttctgctgggcgtaagcgcctgcaagtcgccgccacctg

SEQ ID NO: 703818 - DNA, 75 bp, synthetic construct
  source 1..75: mol_type = other DNA
agggctgtatcgtcacggggagaaattgccgtcggtgcgcagcttaagtcgggagcacggcgtcagcatcagcac

SEQ ID NO: 703819 - DNA, 75 bp, synthetic construct
  source 1..75: mol_type = other DNA
gcagaagcagctggaaggggcgcaggaatatatccgcactcagtgcactaagctggctttttattatccggagga

SEQ ID NO: 703820 - DNA, 75 bp, synthetic construct
  source 1..75: mol_type = other DNA
ctgcgaaatctgtattacgcgcccgaaaggcggatttttactgtggatagaattgcctgaacaggtcgatatggt

SEQ ID NO: 703821 - DNA, 75 bp, synthetic construct
  source 1..75: mol_type = other DNA
catcatcgctgatatgcggaagcgtcaacgtgatgtagcagaactcgacgcaagatacacaaaggagcttgctga

SEQ ID NO: 703822 - DNA, 75 bp, synthetic construct
  source 1..75: mol_type = other DNA
ctgatgttgccgctggtcgtaagcgcctgcgggtcaacgccacctgctcaggtaccgtgcgtgaagccaccgccg

SEQ ID NO: 703823 - DNA, 75 bp, synthetic construct
  source 1..75: mol_type = other DNA
gctgcaagtcgccgccacctgtgcaaagtcaacgaccggagccagcagcatgggcgatggagaaagcccaagact

SEQ ID NO: 703824 - DNA, 75 bp, synthetic construct
  source 1..75: mol_type = other DNA
ttattaccgtctccgaagtggaatcgacaagataaccgcgcaggttaactacatgcaggattacatcaggacgca

SEQ ID NO: 703825 - DNA, 75 bp, synthetic construct
  source 1..75: mol_type = other DNA
gggacgggtggtttacatcggagaaaccggaaaagtggagttcgaggttagcgctgatctgatgcatcatcaacg

SEQ ID NO: 703826 - DNA, 75 bp, synthetic construct
  source 1..75: mol_type = other DNA
tgctggcggaagaaaaagatctgatcctgctcccggacgcgctgagctatgaagatggtgcgtttatcagttgcg

SEQ ID NO: 703827 - DNA, 75 bp, synthetic construct
  source 1..75: mol_type = other DNA
agtctgttccatatggaaaaatgcgcccacgatttaacggactggaaactgtggccgcgtaatgccattacccat

SEQ ID NO: 703828 - DNA, 75 bp, synthetic construct
  source 1..75: mol_type = other DNA
cgggattatttcaccctcagagagcggctgatgacgatgcagaagcaactggaaggggcacaggaatatatccgt

SEQ ID NO: 703829 - DNA, 75 bp, synthetic construct
  source 1..75: mol_type = other DNA
gtgaaggaaaaactcaaccaggcgaccgcaatcattactgacatgcagatacgccagcgtgatgttgctgcactc

SEQ ID NO: 703830 - DNA, 75 bp, synthetic construct
  source 1..75: mol_type = other DNA
ctaaacgcccctggcgcgggtgcggcagggatgaaaattaatcgtattgttaatgagggatttatgaaaacgatg

SEQ ID NO: 703831 - DNA, 75 bp, synthetic construct
  source 1..75: mol_type = other DNA
tgctggcggaagaaaaagatctgatcctcctgccggatgcgctgagctacgaagatggtgcgtttatcagttgcg

SEQ ID NO: 703832 - DNA, 75 bp, synthetic construct
  source 1..75: mol_type = other DNA
ttattaccgtctccgatgtggaatcgacaagataaccgcgcaggttaactacatgcaggaatacatcaggacgca

SEQ ID NO: 703833 - DNA, 75 bp, synthetic construct
  source 1..75: mol_type = other DNA
ttattaccgtctccgaagtggaatcgacaagataaccgcgcaggttaactacttgcaggaatacatcaggacgca

SEQ ID NO: 703834 - DNA, 75 bp, synthetic construct
  source 1..75: mol_type = other DNA
tgaaatcctccgggatttgcggaagcgatgtccactatatctaccaccagcaccgcgccacggcggcggcgcccg

SEQ ID NO: 703835 - DNA, 75 bp, synthetic construct
  source 1..75: mol_type = other DNA
actcacccacggtggcgcggatgttgcgctcgattgttccggtaatgccgcaggtcgcttgctggcactgcaatc

SEQ ID NO: 703836 - DNA, 75 bp, synthetic construct
  source 1..75: mol_type = other DNA
tgctggcggaagaaaaagatctgatcctcctgccggacgcgctgagctatgaagatggtgcgtttatcagttgcg

SEQ ID NO: 703837 - DNA, 75 bp, synthetic construct
  source 1..75: mol_type = other DNA
gtggctgcccaccaccagcaccaacaattaccgcattgcgttacggaagtatcaacactatcagcgtcaaacgtg

SEQ ID NO: 703838 - DNA, 75 bp, synthetic construct
  source 1..75: mol_type = other DNA
ataatcgtcgttttaacgagtatgttaacaccatgttaatggaaaaggatatttcaccattaataggcatggatg

SEQ ID NO: 703839 - DNA, 75 bp, synthetic construct
  source 1..75: mol_type = other DNA
ttgtcgatgaacagtacgagcaactaatttcaagaaacatgggggatttaaaaaaagaatatcttgggtattatt

SEQ ID NO: 703840 - DNA, 75 bp, synthetic construct
  source 1..75: mol_type = other DNA
gcgcctgctgatcttgaaccgccacaagccgttcagccaccaccggagccggtggtagagccagaaccggaacct

SEQ ID NO: 703841 - DNA, 75 bp, synthetic construct
  source 1..75: mol_type = other DNA
cattttctggaattgccagagagggagtaaaagagaagcgcagcgcggcgcaaaaccgctggaaaaaccacttat

SEQ ID NO: 703842 - DNA, 75 bp, synthetic construct
  source 1..75: mol_type = other DNA
agcaatcgccgtgtggtgttgtacttatattctggaattgccagagagggagtcaaatataagcgcagcgcggcg

SEQ ID NO: 703843 - DNA, 75 bp, synthetic construct
  source 1..75: mol_type = other DNA
actttgctaccccagccagtggttgagagttagcaatcgccgtgtggtgttgttctcattttccggaattgccag

SEQ ID NO: 703844 - DNA, 75 bp, synthetic construct
  source 1..75: mol_type = other DNA
gtggtgcagaagtattcctcaaaaatatgaccagattatggcgtaaagaaaacgtacgaatgtggccgctgtttt

SEQ ID NO: 703845 - DNA, 75 bp, synthetic construct
  source 1..75: mol_type = other DNA
tgatggaataactactttgaaaaacagtttaacagcttcgggaaatattacttcatcacaaaaaatacagggggt

SEQ ID NO: 703846 - DNA, 75 bp, synthetic construct
  source 1..75: mol_type = other DNA
cggtgcgtgaactgctgggtgtgaccgcagccgacgaacgccggatgcgtgacgcgattatccgttccctgggga

SEQ ID NO: 703847 - DNA, 75 bp, synthetic construct
  source 1..75: mol_type = other DNA
ccgaaccgccaaaagaagcaccggtggtcattgaaaagccgaagccgaaacctaagccaaaaccgaagccggtga

SEQ ID NO: 703848 - DNA, 75 bp, synthetic construct
  source 1..75: mol_type = other DNA
cgcgtgtgggtgccgtaaccggtaatcctcgtattcgcacacgttctaccctggtgggtaaaattcaggttggcg

SEQ ID NO: 703849 - DNA, 75 bp, synthetic construct
  source 1..75: mol_type = other DNA
tggcaacgacattggtatcatttacacgagtcatgttgatgcctaaaaagcaacgcgcccgttgggtaagtcccg

SEQ ID NO: 703850 - DNA, 75 bp, synthetic construct
  source 1..75: mol_type = other DNA
aagaaagaatatcttgggtattatttgcaaataatagatgtggaaattaataatattgcctcaaaaatatttata

SEQ ID NO: 703851 - DNA, 75 bp, synthetic construct
  source 1..75: mol_type = other DNA
tggaatcgcgcggacggtatcaggaagccgagaaagtcatgcggagtactgagagatcccctcataatttcccca

SEQ ID NO: 703852 - DNA, 75 bp, synthetic construct
  source 1..75: mol_type = other DNA
tgcagtgctgctcagtagttatggcgtaacgggagtctttattcttctgggggctgtttcaattgttgtcgcaat

SEQ ID NO: 703853 - DNA, 75 bp, synthetic construct
  source 1..75: mol_type = other DNA
tgcttatccctgcaatattgtcgcttatcgctacggcgctggcctggcgctactttcctgaatccccgcgctggc

SEQ ID NO: 703854 - DNA, 75 bp, synthetic construct
  source 1..75: mol_type = other DNA
gtgcgctggtgggcggcatcattggcgacaaaaccggtcgcagaaatgcgttcatccattcatattgcctcgatg

SEQ ID NO: 703855 - DNA, 75 bp, synthetic construct
  source 1..75: mol_type = other DNA
agccgagaaagtcatgcggagtatagaagaaggcgtcatacgccagacgggtaaacctttgccgcccgtggttat

SEQ ID NO: 703856 - DNA, 75 bp, synthetic construct
  source 1..75: mol_type = other DNA
cgtgacaggagtatttgtcctgcttggcgcagtttcaattatggtggcaattgccatcgccacaatcggaattga

SEQ ID NO: 703857 - DNA, 75 bp, synthetic construct
  source 1..75: mol_type = other DNA
cgtttttgggccgcgacgtggctgtattctacgctatcgcttgtcctaacgcgaagccgttagatgacgattaca

SEQ ID NO: 703858 - DNA, 75 bp, synthetic construct
  source 1..75: mol_type = other DNA
ctatcccagccagtggttgagagttagcaatcgccgtatggtgttgtacttatattctggaattgccagagaggg

SEQ ID NO: 703859 - DNA, 75 bp, synthetic construct
  source 1..75: mol_type = other DNA
gtgttgcggggtgatggggcacagctgttgcaaaaagcccagcgcgtcacagaacaggcggaagaaagggtacgc

SEQ ID NO: 703860 - DNA, 75 bp, synthetic construct
  source 1..75: mol_type = other DNA
gcagagtggaactggcgggtacaactgcttatccctgcaatattgtcgcttatcgctacggcgctggcctggcgc

SEQ ID NO: 703861 - DNA, 75 bp, synthetic construct
  source 1..75: mol_type = other DNA
atctctttccgtagaatgggaaaccgcagacgccaccgctgataaatcagcagactacaccaaagaatcactggt

SEQ ID NO: 703862 - DNA, 75 bp, synthetic construct
  source 1..75: mol_type = other DNA
acgatgatgtctccacctggtctattgagtgctcaagcgctggtaaggtgacggttggcgacatcccagcagcat

SEQ ID NO: 703863 - DNA, 75 bp, synthetic construct
  source 1..75: mol_type = other DNA
catttttccgcaaggtgatgagcaagaagccaacgaagcgggtttacaattttatgatgacctgtttgatgagtg

SEQ ID NO: 703864 - DNA, 75 bp, synthetic construct
  source 1..75: mol_type = other DNA
attatgtcactgttattggtctgggaggaagtgaaaagcaggcagaggaaggtgagtttgaaaccgtgatgctgt

SEQ ID NO: 703865 - DNA, 75 bp, synthetic construct
  source 1..75: mol_type = other DNA
tttattcctgctgcactcgaaataaccggacttacgcttgaagaactggaggacagaggccttccaccacaagcg

SEQ ID NO: 703866 - DNA, 75 bp, synthetic construct
  source 1..75: mol_type = other DNA
accttatgtggccgatggacgttgaatattcattagtcgataattcatccacaaaagcgataatacaagtcggac

SEQ ID NO: 703867 - DNA, 75 bp, synthetic construct
  source 1..75: mol_type = other DNA
atggccgacgttcacgataaggccactcgcagcaaaaatatgcgcgcgattgccacgcgtgatacggcgattgag

SEQ ID NO: 703868 - DNA, 75 bp, synthetic construct
  source 1..75: mol_type = other DNA
agaatatattgatgactgcagcatgtttgactgcagcacctactgttaatgcggccgtttcccttgaccgtaccc

SEQ ID NO: 703869 - DNA, 75 bp, synthetic construct
  source 1..75: mol_type = other DNA
ccgccgctgatgacgctgagcggtatcgcgctgttagtggttggcgtggtcattgcagtcagagcaaaaccagaa

SEQ ID NO: 703870 - DNA, 75 bp, synthetic construct
  source 1..75: mol_type = other DNA
aaccgacttacttatttcgggtaatgactccaacttattgatagtgttttatgttcagataatgcccgatgactt

SEQ ID NO: 703871 - DNA, 75 bp, synthetic construct
  source 1..75: mol_type = other DNA
aaggcattatcaccagcggtactttctccccgacgctgggttacagcattgcgctggcgcgcgtgccggaaggta

SEQ ID NO: 703872 - DNA, 75 bp, synthetic construct
  source 1..75: mol_type = other DNA
ataagagtgattatgttctcgctcatggacagaacaccgacgaccaactggcagttggtatcgtctaccagttct

SEQ ID NO: 703873 - DNA, 75 bp, synthetic construct
  source 1..75: mol_type = other DNA
atgtacggtgaatctcacaacatgaattccgacgacggtgatgttgtgaacaaaacacaaaacttcgaagctgtt

SEQ ID NO: 703874 - DNA, 75 bp, synthetic construct
  source 1..75: mol_type = other DNA
gatactgaacttcaggttatcaaccagatgggcttcccgggttacttcctcatcgttatggaatttatccagtgg

SEQ ID NO: 703875 - DNA, 75 bp, synthetic construct
  source 1..75: mol_type = other DNA
agtggtattgccgcgccttatgccgttgcagtgctgctcagtagttatggcgtaacgggagtctttattcttctg

SEQ ID NO: 703876 - DNA, 75 bp, synthetic construct
  source 1..75: mol_type = other DNA
agcaacagcgccagcaatccctgatatcgcaatcatgattgccaaccgccttggaaatttcggaggtgatgaatc

SEQ ID NO: 703877 - DNA, 75 bp, synthetic construct
  source 1..75: mol_type = other DNA
tgagggcagctttaaaatgccggacgggacaacattcagcgatcctgtcgtggcaatgtcagacaatggtatgca

SEQ ID NO: 703878 - DNA, 75 bp, synthetic construct
  source 1..75: mol_type = other DNA
gggtaaaggcgctaagggcgttaaacgtggttctgttgagcctaagtacgcttatacagacagtgaagggcaaga

SEQ ID NO: 703879 - DNA, 75 bp, synthetic construct
  source 1..75: mol_type = other DNA
gccgtttatcccgcttgccggctgggttgttgttcccaccggcctgctggtcatgccgctgctgctcgtctggtt

SEQ ID NO: 703880 - DNA, 75 bp, synthetic construct
  source 1..75: mol_type = other DNA
aaaagtcggtggaaggggccattgcactcttttccggtgaaaaaattaataacccacgtgaaatttggctggtag

SEQ ID NO: 703881 - DNA, 75 bp, synthetic construct
  source 1..75: mol_type = other DNA
cgggtttcctttattggcaactggtcatatccgctctgttcattgattgcgatgggactcacgccgctgattagt

SEQ ID NO: 703882 - DNA, 75 bp, synthetic construct
  source 1..75: mol_type = other DNA
aattggcctgggtcatgaatgtgccgggacggttgtggctgtgggaagccgcgtgcgcaaatttaaaccggggga

SEQ ID NO: 703883 - DNA, 75 bp, synthetic construct
  source 1..75: mol_type = other DNA
ggggcggtttcaattattgtcgcaattgctatcgcaaccattggaattgaaaccaaaggtgtctccgttgaaagt

SEQ ID NO: 703884 - DNA, 75 bp, synthetic construct
  source 1..75: mol_type = other DNA
gggtaaaggtggtaaaggcgttaaacgtggttctgttgagccaaaatatgcgttcactgtagagggtgaagaaca

SEQ ID NO: 703885 - DNA, 75 bp, synthetic construct
  source 1..75: mol_type = other DNA
cgaacaacgcccgtagtggtacgccatgactgcggaagatatccagaaccagaccgccaatcagctggctggcga

SEQ ID NO: 703886 - DNA, 75 bp, synthetic construct
  source 1..75: mol_type = other DNA
cagcgcagcgtaaagcgaaagatcgtattgacttagagcgtcattacggtattaaaaatgagattaaagatctag

SEQ ID NO: 703887 - DNA, 75 bp, synthetic construct
  source 1..75: mol_type = other DNA
gcctctgataagcagttttaataatgtagtgactactatgtcatctccagatgtttccaccagaacagactttca

SEQ ID NO: 703888 - DNA, 75 bp, synthetic construct
  source 1..75: mol_type = other DNA
tcttgcaagcattttgcatatgtcggaggtgtcgattcgtaagaagcttgagaaagagagtaataattttaatac

SEQ ID NO: 703889 - DNA, 75 bp, synthetic construct
  source 1..75: mol_type = other DNA
aatgacttcttgtcttataatataaatatcatcaaagtttttcgttctattgatgatacgaaagtcatgcttatt

SEQ ID NO: 703890 - DNA, 75 bp, synthetic construct
  source 1..75: mol_type = other DNA
acgcaacgaacgtttctttaaatctcttttaaagggagattattatgaacgcctttttgagcaaactcaaaaagt

SEQ ID NO: 703891 - DNA, 75 bp, synthetic construct
  source 1..75: mol_type = other DNA
aatgactttttgtcttataatattaagatcatcaaagtgtttcgttctattgatgatacaaaagtcatgcttatt

SEQ ID NO: 703892 - DNA, 75 bp, synthetic construct
  source 1..75: mol_type = other DNA
tcaataccgtaaccgatcaggcaagcaagatcacagacactaaccgcaaggcaaaggctgtcaacgtaaacacta

SEQ ID NO: 703893 - DNA, 75 bp, synthetic construct
  source 1..75: mol_type = other DNA
tgccacctatacgcaagcggatcttgacgctgctgaacgtctgcaagctgtacaggctaatatgaatatggcctg

SEQ ID NO: 703894 - DNA, 75 bp, synthetic construct
  source 1..75: mol_type = other DNA
aacagtgtcatgtcgattttagcctgccactggataaaaagcagaccggtcctgtaacggaaatggtggcggtat

SEQ ID NO: 703895 - DNA, 75 bp, synthetic construct
  source 1..75: mol_type = other DNA
ctttctaaaatcagggacattgaatcgttagtttattctctgtcggtatcaacggatactacctttactgagcga

SEQ ID NO: 703896 - DNA, 75 bp, synthetic construct
  source 1..75: mol_type = other DNA
gcaaagtcatggaaccattgttactgaatccccataaaattggccctatgcgaagtagaatttttaattgcatgg

SEQ ID NO: 703897 - DNA, 75 bp, synthetic construct
  source 1..75: mol_type = other DNA
cattcttctatggctaaagatacaatcaccgttgtcgcgacaggaaatcagaacacggtatttgaaacgccgtcg

SEQ ID NO: 703898 - DNA, 75 bp, synthetic construct
  source 1..75: mol_type = other DNA
atgattcagaagagcaagatcaaagacttggttgtttttaccgatgaagagaattcaaagtacctcaatgtatta

SEQ ID NO: 703899 - DNA, 75 bp, synthetic construct
  source 1..75: mol_type = other DNA
atggggaacagtaccgtttctctcggatttgctcatcttcagctctctggactgaatcattttgttaaggattta

SEQ ID NO: 703900 - DNA, 75 bp, synthetic construct
  source 1..75: mol_type = other DNA
catcaggtatcgttacgagataactgatgaactgggtgttatagcctcttttacatgggcgcgctccatgactaa

SEQ ID NO: 703901 - DNA, 75 bp, synthetic construct
  source 1..75: mol_type = other DNA
atgcgccattgtgtgtggttgctgggattgttatcgttattttctttggcaacccatgccagtgactggcaggaa

SEQ ID NO: 703902 - DNA, 75 bp, synthetic construct
  source 1..75: mol_type = other DNA
agctggtcttctcacataccttggtttgggagaaggctctgcattacctgttggtgtccctgttccgtggccttc

SEQ ID NO: 703903 - DNA, 75 bp, synthetic construct
  source 1..75: mol_type = other DNA
acttaatttatcaaactgatcgggtacgtggtgagggcatccaatcaattaatgactattttttacttgctgaac

SEQ ID NO: 703904 - DNA, 75 bp, synthetic construct
  source 1..75: mol_type = other DNA
ttaatcagtacatgagtttatatgcgatggcagggataggcgtggctaaagttaccgctgacctgaaaattaagg

SEQ ID NO: 703905 - DNA, 75 bp, synthetic construct
  source 1..75: mol_type = other DNA
ctgattatgctgacgcccgatcccgccgcgttaaaagttgccccggataaagccactttcgcccgcgtcactgcg

SEQ ID NO: 703906 - DNA, 75 bp, synthetic construct
  source 1..75: mol_type = other DNA
cctatccgcgcccaccggactttaccggcacggcgtttcttgaacagttgctgattatgctgacgcccgatcccg

SEQ ID NO: 703907 - DNA, 75 bp, synthetic construct
  source 1..75: mol_type = other DNA
ttctcatcctgttttttaattgtgatttatttaatagagtatatatcattaaccataatatgcgcaggggatgta

SEQ ID NO: 703908 - DNA, 75 bp, synthetic construct
  source 1..75: mol_type = other DNA
ggggatgattggcaacgtgcatttcgtcaccattcctgctaacgcgaatgccagtgctgcggcgaaggtggttgc

SEQ ID NO: 703909 - DNA, 75 bp, synthetic construct
  source 1..75: mol_type = other DNA
gcacaactgacgtttatcgcccgccgcgatgttacgccacagccaccacaaacgccgcaagcattgctggagttt

SEQ ID NO: 703910 - DNA, 75 bp, synthetic construct
  source 1..75: mol_type = other DNA
tgcatccgtatttatggcgcgaaggaaaggattttccgccttcgcctgcacggatggatgccctgctaaaagccg

SEQ ID NO: 703911 - DNA, 75 bp, synthetic construct
  source 1..75: mol_type = other DNA
atgacttcagtatctccggttattccggagacctggtagtcacggtcagggaatcggatggtagtgagcatagct

SEQ ID NO: 703912 - DNA, 75 bp, synthetic construct
  source 1..75: mol_type = other DNA
tggatcgccaaactcgggaagagtttaaccgttttcaggaagggtgtgtagaagagaacacgaatactgaaacgc

SEQ ID NO: 703913 - DNA, 75 bp, synthetic construct
  source 1..75: mol_type = other DNA
cgaacgcacggcgcttaattttgtacaaactctttctggcgtagccagtagggtccgccactatgtcgaattgtt

SEQ ID NO: 703914 - DNA, 75 bp, synthetic construct
  source 1..75: mol_type = other DNA
gcgcgaatttgccgaaacgggcgtggactttatctccgtcggtgcgctaactaaacacgtacaggcactcgacct

SEQ ID NO: 703915 - DNA, 75 bp, synthetic construct
  source 1..75: mol_type = other DNA
ccagcggtgtgtctggctggtggattgctgatgtgctggccgctgtggcaaaaatctcggcctgacgagtggcaa

SEQ ID NO: 703916 - DNA, 75 bp, synthetic construct
  source 1..75: mol_type = other DNA
gtctgacctcatttctggcgaatttgtttgcaattcccttagtgacatttatttcggtcccattgatccttgccg

SEQ ID NO: 703917 - DNA, 75 bp, synthetic construct
  source 1..75: mol_type = other DNA
ggcaaagcgattctctatgacacgggactggcctggcccgaaggggatagtgggcaacaactgattatcccctgg

SEQ ID NO: 703918 - DNA, 75 bp, synthetic construct
  source 1..75: mol_type = other DNA
atgcactgatatccagcagaagggttattcctgacggtgtacaggactcatggcttagagcaactgaaagcatta

SEQ ID NO: 703919 - DNA, 75 bp, synthetic construct
  source 1..75: mol_type = other DNA
cgctctgttcattgattgcgatgggactcacgccgctgattagtgcagagtggaactggcgggtacaactgctta

SEQ ID NO: 703920 - DNA, 75 bp, synthetic construct
  source 1..75: mol_type = other DNA
tcctttattggcaactggtcatatccgctctgttcattgattgcgatgggactcacgccgctgattagtgcagag

SEQ ID NO: 703921 - DNA, 75 bp, synthetic construct
  source 1..75: mol_type = other DNA
aacggcaaggcgctactggaagtgtctggcaacgtcactgacaaaacactgcgcgaatttgccgaaacgggcgtg

SEQ ID NO: 703922 - DNA, 75 bp, synthetic construct
  source 1..75: mol_type = other DNA
ttctgttcctgctttttatatctgtgtctgtcagggcagaaaaaccctggtattttgatgcaattggcctgacag

SEQ ID NO: 703923 - DNA, 75 bp, synthetic construct
  source 1..75: mol_type = other DNA
agtggcagctctggcacagtaccggaaaggagaaacacctgtattgcatggtggaggggtcaccggaagtcggtt

SEQ ID NO: 703924 - DNA, 75 bp, synthetic construct
  source 1..75: mol_type = other DNA
atatcatgcgtgatactggaacggcgcatttaatggcgatatcgggattgcacatcgcttttgcggcgttgctgg

SEQ ID NO: 703925 - DNA, 75 bp, synthetic construct
  source 1..75: mol_type = other DNA
ttatggccgcaggtggcgcggagtccgtcgcggtgtacgttaacgacgtcaaaggcggttcgaaatcgttcgtta

SEQ ID NO: 703926 - DNA, 75 bp, synthetic construct
  source 1..75: mol_type = other DNA
gcacagttaaattaccttctgatgcaggaagcaacattacttaccgaacaataaatgattatggcgcacttactc

SEQ ID NO: 703927 - DNA, 75 bp, synthetic construct
  source 1..75: mol_type = other DNA
cggcagtacagcacaggtggtaaaaatacacttttagggataagtaaacgtggagataaaaatctgcgacggtta

SEQ ID NO: 703928 - DNA, 75 bp, synthetic construct
  source 1..75: mol_type = other DNA
ccctgctgatggattacagtctgaccggaaacaggaataattctgatgattattcatcgcggagtctgtacgcca

SEQ ID NO: 703929 - DNA, 75 bp, synthetic construct
  source 1..75: mol_type = other DNA
aacggcttctcttacaaaaaaccggctggaacgcctcataaattcagcgaagagaggcaggcgcaattcattgaa

SEQ ID NO: 703930 - DNA, 75 bp, synthetic construct
  source 1..75: mol_type = other DNA
ttataacgtcggcggtattgttatcttccttggctttgcgtggtggaaatacagtaaatatataaagggattaac

SEQ ID NO: 703931 - DNA, 75 bp, synthetic construct
  source 1..75: mol_type = other DNA
tggcaaagcgattctctatgatacgggacttgcctggccggagggcgacagcgggcaacaaattattatcccctg

SEQ ID NO: 703932 - DNA, 75 bp, synthetic construct
  source 1..75: mol_type = other DNA
taccattaattggcggaatttgcagtgctgctttttatgcatggttgactggtatgcaacctcccgcattgcgta

SEQ ID NO: 703933 - DNA, 75 bp, synthetic construct
  source 1..75: mol_type = other DNA
ctgccgccggtattgcgtgcggttgtttccctcatccatctgcaactgggaatcaccctcctgcttatgcccgtg

SEQ ID NO: 703934 - DNA, 75 bp, synthetic construct
  source 1..75: mol_type = other DNA
tttaggtcatgaagcaaaattgatttctccgcagttcgttcgcccttttgttaagagcaacaagaacgattttgt

SEQ ID NO: 703935 - DNA, 75 bp, synthetic construct
  source 1..75: mol_type = other DNA
atgaacattgatttcttaggaaaaaaagggaatatagtttttaatgacttctccctgaaacaaagcatccctctt

SEQ ID NO: 703936 - DNA, 75 bp, synthetic construct
  source 1..75: mol_type = other DNA
ccctattaccagacattaaccgatttttatgtaggctctaacaagttagaaggcgtgatggttcccccaatgggt

SEQ ID NO: 703937 - DNA, 75 bp, synthetic construct
  source 1..75: mol_type = other DNA
tatagctgtgaccagtcttgcggaaggcataaagacattgccaacaacagtatctgaatccgtcaaatccaccca

SEQ ID NO: 703938 - DNA, 75 bp, synthetic construct
  source 1..75: mol_type = other DNA
ctcagaaacaggatattaagtgcgctccctggaatgggagggcgaaactctttgcaggaaaaaatatcggagtgt

SEQ ID NO: 703939 - DNA, 75 bp, synthetic construct
  source 1..75: mol_type = other DNA
tgggaggggagagggttagagtttcttatatgccagatacaggccgttttttagcagaaagtgaagggcggggac

SEQ ID NO: 703940 - DNA, 75 bp, synthetic construct
  source 1..75: mol_type = other DNA
tgcagtagataagattactggctctacaccatttattgccgttaccagtcttgccgaaggcacgaagacattgcc

SEQ ID NO: 703941 - DNA, 75 bp, synthetic construct
  source 1..75: mol_type = other DNA
caaaaactcctggacaagatggtgcgtatattgcaggattaccaacagcaacagttgtcgcagagctatcagatc

SEQ ID NO: 703942 - DNA, 75 bp, synthetic construct
  source 1..75: mol_type = other DNA
tactaccgcatttgttgccgtgaccagtcttgcggaaggcacaaagacattgccgacgacaatatctgaatccat

SEQ ID NO: 703943 - DNA, 75 bp, synthetic construct
  source 1..75: mol_type = other DNA
ctggccggaaatatggcctcagtgggcgctgccggtgtggggattgctgctgcgggaacgatggccggtgttaag

SEQ ID NO: 703944 - DNA, 75 bp, synthetic construct
  source 1..75: mol_type = other DNA
actgggtactggaaaaactcggggttatcaacaaagagtcagacacacttgaccagaccgccgccagaactcatg

SEQ ID NO: 703945 - DNA, 75 bp, synthetic construct
  source 1..75: mol_type = other DNA
gccgcaatggtcggggcactgcatgatgcaaaaatcacaggctcaatggcggggacgggaagccgtgccgtgtta

SEQ ID NO: 703946 - DNA, 75 bp, synthetic construct
  source 1..75: mol_type = other DNA
gaggggcagattggtggatttctcctgggaggggagagggttagagtttcttatatgccagatacaggccgtttt

SEQ ID NO: 703947 - DNA, 75 bp, synthetic construct
  source 1..75: mol_type = other DNA
gatgatggctggttcctgggctctatccatgatacccactacgggcctgcctgttactggttacgtcatatcaga

SEQ ID NO: 703948 - DNA, 75 bp, synthetic construct
  source 1..75: mol_type = other DNA
cactgacccgggagccaataacgtcatcaatgattgtaagtcaagaacaatgtatttatgatcaagccaaaggaa

SEQ ID NO: 703949 - DNA, 75 bp, synthetic construct
  source 1..75: mol_type = other DNA
ctggaggttcaaaaactgttgcgtgagatggtcaccacattgcaagattatcttcagaagcaattggcgcaaagc

SEQ ID NO: 703950 - DNA, 75 bp, synthetic construct
  source 1..75: mol_type = other DNA
ttccctggtatgaggggaatatcctgtttgcctttgcagttgctgcacaggtgctgacgtggtgtgagacgcgca

SEQ ID NO: 703951 - DNA, 75 bp, synthetic construct
  source 1..75: mol_type = other DNA
gtacaggaaaatcactaccccgtttctggcacggggattttttcccgacattctacgcctgtcatctgactgtgc

SEQ ID NO: 703952 - DNA, 75 bp, synthetic construct
  source 1..75: mol_type = other DNA
cgtgataaccagttgcttcatcctaccggcagcacccgactgcgcgaaggcgatgtgttgtgtgtaattggtcgg

SEQ ID NO: 703953 - DNA, 75 bp, synthetic construct
  source 1..75: mol_type = other DNA
catttatctgaacctgcccacgctggatgaggctgtgaacaccctgaagccctggtggccgggattatttgacgg

SEQ ID NO: 703954 - DNA, 75 bp, synthetic construct
  source 1..75: mol_type = other DNA
gctgtaccgggcggaagacagagcggaacgtctggcgctggtcgcctgcctgctggctgttattccggcgcttaa

SEQ ID NO: 703955 - DNA, 75 bp, synthetic construct
  source 1..75: mol_type = other DNA
tgatggcggcgtggctgtttaatcttgatttgattgaaggcttattaatcggcgctatcgtcggctccaccgatg

SEQ ID NO: 703956 - DNA, 75 bp, synthetic construct
  source 1..75: mol_type = other DNA
ggcggcattccgtttgataattatccttttgcctacatggtaagtaacctggcactggcgattattttgctcgat

SEQ ID NO: 703957 - DNA, 75 bp, synthetic construct
  source 1..75: mol_type = other DNA
ctggtctggtcacccggccagcgggatatcatcaaaacggtggcactggtgctgatggttctggaccatgcaaac

SEQ ID NO: 703958 - DNA, 75 bp, synthetic construct
  source 1..75: mol_type = other DNA
gtacacaatacagaaggagtttctttgtggcagtgccttttttatcggatggcggattgagacaccttttttttc

SEQ ID NO: 703959 - DNA, 75 bp, synthetic construct
  source 1..75: mol_type = other DNA
agagcggaacgtctggcgctgttggcctgcctgctggccgttattccggcccttaaccttgccgccagtgatgca

SEQ ID NO: 703960 - DNA, 75 bp, synthetic construct
  source 1..75: mol_type = other DNA
agagcggaacgtctggcgctgttggcctgcctgctggcagttattccggcacttaaccttgcccccagtgatgca

SEQ ID NO: 703961 - DNA, 75 bp, synthetic construct
  source 1..75: mol_type = other DNA
gtgtgcagggaaatccttaccccgtttctggtccggagatttcttcccgacgttctatgcctgtcatcttactgt

SEQ ID NO: 703962 - DNA, 75 bp, synthetic construct
  source 1..75: mol_type = other DNA
cgtgccgtgttaagtcgcctgcaggcaccaacgggaaaagcatgggatgcactcaaagagcttggcgtgaaaacc

SEQ ID NO: 703963 - DNA, 75 bp, synthetic construct
  source 1..75: mol_type = other DNA
gcggactgcattatcagttagagccttatgcacaagggaaacttgtacgctgtgttgtcggtgaagtttttgatg

SEQ ID NO: 703964 - DNA, 75 bp, synthetic construct
  source 1..75: mol_type = other DNA
ctgcgcacgtttacctttgaaaatggtgatatcgccgtgcaaatgggaactccgaccgattgtgtctatcttggc

SEQ ID NO: 703965 - DNA, 75 bp, synthetic construct
  source 1..75: mol_type = other DNA
ctaataacttttattctagagagtgtgagcgggctatcatttggaatgactcattcttaaacattcagtggccat

SEQ ID NO: 703966 - DNA, 75 bp, synthetic construct
  source 1..75: mol_type = other DNA
tggcaaagtatggatgtgatatcggtctgggggcgcggattggtaaaggcttcgtgttgccccaccattcaggtg

SEQ ID NO: 703967 - DNA, 75 bp, synthetic construct
  source 1..75: mol_type = other DNA
cagagaggctttctcctttggtggcgcttggctaatgaaatgtatatatccgggaataaaaaacaacgaaaatgt

SEQ ID NO: 703968 - DNA, 75 bp, synthetic construct
  source 1..75: mol_type = other DNA
gtaaatttgtcggcggagaataagcgccagttgtggatcccggaagggtttgcgcatggttttttggtgttgagt

SEQ ID NO: 703969 - DNA, 75 bp, synthetic construct
  source 1..75: mol_type = other DNA
ggcgacgccctccccgtttcggcgctgccgccagacggcacctggccgatgggcaccacgcgctgggaaaaacgc

SEQ ID NO: 703970 - DNA, 75 bp, synthetic construct
  source 1..75: mol_type = other DNA
ccgctcctgatttcgtgaaaaccgtaaccgctgcgatgctcgccgggcttggcgacgccctccccgtttcggcgc

SEQ ID NO: 703971 - DNA, 75 bp, synthetic construct
  source 1..75: mol_type = other DNA
ccttttttatccatcgaatggcctgaaattggggaagtgttaatatcttttaaagataaagagttaccaccgtta

SEQ ID NO: 703972 - DNA, 75 bp, synthetic construct
  source 1..75: mol_type = other DNA
atatagcaagtcatattattttgtctgaaaaagatgaaaaggcttgttcattcattgatgcagtatgcttttctt

SEQ ID NO: 703973 - DNA, 75 bp, synthetic construct
  source 1..75: mol_type = other DNA
cagcgtggcggtactggacagaaccaaagaacccggtgcccaggctgaaccgctctatctggatgtgatgaccgc

SEQ ID NO: 703974 - DNA, 75 bp, synthetic construct
  source 1..75: mol_type = other DNA
acatgaactgctgcgtgacgcagatgcactggtggaaaaatcaatctggctgattggtggcgatggctgggctta

SEQ ID NO: 703975 - DNA, 75 bp, synthetic construct
  source 1..75: mol_type = other DNA
cagtgaacggagatgctgatcagaccctgttgatgcttggcggtgcgggcggagtcccttgtatggctatacagc

SEQ ID NO: 703976 - DNA, 75 bp, synthetic construct
  source 1..75: mol_type = other DNA
cttcagtccggaaactttcgggaaagcaagaattcgtcaaccaataattttcgggaaatcgcggaaacgtcaacc

SEQ ID NO: 703977 - DNA, 75 bp, synthetic construct
  source 1..75: mol_type = other DNA
tgtaagccaaagtaagacttacaggttggattttgggcaatggctggaacagcaacgcgggaaaatcgatgtgga

SEQ ID NO: 703978 - DNA, 75 bp, synthetic construct
  source 1..75: mol_type = other DNA
ctggaacgcctgccgcgccgccatgcttcagtccggaaactttcgggaaaacaagaattcgtcaaccaataattt

SEQ ID NO: 703979 - DNA, 75 bp, synthetic construct
  source 1..75: mol_type = other DNA
attttcgggaaatcgcggaaacgtcaaccaactatccggtaattcctagtgaggtgttgtccgcaatcttgaagg

SEQ ID NO: 703980 - DNA, 75 bp, synthetic construct
  source 1..75: mol_type = other DNA
atcggtggttgggttctggctgaatacagtgcattgctactcgaaaatgctcgccgcagcaccagcagcaccaca

SEQ ID NO: 703981 - DNA, 75 bp, synthetic construct
  source 1..75: mol_type = other DNA
caaatgccgaaaacaatataccactccgccagttccggtaatgcaggctgatgtcgcgcaagcaattgaaaacct

SEQ ID NO: 703982 - DNA, 75 bp, synthetic construct
  source 1..75: mol_type = other DNA
ttgaattgttcattaaaaatccgcttgaaaacgggcttacccgtggcgaacaaatggaactggcacggattgcac

SEQ ID NO: 703983 - DNA, 75 bp, synthetic construct
  source 1..75: mol_type = other DNA
gtatcaaatgaagcatctcagccattgccggacatagcacagcgtctgatagaccatcttgcagagcatggtatt

SEQ ID NO: 703984 - DNA, 75 bp, synthetic construct
  source 1..75: mol_type = other DNA
aggctgaatgctaaagcacttcgccgggctcatgaggacatggaaaataaaaatgtgaacgggaaaattgttttt

SEQ ID NO: 703985 - DNA, 75 bp, synthetic construct
  source 1..75: mol_type = other DNA
tgcttcagtccggaaactttcgggaaaataagaattcgtcaaccaataattttcgggaaatcgcggaaacgtcaa

SEQ ID NO: 703986 - DNA, 75 bp, synthetic construct
  source 1..75: mol_type = other DNA
tccgccagttcctgtaatacaggctgatgtcgcgcaggcaattgaaaaactcaaacggaaattagtggaatgcaa

SEQ ID NO: 703987 - DNA, 75 bp, synthetic construct
  source 1..75: mol_type = other DNA
attgcgtatttcatgcgacaagcattggcatggctggaagggcattcatgcagcgcagaaagtcagggcaaatcc

SEQ ID NO: 703988 - DNA, 75 bp, synthetic construct
  source 1..75: mol_type = other DNA
ccgggtaaggtgagtactgaccctcagaatacatctcaggggaaggtggcaaaaacgataaacatatcctgtcca

SEQ ID NO: 703989 - DNA, 75 bp, synthetic construct
  source 1..75: mol_type = other DNA
tgttgtcgattttgggaatattaatcctgagcacgtggacaactcacgtggtgaaatcacaaaaaccataagcat

SEQ ID NO: 703990 - DNA, 75 bp, synthetic construct
  source 1..75: mol_type = other DNA
aaaagaggcagcgaaatcttcagaaacgaatgcatcatcaagtgccagtagtgcagcttcctcggcaacggcggc

SEQ ID NO: 703991 - DNA, 75 bp, synthetic construct
  source 1..75: mol_type = other DNA
ctacaaaaatagactggagaaatacagatatacagaacgaacagtgtccgatggacatctttataactttttaat

SEQ ID NO: 703992 - DNA, 75 bp, synthetic construct
  source 1..75: mol_type = other DNA
aacgtaacatgcgtaatgtttatcatgacagtcaggatgccgatattacaagaataaaatatgatattcagattc

SEQ ID NO: 703993 - DNA, 75 bp, synthetic construct
  source 1..75: mol_type = other DNA
cagatgtcatgttttagcaatttacaatattatattaaagtattattggataatttatgcagagataaaatcatt

SEQ ID NO: 703994 - DNA, 75 bp, synthetic construct
  source 1..75: mol_type = other DNA
ccctggataaaggtcacaggtaatgcaatggctgggcagactaatgtactgtctacaaatataaccagttttggt

SEQ ID NO: 703995 - DNA, 75 bp, synthetic construct
  source 1..75: mol_type = other DNA
taatggttcaggaaatggttacagagtgacagcaggtctggacacagcgcgttcaacgttcacctttacttcagt

SEQ ID NO: 703996 - DNA, 75 bp, synthetic construct
  source 1..75: mol_type = other DNA
ccagccgggagcaccgttatatgatacgattgttattgtcactggtgagagtgtgcgcagggattatatgtcagt

SEQ ID NO: 703997 - DNA, 75 bp, synthetic construct
  source 1..75: mol_type = other DNA
gcaatggccgttagtcaaaaagccagaacgatgcgccagcgccgcgaaaggctgaacctacagcagcgtatcgac

SEQ ID NO: 703998 - DNA, 75 bp, synthetic construct
  source 1..75: mol_type = other DNA
actggcaacaaatataactcattttggtatagcgctgtatcagggaaaagggatgtcaacacctcttacattagg

SEQ ID NO: 703999 - DNA, 75 bp, synthetic construct
  source 1..75: mol_type = other DNA
atctggataacatcggtacgactccgctggcggagaaagtgaaaaccaaagcctgcgatctggtattaaagcaag

SEQ ID NO: 704000 - DNA, 75 bp, synthetic construct
  source 1..75: mol_type = other DNA
taatttatgcagagataagattatcagtgttgaatttaaaaaaacaacaacagatactttggtctgtgattttga

SEQ ID NO: 704001 - DNA, 75 bp, synthetic construct
  source 1..75: mol_type = other DNA
acgctgcgtctggaagcgggcatgaatctttatggtcaggagatggacgaaaccatctctccgttagccgccaac

SEQ ID NO: 704002 - DNA, 75 bp, synthetic construct
  source 1..75: mol_type = other DNA
atggcacaacagactcctttgtacgaacaacacacgctttgcggtgctcgcatggtggatttccacggctggatg

SEQ ID NO: 704003 - DNA, 75 bp, synthetic construct
  source 1..75: mol_type = other DNA
caacagattcgtgcttttcttcagccagggtaagaactccacggggattaatccgtcgtctggtggaatcagtcg

SEQ ID NO: 704004 - DNA, 75 bp, synthetic construct
  source 1..75: mol_type = other DNA
cggggatgttgaatgcctctggcggtgtgatagatgacctcatcgtctactactttactgaagatttcttccgcc

SEQ ID NO: 704005 - DNA, 75 bp, synthetic construct
  source 1..75: mol_type = other DNA
aatgaaaaagcggcggatttctggcgcgcgctggtggaagcgggcgttaagccatgcggcctgggcgcgcgtgac

SEQ ID NO: 704006 - DNA, 75 bp, synthetic construct
  source 1..75: mol_type = other DNA
agcgggttatgaaattgcgctgcccaatgaaaaagcggccgatttctggcgcgcgctagtggaagcgggtgttaa

SEQ ID NO: 704007 - DNA, 75 bp, synthetic construct
  source 1..75: mol_type = other DNA
gatcactatattaaattaacttcagacaccttcaaagagagtaatttaattgcattgccagagattaagattgct

SEQ ID NO: 704008 - DNA, 75 bp, synthetic construct
  source 1..75: mol_type = other DNA
ggggaaatatctacctttcagagaatggtggctacagatgctagagttgttgatttgtcatacaatcactatgat

SEQ ID NO: 704009 - DNA, 75 bp, synthetic construct
  source 1..75: mol_type = other DNA
gattactatattaaattaacttcagatatattcaaaaatagtaactcaattgcattgcctgagattaagattgcg

SEQ ID NO: 704010 - DNA, 75 bp, synthetic construct
  source 1..75: mol_type = other DNA
ggtcatgtagccctgatgatttactggtagagttagtattatcgcaggaaaaaatatgcagtaagccgtcttccg

SEQ ID NO: 704011 - DNA, 75 bp, synthetic construct
  source 1..75: mol_type = other DNA
gagtactatattaaattaacttcagatactttcaaaaagaataattcaattgcattgtcagagattaagattgct

SEQ ID NO: 704012 - DNA, 75 bp, synthetic construct
  source 1..75: mol_type = other DNA
tattgtgtattgatgatgagtgttcatttcctgcaatgaggttatcagcgaatcacaaactcagagataaaatca

SEQ ID NO: 704013 - DNA, 75 bp, synthetic construct
  source 1..75: mol_type = other DNA
gtgaaccgccccgtgtttcctgtttatcattttctggtcagtgccgcgattctggtattcgtggtgattttctgg

SEQ ID NO: 704014 - DNA, 75 bp, synthetic construct
  source 1..75: mol_type = other DNA
tgggggcctttgtccggcaccagttacggcattgccgggctgctgatgctggcagtcagccaccggctgtaccgg

SEQ ID NO: 704015 - DNA, 75 bp, synthetic construct
  source 1..75: mol_type = other DNA
atatcatcaaaacggtggcactggtgctgatggttctggaccatgcaaaccgcattctgcatctggaccagacgt

SEQ ID NO: 704016 - DNA, 75 bp, synthetic construct
  source 1..75: mol_type = other DNA
gcttaaccttgccaccagtgatgcggcggctgtagccggccttgtgatgacggtgctgaccgttggtctggtgtc

SEQ ID NO: 704017 - DNA, 75 bp, synthetic construct
  source 1..75: mol_type = other DNA
gtgctgacgtggtgtgagacgcgcagcttgtggcgtactgctgcggccatactcctgatggcactgtgggggcct

SEQ ID NO: 704018 - DNA, 75 bp, synthetic construct
  source 1..75: mol_type = other DNA
ggcgaatggtataacacgcgctttgtccctgctgcgctggttgaaaccatactgaactcgccgcgtgtcgcgaat

SEQ ID NO: 704019 - DNA, 75 bp, synthetic construct
  source 1..75: mol_type = other DNA
gttcataaagaacaactgcaaaaaatgatcgcccgtaaaggcgagctgtctttttacgatattttcactctcgct

SEQ ID NO: 704020 - DNA, 75 bp, synthetic construct
  source 1..75: mol_type = other DNA
cttgcctgctggccgtgattccggcgcttaaccttgccaccagtgatgccgcggcggtggccggccttgtgatga

SEQ ID NO: 704021 - DNA, 75 bp, synthetic construct
  source 1..75: mol_type = other DNA
cgcggtttcaatctgcgtgagcgcgtgtttatcagctgggtgggattacgcggcgcggtgccaatcatcctggcc

SEQ ID NO: 704022 - DNA, 75 bp, synthetic construct
  source 1..75: mol_type = other DNA
acgtggcgcagcggaatatcccgctctcgcataaaaaactgcgctgggcgctgaaggccatcacccgttcagaaa

SEQ ID NO: 704023 - DNA, 75 bp, synthetic construct
  source 1..75: mol_type = other DNA
gcgggatatcatcaaaacggtggcactggtgctgatggtactggaccatgcaaaccgcattctgcatctggacca

SEQ ID NO: 704024 - DNA, 75 bp, synthetic construct
  source 1..75: mol_type = other DNA
agaacggaacgtctggcgctggtcgcctgcctgctggccgtgattccggggcttaaccttgccaccagtgatgcc

SEQ ID NO: 704025 - DNA, 75 bp, synthetic construct
  source 1..75: mol_type = other DNA
ggatgtttctggccgggcgaggagcctttccgctttttgccctggtgtgggggctgaatctgtcccgtcatgcgc

SEQ ID NO: 704026 - DNA, 75 bp, synthetic construct
  source 1..75: mol_type = other DNA
aacctgtcccgtcatgcgcatatccggcagtcggccattaaccgactgtggggatgggcagtgattgctcagttc

SEQ ID NO: 704027 - DNA, 75 bp, synthetic construct
  source 1..75: mol_type = other DNA
tgaaagtatttccgttatctgcggtaatccaggtgtgggaaaaactgaagcagcccgcgaatttcgtcgcaccaa

SEQ ID NO: 704028 - DNA, 75 bp, synthetic construct
  source 1..75: mol_type = other DNA
tccctggcaaagacacctttacgaaaaatattggtgcctgccgtgccttcggtgggtcagtaagcacaacaacag

SEQ ID NO: 704029 - DNA, 75 bp, synthetic construct
  source 1..75: mol_type = other DNA
tggtcacaaaatgggtcagtacataagttagtgtctgcgtccagtgtgaatacaagtgctgcaggagcgcacact

SEQ ID NO: 704030 - DNA, 75 bp, synthetic construct
  source 1..75: mol_type = other DNA
ctgtgcggttttctgctgggtaatcggccgattcgcaaccgctacggcatcctgcaaaatttcgacggcctcgcc

SEQ ID NO: 704031 - DNA, 75 bp, synthetic construct
  source 1..75: mol_type = other DNA
cgcggttttaatctacgtgagcgcgtgtttatcagttgggtgggattacgcggcgcggtgccaatcatcctggcc

SEQ ID NO: 704032 - DNA, 75 bp, synthetic construct
  source 1..75: mol_type = other DNA
cggaaccattgctgttatctgcggtaatccaggagtgggtaaaagcgaagcagcccgtgaattttgtcgcactaa

SEQ ID NO: 704033 - DNA, 75 bp, synthetic construct
  source 1..75: mol_type = other DNA
tcatcaaaacggtggcactggtgctgatggtgctggaccatgcaaaccgcattctgcatctggaccagacgtgga

SEQ ID NO: 704034 - DNA, 75 bp, synthetic construct
  source 1..75: mol_type = other DNA
ttggtctggtgtcgtgtacagggaaatcattaccccgtttctggcccggggattttttcccgacgttctatgcct

SEQ ID NO: 704035 - DNA, 75 bp, synthetic construct
  source 1..75: mol_type = other DNA
gcggcggtggccggccttgtgatgacggtgctgaccgttggcctggtgtcctgtgcagggaaatcattaccccgt

SEQ ID NO: 704036 - DNA, 75 bp, synthetic construct
  source 1..75: mol_type = other DNA
aaaagaggcagcgaaatcatcagaaacgaacgcatcctcgagcgccagtagttccgcttcctcggcaacggcggc

SEQ ID NO: 704037 - DNA, 75 bp, synthetic construct
  source 1..75: mol_type = other DNA
atggacgttgagtacggtcagtacagcgttattctgttggtggagggattcccgccgtcacatgccgggactatc

SEQ ID NO: 704038 - DNA, 75 bp, synthetic construct
  source 1..75: mol_type = other DNA
gttgcttcttgccgtgtggttacctttgtccggcaccagttacggtattgccgggctgctgatgctggcggtcag

SEQ ID NO: 704039 - DNA, 75 bp, synthetic construct
  source 1..75: mol_type = other DNA
tgaaggcgtgcgccaccatgcgctggatgatgcccgtcaccaggcgaaatacgtttcagcaatctggcaaaaact

SEQ ID NO: 704040 - DNA, 75 bp, synthetic construct
  source 1..75: mol_type = other DNA
caaaaacgatacatccggagccagcagcgcaacatacacagaaaaatccctgtaatgtttgtggggaaactggcg

SEQ ID NO: 704041 - DNA, 75 bp, synthetic construct
  source 1..75: mol_type = other DNA
agccaatatcagccagcctgacgccgatgaactgcttgcagtatcacgtggtgaatttgttgcaggaattagcga

SEQ ID NO: 704042 - DNA, 75 bp, synthetic construct
  source 1..75: mol_type = other DNA
acaatcgtcgaactgggaaaaaccatcgactttgatgccaagacagctattccattcgaaggcgtacgccataat

SEQ ID NO: 704043 - DNA, 75 bp, synthetic construct
  source 1..75: mol_type = other DNA
ttgtctgcgaggataaacctggtataccccgccctgccctcgattcatgggatgctgaatatatgcaggaaaacc

SEQ ID NO: 704044 - DNA, 75 bp, synthetic construct
  source 1..75: mol_type = other DNA
atgcgcaaacagcctgatgcccttcgctacgaccgccagactatttttggccttgtccgtgaacgtccgatcgac

SEQ ID NO: 704045 - DNA, 75 bp, synthetic construct
  source 1..75: mol_type = other DNA
ttaattaaggtgaacggtcatcgtgaaatcacatccacccgcaggttgtggcaccatctgatgattgaccttgaa

SEQ ID NO: 704046 - DNA, 75 bp, synthetic construct
  source 1..75: mol_type = other DNA
gccgggcttgaggagatcagcggcggcgatctgttgatcgacggcaaacgaatgaatgacgttccggctaaagag

SEQ ID NO: 704047 - DNA, 75 bp, synthetic construct
  source 1..75: mol_type = other DNA
aactgggcggcgcaaattctcggcctgcgtgagtacctgaaacgcaagccgggcgcgctttccggcgggcaacgc

SEQ ID NO: 704048 - DNA, 75 bp, synthetic construct
  source 1..75: mol_type = other DNA
ccggagatatgggaccggaatttagtaagactatcgatctggaaactgctggcggggtcattgatcgggacacca

SEQ ID NO: 704049 - DNA, 75 bp, synthetic construct
  source 1..75: mol_type = other DNA
tagagcgtgaggggccgttctacttcctcttcacagataaggatggcgaaaaatatggtcgcgcaaacaaacttt

SEQ ID NO: 704050 - DNA, 75 bp, synthetic construct
  source 1..75: mol_type = other DNA
gcaattcctggagcattatccggctgctcaggactgcgcttataaatttcttgtctgcgaggataaacccggtat

SEQ ID NO: 704051 - DNA, 75 bp, synthetic construct
  source 1..75: mol_type = other DNA
gcgataatgaaactggcgagacggcagatcactcaattaaggtgaacggtcatcacgaaatcacatccaccagca

SEQ ID NO: 704052 - DNA, 75 bp, synthetic construct
  source 1..75: mol_type = other DNA
caaactgttcgctatcggatgggttaaacacaaatgtaatccgggtgccaaatggcccgaaattcaggctgaatt

SEQ ID NO: 704053 - DNA, 75 bp, synthetic construct
  source 1..75: mol_type = other DNA
catactcaggctcacaacaaaatactggtgcatctgacacgaccgcacaaccagagccggtaaaagttaccgctg

SEQ ID NO: 704054 - DNA, 75 bp, synthetic construct
  source 1..75: mol_type = other DNA
gaatatttcgcccgcaaaaacagtacatactcaggttcacaacaaaatactggtgcatctgacacgaccgcacag

SEQ ID NO: 704055 - DNA, 75 bp, synthetic construct
  source 1..75: mol_type = other DNA
aacggtgcaactttcgacaacgtgattttacgccgttcatatgaacggcaggggatcccctgcccgtggcgttac

SEQ ID NO: 704056 - DNA, 75 bp, synthetic construct
  source 1..75: mol_type = other DNA
ggaaatggaaggctctgcgcatcagcacaaggagaacactggcagcaatcagcatcatgccagcgatagtgaaac

SEQ ID NO: 704057 - DNA, 75 bp, synthetic construct
  source 1..75: mol_type = other DNA
tcactggcagttcctggaacattatccggctgctcaggactgcgcttataaatttattgtctgcgaggataaacc

SEQ ID NO: 704058 - DNA, 75 bp, synthetic construct
  source 1..75: mol_type = other DNA
ctcaggaccacgccagcgataatgaaactggcgagacggcagatcccttaattgcggtgaacggtcatcacgtta

SEQ ID NO: 704059 - DNA, 75 bp, synthetic construct
  source 1..75: mol_type = other DNA
cggcaactgccccgattgtggcgcggtgatgggcgacgcaacataccaggaaacattcgatgaagagaatcaggt

SEQ ID NO: 704060 - DNA, 75 bp, synthetic construct
  source 1..75: mol_type = other DNA
tttctggtctggataaggcgctggctgccggggctactgaaatcacaaaagaagaatattttgcccgaaaaaatg

SEQ ID NO: 704061 - DNA, 75 bp, synthetic construct
  source 1..75: mol_type = other DNA
cgaaagaagaatattttgcccgcaaaaacggcacatactcaggttcacaacaaaatactggtgcatctgacacga

SEQ ID NO: 704062 - DNA, 75 bp, synthetic construct
  source 1..75: mol_type = other DNA
gatgacgcccgtcaccaggcaaaatacgtttcagcaatctggcaaaaactgatcccgaatccggttgatttttaa

SEQ ID NO: 704063 - DNA, 75 bp, synthetic construct
  source 1..75: mol_type = other DNA
atgggaaccaacaccaatgcgcccatcgtggttattggtgcggttttcttcgacccacaaacaggggaaatcggg

SEQ ID NO: 704064 - DNA, 75 bp, synthetic construct
  source 1..75: mol_type = other DNA
catgggaaaaaatcctgatgccccgattatctcaataggtgcaatatttttcgatccgcaaaccggagagatggg

SEQ ID NO: 704065 - DNA, 75 bp, synthetic construct
  source 1..75: mol_type = other DNA
tcccctgcccgtggcgctactacaacgatcgcgatgtacgcacaatcattgaactgggaaaatccatagacttcg

SEQ ID NO: 704066 - DNA, 75 bp, synthetic construct
  source 1..75: mol_type = other DNA
ggatcgcgaagactggaagcgtatctcagcatcaatgcgcaaacagcccgaagcacttggctatgaccgtcagac

SEQ ID NO: 704067 - DNA, 75 bp, synthetic construct
  source 1..75: mol_type = other DNA
gaatacaaacagacatggaaaacactcgaccatgagctggcctgcgccctctggcccggtgatgtgaatgcggga

SEQ ID NO: 704068 - DNA, 75 bp, synthetic construct
  source 1..75: mol_type = other DNA
aaagttaccgctgtcgaagtaaacaaaattatgcaggcagccaatatcaaccagcctgatgccgacaaaatactg

SEQ ID NO: 704069 - DNA, 75 bp, synthetic construct
  source 1..75: mol_type = other DNA
aaaaacccgtccgcgtccatttacccgttgtgaatgaccttccacctgaaggcgtgtttgatactgaattctgta

SEQ ID NO: 704070 - DNA, 75 bp, synthetic construct
  source 1..75: mol_type = other DNA
acgcttaaatgaaaatgggttttatttaccatcaagcctggccgataaagattatttatcgtatcagaaacggat

SEQ ID NO: 704071 - DNA, 75 bp, synthetic construct
  source 1..75: mol_type = other DNA
cgcctgcggtcagagcggtggcggcaactgccctgattgtggtgcggtgatgggtgacgcaacataccaggaaat

SEQ ID NO: 704072 - DNA, 75 bp, synthetic construct
  source 1..75: mol_type = other DNA
cctggtatcagttctttaatagcctcttgcaggacagtgcttatgaaatgttaccaaagccctgcttcgaggttt

SEQ ID NO: 704073 - DNA, 75 bp, synthetic construct
  source 1..75: mol_type = other DNA
ggagaatgctggcagcgctcaggaccacgccagcgatagtaaaactggcgagacggcagatcccttaattacggt

SEQ ID NO: 704074 - DNA, 75 bp, synthetic construct
  source 1..75: mol_type = other DNA
ttcacatggaaaaaaaacaaccagaattcaccagactcagtagaactgtttacccggaagtttaaaagcgcctga

SEQ ID NO: 704075 - DNA, 75 bp, synthetic construct
  source 1..75: mol_type = other DNA
ccggtaacgcacgtttcacgggaagaacttcaggcattacatatcgcacgagctgaagaactaccggctgttact

SEQ ID NO: 704076 - DNA, 75 bp, synthetic construct
  source 1..75: mol_type = other DNA
tggcatcacaatgatatttatagcgccttccccctcagttcaggaaaaaccagccagcactgacaataccaacgt

SEQ ID NO: 704077 - DNA, 75 bp, synthetic construct
  source 1..75: mol_type = other DNA
gtagtaagattaaatatcttgaaaataaattaattgagaatggttatcacttctattctggtggggttgataaag

SEQ ID NO: 704078 - DNA, 75 bp, synthetic construct
  source 1..75: mol_type = other DNA
ggcagccaatatcagccagcctgacgccgatgaactgcttgcagtatcacgtggtgaatttgttgaagggattag

SEQ ID NO: 704079 - DNA, 75 bp, synthetic construct
  source 1..75: mol_type = other DNA
tgattatgaaggatggcattgttcagcaggttggtgcgccgaaaacagtttataaccacccagcaaatatgtttg

SEQ ID NO: 704080 - DNA, 75 bp, synthetic construct
  source 1..75: mol_type = other DNA
tccggcaaccggagagatggggccagaattcagcaaaactatcgatctggaaaccgcaggtggggtcatcgatcg

SEQ ID NO: 704081 - DNA, 75 bp, synthetic construct
  source 1..75: mol_type = other DNA
gcaccgcctgcggtcagaccggcggcggcaactgccctgattgtggcgcggtgatgggcgacgcaacataccagg

SEQ ID NO: 704082 - DNA, 75 bp, synthetic construct
  source 1..75: mol_type = other DNA
atgattgccgggcttgaggagatcagcggcggcgatctgttgatcgacggcaaacgaatgaatgacgttccagcc

SEQ ID NO: 704083 - DNA, 75 bp, synthetic construct
  source 1..75: mol_type = other DNA
ggttctgaaaacacagggaagtttgcataagcccatcgtgggtaatgactccaacttactgatagtgttttatgt

SEQ ID NO: 704084 - DNA, 75 bp, synthetic construct
  source 1..75: mol_type = other DNA
cgaacggcaggggatcccctgcccggggcgttactacaacgatcgcgatgtacgcacaatcgttgagctgggaaa

SEQ ID NO: 704085 - DNA, 75 bp, synthetic construct
  source 1..75: mol_type = other DNA
gcactgttacaattgcgggaatttatcgacgaaaactccggtgaattttttgttcaggtctggggaaatggagcc

SEQ ID NO: 704086 - DNA, 75 bp, synthetic construct
  source 1..75: mol_type = other DNA
cagaaacgaaacaacctgagccagtagcgcaacaggaagcggaaaaagtctgcaccgcatgcggtcagaccggcg

SEQ ID NO: 704087 - DNA, 75 bp, synthetic construct
  source 1..75: mol_type = other DNA
caattgcgggaatttatcgacgaaaactccggtgaattttttgttcaggtttggggaaatggagccaacttcgac

SEQ ID NO: 704088 - DNA, 75 bp, synthetic construct
  source 1..75: mol_type = other DNA
ccggctattcatagaatttatcgaaaaaaactccggcgggtgttttgtccaagtatggggaaatggagccaactt

SEQ ID NO: 704089 - DNA, 75 bp, synthetic construct
  source 1..75: mol_type = other DNA
aggcgcggaacatccgaacaatgagaatgctggtaacgatcagcatcacaccagcgatagtgaaactggcgaggc

SEQ ID NO: 704090 - DNA, 75 bp, synthetic construct
  source 1..75: mol_type = other DNA
cggcggtgcacaatcttctcgcgcaacgcgtcagtgggctgatcattaactatccgctggatgaccaggatgcca

SEQ ID NO: 704091 - DNA, 75 bp, synthetic construct
  source 1..75: mol_type = other DNA
aagttctgtctcggcgcgtctgcgtctggcgggctggcacaaatatctcgattgcaatcaactacagccaatagc

SEQ ID NO: 704092 - DNA, 75 bp, synthetic construct
  source 1..75: mol_type = other DNA
cgcaaaccgcttctccccaggcgttggctgattccttaatgcagctggcgcgacaaatttcccgactggaaagcg

SEQ ID NO: 704093 - DNA, 75 bp, synthetic construct
  source 1..75: mol_type = other DNA
gggatcccctgcccgtggcgttactacaacgatcgcgatgtacgcacaatcgttgagctggggaaagccatagac

SEQ ID NO: 704094 - DNA, 75 bp, synthetic construct
  source 1..75: mol_type = other DNA
tgttccggcgttatttcttgatgtctctgaccagactcccatcaacagtattattttctcccatgaagacggtac

SEQ ID NO: 704095 - DNA, 75 bp, synthetic construct
  source 1..75: mol_type = other DNA
acgcgtcagtgggctgatcattaactatccgctggatgaccaggatgccattgctgtggaagctgcctgcgctaa

SEQ ID NO: 704096 - DNA, 75 bp, synthetic construct
  source 1..75: mol_type = other DNA
ccagcaggacgtgtgaccatctaatgatcgaccttgaaaccatgggaaaaaatcctgatgccccgattatctcaa

SEQ ID NO: 704097 - DNA, 75 bp, synthetic construct
  source 1..75: mol_type = other DNA
gctgtcatggttaagttcgacacatgtgaaaacatcaccgttgatatggttattagcgcacaggaattgttgcag

SEQ ID NO: 704098 - DNA, 75 bp, synthetic construct
  source 1..75: mol_type = other DNA
gcgggcgattgtgcgcgaagcgggcgtgtttttaatggatgaaccgctctctaaccttgatgccaagctgcgcgt

SEQ ID NO: 704099 - DNA, 75 bp, synthetic construct
  source 1..75: mol_type = other DNA
aacgctatacgatgtcgcagagtatgccggtgtctcttatcagaccgtttcccgcgtggtgaatcaggccagcca

SEQ ID NO: 704100 - DNA, 75 bp, synthetic construct
  source 1..75: mol_type = other DNA
ctgcacgcgccgtcgcaaattgtcgcggcgattaaatctcgcgccgatcaactgggtgccagcgtggtggtgtcg

SEQ ID NO: 704101 - DNA, 75 bp, synthetic construct
  source 1..75: mol_type = other DNA
gttgaagcgttgatgaaaatgccagaagttaacgccatgtatccggagcttaagttgcacgccattgggtgggtt

SEQ ID NO: 704102 - DNA, 75 bp, synthetic construct
  source 1..75: mol_type = other DNA
tgatgacgcccgttaccaggcaaaatacgtttcagttatctggcaaaaactgatcccgagtcaggctgattctta

SEQ ID NO: 704103 - DNA, 75 bp, synthetic construct
  source 1..75: mol_type = other DNA
taaaacagtgaaactggcttccgctaaatactatgacgaactgccaacggaagggaatgagcacggtcaggcgtt

SEQ ID NO: 704104 - DNA, 75 bp, synthetic construct
  source 1..75: mol_type = other DNA
cgcgccagaagcgttaacgcttctggcgcgtcaggcgtttcatgatgcatcatttatgctacgtccggcccacca

SEQ ID NO: 704105 - DNA, 75 bp, synthetic construct
  source 1..75: mol_type = other DNA
tactacaacgatcgcgatgtacgcacaatcgttgagctggggaaagccatagacttcgatgccagaacggctatt

SEQ ID NO: 704106 - DNA, 75 bp, synthetic construct
  source 1..75: mol_type = other DNA
gcgaagatcaaccgtcaggggatctggatcgaaaaactggaacataatccaggcaaatatatccctgaagaattg

SEQ ID NO: 704107 - DNA, 75 bp, synthetic construct
  source 1..75: mol_type = other DNA
gtatcggcggcccggcagcggtactggcgcaaggcagtataaagagtctggaatgtgttgagtatcctgagctgg

SEQ ID NO: 704108 - DNA, 75 bp, synthetic construct
  source 1..75: mol_type = other DNA
gcgcacgctgggtacggcggcctgtcctccgtatcatattgcgttcgttattggtggaacttctgcagaaacgaa

SEQ ID NO: 704109 - DNA, 75 bp, synthetic construct
  source 1..75: mol_type = other DNA
cccctgaagtacagaacgctgtcatggttaagttcgacacatgtgaaaacatcaccgttgatatggttattagcg

SEQ ID NO: 704110 - DNA, 75 bp, synthetic construct
  source 1..75: mol_type = other DNA
ccgatgaacgtcacttttgacaagctggccctgaagtacagaacgctgtcatggttaagttcgacacatgtgaaa

SEQ ID NO: 704111 - DNA, 75 bp, synthetic construct
  source 1..75: mol_type = other DNA
tgatgacgcccgttaccaggcaaaatacgtttcagctatctggcaaaaactgatcccaaatcaggctgattttta

SEQ ID NO: 704112 - DNA, 75 bp, synthetic construct
  source 1..75: mol_type = other DNA
cgtatctcggcatcaatgcgcaaacagcctgatgcccttcgctacgaccgccaaactatttttggccttgtccgt

SEQ ID NO: 704113 - DNA, 75 bp, synthetic construct
  source 1..75: mol_type = other DNA
tgaagagtatcaggttgaagttcaggaagatgatccggaggaaatggaaggcgctgaacatccacacaaggagaa

SEQ ID NO: 704114 - DNA, 75 bp, synthetic construct
  source 1..75: mol_type = other DNA
gccagcctgacgccgataagttgcttgctgcatcacgtggtgaatttgttgaagggattagtgacccgaatgatc

SEQ ID NO: 704115 - DNA, 75 bp, synthetic construct
  source 1..75: mol_type = other DNA
ggatccagacccgcgattctgtaaaccagaaccagcatgaatcggaacggaactaccaaaaagcggaacaaaaca

SEQ ID NO: 704116 - DNA, 75 bp, synthetic construct
  source 1..75: mol_type = other DNA
caggaagacatggcaacattcgacggacatatcgttgaagcgttgatgaaaatgccagaagttaacgccatgtat

SEQ ID NO: 704117 - DNA, 75 bp, synthetic construct
  source 1..75: mol_type = other DNA
ctgtctgctggggctactgaaatcacgaaagaagaatatttcgcccgcaaaaacggtacatactcaggttcacaa

SEQ ID NO: 704118 - DNA, 75 bp, synthetic construct
  source 1..75: mol_type = other DNA
ttctacttcctcttcaccgacaaggatggcgaaaaatacggtcgcgcaaacaaactttctggtctggataaggcg

SEQ ID NO: 704119 - DNA, 75 bp, synthetic construct
  source 1..75: mol_type = other DNA
gggacaccattaaatggtggcttaagcaatcacgcgaagcgcaatctgccattatgaccgatgaaatcccgttag

SEQ ID NO: 704120 - DNA, 75 bp, synthetic construct
  source 1..75: mol_type = other DNA
attaaatggtggcttaagcaatcacgcgaagcgcaatctgccattatgaccgatgaaatcccgttagatgatgca

SEQ ID NO: 704121 - DNA, 75 bp, synthetic construct
  source 1..75: mol_type = other DNA
ggtgaacgcaaggaaaccggaaaatacacgtctgttgttgatctcgcccgcgccagaatccaccgacagcacact

SEQ ID NO: 704122 - DNA, 75 bp, synthetic construct
  source 1..75: mol_type = other DNA
atgaagcccgggagaaagatccagaggaaatggaaagtgccgtatacccgaacaaggagtgcaccgaaggcgatc

SEQ ID NO: 704123 - DNA, 75 bp, synthetic construct
  source 1..75: mol_type = other DNA
atattttgcccgaaaaaatggcacatacacaggcttaccgcaaaatgcaaataccgcacaaaattctgaacaacc

SEQ ID NO: 704124 - DNA, 75 bp, synthetic construct
  source 1..75: mol_type = other DNA
taccgatgaagtacatgcccgtccggcgatggtgggattcttctttaccggcagcgctgtcattgggattctggt

SEQ ID NO: 704125 - DNA, 75 bp, synthetic construct
  source 1..75: mol_type = other DNA
agtgctaatctatgacaggaaggttaaagtttcaccgacacttgatgtcccgttacctgaaaatattccaagaaa

SEQ ID NO: 704126 - DNA, 75 bp, synthetic construct
  source 1..75: mol_type = other DNA
aggtgagcgccacaatgcgctggatgacgctcgttaccaggcaaaatacgtttcagctatctggcaaaaactgat

SEQ ID NO: 704127 - DNA, 75 bp, synthetic construct
  source 1..75: mol_type = other DNA
accagaatcagccagaaacggaacagaacgaccagaaagcggaacagaacagcccaaatacgcaacaaaacgagc

SEQ ID NO: 704128 - DNA, 75 bp, synthetic construct
  source 1..75: mol_type = other DNA
aatcaacgggtttgacaatctgatggctcagccgttgttgtcagatgagcccctgacagcgctgatggatcatta

SEQ ID NO: 704129 - DNA, 75 bp, synthetic construct
  source 1..75: mol_type = other DNA
ttcaggaagatgatccggagaaaatggaaggcgctgaacatccacacaaggagaacactggcggcaatcagcatc

SEQ ID NO: 704130 - DNA, 75 bp, synthetic construct
  source 1..75: mol_type = other DNA
ttcaggtctggggaaatggagccaacttcgacaacacgattttgcgccgttcatacgaacggcaggggatcccct

SEQ ID NO: 704131 - DNA, 75 bp, synthetic construct
  source 1..75: mol_type = other DNA
gcgggaatttatcgacgaaaactccggcgaattttttgttcaggtctggggaaatggagccaacttcgacaacac

SEQ ID NO: 704132 - DNA, 75 bp, synthetic construct
  source 1..75: mol_type = other DNA
gcctgcggtcaaagcggtggcggcaactgccctgattgtggcgcggtgatgggtgacgcaacataccaggaaaca

SEQ ID NO: 704133 - DNA, 75 bp, synthetic construct
  source 1..75: mol_type = other DNA
ggcagccaatatcagccagcctgacgccgataagttgcttgctgcctctcgcggagaatttgttgcagggattag

SEQ ID NO: 704134 - DNA, 75 bp, synthetic construct
  source 1..75: mol_type = other DNA
aaccggagatatgggaccggaatttagtaagactatcgatctggaaactgctggcggagtcattgatcgggacac

SEQ ID NO: 704135 - DNA, 75 bp, synthetic construct
  source 1..75: mol_type = other DNA
aaaaataatgtggaaaaatcacaaccgtctgacgcaatggcagatgaacaggcaacggctgaaacaatggaaccg

SEQ ID NO: 704136 - DNA, 75 bp, synthetic construct
  source 1..75: mol_type = other DNA
cacttgatgacgcccgttaccaggcaaaatacgtttcagctatctggcaaaaactgatcccgagtcaggctgatt

SEQ ID NO: 704137 - DNA, 75 bp, synthetic construct
  source 1..75: mol_type = other DNA
tgtcccctgaagtacagaacgcggtcctggttaagttcggtacatgtgaaaacatcaccgttgatatggcgattg

SEQ ID NO: 704138 - DNA, 75 bp, synthetic construct
  source 1..75: mol_type = other DNA
atggttgctctgggactggtgatggatttcgatgctcgaagtgtcatcacatttgagggtgagcgccataatgcc

SEQ ID NO: 704139 - DNA, 75 bp, synthetic construct
  source 1..75: mol_type = other DNA
gcctgctcgacccgctggagattcgcgacctccacaaactggtgcgtgatactgacaaagttttccctaatcctg

SEQ ID NO: 704140 - DNA, 75 bp, synthetic construct
  source 1..75: mol_type = other DNA
ctactgcaattgcgggaatttatagatgaaaactcctgtggattttatgttcgagtctggggaaatggagccaac

SEQ ID NO: 704141 - DNA, 75 bp, synthetic construct
  source 1..75: mol_type = other DNA
atgcctttatcgttattgattggcctgcgttttagccgcggacggcggcgcggcggcatggtgtcgctgatctcc

SEQ ID NO: 704142 - DNA, 75 bp, synthetic construct
  source 1..75: mol_type = other DNA
cacagttttgccatgatcccactggcagatgcccagcaatatcttgatatgggctccagcgtgtcaggtattgcc

SEQ ID NO: 704143 - DNA, 75 bp, synthetic construct
  source 1..75: mol_type = other DNA
tctccagcgatatctattttattgacttcctgccatcggaattgcactggctggacgtcttctacgtactggtca

SEQ ID NO: 704144 - DNA, 75 bp, synthetic construct
  source 1..75: mol_type = other DNA
atgaaaacgcgttgtatcatttgcgcgatgccctgaccaaaatcagggaatatcacgaaacggaagatgaacagc

SEQ ID NO: 704145 - DNA, 75 bp, synthetic construct
  source 1..75: mol_type = other DNA
accttttaagtcttggggaaacaatttataccactgacgggaaaagtggagccgaaaagcattttaacggcgaat

SEQ ID NO: 704146 - DNA, 75 bp, synthetic construct
  source 1..75: mol_type = other DNA
atcaatttatggtgatgcaaaatttgccagtgatgccgatatacgaaaatccagacaagtaacgtggggagataa

SEQ ID NO: 704147 - DNA, 75 bp, synthetic construct
  source 1..75: mol_type = other DNA
aagacggtttaattcgcgccatttttgtctggtatggattgctggctgggttgttcggcagcttgtgtggtgtga

SEQ ID NO: 704148 - DNA, 75 bp, synthetic construct
  source 1..75: mol_type = other DNA
tcctgatggcgaaaaagttccagcagctggaataacccaggcttattttgagttgggtatgacgttcccagaact

SEQ ID NO: 704149 - DNA, 75 bp, synthetic construct
  source 1..75: mol_type = other DNA
tccgctgggtagaaaaagacacccctgatgcggttaaaaaaattcaggcgttgttaccggcgatcgaaaaagcaa

SEQ ID NO: 704150 - DNA, 75 bp, synthetic construct
  source 1..75: mol_type = other DNA
gaccaacagctatgtctatatcaagagctggatcggtacttacggctatatgtatcgggatatccagatgatccg

SEQ ID NO: 704151 - DNA, 75 bp, synthetic construct
  source 1..75: mol_type = other DNA
cccaacaatatcttgatatgggttccagcgtgtcaggtattgcccttaaaatgacggatgttttcaacgccaata

SEQ ID NO: 704152 - DNA, 75 bp, synthetic construct
  source 1..75: mol_type = other DNA
ggcggtggatcagccgtggactaactggcaggaagcactggatcacgtgcaaaaagtgccaggtattgccgccgc

SEQ ID NO: 704153 - DNA, 75 bp, synthetic construct
  source 1..75: mol_type = other DNA
tctatggtgttgaaggtgccaaaacgctgatgagtgcgcatccctgccggattatctatgctgtcagtgaagaag

SEQ ID NO: 704154 - DNA, 75 bp, synthetic construct
  source 1..75: mol_type = other DNA
gccatggtcagcagaattgtgacggatttacgcgtaccgaggatgttgctctctgtgctgacaggggcgggactg

SEQ ID NO: 704155 - DNA, 75 bp, synthetic construct
  source 1..75: mol_type = other DNA
atctataacctttatcaatatgacgccgagtgcaaggagtggttgcagatttgggcggattatatggatgggcta

SEQ ID NO: 704156 - DNA, 75 bp, synthetic construct
  source 1..75: mol_type = other DNA
ccctttccactaaagctattgaagcaatgaaacctcatgacaaagacaaggccgatgttggggaaaatgcaggcc

SEQ ID NO: 704157 - DNA, 75 bp, synthetic construct
  source 1..75: mol_type = other DNA
aactggaagcgcaggaatcccgttttacctacagttaccggtttggtctgttcgataaagcaggcgactggacgc

SEQ ID NO: 704158 - DNA, 75 bp, synthetic construct
  source 1..75: mol_type = other DNA
ttcgataaagcaggcgactggaagaacgttccggtaaaagatgccgaagtggttgagcgactggaacataccctg

SEQ ID NO: 704159 - DNA, 75 bp, synthetic construct
  source 1..75: mol_type = other DNA
gcctacctacagtcccgtggtgaaaatattggaaccttcgataaccaggatttggtaaaatacattgatgtgggg

SEQ ID NO: 704160 - DNA, 75 bp, synthetic construct
  source 1..75: mol_type = other DNA
gtggtgaaagacggtaaaacctggctggttaccggtagcccaggcggtagccggatcatcactacagtgctgcaa

SEQ ID NO: 704161 - DNA, 75 bp, synthetic construct
  source 1..75: mol_type = other DNA
gtgaatagcatcgattatggaatgaacgtcgccgaagcgaccaatgcgccgcgtttccaccatcagtggttgccg

SEQ ID NO: 704162 - DNA, 75 bp, synthetic construct
  source 1..75: mol_type = other DNA
ttcgtgccgctggaggccggtgacaccgttgctgacgtagctggcctgttcgttcgtccgtacccaactaccaac

SEQ ID NO: 704163 - DNA, 75 bp, synthetic construct
  source 1..75: mol_type = other DNA
attatctatgctgtcagtgaagaggatgatgccgcgaaaatatcagaaaaacttggatatattaccactacatca

SEQ ID NO: 704164 - DNA, 75 bp, synthetic construct
  source 1..75: mol_type = other DNA
gtttcgtctctcattgtgcctgtttttattatctggcaactgaataaaatggatgttgctctttatggtgatgcg

SEQ ID NO: 704165 - DNA, 75 bp, synthetic construct
  source 1..75: mol_type = other DNA
cctgaaacgcggttacatctgcgtaactgctaccgcaggcaacgcggcgaccgcgaaaaaaggcgatccggttta

SEQ ID NO: 704166 - DNA, 75 bp, synthetic construct
  source 1..75: mol_type = other DNA
tccgctgggtagagaaagacacccctgatgctgttgaaaaaatgcaggctctgttaccggcgatcgaaaaggcga

SEQ ID NO: 704167 - DNA, 75 bp, synthetic construct
  source 1..75: mol_type = other DNA
gatgtcgctggcgttaatggcggtgtgtaaaccgggcgatattgtcgcggtcgaatctccctgttattacggttc

SEQ ID NO: 704168 - DNA, 75 bp, synthetic construct
  source 1..75: mol_type = other DNA
gtcactatcatcgccatatccggcggatgcggcagaactatcagcgcaatttggcgctttatacctgctggatac

SEQ ID NO: 704169 - DNA, 75 bp, synthetic construct
  source 1..75: mol_type = other DNA
gaaacgatgaagctcatcactccgcagccgcgttcgggttattttgtcgcgcaacataaagcccagccaccagtg

SEQ ID NO: 704170 - DNA, 75 bp, synthetic construct
  source 1..75: mol_type = other DNA
tgcctggagccgcctcttcccgcagggcgatgaactgacgcccaaccagcagggcattgctttttaccgttctgt

SEQ ID NO: 704171 - DNA, 75 bp, synthetic construct
  source 1..75: mol_type = other DNA
tgatgtacgatcgttatcagaagccgctgtttctggtggaaaacggcctcggcgcaaaagatgaacttgctgcca

SEQ ID NO: 704172 - DNA, 75 bp, synthetic construct
  source 1..75: mol_type = other DNA
gcatggcgatgaatgcctgggcatatcctgatggtgagaaagtgcctgcagctgaaatagcccggacttatttcg

SEQ ID NO: 704173 - DNA, 75 bp, synthetic construct
  source 1..75: mol_type = other DNA
gctgaaataacctgggcttattttgagctgggtatgacgttcccggagctatatgacgacagccatccggaagcc

SEQ ID NO: 704174 - DNA, 75 bp, synthetic construct
  source 1..75: mol_type = other DNA
tccgctgggtagagaaagacacccctgatgcagttgaaaaaattcaggcgttgttaccagcgatcgaaaaagcaa

SEQ ID NO: 704175 - DNA, 75 bp, synthetic construct
  source 1..75: mol_type = other DNA
gctgaaataacccaggcttattttgagttggggctgacgtttcctgaactgtacgacgacagccatccggaagcc

SEQ ID NO: 704176 - DNA, 75 bp, synthetic construct
  source 1..75: mol_type = other DNA
tgtcgcggtggtaattgctggtttcaatcagatgaatcgcggtggcccggcaggaaatattgtagctgtgcattg

SEQ ID NO: 704177 - DNA, 75 bp, synthetic construct
  source 1..75: mol_type = other DNA
atgtccggttttcaacaaaccatgcaaatgttgaatgagggcatcgttcccactgcgatgctggttgccaacgat

SEQ ID NO: 704178 - DNA, 75 bp, synthetic construct
  source 1..75: mol_type = other DNA
gcatggcgatgaatgcctgggcacatctgaacggtgaaaaagttccggctgcgaaaattaccaaagcgtatttcg

SEQ ID NO: 704179 - DNA, 75 bp, synthetic construct
  source 1..75: mol_type = other DNA
ttgaagagtgtaaaaagtacggtatcgaaccgctggtcacgttgtgccacttcgatgtgccgatgcatctggtca

SEQ ID NO: 704180 - DNA, 75 bp, synthetic construct
  source 1..75: mol_type = other DNA
tttgcaggctaccgtttttctgaaaagaacttcatgaccatgagcgagtatctggacgcgaaccagtcagacatg

SEQ ID NO: 704181 - DNA, 75 bp, synthetic construct
  source 1..75: mol_type = other DNA
gatgaagatgacagcagtaacagtacaacgagtaaaaactgggactggagccgttattacgcctggcgagcttta

SEQ ID NO: 704182 - DNA, 75 bp, synthetic construct
  source 1..75: mol_type = other DNA
tgatgcggttaaaaaaattcaggcgttgttaccggctatcgaaaaagcaatgccacctctgctggtggcccgaat

SEQ ID NO: 704183 - DNA, 75 bp, synthetic construct
  source 1..75: mol_type = other DNA
gcgccgttgaaattatccaacggcaggcggagcagcacgatgttaagcgcgtcaccgccgtgtggctggaaattg

SEQ ID NO: 704184 - DNA, 75 bp, synthetic construct
  source 1..75: mol_type = other DNA
agcacgatgcgcagtgtccgatctgtcacggcgagcggttgcgtgtcgataccggcgattcgctgatcgtcaaaa

SEQ ID NO: 704185 - DNA, 75 bp, synthetic construct
  source 1..75: mol_type = other DNA
aggcgttgttaccagcgatcgaaaaggcaatgccacctttgctggtggccagaatgcgcagccacagttcagctt

SEQ ID NO: 704186 - DNA, 75 bp, synthetic construct
  source 1..75: mol_type = other DNA
acttcccacagggcgaaagtcgcgaccatccgattaaattcccggcgaaagcgcagttttatcagaacctgcaaa

SEQ ID NO: 704187 - DNA, 75 bp, synthetic construct
  source 1..75: mol_type = other DNA
agaaaggccattatggcgtggcgctgctgaccaaagagacgccgattgccgtgcgtcgcggctttcccggtgacg

SEQ ID NO: 704188 - DNA, 75 bp, synthetic construct
  source 1..75: mol_type = other DNA
ggcattccgctgatgggctacaccacctggggctgtattgatttagtttccgcctctacgggtgaaatgagcaaa

SEQ ID NO: 704189 - DNA, 75 bp, synthetic construct
  source 1..75: mol_type = other DNA
gcgaatggatggacagactgatcggctgggggctggtagataccttccgtcacgctaatccggaaacagcagatc

SEQ ID NO: 704190 - DNA, 75 bp, synthetic construct
  source 1..75: mol_type = other DNA
agaaaccggcatcgactatgaaattcgcagcatggaaaaaccatcagatcacgcaccggtgtgggcgaccttccg

SEQ ID NO: 704191 - DNA, 75 bp, synthetic construct
  source 1..75: mol_type = other DNA
ccatccgataaaattcccggcaaaggcgcagttttatcagaatctgcaaaactacctggaaaccgaactcaagcg

SEQ ID NO: 704192 - DNA, 75 bp, synthetic construct
  source 1..75: mol_type = other DNA
cgacccgaatgatccgaaatgggtgaaggggattgaaacccgcgattctgtgaaccagaaccagcaagaaacgga

SEQ ID NO: 704193 - DNA, 75 bp, synthetic construct
  source 1..75: mol_type = other DNA
ggaaatggaaggtactgcacatcagcacaaggagaacactggcggcaatcagcatcatgccagcgatagtgaaac

SEQ ID NO: 704194 - DNA, 75 bp, synthetic construct
  source 1..75: mol_type = other DNA
gtgaattttttgttcatgtctggggaaatggagccaacttcgacaacacgattttgcgccgttcatacgaacggc

SEQ ID NO: 704195 - DNA, 75 bp, synthetic construct
  source 1..75: mol_type = other DNA
gtagcttagataactacaccaaaggcaatggcgatggttttggtttctctgcgacctatgaatacgaaggtttcg

SEQ ID NO: 704196 - DNA, 75 bp, synthetic construct
  source 1..75: mol_type = other DNA
aatgcagaagtttgggccgcaggtctgaaatatgacgctaacaacatttacctggccactacctattctgaaacc

SEQ ID NO: 704197 - DNA, 75 bp, synthetic construct
  source 1..75: mol_type = other DNA
ccacacaaggagaatgcgggaagcgctcagggccacgccagcgatagtgaaactggcgaggcgacagatccctta

SEQ ID NO: 704198 - DNA, 75 bp, synthetic construct
  source 1..75: mol_type = other DNA
gcgaagcgatcacgcgaagcgcaatctgccatttttaccgatgaaatcccgttagatgacgctctactgcaatta

SEQ ID NO: 704199 - DNA, 75 bp, synthetic construct
  source 1..75: mol_type = other DNA
ggatgaagaaacagaccagaacactactgatattctccagccgtcagcagcacaaactgatgcagtggaaactga

SEQ ID NO: 704200 - DNA, 75 bp, synthetic construct
  source 1..75: mol_type = other DNA
ttatcagcacacccgcagcaacgatgacgacgatgacagcagtaacagtacaacgagcaaacactgggactggag

SEQ ID NO: 704201 - DNA, 75 bp, synthetic construct
  source 1..75: mol_type = other DNA
gggggggcgaggactcacatgatatcagcggcaacggtaccgttggggcgaacctgggggcatggcgtttccgtg

SEQ ID NO: 704202 - DNA, 75 bp, synthetic construct
  source 1..75: mol_type = other DNA
cggggctactgaaatcacgaaagaagaatattttgcccgtaaaaacggcacgtactcaggttcacaacaaaatac

SEQ ID NO: 704203 - DNA, 75 bp, synthetic construct
  source 1..75: mol_type = other DNA
tctgcgaggataaacccggcatggcccgccctgctctcgattcctgggattccgaatatatgcaggaaaaccgct

SEQ ID NO: 704204 - DNA, 75 bp, synthetic construct
  source 1..75: mol_type = other DNA
ctgaaattcggtgactacggctccatcgattacggccgtaactacggtgtagcatacgacatcggtgcgtggact

SEQ ID NO: 704205 - DNA, 75 bp, synthetic construct
  source 1..75: mol_type = other DNA
ccaacttcgacaacgtaattttacgccgttcatatgaacgacaggggatcccctgtccgtggcgctacaacaacg

SEQ ID NO: 704206 - DNA, 75 bp, synthetic construct
  source 1..75: mol_type = other DNA
gtggtgattgcggcggtttacggtttatgtgcgaatcctgcaggtatagcctcagcgccattaattccgggtatt

SEQ ID NO: 704207 - DNA, 75 bp, synthetic construct
  source 1..75: mol_type = other DNA
caccacaatccttgagatccgtccccggaaaaggctgaaatatgcaggtgatggtggcaacagcggcggtctgct

SEQ ID NO: 704208 - DNA, 75 bp, synthetic construct
  source 1..75: mol_type = other DNA
aactgccctgattgtggcgcggtgatgggcgacgcaacataccagaaaacattcgatgaagagaatcaggttgaa

SEQ ID NO: 704209 - DNA, 75 bp, synthetic construct
  source 1..75: mol_type = other DNA
gagcatgagaaatatccccggtagctatcatgcgatgcaaaatggctactggggggagtcgcatggctgcgagtt

SEQ ID NO: 704210 - DNA, 75 bp, synthetic construct
  source 1..75: mol_type = other DNA
atccactgcattacgagaatctatttgcgcggtcatcgccggaaaagattgttatcaggcggacacgctatcatt

SEQ ID NO: 704211 - DNA, 75 bp, synthetic construct
  source 1..75: mol_type = other DNA
ggcctggcgatattgataccggaaacattgacggcagcatccatcgctgggcaaaaaatgaagttatcgacaaag

SEQ ID NO: 704212 - DNA, 75 bp, synthetic construct
  source 1..75: mol_type = other DNA
ggagaaaatggaaggcgctgaacatccacacaaggagaatgctggcagcgctcaggaccacgccagcgatagtga

SEQ ID NO: 704213 - DNA, 75 bp, synthetic construct
  source 1..75: mol_type = other DNA
aagggtaaagatcttggagtatggggcgatcaagacttagtcaaatatgttgatgtcggcgctacctattacttc

SEQ ID NO: 704214 - DNA, 75 bp, synthetic construct
  source 1..75: mol_type = other DNA
ctgcttacgacgcttcttcgccatatatcgataatcaacgggttcgacaatccgatgactcagccgttgttgtca

SEQ ID NO: 704215 - DNA, 75 bp, synthetic construct
  source 1..75: mol_type = other DNA
tcttgatactgatgctctgtctgacgggctaccgttgtatgtgtcgctgtaccccacggaagggggaatgcagga

SEQ ID NO: 704216 - DNA, 75 bp, synthetic construct
  source 1..75: mol_type = other DNA
gccccgcggacagcagaaagaggctctgcttgcgtcagccgcgctgcccctgctgttccgtccccgtgaggttca

SEQ ID NO: 704217 - DNA, 75 bp, synthetic construct
  source 1..75: mol_type = other DNA
cagcaaaccgggatacacgttgcccagtcgataattgattacttcgcaggaagggagataaaaaacgtgttgtga

SEQ ID NO: 704218 - DNA, 75 bp, synthetic construct
  source 1..75: mol_type = other DNA
actataagatcaacctgaacgatgaaagtgattttaccaaaaaatctggcgttgcaaccgacaacatcgttgctg

SEQ ID NO: 704219 - DNA, 75 bp, synthetic construct
  source 1..75: mol_type = other DNA
attacggctcaatcgattacggccgtaacttcggtgtagcatacgacatcggtgcgtggactgacgtcctgccag

SEQ ID NO: 704220 - DNA, 75 bp, synthetic construct
  source 1..75: mol_type = other DNA
gcagatgatggtgatactacttatgcccgtcttggcttcaaaggtgaaacccaaatcaacgatcaactgactggg

SEQ ID NO: 704221 - DNA, 75 bp, synthetic construct
  source 1..75: mol_type = other DNA
ctgctcagtatcagggtaaaaatgaccgcactgacgtaactgaagccaatggtgatggtttcggtttctccacta

SEQ ID NO: 704222 - DNA, 75 bp, synthetic construct
  source 1..75: mol_type = other DNA
tggatctgtacggcaaagttaacgcagaacattacttctcttcttcagctagtgatgacggagataagacttatg

SEQ ID NO: 704223 - DNA, 75 bp, synthetic construct
  source 1..75: mol_type = other DNA
atgaaggatttggcattggcgcaacttatgcaaaatctgaccgtactgatggacaggtatcctatgctaatgcaa

SEQ ID NO: 704224 - DNA, 75 bp, synthetic construct
  source 1..75: mol_type = other DNA
caaggtaaaaatgatagtgctgcaaaagtgaacaactggaaaggccgcgacgaagttgaatctaatggtgatggc

SEQ ID NO: 704225 - DNA, 75 bp, synthetic construct
  source 1..75: mol_type = other DNA
cgtgaactgctgacgacgctgaatctgaagctggaaccggcggatgattttcgtgacgagccggtgaagttaacg

SEQ ID NO: 704226 - DNA, 75 bp, synthetic construct
  source 1..75: mol_type = other DNA
aactggaagcgcaggagtcccgttttacctacagttatcagttcggtctatttgataaagcaggtgactggacga

SEQ ID NO: 704227 - DNA, 75 bp, synthetic construct
  source 1..75: mol_type = other DNA
tatattgcaaccctttattgcttttatgaaccatcgtgcacatatcgatcgtcggctggctcccattgcgaatat

SEQ ID NO: 704228 - DNA, 75 bp, synthetic construct
  source 1..75: mol_type = other DNA
ttacctaagccggttagcggtggccgatttgtaactaatgatggttctgttcattttgatggtgtggcatctata

SEQ ID NO: 704229 - DNA, 75 bp, synthetic construct
  source 1..75: mol_type = other DNA
tggtatggggtctgtgagttccaggctaaatgctctgtttatttcgctaccgaaaaatagccatttagatattag

SEQ ID NO: 704230 - DNA, 75 bp, synthetic construct
  source 1..75: mol_type = other DNA
aacaaaaatatgtctacttttgttgattacaaaatcaacctgcttgacaaaaatgacttcactaaaacactcggt

SEQ ID NO: 704231 - DNA, 75 bp, synthetic construct
  source 1..75: mol_type = other DNA
cacaagaactgcgccaggccggtgaaggcgaagcggtgaaagttgaccttaaccgcccgatgaaagagatcctcg

SEQ ID NO: 704232 - DNA, 75 bp, synthetic construct
  source 1..75: mol_type = other DNA
attcccggggcggttcatattacgcttcttcgccatatatcgacaatcaacgggtttgacaatctgatggctcag

SEQ ID NO: 704233 - DNA, 75 bp, synthetic construct
  source 1..75: mol_type = other DNA
ccagagccgataaaagttaccgctgacgaagtaaacaaaattatgcaggcagccaatatcatccagcctgacgcc

SEQ ID NO: 704234 - DNA, 75 bp, synthetic construct
  source 1..75: mol_type = other DNA
gggattaattcaaatgcggttgcggaatttatcattggacttatcttcgcgagcatgagaaatatccctggcagc

SEQ ID NO: 704235 - DNA, 75 bp, synthetic construct
  source 1..75: mol_type = other DNA
tgctgttccgtccccgcgagattcagggaacaatgtacggtgatggtgggatgggcggatggcgaaacaggcagg

SEQ ID NO: 704236 - DNA, 75 bp, synthetic construct
  source 1..75: mol_type = other DNA
agtagaagatttcccggcgtttatcctggtcgatgacaaaggtaacgacttcttccagcaaatcgtcaacaaaca

SEQ ID NO: 704237 - DNA, 75 bp, synthetic construct
  source 1..75: mol_type = other DNA
agcaggcactgaaactgattgaagatgttggctgctgcaatgtaaaaatccagtatgacatttatcatatgcaac

SEQ ID NO: 704238 - DNA, 75 bp, synthetic construct
  source 1..75: mol_type = other DNA
accctttcaccgcgccctccgggcagcgcatcgacgagctgcaactcactcgcctgaaggtgaaagatatgcgcg

SEQ ID NO: 704239 - DNA, 75 bp, synthetic construct
  source 1..75: mol_type = other DNA
cgcaggtctgaaatatgacgctaacaacatttacctggccactacctattctgaaacccagaatatgactgtatt

SEQ ID NO: 704240 - DNA, 75 bp, synthetic construct
  source 1..75: mol_type = other DNA
gcactgacccggtcagaggcggtgttgcagaaaagcctggatataacggaagaggcagatttggcactgagaaac

SEQ ID NO: 704241 - DNA, 75 bp, synthetic construct
  source 1..75: mol_type = other DNA
cataatgcacttgatgacgcccgttaccaggcaaaatacgtttcagttatctggcaaaaactgatcccgaatcag

SEQ ID NO: 704242 - DNA, 75 bp, synthetic construct
  source 1..75: mol_type = other DNA
gccaatggtgatggtttcggtttctccactacttatgagtatgaaggattcggtgtaggtgcaacctatgctaaa

SEQ ID NO: 704243 - DNA, 75 bp, synthetic construct
  source 1..75: mol_type = other DNA
ttgaagggcaggagattttgaaagtcgcacccgaagcgttaactctgttggcgcgtcaggcgtttcatgatgcgt

SEQ ID NO: 704244 - DNA, 75 bp, synthetic construct
  source 1..75: mol_type = other DNA
ttgcggcagttctttatcggtagtcatacctccgaaatgctgcaaaagacgcaacaaccgcttcttatcctccgt

SEQ ID NO: 704245 - DNA, 75 bp, synthetic construct
  source 1..75: mol_type = other DNA
tttagccatgcagatacgcagtttaaaaatgttccatcaacttttcaggttggttatatcaatgattttggtggc

SEQ ID NO: 704246 - DNA, 75 bp, synthetic construct
  source 1..75: mol_type = other DNA
gtgatgcaagtcactatgcagcacgcattgaaactattctggcggccaaaagccattgaattagaagacgatggg

SEQ ID NO: 704247 - DNA, 75 bp, synthetic construct
  source 1..75: mol_type = other DNA
aaccattcagccgtcttgacgtaactctgcgtgataattttcgtcagtgggtatttaatgaagttcgcaaactgg

SEQ ID NO: 704248 - DNA, 75 bp, synthetic construct
  source 1..75: mol_type = other DNA
ctgccagcggcactcaaaggtgttgcaaggcgcgatgcggtaaatgatgcgctggagcgtgcggggcttggcggt

SEQ ID NO: 704249 - DNA, 75 bp, synthetic construct
  source 1..75: mol_type = other DNA
ccaggcgcaatgccgtgaaagacgcgcttgatcgagcgggactggctgaaacttatcaccaggaccctgcgacat

SEQ ID NO: 704250 - DNA, 75 bp, synthetic construct
  source 1..75: mol_type = other DNA
ggcgaattgaaattaaagtcacagaaaagtacctgattgatcgaggcattctggcaaaaccgtacttcctttatc

SEQ ID NO: 704251 - DNA, 75 bp, synthetic construct
  source 1..75: mol_type = other DNA
aacaaacacctcaattttagagttggtatgagcacagcctaccaaaaggcttatcagttggggatcgtgtataat

SEQ ID NO: 704252 - DNA, 75 bp, synthetic construct
  source 1..75: mol_type = other DNA
aaagacaaagccccggcgcttggtaaaccaaatccggcggttaacccattcccatacaatcctgattatgcgtat

SEQ ID NO: 704253 - DNA, 75 bp, synthetic construct
  source 1..75: mol_type = other DNA
cgcatcttcaatggcggtcttccggtgaatgttacccagtctgaactgcagtcaggtgttgctgctgctgataga

SEQ ID NO: 704254 - DNA, 75 bp, synthetic construct
  source 1..75: mol_type = other DNA
ctgtggctgcatctgcagtatctggtatggcacatgcctggacgaatggtgatttcaatggttcggttgatatcg

SEQ ID NO: 704255 - DNA, 75 bp, synthetic construct
  source 1..75: mol_type = other DNA
cgctggctgcctctgctgtatctggtatggctcatgcctggacgaatggtgatttcaatggatcggttgatatcg

SEQ ID NO: 704256 - DNA, 75 bp, synthetic construct
  source 1..75: mol_type = other DNA
tctgttttcatggatgattggtgcgctggccggacagttttcttgtacaggtgagctatggctcaatgagcaacg

SEQ ID NO: 704257 - DNA, 75 bp, synthetic construct
  source 1..75: mol_type = other DNA
gtgtttcgttacgcgatcatcactggccgcgctgaatacaacccggcacctgatttagctatagcgttagccgct

SEQ ID NO: 704258 - DNA, 75 bp, synthetic construct
  source 1..75: mol_type = other DNA
atacggtatggggaattgatgcattttcttctaatgaatatgcgaaaaataatgcttttttcggagttggagcag

SEQ ID NO: 704259 - DNA, 75 bp, synthetic construct
  source 1..75: mol_type = other DNA
atggtcacagaatggattaaatggtgttgttttttgtgggatgcaagcaggatataaagcaacaaaaatgaacga

SEQ ID NO: 704260 - DNA, 75 bp, synthetic construct
  source 1..75: mol_type = other DNA
gctgctggaggcgatccaggggaggcaaaaaaggaagaaaaaatcgcgcagcaaataagtctgaaaaatacgttc

SEQ ID NO: 704261 - DNA, 75 bp, synthetic construct
  source 1..75: mol_type = other DNA
taactctagccgacgctcgcgaaaaacgcagtgaagctaggaaaatcctcgctgcaggatgcgatccgggtgaga

SEQ ID NO: 704262 - DNA, 75 bp, synthetic construct
  source 1..75: mol_type = other DNA
aaaattctatcagggggacctataatcatgccctgtatcttgatggtcgccgggaaatgatgcaatggtacgctg

SEQ ID NO: 704263 - DNA, 75 bp, synthetic construct
  source 1..75: mol_type = other DNA
aggcggaagaacagctcaaaatgctgatcgattatcagaatgaatatcgcaataacctcaatagcgatatgagtg

SEQ ID NO: 704264 - DNA, 75 bp, synthetic construct
  source 1..75: mol_type = other DNA
tggcagacactgcaggaacggcaatccacggcggcactgcttgcagaaaaccgcctcgatcagaaaaagatggat

SEQ ID NO: 704265 - DNA, 75 bp, synthetic construct
  source 1..75: mol_type = other DNA
atgctctgcgtgaaaaatgtttcgctacgtttaccagaaagccgcttgctgacaaatgttaactttacggtgtgt

SEQ ID NO: 704266 - DNA, 75 bp, synthetic construct
  source 1..75: mol_type = other DNA
ctatgacgccccggaaaaaccgcttgatgcgccagaactgctcgattttgcccagcagtatgcctgccagaaagg

SEQ ID NO: 704267 - DNA, 75 bp, synthetic construct
  source 1..75: mol_type = other DNA
ggaaattcagtctctgttgtaagatgtaccctctgatactacgttttcgttttctctgtgtatttaactcactgt

SEQ ID NO: 704268 - DNA, 75 bp, synthetic construct
  source 1..75: mol_type = other DNA
taaactgccagggactggtgtcagaaagcctccggttagcctgctctttccggaatgtgccggttatgaaaaacc

SEQ ID NO: 704269 - DNA, 75 bp, synthetic construct
  source 1..75: mol_type = other DNA
cagcaaatgttgagctacgaagtcgagactggcgactggaagggcacaagcacgatgttcaactggagtaaaaac

SEQ ID NO: 704270 - DNA, 75 bp, synthetic construct
  source 1..75: mol_type = other DNA
caaatccgccatattctggctcgccatgaacagggcgcggggtttatcgctcagggaatggcgcgcaccgacggt

SEQ ID NO: 704271 - DNA, 75 bp, synthetic construct
  source 1..75: mol_type = other DNA
cagagatagccgcggcttacactcttatcatacaccggctcatagctaataatgcctgtgatgcactaaatacga

SEQ ID NO: 704272 - DNA, 75 bp, synthetic construct
  source 1..75: mol_type = other DNA
aagctgctgtaactgcattacgggatatatctcaagatgaatttgttccagttatggaaagtttgattgaacacc

SEQ ID NO: 704273 - DNA, 75 bp, synthetic construct
  source 1..75: mol_type = other DNA
aaaccggcggtctgtatggcctgtagcggaccgggtgcgactaacctggtgaccgccattgccgatgcgcggctg

SEQ ID NO: 704274 - DNA, 75 bp, synthetic construct
  source 1..75: mol_type = other DNA
cgcgcctgcgtttagtgaagagagtattcgtgacgcagctgcaatgattaacgccgccaaacgcccggtgctcta

SEQ ID NO: 704275 - DNA, 75 bp, synthetic construct
  source 1..75: mol_type = other DNA
cgcacccgcctttagcgaagaaagtattcgtgacgcggcggcgatgattaacgccgccaaacgcccggtgcttta

SEQ ID NO: 704276 - DNA, 75 bp, synthetic construct
  source 1..75: mol_type = other DNA
tgcctttggcgggatggtgatcagtaagcgctttactgctcaatcagcagaaccgtggctccagctgatttccgc

SEQ ID NO: 704277 - DNA, 75 bp, synthetic construct
  source 1..75: mol_type = other DNA
gggaggcaacggccagacagcgcgagtgggagcagaaacagcaacaggccagcgtccagaaagcgctgaactcgg

SEQ ID NO: 704278 - DNA, 75 bp, synthetic construct
  source 1..75: mol_type = other DNA
tggcactgatgatgtgcggcgcggcatggggtgcggccataccacaggcaagccgctatgactcccgtgttcagc

SEQ ID NO: 704279 - DNA, 75 bp, synthetic construct
  source 1..75: mol_type = other DNA
actagaacgtcgacgagccggaaaaaatcaaaaaaaatctgagcatggtatagataatggtatcgagagtaagta

SEQ ID NO: 704280 - DNA, 75 bp, synthetic construct
  source 1..75: mol_type = other DNA
tcatgcagacacacaaggaactgcgcctgaggcaggcaattaccaaggtattatttctcttatcatgactcaaaa

SEQ ID NO: 704281 - DNA, 75 bp, synthetic construct
  source 1..75: mol_type = other DNA
tttcttccactcaacagcttacgattcatgcagacacacaaggaactgcgcctgaggcaggcaattaccaaggta

SEQ ID NO: 704282 - DNA, 75 bp, synthetic construct
  source 1..75: mol_type = other DNA
gatgttgatgacgtgctggcgcagttgatcccgctggtggaagcgcaaccgcgtgcagagtggcaccagttggta

SEQ ID NO: 704283 - DNA, 75 bp, synthetic construct
  source 1..75: mol_type = other DNA
gctctttcgcctgaccttgctgcgctgaccgcaatcagcaagcagattggctgcaatggttttttcccgttccag

SEQ ID NO: 704284 - DNA, 75 bp, synthetic construct
  source 1..75: mol_type = other DNA
gacggtgactattcgggacaaccaaccggagaaagtcaccatttctggcgcggcggtgattttgtttcatgccga

SEQ ID NO: 704285 - DNA, 75 bp, synthetic construct
  source 1..75: mol_type = other DNA
aagtccgtctgctaaaacaaactcctgctggcgtcattttttcggtgagatctggaaaaggatttcttcgtcggt

SEQ ID NO: 704286 - DNA, 75 bp, synthetic construct
  source 1..75: mol_type = other DNA
ctgttatgccttaaacatgagcgaataaaaaaagaaactatcaggcaaaaaatgcacatattctggatcatggct

SEQ ID NO: 704287 - DNA, 75 bp, synthetic construct
  source 1..75: mol_type = other DNA
ctgcaatggtttcttcccgttccagatccgcccaggcaaaagcgaaaccgatggtcgcatgttctcgcctgcgat

SEQ ID NO: 704288 - DNA, 75 bp, synthetic construct
  source 1..75: mol_type = other DNA
tggggcgtgacggcgtgattgatgtgacggtgacaattcgagataaccaaccggagaaagttaccatttccggca

SEQ ID NO: 704289 - DNA, 75 bp, synthetic construct
  source 1..75: mol_type = other DNA
cgcgtaagcgctttaccggcgcagaatttatcgttcatttcctggaacagcagggcattaagattgtgacgggta

SEQ ID NO: 704290 - DNA, 75 bp, synthetic construct
  source 1..75: mol_type = other DNA
atccatagctgatattcatcccgccggggccggagaggcaacatcccatgtatcagccaggactgatatcattgc

SEQ ID NO: 704291 - DNA, 75 bp, synthetic construct
  source 1..75: mol_type = other DNA
taaatccgtatctcacccgttcaataccgcagggctcagggacgcactggagaacctcaactgggaagactgcat

SEQ ID NO: 704292 - DNA, 75 bp, synthetic construct
  source 1..75: mol_type = other DNA
atgctttttccctgtcgaaaacctgaagtacgtctactgaataataccgctgcaggcgtcattttttcggtgaag

SEQ ID NO: 704293 - DNA, 75 bp, synthetic construct
  source 1..75: mol_type = other DNA
accaaaaaagtcggccatgctgcgtctatcgttgggatgacggtaatcggcgcgctggtggcaacctatgttcgt

SEQ ID NO: 704294 - DNA, 75 bp, synthetic construct
  source 1..75: mol_type = other DNA
tgatcccgctggtggaagcgcaaccgcgtgcagagtggcaccagttggtggcggatttgcagcgtgaattcccgt

SEQ ID NO: 704295 - DNA, 75 bp, synthetic construct
  source 1..75: mol_type = other DNA
tatgttggcacagaatatcgctgaagcggcaagcggtatcgataagctggtttcccgcgtactggttctggctga

SEQ ID NO: 704296 - DNA, 75 bp, synthetic construct
  source 1..75: mol_type = other DNA
gagatgggcgcggagcatgtgccctgtcctgtcgatgatatcgtggttgatgaagacaataagattgtcaccacc

SEQ ID NO: 704297 - DNA, 75 bp, synthetic construct
  source 1..75: mol_type = other DNA
aaaaaatcacgaataaagcaataggtgcattaacgaaactggcctctagatcaagtcttaacaaactacgtgtga

SEQ ID NO: 704298 - DNA, 75 bp, synthetic construct
  source 1..75: mol_type = other DNA
caaatccgccatattctggcgcgtcacgaacagggggcgggattcatcgcccagggaatggcgcgcaccgacggc

SEQ ID NO: 704299 - DNA, 75 bp, synthetic construct
  source 1..75: mol_type = other DNA
cgctgcgatatccgctggcccctgctgacattccattattagaggcgtttatggcttcacgcgccgccagaccag

SEQ ID NO: 704300 - DNA, 75 bp, synthetic construct
  source 1..75: mol_type = other DNA
gcgggtgcggtgtctatgacggttctgaaatccatgaagcggttttgacgttattagcaatttcacgcaacggtg

SEQ ID NO: 704301 - DNA, 75 bp, synthetic construct
  source 1..75: mol_type = other DNA
cattcagccgcgagcagggattgcatttttatgctgcaggtcaccatgccactgaacgtggtggtattcgcgcat

SEQ ID NO: 704302 - DNA, 75 bp, synthetic construct
  source 1..75: mol_type = other DNA
gggcgtcgttgcccaacgccaatgttatcaggctactggaagaacgatccgtttagcccggaagaggattcacgt

SEQ ID NO: 704303 - DNA, 75 bp, synthetic construct
  source 1..75: mol_type = other DNA
ctttgctggctacccggttgttaccgaagaaaacgaactggtcggcattatcaccggtcgtgacgtgcgttttgt

SEQ ID NO: 704304 - DNA, 75 bp, synthetic construct
  source 1..75: mol_type = other DNA
aaataaaataaaaacatctctggttaatcttaggaatgagctaagcttggcagaggataaggttagagaaagttt

SEQ ID NO: 704305 - DNA, 75 bp, synthetic construct
  source 1..75: mol_type = other DNA
tgggggtaattgatgaattagcaagaagaaaaggttgcaaagttgttctaattttaaatgaagataatttacatg

SEQ ID NO: 704306 - DNA, 75 bp, synthetic construct
  source 1..75: mol_type = other DNA
agtagcttcatcatgaccctttccttatttaaggccccttcctcgggaggggctttcccgtttcagcgtcccgct

SEQ ID NO: 704307 - DNA, 75 bp, synthetic construct
  source 1..75: mol_type = other DNA
acggcagtatttgaaattgaagaattgtccgccccagtagaaaaagccgtcccgccagtctttagcgaagaaagt

SEQ ID NO: 704308 - DNA, 75 bp, synthetic construct
  source 1..75: mol_type = other DNA
gagtcgtacattttcgccaaagcggcccatgcgccgtttatttcgcatccggtcgagtttcatcacctgctggtg

SEQ ID NO: 704309 - DNA, 75 bp, synthetic construct
  source 1..75: mol_type = other DNA
gctggataaactctggccgcacagcgagtcgtacattttcgccaaagcggcccatgcgccgtttatttcgcatcc

SEQ ID NO: 704310 - DNA, 75 bp, synthetic construct
  source 1..75: mol_type = other DNA
cttgttttagtgctcgtgacgagtggccggggataaaaccggacgtgctggcgggatttcagcagcaactcagtg

SEQ ID NO: 704311 - DNA, 75 bp, synthetic construct
  source 1..75: mol_type = other DNA
cccggacggcactaaagtcgaagaactgaacaaagcgacagcagcgatgatggtcccgttcgacagcatcaaatt

SEQ ID NO: 704312 - DNA, 75 bp, synthetic construct
  source 1..75: mol_type = other DNA
tgtcacttgctgatatggccgaagtcgtgctgcgacaggcacctgataaagccatttggttaggctggagtctgg

SEQ ID NO: 704313 - DNA, 75 bp, synthetic construct
  source 1..75: mol_type = other DNA
gttcctggcgttacaaaccatgggtactgaaacggcgcgccaggatgcgcgggcgttgaagaaaaccgttctggc

SEQ ID NO: 704314 - DNA, 75 bp, synthetic construct
  source 1..75: mol_type = other DNA
tcatttgatgaactacgcgaaaaactgccgggcagcgttgcgagtgcctttggcctcgatgaactagcagcgcaa

SEQ ID NO: 704315 - DNA, 75 bp, synthetic construct
  source 1..75: mol_type = other DNA
acgccgccaaacgcccggtgctttatctggggggcggtgtcattaacgcgcctgcacgggtgcgtgaactggcag

SEQ ID NO: 704316 - DNA, 75 bp, synthetic construct
  source 1..75: mol_type = other DNA
atgcaaattgcggccggatttggccttgaaacctgtgatttaaataatgaaaccgatccacaggccgcgttgcag

SEQ ID NO: 704317 - DNA, 75 bp, synthetic construct
  source 1..75: mol_type = other DNA
atgaataatactgttacagcctgtgtggacggttcactttcaacgcggtcagtgtgtgaatatgcggcgtgggca

SEQ ID NO: 704318 - DNA, 75 bp, synthetic construct
  source 1..75: mol_type = other DNA
ggaagactatactcgctatcaaaacttcatccagtggtgggtaccgcaggctacggaaagtgccattaatcactt

SEQ ID NO: 704319 - DNA, 75 bp, synthetic construct
  source 1..75: mol_type = other DNA
gaggagagtctggcgacattaaatgcgttactttccattgaaaaacagaaagatagtgcgaaattgtggctggag

SEQ ID NO: 704320 - DNA, 75 bp, synthetic construct
  source 1..75: mol_type = other DNA
atgaaaccgcaggtgtaccacgtcgatgcttttacctcacaaccgtttcgcggcaattctgccggtgttgtttcc

SEQ ID NO: 704321 - DNA, 75 bp, synthetic construct
  source 1..75: mol_type = other DNA
gccgtatttacccaaggtgcaaatgctgaagctgctaaagctgcaggcgcagaactggtaggtatggaagatctg

SEQ ID NO: 704322 - DNA, 75 bp, synthetic construct
  source 1..75: mol_type = other DNA
gccaggttcgttatcgtaacgacaaaaacggcatcatccataccaccatcggtaaagtggactttgacgctgaca

SEQ ID NO: 704323 - DNA, 75 bp, synthetic construct
  source 1..75: mol_type = other DNA
aactgaaagaaaacctggaagctcttctggttgcgctgaaaaaagcaaaaccgactcaggcgaaaggcgtgtaca

SEQ ID NO: 704324 - DNA, 75 bp, synthetic construct
  source 1..75: mol_type = other DNA
agattatcgccgaactcacccacggtggcgcggatgttgcgctcgattgttccggtaatgccgcaggtcgcttgc

SEQ ID NO: 704325 - DNA, 75 bp, synthetic construct
  source 1..75: mol_type = other DNA
atgatttttaccaaaatcattaggggattcatcagtacagcgtatgaagggattttgcgcggcgaagtttccggc

SEQ ID NO: 704326 - DNA, 75 bp, synthetic construct
  source 1..75: mol_type = other DNA
ctgcatgcggccacgttgtacaacattgccgcctatcctcatctgaaaggggatgacctggccgagcaagcgcag

SEQ ID NO: 704327 - DNA, 75 bp, synthetic construct
  source 1..75: mol_type = other DNA
cagtgaagaaagcaggagtaacctggaacgtctgacgatgagtcccttactcagggggctggagtgccaccttgt

SEQ ID NO: 704328 - DNA, 75 bp, synthetic construct
  source 1..75: mol_type = other DNA
gcaaatgagtttgaaaaacacatttgaggccgttgctcgagaatggcatcagtcaaaagccgatcggtggtcatt

SEQ ID NO: 704329 - DNA, 75 bp, synthetic construct
  source 1..75: mol_type = other DNA
gaaatgcagttagctcatgtggataaaaattccatcaggggtacctataatcatgccctgtatctcgatggccgc

SEQ ID NO: 704330 - DNA, 75 bp, synthetic construct
  source 1..75: mol_type = other DNA
gacgctcgtaaatctgaccagaacgtacgtggtgcaactgtactgccgcacggtactggccggtccgttcgcgta

SEQ ID NO: 704331 - DNA, 75 bp, synthetic construct
  source 1..75: mol_type = other DNA
tctgcgtgttggtgcggcggttggtgctggcgcaggtaacgaagagcgtgttgatgcgctggtggccgctggtgt

SEQ ID NO: 704332 - DNA, 75 bp, synthetic construct
  source 1..75: mol_type = other DNA
atgctacgtatcgctaaagaagctctcacatttgacgacgttctcctcgttcctgctcattctaccgttctgccg

SEQ ID NO: 704333 - DNA, 75 bp, synthetic construct
  source 1..75: mol_type = other DNA
ggcttttgcccgaactgccgtcgcggttttcctatctcctgcaccggtgaaggaaaagccgcttacggctggcag

SEQ ID NO: 704334 - DNA, 75 bp, synthetic construct
  source 1..75: mol_type = other DNA
ggcaatgccaatggcccaatgggcgcatggttagtgcatcacaacgtattgccccacgatggcaacgtgttgcgt

SEQ ID NO: 704335 - DNA, 75 bp, synthetic construct
  source 1..75: mol_type = other DNA
tatgcggcaaatggagttcactgttccaggcggtgcgcccatcactggttttttgcatatgccaaaaggcgatgg

SEQ ID NO: 704336 - DNA, 75 bp, synthetic construct
  source 1..75: mol_type = other DNA
cgttacgtgtagagttgaatcgctattcattgaaagtgcaagggttgctgggacgtcgctgcccaacgccaatgt

SEQ ID NO: 704337 - DNA, 75 bp, synthetic construct
  source 1..75: mol_type = other DNA
gtgcggcgattatcaacgcgcttcatctcactgaagacgacattctgcccggtttgccgatccaggtggcgacta

SEQ ID NO: 704338 - DNA, 75 bp, synthetic construct
  source 1..75: mol_type = other DNA
gacggtgactattcgggacaaccaaccggagaaagtcaccatttctggcacagcggtgattttgtttcatgccga

SEQ ID NO: 704339 - DNA, 75 bp, synthetic construct
  source 1..75: mol_type = other DNA
aggtcattcggaaactgcttttctgctgcacagcgacgacagcgatgtgcgcatccgctactttacgccaacagt

SEQ ID NO: 704340 - DNA, 75 bp, synthetic construct
  source 1..75: mol_type = other DNA
atttatacgataccgtgattggctaccgtggtggcaactggatttatgagtgggccacccaggcgatggtgtggc

SEQ ID NO: 704341 - DNA, 75 bp, synthetic construct
  source 1..75: mol_type = other DNA
ctgcatgcggctacgttgtacaacattgccgcctatcctcatctgaaaggagatgatctggccgagcaagcgcag

SEQ ID NO: 704342 - DNA, 75 bp, synthetic construct
  source 1..75: mol_type = other DNA
ctgacggtaaattgttagagatcccatttaacccggtgtatcggaattttgacaaaggccttcaggaaatcacag

SEQ ID NO: 704343 - DNA, 75 bp, synthetic construct
  source 1..75: mol_type = other DNA
gcggcgttgatccgcgtgaaatcctcgacgtccaggcgcgtattgtgatgagcgatgccgaacgcaccgacaatg

SEQ ID NO: 704344 - DNA, 75 bp, synthetic construct
  source 1..75: mol_type = other DNA
cgatgatctggctgaacaggtacaggcgttgtcaaatcgcgcgtatgaagaagcggcgcaacgtctgcctggcac

SEQ ID NO: 704345 - DNA, 75 bp, synthetic construct
  source 1..75: mol_type = other DNA
ccctgaaacctcgacgctagtccgccgttttaaccgcggtacgcaaccgtcggtgcagtcggccctcgatggcaa

SEQ ID NO: 704346 - DNA, 75 bp, synthetic construct
  source 1..75: mol_type = other DNA
agatcgattttgatgctaacgaatggaaaattccagcagcccgaatgaaaatgaaccgggaccataccgttccat

SEQ ID NO: 704347 - DNA, 75 bp, synthetic construct
  source 1..75: mol_type = other DNA
aaggctcatactctggttaaagcagttcagccggttcaggccagaggtgcattagagactgttcgccgcctttgt

SEQ ID NO: 704348 - DNA, 75 bp, synthetic construct
  source 1..75: mol_type = other DNA
agcaagtacagcaatgaatgaagctggtataaatccagatattatcgaagcagcactttcccattgtgataaaaa

SEQ ID NO: 704349 - DNA, 75 bp, synthetic construct
  source 1..75: mol_type = other DNA
agtgattatcttgagcaacgtcgtccgatgatgcaatggtgggctgattttgtaaaagcagcagatagcggcagt

SEQ ID NO: 704350 - DNA, 75 bp, synthetic construct
  source 1..75: mol_type = other DNA
gaagaaagccagcgtaacagatgactatgccgacgatatctggcgctcgcttgagagagatgttttcccggcaat

SEQ ID NO: 704351 - DNA, 75 bp, synthetic construct
  source 1..75: mol_type = other DNA
cgatgatgcaatggtgggctgatctcgtaaaagcagcagatagtggtagcatcgttttaactcatttgagcaaaa

SEQ ID NO: 704352 - DNA, 75 bp, synthetic construct
  source 1..75: mol_type = other DNA
atggcaacattcgacggacatatcgttgaagcgttgatgaaaatgccagaagttaacgccatgtatccggagctt

SEQ ID NO: 704353 - DNA, 75 bp, synthetic construct
  source 1..75: mol_type = other DNA
cacaaagagaacgctggcggtaatcagcatcacaccagcgataatgaagctggcgggacggcaaatcccttaatt

SEQ ID NO: 704354 - DNA, 75 bp, synthetic construct
  source 1..75: mol_type = other DNA
ctcgcagaggcaattatccggactaaagaaattaacgccatgtatccggaacgtcagattgaatacatcaacgat

SEQ ID NO: 704355 - DNA, 75 bp, synthetic construct
  source 1..75: mol_type = other DNA
actacaaaaaaaagaacaatgatagggataggtgctttcccagctatctcacttgctgatgctagaaggttaagg

SEQ ID NO: 704356 - DNA, 75 bp, synthetic construct
  source 1..75: mol_type = other DNA
atggatccacaacagcaacaggagcaagcgtcagcacaacgccagattgagttagacagcattttctcaactgtg

SEQ ID NO: 704357 - DNA, 75 bp, synthetic construct
  source 1..75: mol_type = other DNA
gtaagtaatagccgaactaatctgagtctcggctcataccctgccattacactcgcagctgctcgccagttacgc

SEQ ID NO: 704358 - DNA, 75 bp, synthetic construct
  source 1..75: mol_type = other DNA
ggaaatgatgaagtcactcagtggtggccgagagtttatctttcccagtcgcatcaaaccaacccagccaatgaa

SEQ ID NO: 704359 - DNA, 75 bp, synthetic construct
  source 1..75: mol_type = other DNA
gccgaacgcaaagaaaccgggaaatacacgtctgttgttgatcttgcccgcgccagagtcaaccggcagcacact

SEQ ID NO: 704360 - DNA, 75 bp, synthetic construct
  source 1..75: mol_type = other DNA
acgcacctggaaaaaacgtcgcgaagccgaacgcaaagaaaccgggaaatacacgtctgttgttgatcttgcccg

SEQ ID NO: 704361 - DNA, 75 bp, synthetic construct
  source 1..75: mol_type = other DNA
cccaaatgcgcaacaaaacgagccagaaacgaaacaggagccggaaaaagcctgcaccgcctgcggtcagaccgg

SEQ ID NO: 704362 - DNA, 75 bp, synthetic construct
  source 1..75: mol_type = other DNA
atcctggtggaagctgaaccatctgtagagcgtgaaggaccgttttatttcgtctttaccgataaggacggggaa

SEQ ID NO: 704363 - DNA, 75 bp, synthetic construct
  source 1..75: mol_type = other DNA
cgccgttcatatgaacggcaggggatcccctgcccttggctttactacaacgatcgcgatgtacgcacaatcgtt

SEQ ID NO: 704364 - DNA, 75 bp, synthetic construct
  source 1..75: mol_type = other DNA
ggtgaacgcaaggaaaccggaaaatatacgtctgttgttgatctggccctcgccagagtcaaccaacagcacact

SEQ ID NO: 704365 - DNA, 75 bp, synthetic construct
  source 1..75: mol_type = other DNA
taacaacattgattcgattatatttattgttgaaaaaatattggattctgttaagtcctgtgaagagaaaagaag

SEQ ID NO: 704366 - DNA, 75 bp, synthetic construct
  source 1..75: mol_type = other DNA
tagacaactacgagattgatatctgtgagtttgaggaagtaaaggatattgatcctgtatccaaaagaaagactc

SEQ ID NO: 704367 - DNA, 75 bp, synthetic construct
  source 1..75: mol_type = other DNA
attagagtcttggatggtgaacaatcaagtcactggtaatttactacgttcagtattgccggcgggatggaacat

SEQ ID NO: 704368 - DNA, 75 bp, synthetic construct
  source 1..75: mol_type = other DNA
ctgttgttgatctcgcacgcaccagagttaaccagcacctcaccgaaaactcagcagcaaaaatcaaccctgtca

SEQ ID NO: 704369 - DNA, 75 bp, synthetic construct
  source 1..75: mol_type = other DNA
acgctctggccggtaagttttttgatccgacaaccggagagatgggaccagaattcagcaaaaccatcgctctgg

SEQ ID NO: 704370 - DNA, 75 bp, synthetic construct
  source 1..75: mol_type = other DNA
gtgagtagtgaatatacccggatgaggacgcgccttgttgcccttgcgccggagcatggtcctcgtctgcgggtg

SEQ ID NO: 704371 - DNA, 75 bp, synthetic construct
  source 1..75: mol_type = other DNA
ggagtcatcgatcgggacaccattaagtggtggctgaaacagtcacgggaagcacaatcagccattctgaccgat

SEQ ID NO: 704372 - DNA, 75 bp, synthetic construct
  source 1..75: mol_type = other DNA
gaaatgggtgaaggggattgaaacccgcgattctgtgaaccagaaccagcaagaaacggaacagaacgaccagaa

SEQ ID NO: 704373 - DNA, 75 bp, synthetic construct
  source 1..75: mol_type = other DNA
ggtcagagcggtggcggcaactgccctgattgtggtgcggtgatgggtgacgcaacataccaggaaatattcgat

SEQ ID NO: 704374 - DNA, 75 bp, synthetic construct
  source 1..75: mol_type = other DNA
cggcagcatccttcgctgggctaaaaatgaagttatcgccagagatcgcgaagactggaagcgcatctccgcatc

SEQ ID NO: 704375 - DNA, 75 bp, synthetic construct
  source 1..75: mol_type = other DNA
tgaaccagaaccagcaagaaacggaacagaacgaccagaaagcggaacaaaacagcccaaatacgcaacaaaacg

SEQ ID NO: 704376 - DNA, 75 bp, synthetic construct
  source 1..75: mol_type = other DNA
tttttggccttgtccgtgaacgtccgatcgacattcacaaagatcccgtggcgctgaacaaatacatcactgaat

SEQ ID NO: 704377 - DNA, 75 bp, synthetic construct
  source 1..75: mol_type = other DNA
gataagttgcttgctgcctctcgcggagaatttgttgcagggattagcgccccgaatgatccgaaatgggttaag

SEQ ID NO: 704378 - DNA, 75 bp, synthetic construct
  source 1..75: mol_type = other DNA
cagggctgataagcccagtgctggcacgggaagagatatttacgcatgggtacagggaggattgctcgatttcaa

SEQ ID NO: 704379 - DNA, 75 bp, synthetic construct
  source 1..75: mol_type = other DNA
tgaaagttcttgatgtaccaacaaagccagtatctattcctgttaagaatgaggctgcaaaaccagtttttactt

SEQ ID NO: 704380 - DNA, 75 bp, synthetic construct
  source 1..75: mol_type = other DNA
gtctgggggcgcagtttggcggtaaatattttgcccatgatatccgcgtgattcgtctgccacgccacggcgcat

SEQ ID NO: 704381 - DNA, 75 bp, synthetic construct
  source 1..75: mol_type = other DNA
cgggaatttatcgacgaaaactccggtgaattttttgttcaggtctggggtaacggtgcaactttcgacaacgtg

SEQ ID NO: 704382 - DNA, 75 bp, synthetic construct
  source 1..75: mol_type = other DNA
gaaacccgcgattctgtgaaccagaaccagcaagaaacggaacagaacgaccagaaagcggaacaaaacagccca

SEQ ID NO: 704383 - DNA, 75 bp, synthetic construct
  source 1..75: mol_type = other DNA
caacaaccggtattcgtgatgaaggggtgtataacagcagacgggaaaatacgataaacatcgcgcacgttcttt

SEQ ID NO: 704384 - DNA, 75 bp, synthetic construct
  source 1..75: mol_type = other DNA
gcactgaacaaatacattactgaatacctgactacaaagggcgtgtttgaagatgaaggaacaaatcagagcgca

SEQ ID NO: 704385 - DNA, 75 bp, synthetic construct
  source 1..75: mol_type = other DNA
gcttgagactgtacgtcgactggtgcagcgtattaacgagataatgatttatgccgtaaacactggtctgattga

SEQ ID NO: 704386 - DNA, 75 bp, synthetic construct
  source 1..75: mol_type = other DNA
acgccgtaaacacaggtctgattgatgccaatccagcatcaggtattgggatggcctttgagaaacctaaaaagc

SEQ ID NO: 704387 - DNA, 75 bp, synthetic construct
  source 1..75: mol_type = other DNA
gaaataaccctaagcaaccaatgaatagtcagactgctaatgccgcacttaagcgtattggttatggtgggaaat

SEQ ID NO: 704388 - DNA, 75 bp, synthetic construct
  source 1..75: mol_type = other DNA
actactgactatcgtacggccctcagaagcttccggtactcaatggtcagagatagattttgaggctaagctatg

SEQ ID NO: 704389 - DNA, 75 bp, synthetic construct
  source 1..75: mol_type = other DNA
tgccagcaccgcattaaatgaagcgggttttaatgcagatgtaattgaggctgctcttgcacatagtgataaaaa

SEQ ID NO: 704390 - DNA, 75 bp, synthetic construct
  source 1..75: mol_type = other DNA
tgaggttcgcagggcatataaccgttcaacttatttagagcaaagaaaagagctcgtagtttggtgggggggatt

SEQ ID NO: 704391 - DNA, 75 bp, synthetic construct
  source 1..75: mol_type = other DNA
tgtcagatgaagcaattgcgatactagagatgatgaagccgttaagtggaaatcgagaatttatctttcccagcc

SEQ ID NO: 704392 - DNA, 75 bp, synthetic construct
  source 1..75: mol_type = other DNA
tgacgcaacataccaggaaacgttcgatgacgagaatcaggtcgaagttcaggaagacgattcggagaaaatgga

SEQ ID NO: 704393 - DNA, 75 bp, synthetic construct
  source 1..75: mol_type = other DNA
tagaacgtgaggggccgttctacttcctcttcaccgacaaggatggcgaaaaatacggtcgcgcaaacaaacttt

SEQ ID NO: 704394 - DNA, 75 bp, synthetic construct
  source 1..75: mol_type = other DNA
aagagaattggatatggtggtaaattagtagctcatggtttacgggcaattgctagtacatgtatgaatgaagca

SEQ ID NO: 704395 - DNA, 75 bp, synthetic construct
  source 1..75: mol_type = other DNA
gtggcaagaacgacacgccccctgagcaacacagaagttctgcgcgctaaagcgttagaaaaggatctaacattg

SEQ ID NO: 704396 - DNA, 75 bp, synthetic construct
  source 1..75: mol_type = other DNA
tggcgacgttagcgttacagatattaaagctcatacaccggttcaggccagaggagcactggaaacggttcgtcg

SEQ ID NO: 704397 - DNA, 75 bp, synthetic construct
  source 1..75: mol_type = other DNA
gcggattgcctttgctcctatgcttttccaggcagctttgtgcctgcgcaatgcaggaatattagattatttgga

SEQ ID NO: 704398 - DNA, 75 bp, synthetic construct
  source 1..75: mol_type = other DNA
accttgatgcgtggtttgcagcgtatcgaccgtgtcgagattgattcgcctctccgcgccagcagcagcgatagc

SEQ ID NO: 704399 - DNA, 75 bp, synthetic construct
  source 1..75: mol_type = other DNA
ttaacggcataaaggccgaagatctctcgttccgacgcaacactgatggcgataacctggaattgaccgttcagg

SEQ ID NO: 704400 - DNA, 75 bp, synthetic construct
  source 1..75: mol_type = other DNA
cgatctccaggatgttcctgctgatagttctgttctggatatggcgcagtggtcagaaaattacaacaaactgtg

SEQ ID NO: 704401 - DNA, 75 bp, synthetic construct
  source 1..75: mol_type = other DNA
cgtcgggcaaaatttactgctggctctgccagcggcactcaaaggtgttgcaaggcgcgatgcggtaaatgatgc

SEQ ID NO: 704402 - DNA, 75 bp, synthetic construct
  source 1..75: mol_type = other DNA
gaccatccggctgcgggaaatccactctgttttcgtggatgattggtgcgctggccggacagttttcttgtacag

SEQ ID NO: 704403 - DNA, 75 bp, synthetic construct
  source 1..75: mol_type = other DNA
gatgcatggtatgcagctggcgctattgaaatccactttgccgaaagatggcccgcagatgaccaccgccgaaaa

SEQ ID NO: 704404 - DNA, 75 bp, synthetic construct
  source 1..75: mol_type = other DNA
gcccgcagatgaccaccgccgaaaaggtgcggattttccttttcggcgtgtttgaactgctggtctggcagaaga

SEQ ID NO: 704405 - DNA, 75 bp, synthetic construct
  source 1..75: mol_type = other DNA
atgctgattaatattggtcgtttgttaatgctctgcgtttggggatttttaatcctcaatctggtgcatcccttc

SEQ ID NO: 704406 - DNA, 75 bp, synthetic construct
  source 1..75: mol_type = other DNA
agcggcgatgaactgcttgccaattttaacaaggaatatggcgcagttgaagcatccacgaccgcggtatctaca

SEQ ID NO: 704407 - DNA, 75 bp, synthetic construct
  source 1..75: mol_type = other DNA
gttgccgttacacagcagggctgggatttaatgttaggggaactggcagcggtaacacgattgggggagaaaatc

SEQ ID NO: 704408 - DNA, 75 bp, synthetic construct
  source 1..75: mol_type = other DNA
cggtcagaaggtcgccgccggcgttgaaatgacgaccaaaattgtcggcaacattaccaaaacggttactcaaat

SEQ ID NO: 704409 - DNA, 75 bp, synthetic construct
  source 1..75: mol_type = other DNA
accaggcgaggctgatatctggtggatgagccaatttttagactgtttttcacccgaacaaataattagcatact

SEQ ID NO: 704410 - DNA, 75 bp, synthetic construct
  source 1..75: mol_type = other DNA
ttaatacccacccttggcggaaatcaaacaatgcgaactgtatgcgagtcaggtttctacaaactaatagcccgt

SEQ ID NO: 704411 - DNA, 75 bp, synthetic construct
  source 1..75: mol_type = other DNA
atttcagtaaacgccaggctgcatatcaacaggaagccagcaaacgcggttacaggttacagcaatgcaaagagg

SEQ ID NO: 704412 - DNA, 75 bp, synthetic construct
  source 1..75: mol_type = other DNA
agatgcggatgaaaagaaaaccgtcgctttaagctacggtattcgaggaaatccaaatcatagcctcatttctga

SEQ ID NO: 704413 - DNA, 75 bp, synthetic construct
  source 1..75: mol_type = other DNA
aaaattctgtgattttcgtgatctggtcgttctgcgctttgatagtgtgaacgttcgcgtggtgtatctgaacgg

SEQ ID NO: 704414 - DNA, 75 bp, synthetic construct
  source 1..75: mol_type = other DNA
gtttgtgaagctctggaaataagcaactcacgcgatgctctaaaagctctggatgtggatgagaagaataccgtc

SEQ ID NO: 704415 - DNA, 75 bp, synthetic construct
  source 1..75: mol_type = other DNA
agcgtggtggtgccagaagttggaatgttgtatcagaatcaggtttttacaagttgatcgccagaagtcgcaaag

SEQ ID NO: 704416 - DNA, 75 bp, synthetic construct
  source 1..75: mol_type = other DNA
tgacaacggcttccaggtcgtgcatatgggctacggcgtcgatgaaaaagtgcaggtgccgcaacagttgtatca

SEQ ID NO: 704417 - DNA, 75 bp, synthetic construct
  source 1..75: mol_type = other DNA
tccgaccattggtcacagccaccatacccgcgaagtggtgccagtgctggtttatcagcaagggatgatcgctac

SEQ ID NO: 704418 - DNA, 75 bp, synthetic construct
  source 1..75: mol_type = other DNA
ctaaaaagaaatgacttagaagattatctctttaaagaacttcaaagaataaaaatagataactattttaaaaat

SEQ ID NO: 704419 - DNA, 75 bp, synthetic construct
  source 1..75: mol_type = other DNA
tcaacgcattctcgatgccgcagaaagcaaagaagggcgctttattggcatcaatgcgccgcgttctggcgccta

SEQ ID NO: 704420 - DNA, 75 bp, synthetic construct
  source 1..75: mol_type = other DNA
taaatgcgccgcgttctggcgcttatgacaatggcttccaggtcgtacatatgggctacggcgtcgatgaaaaag

SEQ ID NO: 704421 - DNA, 75 bp, synthetic construct
  source 1..75: mol_type = other DNA
atgccgaacgtttgcaggtcgttgaccgtaaccttactcgccttgttgaggcgatgcagccggatgattgcctga

SEQ ID NO: 704422 - DNA, 75 bp, synthetic construct
  source 1..75: mol_type = other DNA
gaaatcagcgttgctggaaaatatccgaaatttctttctgacgtttgtctggcctcccctgaatttttccccttt

SEQ ID NO: 704423 - DNA, 75 bp, synthetic construct
  source 1..75: mol_type = other DNA
aagaaacgggcaaacgtgattcgtttaattatgctgatatttcttgtcatgtctctcatgttactggtttttgcc

SEQ ID NO: 704424 - DNA, 75 bp, synthetic construct
  source 1..75: mol_type = other DNA
cagttttacgaagctctgcgttttctgctggaaaataaacagccattaaagaccgcactggaacagatgcgggat

SEQ ID NO: 704425 - DNA, 75 bp, synthetic construct
  source 1..75: mol_type = other DNA
tgccatggagtatttatcaggatatacagggagcaacatttctcctgaatatggctgcacttctgaaagccaaaa

SEQ ID NO: 704426 - DNA, 75 bp, synthetic construct
  source 1..75: mol_type = other DNA
catttattctttcttacagaatgccctccgttaatggttattattcctttgcagatgcgaagaatgccctgaact

SEQ ID NO: 704427 - DNA, 75 bp, synthetic construct
  source 1..75: mol_type = other DNA
tgcaatttgagataaccaaaggaacaagagaagctattgctgcattgataaagcttgattatttgcacaataaag

SEQ ID NO: 704428 - DNA, 75 bp, synthetic construct
  source 1..75: mol_type = other DNA
gtaaaacgcgcgatttagctcagttcgatatggccctggacagtaagctacgaggctgtgatctggtcaaactca

SEQ ID NO: 704429 - DNA, 75 bp, synthetic construct
  source 1..75: mol_type = other DNA
cgatcctgaagcaaaacgtgaatacgaaaaagcggcaaaagatttctgtatcgacaatttgtctgcgttcaataa

SEQ ID NO: 704430 - DNA, 75 bp, synthetic construct
  source 1..75: mol_type = other DNA
tcaattgtattggcgatacacgcgcggtgtgtgtagggacaactaactattatatcaagggacttagatttaccg

SEQ ID NO: 704431 - DNA, 75 bp, synthetic construct
  source 1..75: mol_type = other DNA
acaattcaagcagatgatccgcgatgatggtaacgggctagtgttttgtgttgcgacactcgctaaacgtcctaa

SEQ ID NO: 704432 - DNA, 75 bp, synthetic construct
  source 1..75: mol_type = other DNA
acctgctgaagaaagaactgcaggcagacgcgcaagcctatggtgacgatcgtcgttcgccgttgcaggaacgcg

SEQ ID NO: 704433 - DNA, 75 bp, synthetic construct
  source 1..75: mol_type = other DNA
gccatccttatattatgtcaatgatacagaaacagcattaggtatcgatgagtttgaaaaaagagcaacagagca

SEQ ID NO: 704434 - DNA, 75 bp, synthetic construct
  source 1..75: mol_type = other DNA
gatatttaccagtatttaatttccgacgcgctttataacacgtcatacgaaacgaaaaatccctttgcgcaataa

SEQ ID NO: 704435 - DNA, 75 bp, synthetic construct
  source 1..75: mol_type = other DNA
atgaacacttcatcgtggaacaaaggccgtatcgtaggccaaaaaagaccacttcagatatctcatatctggggg

SEQ ID NO: 704436 - DNA, 75 bp, synthetic construct
  source 1..75: mol_type = other DNA
attgacggatttaaagaaggtgaacccgcggaggcggaaattggtgtcgcggtaatcgactgtggcggcacatta

SEQ ID NO: 704437 - DNA, 75 bp, synthetic construct
  source 1..75: mol_type = other DNA
aatcgccttaatcgaccagccgaaaaccacgctcgatcagctgctggatatcgtgcaggggccggattatccgac

SEQ ID NO: 704438 - DNA, 75 bp, synthetic construct
  source 1..75: mol_type = other DNA
gcggtgagcagagtgagctggaaaaagagcgcgaccagttgcagggcattttggcttccgagcgtaaaatgaata

SEQ ID NO: 704439 - DNA, 75 bp, synthetic construct
  source 1..75: mol_type = other DNA
tctaaaaaactgactaccggggctgtcactatgactactctcccaaccctctctcaacctgaaattgccatcgtt

SEQ ID NO: 704440 - DNA, 75 bp, synthetic construct
  source 1..75: mol_type = other DNA
gaaaaaggaacgggtggctggggcggcccgcttgagctggaagccacgccgggcaaaaaaatcgtctatatcacc

SEQ ID NO: 704441 - DNA, 75 bp, synthetic construct
  source 1..75: mol_type = other DNA
gtattcccaccattaatatccactcgacgggcaagtccggtccgctggcgcagtacattgtggaagatatttatg

SEQ ID NO: 704442 - DNA, 75 bp, synthetic construct
  source 1..75: mol_type = other DNA
aagaaaatgtgattgataagctgaagagcgattatgactttatcctcgttgatagtggtcctcaccttgatgcct

SEQ ID NO: 704443 - DNA, 75 bp, synthetic construct
  source 1..75: mol_type = other DNA
ttgaggcagcgcagcaagctggggttgcgacagctatcgatttcgccatatttcagaatcatggttaccgggggc

SEQ ID NO: 704444 - DNA, 75 bp, synthetic construct
  source 1..75: mol_type = other DNA
tcagtaataaactgattaatatcgttgtttttgttgcaattgtagaatacgcctatttgttcctccatttctatt

SEQ ID NO: 704445 - DNA, 75 bp, synthetic construct
  source 1..75: mol_type = other DNA
gaggaaggcgtagaaccgcgtttaagcgccagcattggttttatgtcgaagatgaccggcaagcgcgatcacgag

SEQ ID NO: 704446 - DNA, 75 bp, synthetic construct
  source 1..75: mol_type = other DNA
atgattttcaatatccagcgctactcgacccatgacggccccggcatccgcacggttgtttttcttaaaggttgc

SEQ ID NO: 704447 - DNA, 75 bp, synthetic construct
  source 1..75: mol_type = other DNA
gatgcgccagaactgctcgactttgcccagcagtatgcctgccagaaagggttaaccgcgaccttacgaggataa

SEQ ID NO: 704448 - DNA, 75 bp, synthetic construct
  source 1..75: mol_type = other DNA
atgaagggcattaatttagttaaaatcaaattaacattttctgatacatacctggtgacatttttccgtatccgt

SEQ ID NO: 704449 - DNA, 75 bp, synthetic construct
  source 1..75: mol_type = other DNA
accgacattgcgcaatcatttatggcaatccgtcgcgccactaccgccagcggcaaccgcccgacctatgaagcc

SEQ ID NO: 704450 - DNA, 75 bp, synthetic construct
  source 1..75: mol_type = other DNA
aaccgcccgacctacgaagccagccgcagcgaagaagccagccatgccgatctggcatgggcaaccatgcacgca

SEQ ID NO: 704451 - DNA, 75 bp, synthetic construct
  source 1..75: mol_type = other DNA
ttaccccgctgccaacagcgactggcacagggtgacactatcctgattttccccgaaggcacgcgaacgaagccc

SEQ ID NO: 704452 - DNA, 75 bp, synthetic construct
  source 1..75: mol_type = other DNA
gggcttggcgtgctggattatcgtattgatggcgctgaaattttacgtcaggaacgcggttgcctcgtcgtagcc

SEQ ID NO: 704453 - DNA, 75 bp, synthetic construct
  source 1..75: mol_type = other DNA
ataaacaaagtaagtggtatgacgtcccgcctgccaggccgttttttacggttgaagtccatgggcgggtagaaa

SEQ ID NO: 704454 - DNA, 75 bp, synthetic construct
  source 1..75: mol_type = other DNA
gacttccgtgcccaggcggacgccatcaaaaaactgactgaacagtacaacgtgacctatatcggtatcgactcg

SEQ ID NO: 704455 - DNA, 75 bp, synthetic construct
  source 1..75: mol_type = other DNA
cgtgacctacatcggtatcgactcaaccggcgttggtcacggggtttatgagaacgtgaaagcattctttcctgc

SEQ ID NO: 704456 - DNA, 75 bp, synthetic construct
  source 1..75: mol_type = other DNA
acctgctggcgcgccagtcggagcgccatgcgcggatcggcaagttcaacaatggcggcaacgaagccgacttaa

SEQ ID NO: 704457 - DNA, 75 bp, synthetic construct
  source 1..75: mol_type = other DNA
cgtgacctatatcggcatcgactcaactggggtcggccacggggtttacgagaacgtgaaagcgttctttcctgc

SEQ ID NO: 704458 - DNA, 75 bp, synthetic construct
  source 1..75: mol_type = other DNA
tgccgggcggcaagttccgcattcttgagcgtaaccagtggcgcgggatggactttcgcgcccaggctgacgcca

SEQ ID NO: 704459 - DNA, 75 bp, synthetic construct
  source 1..75: mol_type = other DNA
ctgcgcatggagtacagcccggacgaatatcagaacctgctgatgtgcgagttcgtggacgatctcgcgtccgtg

SEQ ID NO: 704460 - DNA, 75 bp, synthetic construct
  source 1..75: mol_type = other DNA
ccaggtgaaattttctcgtgtacgtggtgttgaagttaaagatatttcaagattcgataatatctattgtgatca

SEQ ID NO: 704461 - DNA, 75 bp, synthetic construct
  source 1..75: mol_type = other DNA
tcacagggaagtttaagtccggctccatatgatccagtctatgcaccgtcatgttcagaaaaaaaattatttatg

SEQ ID NO: 704462 - DNA, 75 bp, synthetic construct
  source 1..75: mol_type = other DNA
tacttgaaaccaatacaattgttaatgaaatgctgaagaatgcaagatggcaggaagcccttgatttttgggtta

SEQ ID NO: 704463 - DNA, 75 bp, synthetic construct
  source 1..75: mol_type = other DNA
acgattcgacacaaacacaggaaaaaaaattgatactatatatgttggacgaaatccacatgagcctcgatatac

SEQ ID NO: 704464 - DNA, 75 bp, synthetic construct
  source 1..75: mol_type = other DNA
tcgtgtaaagctcatgatacgccggatgaaggtgtgttttttctttttcagcattggtgtaatagtcaaccttag

SEQ ID NO: 704465 - DNA, 75 bp, synthetic construct
  source 1..75: mol_type = other DNA
atgttcagaaaaaaaaattatatatggcgtcttaatgactcagtcgtgtaaagctcatgatacgccggatgaagg

SEQ ID NO: 704466 - DNA, 75 bp, synthetic construct
  source 1..75: mol_type = other DNA
agccctagggttatcgttatttatatcacaaggaagtttgagtccgacttcatatccaccagtccatgcaccgtc

SEQ ID NO: 704467 - DNA, 75 bp, synthetic construct
  source 1..75: mol_type = other DNA
aagcgcaacggcgatgccttgcatgaacgctttaagctggcacaggcggcgttttccagtcttaatgaccgcacc

SEQ ID NO: 704468 - DNA, 75 bp, synthetic construct
  source 1..75: mol_type = other DNA
cgagcgcggtgtgatgctttctggcggacaaaaacagcgtatctccattgctcgagcgttattagtcaacgcgga

SEQ ID NO: 704469 - DNA, 75 bp, synthetic construct
  source 1..75: mol_type = other DNA
gtggcgaacaacatcgcgttgggttgcccgaatgccacccagcaagagattgaacacgtagcgcggttagccagc

SEQ ID NO: 704470 - DNA, 75 bp, synthetic construct
  source 1..75: mol_type = other DNA
aatcctcattctggatgatgcgctttctgcggtggacggacgcacagagcaccagatcctgcataacctgcgcca

SEQ ID NO: 704471 - DNA, 75 bp, synthetic construct
  source 1..75: mol_type = other DNA
ttgcgggccgaccggttccggcaaaagtaccgtgctgtcactcattcagcgtcatttcgacgtcagcgaggggga

SEQ ID NO: 704472 - DNA, 75 bp, synthetic construct
  source 1..75: mol_type = other DNA
tgttgatggcgtgacggaacggcactttaccaccgggcaaatcctgatgtggatagctaccatggtgttgattgc

SEQ ID NO: 704473 - DNA, 75 bp, synthetic construct
  source 1..75: mol_type = other DNA
atgaacaccacactgacacccgcagatctcgatccccgtcgacaggccatgctgctgtactttcagggataccgc

SEQ ID NO: 704474 - DNA, 75 bp, synthetic construct
  source 1..75: mol_type = other DNA
tgactacgtccgcacccacgcgcctggagatctgcgggcaaatggtggtcaccatcctgtcggctgtggcacagg

SEQ ID NO: 704475 - DNA, 75 bp, synthetic construct
  source 1..75: mol_type = other DNA
tcggcagtacagccgtggcgctgctgcataagttaggttatcaggtcgttgctgtatctggtcgcgaaagtaccc

SEQ ID NO: 704476 - DNA, 75 bp, synthetic construct
  source 1..75: mol_type = other DNA
acaagcagcaaaagaaatctcactgacagaggcaccgaagtttgccgaagccattattaataaccaggtgcaggg

SEQ ID NO: 704477 - DNA, 75 bp, synthetic construct
  source 1..75: mol_type = other DNA
acttcgccaaagaagtggaggtggagctgaaaggcgatccgatggtgcttcccaacggggccactctttacttcc

SEQ ID NO: 704478 - DNA, 75 bp, synthetic construct
  source 1..75: mol_type = other DNA
ccgtggaagatgcggtgcgcagcggctgtaacctgttcgaccttgaccagttgcgcatggagtacagcccggacg

SEQ ID NO: 704479 - DNA, 75 bp, synthetic construct
  source 1..75: mol_type = other DNA
cggtatggctattcacaagaaatggcgacaaacctatttttccacgccatccagcctgactcatagtgcttatcc

SEQ ID NO: 704480 - DNA, 75 bp, synthetic construct
  source 1..75: mol_type = other DNA
gagcaaatgggataaagccagcgattcccagcgcagacttgctgaaaaatggttgcctgcggttcaggctgcaga

SEQ ID NO: 704481 - DNA, 75 bp, synthetic construct
  source 1..75: mol_type = other DNA
tttcgagcgtgaatacgccagaacgattgtgcgtaagcctaccgaagagcaaaaacggatgctgttactgcctgc

SEQ ID NO: 704482 - DNA, 75 bp, synthetic construct
  source 1..75: mol_type = other DNA
agtgtgcgaatcttcctggtttgccgaaaacatcggctggggtgatttatgttgctaaaaagcaaggatggcaaa

SEQ ID NO: 704483 - DNA, 75 bp, synthetic construct
  source 1..75: mol_type = other DNA
ttgcgaccgttgcagggcattaccaggtcagcgcatccactttgcgggacaagtattaccaggtacagaagtttg

SEQ ID NO: 704484 - DNA, 75 bp, synthetic construct
  source 1..75: mol_type = other DNA
cgaccgttgcaggacattaccaggtcagcgcatccactttgcgagacaaatattaccaggtacagaagtttgcga

SEQ ID NO: 704485 - DNA, 75 bp, synthetic construct
  source 1..75: mol_type = other DNA
tggcacctgttgcgtttaatgatgctgcggcaggccgtgaatatcgccgccgccagaaacaactgaaatctgcga

SEQ ID NO: 704486 - DNA, 75 bp, synthetic construct
  source 1..75: mol_type = other DNA
acgactggcacgggtaaaccgctacaaccagaccggcaacgaggcagaccttaatccgaacatcgctaaccgcaa

SEQ ID NO: 704487 - DNA, 75 bp, synthetic construct
  source 1..75: mol_type = other DNA
atacagcagcgggttcccgcgaaacgtcaaaaccgcggctcccgaaactcaacgggtgatgttctttaaaaatca

SEQ ID NO: 704488 - DNA, 75 bp, synthetic construct
  source 1..75: mol_type = other DNA
ggagtcaatacatatcccttccaattaagaatgaatatgtttccgtgttaggaaactataaagtaagtccgttta

SEQ ID NO: 704489 - DNA, 75 bp, synthetic construct
  source 1..75: mol_type = other DNA
aacctgaacttggagaggctgacattagtgactctgttattcataaaaaaataccagtaaaatatgttcaggcac

SEQ ID NO: 704490 - DNA, 75 bp, synthetic construct
  source 1..75: mol_type = other DNA
atggaaaactacgctaaatttgttgctactgaaatactgaaacaactcggtggaaatcgtttcatagcgatgaca

SEQ ID NO: 704491 - DNA, 75 bp, synthetic construct
  source 1..75: mol_type = other DNA
cagaagagcgtccagatttgacatttcctcatcagatgaaaaatggattgaaggctgatatttgcattgcgcatt

SEQ ID NO: 704492 - DNA, 75 bp, synthetic construct
  source 1..75: mol_type = other DNA
tcgacgatgaatccgctaggtattgcaggaatatttctgaatcactcaaaaatcaggtttctgctcaacaggagg

SEQ ID NO: 704493 - DNA, 75 bp, synthetic construct
  source 1..75: mol_type = other DNA
ccgtctggagtttgacgccgggcacaccgacattgcgcagtcattcatggcaatccgtcgtgccaccaccgccag

SEQ ID NO: 704494 - DNA, 75 bp, synthetic construct
  source 1..75: mol_type = other DNA
agccgcagcgaagaagccagccatgccgatctggcatgggcaaccatgcacgcactgtttaacgaaccgctgcag

SEQ ID NO: 704495 - DNA, 75 bp, synthetic construct
  source 1..75: mol_type = other DNA
ggagctgcgcaaagtggcttctggtatggctattcacaagaaatggcgacaaacctatttttccacgccatccag

SEQ ID NO: 704496 - DNA, 75 bp, synthetic construct
  source 1..75: mol_type = other DNA
acgggtgtcggtcacggggtttatgaaaacgtgaaagcgttttttccagccgtccgggagtttgtctacaacccc

SEQ ID NO: 704497 - DNA, 75 bp, synthetic construct
  source 1..75: mol_type = other DNA
gcatggtggacagctgggaagtctggactgactttcatgcactggcgctgcgcccgtttggctggcgcgaggtgt

SEQ ID NO: 704498 - DNA, 75 bp, synthetic construct
  source 1..75: mol_type = other DNA
ccgaacgcgtggaaatcgacgtcagtcataatgcccttgccggtgggcttctctgtgcggacggtcagtggcggc

SEQ ID NO: 704499 - DNA, 75 bp, synthetic construct
  source 1..75: mol_type = other DNA
ggtaacggtgccggtatcagcgtctttgccggcgttaatgcggcaaaaggcagcgagaaaggtaacggtactgag

SEQ ID NO: 704500 - DNA, 75 bp, synthetic construct
  source 1..75: mol_type = other DNA
acagtattcgggatgcctcagcggtgcttaaaacaatcccttctatcaattatatcggctatcttgaagccaatg

SEQ ID NO: 704501 - DNA, 75 bp, synthetic construct
  source 1..75: mol_type = other DNA
acaacgtcaggaatatcttgcgaaactgcgtgacacgcaggcttacaggaatgaaatggcgaagtatggtaccgg

SEQ ID NO: 704502 - DNA, 75 bp, synthetic construct
  source 1..75: mol_type = other DNA
aaagcgggaagaatgctgttgagaataactcactcagtgatggctggaacaatatcctgccatcaggaacacagg

SEQ ID NO: 704503 - DNA, 75 bp, synthetic construct
  source 1..75: mol_type = other DNA
agtcagagtgccagcaccatcggctccactgccggtaatgtcagtattaccgcgggcaaacaggctcatatcagc

SEQ ID NO: 704504 - DNA, 75 bp, synthetic construct
  source 1..75: mol_type = other DNA
gagaaacaacgtcaggaatatcttgcgaaactgcgtgacacgcaggcttacaggaatgaaatggcgaagtatggt

SEQ ID NO: 704505 - DNA, 75 bp, synthetic construct
  source 1..75: mol_type = other DNA
ttgaggccgtagtaaaggccagcggcatgcccgtaactgaagcagaagtgcgggagcgcttcaacgcgatagtaa

SEQ ID NO: 704506 - DNA, 75 bp, synthetic construct
  source 1..75: mol_type = other DNA
tgttgaattttcgctggacgatatcgtcagtgaattgagtattccgcgtttacgctcgttatcagtgaagtgggg

SEQ ID NO: 704507 - DNA, 75 bp, synthetic construct
  source 1..75: mol_type = other DNA
aacgtggccctggtcgcggtttggcttttctaagttgggtgaagaaattcacgaggcgtttcccgccctgtcgtc

SEQ ID NO: 704508 - DNA, 75 bp, synthetic construct
  source 1..75: mol_type = other DNA
gtcaggtggcggatattgcgcgtacacagggagaactgaatgcgttgaaggccgcgaaggaagcaaccggcgaaa

SEQ ID NO: 704509 - DNA, 75 bp, synthetic construct
  source 1..75: mol_type = other DNA
catgccggagacgcgtcaccgtctggacgtcaccgtatacatcagaagctcaaccaccctgccaccggacggcgc

SEQ ID NO: 704510 - DNA, 75 bp, synthetic construct
  source 1..75: mol_type = other DNA
ttaatcacggcgattgttaccgcgccagtgatgtggctgaaggatgctctggtgtccacggtgctggccaatatg

SEQ ID NO: 704511 - DNA, 75 bp, synthetic construct
  source 1..75: mol_type = other DNA
gcaccggaactggcacatctgctgaaatcaacagaaaaagacccggcagtaaacgccattgctcacgccattctg

SEQ ID NO: 704512 - DNA, 75 bp, synthetic construct
  source 1..75: mol_type = other DNA
atggctaaggctaaaggcattaagttgcctcacttcaagatcccgctttttgagcataccactgttttcttttgc

SEQ ID NO: 704513 - DNA, 75 bp, synthetic construct
  source 1..75: mol_type = other DNA
agccaccctgcaaatgagacatacgcttacatggtaggccgtatctttgatgctttcttccccatcctggcagaa

SEQ ID NO: 704514 - DNA, 75 bp, synthetic construct
  source 1..75: mol_type = other DNA
agccatccggcaaacgagacttacgcttacatggtaggccgtatctttgacgcattcttccccatcctggcggaa

SEQ ID NO: 704515 - DNA, 75 bp, synthetic construct
  source 1..75: mol_type = other DNA
tgcatgtatccagcggcggtagtgtcacgggtaccatagttaataacggtggccgcgagaatatctattcaggcg

SEQ ID NO: 704516 - DNA, 75 bp, synthetic construct
  source 1..75: mol_type = other DNA
ttaacagcgctggatatcagtatgtctccagcggaggcagtgccatgagtactactattaacagcgctggatacc

SEQ ID NO: 704517 - DNA, 75 bp, synthetic construct
  source 1..75: mol_type = other DNA
ggtctgacgttaacctgtactggtgagaccggcggtaatttctacgtgatcgcagtattcaacaatgagactgga

SEQ ID NO: 704518 - DNA, 75 bp, synthetic construct
  source 1..75: mol_type = other DNA
tgagaataatgcgctgagtctggttgccagaggctgtgcggtcgcagcaccttgcaggactaaagttgcagagca

SEQ ID NO: 704519 - DNA, 75 bp, synthetic construct
  source 1..75: mol_type = other DNA
ctgacagaagatcagaagcaaactgtaagcacgctggcaacgctgtcagcgggtatggccggcggcattgccagt

SEQ ID NO: 704520 - DNA, 75 bp, synthetic construct
  source 1..75: mol_type = other DNA
agcggttcggatgtgattgcgaaccgggatatcagcattaccggtgacagtgtggtggttgacccggggcatgat

SEQ ID NO: 704521 - DNA, 75 bp, synthetic construct
  source 1..75: mol_type = other DNA
caatgctgctggatatcctgtatataacggacagattgccaaattcgttactgtgaaaggacactctatggctgt

SEQ ID NO: 704522 - DNA, 75 bp, synthetic construct
  source 1..75: mol_type = other DNA
accgcctgatgcggggctatgcggaaggtggttatgtcggcggtgccggaagtccggcgcagatgcggcgggcgg

SEQ ID NO: 704523 - DNA, 75 bp, synthetic construct
  source 1..75: mol_type = other DNA
cagtcaaggatatggccgacaggatgacctccgatgaactggagcatctgattaccctgcaaatgatgggtaatg

SEQ ID NO: 704524 - DNA, 75 bp, synthetic construct
  source 1..75: mol_type = other DNA
ttgatatctacccgtacatagccggggcggtcttcctgattggtagctggctgcgttatgactacgggcagtata

SEQ ID NO: 704525 - DNA, 75 bp, synthetic construct
  source 1..75: mol_type = other DNA
gcgaaccggataccggaatgcctttagcagaactggaatacacccaggccattctgacgtatgacgttacgttaa

SEQ ID NO: 704526 - DNA, 75 bp, synthetic construct
  source 1..75: mol_type = other DNA
tgtctgcgtctggcagtttcgcctggacaacggcggaagtggcgaagggttcgggcctttgacactctccctgcg

SEQ ID NO: 704527 - DNA, 75 bp, synthetic construct
  source 1..75: mol_type = other DNA
aggtcatcttcagttccgatggcacgggattcggcaaaagctatggcgtaattcaagggtatgtcgaatatctgg

SEQ ID NO: 704528 - DNA, 75 bp, synthetic construct
  source 1..75: mol_type = other DNA
cggaaagtcagtatgcggtcctgaaagaggctgccacgaaacgacagttatctgagcaggaaaaatccctgctgg

SEQ ID NO: 704529 - DNA, 75 bp, synthetic construct
  source 1..75: mol_type = other DNA
tatttctctagactccagtattttttcgaagcttatgatttatatattttaacacccaaagatagttgggataaa

SEQ ID NO: 704530 - DNA, 75 bp, synthetic construct
  source 1..75: mol_type = other DNA
tacagaaataaataagtctgatgttattttttgtggtactcctagagaatatgaaaatttgcaaggaaaaaataa

SEQ ID NO: 704531 - DNA, 75 bp, synthetic construct
  source 1..75: mol_type = other DNA
ttctctctcgtaaggatattgccgatctcgactttatggactgggccacgggcctgaaaaatcgcgaccgctata

SEQ ID NO: 704532 - DNA, 75 bp, synthetic construct
  source 1..75: mol_type = other DNA
aggtcatcttcagttccgatggcacggggtttggcaaaagttatggcgtaattcaagggtatgtcgaatatctgg

SEQ ID NO: 704533 - DNA, 75 bp, synthetic construct
  source 1..75: mol_type = other DNA
ggagtattaatggatcagtcgtgtaaatattatgatacgcctgatgaaggtgtgttttttctttttcagcattgg

SEQ ID NO: 704534 - DNA, 75 bp, synthetic construct
  source 1..75: mol_type = other DNA
aagctgagtcagggccagtcattcaataatgcggaacagcgactgacgtttgagcaagctatcgtcgcgaatggt

SEQ ID NO: 704535 - DNA, 75 bp, synthetic construct
  source 1..75: mol_type = other DNA
agcgtttcgccaaaaaccaaaatccaggtgatctgttttccgaaggtggctttaccaacctgttgttcatgtcac

SEQ ID NO: 704536 - DNA, 75 bp, synthetic construct
  source 1..75: mol_type = other DNA
gccgctagcggcgagttcatttgcgttctctcccgtaaggatgttgccgacctcgactttatggactgggcctct

SEQ ID NO: 704537 - DNA, 75 bp, synthetic construct
  source 1..75: mol_type = other DNA
atggcaaatcaatgatgaactgggggaactgttggatagcgtggaaaatcacacgccagttatcagaaaaaaagc

SEQ ID NO: 704538 - DNA, 75 bp, synthetic construct
  source 1..75: mol_type = other DNA
gttctatgattctttgaagttgatgagcctttttgtccgtcaggcaggctatgccggacttttagttagcctcga

SEQ ID NO: 704539 - DNA, 75 bp, synthetic construct
  source 1..75: mol_type = other DNA
cgtgctggaacaaaacagaacgatgaactggcaaacactaatcgagggtgtggcgattgaagaggaccggcccag

SEQ ID NO: 704540 - DNA, 75 bp, synthetic construct
  source 1..75: mol_type = other DNA
actgcctgcaaggaacggctgagtatatcggctttttactcggcggcacgccagagttcctgttcgatccgcgca

SEQ ID NO: 704541 - DNA, 75 bp, synthetic construct
  source 1..75: mol_type = other DNA
agatgacaaacatgatctcatatcagggacttgttcgcaccttccctaacagaacactcattcatgagcagcgta

SEQ ID NO: 704542 - DNA, 75 bp, synthetic construct
  source 1..75: mol_type = other DNA
tgataggatttattttagtaaatatctgaatgttgaagtaattaatgttgaaaaaaattgctggccgcttaatac

SEQ ID NO: 704543 - DNA, 75 bp, synthetic construct
  source 1..75: mol_type = other DNA
ggtaaagttgacggattttttcgtaatggttttgcgtccgtggttctggctggtggatggtgaagtcagaggatc

SEQ ID NO: 704544 - DNA, 75 bp, synthetic construct
  source 1..75: mol_type = other DNA
gaccaacctggtacgcggtgaaatcatcgatgaagatgatctgccaattaagatgaccgcccacaccccatgttt

SEQ ID NO: 704545 - DNA, 75 bp, synthetic construct
  source 1..75: mol_type = other DNA
tgcaccagttcgacaaagttgaaatggtgcagatcgtgcgtccggaagattcaatggcggcacttgaagagatga

SEQ ID NO: 704546 - DNA, 75 bp, synthetic construct
  source 1..75: mol_type = other DNA
cgtttccttcccctgagggttttacctcaggcatgacaatggcgggatattttattcacgccactgtcataaatg

SEQ ID NO: 704547 - DNA, 75 bp, synthetic construct
  source 1..75: mol_type = other DNA
atggccgtactgggattgcagggggtgcggggtggcgtgggtactacaaccatcactgccgcgttaggctggtca

SEQ ID NO: 704548 - DNA, 75 bp, synthetic construct
  source 1..75: mol_type = other DNA
atgttgattttacccaccgtcagggctgggccagagcgatgctggattggccaggactggcgtgacgctgggttg

SEQ ID NO: 704549 - DNA, 75 bp, synthetic construct
  source 1..75: mol_type = other DNA
atcgacttaccgcgtgatgcctcgcagataacccaccagctgctgagtttgtgcgatcactcgctggcaatcgtc

SEQ ID NO: 704550 - DNA, 75 bp, synthetic construct
  source 1..75: mol_type = other DNA
tccgcgaactcggatgccaacatcggcgacctgatcgcgcaggcgatggacaaggtcggcaaggaaggcgtgatc

SEQ ID NO: 704551 - DNA, 75 bp, synthetic construct
  source 1..75: mol_type = other DNA
ttcggctacaacgccgccaacggcgagttcggcgacatgatcgagttcggcatcctggacccgaccaaggtcacg

SEQ ID NO: 704552 - DNA, 75 bp, synthetic construct
  source 1..75: mol_type = other DNA
gcgctacggtacatgccatacgccaatgaaattctgggcggcatggcgcgaagaagatattaccgatgcgcagat

SEQ ID NO: 704553 - DNA, 75 bp, synthetic construct
  source 1..75: mol_type = other DNA
gcgcgttattatccgcaggtcgcgtaacgcaaatgctgacctcactggcgttaaaatacaatgaatcgctcactc

SEQ ID NO: 704554 - DNA, 75 bp, synthetic construct
  source 1..75: mol_type = other DNA
gcgtgcaacaggcgtcagcaaaggtccggggcagcagtaagccgtcaggatcgccgcgtcggctgaagagctgac

SEQ ID NO: 704555 - DNA, 75 bp, synthetic construct
  source 1..75: mol_type = other DNA
gcgtgcaacaggcgtcagcaaaggtccggggcagcagtaagccgtcaggaccgctgcgtcggctgaagagctgac

SEQ ID NO: 704556 - DNA, 75 bp, synthetic construct
  source 1..75: mol_type = other DNA
tgattgagcaggagctgcgtgatgacccgtatgctcaggaagccttttcaaaactcctgcgtatggctattgaag

SEQ ID NO: 704557 - DNA, 75 bp, synthetic construct
  source 1..75: mol_type = other DNA
ttgcccatcgcccgcctgccgatcgcaactggtatcagcagttaattgctgccggtgaactggccgtcagcgggc

SEQ ID NO: 704558 - DNA, 75 bp, synthetic construct
  source 1..75: mol_type = other DNA
tccgtatgctcaggaggccttttccagactcctgcgtatggcaatcgaagaggctgaaaaactgttcgaccatcc

SEQ ID NO: 704559 - DNA, 75 bp, synthetic construct
  source 1..75: mol_type = other DNA
atgcctggtttgatcgtattaccgatgggttaagcgaagcgcaaaaagccgaccttaagcgtaaatatgcccgta

SEQ ID NO: 704560 - DNA, 75 bp, synthetic construct
  source 1..75: mol_type = other DNA
atgcgtcaataccagccccgacatcatcgttctgattgatgaaggacaccgcagccaggggggtgagaaccatgt

SEQ ID NO: 704561 - DNA, 75 bp, synthetic construct
  source 1..75: mol_type = other DNA
cgacgttcaggtgcaggataagtggacgaagctggcctttgaagtggacagcattatcgttagagcggtggaaga

SEQ ID NO: 704562 - DNA, 75 bp, synthetic construct
  source 1..75: mol_type = other DNA
gtgaacaagatctatatgctcgacacgaacatctgctcgttcatcatgcgcgagcaacctgaagcattgcttaag

SEQ ID NO: 704563 - DNA, 75 bp, synthetic construct
  source 1..75: mol_type = other DNA
acatttaaggggtatacaaatgatttagtgatagaaactacgtctaacatacagggctttaacaccaaaaagaaa

SEQ ID NO: 704564 - DNA, 75 bp, synthetic construct
  source 1..75: mol_type = other DNA
gaagatagagtaattgaactttcgcgtgttggacttaacaaacttttttctttttccaaattatacaaaatttat

SEQ ID NO: 704565 - DNA, 75 bp, synthetic construct
  source 1..75: mol_type = other DNA
gatgcgaccacggagattaaggtggcactgcgtctcgccggcacgccgatcggtccgaacgacacggcgatagcc

SEQ ID NO: 704566 - DNA, 75 bp, synthetic construct
  source 1..75: mol_type = other DNA
ggaaagggtcttatatgactaagatttactacaatccagaagaaaaaaatgaggctgtaatgcgcatgttaggca

SEQ ID NO: 704567 - DNA, 75 bp, synthetic construct
  source 1..75: mol_type = other DNA
gaaagggggagaggttgggaaaatattagcagtgatatttgtaattattccaatctcgaaatgctggcacaatcc

SEQ ID NO: 704568 - DNA, 75 bp, synthetic construct
  source 1..75: mol_type = other DNA
cgattgaagatacacatgaacttgatttgcctaaccatcctaatcatgttcatttattttttaagcgtgagggga

SEQ ID NO: 704569 - DNA, 75 bp, synthetic construct
  source 1..75: mol_type = other DNA
ttctgaggactacgccagcctcggcacttttttcttgttgtttgtgcaactggttcctgcattttgcctgattac

SEQ ID NO: 704570 - DNA, 75 bp, synthetic construct
  source 1..75: mol_type = other DNA
gcgcactgccggtacgccgatcggcccaaacgacacagcaatcgccggtcatgccattgccgtcggtgcgatcct

SEQ ID NO: 704571 - DNA, 75 bp, synthetic construct
  source 1..75: mol_type = other DNA
ctgcgcccggctcgatgccgtcctgccctgggaccgcaccgcggtggatgccaccacagagattaaggtggccct

SEQ ID NO: 704572 - DNA, 75 bp, synthetic construct
  source 1..75: mol_type = other DNA
cccaccgcttatgcgttggctgcattgttcatgctgttgctgtccaacttgttcccttttgtgaatatgaatgtt

SEQ ID NO: 704573 - DNA, 75 bp, synthetic construct
  source 1..75: mol_type = other DNA
atgtgcgaacatcatcatgccgcgaagcacatcctgtgctcgcagtgtgacatgctggtggcgttaccccacctt

SEQ ID NO: 704574 - DNA, 75 bp, synthetic construct
  source 1..75: mol_type = other DNA
tcttccggctaatattttgcccatcatggtgacggatttattaggctcgaagatgccgtcgacgattctcgctgg

SEQ ID NO: 704575 - DNA, 75 bp, synthetic construct
  source 1..75: mol_type = other DNA
cgaggcgttaacggcctttgccggatgcctgaaagtggcactgcagtccgccaccttcttcaccgacaagagctt

SEQ ID NO: 704576 - DNA, 75 bp, synthetic construct
  source 1..75: mol_type = other DNA
accggacggtgagggttgtgtgccgtgagtggagtgtcacggataatgcccggtacagtgatttcagttgcacga

SEQ ID NO: 704577 - DNA, 75 bp, synthetic construct
  source 1..75: mol_type = other DNA
acctccacggtaaaccgcaaggcaccgggctgctgaaagccaacccggaagattttgtggtggtggaagatttag

SEQ ID NO: 704578 - DNA, 75 bp, synthetic construct
  source 1..75: mol_type = other DNA
ggcgctggctggatgaatttttatcgtggcatggtggttaccgtgcctttttgtggaaacccccgaaacataacc

SEQ ID NO: 704579 - DNA, 75 bp, synthetic construct
  source 1..75: mol_type = other DNA
aaatgctgcgaaaacgataggaaaaaggctgtacgggatcctgaatgcgatgcgacacagtgtctcaaacggaaa

SEQ ID NO: 704580 - DNA, 75 bp, synthetic construct
  source 1..75: mol_type = other DNA
ggtcttttccctgacggcgactttaagcgcctgggtgatgtggttgagctgaaagccgagaagattgatgacgac

SEQ ID NO: 704581 - DNA, 75 bp, synthetic construct
  source 1..75: mol_type = other DNA
taattatattgtctttgacagaagtaaactttccaaaggaaaaggtggatttttattcctatcttataagcctgg

SEQ ID NO: 704582 - DNA, 75 bp, synthetic construct
  source 1..75: mol_type = other DNA
gcaaaggcgatgatgtattcgcggaacacatacgcctgcgttttactggccgacagaaaaatctggttatggccg

SEQ ID NO: 704583 - DNA, 75 bp, synthetic construct
  source 1..75: mol_type = other DNA
gaaaccagccaggcattcacccgcctgaaaaacagtctcgaccacaccgaaagtctgacccagcagcgccgcagc

SEQ ID NO: 704584 - DNA, 75 bp, synthetic construct
  source 1..75: mol_type = other DNA
cctggctcgttcaaacatattgccctggaagagatctacgccctgtgcagtgcgtattcgatcacttacgacatg

SEQ ID NO: 704585 - DNA, 75 bp, synthetic construct
  source 1..75: mol_type = other DNA
ggacggtgagggtggtgtgccgggagtggagcgtcacggataacgtccggtacagtgatttcagttgtacgattg

SEQ ID NO: 704586 - DNA, 75 bp, synthetic construct
  source 1..75: mol_type = other DNA
ttccgggtgacggatgagtcaaccaggcgctggctggaagagtttttatcgtggcatggtggttaccgtgccttt

SEQ ID NO: 704587 - DNA, 75 bp, synthetic construct
  source 1..75: mol_type = other DNA
ggatcccccgcgaggggatggagacgacacgaaagccatctgttattacggtaaagttcggtgacggatatgaac

SEQ ID NO: 704588 - DNA, 75 bp, synthetic construct
  source 1..75: mol_type = other DNA
gcgaggcctgtcgcggattaaaaagcctttatcagtgcgtcatatgaatgtagacgaagtcgcctttaaaaaagg

SEQ ID NO: 704589 - DNA, 75 bp, synthetic construct
  source 1..75: mol_type = other DNA
ttaattcagcgacaaaacttcctgaatgcgtcaataccagccccgacatcatcgttctgattgatgaaggacacc

SEQ ID NO: 704590 - DNA, 75 bp, synthetic construct
  source 1..75: mol_type = other DNA
acccgcttcttcaccctgtttgataaaaagaccgggaaaattgtcgcccgctatcagcaggtgttcggtattaaa

SEQ ID NO: 704591 - DNA, 75 bp, synthetic construct
  source 1..75: mol_type = other DNA
atggagttttacaagacggggtgcgccttcctgaaagctttactgagaacccggctgagacttaaaaaaaccgac

SEQ ID NO: 704592 - DNA, 75 bp, synthetic construct
  source 1..75: mol_type = other DNA
cggtctgctgattgattatcgcggtattctggctgagctggacacgactatcggcaaatatcaggacctcgcctc

SEQ ID NO: 704593 - DNA, 75 bp, synthetic construct
  source 1..75: mol_type = other DNA
gataaactgctcaccgggtttgatgagccgaagaataccgtgctgtatatcgacaagccgcttaagtcccacaac

SEQ ID NO: 704594 - DNA, 75 bp, synthetic construct
  source 1..75: mol_type = other DNA
tacccgggaagggaatactgaggtggatgaaagcaaactgccggaagtgacgaaatggtggaaggataatgtcgg

SEQ ID NO: 704595 - DNA, 75 bp, synthetic construct
  source 1..75: mol_type = other DNA
agtacaacgaatgtgtagatcactcgctaagggccggacacgccgaaaggctgaacgaaacagagaatcaaaaat

SEQ ID NO: 704596 - DNA, 75 bp, synthetic construct
  source 1..75: mol_type = other DNA
atgacgactatgaacgggaaagtgtcatgcgtgcaatgtgcagtgtatgcagcacgaagaagggagaatgtaacg

SEQ ID NO: 704597 - DNA, 75 bp, synthetic construct
  source 1..75: mol_type = other DNA
gggctgtgttttattcacagttataatggcatattcccagccatcgtttgcactgttgtgcagaaataaccagac

SEQ ID NO: 704598 - DNA, 75 bp, synthetic construct
  source 1..75: mol_type = other DNA
attcctgagcgtcatggctttacggcggagctggcatcactggaaaactgcataagcgatgatgaatattgcttc

SEQ ID NO: 704599 - DNA, 75 bp, synthetic construct
  source 1..75: mol_type = other DNA
gttgatgtgccgagcggatacaaagtggtggtagtccccgattcagtcagcgttccacaagcggtcagcgtcgcg

SEQ ID NO: 704600 - DNA, 75 bp, synthetic construct
  source 1..75: mol_type = other DNA
ttgtggttcctgattcagtcagcgttccacaagcggtcagcgtcgcgactgtgccgcaaaccgtctatgtggctc

SEQ ID NO: 704601 - DNA, 75 bp, synthetic construct
  source 1..75: mol_type = other DNA
gctggattatctggatgcactggaactggttgattcctccagtgcgccagatattgaatggcctacgcctccggc

SEQ ID NO: 704602 - DNA, 75 bp, synthetic construct
  source 1..75: mol_type = other DNA
tcatttaggcgatccggtttttaaagatacgtttcatgggaaatacaaggtttctgactgggttattcatttcca

SEQ ID NO: 704603 - DNA, 75 bp, synthetic construct
  source 1..75: mol_type = other DNA
atgggcagcggagcaggcgcgcaaaatccacaattgaatattgtctcattctctgagaccttcaacctttattac

SEQ ID NO: 704604 - DNA, 75 bp, synthetic construct
  source 1..75: mol_type = other DNA
atgcgctcgcttggttgcagcaatatcgactacctggtaccaaaccgtttcgaagacggttacggcttaagcccg

SEQ ID NO: 704605 - DNA, 75 bp, synthetic construct
  source 1..75: mol_type = other DNA
aggccgttgagatcctttacaacgcttttcgcgaaggaacgcggattattgtggtcggtgatttcgacgccgacg

SEQ ID NO: 704606 - DNA, 75 bp, synthetic construct
  source 1..75: mol_type = other DNA
gtttcatgtgaaaaacatcaaacataaaatacaagctcggaatacgaatcacgctatacacattgctaacaggaa

SEQ ID NO: 704607 - DNA, 75 bp, synthetic construct
  source 1..75: mol_type = other DNA
atatgcagccagcaaaagccgctatgaaggaagtcgttacgcgcattatcggcgtttgcggcagtgaaggaaaaa

SEQ ID NO: 704608 - DNA, 75 bp, synthetic construct
  source 1..75: mol_type = other DNA
agattcaacctttgcctcgatgtgtgaatttggcccgctgtggctggatgattttggcaccgggatggcaaattt

SEQ ID NO: 704609 - DNA, 75 bp, synthetic construct
  source 1..75: mol_type = other DNA
taccgattatgtaagctgttctgtctatcactacccgttctcctgcaaagacaaatggacccaatcccgtgtggt

SEQ ID NO: 704610 - DNA, 75 bp, synthetic construct
  source 1..75: mol_type = other DNA
aacaggtgcgatgcaagcaaagttaaaaaaactaaataaacatccctatctcttttttaaagatgcaatcaaaaa

SEQ ID NO: 704611 - DNA, 75 bp, synthetic construct
  source 1..75: mol_type = other DNA
cattatcgcggaagagatcaaacaacataatccgcaactccacgaaacgttgctcactcaccttgagcagctgca

SEQ ID NO: 704612 - DNA, 75 bp, synthetic construct
  source 1..75: mol_type = other DNA
caatgtatcaccccgaatggcatcagggggttgtcggtattctggcttcccgtattaaagagcgttttcaccgtc

SEQ ID NO: 704613 - DNA, 75 bp, synthetic construct
  source 1..75: mol_type = other DNA
gaatcgccaaggcaaacgcgtgccaatcagcattgagcagcatgtctttaaataccatatcaccattcaatactt

SEQ ID NO: 704614 - DNA, 75 bp, synthetic construct
  source 1..75: mol_type = other DNA
atggtctacccgcaagcgacatcatcgccccgaatctggttgagctggaaatactctgcgggcatccggtacata

SEQ ID NO: 704615 - DNA, 75 bp, synthetic construct
  source 1..75: mol_type = other DNA
caatgcaggaatatgagctgcaagtggtggctgctcaggatcgtattgccaaaccagaacattacttcagcgcaa

SEQ ID NO: 704616 - DNA, 75 bp, synthetic construct
  source 1..75: mol_type = other DNA
tgactggcagcttcaacggcaaaacccagtcgctgttggtgatgcttaatgccgacgaccagaaaatcacccttg

SEQ ID NO: 704617 - DNA, 75 bp, synthetic construct
  source 1..75: mol_type = other DNA
cctcaccggctgtagccactcgcaaccggaacaggaaggccgcccgcaggcgtggctgcaacctggcacgcgcat

SEQ ID NO: 704618 - DNA, 75 bp, synthetic construct
  source 1..75: mol_type = other DNA
cttagccactggccgattagcgcctggcaaccgcaactccccgctggatggacgcttcgcgacaacggtgacaaa

SEQ ID NO: 704619 - DNA, 75 bp, synthetic construct
  source 1..75: mol_type = other DNA
tcccgtcgaaatcactggcaggcgtgggtgtggcgttttatctaatgctggcgctgcgcacctttttgcgcgatc

SEQ ID NO: 704620 - DNA, 75 bp, synthetic construct
  source 1..75: mol_type = other DNA
caactggcttacaaactggatatcaacgagtttcgcggcaaccgcaatctacagattatcatcgacaatatctgg

SEQ ID NO: 704621 - DNA, 75 bp, synthetic construct
  source 1..75: mol_type = other DNA
cgcaattcctaacctggcagaactgctggatctggtcgcgctggggacagtggcggacgtcgtgccgctggacgc

SEQ ID NO: 704622 - DNA, 75 bp, synthetic construct
  source 1..75: mol_type = other DNA
gaaccttcaaaagctgaagtcggcgttggggcttccgctattggtctcggtgtcgcggaaatccttcttgggcgc

SEQ ID NO: 704623 - DNA, 75 bp, synthetic construct
  source 1..75: mol_type = other DNA
ttctccggcatctccgggttctatccttgctgtactggcgatgacaccaaaaggtgcttacttcgctaacatcgc

SEQ ID NO: 704624 - DNA, 75 bp, synthetic construct
  source 1..75: mol_type = other DNA
actggcttgcagcagtttacgccgaacacgttggtggatatgcccacgctgctcagggatctggaacaggcgcgt

SEQ ID NO: 704625 - DNA, 75 bp, synthetic construct
  source 1..75: mol_type = other DNA
ctgttgaagataccggtttacttggtaccgattatgtaagctgtgctgtctatcacttcccgttctcctgcaaag

SEQ ID NO: 704626 - DNA, 75 bp, synthetic construct
  source 1..75: mol_type = other DNA
cgccgctggcgggtagaaatcatgagcgccagcgagggtgaacatggtggttataaagagatcatcgccaaaatt

SEQ ID NO: 704627 - DNA, 75 bp, synthetic construct
  source 1..75: mol_type = other DNA
gctcgcatccacgctgctgaaatggcaaaacggcaacaggccgaagcgtctacccgtcgtaacctgctggggagt

SEQ ID NO: 704628 - DNA, 75 bp, synthetic construct
  source 1..75: mol_type = other DNA
tggaagccctgcatgaacgccatgaagaagttcaggcgttgttgggtgatgcgcaaaccatcgctgaccaggaac

SEQ ID NO: 704629 - DNA, 75 bp, synthetic construct
  source 1..75: mol_type = other DNA
tgtctactgacgttactgcctgtgctgattctggctgtcgtttcaggcgtcagtttatttgtactgttgcagtag

SEQ ID NO: 704630 - DNA, 75 bp, synthetic construct
  source 1..75: mol_type = other DNA
aactgtacgcaccagcgaagatccgcgttttcatgccggtcaggaggtgttactcactggctggggcgttggtga

SEQ ID NO: 704631 - DNA, 75 bp, synthetic construct
  source 1..75: mol_type = other DNA
accaacggcaagattaaggcggcagagatcaggcctgaccttgctcagttgctgagcgcgcattcaccggccgcc

SEQ ID NO: 704632 - DNA, 75 bp, synthetic construct
  source 1..75: mol_type = other DNA
gcttctgaaaaagcagagcttgctaaactgaaagatctgccagctattacgctggacggtcaccaggtagaagtg

SEQ ID NO: 704633 - DNA, 75 bp, synthetic construct
  source 1..75: mol_type = other DNA
cacaagatggctattcgccggtggtacgtgactatgacaccggcctaccgacgcaaggagtgaaagtggaagaga

SEQ ID NO: 704634 - DNA, 75 bp, synthetic construct
  source 1..75: mol_type = other DNA
atggttattcgccagtggtacgcgactatgacaccggcctgccgacacaaggggtgaaggtggaagagaaaaaac

SEQ ID NO: 704635 - DNA, 75 bp, synthetic construct
  source 1..75: mol_type = other DNA
tacagcgtgttccggccactgaatctcaggggcgtattcatacttctgcttgtaccgttgctgtaatgccagaac

SEQ ID NO: 704636 - DNA, 75 bp, synthetic construct
  source 1..75: mol_type = other DNA
gatatggcgggaaatggtggcccggggatttacaggcagtgaaaccatcgtcagggatgcggttgccaaatggcg

SEQ ID NO: 704637 - DNA, 75 bp, synthetic construct
  source 1..75: mol_type = other DNA
tcatgctgaaggcaaatggacgggcatgtgtggtgagcttgctggcgatgaacgtgctacacttctgttgctggg

SEQ ID NO: 704638 - DNA, 75 bp, synthetic construct
  source 1..75: mol_type = other DNA
aaagaagagttccccgaaatggactctttgcctcaggaggttcgtgatgttacatcccgcctgagtgcggactac

SEQ ID NO: 704639 - DNA, 75 bp, synthetic construct
  source 1..75: mol_type = other DNA
gcgatgtgtcgggcgtcgctggccatgtataacacccatgaagaagtggatcgtctggtgaccggcctgcaacgt

SEQ ID NO: 704640 - DNA, 75 bp, synthetic construct
  source 1..75: mol_type = other DNA
tgtgattcctctcaaccccgacggtacgttgcagctggagatactgcctaatctgttcgatgagaaaactcgcct

SEQ ID NO: 704641 - DNA, 75 bp, synthetic construct
  source 1..75: mol_type = other DNA
aactatctgcacttccagcacgtcccatccctgatgaatgcaatcagccgtttctttgtccagttagcccgccag

SEQ ID NO: 704642 - DNA, 75 bp, synthetic construct
  source 1..75: mol_type = other DNA
gctatgtgtcgggcatcgttggctatgtataacacccatgaagaagtggatcgtctggtaacaggattacaacgt

SEQ ID NO: 704643 - DNA, 75 bp, synthetic construct
  source 1..75: mol_type = other DNA
atgatctggcgctgcgataacgatctggatattcagcagttgttgactgccgcaatggatccgcaggagtttaca

SEQ ID NO: 704644 - DNA, 75 bp, synthetic construct
  source 1..75: mol_type = other DNA
ataacgctcgccatgaaagagggggttccacagcgtgttctgctgaaagacttccagggcgatatgcggctggtg

SEQ ID NO: 704645 - DNA, 75 bp, synthetic construct
  source 1..75: mol_type = other DNA
cctgatctggatggcggcagccgcatgctgccgaattaccttgaggatctgcaaaatccgctgtggctggtaact

SEQ ID NO: 704646 - DNA, 75 bp, synthetic construct
  source 1..75: mol_type = other DNA
gacaaaatataactctcgccatgaaagagggggttccacagcgtgttctgctgaaagacttccagggcgatatgc

SEQ ID NO: 704647 - DNA, 75 bp, synthetic construct
  source 1..75: mol_type = other DNA
cgacgccaccctagtgcaaagcggcgcagtgatacttggtgaaccggctgcaggctatgtctcccatgaaggcta

SEQ ID NO: 704648 - DNA, 75 bp, synthetic construct
  source 1..75: mol_type = other DNA
gcgtgcaacaggcgtcagcaaaggtccggggcagcagaaagccgtcaggaacgcagcgtcggctgaagagctgac

SEQ ID NO: 704649 - DNA, 75 bp, synthetic construct
  source 1..75: mol_type = other DNA
aggccagcgatacgatggttggcagtgacggtacgctggatgttcgcagcggcggtgtgctctacggcaccacaa

SEQ ID NO: 704650 - DNA, 75 bp, synthetic construct
  source 1..75: mol_type = other DNA
atgattaacgtacaaaacgtcagtaaaaccttcatcctgcaccagcaaaacggcgtgcgcctgcccgtcctcaac

SEQ ID NO: 704651 - DNA, 75 bp, synthetic construct
  source 1..75: mol_type = other DNA
caccgactgttccggctaccagacccgttatgaccatgaccgcttcgggcagatgacggcggtgcaccgcgagga

SEQ ID NO: 704652 - DNA, 75 bp, synthetic construct
  source 1..75: mol_type = other DNA
ggttgccattgccagagcgttagtgaatgaaccgcgcgtattgctgctggatgaaccgctcggcgcactggatct

SEQ ID NO: 704653 - DNA, 75 bp, synthetic construct
  source 1..75: mol_type = other DNA
taccggcgtaccgcgtgaagcctgcgccgctaaagccgcgcgtctgctcacccgcctgaacgtgcctgaacgcct

SEQ ID NO: 704654 - DNA, 75 bp, synthetic construct
  source 1..75: mol_type = other DNA
ctggtcaccgcgccagcgcgcaaagtggtggagatccgcaaaaccaccgtcggctgggtgagccagtttctgcgc

SEQ ID NO: 704655 - DNA, 75 bp, synthetic construct
  source 1..75: mol_type = other DNA
atgattaacgtacaaaacgtcagtaaaaccttcatcctgcaccagcaaaacggcgtgcgcctgcctgtcttacaa

SEQ ID NO: 704656 - DNA, 75 bp, synthetic construct
  source 1..75: mol_type = other DNA
ggcatcgcaaggtgctgtgcaactttgataatgcctggtcagcaacgcaggatatgcgtgagcagattattgagg

SEQ ID NO: 704657 - DNA, 75 bp, synthetic construct
  source 1..75: mol_type = other DNA
ggtgagcggacagtgaagaaacgcagagtttattgcggtcttctgtctggcgctgaatggctggaagaaccgaag

SEQ ID NO: 704658 - DNA, 75 bp, synthetic construct
  source 1..75: mol_type = other DNA
gaagcgttagccgaaaagatgaacggcaaattccgcgctgattatcaggaaacatccggtggcgaagcgtgtgat

SEQ ID NO: 704659 - DNA, 75 bp, synthetic construct
  source 1..75: mol_type = other DNA
atgaaccgctcggcgcactggatctcaaattgcgtgagcagatgcagctggaactgaaaaaactgcaacagtctc

SEQ ID NO: 704660 - DNA, 75 bp, synthetic construct
  source 1..75: mol_type = other DNA
taaatccatgcgccgcgctggcgttgtgtggctttctatggctcgtgaagtctatggcagcgatacgccaatgcg

SEQ ID NO: 704661 - DNA, 75 bp, synthetic construct
  source 1..75: mol_type = other DNA
ggtgagcgaacggtgaagaaacgccgcgtttattgcggtcttctgtctggcgctgaatggctggaagaaccgaag

SEQ ID NO: 704662 - DNA, 75 bp, synthetic construct
  source 1..75: mol_type = other DNA
cggctgggtaagccagtttcttcgcgtcatccctcgtatttcggcactggaagtggtgatgcagccgctgctcaa

SEQ ID NO: 704663 - DNA, 75 bp, synthetic construct
  source 1..75: mol_type = other DNA
ggcaggcgctgccggaagaacttcgcttaagtccgcacagttatctggcgacgaacagcccgcaggggccgtggt

SEQ ID NO: 704664 - DNA, 75 bp, synthetic construct
  source 1..75: mol_type = other DNA
gcggcctgccgctggcgctcatcagcacggaaggggcaacagcgtggtgcgcagaatatgatgaatggggcaacc

SEQ ID NO: 704665 - DNA, 75 bp, synthetic construct
  source 1..75: mol_type = other DNA
tgaaagacacgcagggccatgaaacgcggtatgaatacaacaccgccggtgacctgaccaccgtcattgccccgg

SEQ ID NO: 704666 - DNA, 75 bp, synthetic construct
  source 1..75: mol_type = other DNA
ttccttatcatgctgcagcagggggggcagatcagcgattcattcggtggaccgctcagcctgcttaccctgctg

SEQ ID NO: 704667 - DNA, 75 bp, synthetic construct
  source 1..75: mol_type = other DNA
gactgattagcgggctatctcgctggggagaacgactgctggatacctccattcagatgttgcgtaacgtgccgc

SEQ ID NO: 704668 - DNA, 75 bp, synthetic construct
  source 1..75: mol_type = other DNA
gttacagagtcagcacctgaacagcctgctgtctgatcgcgattacatctggaacgacaacggcgaactcacccg

SEQ ID NO: 704669 - DNA, 75 bp, synthetic construct
  source 1..75: mol_type = other DNA
gtggtccctgacgagttacgcatcggcttctggccacagcactttggctccatcccacaatggataacccttgaa

SEQ ID NO: 704670 - DNA, 75 bp, synthetic construct
  source 1..75: mol_type = other DNA
cgaatgtgacgcgatgactgagcactattatcgcttacgagacttcgcgctgaaccatccggaatgcagcgccat

SEQ ID NO: 704671 - DNA, 75 bp, synthetic construct
  source 1..75: mol_type = other DNA
ccaaagtgaaagccgtcagtgcggcgctgggggaatcggtgagcagtgcgcaaatcaaagcggcgctggctgagg

SEQ ID NO: 704672 - DNA, 75 bp, synthetic construct
  source 1..75: mol_type = other DNA
cggcaggctgacggagaaaaccgacctcatcccggaaggggttatccgcacggatgatgagcggactcaccggta

SEQ ID NO: 704673 - DNA, 75 bp, synthetic construct
  source 1..75: mol_type = other DNA
tgaccgggctggtggaccgcttcgggcgcacacagacgttccaccacgaagccgccggtgaattcagcggcgaaa

SEQ ID NO: 704674 - DNA, 75 bp, synthetic construct
  source 1..75: mol_type = other DNA
gagtcagatcacgatgagaagtggacattgttcaacagcatgaacggcaatggcgcagagcttaccagtgaagct

SEQ ID NO: 704675 - DNA, 75 bp, synthetic construct
  source 1..75: mol_type = other DNA
cccgcgctgagcgtcttcacatccacagcgaaatcaaccgcagacttttccgcgcaacacgcgtcgcgcaaatca

SEQ ID NO: 704676 - DNA, 75 bp, synthetic construct
  source 1..75: mol_type = other DNA
tacaccgaatatggccgggacaacggcatccgtctgtctgccgtgtggctgacgcacgacccggaatatccggat

SEQ ID NO: 704677 - DNA, 75 bp, synthetic construct
  source 1..75: mol_type = other DNA
gtgtggtgttcccgccggtgctggtgcagatgctcgaccggctggaaagtgaaatccttactgaccgggtgagtg

SEQ ID NO: 704678 - DNA, 75 bp, synthetic construct
  source 1..75: mol_type = other DNA
cagcgacgggcgggtgacagaacagctaaacccggcaggcttaagctacacgtatcagtatgagaaagaccgcat

SEQ ID NO: 704679 - DNA, 75 bp, synthetic construct
  source 1..75: mol_type = other DNA
ctgacggagaagacggaccttatcccggcgggtgttatccggacggacgacgagcggacccaccactaccactac

SEQ ID NO: 704680 - DNA, 75 bp, synthetic construct
  source 1..75: mol_type = other DNA
acactggctgtgccgttcaccggtgacgggcatgatgccgcgcagatcctgcggacactcccccctctgacgtga

SEQ ID NO: 704681 - DNA, 75 bp, synthetic construct
  source 1..75: mol_type = other DNA
tgtggccggataaccgcatcgcgaaggatgcgcactatgtttaccactacgatgaatacggcagactgacggaga

SEQ ID NO: 704682 - DNA, 75 bp, synthetic construct
  source 1..75: mol_type = other DNA
atggaattcgaaagtatcggtaaagcgggaagccgtctgggtacggcgctggcgatggcggttgaccacgagatc

SEQ ID NO: 704683 - DNA, 75 bp, synthetic construct
  source 1..75: mol_type = other DNA
taaaaatccgtgatgtcaccgattgtccactacattcttcaaccatccggcaatggttgccagctgccggattgg

SEQ ID NO: 704684 - DNA, 75 bp, synthetic construct
  source 1..75: mol_type = other DNA
gaccgtaagttcattttttgcattaggttatagtcctcatttatttttcgcttatgttatcactgcgtttttttg

SEQ ID NO: 704685 - DNA, 75 bp, synthetic construct
  source 1..75: mol_type = other DNA
atatcgatggcgaaggccttgatgacttcaaagagtacaaccgaaaccaactgctgatatctggcattgcaaaac

SEQ ID NO: 704686 - DNA, 75 bp, synthetic construct
  source 1..75: mol_type = other DNA
ctgatactgcagcgcaagaccccggtcagatccctatagttggcatggagcaaattcgtggacttgagaagcact

SEQ ID NO: 704687 - DNA, 75 bp, synthetic construct
  source 1..75: mol_type = other DNA
atccgtgggtcggcaaaacgccttacggctgggtcgttgatccggtgggattgcgcctgacgctgcgtaaagtgt

SEQ ID NO: 704688 - DNA, 75 bp, synthetic construct
  source 1..75: mol_type = other DNA
actggtcgagagccgctacctctacgacccgctgggacggcgaatggcgaaacgggtatggcggcgggagcgtga

SEQ ID NO: 704689 - DNA, 75 bp, synthetic construct
  source 1..75: mol_type = other DNA
tccgcctctgttttcagctatctggcggatgatctgcacgagcttcaacagctcatccagcagcaaaacaaactc

SEQ ID NO: 704690 - DNA, 75 bp, synthetic construct
  source 1..75: mol_type = other DNA
gacggaagcgggcgtcacgtcagtggttggtctgctgggcaccgactctatctctcgccacccggaatccctgct

SEQ ID NO: 704691 - DNA, 75 bp, synthetic construct
  source 1..75: mol_type = other DNA
cccgcgctgagcgccttcacatccgcaccgaaatcaaccgcagactccatcgggctgcatctgtcgccttcatca

SEQ ID NO: 704692 - DNA, 75 bp, synthetic construct
  source 1..75: mol_type = other DNA
ggttgcgcttctgaaatcgggcatcggtaaagtcgctgcggcgctgggtgccactctgctgttggaacactgcaa

SEQ ID NO: 704693 - DNA, 75 bp, synthetic construct
  source 1..75: mol_type = other DNA
tgtgccgctgttttcagctacctggcggatgatctcgcggagctgcaggaccttatcaaccagcaacaccaccac

SEQ ID NO: 704694 - DNA, 75 bp, synthetic construct
  source 1..75: mol_type = other DNA
ctacacgcggatacagcacggcgaaccacaggtggagagccgctacctctatgacccgctgggccgccggacggg

SEQ ID NO: 704695 - DNA, 75 bp, synthetic construct
  source 1..75: mol_type = other DNA
tatgagaaggaccgcatcaccatcaccgacagcctgaaccgccgtgaagtgctgcacacgcagggcgaagccggg

SEQ ID NO: 704696 - DNA, 75 bp, synthetic construct
  source 1..75: mol_type = other DNA
tagtgctaaagatgcaaaaagcacacagaaagcctggaattgtcgtcactccagacagtcaaacgataaaaaaag

SEQ ID NO: 704697 - DNA, 75 bp, synthetic construct
  source 1..75: mol_type = other DNA
tatgatgatatgaagagattaaatttaggtgggactgatcaatttttccattgtatggcattttgtcgagtgtct

SEQ ID NO: 704698 - DNA, 75 bp, synthetic construct
  source 1..75: mol_type = other DNA
cggagctgcacccggacagtacactcacagtgtggccggataaccgcatcgcggaggatgcgcactatgtctacc

SEQ ID NO: 704699 - DNA, 75 bp, synthetic construct
  source 1..75: mol_type = other DNA
cgcgtaaaccggaggtgacatggtacgggtgggacggcgacaggctgacgacggtacagaccggcaccacgcgta

SEQ ID NO: 704700 - DNA, 75 bp, synthetic construct
  source 1..75: mol_type = other DNA
gcatcagcagcccgcgccagacccggagttacagctacagcgactccggcaggctgaccggcgttcacaccaccg

SEQ ID NO: 704701 - DNA, 75 bp, synthetic construct
  source 1..75: mol_type = other DNA
gcggacacaatatgcagagccgctggtcgaaagtcgctatctttacgacccgctgggccgcagggtggcaaaacg

SEQ ID NO: 704702 - DNA, 75 bp, synthetic construct
  source 1..75: mol_type = other DNA
tgagtacagcccggatgtggtgacgggactcatcacgcgcatcaccacaccggatggcagggcatcggcatttta

SEQ ID NO: 704703 - DNA, 75 bp, synthetic construct
  source 1..75: mol_type = other DNA
ggcaggcgctgccggaagacctgcgcgtaagtccgcatcgttatctggcgacgaacagtccgcaggggccgtggt

SEQ ID NO: 704704 - DNA, 75 bp, synthetic construct
  source 1..75: mol_type = other DNA
tacgacagcgacgggcgggtgacagaacagctaaacccggcaggcttaagctacacgtatcagtatgagaaagac

SEQ ID NO: 704705 - DNA, 75 bp, synthetic construct
  source 1..75: mol_type = other DNA
aggtgacggcggtgcaccgcgaggaaggcctgagccagtaccacgcatacgacagccgtggacagttaattgccg

SEQ ID NO: 704706 - DNA, 75 bp, synthetic construct
  source 1..75: mol_type = other DNA
gcaaacttatccgcagcgaggatgaggggctggtcacccactggcactatgacgaagcagaccgcctcacgcacc

SEQ ID NO: 704707 - DNA, 75 bp, synthetic construct
  source 1..75: mol_type = other DNA
acacaccgctggtggagtacacccgcgaccgcctgcaccgggaaacgctgcgcagcttcggtcgttatgaactca

SEQ ID NO: 704708 - DNA, 75 bp, synthetic construct
  source 1..75: mol_type = other DNA
taaggataatagtggcagatatttctcaacagcacctaaccgaggagaaagaaaaggatcatatccattcaatag

SEQ ID NO: 704709 - DNA, 75 bp, synthetic construct
  source 1..75: mol_type = other DNA
tctttgtggatgccggaaacaaaaagctggtcttctggtttgtacgtgttgatgacgaagggtatccggaaatag

SEQ ID NO: 704710 - DNA, 75 bp, synthetic construct
  source 1..75: mol_type = other DNA
tggaaaatgcctgcggatatccgcttacagctgcgcgataacacactgatactcagtgataacggcggcagaagc

SEQ ID NO: 704711 - DNA, 75 bp, synthetic construct
  source 1..75: mol_type = other DNA
caaaaccagatggacccggtatacacgccggcgcgaaaaattcacctgtaccactgcgaccatcgcggcctgccg

SEQ ID NO: 704712 - DNA, 75 bp, synthetic construct
  source 1..75: mol_type = other DNA
ggcaggcgctgccggaagagctacgcataagtccgcatcgttatctggcgacgaacagtccgcaggggccgtggt

SEQ ID NO: 704713 - DNA, 75 bp, synthetic construct
  source 1..75: mol_type = other DNA
aaccatcggtcagaaagggggaaatatggttgaccgtgactggttggactcagataaacctggcatctggactga

SEQ ID NO: 704714 - DNA, 75 bp, synthetic construct
  source 1..75: mol_type = other DNA
agtaataaaccagaattactattctgttgcagttaatgccggttactatattaccccagaggcaaaagtgtacat

SEQ ID NO: 704715 - DNA, 75 bp, synthetic construct
  source 1..75: mol_type = other DNA
gttaactgggagctgaatccatggttatctgttggtgcagctggctggaccactctcaatagtcggggggggaat

SEQ ID NO: 704716 - DNA, 75 bp, synthetic construct
  source 1..75: mol_type = other DNA
caccattctctcgacgttgccaacggcaggtgttggcgcactgctggcgctaatgattgccggaagtgagctgga

SEQ ID NO: 704717 - DNA, 75 bp, synthetic construct
  source 1..75: mol_type = other DNA
acggctgggtgaaaaacccgaaaggcgtggtagatgatcttgaatcgttagataaagaaggtcgggttagagtcg

SEQ ID NO: 704718 - DNA, 75 bp, synthetic construct
  source 1..75: mol_type = other DNA
aacgatataatgacagagcgccgcttgaaattatagatgaatatgatgtacaggatctggtttatgcgcttctca

SEQ ID NO: 704719 - DNA, 75 bp, synthetic construct
  source 1..75: mol_type = other DNA
gtagctatggattatccggtttgccgctgtttatccatgtgatcctgcccggcgccctgccctcaattatggtcg

SEQ ID NO: 704720 - DNA, 75 bp, synthetic construct
  source 1..75: mol_type = other DNA
tgctcggcaaacttgctgacattagcgcccaattgctagagcgtctctggttgcgctggaacccggcttatcatc

SEQ ID NO: 704721 - DNA, 75 bp, synthetic construct
  source 1..75: mol_type = other DNA
gactgattagcggactgtcgcgctggggagaaaggctgctggatacctcaattcagatgttgcgcaacgtgccgc

SEQ ID NO: 704722 - DNA, 75 bp, synthetic construct
  source 1..75: mol_type = other DNA
ttcaaaggcattattcttctgcaggaatattcgtactttcttctcgctttgagggtttgggtatggtgcttttag

SEQ ID NO: 704723 - DNA, 75 bp, synthetic construct
  source 1..75: mol_type = other DNA
gaaaaacatggagaaaaaggtttaattcccaaacctaaaggtgttagtgctgatcctgagttgcgtattaaggtc

SEQ ID NO: 704724 - DNA, 75 bp, synthetic construct
  source 1..75: mol_type = other DNA
gattttgtggtttggcattgatgaatccgcaaaaatctttctggtggcgctcggtacgctattccccatttatat

SEQ ID NO: 704725 - DNA, 75 bp, synthetic construct
  source 1..75: mol_type = other DNA
atggaatttttatcagtatccgttgaatccggttcagtatatagattcaatgggactggcatcaaaatatggaca

SEQ ID NO: 704726 - DNA, 75 bp, synthetic construct
  source 1..75: mol_type = other DNA
gcccgctgtacggagcgggagtttgcaaccattcttgccggtatcagtgccggtggtatgtactgcccggaatgc

SEQ ID NO: 704727 - DNA, 75 bp, synthetic construct
  source 1..75: mol_type = other DNA
ggtatcagcgccggcggtatgtactgcccggagtgtggcacggttcactggccggacggagtcgccccgcccttc

SEQ ID NO: 704728 - DNA, 75 bp, synthetic construct
  source 1..75: mol_type = other DNA
gatcatccgctggcgaacgttgaagagccgctaacagaagcgcagttgcgtcgctttccggcggtcaatattgaa

SEQ ID NO: 704729 - DNA, 75 bp, synthetic construct
  source 1..75: mol_type = other DNA
atcagcgccggcggcatgtactgcccggagtgtggcacggttcactggccggacggagtccccccgccctttctg

SEQ ID NO: 704730 - DNA, 75 bp, synthetic construct
  source 1..75: mol_type = other DNA
cttcatccggatgatttttttgacgaagaagacgctgaagttctgcgctttgataattttgacgatgccgttgag

SEQ ID NO: 704731 - DNA, 75 bp, synthetic construct
  source 1..75: mol_type = other DNA
tctttgtggatgcgggaaacaaaaaactggtcttctggtttgtacgtgttgatgacgaagggtatccggaaatcg

SEQ ID NO: 704732 - DNA, 75 bp, synthetic construct
  source 1..75: mol_type = other DNA
gcctgattgaatacagccatcacgcctgtcgcaccgaatgcgatgccatgacggagcactattaccgcctgcggg

SEQ ID NO: 704733 - DNA, 75 bp, synthetic construct
  source 1..75: mol_type = other DNA
gctcagcaatggcggcgcgtttatggcccctgatgctgacgttgacgataaatggcatctgttcaacggcatgaa

SEQ ID NO: 704734 - DNA, 75 bp, synthetic construct
  source 1..75: mol_type = other DNA
gtggtgataaatggcatctgttcaacagcatgaacggcaatggtgcgggaatgagcgcggaagccgcaggtatcg

SEQ ID NO: 704735 - DNA, 75 bp, synthetic construct
  source 1..75: mol_type = other DNA
gttatcgcattaaacttctggaagagaataccggagtagcgctgtttttccgcacgactcgcagcgtgacgttga

SEQ ID NO: 704736 - DNA, 75 bp, synthetic construct
  source 1..75: mol_type = other DNA
ctgcagggattgcggtctgtctgatggctttcagccaccatgcctgccgtaccgaatgcgacgccatgacggagc

SEQ ID NO: 704737 - DNA, 75 bp, synthetic construct
  source 1..75: mol_type = other DNA
tcggcggtctgattgtcagccaggtgctgacgctgttcaccacgccggtgatttatctgctgttcgaccgcctgg

SEQ ID NO: 704738 - DNA, 75 bp, synthetic construct
  source 1..75: mol_type = other DNA
cgttcagctaaaccccgtaaacgaaaacctgcccctcaaagaagcaaacttccccgctatgtcgtgaagcttcac

SEQ ID NO: 704739 - DNA, 75 bp, synthetic construct
  source 1..75: mol_type = other DNA
taaatttgatgggaattataaagatgggatgacagtttggttattttcttgtaatacaggtaaaggacaaaattc

SEQ ID NO: 704740 - DNA, 75 bp, synthetic construct
  source 1..75: mol_type = other DNA
gaagcagaccgcatcacacagcgaacggtgaatggtgaaccggcagagcagtggcagtatgacgaacgcggctgg

SEQ ID NO: 704741 - DNA, 75 bp, synthetic construct
  source 1..75: mol_type = other DNA
gtgaagcttcacgacgatgacttctttgacgaagaagacgcagaagctctgcgctttgataattttgacgatgcc

SEQ ID NO: 704742 - DNA, 75 bp, synthetic construct
  source 1..75: mol_type = other DNA
cagcatcacaaagaatatttgactctctaatattgaataatccgggactagcattagggaaggtgcgaacaagtc

SEQ ID NO: 704743 - DNA, 75 bp, synthetic construct
  source 1..75: mol_type = other DNA
tggcagggcatcggcgttttactataaccaccacagccagttaacgtcagccaccgggcctgacgggctggaaat

SEQ ID NO: 704744 - DNA, 75 bp, synthetic construct
  source 1..75: mol_type = other DNA
gctggtgtgagcgggtgccggaagcggatgaggtgctgcctgcgccgctgccgccgtaccgggtactgaccgggc

SEQ ID NO: 704745 - DNA, 75 bp, synthetic construct
  source 1..75: mol_type = other DNA
aaatggcttcctggctggttgagtggaaaaatgccactgaaacgcaatggcttaaagatgcccagtcacagccat

SEQ ID NO: 704746 - DNA, 75 bp, synthetic construct
  source 1..75: mol_type = other DNA
aaccgttcgatactggatcagggctggtatgaaatgcgccgccagcttgagtacaagcagcttctggagtggcgg

SEQ ID NO: 704747 - DNA, 75 bp, synthetic construct
  source 1..75: mol_type = other DNA
gttgagtggaaaaatgccactgaaacgcaatggcttaaagattctccctcacagccattgcaacagtcactgaaa

SEQ ID NO: 704748 - DNA, 75 bp, synthetic construct
  source 1..75: mol_type = other DNA
tacatgccgccggcgctgataccggcaagaatggtcgcaaactcccgctccgtgcagcgggctatttcaggatac

SEQ ID NO: 704749 - DNA, 75 bp, synthetic construct
  source 1..75: mol_type = other DNA
agcgaaaaagcgcaggtttacgcgctgaacaccagcgatggtactgttgcatggcaaaccaaagtagcgggtgaa

SEQ ID NO: 704750 - DNA, 75 bp, synthetic construct
  source 1..75: mol_type = other DNA
tttcagaaaaaccagaagacgctggcgagacttcagcgacagttaagccgcaaggtcaaattcagcaacaactgg

SEQ ID NO: 704751 - DNA, 75 bp, synthetic construct
  source 1..75: mol_type = other DNA
acccctgaaggctacgccgtcgagtccgaatctcacccaggctcagtccagatttatcccatgactgcgcttgaa

SEQ ID NO: 704752 - DNA, 75 bp, synthetic construct
  source 1..75: mol_type = other DNA
gtacttcagctgctggccggttcgcattcccatcaaacgccacgtttgccttgggggatcgcgtacgcaagaagt

SEQ ID NO: 704753 - DNA, 75 bp, synthetic construct
  source 1..75: mol_type = other DNA
tatatctggctgctttcgttttgctatgtgctggtctatgtggtccgggcggcgatcaacgactggggcaatttg

SEQ ID NO: 704754 - DNA, 75 bp, synthetic construct
  source 1..75: mol_type = other DNA
tctcgataaaaggcactgatggtaaagtaggaaaaatagaaatttatacagatacaggcgagcttatttttgaac

SEQ ID NO: 704755 - DNA, 75 bp, synthetic construct
  source 1..75: mol_type = other DNA
gatggttactatgtagatggcgttgttaaagtcaaccgtttcaggaacgaactgcgcacctggatgagtgacggt

SEQ ID NO: 704756 - DNA, 75 bp, synthetic construct
  source 1..75: mol_type = other DNA
tctgagtggtaccaacattaacggcagcttcagtattgccggtggcagtgccgtcaatatgctgctggagaacgg

SEQ ID NO: 704757 - DNA, 75 bp, synthetic construct
  source 1..75: mol_type = other DNA
acattctgtttggcttctcgacgtcgctatgggcgtttgccgtgctctgggtgctgaacgcctttttccagggct

SEQ ID NO: 704758 - DNA, 75 bp, synthetic construct
  source 1..75: mol_type = other DNA
ggcgtcgcttgctggttggccgctggcgaaagtactcgatacctggcactggagcggattttttgtggttatcgc

SEQ ID NO: 704759 - DNA, 75 bp, synthetic construct
  source 1..75: mol_type = other DNA
gccgctatgccggaaatccttgctaccggcgtgctaagtcgtagcgatattggcctgttagcaaccctgttttat

SEQ ID NO: 704760 - DNA, 75 bp, synthetic construct
  source 1..75: mol_type = other DNA
gacgatgtttgaactgggcggatttatcggtgcgctggtagccggttgggctcggacaaattgtttaacggcaac

SEQ ID NO: 704761 - DNA, 75 bp, synthetic construct
  source 1..75: mol_type = other DNA
ggagcggtttttttgtggtcatctccattgccgccgggatctcggccttgctattactgccctttttgaatgctc

SEQ ID NO: 704762 - DNA, 75 bp, synthetic construct
  source 1..75: mol_type = other DNA
cgcaggcgttaggtttaccagcggtcggtgaatggcgacacgacgcgctggagattgctcaacaacaagaagggg

SEQ ID NO: 704763 - DNA, 75 bp, synthetic construct
  source 1..75: mol_type = other DNA
aataagttttgaaagaggctttaatgcaaaaatacacaaaaaatatagtttaaacagaatgaaaactataacgag

SEQ ID NO: 704764 - DNA, 75 bp, synthetic construct
  source 1..75: mol_type = other DNA
tgaaggtcagcaacatgtcaaagtcagcagcgggtacggtcagccagccggggcgcaatgtccgggcaaaatcag

SEQ ID NO: 704765 - DNA, 75 bp, synthetic construct
  source 1..75: mol_type = other DNA
cttaaagatgccccgtcacagccattgcaacagtcactgaaagaccttgagcgggcttacaaaaacttcttccgg

SEQ ID NO: 704766 - DNA, 75 bp, synthetic construct
  source 1..75: mol_type = other DNA
tcgcgtctggtacacatctggagcgtcccggtggagtatctgacacgtaagtatcagcttgtgcgcgcccgtcac

SEQ ID NO: 704767 - DNA, 75 bp, synthetic construct
  source 1..75: mol_type = other DNA
taaactcgccacgctgtcagatggcacagtctttgggcctgtaaacagttttcagaaaaaccagaagacgctggc

SEQ ID NO: 704768 - DNA, 75 bp, synthetic construct
  source 1..75: mol_type = other DNA
cgcaaggtcaaattcagcaataactggcagaagcaggaacgcaaaatacagcgactgcattcccgtatcgcaaat

SEQ ID NO: 704769 - DNA, 75 bp, synthetic construct
  source 1..75: mol_type = other DNA
cattttagcggcggggcacgccgttcttgcctgtggagagatggtgcagtcaggccgctcgttgaagcaggaacc

SEQ ID NO: 704770 - DNA, 75 bp, synthetic construct
  source 1..75: mol_type = other DNA
aaaaacttcttccagaagcgggctgcttttccccgattcaaaaagcggggacagaatgatgcattccgctacccg

SEQ ID NO: 704771 - DNA, 75 bp, synthetic construct
  source 1..75: mol_type = other DNA
cgatgtaaacggcgctcgtaacattttagcggcggggcacgccgttcttgcctgtggaggatgtcaacaaacagg

SEQ ID NO: 704772 - DNA, 75 bp, synthetic construct
  source 1..75: mol_type = other DNA
gcacgccgttcttgcctgtggagagatggtgcagtcaggccgcccgttgaagcaggaacccaccgaaatgattca

SEQ ID NO: 704773 - DNA, 75 bp, synthetic construct
  source 1..75: mol_type = other DNA
gaccattccgttctccgctcagcatgtggacggtagcgagatgatgaaactggttggctgggcgcagtcggtagt

SEQ ID NO: 704774 - DNA, 75 bp, synthetic construct
  source 1..75: mol_type = other DNA
cggggcacgccgttcttgcctgtggagagatggtgcagtcaggccgcccgttgaagcaggaacccaccgaaatga

SEQ ID NO: 704775 - DNA, 75 bp, synthetic construct
  source 1..75: mol_type = other DNA
gtaaatggcgctcgtaacattttagcggcggggcacgccgttcttgcctgtggaggatgtcaacaaacaggttga

SEQ ID NO: 704776 - DNA, 75 bp, synthetic construct
  source 1..75: mol_type = other DNA
tggcgctatcagagcgaacacatcggccatcctgagtggaacgaacgtaaatggtagcttcagcattactaatgg

SEQ ID NO: 704777 - DNA, 75 bp, synthetic construct
  source 1..75: mol_type = other DNA
cggtaactttgtgctggatatcaaaaacaccggtctggagccagtatctgctggagcaccgcttcaggtggtgca

SEQ ID NO: 704778 - DNA, 75 bp, synthetic construct
  source 1..75: mol_type = other DNA
ggcgggaacacccgcttcagcggcctgttgtctcaggacggtgggattttccttcagagtggcggggccatgacg

SEQ ID NO: 704779 - DNA, 75 bp, synthetic construct
  source 1..75: mol_type = other DNA
ggacatcagaaataccggtcttgaacctgtttccgcaggcacaccacttcaggtcgttcataccggcagtggcga

SEQ ID NO: 704780 - DNA, 75 bp, synthetic construct
  source 1..75: mol_type = other DNA
aaaacaccagctccggggccataaacgacgtttacgatttactgcaacataccagtttgtcgattgttggcgaaa

SEQ ID NO: 704781 - DNA, 75 bp, synthetic construct
  source 1..75: mol_type = other DNA
ggggaaatcacccgttcgatgaaggtattgggctgttacccaagtgagaacgtagtgcctgttgatccaacctga

SEQ ID NO: 704782 - DNA, 75 bp, synthetic construct
  source 1..75: mol_type = other DNA
tccaccatcaacacggtctacagccatccgcagccattccagcaatgcagtaaattccttaatcgctatccgcac

SEQ ID NO: 704783 - DNA, 75 bp, synthetic construct
  source 1..75: mol_type = other DNA
gatacctgacggtgtttgacggtcatcaggccagcgatacgatggttggcagtgacggtacgctggatgttcgca

SEQ ID NO: 704784 - DNA, 75 bp, synthetic construct
  source 1..75: mol_type = other DNA
caagtgccacaaatacaaccattgttgacttcgggaagcagcatgtcagcggcggaagtgccacggacaccacta

SEQ ID NO: 704785 - DNA, 75 bp, synthetic construct
  source 1..75: mol_type = other DNA
aacctgtatttcctcaacaacagtgctgcgaccttcgcaggtactttgacgggtaccggcaccctgacacaggaa

SEQ ID NO: 704786 - DNA, 75 bp, synthetic construct
  source 1..75: mol_type = other DNA
agcggcagaatgaatgtcgaaggtagtgcaacgaacaccaccattaacagtggtggtggcctgtccgtctacggg

SEQ ID NO: 704787 - DNA, 75 bp, synthetic construct
  source 1..75: mol_type = other DNA
acccttcaggcgaacactaatgtgacgacacagtcaggcaccatcctgacgctggataacggaagcatcctgacg

SEQ ID NO: 704788 - DNA, 75 bp, synthetic construct
  source 1..75: mol_type = other DNA
aggtaaccctgacgcaggtaagccagatgcaggtaacccaggtacaggtaagccagatgaaggtacatcgtcgtc

SEQ ID NO: 704789 - DNA, 75 bp, synthetic construct
  source 1..75: mol_type = other DNA
cggaaatgcaaaaagcattgaaagagttaggggaaatcacccgttcgatgaaggtattgggctgttacccaagtg

SEQ ID NO: 704790 - DNA, 75 bp, synthetic construct
  source 1..75: mol_type = other DNA
tggaagccgtacgtgcgctacgaaccagtctgcatttcgctatgatggagacggagaataacattctgatgatca

SEQ ID NO: 704791 - DNA, 75 bp, synthetic construct
  source 1..75: mol_type = other DNA
gggattacagccagaacggcttcggtggtagcctcgaagcgggcaggaccatcagcctgaatgagaatacatggg

SEQ ID NO: 704792 - DNA, 75 bp, synthetic construct
  source 1..75: mol_type = other DNA
atcctgacggggagcgttacaggagacaacactggtgcaggtgatatgacggttaagggagcctctgtctggcat

SEQ ID NO: 704793 - DNA, 75 bp, synthetic construct
  source 1..75: mol_type = other DNA
tccggccggtgtcactggtgtctgaaagtctttcaggtaacgggacattccgtatgaacacggatatcgcatctc

SEQ ID NO: 704794 - DNA, 75 bp, synthetic construct
  source 1..75: mol_type = other DNA
aatcaaccgtttcagtaacgatgttcgcacttggatgaatgacggcacggctgtaaaaggagattatcatcagaa

SEQ ID NO: 704795 - DNA, 75 bp, synthetic construct
  source 1..75: mol_type = other DNA
gcgagattaaccaaagagaagccaggtgaactggctatcagttggatgcatatcccgcaactgaatggtcaggac

SEQ ID NO: 704796 - DNA, 75 bp, synthetic construct
  source 1..75: mol_type = other DNA
ttacaatggataatggcactgttcattttcattctccgcagtcagaaaactggcagcctgcaattctgacggctg

SEQ ID NO: 704797 - DNA, 75 bp, synthetic construct
  source 1..75: mol_type = other DNA
aagcctgagtctggagcagaacagcacattggcaggacgtattgtgggagatggcgctggtgcaggaaatgtgac

SEQ ID NO: 704798 - DNA, 75 bp, synthetic construct
  source 1..75: mol_type = other DNA
cgacgtttacgatctgctgcaacatacctgcttgtcgattgtgggcgaaatgacccttaccatcgaccactgcct

SEQ ID NO: 704799 - DNA, 75 bp, synthetic construct
  source 1..75: mol_type = other DNA
ggttaaaggtgcgtctgtctggcatctcgacggcgactccactgtcggggcattaacgctggataacgggactgt

SEQ ID NO: 704800 - DNA, 75 bp, synthetic construct
  source 1..75: mol_type = other DNA
tctggagaatggcggctcattaactgtactcaatgggcatcaggccacaggtaccactataaacagtggtggaga

SEQ ID NO: 704801 - DNA, 75 bp, synthetic construct
  source 1..75: mol_type = other DNA
tatcaatgacacctatgacttcaggaacgatatctccgggacgaccgggaaatacgggctgggtgtcaatgctca

SEQ ID NO: 704802 - DNA, 75 bp, synthetic construct
  source 1..75: mol_type = other DNA
cagtccgccaatgcggttaaggcgatgaaacaagaaggtgcattctcgttaagccgggttaagcgtatcgccttt

SEQ ID NO: 704803 - DNA, 75 bp, synthetic construct
  source 1..75: mol_type = other DNA
gagaaagtgcgcgcgcgtcgtgggcggccgccaaaagatgaagtgcgcctggtgccgctgacggatgtcagtttt

SEQ ID NO: 704804 - DNA, 75 bp, synthetic construct
  source 1..75: mol_type = other DNA
ggcactgacgccgaaaggctcgttcctggcgacaattgccggtgttacggtaggtaccctggtgtcctttgctat

SEQ ID NO: 704805 - DNA, 75 bp, synthetic construct
  source 1..75: mol_type = other DNA
gaaggacgcgtgaaacgtgtgacggataaaccgctgatattgattaataactatattggtgatccaaagctcgac

SEQ ID NO: 704806 - DNA, 75 bp, synthetic construct
  source 1..75: mol_type = other DNA
ggcactggaaaaacgcatccccgctggttttgagatggttatcaataacttctcattaggtatcgccgggatggc

SEQ ID NO: 704807 - DNA, 75 bp, synthetic construct
  source 1..75: mol_type = other DNA
gaacataaacgcaggttgcaggtcatgagtacccgcgacggtatgacgggcgtgtataaccgacgtcattgggaa

SEQ ID NO: 704808 - DNA, 75 bp, synthetic construct
  source 1..75: mol_type = other DNA
aactgacgggcatcaccgtgtcgttcaatagtgcgccgctggaatggtggctctcccttcccattatcgtcattt

SEQ ID NO: 704809 - DNA, 75 bp, synthetic construct
  source 1..75: mol_type = other DNA
tgagtacccgcgatggcatgacgggcgtttacaacaggcgtcactgggaactaatgttgcgcaatgagtttgata

SEQ ID NO: 704810 - DNA, 75 bp, synthetic construct
  source 1..75: mol_type = other DNA
gcgtggtgagttcaatggtgcataacgtcaccgtgggtaaagccgatctctctactacgctgcaagcgagccaga

SEQ ID NO: 704811 - DNA, 75 bp, synthetic construct
  source 1..75: mol_type = other DNA
ctccacctatatccttccggctgtgattaaagaaggcgacccgaaaaacgtcggtttcgtggtgccaaccgagaa

SEQ ID NO: 704812 - DNA, 75 bp, synthetic construct
  source 1..75: mol_type = other DNA
tggccggacttgaagtcgcaaatattgttattgctaacgataaatatcgtgaacagtttaaattagctcttattg

SEQ ID NO: 704813 - DNA, 75 bp, synthetic construct
  source 1..75: mol_type = other DNA
atactttcgtcaaagagtgtattgaggcgctggtacatgcgggttatctgcctctgctgtcagttatcaatgaac

SEQ ID NO: 704814 - DNA, 75 bp, synthetic construct
  source 1..75: mol_type = other DNA
gaattaagttgtgctcttggatcatcccgtaccaacgcgacgcgtattgccgatgaactggaaaaacgcggttgg

SEQ ID NO: 704815 - DNA, 75 bp, synthetic construct
  source 1..75: mol_type = other DNA
ggtatgaaatgcgccgccagcttgagtacaagcagctctggcgcttgctgttccgccagcgtacacaagccagcg

SEQ ID NO: 704816 - DNA, 75 bp, synthetic construct
  source 1..75: mol_type = other DNA
tggtcatacagcgaaagaaaccgcctgtcacaaagtaaattcagatgccaggtatgtggatatacagcgaacgcc

SEQ ID NO: 704817 - DNA, 75 bp, synthetic construct
  source 1..75: mol_type = other DNA
gcgccatggcacatagacgttaacgatgactacatggagttcaggcgctcacctttttggatggtatcgggagaa

SEQ ID NO: 704818 - DNA, 75 bp, synthetic construct
  source 1..75: mol_type = other DNA
acaccgaaatgcaaaaattttttgccagagaaattaaggaagtaggcggtaggcccatcacttctaagaatttag

SEQ ID NO: 704819 - DNA, 75 bp, synthetic construct
  source 1..75: mol_type = other DNA
tggaggtttataccagagtgtttgcactggatatggctgccacgctggcagtgcctttcacaggtgacggcatac

SEQ ID NO: 704820 - DNA, 75 bp, synthetic construct
  source 1..75: mol_type = other DNA
gacgtaataagcgtaccggcagaaccgaaaaggcgcgtatctgggaggtcactgaccggacggtacggacctggc

SEQ ID NO: 704821 - DNA, 75 bp, synthetic construct
  source 1..75: mol_type = other DNA
ggctgccagaacagcaggacgtctgcccgccggcagtcaggcccatcgtctggttccgctatcagacagccagta

SEQ ID NO: 704822 - DNA, 75 bp, synthetic construct
  source 1..75: mol_type = other DNA
ggtggcgtcgaatccggggccagggttggggttgctgctggcgtttagtctgtttggtaaaggaatgagtaaacg

SEQ ID NO: 704823 - DNA, 75 bp, synthetic construct
  source 1..75: mol_type = other DNA
caggtgcttgctgttccgccagcgtagacaagccagcgttgcgcgttctgtggtcatacagcgaaagaaaatcgc

SEQ ID NO: 704824 - DNA, 75 bp, synthetic construct
  source 1..75: mol_type = other DNA
caggtgcttgctgttccgccagcgtacacaagccagcgttgcgcgtcctgtggtcatacagcgaaagataatcgc

SEQ ID NO: 704825 - DNA, 75 bp, synthetic construct
  source 1..75: mol_type = other DNA
caggtgcttgctgttccgccagcgtatacaagccagcgttgcgcgtgctgtggtcatacagcgaaagaaaatcgc

SEQ ID NO: 704826 - DNA, 75 bp, synthetic construct
  source 1..75: mol_type = other DNA
aaaactttttcaaaaaagcggcggcgcatggggaggaacctcctttaactcctcaaaacgaacatcagcggtccg

SEQ ID NO: 704827 - DNA, 75 bp, synthetic construct
  source 1..75: mol_type = other DNA
cctgactttccgtaatatgaacgatttcactccggagcaggttgcccgacaaattccccgtcttaaagccatgct

SEQ ID NO: 704828 - DNA, 75 bp, synthetic construct
  source 1..75: mol_type = other DNA
acgcaatggcttaaagattcgccctcacagccattgcaacagtcactgaaagaccttgagcgggcttacaaaaac

SEQ ID NO: 704829 - DNA, 75 bp, synthetic construct
  source 1..75: mol_type = other DNA
tcagatgccaggtatgtggatatacagcgaacgccgatgtaaatggcgctcgtaacattttagcggcggggcacg

SEQ ID NO: 704830 - DNA, 75 bp, synthetic construct
  source 1..75: mol_type = other DNA
ctgtactatagaagcggccaatggatttgcagaagaatacattgcggattacaaccgacgctttgccaaagcgcc

SEQ ID NO: 704831 - DNA, 75 bp, synthetic construct
  source 1..75: mol_type = other DNA
ggccatgcgcagccttctgcgtgacctgaaagccaatctgctggataacgtgactttccgtaaagagctggaaaa

SEQ ID NO: 704832 - DNA, 75 bp, synthetic construct
  source 1..75: mol_type = other DNA
tctgacattccagagcatgaaggatttcacccctgagcaggtttcccggcaaattcctcagctgaaggcaatgct

SEQ ID NO: 704833 - DNA, 75 bp, synthetic construct
  source 1..75: mol_type = other DNA
gggcaggaaaaatccctgctggcccatgagaaagagacgctggagtacaaacgccagctggctgagctgggcgac

SEQ ID NO: 704834 - DNA, 75 bp, synthetic construct
  source 1..75: mol_type = other DNA
cgatatcaacggagcacgtaacattttagcggcaggacatgccgtgcttgcctgtggagggatggtacagtcagg

SEQ ID NO: 704835 - DNA, 75 bp, synthetic construct
  source 1..75: mol_type = other DNA
gcttcgtttttaaccgtgcgctggcgcttcaaaacgaaaaccatgaagcggggaacaaatatgtttcctacacca

SEQ ID NO: 704836 - DNA, 75 bp, synthetic construct
  source 1..75: mol_type = other DNA
atgcgctaccggaatagccgtcaggtcacgggtgttgtgaaaaatgtcacggtcagccagtcctgcggtaagtgg

SEQ ID NO: 704837 - DNA, 75 bp, synthetic construct
  source 1..75: mol_type = other DNA
aaggtcaaattcagcaataactggcagaagcagaaacgcaaaatacagcgactgcattcctgtatcgcaaatatc

SEQ ID NO: 704838 - DNA, 75 bp, synthetic construct
  source 1..75: mol_type = other DNA
ggcgtggctaaacttgcctcgctgtcagatggcacagtctttgagcctgtaaacagttttcagaaaaaccagaag

SEQ ID NO: 704839 - DNA, 75 bp, synthetic construct
  source 1..75: mol_type = other DNA
ctggtcatgcagaaaaagtcctgcagttgctgggcctgccgtaccgtaaaatcatcctttgcactggcgacatgg

SEQ ID NO: 704840 - DNA, 75 bp, synthetic construct
  source 1..75: mol_type = other DNA
gcagtcagtcgcatcactgccaaactgctgaccgagatccgccgccagaccggggtagtttttccggcagatagc

SEQ ID NO: 704841 - DNA, 75 bp, synthetic construct
  source 1..75: mol_type = other DNA
gcggtcagtcgcatcacagccaaactgctgaccgagatccgccgccagactggggtgatttttccggcagatagc

SEQ ID NO: 704842 - DNA, 75 bp, synthetic construct
  source 1..75: mol_type = other DNA
tctggtggatcatccagggctggcggtcagtcgcatcaccgccaaactgctgactgagatccgccgccagactgg

SEQ ID NO: 704843 - DNA, 75 bp, synthetic construct
  source 1..75: mol_type = other DNA
cgactggcaaatagctggtggcccggtgcggtgattagcgaagagctggcaacggcggcggcattgcgtcaacag

SEQ ID NO: 704844 - DNA, 75 bp, synthetic construct
  source 1..75: mol_type = other DNA
gtgcggtgatgagcgaagagctggcaacggcagcggccttgcgtcagcagcaggcgctactggcacggctggcag

SEQ ID NO: 704845 - DNA, 75 bp, synthetic construct
  source 1..75: mol_type = other DNA
cacttcctggctttttaacatgtgttactggcatctgccagggctgaacgggcagtttaaggtgctgccggaatc

SEQ ID NO: 704846 - DNA, 75 bp, synthetic construct
  source 1..75: mol_type = other DNA
ccatatcaacattgcggaagtcgatcacttcaaacagttcctgcgtcagattaagcgtgccggcctcgatatccg

SEQ ID NO: 704847 - DNA, 75 bp, synthetic construct
  source 1..75: mol_type = other DNA
atcatcctttgcaccggcgacatgggctttggtgcttgcaaaacttacgacctggaagtatggatcccggcacag

SEQ ID NO: 704848 - DNA, 75 bp, synthetic construct
  source 1..75: mol_type = other DNA
tggttcataccctgaacggttctggtctggctgttggtcgtacgctggttgcagtaatggaaaactatcagcagg

SEQ ID NO: 704849 - DNA, 75 bp, synthetic construct
  source 1..75: mol_type = other DNA
gcggtcagtcgtatcaccgccaggctgctgaccgagatccgccgccagaccggggtgatttttccggcagatagc

SEQ ID NO: 704850 - DNA, 75 bp, synthetic construct
  source 1..75: mol_type = other DNA
aggtactgccgaaagttggcaaattgcgtaaagtctttttcaactattgccaatattcctcgcgatatcaacgtt

SEQ ID NO: 704851 - DNA, 75 bp, synthetic construct
  source 1..75: mol_type = other DNA
cacccggaaaagatggccttcagctatagctacgcgctcagccggggtgtggatacgcagttccgccatatcaac

SEQ ID NO: 704852 - DNA, 75 bp, synthetic construct
  source 1..75: mol_type = other DNA
acgattattttggctgtcacatagcaccgcagtttctccaatcatgcctgagagaccaaaagcaattacccctgt

SEQ ID NO: 704853 - DNA, 75 bp, synthetic construct
  source 1..75: mol_type = other DNA
ggcgatgctcacgcatacagaaaacggctttggttcgattgctaatattttgctgattatcggggccggaggcgc

SEQ ID NO: 704854 - DNA, 75 bp, synthetic construct
  source 1..75: mol_type = other DNA
ccgctgtatcccgacatcagcccggaaattattgcgattgctatcggttcaggtgcaattggctgcactatcgtt

SEQ ID NO: 704855 - DNA, 75 bp, synthetic construct
  source 1..75: mol_type = other DNA
gatgtttgggtgagtatcaaaaattggatagagaaaagttggtaagcggtgcacctgctttggcgggcgaaggaa

SEQ ID NO: 704856 - DNA, 75 bp, synthetic construct
  source 1..75: mol_type = other DNA
tccgtcacacgttttcaaccaggctcaaacaagcaggaattgaaccgccccgggaatcctggagactaaacttcc

SEQ ID NO: 704857 - DNA, 75 bp, synthetic construct
  source 1..75: mol_type = other DNA
gtaaaaggatatggcgataaagcttcggactggtttaatcgatcgttgctcaaagaacggttaggctttgaaaaa

SEQ ID NO: 704858 - DNA, 75 bp, synthetic construct
  source 1..75: mol_type = other DNA
tatctgaagaaccagaatatttttgcaagacgttatttttatcctgttataccagattttcaagcgtatttgaat

SEQ ID NO: 704859 - DNA, 75 bp, synthetic construct
  source 1..75: mol_type = other DNA
aacgggatgaagggacgtatacgcgcattggtcgtcactattcgccaatccggaagcgcgcagtctggcgctggc

SEQ ID NO: 704860 - DNA, 75 bp, synthetic construct
  source 1..75: mol_type = other DNA
gactcgccgcagggctatcgcctgcgccgccatgccctgtggcaatccatcaccagtacgccccaggcggaaagc

SEQ ID NO: 704861 - DNA, 75 bp, synthetic construct
  source 1..75: mol_type = other DNA
agtattatgcttaccgatctttaatgaactaacggacaatgatttcagcaggattataaaaacaataagaggtta

SEQ ID NO: 704862 - DNA, 75 bp, synthetic construct
  source 1..75: mol_type = other DNA
taaagtattatgtttacccatatatgcatccatgaatagagacgaatatgtctatataatttccaaagtgaagga

SEQ ID NO: 704863 - DNA, 75 bp, synthetic construct
  source 1..75: mol_type = other DNA
gctttgcctaccgatgcatgcagaattgagctctgatatcttagaatatattgtaagtacgattagggagattaa

SEQ ID NO: 704864 - DNA, 75 bp, synthetic construct
  source 1..75: mol_type = other DNA
aaattgccaggaccagttccggcgctggtaattacagcgtttgtcgcccgtcgcttactgcgctttcgtcatatg

SEQ ID NO: 704865 - DNA, 75 bp, synthetic construct
  source 1..75: mol_type = other DNA
tgaacagaaatattgctgccagaatcgcagcccagaatgtgctgaacagtacaacggcggtgggctcacgtctga

SEQ ID NO: 704866 - DNA, 75 bp, synthetic construct
  source 1..75: mol_type = other DNA
tgaacagaaatattgctgccagaaacgctgcccagaatgtgctgaacagtacaacggcggtgggctcacgtctga

SEQ ID NO: 704867 - DNA, 75 bp, synthetic construct
  source 1..75: mol_type = other DNA
gacgcagattgccacggcgcgggcaagagcagccgtgtaccgtgcgcagcaggcagtggcggcagcccgcgggac

SEQ ID NO: 704868 - DNA, 75 bp, synthetic construct
  source 1..75: mol_type = other DNA
tgaacagaaatattgctgccagaagcgcggcccagaatgcgctgaacagtacaacggcggtgggctcacgtctga

SEQ ID NO: 704869 - DNA, 75 bp, synthetic construct
  source 1..75: mol_type = other DNA
tgaacagaaatattgctgccagaagcgccgcccagaatgggctgaacagtacaacggcggtgggctcacgtctga

SEQ ID NO: 704870 - DNA, 75 bp, synthetic construct
  source 1..75: mol_type = other DNA
tgaacagaaatattgctgccagaaccgcggcccagaatgggctgaacagtacaacggcggtgggctcacgtctga

SEQ ID NO: 704871 - DNA, 75 bp, synthetic construct
  source 1..75: mol_type = other DNA
aacgcagattgccacggcgcgggcaagcgcagccgtgtaccgtgcccagcaggcagtggcggcagcccgcgggac

SEQ ID NO: 704872 - DNA, 75 bp, synthetic construct
  source 1..75: mol_type = other DNA
aacgcagattgccacggcgcgggcaagagcagccgtgtaccgtgcacagcaggcagtggcggcagcccgcgggac

SEQ ID NO: 704873 - DNA, 75 bp, synthetic construct
  source 1..75: mol_type = other DNA
cagattgctgcagaagcccgtctggcggccacacaggaacgcctgaacagaaatattgctgccagaagcgccgcc

SEQ ID NO: 704874 - DNA, 75 bp, synthetic construct
  source 1..75: mol_type = other DNA
cacgcagattgccacggcgcgggcaagagcagccgtgtaccgtgcccagcaggcagtggcggcagcccgcgggac

SEQ ID NO: 704875 - DNA, 75 bp, synthetic construct
  source 1..75: mol_type = other DNA
tacgcagattgccacggcgcgggcaagagcagccgtgtaccgtgctcagcaggcagtggcggcagcccgcgggac

SEQ ID NO: 704876 - DNA, 75 bp, synthetic construct
  source 1..75: mol_type = other DNA
aacgcagattgccacggcgcgggcaagggcagccgtgtaccgtgcgcagcaggcagtggcggcagcccgcgggac

SEQ ID NO: 704877 - DNA, 75 bp, synthetic construct
  source 1..75: mol_type = other DNA
ccgcagggctaccgtctgcgccgccatgcgctgtggcagaacatcaccagtacaccccaggtggaaagcgatgga

SEQ ID NO: 704878 - DNA, 75 bp, synthetic construct
  source 1..75: mol_type = other DNA
gcagtgatgactgccgactgcctgcccgtgctgttttgtaatcgtgcgggaacggaagtggctgcagcccatgct

SEQ ID NO: 704879 - DNA, 75 bp, synthetic construct
  source 1..75: mol_type = other DNA
gcctggttagggccggcaattggtccacgcgcgttcgaagtgggggggggaggttcgcgaggcgtttatggcagt

SEQ ID NO: 704880 - DNA, 75 bp, synthetic construct
  source 1..75: mol_type = other DNA
ggctggcgtggactttgcgctggtgtgctggaggagacagtttcttgttttgctgataagccagaaaacattctt

SEQ ID NO: 704881 - DNA, 75 bp, synthetic construct
  source 1..75: mol_type = other DNA
cagaagaacttacagccctgctgattgccggtggtttaccggaaaacgaggtcaacgactttgtggcctttgtat

SEQ ID NO: 704882 - DNA, 75 bp, synthetic construct
  source 1..75: mol_type = other DNA
gccagcaaattttaagctctgcactaaaagtcagcaaatgtcgctcgctcgtaaaaaggcgctttcagtctttgg

SEQ ID NO: 704883 - DNA, 75 bp, synthetic construct
  source 1..75: mol_type = other DNA
tgctgataatccagaaaatattctcgcctggttagggccggcaattggtccacgcgcgtttgaagtgggggcgga

SEQ ID NO: 704884 - DNA, 75 bp, synthetic construct
  source 1..75: mol_type = other DNA
ctgaaattatcaaacagaccaccccggacggtgcgggacgtgtggcagcccatgctgtggtaaatgctgcactgg

SEQ ID NO: 704885 - DNA, 75 bp, synthetic construct
  source 1..75: mol_type = other DNA
agcctcaggttttggaacgggaggtaaataccagcaggcgatacaggccgcaacggcagcagtacagggactggc

SEQ ID NO: 704886 - DNA, 75 bp, synthetic construct
  source 1..75: mol_type = other DNA
ccgctacggtggcaatgatgggggcaacggcaattgttgcacccatgctgccgctgtatcccgacatcagcccgg

SEQ ID NO: 704887 - DNA, 75 bp, synthetic construct
  source 1..75: mol_type = other DNA
ccgtgctgttttgcaatcgtgcgggaacggaagtcgccgccgctcatgctggctggcgtggactgtgcgcaggcg

SEQ ID NO: 704888 - DNA, 75 bp, synthetic construct
  source 1..75: mol_type = other DNA
ggaacaatcatctcggacgagactacattgcgcgcagtcccggacatgaagtttttgtacttaatgcggatacag

SEQ ID NO: 704889 - DNA, 75 bp, synthetic construct
  source 1..75: mol_type = other DNA
gtggcgaagggcagtacactgaccgcaggtaataacctcagtattcaggccaccggctccggcgtgaagggcgtg

SEQ ID NO: 704890 - DNA, 75 bp, synthetic construct
  source 1..75: mol_type = other DNA
aagtggtgtctggatagattaccaagtgattgtcagattgtcggtgaagatggtaattattatctgattaggtaa

SEQ ID NO: 704891 - DNA, 75 bp, synthetic construct
  source 1..75: mol_type = other DNA
aaaccagtattccgactccacaggtcaccattgacagccacaacgataaagcctggcgcgacacgctgttaaaag

SEQ ID NO: 704892 - DNA, 75 bp, synthetic construct
  source 1..75: mol_type = other DNA
ctccagtagaccacaacagaccaccgtcacgtctgaaagcgacgtgatgcaaaccagtattccgactccacaggt

SEQ ID NO: 704893 - DNA, 75 bp, synthetic construct
  source 1..75: mol_type = other DNA
ttttgatgaacaggggctggaagccgccttacggtatctggatacgttgcccgccggtgaaccccgcgatcagtt

SEQ ID NO: 704894 - DNA, 75 bp, synthetic construct
  source 1..75: mol_type = other DNA
gccacgtctgaaagcggcgtgacgcataccagtactccgactccacagatcgccatcgacagtcacgacgacaaa

SEQ ID NO: 704895 - DNA, 75 bp, synthetic construct
  source 1..75: mol_type = other DNA
ttcggagagtaaggattttcgcctgctggcgcatctgctgagaaccctgcaacatgccggtgatccgctcctggc

SEQ ID NO: 704896 - DNA, 75 bp, synthetic construct
  source 1..75: mol_type = other DNA
agccagctggatatccctgaactccagcaccggggactggtccttctggcttcggagagtaaggattttcgcctg

SEQ ID NO: 704897 - DNA, 75 bp, synthetic construct
  source 1..75: mol_type = other DNA
gtgaccgatgatggcagcaccattcagggcaaagatgccgacatcatgatcatcggtggtatcccggacaaactg

SEQ ID NO: 704898 - DNA, 75 bp, synthetic construct
  source 1..75: mol_type = other DNA
cagtgtgatattgctggcatgggtactgtggcgtctgctgcgaattattagtcgtcgtcgtcttaacccggataa

SEQ ID NO: 704899 - DNA, 75 bp, synthetic construct
  source 1..75: mol_type = other DNA
aaatggtgtcttgataaattaccaagtgattgtcagattgtcggtgaagatggcaattattatctggttaggtaa

SEQ ID NO: 704900 - DNA, 75 bp, synthetic construct
  source 1..75: mol_type = other DNA
actgggagtatatcgacggcgaaatcgtcaagctgggttcactggcccacagccaactggatatcccggaactcc

SEQ ID NO: 704901 - DNA, 75 bp, synthetic construct
  source 1..75: mol_type = other DNA
tatctacaggccagcgccgattgccaaagttccgccccagcaagcggcattgtttatgaactgtttgtcgctggt

SEQ ID NO: 704902 - DNA, 75 bp, synthetic construct
  source 1..75: mol_type = other DNA
tgacggcaccattaacggcatcaaagtcggcctgatggggccgctggcaggggttggcgatccgctggtctgggg

SEQ ID NO: 704903 - DNA, 75 bp, synthetic construct
  source 1..75: mol_type = other DNA
ataaagaccaggttgcctttttccacggctgcttcgttaactacaaccatccgcagttaggcaaagatttaatta

SEQ ID NO: 704904 - DNA, 75 bp, synthetic construct
  source 1..75: mol_type = other DNA
tgctgcggcgtaccgctaatcgccaacggctttaccgataaagcacgcaaacaggcaattacgaatgtagagtcg

SEQ ID NO: 704905 - DNA, 75 bp, synthetic construct
  source 1..75: mol_type = other DNA
cgcctgcccggtaagccgggtgaatccgggctatccggggccaaaacaggccggtccggatggcgagcgtctgcg

SEQ ID NO: 704906 - DNA, 75 bp, synthetic construct
  source 1..75: mol_type = other DNA
ataaagaccaggtcgctttctttcacggctgcttcgttaactacaaccatccgcagttaggcaaagatttaatta

SEQ ID NO: 704907 - DNA, 75 bp, synthetic construct
  source 1..75: mol_type = other DNA
tgccgctgaaatcactgccgctaaaagtggtctatcacaccccgtgccatatggaaaaaatgggctggacactct

SEQ ID NO: 704908 - DNA, 75 bp, synthetic construct
  source 1..75: mol_type = other DNA
acggttttaccgataaagcgcgtaaacaggcaatcactaacgtggaatcgatccgcgaagctgtgggggtaaaag

SEQ ID NO: 704909 - DNA, 75 bp, synthetic construct
  source 1..75: mol_type = other DNA
gatgctttctcgtcctcgaatggagtaagtattattaatggtgtaatattgaatgatgtatcatgggatgtggtg

SEQ ID NO: 704910 - DNA, 75 bp, synthetic construct
  source 1..75: mol_type = other DNA
tattcccatatgcaaaccctggtcgaacagggaaatcccatcgacctgatcaccctgagcgaatcgctggaacag

SEQ ID NO: 704911 - DNA, 75 bp, synthetic construct
  source 1..75: mol_type = other DNA
tctaccacatcgccattcagaatgacggggctaacggacagatagggccggaagctgcgggcagccttgtgcagc

SEQ ID NO: 704912 - DNA, 75 bp, synthetic construct
  source 1..75: mol_type = other DNA
gttgaaagtaccgaagtgaataacttgaatttgtttgtctggagatttttcgaaagatacgtagttagtagcttt

SEQ ID NO: 704913 - DNA, 75 bp, synthetic construct
  source 1..75: mol_type = other DNA
gaatgatgtatcatgggatgtggtggttgaaagtaccgaagtgaataacttgaatttgtttgtctggagattttt

SEQ ID NO: 704914 - DNA, 75 bp, synthetic construct
  source 1..75: mol_type = other DNA
cgaaagatacgtagttagtagcttttttataaagggcaaggagtttagttgtgaacctgacaaatatcgctttaa

SEQ ID NO: 704915 - DNA, 75 bp, synthetic construct
  source 1..75: mol_type = other DNA
gtggcttggtacggtcggcggatggatttcgggggcagtggcaaacgcaaaaggtggtgtttacacatcggcaaa

SEQ ID NO: 704916 - DNA, 75 bp, synthetic construct
  source 1..75: mol_type = other DNA
agcttttacaccgtacagcctggggaaatcctgtctggaatgcactccagagtctcaatatctatggcttttgcc

SEQ ID NO: 704917 - DNA, 75 bp, synthetic construct
  source 1..75: mol_type = other DNA
agaaagccaatgagaaatcaggctgtactaactatctgccgacgcttatcaccaccagcgatgagctgatgaaac

SEQ ID NO: 704918 - DNA, 75 bp, synthetic construct
  source 1..75: mol_type = other DNA
agaatcagcaatgtgcttccggagtttcggggagagggtggtgtcagagtggggcgaatatcctttaataatata

SEQ ID NO: 704919 - DNA, 75 bp, synthetic construct
  source 1..75: mol_type = other DNA
atactttctacagattttcagattttgcacatatatcagtgcccggtgtgacaactgtttccatgacaacggaca

SEQ ID NO: 704920 - DNA, 75 bp, synthetic construct
  source 1..75: mol_type = other DNA
ggcgcgttctgttcgcgccgtgaatgaagatagtcaaccagaatgtcagataactggcgacaggacccgttataa

SEQ ID NO: 704921 - DNA, 75 bp, synthetic construct
  source 1..75: mol_type = other DNA
ggacgttcccggtttcgacctgtcgctggtcaggacaccatcagcctggacggaagaacccagaaaacaacatgc

SEQ ID NO: 704922 - DNA, 75 bp, synthetic construct
  source 1..75: mol_type = other DNA
ggtttccgcatggaacagtgcggttatgtgatgtcggcagtcattgatgagctgcaggatatctttcttaaattt

SEQ ID NO: 704923 - DNA, 75 bp, synthetic construct
  source 1..75: mol_type = other DNA
ggtactgacgctggcgtggctccctcagcaaacgaggcctcatccggtgaggaccacgacgaactcttcgacaaa

SEQ ID NO: 704924 - DNA, 75 bp, synthetic construct
  source 1..75: mol_type = other DNA
tactgacaatcaagcagtggcgcgaaacatacggacctgatagcaacgtggtactgccagcagaagaagcggaag

SEQ ID NO: 704925 - DNA, 75 bp, synthetic construct
  source 1..75: mol_type = other DNA
cggaactgaaaggtaaacaaccgggtgatgtagaagtgcctgttattggcggtcactctggcgttactattctgc

SEQ ID NO: 704926 - DNA, 75 bp, synthetic construct
  source 1..75: mol_type = other DNA
cagaacgcgctggaaggtatgctggatacgctgaagaaagatatcgctctgggcgaagagttcgttaataagtaa

SEQ ID NO: 704927 - DNA, 75 bp, synthetic construct
  source 1..75: mol_type = other DNA
tagttttaccgagcaggaagtggctgatctgaccaaacgtatccagaacgcgggtactgaggtggttgaagcgaa

SEQ ID NO: 704928 - DNA, 75 bp, synthetic construct
  source 1..75: mol_type = other DNA
gacttgaactgtcggagaatgttattattactgttgataactctccttctgaaatcggtgaaggtctcaggctgg

SEQ ID NO: 704929 - DNA, 75 bp, synthetic construct
  source 1..75: mol_type = other DNA
ataaaaagaccgaagcggaaaaaacagaagatatttataaacggctgattaaacagcaaaaagaacagatagcac

SEQ ID NO: 704930 - DNA, 75 bp, synthetic construct
  source 1..75: mol_type = other DNA
ttgaggtattcgttgctcagaagcgcaaatctaaagaagaaaaatatgtgcaagatttgtttgattcgttaactc

SEQ ID NO: 704931 - DNA, 75 bp, synthetic construct
  source 1..75: mol_type = other DNA
gccggtgcctttgccaccggacacctgatttcgctggcggatgaatggagctccgtgaatgcccgtctgaaacag

SEQ ID NO: 704932 - DNA, 75 bp, synthetic construct
  source 1..75: mol_type = other DNA
gttacgtcagtggggagtcgtttattaagtggcgcgctggggctggttggtggtgtgccgggactcgtcatgctg

SEQ ID NO: 704933 - DNA, 75 bp, synthetic construct
  source 1..75: mol_type = other DNA
aataactcactggatgcctggcgaaataaccaggcaaataaaccgcataaaaaaccgaagcggaaaaaacagagg

SEQ ID NO: 704934 - DNA, 75 bp, synthetic construct
  source 1..75: mol_type = other DNA
gtctcgcctcactcaaatgcagggcaaagcgcaatccattcaggatgtgcttgccgggctggaggagcgacgggt

SEQ ID NO: 704935 - DNA, 75 bp, synthetic construct
  source 1..75: mol_type = other DNA
cagagcgtgagctggccctgtccggactgaatggggacgaaaaagagcggggccggctggggtatgcggcggatg

SEQ ID NO: 704936 - DNA, 75 bp, synthetic construct
  source 1..75: mol_type = other DNA
cagagcgtgagctggccctgtcctgactgaagggggacgaaaaagagcggggccggctggggtatgcggcggatg

SEQ ID NO: 704937 - DNA, 75 bp, synthetic construct
  source 1..75: mol_type = other DNA
gtggatgaggtgctggatattcatcagcgcgatgcggaaaacaccatgcgcgaactggcagtgcgggaaggaata

SEQ ID NO: 704938 - DNA, 75 bp, synthetic construct
  source 1..75: mol_type = other DNA
tgataatgtggcaacagccgtgggggcactggttgccgtcggggttgcccggtactttggcaatatggcctccgg

SEQ ID NO: 704939 - DNA, 75 bp, synthetic construct
  source 1..75: mol_type = other DNA
gaaaatcagagacggaaaaagcggaagacagtttttcccggctcctgaagcagcagaaagagcaactggcactgg

SEQ ID NO: 704940 - DNA, 75 bp, synthetic construct
  source 1..75: mol_type = other DNA
cagagcgtgagctggccctgtccggactgaagggggacgaaaaagagcggggccgtctggggtatgcggcggatg

SEQ ID NO: 704941 - DNA, 75 bp, synthetic construct
  source 1..75: mol_type = other DNA
gaatgggtgttgcccgtaaggatctgaaggccatggcggataacggaaaactgaccgccgataaggttgttcctg

SEQ ID NO: 704942 - DNA, 75 bp, synthetic construct
  source 1..75: mol_type = other DNA
gaacaaaacaaagcgtatcagtccctgttgatcatgaatgggcagcataccgagtttaatcgccttctcgggctc

SEQ ID NO: 704943 - DNA, 75 bp, synthetic construct
  source 1..75: mol_type = other DNA
agtataggcaactggctgggtggcgcggtggccaatgcaaaaggcggcgtttatacctcggcaaacctgagtgca

SEQ ID NO: 704944 - DNA, 75 bp, synthetic construct
  source 1..75: mol_type = other DNA
aggtggaaaacgcctttatggcctgggtgggtggcgcgaatgaggccagcggggtgacaaaaacgctctccggcg

SEQ ID NO: 704945 - DNA, 75 bp, synthetic construct
  source 1..75: mol_type = other DNA
tggaatggcgcagctgggcctcatcagtgctgcaggaaatatcaaaagttcttatgaatgccgcgattgtcaacg

SEQ ID NO: 704946 - DNA, 75 bp, synthetic construct
  source 1..75: mol_type = other DNA
ctgatgaacgcggccattgttaacgggctgaaatcactctccgggacaatgtcgggagcggggggatggattggt

SEQ ID NO: 704947 - DNA, 75 bp, synthetic construct
  source 1..75: mol_type = other DNA
atctgcacgccagtatgccgcaacaatcgacgaaattcgccagaaaacgtcggcaatgtcgcttcctgaagcgtc

SEQ ID NO: 704948 - DNA, 75 bp, synthetic construct
  source 1..75: mol_type = other DNA
gcttgactacgcgattctccgtcccggcggcctgcttgatggtgcggcaacgggcaaggcgctacgcatacaaaa

SEQ ID NO: 704949 - DNA, 75 bp, synthetic construct
  source 1..75: mol_type = other DNA
ggaattcaaccgtctgctggggctggggaatgaactgcttcagcagcggcagggactggtgaatgtgccgttacg

SEQ ID NO: 704950 - DNA, 75 bp, synthetic construct
  source 1..75: mol_type = other DNA
cacagctggcaacggaggggatttcaggactggtgaataacatcacggagatgctgaacggaaacaaagtggaat

SEQ ID NO: 704951 - DNA, 75 bp, synthetic construct
  source 1..75: mol_type = other DNA
cggagatgctgaacggaaataaagtggaatggcgcagctgggcctcatcagtgctgcaggaaatatcaaaagttc

SEQ ID NO: 704952 - DNA, 75 bp, synthetic construct
  source 1..75: mol_type = other DNA
tgctgtcggaatggctggcgcatttgccggtgcctttgccaccggacacctgatttcactggctgatgagtggag

SEQ ID NO: 704953 - DNA, 75 bp, synthetic construct
  source 1..75: mol_type = other DNA
ggctgtcggaatgaccagtgcgtttgccggtgcctttgccaccggacacctgatttcgctggcagatgaatggag

SEQ ID NO: 704954 - DNA, 75 bp, synthetic construct
  source 1..75: mol_type = other DNA
gaaaagacaaccactatcgccccgttaacgccatacgataaatgggatggtgagaaatgggtgacggataccgag

SEQ ID NO: 704955 - DNA, 75 bp, synthetic construct
  source 1..75: mol_type = other DNA
aatcacagatccgggtgattatcctgaaaatacaaccactatggccccgttaacgccatacgataaatgggatgg

SEQ ID NO: 704956 - DNA, 75 bp, synthetic construct
  source 1..75: mol_type = other DNA
aaaactcgggaatatatttctacttcaaatgaatatcttgccattggtgtcggtatccctgcatattcctgttta

SEQ ID NO: 704957 - DNA, 75 bp, synthetic construct
  source 1..75: mol_type = other DNA
tgttaccgtttataattatgatggcgaaacacgggaatatattgccacatcaactgaacatcttgctgtcggtgt

SEQ ID NO: 704958 - DNA, 75 bp, synthetic construct
  source 1..75: mol_type = other DNA
gcacagcataatgccgcagtagacgcggcagaagcactgcgccagtcactgattgatgcagcaatggcttccatt

SEQ ID NO: 704959 - DNA, 75 bp, synthetic construct
  source 1..75: mol_type = other DNA
tacaccaccaccgggccggaaatctggcagcaaaccggcgggcgcattacgcattttgtctccagtatggggacg

SEQ ID NO: 704960 - DNA, 75 bp, synthetic construct
  source 1..75: mol_type = other DNA
aatttatcgccactcaggcaggaaatattactgtttataactatgatggtgaaacacgggaatatattttcacat

SEQ ID NO: 704961 - DNA, 75 bp, synthetic construct
  source 1..75: mol_type = other DNA
tctggttgaaactggaaggcaataacccggcaggttcggtgaaagatcgtgcggcactttcgatgatcgtcgagg

SEQ ID NO: 704962 - DNA, 75 bp, synthetic construct
  source 1..75: mol_type = other DNA
ataaccctgcgggttcggtgaaagaccgcgcggcattatcaatgattgtcgaggcggaaaagcgtggggaaatta

SEQ ID NO: 704963 - DNA, 75 bp, synthetic construct
  source 1..75: mol_type = other DNA
atggaatggtgagaaatgggtgacagataccgaggcacagcacggcgcagcagtagatgcagcagaagcacagcg

SEQ ID NO: 704964 - DNA, 75 bp, synthetic construct
  source 1..75: mol_type = other DNA
caactgaatatcttgctgttggtgtcggtattccggcatgttcctgtttagatgcaccaggaacatataaagctg

SEQ ID NO: 704965 - DNA, 75 bp, synthetic construct
  source 1..75: mol_type = other DNA
atggataacgctgtattaaatagcgagtttattgctacaaaggcggggaatattaccgtctataactatgatggc

SEQ ID NO: 704966 - DNA, 75 bp, synthetic construct
  source 1..75: mol_type = other DNA
atgaatgacgctgtattaaataacgaatttattgccactcaagcaggaaatatcaccgtttataactatgacggt

SEQ ID NO: 704967 - DNA, 75 bp, synthetic construct
  source 1..75: mol_type = other DNA
gatgcaccaagtacacataaagctggttatgcaatctgtcgctctgtagatttaaattcatgggaatatgtgcca

SEQ ID NO: 704968 - DNA, 75 bp, synthetic construct
  source 1..75: mol_type = other DNA
gagtggcagtatttacaggtaagggatggagccatgaagaagaccatcgcaatgagactgtttactcaatcgaaa

SEQ ID NO: 704969 - DNA, 75 bp, synthetic construct
  source 1..75: mol_type = other DNA
agtctgattcagctgaaattgcaggccgggcggaagctgacgcaggcagaaatcacccgccttaacgctgtactg

SEQ ID NO: 704970 - DNA, 75 bp, synthetic construct
  source 1..75: mol_type = other DNA
gatgcgcccggcacacataaggctggttatgcaatctgccgttctgcagattttaactcatgggaatatgtgcca

SEQ ID NO: 704971 - DNA, 75 bp, synthetic construct
  source 1..75: mol_type = other DNA
cggcagaagcacagcgtcagtcactgattgatgctgcaatggcttccatcagtctgattcagctgaaattacagg

SEQ ID NO: 704972 - DNA, 75 bp, synthetic construct
  source 1..75: mol_type = other DNA
tttaaaatcatgggaatatgtgtcagaccatcgcggtgaaatcgtctataacaccgaaacgggagatgccaaaga

SEQ ID NO: 704973 - DNA, 75 bp, synthetic construct
  source 1..75: mol_type = other DNA
aattgaatatcttgctgtgggtgtcggtatccccgcatattcctgtttagatgctcctggcacacataaggctgg

SEQ ID NO: 704974 - DNA, 75 bp, synthetic construct
  source 1..75: mol_type = other DNA
caactgaatatcttgctattggtgtcggcattccggcatattcctgtttagatgccccaggcgcatacaaagctg

SEQ ID NO: 704975 - DNA, 75 bp, synthetic construct
  source 1..75: mol_type = other DNA
caactgaatatcttgctgttggcgtcggtatcccggcatgttcttgtttagatgcaccaggtatacataaagctg

SEQ ID NO: 704976 - DNA, 75 bp, synthetic construct
  source 1..75: mol_type = other DNA
caggcagaaacaacccggcttaacgctgtgctggattacattgacgcggtgactgcaacagataccagcaccgcg

SEQ ID NO: 704977 - DNA, 75 bp, synthetic construct
  source 1..75: mol_type = other DNA
taacgccattcgataaatgggatggtgagaaatgggtgacggataccgaggcacagcatagcgccgcactagacg

SEQ ID NO: 704978 - DNA, 75 bp, synthetic construct
  source 1..75: mol_type = other DNA
cggcagaagcacaacgtcagtcactgattgatactgcaatggcttccattagtctgattcagttgaaattgcagg

SEQ ID NO: 704979 - DNA, 75 bp, synthetic construct
  source 1..75: mol_type = other DNA
gaaaatacaaccactatcgcaccgttaacgccatacgataaatgggatggtgagaaatgggtgacagatactgag

SEQ ID NO: 704980 - DNA, 75 bp, synthetic construct
  source 1..75: mol_type = other DNA
atattgaaagaacattataatgaagatgaaattagtgcgaaattaccactagcatatgattacattttaaataaa

SEQ ID NO: 704981 - DNA, 75 bp, synthetic construct
  source 1..75: mol_type = other DNA
atggttaagtcaattggctttgtcctgctggttggtacttgcgggaatgatgcctgtgatgccattccggtaaca

SEQ ID NO: 704982 - DNA, 75 bp, synthetic construct
  source 1..75: mol_type = other DNA
aagataacagctatgttttcgtgcttgaacgtggtggtgcctggtgctacgactacactgtctcggtagttaacc

SEQ ID NO: 704983 - DNA, 75 bp, synthetic construct
  source 1..75: mol_type = other DNA
agctgacgcaggcagaaaccacccgacttaacgctgtgctggattacattgacgcggtggaggcaacagatacca

SEQ ID NO: 704984 - DNA, 75 bp, synthetic construct
  source 1..75: mol_type = other DNA
tacgaaaagctgcctgggttcccggtaagtaccgtacacggtcatgcgggtgagctggtgctgggttatctccag

SEQ ID NO: 704985 - DNA, 75 bp, synthetic construct
  source 1..75: mol_type = other DNA
ggcgtaccggtggtatgtatgaaaggtcgcggacatttctacgaaggtcgtggaatgaccattatgactgacgca

SEQ ID NO: 704986 - DNA, 75 bp, synthetic construct
  source 1..75: mol_type = other DNA
aatctgatgttacagccgagtcggttttctttatgcaacgtcggcaggtgttaaaagcactgggcatcagcgcag

SEQ ID NO: 704987 - DNA, 75 bp, synthetic construct
  source 1..75: mol_type = other DNA
cgttcagtgatttcgcccgcgatcgccgtggagtgtgcgatccggaagcccgttgccttgccggcaatccctggt

SEQ ID NO: 704988 - DNA, 75 bp, synthetic construct
  source 1..75: mol_type = other DNA
cttgagcgtgcgcttcgtgagcagtccggctcacggatacggcggatcctgcttcgtctgccgtgggaatatgac

SEQ ID NO: 704989 - DNA, 75 bp, synthetic construct
  source 1..75: mol_type = other DNA
ccggtgcctggcgtaatgccctctctatctgggagcctgtttgcaatgagatttttgatcgtctgattaaaccac

SEQ ID NO: 704990 - DNA, 75 bp, synthetic construct
  source 1..75: mol_type = other DNA
tttaatgatgacagcccggaagcgaggaaaatcacccgacgctggagaataggtgaagcagcggatttagttgga

SEQ ID NO: 704991 - DNA, 75 bp, synthetic construct
  source 1..75: mol_type = other DNA
cacactgatgaccgtaggtgtctatggcaaggcgctgccgccacaaaatggagcgccagtgcgattgatcgtacc

SEQ ID NO: 704992 - DNA, 75 bp, synthetic construct
  source 1..75: mol_type = other DNA
gcttaacgctgtgctggattacattgacgcggtgacggcaacagataccagcaccgcgccggacgtcatctggcc

SEQ ID NO: 704993 - DNA, 75 bp, synthetic construct
  source 1..75: mol_type = other DNA
tgaatacaaagacaaccaactgtgttcaggcgaaaacaaaccgttcttcaaaatcaaaaatggtgtaccgacggt

SEQ ID NO: 704994 - DNA, 75 bp, synthetic construct
  source 1..75: mol_type = other DNA
tattaccgtctataactatgatagtgaaacacgggaatatatttccacatcaactgaatatcttgctgtgggggt

SEQ ID NO: 704995 - DNA, 75 bp, synthetic construct
  source 1..75: mol_type = other DNA
tgagaaatgggtgacggatactgaggcacagcatagcgccgcactagacgcggcagaagtaaagcgccagtcgct

SEQ ID NO: 704996 - DNA, 75 bp, synthetic construct
  source 1..75: mol_type = other DNA
atcttcatattcatgcagaggatactctccttcccttctatcttggggaaaaggacgatgtcacttatgcaataa

SEQ ID NO: 704997 - DNA, 75 bp, synthetic construct
  source 1..75: mol_type = other DNA
gctctcagtccccgtggatggaggagcaaattcgggatgcctggggaagcatggttctaaaaaatgttgtacgtg

SEQ ID NO: 704998 - DNA, 75 bp, synthetic construct
  source 1..75: mol_type = other DNA
tactgattgttccgacaccggccgaactatttgattatacgtctgctctgcaattttttgatatgctccgggatt

SEQ ID NO: 704999 - DNA, 75 bp, synthetic construct
  source 1..75: mol_type = other DNA
gatgcccctggcacacataaggcgggttatgctatctgccgttcgatagatttaaactcatgggaatatgtgccg

SEQ ID NO: 705000 - DNA, 75 bp, synthetic construct
  source 1..75: mol_type = other DNA
agattatcgccaccaaagcagggaatattacagtgtataactatgatagtgaaacccgggaatatatttccactt

SEQ ID NO: 705001 - DNA, 75 bp, synthetic construct
  source 1..75: mol_type = other DNA
agtctgattcaactgaaattacaggccggacggaagctgacgcaggcagaaacaacccgccttaacgccgtgctg

SEQ ID NO: 705002 - DNA, 75 bp, synthetic construct
  source 1..75: mol_type = other DNA
atcagaaaataatcacaattatcaaactgaaatgttgcttcgatggaactatcctgccgcctcagacctgctcag

SEQ ID NO: 705003 - DNA, 75 bp, synthetic construct
  source 1..75: mol_type = other DNA
atgagtcgggaatatatttcagcttcaactgaatatcttgctattggtgtcggcattccggcatattcctgttta

SEQ ID NO: 705004 - DNA, 75 bp, synthetic construct
  source 1..75: mol_type = other DNA
tggcgtcggtatcccggcatgttcttgtttagatgcaccagttacacataaggctggttatgcaatctgccgttc

SEQ ID NO: 705005 - DNA, 75 bp, synthetic construct
  source 1..75: mol_type = other DNA
acgtcgaactttttcggaaccttccctatccgaaaaaacagatattatcgcacctgtatttactgaacagacgac

SEQ ID NO: 705006 - DNA, 75 bp, synthetic construct
  source 1..75: mol_type = other DNA
ggccctgtttcctcatcttcgtgctgaaggtggtggatttattcccctgaaaattggcataaacaatgatatttc

SEQ ID NO: 705007 - DNA, 75 bp, synthetic construct
  source 1..75: mol_type = other DNA
gggactgtgccgtatcctgtatcacctcccggcgtgtctatctgttgcgtaccgctgtcaccggtgccacccgct

SEQ ID NO: 705008 - DNA, 75 bp, synthetic construct
  source 1..75: mol_type = other DNA
tcatggaatgtgaatccatcgttaattggttggatttttattcaaaatgatttatacgttctacccatcatatgg

SEQ ID NO: 705009 - DNA, 75 bp, synthetic construct
  source 1..75: mol_type = other DNA
accggatctgtaccggatatgtcaccgcacacggttgccgctcagcctcctgctgcagccactccagtcccgcaa

SEQ ID NO: 705010 - DNA, 75 bp, synthetic construct
  source 1..75: mol_type = other DNA
gcaggtctcagaatctgaagcacagagtgccagtcgaagactggcgacattagaacaaaagtggctcaggatgaa

SEQ ID NO: 705011 - DNA, 75 bp, synthetic construct
  source 1..75: mol_type = other DNA
ttaatgaggtggcaaaagagaaactgccacattacgtcatgagtgcaactgcagagatcgggcgtgttgctgcag

SEQ ID NO: 705012 - DNA, 75 bp, synthetic construct
  source 1..75: mol_type = other DNA
ttcagcatttctggcagaacacccggagacagaactgaccatggacgaatggctctgtgcagtgtcctgcatcac

SEQ ID NO: 705013 - DNA, 75 bp, synthetic construct
  source 1..75: mol_type = other DNA
ttcgccgctggcctgcggaatatctgccggggattttcaacgcttctctggtggatgaggtgctggatattcatc

SEQ ID NO: 705014 - DNA, 75 bp, synthetic construct
  source 1..75: mol_type = other DNA
ttattcagtacctgaagatgatttgctctgttgctatccgtcattgtcgggcgatggcagttactttttcacgtt

SEQ ID NO: 705015 - DNA, 75 bp, synthetic construct
  source 1..75: mol_type = other DNA
tgatggcgctggcggctgtttcattgcaggcccgtttacaggctaaccctgcgatattgctgtctgaattgacca

SEQ ID NO: 705016 - DNA, 75 bp, synthetic construct
  source 1..75: mol_type = other DNA
gcggagattgggcgagtagctgcaggcgcagtatccggtgatgtaaaaaccagtgcaggccgccgcgatgttatc

SEQ ID NO: 705017 - DNA, 75 bp, synthetic construct
  source 1..75: mol_type = other DNA
cgattgaaaaacaaaaaaaattggaaagctggggtagtattaatatgttttattctggctctgccatttgtagaa

SEQ ID NO: 705018 - DNA, 75 bp, synthetic construct
  source 1..75: mol_type = other DNA
tactttacagcgcgattttcatcagcgtctggttcacctggacttagagtacagaaatggcaggtacagcctcag

SEQ ID NO: 705019 - DNA, 75 bp, synthetic construct
  source 1..75: mol_type = other DNA
attcaacgccattttaaaaagcagcagtctcgctgatacgctggcagttattctctctaatatgcatatgcaccc

SEQ ID NO: 705020 - DNA, 75 bp, synthetic construct
  source 1..75: mol_type = other DNA
ataccgggatcgcacggatacttccgctccggaacggacgactgataacctttcttaccgacaaccaggagccct

SEQ ID NO: 705021 - DNA, 75 bp, synthetic construct
  source 1..75: mol_type = other DNA
ctgggaaaaaatgaacgcaaggataaaccagatacttcaaacggagagggtgtaggtggctctgtcagctatgaa

SEQ ID NO: 705022 - DNA, 75 bp, synthetic construct
  source 1..75: mol_type = other DNA
cggagtttggacctaccgcagcgcaaaaggataacttcttcgttggtcgtgtaggcggtgttgccacataccgca

SEQ ID NO: 705023 - DNA, 75 bp, synthetic construct
  source 1..75: mol_type = other DNA
ttggcggaacgctggggttcctcgctgcggttatcggccttggcacgatactgggaaaaatgatggaagtatccg

SEQ ID NO: 705024 - DNA, 75 bp, synthetic construct
  source 1..75: mol_type = other DNA
ttctgcggcgtcagctccggcggcgcggttgccggtgcgatacgcgtggcaaaagccaaccctggcgcagtggtg

SEQ ID NO: 705025 - DNA, 75 bp, synthetic construct
  source 1..75: mol_type = other DNA
tggccgatcacgccgatgcctttgccgagctggattacaacatattccgcggcctggcgtttgcttccggcaacc

SEQ ID NO: 705026 - DNA, 75 bp, synthetic construct
  source 1..75: mol_type = other DNA
acgtgctaatggcgcagagatcgatgacggtgctatcaacggcatcaaagtcggtttgatggggccgctggctgg

SEQ ID NO: 705027 - DNA, 75 bp, synthetic construct
  source 1..75: mol_type = other DNA
cgtctggttcacctggatttagagtacagaaatggccggtacagcctcagacgacagagcagcccaggtgcgatc

SEQ ID NO: 705028 - DNA, 75 bp, synthetic construct
  source 1..75: mol_type = other DNA
cagaataccgggatcgcacggatacttccgctccggaacggacgactgataacctgtcttaccgacaaccaggag

SEQ ID NO: 705029 - DNA, 75 bp, synthetic construct
  source 1..75: mol_type = other DNA
gattctgtttattacggcaggctggggaaaaattactggctacgcgggtacccaacaatatatggaagcaatggg

SEQ ID NO: 705030 - DNA, 75 bp, synthetic construct
  source 1..75: mol_type = other DNA
ccattttgtctccagcatggggacgaccggtacgattaccggcgtgtcgcgctttatgcgcgagcaatccaaacc

SEQ ID NO: 705031 - DNA, 75 bp, synthetic construct
  source 1..75: mol_type = other DNA
gacggtcggcatactgccgccggaagccggtgtgattgagcgggcgcgcgccggtatcgatgaggccatcagtcg

SEQ ID NO: 705032 - DNA, 75 bp, synthetic construct
  source 1..75: mol_type = other DNA
atgccgggcgtaccggtggaggccttttccggacgctcgcagactatccgggaggccgtcggggaggacgcctcg

SEQ ID NO: 705033 - DNA, 75 bp, synthetic construct
  source 1..75: mol_type = other DNA
tctccgcccccaaaagtgtctccatgatggccatgttaggtggcgataagcgcctgattgatgcacataatcagg

SEQ ID NO: 705034 - DNA, 75 bp, synthetic construct
  source 1..75: mol_type = other DNA
gcacagaaacaggagaatcaaaagaaatcaaagctccgggtgattaccctgaaaatacaaccactatcgcccctt

SEQ ID NO: 705035 - DNA, 75 bp, synthetic construct
  source 1..75: mol_type = other DNA
cggcaggacaccggaagcacgggagcagacgctgattgtcacgcacctgaatgaggaccgacgcgtgctgaacag

SEQ ID NO: 705036 - DNA, 75 bp, synthetic construct
  source 1..75: mol_type = other DNA
ggcactgaagctggagaacggctgggtggaaacgcccgggcattccgtcagcgacagtgcgacggtttttgcctc

SEQ ID NO: 705037 - DNA, 75 bp, synthetic construct
  source 1..75: mol_type = other DNA
ggccctgcagggcagccgtaacggagagagcctgctggctgataatatgcaggatggtgtccggattgcccgtga

SEQ ID NO: 705038 - DNA, 75 bp, synthetic construct
  source 1..75: mol_type = other DNA
gctggcagggcggagagcagcgaccggcaaccatcatcagtgaaccagaccgtaatgtccgctatgcccggctgg

SEQ ID NO: 705039 - DNA, 75 bp, synthetic construct
  source 1..75: mol_type = other DNA
ttcatgtgctcgatgagctgtccgtccgggcactcagtcgtgacatcatgaaacagaaccgggtgactgtacatc

SEQ ID NO: 705040 - DNA, 75 bp, synthetic construct
  source 1..75: mol_type = other DNA
agtggaacccggagacacgcagtcatgaccgctatgtgatagaccgggtgacggcgcagagtcacagcctgaccc

SEQ ID NO: 705041 - DNA, 75 bp, synthetic construct
  source 1..75: mol_type = other DNA
ggaaacgggctgcggggattcagcggtgaaggccgggtgaaaggcagcggggatgcgcagttcgtggccctgcag

SEQ ID NO: 705042 - DNA, 75 bp, synthetic construct
  source 1..75: mol_type = other DNA
ctgtcagggagattgccgggcaggagcgtgaccgggctgccataactgaacgggaagccgcgctgccggagagtg

SEQ ID NO: 705043 - DNA, 75 bp, synthetic construct
  source 1..75: mol_type = other DNA
tgagaaatgggtgacggataccgtggcacagcatagcgccgcagtagatgcagcagaagcacagcgccagtcgct

SEQ ID NO: 705044 - DNA, 75 bp, synthetic construct
  source 1..75: mol_type = other DNA
tgcattcgcactgcgccacaacctggtgcagctggcaggacgtgcaggaatgaatgtgcagattctgcgaaacaa

SEQ ID NO: 705045 - DNA, 75 bp, synthetic construct
  source 1..75: mol_type = other DNA
ggcttttgcactgcgtcacaacctggtgcaactggcagaacgtgcagacatgaatgtgcagattctgcggaacaa

SEQ ID NO: 705046 - DNA, 75 bp, synthetic construct
  source 1..75: mol_type = other DNA
atccgcatttcgatgaagcctgtagggcttttgcactgcgccacaacctggtgcaactggcagaacgtgcaggca

SEQ ID NO: 705047 - DNA, 75 bp, synthetic construct
  source 1..75: mol_type = other DNA
cgccggggggcgatgtcttatgcggctgtggccccccggggatacaccagtctgtcgcaggtggcactggttggt

SEQ ID NO: 705048 - DNA, 75 bp, synthetic construct
  source 1..75: mol_type = other DNA
cgcagcttaatgaactgccggcgtcccttgagcagattcaggcagcacagaaagccctttccctgcggctggaca

SEQ ID NO: 705049 - DNA, 75 bp, synthetic construct
  source 1..75: mol_type = other DNA
agacgaagctgcaggcggagagtgcgcgtctggcgcagctggcccggcagcccgttctgacggcggttcagcaga

SEQ ID NO: 705050 - DNA, 75 bp, synthetic construct
  source 1..75: mol_type = other DNA
aactgaacgtcctataaaccagacaatttaccgcgaatttaacggtatttctgttttatgggatccgatatatgc

SEQ ID NO: 705051 - DNA, 75 bp, synthetic construct
  source 1..75: mol_type = other DNA
ttggttcagtcaatgatggatacctttgttgacccatggttggagcgaattaccaaccggaagtctattttttcc

SEQ ID NO: 705052 - DNA, 75 bp, synthetic construct
  source 1..75: mol_type = other DNA
tgagaaatgggtgacggataccgaagcacagcatagcgccgcagtagatgtagcagaagcacagcgccagtcact

SEQ ID NO: 705053 - DNA, 75 bp, synthetic construct
  source 1..75: mol_type = other DNA
ttcacaccgcctgagttatggctgctgactgatctgaccgaagactcaaccctcgttgatggctttctggcgcag

SEQ ID NO: 705054 - DNA, 75 bp, synthetic construct
  source 1..75: mol_type = other DNA
gtgctgtttccggtgagcaactgacgactgcaggccgccgccagattatcgacagtatcaactctgttactcgcc

SEQ ID NO: 705055 - DNA, 75 bp, synthetic construct
  source 1..75: mol_type = other DNA
tgaatgttcagacactgagaaacaaactcaacccagatcaaccgcatcagctcaccgcaccagaaatctggctgc

SEQ ID NO: 705056 - DNA, 75 bp, synthetic construct
  source 1..75: mol_type = other DNA
attctcgtctgatggctacatacggcggtcagtttacgcttacgggttcgttaatacggcaacaaatactttcta

SEQ ID NO: 705057 - DNA, 75 bp, synthetic construct
  source 1..75: mol_type = other DNA
caccaatgacatctgatgttatcccgccgaaaaatgctttcactcgcggccttactcaggatgccgagggggctt

SEQ ID NO: 705058 - DNA, 75 bp, synthetic construct
  source 1..75: mol_type = other DNA
cataccatttgacgtattgcagggtggcgcaagtctgattaatgcaatcagccaggggcttggtggccccaaggt

SEQ ID NO: 705059 - DNA, 75 bp, synthetic construct
  source 1..75: mol_type = other DNA
caagccgggaacaccagcctatgaaagagcgctaaataatgctgcaaatgcgatacgccctatacttgcaagcca

SEQ ID NO: 705060 - DNA, 75 bp, synthetic construct
  source 1..75: mol_type = other DNA
ggcagctttaccgcagcggctaagcggctgggtcttgctcagtcaggagtcagccgttctgttcgcgagcttgaa

SEQ ID NO: 705061 - DNA, 75 bp, synthetic construct
  source 1..75: mol_type = other DNA
tattgcgctgaaagatatcgtcaaaggcggtattaaagagcgcttcgcccaactgcgcaaaatgggcattaaaac

SEQ ID NO: 705062 - DNA, 75 bp, synthetic construct
  source 1..75: mol_type = other DNA
cgatggtgaagtcattgaagggggcgcatcggtcgatgaaagcgccatcaccggggaatcggcaccggtgatccg

SEQ ID NO: 705063 - DNA, 75 bp, synthetic construct
  source 1..75: mol_type = other DNA
ttcccggtaacagcaataccagcggtactgagacaaccaccccggaaaccgcacgccagccggaacatctgccgg

SEQ ID NO: 705064 - DNA, 75 bp, synthetic construct
  source 1..75: mol_type = other DNA
caatcacatgtatctggtgtgataaatcgcgttacatgacctctctgttgtgctggtggttatcacgacgttctg

SEQ ID NO: 705065 - DNA, 75 bp, synthetic construct
  source 1..75: mol_type = other DNA
ggggcgattattccggcggcggtgggcgtggatattggctgtggaatgaacgcactgcgtaccgcgttaacggcg

SEQ ID NO: 705066 - DNA, 75 bp, synthetic construct
  source 1..75: mol_type = other DNA
tcggaagtggatagcggtatggttgcggtgcgcatttcgcccgatatggagatggctgttgtcggcacgcccggg

SEQ ID NO: 705067 - DNA, 75 bp, synthetic construct
  source 1..75: mol_type = other DNA
ttacggaacagtggttatgcgctcgcgtgccaggcaaggaaatgcccgatctgagcgcctttcaactggaaggct

SEQ ID NO: 705068 - DNA, 75 bp, synthetic construct
  source 1..75: mol_type = other DNA
aagctctgctccggaagctgttatttcagaaggagagatgtttataaactggttaaaaaaaggagtgaggaacgg

SEQ ID NO: 705069 - DNA, 75 bp, synthetic construct
  source 1..75: mol_type = other DNA
cagtttccgaggcagccgtgatggaggcaatccgggaagcacttgagggggctgatccacgcactgccgggctga

SEQ ID NO: 705070 - DNA, 75 bp, synthetic construct
  source 1..75: mol_type = other DNA
aagctggctggcagcgttaagcgtgctgctacttctgttgtgcacaccttatgaaaacgactttattgccggtta

SEQ ID NO: 705071 - DNA, 75 bp, synthetic construct
  source 1..75: mol_type = other DNA
gcatgagcacgctcggtaatgcctgggtcgatctgctacgcatcacgttatgggtgttagcccctgtggcattgt

SEQ ID NO: 705072 - DNA, 75 bp, synthetic construct
  source 1..75: mol_type = other DNA
tgcaagtattaaaggcacaacaaacctgttcaaaagacacggctatatcaatgaggatggtattccatattctat

SEQ ID NO: 705073 - DNA, 75 bp, synthetic construct
  source 1..75: mol_type = other DNA
tgactttaccggtgagaagtaccgcgatatcgcgcgcgttatgggcgtgaaagtggaaggtatgagcctggaaga

SEQ ID NO: 705074 - DNA, 75 bp, synthetic construct
  source 1..75: mol_type = other DNA
tcagatttcactacgactatttgggagcgagatggaatgcagcagtaaaacgtgctggtattcgccgccgtaatc

SEQ ID NO: 705075 - DNA, 75 bp, synthetic construct
  source 1..75: mol_type = other DNA
aacccggcatttatagccagccagatggggcatgaaactgcgcagatggtgtatgaaatttacggtatgtggatt

SEQ ID NO: 705076 - DNA, 75 bp, synthetic construct
  source 1..75: mol_type = other DNA
gcgcacagcgacgcaaaacaccgaacgagattgccctgactatcctgctgattgctctgaccatcgtctttttac

SEQ ID NO: 705077 - DNA, 75 bp, synthetic construct
  source 1..75: mol_type = other DNA
cgttaaccccggtgagacatttctggatcggatgatcgcgatggtggaaggcgcacagcgacgcaaaacaccgaa

SEQ ID NO: 705078 - DNA, 75 bp, synthetic construct
  source 1..75: mol_type = other DNA
ggtgagacccgtgaatatcgtgtcacgttccgggaactgacagcgaaagacagtattgacgcagaagcagaagcc

SEQ ID NO: 705079 - DNA, 75 bp, synthetic construct
  source 1..75: mol_type = other DNA
tgtaagagtaatattttcaactcgaagttagcgatttcatggaaaagcaatgtatggaagagatattatagattc

SEQ ID NO: 705080 - DNA, 75 bp, synthetic construct
  source 1..75: mol_type = other DNA
tgtctgtcgatgacttccagcgtctgtcgctggccacagaaatgtacgacatggctgtggcggcatcgctgacac

SEQ ID NO: 705081 - DNA, 75 bp, synthetic construct
  source 1..75: mol_type = other DNA
gggcaatatggtcgatctcgactctaacccgaccaagttgatcgaggtggtacatattggcaaacagatgctgat

SEQ ID NO: 705082 - DNA, 75 bp, synthetic construct
  source 1..75: mol_type = other DNA
atgaattacgaattactgaccactgaaaatgccccggtaaaaatgtggaccaaaggcgtgccggtagaagccgat

SEQ ID NO: 705083 - DNA, 75 bp, synthetic construct
  source 1..75: mol_type = other DNA
aaaagttagcggttcaactgcgtaaacgtaaccacagaaatgaggaattaaccgtgggtaaagaacctgaatgga

SEQ ID NO: 705084 - DNA, 75 bp, synthetic construct
  source 1..75: mol_type = other DNA
attgaaactggtgacccacgttttatactccctgttaccgactcaaacatgaagcgtcttattatcgaagaaaca

SEQ ID NO: 705085 - DNA, 75 bp, synthetic construct
  source 1..75: mol_type = other DNA
ggcggtattaaagagcgcttcgcccaactgcgcaaaatgggcattaaaacggtgatgattacgggtgataaccgt

SEQ ID NO: 705086 - DNA, 75 bp, synthetic construct
  source 1..75: mol_type = other DNA
gatgtttataagagacgggcgctggcctgttcgttgatgcatgacccggactttctttttctcgacgacccgact

SEQ ID NO: 705087 - DNA, 75 bp, synthetic construct
  source 1..75: mol_type = other DNA
tttgatttatgaagttgttgagtttgtaggccgctggtcgatgattgacgttttcgttatcgcggtgctctcggc

SEQ ID NO: 705088 - DNA, 75 bp, synthetic construct
  source 1..75: mol_type = other DNA
ccggcaccatcacgctaggtaaccgtcaggcatcggagtttatccctgcacagggcgtagaggaaaaaacgctgg

SEQ ID NO: 705089 - DNA, 75 bp, synthetic construct
  source 1..75: mol_type = other DNA
tcgcgacttggtattaatgtttggttcgatgaacaaacattggaaattggtgatagcttaagaaggaatatagat

SEQ ID NO: 705090 - DNA, 75 bp, synthetic construct
  source 1..75: mol_type = other DNA
caattccgatctgaccggttatggtcagtgggaatataacttccagggtaacaactctgaaggcgctgacgctca

SEQ ID NO: 705091 - DNA, 75 bp, synthetic construct
  source 1..75: mol_type = other DNA
tgacacggcatacagcgatgacttcttcgttggtcgtgttggcggcgttgctacctatcgtaactccaacttctt

SEQ ID NO: 705092 - DNA, 75 bp, synthetic construct
  source 1..75: mol_type = other DNA
ccggtaccatcaccctcggtaaccgtcaggcatcagagtttatccccgcgcagggcgtagaggaaaaaacgctgg

SEQ ID NO: 705093 - DNA, 75 bp, synthetic construct
  source 1..75: mol_type = other DNA
aactcaaatggcaatggggcaagtacaacaaatggctataacagataatgcaagtaaaaacactatccaacaacg

SEQ ID NO: 705094 - DNA, 75 bp, synthetic construct
  source 1..75: mol_type = other DNA
ctgttataacgattcaatggcggcgggcgcgatgggcgtactcaatgataatggtattgatgtaccgggtgagat

SEQ ID NO: 705095 - DNA, 75 bp, synthetic construct
  source 1..75: mol_type = other DNA
catggttttagcgaagtgctgtacgccgtgtcatccgccgctaacaacaacggcagcgcctttgccggattaagc

SEQ ID NO: 705096 - DNA, 75 bp, synthetic construct
  source 1..75: mol_type = other DNA
acggaatactttgatgattacctaagagccgtggcctgggcgcagcttttcgccagccttaaccgcgatgcgatg

SEQ ID NO: 705097 - DNA, 75 bp, synthetic construct
  source 1..75: mol_type = other DNA
aagcggtggcctgggcgcagctttttgccagccttaaccgcgatgcaatgatggaaaacgtagtaacagcgttgc

SEQ ID NO: 705098 - DNA, 75 bp, synthetic construct
  source 1..75: mol_type = other DNA
gtgtggattatgctgcactccggttcacgcggaattggtaatgccatcgggacttactttatcgatctggcgcaa

SEQ ID NO: 705099 - DNA, 75 bp, synthetic construct
  source 1..75: mol_type = other DNA
ggcctgggcgcagctttttgccagccttaaccgcgatgcgatgatggaaaacgtggtaacggcgttgcagagcat

SEQ ID NO: 705100 - DNA, 75 bp, synthetic construct
  source 1..75: mol_type = other DNA
aaacgcttgaaacgttgccgtcgcgtgatctggcgtactttatggaaggtacggaatactttgatgattacctga

SEQ ID NO: 705101 - DNA, 75 bp, synthetic construct
  source 1..75: mol_type = other DNA
taaagcgaaaaaactgttcagcgtggaagatcaaattcgtgccaccgcgcatgtggaatgccgtaaagatgccga

SEQ ID NO: 705102 - DNA, 75 bp, synthetic construct
  source 1..75: mol_type = other DNA
atcacggatgtggacaaaaacgcgctcacctcccgcgcgtatggtcgtgccgcagtggtcaccgatgtgggtatt

SEQ ID NO: 705103 - DNA, 75 bp, synthetic construct
  source 1..75: mol_type = other DNA
agctgtaattaccgacgtcggaatttcatttgccaaagaactggaaacggccggacaaaaatggtctcttggcgt

SEQ ID NO: 705104 - DNA, 75 bp, synthetic construct
  source 1..75: mol_type = other DNA
acctgtttaccactgctcttgacgttgatctgactcctgccagtggcttcacttctgacagcaaacgtcagtttg

SEQ ID NO: 705105 - DNA, 75 bp, synthetic construct
  source 1..75: mol_type = other DNA
aagccggttatcagtggttaacgcaaaaatatccgcgtttccttaataccaataactataaacacctgggaacgc

SEQ ID NO: 705106 - DNA, 75 bp, synthetic construct
  source 1..75: mol_type = other DNA
aaccttcaaagttcgtccgcaggcaaccgccggtgtatcctggcataatgacctgtttaccactgctcttgacat

SEQ ID NO: 705107 - DNA, 75 bp, synthetic construct
  source 1..75: mol_type = other DNA
gccggtgtgtcctggcacaacgacctgttcaccactgcacttgatgttgacctgacgccggccagcggattcacc

SEQ ID NO: 705108 - DNA, 75 bp, synthetic construct
  source 1..75: mol_type = other DNA
ccttcatgctcctgcacggaccatgccgttgatggaaccattacgtcaggcagcggagaaactggctcaggcgca

SEQ ID NO: 705109 - DNA, 75 bp, synthetic construct
  source 1..75: mol_type = other DNA
cagattaacgccaatggcacgctgcatttatgcgaagtcggcgtgtcgcattttacgccgccagagctacaaacc

SEQ ID NO: 705110 - DNA, 75 bp, synthetic construct
  source 1..75: mol_type = other DNA
atgaaaacaaatataaaagtatttacatcgacaggtgaattgaccactcttggccgtgaactgggcaaaggtggt

SEQ ID NO: 705111 - DNA, 75 bp, synthetic construct
  source 1..75: mol_type = other DNA
atcaggtattgcgtgaactgcaaccggtgctgaaaacgctcaacgagaagagcaacgcgctggtatttgaagcga

SEQ ID NO: 705112 - DNA, 75 bp, synthetic construct
  source 1..75: mol_type = other DNA
gatattcagtcgacattgcgtgaactgaatcgcagtatgcagggcttccagccgggttctgcggcttacaacaag

SEQ ID NO: 705113 - DNA, 75 bp, synthetic construct
  source 1..75: mol_type = other DNA
ccgactgcccgtggtgtgcgctggataatcaaggcgttatctattttattgatctcggcgaagaggtcattacca

SEQ ID NO: 705114 - DNA, 75 bp, synthetic construct
  source 1..75: mol_type = other DNA
tgcctggcgggtgctgctggttctggatgaaagtgtcattacccagacctggaacatcccgttccctgagcttga

SEQ ID NO: 705115 - DNA, 75 bp, synthetic construct
  source 1..75: mol_type = other DNA
agtggcggctcaggcgggatcgtggcgtgacctgccgccaatggattttgtgttttacgccaacacgggcaccga

SEQ ID NO: 705116 - DNA, 75 bp, synthetic construct
  source 1..75: mol_type = other DNA
ggaagtgaaggtggagacgttcggcaacaaattgcaggtcagcaatttgctggatatcgatccaaagggcggcgg

SEQ ID NO: 705117 - DNA, 75 bp, synthetic construct
  source 1..75: mol_type = other DNA
aggccgaatgaagcggtaacgccagcagacaggcaggcggtaatggcgaaaattgccgccaaacgacatcgactg

SEQ ID NO: 705118 - DNA, 75 bp, synthetic construct
  source 1..75: mol_type = other DNA
cggacgatgctcgaaaaaatgaaggacgaaattctcgggttaccggaagaagagaaacgcgctctggcagcactt

SEQ ID NO: 705119 - DNA, 75 bp, synthetic construct
  source 1..75: mol_type = other DNA
tgtgacccggcgcggcgttaaacaagtgaaaggatttggcgaccatctgactcaggcggttattgactggaaagc

SEQ ID NO: 705120 - DNA, 75 bp, synthetic construct
  source 1..75: mol_type = other DNA
gataagatcaacaaacttccgttgaatccgatgattgagcaggcgaccagcacgctgtcggaaagccagcgcacg

SEQ ID NO: 705121 - DNA, 75 bp, synthetic construct
  source 1..75: mol_type = other DNA
agctgcgtcagttcgccatgagtatcagcggttcggtgattttcggcagtaacggggaaatgcgtatcctgtctt

SEQ ID NO: 705122 - DNA, 75 bp, synthetic construct
  source 1..75: mol_type = other DNA
atgcgactgaaaccgctttgcctggcgtttgcgctgggcctgtacagtgcaggaacggcacaggccgggctgcag

SEQ ID NO: 705123 - DNA, 75 bp, synthetic construct
  source 1..75: mol_type = other DNA
agaaagctaaaagaatacgataaaaacgaagcgttgccagttgcttatctgcgtaaagaaattctttattatggg

SEQ ID NO: 705124 - DNA, 75 bp, synthetic construct
  source 1..75: mol_type = other DNA
gattgtggatcagtcgtcactgagtgtctcgcagtccctttttgcccagctgacggattacatcgcggtcgacat

SEQ ID NO: 705125 - DNA, 75 bp, synthetic construct
  source 1..75: mol_type = other DNA
cgaaagcgtcacgaacaaggccaccggcgcagaaaaagaccaggtcctgaaggatattaacctgatgtgggatgc

SEQ ID NO: 705126 - DNA, 75 bp, synthetic construct
  source 1..75: mol_type = other DNA
cactgcgtatggaggttcagattaaggaaaatgcgcttatttccgcacaacagcaaatccgctttatccgccagc

SEQ ID NO: 705127 - DNA, 75 bp, synthetic construct
  source 1..75: mol_type = other DNA
aaaatcgacagtaagaacccgcagccggagggcgcggagattgtgttaactgcgcctgagtacagcgctatgtat

SEQ ID NO: 705128 - DNA, 75 bp, synthetic construct
  source 1..75: mol_type = other DNA
ttgatctcgatttctatccaaatagccctgctattaccggtattcgtgagtttaatggttatcagattatcccga

SEQ ID NO: 705129 - DNA, 75 bp, synthetic construct
  source 1..75: mol_type = other DNA
atcaggtcttgcgtgaattgcaaccagtgctgaaaacgctcaatgagaagagcaacgcgctggtatttgaagcga

SEQ ID NO: 705130 - DNA, 75 bp, synthetic construct
  source 1..75: mol_type = other DNA
tttaggctcaaaacctatttatacttatgagtggaacgagcgtaaaaaaagagtggatgcagttgctagatattg

SEQ ID NO: 705131 - DNA, 75 bp, synthetic construct
  source 1..75: mol_type = other DNA
ataaagcttatatcagggttaagccagagccacctaagctaccgcgtaggccgagagttaaaaagggcagccacg

SEQ ID NO: 705132 - DNA, 75 bp, synthetic construct
  source 1..75: mol_type = other DNA
atcataggcaatactgaggcggttagctatatagagcggcttatttcagaacgtaaatcaaaacgagccgcaaaa

SEQ ID NO: 705133 - DNA, 75 bp, synthetic construct
  source 1..75: mol_type = other DNA
attttctcttttatgccaacaacggcagcgaggaggaaaaaatcgaggtattcggctgcgtccccatgttgtcgg

SEQ ID NO: 705134 - DNA, 75 bp, synthetic construct
  source 1..75: mol_type = other DNA
gtgcacttacagcgccatcaggatgcggttatgctcactgataaaatactggcatacaatcctgaagataatcag

SEQ ID NO: 705135 - DNA, 75 bp, synthetic construct
  source 1..75: mol_type = other DNA
gaaatgcagaacatggcggggagaagaagtctggccctggatattgccatttacagccgggggaataaatccctg

SEQ ID NO: 705136 - DNA, 75 bp, synthetic construct
  source 1..75: mol_type = other DNA
ttccacttgctgtgtggcatgacttctccggctctctggatacggcagaagattactatgcaacatactcaccat

SEQ ID NO: 705137 - DNA, 75 bp, synthetic construct
  source 1..75: mol_type = other DNA
atgcgaaagcattttaagacagcagaagttgttgtgggaaagaattgatgagacactttctgaggaaattgtaca

SEQ ID NO: 705138 - DNA, 75 bp, synthetic construct
  source 1..75: mol_type = other DNA
gaaatcatgaaatgtgccgaaatgctgatgcaggaagatgatgtcgaaatatgcgagaggattttaagacagcag

SEQ ID NO: 705139 - DNA, 75 bp, synthetic construct
  source 1..75: mol_type = other DNA
gtgcacttacagcgtcatcaggatgcggttatgcttactgataaaatactggcatacaatcctgaagataatcag

SEQ ID NO: 705140 - DNA, 75 bp, synthetic construct
  source 1..75: mol_type = other DNA
ggagcacgctggctactgggaccggaactgttacgtactggcgaccatgaacaggcacgccatgtactgaaagcg

SEQ ID NO: 705141 - DNA, 75 bp, synthetic construct
  source 1..75: mol_type = other DNA
aaattgtacagaaatgcagaaatatgaatggtgaatatgtctggccctggatattgccgttttcagcggcaggca

SEQ ID NO: 705142 - DNA, 75 bp, synthetic construct
  source 1..75: mol_type = other DNA
catgctgatgaattttcaccttactggtatgaactcggtctcctgcattttctgaacggggaacatgttaaggcc

SEQ ID NO: 705143 - DNA, 75 bp, synthetic construct
  source 1..75: mol_type = other DNA
tttcagcggcaggcatgaaacatactggcatacagggtaatgactccaacttactgatagtgttttatgttcaga

SEQ ID NO: 705144 - DNA, 75 bp, synthetic construct
  source 1..75: mol_type = other DNA
tccacttgctgtgcggcataacttctccggctctctggatactgcgtattccgctctattcgatcacggattggc

SEQ ID NO: 705145 - DNA, 75 bp, synthetic construct
  source 1..75: mol_type = other DNA
aagttgttgtgggaaagaattgatgagacactttctgaggaaattgtacagaaatgcagaaatattaacggtgaa

SEQ ID NO: 705146 - DNA, 75 bp, synthetic construct
  source 1..75: mol_type = other DNA
ctggctatcaaactacaccaccctgcaatatcgcggacaattcgatgttgttcgcccggtggtcaggaaactggt

SEQ ID NO: 705147 - DNA, 75 bp, synthetic construct
  source 1..75: mol_type = other DNA
agagtatcctgtcgcgctttgatgcggactggatagccagcgatgaagccagaatggaggccaagaatgatctct

SEQ ID NO: 705148 - DNA, 75 bp, synthetic construct
  source 1..75: mol_type = other DNA
tcaatcaactgaacatgcgggcagaccttgagacgtacgtgtttcaggataacctggctaccgcaatgcgacgtg

SEQ ID NO: 705149 - DNA, 75 bp, synthetic construct
  source 1..75: mol_type = other DNA
tgatcctgacacgctgccatctttccagaatccgaacgatacatggctgtttccgtgggtatcgaatgatgtcgt

SEQ ID NO: 705150 - DNA, 75 bp, synthetic construct
  source 1..75: mol_type = other DNA
gtgtataagtcgatcatcacctgcacgcagatactgaaagaccgcgagaagatagccggagagcatattccaatc

SEQ ID NO: 705151 - DNA, 75 bp, synthetic construct
  source 1..75: mol_type = other DNA
tgatccggacaccttgccatctttccagaatccgaacgatacatggctgtttccgtgggtatcgaatgatgtcgt

SEQ ID NO: 705152 - DNA, 75 bp, synthetic construct
  source 1..75: mol_type = other DNA
cagctggcaatccaggttcgtcagaaggtgaaaggtctggctcgcgcattccgccgcaatctgattctgggcgac

SEQ ID NO: 705153 - DNA, 75 bp, synthetic construct
  source 1..75: mol_type = other DNA
atgccattactgcgtgatgaagctgaaaagctgtctaataacgaacttgagcagggtgtgatcgagaccatcatc

SEQ ID NO: 705154 - DNA, 75 bp, synthetic construct
  source 1..75: mol_type = other DNA
cgttcagagcacctgcgtgcttaccgtgcgctgctgcgtacagtaaacgtaggtccgtctgaaatcatgatggag

SEQ ID NO: 705155 - DNA, 75 bp, synthetic construct
  source 1..75: mol_type = other DNA
tcgctggtgacaaggagtgctacgaaggagtggtaaggctgacgaaagacggtcaacgccttcgtaacatgatca

SEQ ID NO: 705156 - DNA, 75 bp, synthetic construct
  source 1..75: mol_type = other DNA
gaagcggtgaccgctgtcgctgaacatgtgcaggaaaaactgagcgccactgagcagcgcctcgctgagatggaa

SEQ ID NO: 705157 - DNA, 75 bp, synthetic construct
  source 1..75: mol_type = other DNA
aaaagctatccaataatgaacttgaacagggtgtgatcgaaactatcatcgatcgcgatgacctgtttgcgattc

SEQ ID NO: 705158 - DNA, 75 bp, synthetic construct
  source 1..75: mol_type = other DNA
tcataacgcccttgccggagggcttctctgtgcggacggccagtggcggcagattgtcaccattgaggacgccct

SEQ ID NO: 705159 - DNA, 75 bp, synthetic construct
  source 1..75: mol_type = other DNA
acgggtgtcggtcacggagtttatgagaacgtgaaagcgttttttccagccgtccgggagtttgtctacaacccc

SEQ ID NO: 705160 - DNA, 75 bp, synthetic construct
  source 1..75: mol_type = other DNA
accggcgtcggtcacggtgtctacgagaacgtgaaagcgttctttcctgccgtgcgggagtttgtctacaacccc

SEQ ID NO: 705161 - DNA, 75 bp, synthetic construct
  source 1..75: mol_type = other DNA
caagggtgagcgcaaaaaaccgaaaaagaattttttcagtgacgaggctatcgagaaactggaagaattattttt

SEQ ID NO: 705162 - DNA, 75 bp, synthetic construct
  source 1..75: mol_type = other DNA
aattgggatgaaagaagaggatgtgatggctttagcgactgccgctatggctgacatttgtacagggggcaatcc

SEQ ID NO: 705163 - DNA, 75 bp, synthetic construct
  source 1..75: mol_type = other DNA
ctgtctggagtacgacgccggagcaaccgacgtcacgcagtcgtttatgtcgattcgcaaaaccatgaccagcag

SEQ ID NO: 705164 - DNA, 75 bp, synthetic construct
  source 1..75: mol_type = other DNA
gctgaacgccgatccggaattttttatgcaccagaaacagtcgtccgcagcgctggaaagctatcttaatcgcct

SEQ ID NO: 705165 - DNA, 75 bp, synthetic construct
  source 1..75: mol_type = other DNA
tactcaacgatccgcgacgacaggccgcgcttttgttctggcagggctattccgtgccacaaatcgcggaacagt

SEQ ID NO: 705166 - DNA, 75 bp, synthetic construct
  source 1..75: mol_type = other DNA
gatgaatatttctggataccgaaatttcaggagttgcgtaaagtggcttccggtatggctattcacaaaaaatgg

SEQ ID NO: 705167 - DNA, 75 bp, synthetic construct
  source 1..75: mol_type = other DNA
tttgcccgcgagtcattgctgcgcgccctcaaaaccgggcaaaaccagatatttttatccgccagtaagacgcag

SEQ ID NO: 705168 - DNA, 75 bp, synthetic construct
  source 1..75: mol_type = other DNA
actcaccgcagaacagcgtgagcgttatctgcaagccagcgccgattgccaggcatcttcacccgccaacggaat

SEQ ID NO: 705169 - DNA, 75 bp, synthetic construct
  source 1..75: mol_type = other DNA
aaaggcaaaacctttacagcgaaaccgaaaccggatgcagagatcgcctcgctgttagcgaaacgttcctcttgc

SEQ ID NO: 705170 - DNA, 75 bp, synthetic construct
  source 1..75: mol_type = other DNA
ctgggcaataacggcgcaaaactgatttttctcggcaccaactccaacaccgcacagagccataacggcgacctg

SEQ ID NO: 705171 - DNA, 75 bp, synthetic construct
  source 1..75: mol_type = other DNA
tttgtcgagcctgatttaaaactaatgtctgaatacacgcgaaaaatgtttgtgctttgtacagtatttggatgt

SEQ ID NO: 705172 - DNA, 75 bp, synthetic construct
  source 1..75: mol_type = other DNA
tcatcttcggcatcatcaatatgatcatgcgtctggcacctattggtgcgttcggggcaatggcgtttactatcg

SEQ ID NO: 705173 - DNA, 75 bp, synthetic construct
  source 1..75: mol_type = other DNA
ttcggggcaatggcgtttaccatcggtaaatacggcgtcggcacactggtgcaactggggcagctgattatctgc

SEQ ID NO: 705174 - DNA, 75 bp, synthetic construct
  source 1..75: mol_type = other DNA
gcatctcgccacgttcaggttgcggaaatggtgatcgagaaggccaaacgcctggttgagcacaagaaagacgtt

SEQ ID NO: 705175 - DNA, 75 bp, synthetic construct
  source 1..75: mol_type = other DNA
attaaacaggcgttacgtttttgccgtatcaggcaatacattagttgcgatccattcggtgatattaacgttagt

SEQ ID NO: 705176 - DNA, 75 bp, synthetic construct
  source 1..75: mol_type = other DNA
ttcaaagatcactacggagtgcccgtcagagtcattcgttgggaaccggaaacacaacgggttatctacctccgc

SEQ ID NO: 705177 - DNA, 75 bp, synthetic construct
  source 1..75: mol_type = other DNA
atgttgcagatgaaacgcccgacggtgcagagctggaaacagcgcgacggctgggacagcgttgcccccatcagc

SEQ ID NO: 705178 - DNA, 75 bp, synthetic construct
  source 1..75: mol_type = other DNA
atttttatcagccagtaaaacgcaggcttacgtgtttcgcgaatacatcatccagtttgcacgactggtcgacgt

SEQ ID NO: 705179 - DNA, 75 bp, synthetic construct
  source 1..75: mol_type = other DNA
gaccagggcattgtcgccttcattatggatgtcatcccggcgagcgtcattggcgcatttgccagcggtaacatt

SEQ ID NO: 705180 - DNA, 75 bp, synthetic construct
  source 1..75: mol_type = other DNA
tatttcacgccaggatcgcttgccgacctgaagtttgaattactgaagcaggattacgcgagcgaaattcgaaac

SEQ ID NO: 705181 - DNA, 75 bp, synthetic construct
  source 1..75: mol_type = other DNA
ttcagttttcaatcgccttgtttttattggtgattttgatggctatattttaaggatttatgagaaatatgaggg

SEQ ID NO: 705182 - DNA, 75 bp, synthetic construct
  source 1..75: mol_type = other DNA
tgcgtggtggtggctccgccagccgtgccgggcggtaagttccgcattcttgagcgtcaccagtggcgcggaatg

SEQ ID NO: 705183 - DNA, 75 bp, synthetic construct
  source 1..75: mol_type = other DNA
ggcgctgctgtactggcagggattttccgtgccgcagattgccgccatgttgcagatgaaacgcccgacggtgca

SEQ ID NO: 705184 - DNA, 75 bp, synthetic construct
  source 1..75: mol_type = other DNA
atgaacaattacccaatgcaaattatggttgataacgacaccgctatgatggtgcaggctttcactgattccggt

SEQ ID NO: 705185 - DNA, 75 bp, synthetic construct
  source 1..75: mol_type = other DNA
tcgttgatagcgacaccgctatgatggtgcaaagcttcattgatgcaggtattagcattgactttgacaggctgt

SEQ ID NO: 705186 - DNA, 75 bp, synthetic construct
  source 1..75: mol_type = other DNA
gtgacgaggctatcgaaaaagctggagcagattttctttgagcagtctttcgactatcagttgcactggtatcgc

SEQ ID NO: 705187 - DNA, 75 bp, synthetic construct
  source 1..75: mol_type = other DNA
cgggtgaactgtttaaccggggacgcgccagcgccgccgaacgcgtggaaatcgacgtcagtcataacgcccttg

SEQ ID NO: 705188 - DNA, 75 bp, synthetic construct
  source 1..75: mol_type = other DNA
aacaaatacagcgttagccctgaaaaatatctcaaggcagctatagcaattttgtatagcgataatattctggtg

SEQ ID NO: 705189 - DNA, 75 bp, synthetic construct
  source 1..75: mol_type = other DNA
aaccgatacagcgttagccctgaaaaatatctcaaggcagctatagcaatcttgtatagcgacagtattttggcg

SEQ ID NO: 705190 - DNA, 75 bp, synthetic construct
  source 1..75: mol_type = other DNA
cgtgagctctggctgagcatggatgacctcacccggcatatcatgttttttgccaccaccggtggcggtaaaaca

SEQ ID NO: 705191 - DNA, 75 bp, synthetic construct
  source 1..75: mol_type = other DNA
ccaactttcagaaactgaagcgcgtcgctgggggcatgtcgtcacaggagcatttacgcacgacctatttttcga

SEQ ID NO: 705192 - DNA, 75 bp, synthetic construct
  source 1..75: mol_type = other DNA
atgaacgaatatgaattacagattttcattgatagcgacactgctacgatggtgcaggctttcactgattccggt

SEQ ID NO: 705193 - DNA, 75 bp, synthetic construct
  source 1..75: mol_type = other DNA
gtagcccgcattgctgaaatgctgggcgagaaagttgcaactgttcacagctggaagaaacgcgacaagtggggt

SEQ ID NO: 705194 - DNA, 75 bp, synthetic construct
  source 1..75: mol_type = other DNA
tcgttgataacgacaccgctatgatgattcaggctttcactgatgtaggtgttagcattgactttgacaggctgt

SEQ ID NO: 705195 - DNA, 75 bp, synthetic construct
  source 1..75: mol_type = other DNA
ctgaaaaatatctcaaggcggctatagcaattttgtacgctgacaatattctggtgacggattctatgaggattc

SEQ ID NO: 705196 - DNA, 75 bp, synthetic construct
  source 1..75: mol_type = other DNA
attaaaactggtgacccgcgttttatgtttcccgttaccgactcaaacatgaaaaggcttgttatcgaagaaacg

SEQ ID NO: 705197 - DNA, 75 bp, synthetic construct
  source 1..75: mol_type = other DNA
tcagctcatcatgaaggagcacaaagaagggaaagatttcaaagagattgacctgctggcgcgccagtcggagcg

SEQ ID NO: 705198 - DNA, 75 bp, synthetic construct
  source 1..75: mol_type = other DNA
accgacatcaccagctcgtttatggctatccgcaagaccatgaccagcagcggacgcagcgccacttatgaggcc

SEQ ID NO: 705199 - DNA, 75 bp, synthetic construct
  source 1..75: mol_type = other DNA
accctaacgtcgccaaccgcaacaaatgcccacgccgtcagccggaaaagaatgttttcaccgatgaacagattg

SEQ ID NO: 705200 - DNA, 75 bp, synthetic construct
  source 1..75: mol_type = other DNA
gtgcgctgttcaaccgtggacgcaacaaagccgacaaggtggacatcgacctgtcccacagcaatcttgcccccg

SEQ ID NO: 705201 - DNA, 75 bp, synthetic construct
  source 1..75: mol_type = other DNA
tcgttgataacgacaccgctatgatggtgcaaagcttcagtgatgcaggtattagcattgattttgacaggctgt

SEQ ID NO: 705202 - DNA, 75 bp, synthetic construct
  source 1..75: mol_type = other DNA
gcgtcggtattcccgttcgaggagctacagcgctgcatggtcgatgcgatggaagaatgggaggactttgcgccg

SEQ ID NO: 705203 - DNA, 75 bp, synthetic construct
  source 1..75: mol_type = other DNA
tggccggtggcaaattcaggatccttgagcgtcaccagtggaaaggcatggactttgccacccaggcagaatcca

SEQ ID NO: 705204 - DNA, 75 bp, synthetic construct
  source 1..75: mol_type = other DNA
atcagtattgattttgacaagttgttagctttgatggctgataatgcagaaaacatttctgactttattcagtcg

SEQ ID NO: 705205 - DNA, 75 bp, synthetic construct
  source 1..75: mol_type = other DNA
accgcatccgcgatatcctgaaatcccgccagattggcgcaacgttttatttttcccgcgaggcgctgctgcgcg

SEQ ID NO: 705206 - DNA, 75 bp, synthetic construct
  source 1..75: mol_type = other DNA
cgcccgtttggctggcgcgaagtatggatcggttatgacccggcgaaaggtacgcagaacggcgacagtgccgga

SEQ ID NO: 705207 - DNA, 75 bp, synthetic construct
  source 1..75: mol_type = other DNA
ttcaacaagggacgctcagacaagagcgagcgcgtcgatatcgatatcagtcacgccgctctcgcgaagggcgtc

SEQ ID NO: 705208 - DNA, 75 bp, synthetic construct
  source 1..75: mol_type = other DNA
tttgtttcacttttatctgaaggtaatataaagacactacttacattatcaactaaatacgatacgcttttaatt

SEQ ID NO: 705209 - DNA, 75 bp, synthetic construct
  source 1..75: mol_type = other DNA
tttaacattggttcaattagtggtaatcaagtgcagataggtgagcataaccatatgctggtaaacatcagcatc

SEQ ID NO: 705210 - DNA, 75 bp, synthetic construct
  source 1..75: mol_type = other DNA
ggccgaccgcatcgtggtgatgaacggcgaccacgtgcagcaggtcgggcacccggagtatctgtacgccaaccc

SEQ ID NO: 705211 - DNA, 75 bp, synthetic construct
  source 1..75: mol_type = other DNA
tgaagaggcgaagcgtgatgcgctgattaatcaggcggcagaaaagaaaaccagcctgctgaaacagactggaga

SEQ ID NO: 705212 - DNA, 75 bp, synthetic construct
  source 1..75: mol_type = other DNA
ccttcctgaaaatgtgacttctgtttctcctgatggcgaataccaacgctggaatggcagtcagtgggtgacaga

SEQ ID NO: 705213 - DNA, 75 bp, synthetic construct
  source 1..75: mol_type = other DNA
tgattcggcaggttatttagcaatatcagaaccgaaggttgacaaattaattagtggttttaagttgcttaacgt

SEQ ID NO: 705214 - DNA, 75 bp, synthetic construct
  source 1..75: mol_type = other DNA
ccggacgaaaatgatgtactgatgcagaaggcggcgggcctcgctggtggagtccgtttcggggaggagggaagg

SEQ ID NO: 705215 - DNA, 75 bp, synthetic construct
  source 1..75: mol_type = other DNA
ccgggctgacgtacgctgtactcagcctgtttttttgcgatccggatatgcatccctctgatttcagtctgcttg

SEQ ID NO: 705216 - DNA, 75 bp, synthetic construct
  source 1..75: mol_type = other DNA
agaaagcgacaggagttgccggaggcgtccggttcggagggacggagggcgcgatatttcaccttctgcggatgt

SEQ ID NO: 705217 - DNA, 75 bp, synthetic construct
  source 1..75: mol_type = other DNA
tgcttgccgggatgacatccaccgaatatgccgactggcaacatttttaccgcacgcattattttcaggataccc

SEQ ID NO: 705218 - DNA, 75 bp, synthetic construct
  source 1..75: mol_type = other DNA
atggggagtcctgactggcgcgccatgcttgccgggatgacatccaccgaatatgccgactggcttcttttttac

SEQ ID NO: 705219 - DNA, 75 bp, synthetic construct
  source 1..75: mol_type = other DNA
tgcttgccgggatgacatccaccgaatatgccgactggcaccccgtttttaccgcacgcattattttcaggatac

SEQ ID NO: 705220 - DNA, 75 bp, synthetic construct
  source 1..75: mol_type = other DNA
gaagctaaatcacttttgacaaaattcctggaacatccactgacttcatcagtagttggtggtgttgctggctct

SEQ ID NO: 705221 - DNA, 75 bp, synthetic construct
  source 1..75: mol_type = other DNA
acgagtttatctatcatgagatgatgacccatgttccgctactggcccacggtcacgcgaaacatgtgctgatta

SEQ ID NO: 705222 - DNA, 75 bp, synthetic construct
  source 1..75: mol_type = other DNA
cttttatcaggcggcaatcccgacctattacggcggcatcatgacctttgcatgggcgacagataacgacgcctt

SEQ ID NO: 705223 - DNA, 75 bp, synthetic construct
  source 1..75: mol_type = other DNA
tgaaatgccgttattacaatccggcaatccatacggcagcttttgccttacctcagtatctgcaagacgcactgg

SEQ ID NO: 705224 - DNA, 75 bp, synthetic construct
  source 1..75: mol_type = other DNA
tgaaatgccgttattacaacccggcaatccacacggcagcgtttgccttaccccagtatctgcaagacgcactgg

SEQ ID NO: 705225 - DNA, 75 bp, synthetic construct
  source 1..75: mol_type = other DNA
ggtcacgctaaacacgtgttaatcattggcggcggcgacggcgcgatgttacgtgaagtaagccgacataaaaac

SEQ ID NO: 705226 - DNA, 75 bp, synthetic construct
  source 1..75: mol_type = other DNA
gttgagtcaatcacgatggtggaaatcgatgcgggtgtcgtgtcgttctgccgtcagtatctacccaaccataac

SEQ ID NO: 705227 - DNA, 75 bp, synthetic construct
  source 1..75: mol_type = other DNA
tcgtatattagctcaggttcaactccttctacccgtgcgagcgatatggtaagtattacgactaaaaacaacctt

SEQ ID NO: 705228 - DNA, 75 bp, synthetic construct
  source 1..75: mol_type = other DNA
ggtggtgtgacacaggacaaaaacatccgctttggtggtcagacatccgatggaacgcgccacttgttcggacat

SEQ ID NO: 705229 - DNA, 75 bp, synthetic construct
  source 1..75: mol_type = other DNA
tactggagaacgtcatctatttggtcatgtcagaaatgttcgagtatggcacaaagcattaactgatacgcaatt

SEQ ID NO: 705230 - DNA, 75 bp, synthetic construct
  source 1..75: mol_type = other DNA
tgaaatgccgttattacaacccagcaatccacacggcagcgtttgccttacctcagtatttgcaagacgcactgg

SEQ ID NO: 705231 - DNA, 75 bp, synthetic construct
  source 1..75: mol_type = other DNA
acctttgatgtgatcatctccgactgtaccgatcccatcggtcccggcgaaagcctgttcacctcagcattttat

SEQ ID NO: 705232 - DNA, 75 bp, synthetic construct
  source 1..75: mol_type = other DNA
attgtgttgcacagcgcgctcagtgccgaagagcaggatgaagacgatccgtatgccgacttcaaagtgcctgat

SEQ ID NO: 705233 - DNA, 75 bp, synthetic construct
  source 1..75: mol_type = other DNA
ccggaggcagaggaagggcaggcggagacgccggacgaaaatgatgtactgatgcagaaggcggcgggcctcgcc

SEQ ID NO: 705234 - DNA, 75 bp, synthetic construct
  source 1..75: mol_type = other DNA
aggcagcacagcttgcgacagacggtatctcagggatggtaaataacatcacggagatgctgaacggaaataaag

SEQ ID NO: 705235 - DNA, 75 bp, synthetic construct
  source 1..75: mol_type = other DNA
aatatcaaaagttcttatgaatgccgcgattgtcaacgggatcaagacggcggcaaacagtatgtccggtgcagg

SEQ ID NO: 705236 - DNA, 75 bp, synthetic construct
  source 1..75: mol_type = other DNA
actggtgatgctgggagctgccgcatggtacacgctgtaccagaatcaggaacaggccagggagtctgcgcgcca

SEQ ID NO: 705237 - DNA, 75 bp, synthetic construct
  source 1..75: mol_type = other DNA
agaatataaagctcaggtgaagcagcttatcgaaatgaaccggatcaccattgccaatggcgatatcggttttaa

SEQ ID NO: 705238 - DNA, 75 bp, synthetic construct
  source 1..75: mol_type = other DNA
aaacgcagttgattaatggtcgtctggcgattgctcgcttgttggtcgataacaatagcgaaggtgaatacgcca

SEQ ID NO: 705239 - DNA, 75 bp, synthetic construct
  source 1..75: mol_type = other DNA
agaagcaggaactgctgcgtaacgcggccctgattgaccagcaaaaaatccgggaacagttgcgatcccgggaag

SEQ ID NO: 705240 - DNA, 75 bp, synthetic construct
  source 1..75: mol_type = other DNA
cgctgggtgaactgaaaaccctgtcggagatacagaagcaggaactgctgcgtaacgcggccctgattgaccagc

SEQ ID NO: 705241 - DNA, 75 bp, synthetic construct
  source 1..75: mol_type = other DNA
cctgatgacatctacgtttcccctagccaaatccgccgtttcaccctccgcactggtgataccatctctggtaag

SEQ ID NO: 705242 - DNA, 75 bp, synthetic construct
  source 1..75: mol_type = other DNA
cctgatgacatctacgttccccctagccaaacccgccgtttcaccctccgcactggtgataccatctctggtaag

SEQ ID NO: 705243 - DNA, 75 bp, synthetic construct
  source 1..75: mol_type = other DNA
tgcggcagaggcgggttcggtgatcacccagttcagtcaggcgctggcacagggggtgttgcgcggcgaggaatt

SEQ ID NO: 705244 - DNA, 75 bp, synthetic construct
  source 1..75: mol_type = other DNA
atcgcggcgaagtccgggacggttgcccttgcagccgcacaggcagatgcggctgttcaggtgcagcgtaaggcg

SEQ ID NO: 705245 - DNA, 75 bp, synthetic construct
  source 1..75: mol_type = other DNA
gtctggtgtattccccggtctaccatatcgccattcagaatgacgggactaatggccagatagggccggaggcgg

SEQ ID NO: 705246 - DNA, 75 bp, synthetic construct
  source 1..75: mol_type = other DNA
atgaaatgccatgatgcagtgcaatttccttatttatataacgacatattgttttttatatactttctgaaatgt

SEQ ID NO: 705247 - DNA, 75 bp, synthetic construct
  source 1..75: mol_type = other DNA
tcggatttcagtctgctggcaccagagcagaaggaagagcagatcgggatgccggatggggaagatatgctgatg

SEQ ID NO: 705248 - DNA, 75 bp, synthetic construct
  source 1..75: mol_type = other DNA
cggatttcagtctgctggctccccggcgagaggaagcgcagacggagatgccggatgaggaagacatgctgatgc

SEQ ID NO: 705249 - DNA, 75 bp, synthetic construct
  source 1..75: mol_type = other DNA
actgtgtctggttaccgacgccaccgcgccagcaggtgccaacattgaacagttcatttttgcgggtaaaacaat

SEQ ID NO: 705250 - DNA, 75 bp, synthetic construct
  source 1..75: mol_type = other DNA
tacatcattgcgcagcaggacaataacagtcaggctatgcagtggctgacccggttgcgggataactctcatcgc

SEQ ID NO: 705251 - DNA, 75 bp, synthetic construct
  source 1..75: mol_type = other DNA
atatgccgactggcgacgtttttaccgcacgcattattttcacgatacccagctggatatgcatttttccgggct

SEQ ID NO: 705252 - DNA, 75 bp, synthetic construct
  source 1..75: mol_type = other DNA
gcaggacttgccggaggcatccggtttggtggggaaggagggggcgatatttcaccttctgcggatgtggtggat

SEQ ID NO: 705253 - DNA, 75 bp, synthetic construct
  source 1..75: mol_type = other DNA
gtactcagcctgtttttttgcgatccggatatgcatccctctgatttcagtctgcttgccccccggcgtgaggaa

SEQ ID NO: 705254 - DNA, 75 bp, synthetic construct
  source 1..75: mol_type = other DNA
aaccgatacagcgttagccctgaaaaatatctcaaggcggctatagcaattttgtacgctgacaatattttggtg

SEQ ID NO: 705255 - DNA, 75 bp, synthetic construct
  source 1..75: mol_type = other DNA
atctaccgtttattgctgattggcctcggaacgccaatggtgatttacggcctggtttgcccgctcaccatcgaa

SEQ ID NO: 705256 - DNA, 75 bp, synthetic construct
  source 1..75: mol_type = other DNA
tgcggagcagtacagaggatgaagccatgctgatgatggtgtctgagggaattgcaggaggtgtacgctatggcg

SEQ ID NO: 705257 - DNA, 75 bp, synthetic construct
  source 1..75: mol_type = other DNA
gcctgactggcgcgccatgcttgccgggatgacatccaccgaatatgccgactggcgacatttttaccgctacgc

SEQ ID NO: 705258 - DNA, 75 bp, synthetic construct
  source 1..75: mol_type = other DNA
gtgtgaggaagagcagacggagatgccggacgaggaagaaatgctgatgcagaaagcgacaggagttgccggagg

SEQ ID NO: 705259 - DNA, 75 bp, synthetic construct
  source 1..75: mol_type = other DNA
tggtctgagtcagcgtcaggaagccgaaaataaagcaaaggatgatttcagagtcaagaaagaagaagcggtagc

SEQ ID NO: 705260 - DNA, 75 bp, synthetic construct
  source 1..75: mol_type = other DNA
ctgtcttatattaacgactatggtggtcgcccggtactgtcgtttatctgtaatggcagccgttgctctgtgaaa

SEQ ID NO: 705261 - DNA, 75 bp, synthetic construct
  source 1..75: mol_type = other DNA
aatggtggttccgccgggggagattgtgctaacacatccagattgcagggatacgttgcaggggcattgattagc

SEQ ID NO: 705262 - DNA, 75 bp, synthetic construct
  source 1..75: mol_type = other DNA
tatgggcttaaacgtaaaatggcttgattataaaagaaataattttaatatttctgttgaggatgttgaaagatt

SEQ ID NO: 705263 - DNA, 75 bp, synthetic construct
  source 1..75: mol_type = other DNA
acagaacaatattttgccttactccgctcgtctgaagtcaactcagaagtccgtcaatccgggactggtgagggc

SEQ ID NO: 705264 - DNA, 75 bp, synthetic construct
  source 1..75: mol_type = other DNA
gtgcagactgccctgcgcaccctgcacggcgtcattaccagctttaaacacctctcctcgtcacaggacgaagcc

SEQ ID NO: 705265 - DNA, 75 bp, synthetic construct
  source 1..75: mol_type = other DNA
ggcgacgacgcgcctgcggtgttccgcaagggcgtactgattaccggcgtgacggccagcgcggcgcgtgaccgc

SEQ ID NO: 705266 - DNA, 75 bp, synthetic construct
  source 1..75: mol_type = other DNA
gagccgcagccgccgcaggaagattacacctttgaaggttaccgcaacgccgacggcagcgtgggcaccaaaaac

SEQ ID NO: 705267 - DNA, 75 bp, synthetic construct
  source 1..75: mol_type = other DNA
aagaaacaaatcctgaggataattttgtcttaaaattctcaccggaagaaatcaatgagatgctcctggattaca

SEQ ID NO: 705268 - DNA, 75 bp, synthetic construct
  source 1..75: mol_type = other DNA
ggaaaaaattgcgaaacaaaatgcgaagaccattgaggagaagaatagtgaaaaaaacaagaaagaaacaaatcc

SEQ ID NO: 705269 - DNA, 75 bp, synthetic construct
  source 1..75: mol_type = other DNA
acctttaaagatttcgacggtacttttacctttgacgaaaaaaatccggctgccgataaagtgaatgtgacaatt

SEQ ID NO: 705270 - DNA, 75 bp, synthetic construct
  source 1..75: mol_type = other DNA
ttgtacggttgtggcgtggcgattaacgcaccggcggcagttgtgcctatccgtaccattcacaatatttcgctg

SEQ ID NO: 705271 - DNA, 75 bp, synthetic construct
  source 1..75: mol_type = other DNA
gcccgactggggacggggaaatgagaaattcccgacagagacggttgattacagtgtgttgcaacgagcattaag

SEQ ID NO: 705272 - DNA, 75 bp, synthetic construct
  source 1..75: mol_type = other DNA
tctggcagcctgagttcacagataaaacactctccaggaaacccggggcggttcacaacgggggttcgggttgca

SEQ ID NO: 705273 - DNA, 75 bp, synthetic construct
  source 1..75: mol_type = other DNA
tccgtctggagggtgacctgctcagaacagaggttgccggtatgtctctgacgacaggggtgtatggtgctgcag

SEQ ID NO: 705274 - DNA, 75 bp, synthetic construct
  source 1..75: mol_type = other DNA
ccctgagtcgcccgcttcaggccggcgcctttaactacaccctgaaccgtgacagcgatgaagactggtacctgc

SEQ ID NO: 705275 - DNA, 75 bp, synthetic construct
  source 1..75: mol_type = other DNA
ttcggtactctggcgattatcggtacgctgcaactcggagacagttctgcgtatgaagtcgcgcaagtacaaccg

SEQ ID NO: 705276 - DNA, 75 bp, synthetic construct
  source 1..75: mol_type = other DNA
tgcgcattatcaaaagatgattaatgccaaactgacggcgcaaaatgaagccaatgaacgttcaaccgctgatca

SEQ ID NO: 705277 - DNA, 75 bp, synthetic construct
  source 1..75: mol_type = other DNA
ctgaacggcggtgagcagtgggtacatgaaggcgggattgcaacggttaccgtcattaatgagaagggctggcag

SEQ ID NO: 705278 - DNA, 75 bp, synthetic construct
  source 1..75: mol_type = other DNA
ctacgcgacagtgcaaaacacagtgtgcgtgaactgccggtgaactggtgggtacagccttctgttatccgcacc

SEQ ID NO: 705279 - DNA, 75 bp, synthetic construct
  source 1..75: mol_type = other DNA
cgttacgaagtgcggctggagccgcgtatggcgctgctggcccgcagccgccagaatgccatttaccagaaccag

SEQ ID NO: 705280 - DNA, 75 bp, synthetic construct
  source 1..75: mol_type = other DNA
cagcgctcttcgcgggtgataccacagcaatcatgggaggaacgctgctgattggcgtctgctttgtgttgataa

SEQ ID NO: 705281 - DNA, 75 bp, synthetic construct
  source 1..75: mol_type = other DNA
tgctgctgattacctttgcgctttcggctctctcaccggtcgatcgcgtactacaaatcgttggcgatcacgcca

SEQ ID NO: 705282 - DNA, 75 bp, synthetic construct
  source 1..75: mol_type = other DNA
atgttactcaccgatctccttcacggtaatacgcacgagcaactgagtaccccgttccgctacgatatccagttt

SEQ ID NO: 705283 - DNA, 75 bp, synthetic construct
  source 1..75: mol_type = other DNA
gctcacccttccgctacgacattgagtttaccagtaccgataaagccatcgcgccggagtcggtactgatgcagg

SEQ ID NO: 705284 - DNA, 75 bp, synthetic construct
  source 1..75: mol_type = other DNA
aacttcctgcaaaaaggcgacaaggaggcagcggaaagcggcgcgttttatgcccgtatccgtcacgaacgctac

SEQ ID NO: 705285 - DNA, 75 bp, synthetic construct
  source 1..75: mol_type = other DNA
gtaaacatttcagcggaaaaaatcgatgaaataaaaaatagcaaagatttcttttcaaatattgtaaatataata

SEQ ID NO: 705286 - DNA, 75 bp, synthetic construct
  source 1..75: mol_type = other DNA
atgaaattgaagattactcccagcatctggcttaccgcatggttaaacgtttcttccctgtctggccgaagctac

SEQ ID NO: 705287 - DNA, 75 bp, synthetic construct
  source 1..75: mol_type = other DNA
atgcttaaaagcggtgatgacgatgatgaaattgaggattattcccagcatctggcttaccgcatggttaaacgc

SEQ ID NO: 705288 - DNA, 75 bp, synthetic construct
  source 1..75: mol_type = other DNA
actgggggatcattggtgccatcgtcttcaggggcatctttgtcgccatcggtacgagcctgctgagtctggggc

SEQ ID NO: 705289 - DNA, 75 bp, synthetic construct
  source 1..75: mol_type = other DNA
ccggcatggtcgtatacgttcagcctggcagacttcgtcggcgacaaggggcgcgggctgcaagtagtcgagggt

SEQ ID NO: 705290 - DNA, 75 bp, synthetic construct
  source 1..75: mol_type = other DNA
acggctacccgtcattaaaacgcgtagtaggggaaacagtagacgttattcactctgatgatgtgacctgcgtca

SEQ ID NO: 705291 - DNA, 75 bp, synthetic construct
  source 1..75: mol_type = other DNA
gttgtcgcgatggcttttgccggtttcctttttgtgcatcacggagccgaggttgccagcctgtttgtcacgggt

SEQ ID NO: 705292 - DNA, 75 bp, synthetic construct
  source 1..75: mol_type = other DNA
cccaaccatccctgtatgggcgtttacatctgtgatgcaaaatgccattaaccatctacaggatggggggaagat

SEQ ID NO: 705293 - DNA, 75 bp, synthetic construct
  source 1..75: mol_type = other DNA
acggtattgctgagcaatacgccgcattatgacactttctacggtggtgcgattccggacgaatggtttagcggc

SEQ ID NO: 705294 - DNA, 75 bp, synthetic construct
  source 1..75: mol_type = other DNA
gaatttatgtcaaacctgaccttcctgaggcataccgacaatatttactgcctctggcgcagggtattacgccca

SEQ ID NO: 705295 - DNA, 75 bp, synthetic construct
  source 1..75: mol_type = other DNA
tggaaagcaaactccgcaccgcaatcaaaaaggatgacaatcctgaggaaatccaggcgaggttacagcaacata

SEQ ID NO: 705296 - DNA, 75 bp, synthetic construct
  source 1..75: mol_type = other DNA
aagctttcacctgaagcagaagtccactgggagacgatgcgtgagaactggctgagatacacactcccaggtagt

SEQ ID NO: 705297 - DNA, 75 bp, synthetic construct
  source 1..75: mol_type = other DNA
aaactttcccctgaagctgcagagttttgggaaaataaacgtgatatctggatttctttaccaataaatgatcct

SEQ ID NO: 705298 - DNA, 75 bp, synthetic construct
  source 1..75: mol_type = other DNA
tttaacctagctgaaatgacggaatatgttccagcagaagaggttgatggtcgatacatccgcgatgaaacgatg

SEQ ID NO: 705299 - DNA, 75 bp, synthetic construct
  source 1..75: mol_type = other DNA
acaatgaagcagatctcggataagattggtgcctctgtagcagaaggtattgcaacgaaacatggggtgagtgcg

SEQ ID NO: 705300 - DNA, 75 bp, synthetic construct
  source 1..75: mol_type = other DNA
cctgcgtaatctcgacctgattatgggttgtgaacgccgggtcgtttacgatttcgtcaacgtcattcagggcga

SEQ ID NO: 705301 - DNA, 75 bp, synthetic construct
  source 1..75: mol_type = other DNA
atatgctgaatgccgggatagcccgcaaaatggtgctggaactgacaggattgtcggaagatcaacttaagatgc

SEQ ID NO: 705302 - DNA, 75 bp, synthetic construct
  source 1..75: mol_type = other DNA
aaaaaagcccccatggcaaattgcttttcatttccggaaatgaaaacttagtaaacatttcagcggaaaaaatcg

SEQ ID NO: 705303 - DNA, 75 bp, synthetic construct
  source 1..75: mol_type = other DNA
tctaaacaaagcattaacctggacaggttctccgattctattcgcaacaaaaacttcagtgatgatgatgtaagg

SEQ ID NO: 705304 - DNA, 75 bp, synthetic construct
  source 1..75: mol_type = other DNA
tatccaatactaatgcgtttaaagaagcatcgtcgaaaatgaaccaggcgacacagacgatggcgcaaaatattt

SEQ ID NO: 705305 - DNA, 75 bp, synthetic construct
  source 1..75: mol_type = other DNA
tgggaagaagccgaacaaaaacgtaaagcggcgctggcagcagaacgcaagcgcgaagaacaggaacaaaaatga

SEQ ID NO: 705306 - DNA, 75 bp, synthetic construct
  source 1..75: mol_type = other DNA
agggttgaggtgctggagcaggaggtgtggggcatgttgctggcttataagctgatacgacgtgaggcaaccaaa

SEQ ID NO: 705307 - DNA, 75 bp, synthetic construct
  source 1..75: mol_type = other DNA
ttttcaaaatatacaggtgatgtacgccagatggtaacggctgctgctggtactgctcgcggtgggcgtaaggta

SEQ ID NO: 705308 - DNA, 75 bp, synthetic construct
  source 1..75: mol_type = other DNA
tgcgcccgctatatgacgcgctgtttgaaatgttgggctttgagaaagtcgagaagctgattgagcgcaacgtta

SEQ ID NO: 705309 - DNA, 75 bp, synthetic construct
  source 1..75: mol_type = other DNA
ttaagccagaaagtagacccgtatctgcgcccgctgtacgacgcgctgtttgaaatgctgggctttgagaaagtc

SEQ ID NO: 705310 - DNA, 75 bp, synthetic construct
  source 1..75: mol_type = other DNA
cggcagacattctgcgtagcctgtatgtcgatactgccccgatgcgcggtcagattcaggatatcgaaccggaac

SEQ ID NO: 705311 - DNA, 75 bp, synthetic construct
  source 1..75: mol_type = other DNA
cgcgacaatcgcggaatgttccttattgataaggatgcggaagaattcttccagtttgtgacaagtctgtccgga

SEQ ID NO: 705312 - DNA, 75 bp, synthetic construct
  source 1..75: mol_type = other DNA
accggtgatgtacagactgccgcccgatatcagagcatgattgacgccagacagacagccgctgccaatgcgcaa

SEQ ID NO: 705313 - DNA, 75 bp, synthetic construct
  source 1..75: mol_type = other DNA
tatccggtcaggccagcggcctgctgctggaaaatggcggcagctttacggttaatgccggaggactggccagca

SEQ ID NO: 705314 - DNA, 75 bp, synthetic construct
  source 1..75: mol_type = other DNA
aaccgtgacagcgatgaagactggtacctgcgcagtgaaaatgcctatcgttctgaagtcccccagtatgcctcc

SEQ ID NO: 705315 - DNA, 75 bp, synthetic construct
  source 1..75: mol_type = other DNA
aaccgtgacagcgatgaagactggtacctgcgcagtgaaaatgcatatcgttctgaagtccccccgtatgcctcc

SEQ ID NO: 705316 - DNA, 75 bp, synthetic construct
  source 1..75: mol_type = other DNA
cagccagtaataccgccatcagcagcggcggtctccagtttgtaggtgccgggggaaaggctacagacacaataa

SEQ ID NO: 705317 - DNA, 75 bp, synthetic construct
  source 1..75: mol_type = other DNA
ccaaactgctggcagcaagaaaatgcggatgcggcgatggaaaaatccgtcgagctggtaaaggcatatgttcgt

SEQ ID NO: 705318 - DNA, 75 bp, synthetic construct
  source 1..75: mol_type = other DNA
caaaaagcgtttattgcccgtggcctgacagaggcgttaacgcgcgtgattgcgatagtggtacagcctggcgtt

SEQ ID NO: 705319 - DNA, 75 bp, synthetic construct
  source 1..75: mol_type = other DNA
gagcttatcggccccgaaaatcgtagcagttgcctggcggtaattgaagaagtgatgctcgatgaaccgcagtac

SEQ ID NO: 705320 - DNA, 75 bp, synthetic construct
  source 1..75: mol_type = other DNA
ggccaggataacgccggttatgtgaagttcgggcatggcagtacacaacatgtgcgtgccggcttccgtctgggc

SEQ ID NO: 705321 - DNA, 75 bp, synthetic construct
  source 1..75: mol_type = other DNA
gggtacagccttccgttatccgcaccttcagctcccggggtgatatgcgtgtggggacctccactgcaggcagcg

SEQ ID NO: 705322 - DNA, 75 bp, synthetic construct
  source 1..75: mol_type = other DNA
ctgcgtgacagtgcaaaacacagtgtgcgtgaactgccggtgaactggtgggtacagccttccgttatccgtgtc

SEQ ID NO: 705323 - DNA, 75 bp, synthetic construct
  source 1..75: mol_type = other DNA
aaccgtgacagcgatgaagactggtacctgcgcagtgaacatgcatatcgttctgaagtcccccagtatgcctcc

SEQ ID NO: 705324 - DNA, 75 bp, synthetic construct
  source 1..75: mol_type = other DNA
ggggctggcgaccagcggtaagggtattcaggtggtggaagccattaacggtgccaccacggaggaaggggcctt

SEQ ID NO: 705325 - DNA, 75 bp, synthetic construct
  source 1..75: mol_type = other DNA
ggctggctgggttcactggaaaccggtctgcccttcagtatcactgacaacctgatgctggagccacaactgcag

SEQ ID NO: 705326 - DNA, 75 bp, synthetic construct
  source 1..75: mol_type = other DNA
ccggtgtggcagttgctctgtctcttgctgctgtcacgtcagtcccggcactggctgctgacacggttgttcagg

SEQ ID NO: 705327 - DNA, 75 bp, synthetic construct
  source 1..75: mol_type = other DNA
agccatcgcggcgtgtggtgacgtaccagaaatcatggtgattggcggcggtcgcgtttatgagcagttcctgcc

SEQ ID NO: 705328 - DNA, 75 bp, synthetic construct
  source 1..75: mol_type = other DNA
gtcaaccgggtacggacgatcgcgtaacgtgggtgaaatcggtggatgaagccatcgcggcgtgtggtgacgtac

SEQ ID NO: 705329 - DNA, 75 bp, synthetic construct
  source 1..75: mol_type = other DNA
gattctggcaggctcccgcagccatcagaccggtgtaagcggtgaaaataacagcgtccgtctcagcattcaggg

SEQ ID NO: 705330 - DNA, 75 bp, synthetic construct
  source 1..75: mol_type = other DNA
aggaacaaatggcatcggtatcaagcattcctctggttaagctccttggcatcactcctaacgggctaaacgctt

SEQ ID NO: 705331 - DNA, 75 bp, synthetic construct
  source 1..75: mol_type = other DNA
tgcggctgtcacgtcagttccggcactggctgctgacacggttgtacaggcaggagaaaccgagaacggcggaac

SEQ ID NO: 705332 - DNA, 75 bp, synthetic construct
  source 1..75: mol_type = other DNA
aaccgtgacagcgatgaagactggtacctgcgcagtgaagatgcgtatcgttctgaagtcccccggtatgcctcc

SEQ ID NO: 705333 - DNA, 75 bp, synthetic construct
  source 1..75: mol_type = other DNA
ctgcaggtggacgccggtggtacagccacgaatgtcaccctgaagcagggcggcgcactggttaccagtacggct

SEQ ID NO: 705334 - DNA, 75 bp, synthetic construct
  source 1..75: mol_type = other DNA
gcggcacggccctgaagctgaccggctgcaccgtgctgaacggtgccattgaccccacgaatgtcaccctcgcct

SEQ ID NO: 705335 - DNA, 75 bp, synthetic construct
  source 1..75: mol_type = other DNA
gacggccaggacaacgccggttatgtgaagttcgggcatggcagtgcacaacatgtgcgtgccggtttccgtctg

SEQ ID NO: 705336 - DNA, 75 bp, synthetic construct
  source 1..75: mol_type = other DNA
gtgagcaactgagctatgtcattggcaccgaagttccggttccgggcggtgaggccagcgccattcagtcagtac

SEQ ID NO: 705337 - DNA, 75 bp, synthetic construct
  source 1..75: mol_type = other DNA
gcacatgcccagtcaacggctgaccatgccaacgctaacgccaacaccgctctgatcaacggcgtcaaactgtcc

SEQ ID NO: 705338 - DNA, 75 bp, synthetic construct
  source 1..75: mol_type = other DNA
atgcaggcggcagggcatccggaacggtgattaaccaggatggttaccagaccattaaacatggcggactggcaa

SEQ ID NO: 705339 - DNA, 75 bp, synthetic construct
  source 1..75: mol_type = other DNA
gtccaggggaacatgctgcaggccggggcctttaactacaccctcaaccgggacagtgatgagagctggtatctg

SEQ ID NO: 705340 - DNA, 75 bp, synthetic construct
  source 1..75: mol_type = other DNA
tggtgatgtggttagtaccggcgatattgttaacgcaggagagattcgctttgataatcagacgacaccggatgc

SEQ ID NO: 705341 - DNA, 75 bp, synthetic construct
  source 1..75: mol_type = other DNA
tgattgacgccagacagacagccgctgccaatgcgcaacaggcacaagctgacacccagcagcaacaaatggacg

SEQ ID NO: 705342 - DNA, 75 bp, synthetic construct
  source 1..75: mol_type = other DNA
gggacagtgatgagagctggtatctgcgcagtgaaaatgcttatcgtgcagaagtccccctgtatgcctccatgc

SEQ ID NO: 705343 - DNA, 75 bp, synthetic construct
  source 1..75: mol_type = other DNA
gcacatgcccagtcaacggctgaccatgccaacgctaacgccaacaccgctctgatgaacggcgtcaaactctcc

SEQ ID NO: 705344 - DNA, 75 bp, synthetic construct
  source 1..75: mol_type = other DNA
ctgaccagctggtgattaatggtggtcaggcaaccggcaaaacctggcttgcgttcacaaatgtcggaaacagta

SEQ ID NO: 705345 - DNA, 75 bp, synthetic construct
  source 1..75: mol_type = other DNA
gtcggtacacggaagggccctgaataccacactgaatggcggttaccagtatgtgcacagggacggacttgcgct

SEQ ID NO: 705346 - DNA, 75 bp, synthetic construct
  source 1..75: mol_type = other DNA
cagattgtcaaaaacgggggggggccgggaataccaccgttaatcagaagggcagactgcaggtggacgccggtg

SEQ ID NO: 705347 - DNA, 75 bp, synthetic construct
  source 1..75: mol_type = other DNA
agttagaagtaaatcctgccaaaaaattatttaatgcagggaatcaacgtttaaaacttttaacgatcgcttatt

SEQ ID NO: 705348 - DNA, 75 bp, synthetic construct
  source 1..75: mol_type = other DNA
taaatttgaagcggttcccagtattgatgacgttgccacagataaaaaagatctctctatgcagttaacagttaa

SEQ ID NO: 705349 - DNA, 75 bp, synthetic construct
  source 1..75: mol_type = other DNA
cgtggaaaaatcaggaagtggcacactcactgtcagcaacaccacactcacccagaaagccgtcaacctgaatga

SEQ ID NO: 705350 - DNA, 75 bp, synthetic construct
  source 1..75: mol_type = other DNA
aaatatcaccctgagcgttcaggccggttatgcccacagtgaaccgccccgggtttcctggagagtgttttatct

SEQ ID NO: 705351 - DNA, 75 bp, synthetic construct
  source 1..75: mol_type = other DNA
agcgggaaccttcaacggtgaatctgcggtgtctgtcggaacatcttttaatgccggaacgcatacggtacttaa

SEQ ID NO: 705352 - DNA, 75 bp, synthetic construct
  source 1..75: mol_type = other DNA
tgcgcagtgaaaatgcttatcgtgctgaagtccccctgtatacatccatgctgacacaggcaatggactatgacc

SEQ ID NO: 705353 - DNA, 75 bp, synthetic construct
  source 1..75: mol_type = other DNA
tcggggtggcaacctccggacagggtaccctgcacagtgacgccctgtttcggcgcccgtctggtgcaggagggt

SEQ ID NO: 705354 - DNA, 75 bp, synthetic construct
  source 1..75: mol_type = other DNA
tcggggtggcaacctccggacagggtaaccgcgctgaaatgagcccggaagccgccggcattgctgcctgtctga

SEQ ID NO: 705355 - DNA, 75 bp, synthetic construct
  source 1..75: mol_type = other DNA
tgaaggcgatgcactcctgcagggaggctctctcaccggtaacggcagcgtggaaaaatcaggaagtggcacact

SEQ ID NO: 705356 - DNA, 75 bp, synthetic construct
  source 1..75: mol_type = other DNA
caggaacaagcggacacccagcagcaacaaatggacgatcagcagaaacaaatcgacgcgacgcaaaaaacggtt

SEQ ID NO: 705357 - DNA, 75 bp, synthetic construct
  source 1..75: mol_type = other DNA
cagattactacgctcaataaccatttcagttcgctgaaaaacgaagttgaggacaaccgtaaagaagccaatgcg

SEQ ID NO: 705358 - DNA, 75 bp, synthetic construct
  source 1..75: mol_type = other DNA
aacatcgaacagaaccgcagcgatattgctgaccagcagaaactgttggcatcaaacgagcaaaaacagatcgtc

SEQ ID NO: 705359 - DNA, 75 bp, synthetic construct
  source 1..75: mol_type = other DNA
aaccgtgacagcgatgaagactggtgtcacgaacggtgcaatagtgatccacacccaacgcctgaaatcagatcc

SEQ ID NO: 705360 - DNA, 75 bp, synthetic construct
  source 1..75: mol_type = other DNA
caggtgccacctggaatattcccgataacgccacggttcagtcggtggtggatgacctcagccatgccggacaga

SEQ ID NO: 705361 - DNA, 75 bp, synthetic construct
  source 1..75: mol_type = other DNA
aggacaaaaaaccgttgccgctacaggtgatgcacagacacctgcccgttatcagagcatgatcaacgcccgaca

SEQ ID NO: 705362 - DNA, 75 bp, synthetic construct
  source 1..75: mol_type = other DNA
cgtatgagacgctctctgttcccttccgccaactgttgagcgggctgcgtgcagagcatgacttccgtaaatcgt

SEQ ID NO: 705363 - DNA, 75 bp, synthetic construct
  source 1..75: mol_type = other DNA
tttgcccatatcactaaaccggagtttcaggtgcgctggcgctggcaaccaaatgatattgcgatttgggataac

SEQ ID NO: 705364 - DNA, 75 bp, synthetic construct
  source 1..75: mol_type = other DNA
ccgccaactgttgagcgggctgcgtgcggagcatgatttccgtaaatcgtttccggaatacaaatatcgtaaaac

SEQ ID NO: 705365 - DNA, 75 bp, synthetic construct
  source 1..75: mol_type = other DNA
tccccgcctcgaaggcggttgtcaggtgccgattggtagctatgccgaacttatcaatggcgaaatctggctgcg

SEQ ID NO: 705366 - DNA, 75 bp, synthetic construct
  source 1..75: mol_type = other DNA
gcaaagtgttccttacgcaggcgcagcttgcgatgctgctggaaggtatcgactggcgacagcccaagcggctgc

SEQ ID NO: 705367 - DNA, 75 bp, synthetic construct
  source 1..75: mol_type = other DNA
gtgcgctgccggaaattctcaccggattacgcattggtctgggtgtgggctggtctaccctggtggcggcggagc

SEQ ID NO: 705368 - DNA, 75 bp, synthetic construct
  source 1..75: mol_type = other DNA
gaaaaaatgcaaacggtaatgcaaacattgcttccctatttgaaccaggcactacgcaattacttcaaccagcaa

SEQ ID NO: 705369 - DNA, 75 bp, synthetic construct
  source 1..75: mol_type = other DNA
gcagcaaaggtgaagcaatggcgaaaaaactggcgaaaggtattgaggtgaaaccaggcgagatagtcattccat

SEQ ID NO: 705370 - DNA, 75 bp, synthetic construct
  source 1..75: mol_type = other DNA
taatgtttattcggcattacttcttcattaccttaatcagaaacacagaattgattatcaaagttactggttccc

SEQ ID NO: 705371 - DNA, 75 bp, synthetic construct
  source 1..75: mol_type = other DNA
cgctggggccgtatattggcgcacaaattacgggtgccgacctgacgcgcccgttaagtgataaccagtttgaac

SEQ ID NO: 705372 - DNA, 75 bp, synthetic construct
  source 1..75: mol_type = other DNA
tccggtgagcggtaaacaggcgctgtttgtgaatgaaggctttactacgcgaattgtcgatgtcagcgagaaaga

SEQ ID NO: 705373 - DNA, 75 bp, synthetic construct
  source 1..75: mol_type = other DNA
aaccatgaaactgaagctgaaagcgctgcccgtgtttgataaagaaaaaggcgcgatcttcctgaaagagatgga

SEQ ID NO: 705374 - DNA, 75 bp, synthetic construct
  source 1..75: mol_type = other DNA
ccaccggtgacggactgtgcctcctgaccaaacggctggagcgcgggcgcttcgcctggccgtcagcccgtgatg

SEQ ID NO: 705375 - DNA, 75 bp, synthetic construct
  source 1..75: mol_type = other DNA
atcaaacgagcacaaacagaccgtccgcgacaacgggcaggacaccgccattcaggacgcacaacatgccgccaa

SEQ ID NO: 705376 - DNA, 75 bp, synthetic construct
  source 1..75: mol_type = other DNA
ccaccggcgacggactgtgcctcctgaccaaacggctggagcgtgggcgcttcgcctggccgtcagcccgtgatg

SEQ ID NO: 705377 - DNA, 75 bp, synthetic construct
  source 1..75: mol_type = other DNA
cgccagccagctgtacgctaccgcgcgcgactgggtacgacagctgccggttaaacatatgtgggatctgttctg

SEQ ID NO: 705378 - DNA, 75 bp, synthetic construct
  source 1..75: mol_type = other DNA
cgcgctgtaattccgatgaagtttatcgacatggccgtagttgttcccggcatgagcgtttccgttgtcgctcat

SEQ ID NO: 705379 - DNA, 75 bp, synthetic construct
  source 1..75: mol_type = other DNA
gttaaagagcagatcaccgtaatggctttcaacggagccggggttcgtgataccgccagaacactgaaggtcggc

SEQ ID NO: 705380 - DNA, 75 bp, synthetic construct
  source 1..75: mol_type = other DNA
atggttatagttgaccttcattgctcccgttgccagtccgttcaggtttaccgtcacgagaagaccccaaaagga

SEQ ID NO: 705381 - DNA, 75 bp, synthetic construct
  source 1..75: mol_type = other DNA
gcgttccgaaaccaagctggcacaactgcgtaaggcgctaccgtggttacaggcacaactgccgcagctgaaagt

SEQ ID NO: 705382 - DNA, 75 bp, synthetic construct
  source 1..75: mol_type = other DNA
ggcagtcaggttaaactgctgtggtccaccggtgacgaactgtgcctcctgaccaaacggctggagcgtgggcgc

SEQ ID NO: 705383 - DNA, 75 bp, synthetic construct
  source 1..75: mol_type = other DNA
aaatctggctggttgccggtatcaccgatatgcgcaacggcttcaatggcctcgccgcaaagatgcagaccgcgc

SEQ ID NO: 705384 - DNA, 75 bp, synthetic construct
  source 1..75: mol_type = other DNA
gatagcctgtgcgaaacaatctgctgctgaactggctctaacgcgtctgcaatttcaggcgctggactccactca

SEQ ID NO: 705385 - DNA, 75 bp, synthetic construct
  source 1..75: mol_type = other DNA
gcggcatgatgctgcgctttgtactgcgttctgaaaccaaactggcgcaactgcgtaaggcgctgccgtggttac

SEQ ID NO: 705386 - DNA, 75 bp, synthetic construct
  source 1..75: mol_type = other DNA
taagcgtggcgaactgaaatacattctgctgactgaaagccagagcgatggcggcatgatgctgcgctttgtact

SEQ ID NO: 705387 - DNA, 75 bp, synthetic construct
  source 1..75: mol_type = other DNA
gaaatctcatacgaacaaagttgtcagagagttcttaaactcccattcagatgcatcgcatctcttttgtgctct

SEQ ID NO: 705388 - DNA, 75 bp, synthetic construct
  source 1..75: mol_type = other DNA
taccgcgctgatgaatggccagaaactttccggtgtcgtcagcgacaacaaaaaccagattgaaaaaaacagtac

SEQ ID NO: 705389 - DNA, 75 bp, synthetic construct
  source 1..75: mol_type = other DNA
atgcacacaatatcggcggcaaatgcagatgacgccaaaaaagcgcttaccactgcgcaatctgcaattgatgcg

SEQ ID NO: 705390 - DNA, 75 bp, synthetic construct
  source 1..75: mol_type = other DNA
tattgcgaaagccacaaaagcgaaggctggaagcaatacaagccaggacaatcccgtcatcagcgcggttatggt

SEQ ID NO: 705391 - DNA, 75 bp, synthetic construct
  source 1..75: mol_type = other DNA
tcaccagcgcggttatggttcgaagtgggacgttatccgcgcgcgtgtgctgaagcgtgacaaaggcctgtgcca

SEQ ID NO: 705392 - DNA, 75 bp, synthetic construct
  source 1..75: mol_type = other DNA
attaatgccaaactgacggcgcaaaatgaagccaatgaacgttcaaccgctgatcaggagcagagaattaatgaa

SEQ ID NO: 705393 - DNA, 75 bp, synthetic construct
  source 1..75: mol_type = other DNA
atgccgccacgaatcccgaaagcctgccgtgctcgaggttgccgtaataccaccacagacccgtcaggctactgc

SEQ ID NO: 705394 - DNA, 75 bp, synthetic construct
  source 1..75: mol_type = other DNA
agatgccgacagtaatctgcagagcctgtgctggccgtgccataaggcgaagacggcccgtgaacggctaaagtg

SEQ ID NO: 705395 - DNA, 75 bp, synthetic construct
  source 1..75: mol_type = other DNA
gccgcgttcgcggctgccgtaataccactacagacccgtcaggctactgcgaaagccacaaaaacgaaggctgga

SEQ ID NO: 705396 - DNA, 75 bp, synthetic construct
  source 1..75: mol_type = other DNA
gttatgtctgcgtgctggtgtggtacgtgaggcgaaaaccgttgaccacatcattcctaaagcgcatggcggcac

SEQ ID NO: 705397 - DNA, 75 bp, synthetic construct
  source 1..75: mol_type = other DNA
tggcacctgaactgattaaacgtaatgctgttggatacgaaagcgctttgcagttgttgatctctgccggagaca

SEQ ID NO: 705398 - DNA, 75 bp, synthetic construct
  source 1..75: mol_type = other DNA
gccgtgttcgcggctgccgccataccacaactgacccgtcaggctattgcgaaagccacaaaagtgaaggctgga

SEQ ID NO: 705399 - DNA, 75 bp, synthetic construct
  source 1..75: mol_type = other DNA
atggttgaaaaatctgatgtaataattgcagaatgtagctttccatcaacagggttaggaatagagttacagatt

SEQ ID NO: 705400 - DNA, 75 bp, synthetic construct
  source 1..75: mol_type = other DNA
gttgtgtctgcgtgtcggtgtggtgagcgaggcgaaaaccgtcgaccacatcatcccgaaagcgcatggcggaac

SEQ ID NO: 705401 - DNA, 75 bp, synthetic construct
  source 1..75: mol_type = other DNA
atgaaaattgttaaacttatcaaagacaaggcattatctgcatccatcgcagcgtatcagctgcgcggaacggtg

SEQ ID NO: 705402 - DNA, 75 bp, synthetic construct
  source 1..75: mol_type = other DNA
atgcggccaagtatggccgcgaggtttaccgggcgtttcgtagtaagggcaatcaccgctgggatacgtgcgttt

SEQ ID NO: 705403 - DNA, 75 bp, synthetic construct
  source 1..75: mol_type = other DNA
tgatgccgactgtaatctgcagagtctgtgctggccgtgtcataagtcgaagacggcccgtgaacgacttaagtg

SEQ ID NO: 705404 - DNA, 75 bp, synthetic construct
  source 1..75: mol_type = other DNA
tggtcacgacagaggtactgaaacaggcgctgtcagcgcaggtggtgctgaatgttgtggaagcacaggtaagac

SEQ ID NO: 705405 - DNA, 75 bp, synthetic construct
  source 1..75: mol_type = other DNA
gcaccacctgctgtatgatcccgcacctgcaaatcgagaaagagctggccagcggtgaactgattgacttaacgc

SEQ ID NO: 705406 - DNA, 75 bp, synthetic construct
  source 1..75: mol_type = other DNA
atgaaacgcccggactacagaacattacaggcactggatgcggtgatacgtgaacgaggatttgagcgcgcggca

SEQ ID NO: 705407 - DNA, 75 bp, synthetic construct
  source 1..75: mol_type = other DNA
gttatgtctgcgtgccggtgtggtgcgtgaggcgaaaaccgttgaccacatcatccctaaagcacatggcggcac

SEQ ID NO: 705408 - DNA, 75 bp, synthetic construct
  source 1..75: mol_type = other DNA
cgtgaagcgaaaaccgttgatcacatcatccctaaagcgcatggcggcaccgatgcagacagtaatctgcagagc

SEQ ID NO: 705409 - DNA, 75 bp, synthetic construct
  source 1..75: mol_type = other DNA
tgatgccgacagtaatctgcagagtctgtgctggccctgccataaggcgaagacggcccgtgaacggctaaagtg

SEQ ID NO: 705410 - DNA, 75 bp, synthetic construct
  source 1..75: mol_type = other DNA
gccgtgttcgtggctgccgccataccactactgatccgtcaggctattgcgaaagccacaaaagcgaaggctgga

SEQ ID NO: 705411 - DNA, 75 bp, synthetic construct
  source 1..75: mol_type = other DNA
tgggatgccatacgtgcgcgcatactgaagcgtgataatcatctgtgtcagaactgcatgcgcaatgggagagcc

SEQ ID NO: 705412 - DNA, 75 bp, synthetic construct
  source 1..75: mol_type = other DNA
gttgtgtctgcgtgtcggtgtggtgcgcgaggcgaaaactgtggaccacatcattccgaaagctcatggtggcac

SEQ ID NO: 705413 - DNA, 75 bp, synthetic construct
  source 1..75: mol_type = other DNA
cgaaggggatgccaggtgaagtgctgcaacactttacccgtactcgcatccttaacaaaccaatgaacatgcaac

SEQ ID NO: 705414 - DNA, 75 bp, synthetic construct
  source 1..75: mol_type = other DNA
gcgaccgacgttgcagcccgtggcctggacgttgagcgtatctgcctggtagttaactacgatatcccgatggat

SEQ ID NO: 705415 - DNA, 75 bp, synthetic construct
  source 1..75: mol_type = other DNA
gcttctcactccaccatcgaactgccgaaaggtatgccgggtgaagtactgcaacactttacgcgtactcgcatt

SEQ ID NO: 705416 - DNA, 75 bp, synthetic construct
  source 1..75: mol_type = other DNA
tggcggtgagcgtcgtggcggtggtcgtggtttcggtggcgaacgtcgtgaaggcggtcgtaacttcagcggtga

SEQ ID NO: 705417 - DNA, 75 bp, synthetic construct
  source 1..75: mol_type = other DNA
aaattcagccgactgcagaaggtgaagagctggatctcgaaactctggcagccgcactgctgaaaatggcacagg

SEQ ID NO: 705418 - DNA, 75 bp, synthetic construct
  source 1..75: mol_type = other DNA
tgttgggtgatgcacagccgcatactgaacgtcgtggcggtggtcgtggcttcggtggtgagcgtcgtgagggcg

SEQ ID NO: 705419 - DNA, 75 bp, synthetic construct
  source 1..75: mol_type = other DNA
accgctggagtggaaacaactggaatgcaacagtaagccccattatttacgacggcgattcgctggccttcctgc

SEQ ID NO: 705420 - DNA, 75 bp, synthetic construct
  source 1..75: mol_type = other DNA
acaaccgtcactaatgcactggcagggaaacagccgcttaacgatacgttaaccagtatcagcaaggcaggggtg

SEQ ID NO: 705421 - DNA, 75 bp, synthetic construct
  source 1..75: mol_type = other DNA
tattataaatacccggccgttggtgtgccgattatggcggcatatcagggggagagttttggtgcagatgcgtct

SEQ ID NO: 705422 - DNA, 75 bp, synthetic construct
  source 1..75: mol_type = other DNA
atttaaatctatttcagagagaaaacttactctaggtaagaaaacgatttggatggttgaggagcctgagtcttt

SEQ ID NO: 705423 - DNA, 75 bp, synthetic construct
  source 1..75: mol_type = other DNA
aagcgaaacagtacagggatgaggcgcagcagatagttgatgacctgaatgcaacaaatgcctccacgacagaaa

SEQ ID NO: 705424 - DNA, 75 bp, synthetic construct
  source 1..75: mol_type = other DNA
ggtacacttttccggggcgttatatggcgttatccggggtcagggactcttacggaacaagcggtcgtatctgcc

SEQ ID NO: 705425 - DNA, 75 bp, synthetic construct
  source 1..75: mol_type = other DNA
gtgagcagactctggaacgtctgaaagatggtcgtctggatatcctgatcgcgaccgacgttgcggcccgtggcc

SEQ ID NO: 705426 - DNA, 75 bp, synthetic construct
  source 1..75: mol_type = other DNA
aataacggcctgctaccggataaaccagtatttgagattgaaaaacttaacggtgaaacggggttggaattatga

SEQ ID NO: 705427 - DNA, 75 bp, synthetic construct
  source 1..75: mol_type = other DNA
aaagcgtatgcgtgacattagcgcggaaactggtattccgtggaattacctgtcgcgcacgctgcgtttaatggt

SEQ ID NO: 705428 - DNA, 75 bp, synthetic construct
  source 1..75: mol_type = other DNA
ctatttaaatgcgactgagattagcaatttaataaatggtgatgttgcatattgttttaaaaaagaaagtttggt

SEQ ID NO: 705429 - DNA, 75 bp, synthetic construct
  source 1..75: mol_type = other DNA
acggtattgctgagcaatacgccgcattatgacactttctacggtggtgcgattccggatgaatggtttagcggt

SEQ ID NO: 705430 - DNA, 75 bp, synthetic construct
  source 1..75: mol_type = other DNA
tttcaagcttagcaatgggaatgatagacccggttaatgtggctgcaatgttcatccctgtaggggcggtagcgc

SEQ ID NO: 705431 - DNA, 75 bp, synthetic construct
  source 1..75: mol_type = other DNA
taagaccggcgaggtcattggcgcgacgcaacttactgaaggcgagttgattgttgaagctggcggaagagccga

SEQ ID NO: 705432 - DNA, 75 bp, synthetic construct
  source 1..75: mol_type = other DNA
atttcgcctttatggctgcgattggactggtgaccactttctttgcaccagagactcgcggacgggatctcaact

SEQ ID NO: 705433 - DNA, 75 bp, synthetic construct
  source 1..75: mol_type = other DNA
atgaaaaaaatttgtacactcttgatatctatttttattctttccgcatgtggtgaagatacaaaatcatcagat

SEQ ID NO: 705434 - DNA, 75 bp, synthetic construct
  source 1..75: mol_type = other DNA
gtgaacgtactctgattgttccgccagatgcgccgatgcgtccgaaacgtgaattccgtgaccgtgatgaccgtg

SEQ ID NO: 705435 - DNA, 75 bp, synthetic construct
  source 1..75: mol_type = other DNA
atcaaagaaaacgagagaaaacttatataaaaaaaataaagatgctaattagatatttgcaatgttgttattatg

SEQ ID NO: 705436 - DNA, 75 bp, synthetic construct
  source 1..75: mol_type = other DNA
aaggggtttaagatttattacaaagatcaaagaaaacgagagaaaacttatataaaaaaaataaagatgctaatt

SEQ ID NO: 705437 - DNA, 75 bp, synthetic construct
  source 1..75: mol_type = other DNA
ttaggttatataaatgattccatttttaaaatacaatattacaaacaaaataatagtggtaaacccgcagctatc

SEQ ID NO: 705438 - DNA, 75 bp, synthetic construct
  source 1..75: mol_type = other DNA
tgagcaggtggtcagtgacagggagagagcagaaacagctgctgatgatgcaatcaatgcagcaacatctgcggc

SEQ ID NO: 705439 - DNA, 75 bp, synthetic construct
  source 1..75: mol_type = other DNA
gagaagagagcaaagttacatattttcgatctctaattctcgttttttgtttatcttttcttttagcattgccat

SEQ ID NO: 705440 - DNA, 75 bp, synthetic construct
  source 1..75: mol_type = other DNA
accgtaatggagttaccgaatctcttgaacccgtgtatatcagttcggggagtgtgcagaatgctatctgcacgg

SEQ ID NO: 705441 - DNA, 75 bp, synthetic construct
  source 1..75: mol_type = other DNA
tccacatttgcagcgatttctgcaggtagctgattcgctgattgctaataaggaagacagaagaaaattacgtgc

SEQ ID NO: 705442 - DNA, 75 bp, synthetic construct
  source 1..75: mol_type = other DNA
atagtattcatttcctgacttaccgctttagtggaaacaactggaatgcaacagtaagccctgtcatttacgacg

SEQ ID NO: 705443 - DNA, 75 bp, synthetic construct
  source 1..75: mol_type = other DNA
aacagcaggcactgactcctcctcatactacaaatatccggcggttggcgtcccgatttttgccgtgtaccgggg

SEQ ID NO: 705444 - DNA, 75 bp, synthetic construct
  source 1..75: mol_type = other DNA
tgattgatggcgcaggcatccccatgtccggatgccacataattctgaaatcccgggtaaacacctcagaggtgg

SEQ ID NO: 705445 - DNA, 75 bp, synthetic construct
  source 1..75: mol_type = other DNA
tttaaccgcagagaagttcgccacagcgaaccgaaatcactggcaagtggagaataaattgcactggcatctgga

SEQ ID NO: 705446 - DNA, 75 bp, synthetic construct
  source 1..75: mol_type = other DNA
ctttcaacggtgccggagttcgcgatactgcccgtacgctgaaaatcggcattaataggggttgcacgccggaac

SEQ ID NO: 705447 - DNA, 75 bp, synthetic construct
  source 1..75: mol_type = other DNA
cgttcaacggagcagggggccgcgataccgcaaggacactcaaaattggtataaataccgtcatccgcactttaa

SEQ ID NO: 705448 - DNA, 75 bp, synthetic construct
  source 1..75: mol_type = other DNA
gccgatgcgcccggtgatcctgaaagccgcagccggaagcgggacaatgtttgtggcgcactgcccgaaggagga

SEQ ID NO: 705449 - DNA, 75 bp, synthetic construct
  source 1..75: mol_type = other DNA
tttaaccgcagagaagttcgccacagcaatccgaaaccactggtacgtggagaataagctgcactggcgtctggg

SEQ ID NO: 705450 - DNA, 75 bp, synthetic construct
  source 1..75: mol_type = other DNA
atgaaagagctgatcactgaaatggcctttaatggcgccggggttcgcgataccgccaggacactgaaaattggt

SEQ ID NO: 705451 - DNA, 75 bp, synthetic construct
  source 1..75: mol_type = other DNA
acccgggacggtattacaccttttccacacaaacggaagaaacaaccgggataacagaaattatctggctggata

SEQ ID NO: 705452 - DNA, 75 bp, synthetic construct
  source 1..75: mol_type = other DNA
cagccaggatgcgagcgcaggcaatgcgcaggaagcgaaacagcacagggacgaggcgcaacggatagttgatga

SEQ ID NO: 705453 - DNA, 75 bp, synthetic construct
  source 1..75: mol_type = other DNA
gccggacgatgcgaccgggctggagatggcgaacgcggcatttgttcgcaaactgcttgctgcgctggttgactc

SEQ ID NO: 705454 - DNA, 75 bp, synthetic construct
  source 1..75: mol_type = other DNA
ggcaatgacccgaactttgcgacaaccgtcactaatgcactggcaggtaaacagccgcttaacgatacgttaacc

SEQ ID NO: 705455 - DNA, 75 bp, synthetic construct
  source 1..75: mol_type = other DNA
tggtgctggggcattcagttttcctggtcgttatcaggccctgtcaggttatcgtgcaacgtatggcgacagagg

SEQ ID NO: 705456 - DNA, 75 bp, synthetic construct
  source 1..75: mol_type = other DNA
cacggagcttgagctgaacgcggctgcgacgatggaaccccagagtgatatccgtgaccgcacaccgggcaggct

SEQ ID NO: 705457 - DNA, 75 bp, synthetic construct
  source 1..75: mol_type = other DNA
accgcaacggcccgtgatgatgcggaacgttttgcgggtgaggcagaaaacagcgcacagtcatcaggcacagcg

SEQ ID NO: 705458 - DNA, 75 bp, synthetic construct
  source 1..75: mol_type = other DNA
ttgcggactcttccacgctgctggctggcaccacgaaatttaacggcatcattgatgtgatgtggtccccctttg

SEQ ID NO: 705459 - DNA, 75 bp, synthetic construct
  source 1..75: mol_type = other DNA
gcgtttatctgagacaggactggcgcgatgagtactgtgttggcgacattgctgtatacgacgactccaggcccg

SEQ ID NO: 705460 - DNA, 75 bp, synthetic construct
  source 1..75: mol_type = other DNA
ataacagaaattatctggctggataatggctgggacgacaaaaccagccagacagcaacaaagctggttctgttt

SEQ ID NO: 705461 - DNA, 75 bp, synthetic construct
  source 1..75: mol_type = other DNA
tgaccgttcgtggcgataatatctccgccccggtcacctggacgaatctgacgccacaactgggcaatgcagcac

SEQ ID NO: 705462 - DNA, 75 bp, synthetic construct
  source 1..75: mol_type = other DNA
gcagagcttgggcttaaatctgcagctgcagttgacgttcaaaggactctttatgatgcaggtgaaggatgtgtt

SEQ ID NO: 705463 - DNA, 75 bp, synthetic construct
  source 1..75: mol_type = other DNA
aaccagtattacgaaggtgagcacagtattcatcgcctgacttaccgctggagtggaaataactggaatgcaaca

SEQ ID NO: 705464 - DNA, 75 bp, synthetic construct
  source 1..75: mol_type = other DNA
gccgatctcgcctggtttaaacgtaacaccttaaataaacccgtgattatggggcgccatacctgggaatccatc

SEQ ID NO: 705465 - DNA, 75 bp, synthetic construct
  source 1..75: mol_type = other DNA
gaacaggatcaagaacgtaatgcctttgccatcaaaattcccgcactgttagggatcctcgccactcactcatta

SEQ ID NO: 705466 - DNA, 75 bp, synthetic construct
  source 1..75: mol_type = other DNA
aagtccggctggggcgagtgggcggaaagtgcgacggacagtttttcgcaggttaaaagtgctgccacgcagacc

SEQ ID NO: 705467 - DNA, 75 bp, synthetic construct
  source 1..75: mol_type = other DNA
tcggtatacctatggcgtttacaacgaagagggggcgtttgccgtcaatcccgacgatatggtgcatatccgggc

SEQ ID NO: 705468 - DNA, 75 bp, synthetic construct
  source 1..75: mol_type = other DNA
ctatcatggaaaccatttacgtggtcaccggcaaaacgatctaccgcgatatgacgcgcttctggggtaagctct

SEQ ID NO: 705469 - DNA, 75 bp, synthetic construct
  source 1..75: mol_type = other DNA
gtatgaagtcgcgcaagtacaaccggtaaaactggcggcgatggaaggggagtggcaaacggaacctgcacctgc

SEQ ID NO: 705470 - DNA, 75 bp, synthetic construct
  source 1..75: mol_type = other DNA
cgccggtgttctggagtttccgcatcatggtgggctgcggttcgctgctgttactggtaatgctgattgcgctcg

SEQ ID NO: 705471 - DNA, 75 bp, synthetic construct
  source 1..75: mol_type = other DNA
acggccagttatgacgttcttctgcgtgagacccgtaattttattgatgatacggaaattaccgcccagaaacgc

SEQ ID NO: 705472 - DNA, 75 bp, synthetic construct
  source 1..75: mol_type = other DNA
atgcttttctttttatccccgttacagcggttatattttttcccgtttctctctctggcgatgagtgcggtatct

SEQ ID NO: 705473 - DNA, 75 bp, synthetic construct
  source 1..75: mol_type = other DNA
taacctgattatcacccgcgcctcttccgttcgcgcgggcgtgtcactggtgctgggaaaaaatatcctcgccgc

SEQ ID NO: 705474 - DNA, 75 bp, synthetic construct
  source 1..75: mol_type = other DNA
ccgggcgaaacgttttatcgtctggtgcctgacgcgtcgaagcgcgcacagtctgcggggcaaaacaatcgataa

SEQ ID NO: 705475 - DNA, 75 bp, synthetic construct
  source 1..75: mol_type = other DNA
gcagctcatcacgctgcgccgaagcgtgctaaaactaaccggtgatgttttgaatgacgatccgcgcgatctgca

SEQ ID NO: 705476 - DNA, 75 bp, synthetic construct
  source 1..75: mol_type = other DNA
tatcccaccgccattatatcggggctgccaccctggatgccggggtgagttatcagcggggtacccgctggtttg

SEQ ID NO: 705477 - DNA, 75 bp, synthetic construct
  source 1..75: mol_type = other DNA
aacgatctcgtaagtgtcattagaatagctttagcagctgaccttgcatataaagaatccgagaaaaaatccaag

SEQ ID NO: 705478 - DNA, 75 bp, synthetic construct
  source 1..75: mol_type = other DNA
agaacttactggtggacgttatgctgtcgcccgtcattttggtgatctggataatatctctcacactatttgggc

SEQ ID NO: 705479 - DNA, 75 bp, synthetic construct
  source 1..75: mol_type = other DNA
cgaagttgagcaggatgttgaagtggccatcagggaaaaaaaccgggatgcactctcccgacgtctggagattga

SEQ ID NO: 705480 - DNA, 75 bp, synthetic construct
  source 1..75: mol_type = other DNA
ctgtaaagttgagttccgccacggtaacatgacgctggaaaatccttcaccagagctgctcacggtgttgatccg

SEQ ID NO: 705481 - DNA, 75 bp, synthetic construct
  source 1..75: mol_type = other DNA
ggtggtcgccgactcgctgggaaattttttgcaaggactccctaccagcgagacgcccaccccgctagcggaata

SEQ ID NO: 705482 - DNA, 75 bp, synthetic construct
  source 1..75: mol_type = other DNA
gaaggcgcgatggctaccatcctgccaaagattgccaatgctgtgtccgatctgagtgatggcgacgtggacgct

SEQ ID NO: 705483 - DNA, 75 bp, synthetic construct
  source 1..75: mol_type = other DNA
agccctgagttgctcaactatagcgtggcgaaatttatcatgtggcgcaaagagacggggctttctcctgttaac

SEQ ID NO: 705484 - DNA, 75 bp, synthetic construct
  source 1..75: mol_type = other DNA
acagacgatgatggctggactatatgcactgtccgggatatccgtagcagctatgccagtctcctgggacagtgt

SEQ ID NO: 705485 - DNA, 75 bp, synthetic construct
  source 1..75: mol_type = other DNA
atggacatgcattcaggaacctttaatccacaggatttcgcctggcagggcttaacgctgacacccgcagccgct

SEQ ID NO: 705486 - DNA, 75 bp, synthetic construct
  source 1..75: mol_type = other DNA
taacaatgaaaaaagttcctatgagtgttcttgagacaatcggcaatcttgaggaaaagttacaggaactcgacc

SEQ ID NO: 705487 - DNA, 75 bp, synthetic construct
  source 1..75: mol_type = other DNA
ctcccgacgtctggagattgaacagcaggaagccttcatgactctggagcaacaacaacgggtaaaaacccgtac

SEQ ID NO: 705488 - DNA, 75 bp, synthetic construct
  source 1..75: mol_type = other DNA
cattatcgtttgacgtttggagggcggtattatgatcaagctttccagaatctacccaatgagttgaaagcgaag

SEQ ID NO: 705489 - DNA, 75 bp, synthetic construct
  source 1..75: mol_type = other DNA
gcgaacattgccggatattgaatttcgtgcaggaaaagcgagcaaagacccggaaaagcgtagagccagtgcatg

SEQ ID NO: 705490 - DNA, 75 bp, synthetic construct
  source 1..75: mol_type = other DNA
tcagtgtgacaacccgctggtcggcggcggcaccgcgcgtgattcgtgaggggcaaccctgcacggtcaggctgg

SEQ ID NO: 705491 - DNA, 75 bp, synthetic construct
  source 1..75: mol_type = other DNA
cggaactgccgcgagcccttgacccagatgtcgccggagcgcagggcgttcttcagctcggacagggcgcagatt

SEQ ID NO: 705492 - DNA, 75 bp, synthetic construct
  source 1..75: mol_type = other DNA
cttttcgctcggcgaagagtatgaacatgcgccgccggcgacgaatcgccaaatctcaccgtatctcccgagcgg

SEQ ID NO: 705493 - DNA, 75 bp, synthetic construct
  source 1..75: mol_type = other DNA
gcgccagattaaaccgctgatgcgtcctgatgcgcgtctggtgtgggcgaccaaagggctggaagcagaaaccgg

SEQ ID NO: 705494 - DNA, 75 bp, synthetic construct
  source 1..75: mol_type = other DNA
atttctgtcagaccgcattttaaatacatgggtgccagtttcgacctgagcctggtcggacgactggataaggaa

SEQ ID NO: 705495 - DNA, 75 bp, synthetic construct
  source 1..75: mol_type = other DNA
atgaaggccgtgggtgcatcggccggcaccttgcgcaggtttgtcggcgttcatctcacgcagggtctgcacggc

SEQ ID NO: 705496 - DNA, 75 bp, synthetic construct
  source 1..75: mol_type = other DNA
agcgtcgcctgggctagtgatgcggactacgacgtgcgtttggtccaggactgctgctacgacccggatcgggat

SEQ ID NO: 705497 - DNA, 75 bp, synthetic construct
  source 1..75: mol_type = other DNA
cttacctgtactgacaaccagtcgcgtaaccgccgttttggcatgatgctcggtcagggcatggatgtacaaagc

SEQ ID NO: 705498 - DNA, 75 bp, synthetic construct
  source 1..75: mol_type = other DNA
gcgtctgttacaggacgtggcgcgcgaggcgttaggcgatcaaattccgctggcggttatctccggcccgacttt

SEQ ID NO: 705499 - DNA, 75 bp, synthetic construct
  source 1..75: mol_type = other DNA
gaggcgttaggcgatcaaattccgctggcggttatctctggcccaacgtttgcgaaagaactggcggcaggttta

SEQ ID NO: 705500 - DNA, 75 bp, synthetic construct
  source 1..75: mol_type = other DNA
agtttccgcgtttacagcaacccggatttcatcggcgtgcagcttggcggtgcggtgaaaaacgtcattgccatt

SEQ ID NO: 705501 - DNA, 75 bp, synthetic construct
  source 1..75: mol_type = other DNA
atgaaccaacgtaatgcttcaatgactgtgatcggtgccggctcgtacggcaccgctcttgccattaccctggca

SEQ ID NO: 705502 - DNA, 75 bp, synthetic construct
  source 1..75: mol_type = other DNA
tgatcttgccactgcgctggcagccagccgtaatattctcgtcgtcgtacccagccatgtctttggtgaagtact

SEQ ID NO: 705503 - DNA, 75 bp, synthetic construct
  source 1..75: mol_type = other DNA
tcaggccaaaatcccaaccgaggtgctggtcaccgatcgccgcgaatttgaactggctgaagagggttttatcac

SEQ ID NO: 705504 - DNA, 75 bp, synthetic construct
  source 1..75: mol_type = other DNA
aatccgtcagacagtgaagcgtcagaactacgcaatcaacttaatgatgatcctgactggcttcctgttccccgc

SEQ ID NO: 705505 - DNA, 75 bp, synthetic construct
  source 1..75: mol_type = other DNA
tgtttgttgatacgccaggtatgaaatccccagcgttcgttaaggcactgagttgtgctgacatcgttctcacat

SEQ ID NO: 705506 - DNA, 75 bp, synthetic construct
  source 1..75: mol_type = other DNA
ttaatgctgacacttgagctgaaagatggcgaaaaattgcaggcaaaagccagcgatttagtctcccgcaaaaat

SEQ ID NO: 705507 - DNA, 75 bp, synthetic construct
  source 1..75: mol_type = other DNA
ggcgggactggtcacaatcgcgttattactgacgtggcgattaaaaaaacggcctccggaacacgtccctgaggc

SEQ ID NO: 705508 - DNA, 75 bp, synthetic construct
  source 1..75: mol_type = other DNA
cacggatattccggctatggcacaaaagctggccgcccgctttgattatgtgtttgttgatacaccaggcatgaa

SEQ ID NO: 705509 - DNA, 75 bp, synthetic construct
  source 1..75: mol_type = other DNA
aaactggccgcccgttttgattatgtgttcgtcgatacgcctggtatgaaatccccagcattcgtaaaagcactt

SEQ ID NO: 705510 - DNA, 75 bp, synthetic construct
  source 1..75: mol_type = other DNA
aaaaatccctgcctgaatattcataccggcgcctggatactggcccgccattttcaacgctgcggcgttaactgg

SEQ ID NO: 705511 - DNA, 75 bp, synthetic construct
  source 1..75: mol_type = other DNA
ggtttctgaaatgtggttggtctggccgaaacatcatgaacaaagtccagctgcgcgaaactttcgtattcatct

SEQ ID NO: 705512 - DNA, 75 bp, synthetic construct
  source 1..75: mol_type = other DNA
ccccacgagctcagacgtactggtatcatccgcattttatcgtgtgcggtggcgatcattctgccgatggtggaa

SEQ ID NO: 705513 - DNA, 75 bp, synthetic construct
  source 1..75: mol_type = other DNA
aaggaatcaactacatctattgttgttcgatatgtgctgagatctgtaagaaatggattaagtttttctgaagcg

SEQ ID NO: 705514 - DNA, 75 bp, synthetic construct
  source 1..75: mol_type = other DNA
tacgggattatgcagattaattcagtacatattcctgagctgaaaaaactgggggtcattaaagataaaaatgaa

SEQ ID NO: 705515 - DNA, 75 bp, synthetic construct
  source 1..75: mol_type = other DNA
acattatcgatttcccatcaatccctgtggcgatgttgccgcaccgctgtagccctgagttgctcaactacagcg

SEQ ID NO: 705516 - DNA, 75 bp, synthetic construct
  source 1..75: mol_type = other DNA
tcagtgagctggattacgatcagtgccaggggtttcttaatgaattaatcccgcatggcattgccgatctgttct

SEQ ID NO: 705517 - DNA, 75 bp, synthetic construct
  source 1..75: mol_type = other DNA
gctcgcaaagaggatttacaacttagtgcgcatatcaaccctcaaacgtttgatgttgaattaattgatgagaat

SEQ ID NO: 705518 - DNA, 75 bp, synthetic construct
  source 1..75: mol_type = other DNA
tttcttttcttcgtgctggtgtgtctctcgcggctatcgggatttcgttgccggcctcaggtattgtcaacgcag

SEQ ID NO: 705519 - DNA, 75 bp, synthetic construct
  source 1..75: mol_type = other DNA
ttctttgtacgggtaaaaccgtctgtagaaggcatcgccactgcggcgcagacgttggggcaacgcacgctatca

SEQ ID NO: 705520 - DNA, 75 bp, synthetic construct
  source 1..75: mol_type = other DNA
ttattacctgtagaaataacgccggatgagcagaaagaaccggtggcggccattgcgccgtctttatccacttcc

SEQ ID NO: 705521 - DNA, 75 bp, synthetic construct
  source 1..75: mol_type = other DNA
gaatcatcagaggagtcgctgtcagatacggcaaatgcactggctgaaaatgcccggaatgccggtgagctggga

SEQ ID NO: 705522 - DNA, 75 bp, synthetic construct
  source 1..75: mol_type = other DNA
cggtacggaagacagcgagcagcccggttttctggcgctggatgcttcctcagcggcgcagggcgtcgggattgg

SEQ ID NO: 705523 - DNA, 75 bp, synthetic construct
  source 1..75: mol_type = other DNA
catggaaaaaaccgatggaacaccggtgccgattaacaataccagcggcgcgacctttgtgctgagtaacggcaa

SEQ ID NO: 705524 - DNA, 75 bp, synthetic construct
  source 1..75: mol_type = other DNA
ttgctttgccactgtctcagcatagtgacaatgaaacggaaacgaaacgggaatgttcagtcgttattccggatg

SEQ ID NO: 705525 - DNA, 75 bp, synthetic construct
  source 1..75: mol_type = other DNA
cgaagcgcttgaaacaaagattaaaacgcttgccggtcaggctgagaaattgctagaagaggccgacttcgtcaa

SEQ ID NO: 705526 - DNA, 75 bp, synthetic construct
  source 1..75: mol_type = other DNA
atttcccggaagccagccatcaggttgtgctgctatccaccgatactgaagtggacgagcgttatttcgtcgatc

SEQ ID NO: 705527 - DNA, 75 bp, synthetic construct
  source 1..75: mol_type = other DNA
ctctacaccacgccgaacacctgggtggacgatatcaccgtggtgacgcatgtcgcgcaagactgtaaccacgcg

SEQ ID NO: 705528 - DNA, 75 bp, synthetic construct
  source 1..75: mol_type = other DNA
ttcaaactggcattattgcaggcgctgcctgcggtaattgagaaatccgttgagccgatgaagtcgatcgatggt

SEQ ID NO: 705529 - DNA, 75 bp, synthetic construct
  source 1..75: mol_type = other DNA
ccgggagtggatgagtgctgtcaacgatccacagattaagcaacatggctggttgtgggtgaccagtaatgcccg

SEQ ID NO: 705530 - DNA, 75 bp, synthetic construct
  source 1..75: mol_type = other DNA
gcaatgcgacaggatgaacgcaatctggtgagtcaccagacgaatgaagcgcgtgaacaggatgatgaccgcgag

SEQ ID NO: 705531 - DNA, 75 bp, synthetic construct
  source 1..75: mol_type = other DNA
ctctgacaaaattggcctgccgggcacgcgacgggtgaggtgtactggcaatagcggacactaccatttgttctt

SEQ ID NO: 705532 - DNA, 75 bp, synthetic construct
  source 1..75: mol_type = other DNA
gcacggtcagtaagttgagcaagctgcctcctttagacgttgtgcagttatctggcgtacatccggggatagagt

SEQ ID NO: 705533 - DNA, 75 bp, synthetic construct
  source 1..75: mol_type = other DNA
cctgtcaaaacctgacatagcagatcgcattgctgagctaaaggctgaacgcaatgaagaggtaggtatagacgc

SEQ ID NO: 705534 - DNA, 75 bp, synthetic construct
  source 1..75: mol_type = other DNA
acgaggtgttttgtcgcgagtttcttgtcgatctgaatgctacacaagcagctattcgcgcaggctacgtctcca

SEQ ID NO: 705535 - DNA, 75 bp, synthetic construct
  source 1..75: mol_type = other DNA
gcatggcaggggtgaaaaaactgcaaccgaacctgcgcaccacaccatttgtccttgatccgtttgccattcgcc

SEQ ID NO: 705536 - DNA, 75 bp, synthetic construct
  source 1..75: mol_type = other DNA
taagcgcccaacaaaacgtagaaaccactcgccagactgccgaagccgatcgtgccaagcaggtggcgctgattg

SEQ ID NO: 705537 - DNA, 75 bp, synthetic construct
  source 1..75: mol_type = other DNA
agacacgaattctggctgaacgacagattcaggaaacagaaatcgatcgctattgccgccaaatcggaacaacag

SEQ ID NO: 705538 - DNA, 75 bp, synthetic construct
  source 1..75: mol_type = other DNA
accgtactgcactgatcaccctgcctgccgatcaaaaagcggctggcgtactgccagacggcatggacgatcgcg

SEQ ID NO: 705539 - DNA, 75 bp, synthetic construct
  source 1..75: mol_type = other DNA
cggtgaactatctgttcaaaaccccaggcggtaccctgtatcacagcggcgattcccactactctaactactatg

SEQ ID NO: 705540 - DNA, 75 bp, synthetic construct
  source 1..75: mol_type = other DNA
accgcacggcactgatcaccctgcctgccgatcaaaaagcggctggcgtactgccggacggcatggacgatcgcg

SEQ ID NO: 705541 - DNA, 75 bp, synthetic construct
  source 1..75: mol_type = other DNA
ggacgctgcggtcacgacttgtttgacggagaggtgattaatgcgaccggtgaaacgctcgacaaattgctgaaa

SEQ ID NO: 705542 - DNA, 75 bp, synthetic construct
  source 1..75: mol_type = other DNA
actcagaccagagtcagtgccagttcctgtaaggtggagttccgtcacggtaacataacgctggaaaatccatcg

SEQ ID NO: 705543 - DNA, 75 bp, synthetic construct
  source 1..75: mol_type = other DNA
ggctggctggcggtgtcctgacgggcgccagcgtctatggatttctgtccggaacagattacggcgtggtgtttg

SEQ ID NO: 705544 - DNA, 75 bp, synthetic construct
  source 1..75: mol_type = other DNA
atattgtttattttccccttgaacaaggcctcaatcagtttttacttgatatacgtgaggaaggtgttttccttt

SEQ ID NO: 705545 - DNA, 75 bp, synthetic construct
  source 1..75: mol_type = other DNA
ttctttgtgcgggtaaaaccttcagtagaaggtattgccaccgccgcccagacgctggggcaacgcaccctgtcg

SEQ ID NO: 705546 - DNA, 75 bp, synthetic construct
  source 1..75: mol_type = other DNA
aatgaaattggtgtttcaggcggctcgctagcggcattgacttcacccttaacctcaacaactcccgtagcagaa

SEQ ID NO: 705547 - DNA, 75 bp, synthetic construct
  source 1..75: mol_type = other DNA
gagatggttaacaccatgtcggcgtcgcgcagctatcaggccaacgtggaagtgcttaacacggtgaaaagcatg

SEQ ID NO: 705548 - DNA, 75 bp, synthetic construct
  source 1..75: mol_type = other DNA
ggggacgccggcaaccatcattggcgacgagatgatcccggcgcggtatcgtgggagacccttgaggcggtggtg

SEQ ID NO: 705549 - DNA, 75 bp, synthetic construct
  source 1..75: mol_type = other DNA
aactttgcaacagtgcctagtacaataattctctatatccaaactgaccccgatgagaaaagcatggagacgttg

SEQ ID NO: 705550 - DNA, 75 bp, synthetic construct
  source 1..75: mol_type = other DNA
ttttgaccagctgaaagtgacccgtaaacttctgccggtactggcgggaatgatgtcagatttcgggagcattcg

SEQ ID NO: 705551 - DNA, 75 bp, synthetic construct
  source 1..75: mol_type = other DNA
atgttatcctcatataaaataaaactcctcaatggtgcgatgcgtaatcgggaattacaacttccgatgggaaac

SEQ ID NO: 705552 - DNA, 75 bp, synthetic construct
  source 1..75: mol_type = other DNA
gatcttaatcatccacgtgaactggcttactggtttggacatcagccttgtctggggctgattgtcggcggaaaa

SEQ ID NO: 705553 - DNA, 75 bp, synthetic construct
  source 1..75: mol_type = other DNA
gccaatgcggtattactgcatagctgcgaagtcaccagcggtacgccgggctgctatcgtcaggctgtatgtatc

SEQ ID NO: 705554 - DNA, 75 bp, synthetic construct
  source 1..75: mol_type = other DNA
ggtcttgagctcgagagcgtgtcactcaccaacttcaaccaaacctcgaaagaacatttcaatccgaataacgct

SEQ ID NO: 705555 - DNA, 75 bp, synthetic construct
  source 1..75: mol_type = other DNA
cgttcccgctgaatcagggcagtaacactctcaacttcaatgcctggttacagacaaaaagtgggcgggatgtga

SEQ ID NO: 705556 - DNA, 75 bp, synthetic construct
  source 1..75: mol_type = other DNA
gtggtgtttaagctgaaagattgtaaggggcctgcgagttatcaggtccaggtgacccttaccggtacggaagac

SEQ ID NO: 705557 - DNA, 75 bp, synthetic construct
  source 1..75: mol_type = other DNA
ctggccgtggacaataacctgcatttttccggcaacttattaagccgctcctgcacgctggtggttgatggcgga

SEQ ID NO: 705558 - DNA, 75 bp, synthetic construct
  source 1..75: mol_type = other DNA
gatgtcgcgcaagagcgtagcggtaaagtgcgctttgtgaaagtgaataccgaagctgaacgtgaattgagcagt

SEQ ID NO: 705559 - DNA, 75 bp, synthetic construct
  source 1..75: mol_type = other DNA
tcggatcgaagatgcggcaaaatgcggacgctgcggtcacgacctgtttgacggagaggtgattaatgcgaccgg

SEQ ID NO: 705560 - DNA, 75 bp, synthetic construct
  source 1..75: mol_type = other DNA
cactttcccaccattgccgccagcgatttaatgaacctcgggcagtcagagcgagtaccgttggtatttcaattg

SEQ ID NO: 705561 - DNA, 75 bp, synthetic construct
  source 1..75: mol_type = other DNA
cttaatttcagggcctggttacaggcgaaagaagggcgtgcagtaacgcccggtaattttactgcccagttaacc

SEQ ID NO: 705562 - DNA, 75 bp, synthetic construct
  source 1..75: mol_type = other DNA
taatcttaactttaaggcttggttgcaggcgaaatctgggcgtgaagtcacttctggtgaatttactgccagcct

SEQ ID NO: 705563 - DNA, 75 bp, synthetic construct
  source 1..75: mol_type = other DNA
gaacaagccgtccgctccagaaaagttgaggcagaacgcgaggttcgcattaaagaaattgaacagcagcaggtt

SEQ ID NO: 705564 - DNA, 75 bp, synthetic construct
  source 1..75: mol_type = other DNA
ctgtcgattgattcgtcatcttctgcaacgggtgttgggattggcattgaaactgccggaggggcggctgtacct

SEQ ID NO: 705565 - DNA, 75 bp, synthetic construct
  source 1..75: mol_type = other DNA
ttcaatgcctggttacaggcaaaaagcggtcgtgatgtaaccaatggtaatttcaccgccagcctgaccgcaacg

SEQ ID NO: 705566 - DNA, 75 bp, synthetic construct
  source 1..75: mol_type = other DNA
atgaaaacaaagaccggatgtatgctcctggcaggcctgctgctcgccgccagcgaaaccacgcaggcggcggat

SEQ ID NO: 705567 - DNA, 75 bp, synthetic construct
  source 1..75: mol_type = other DNA
gaccagctggtgattaatggtggtcaggcaaccggcaaaacctggcttgcgtttacaaatgtcggaaacagtaac

SEQ ID NO: 705568 - DNA, 75 bp, synthetic construct
  source 1..75: mol_type = other DNA
tacacaacatgtgcgtgccggcttccgtctgggcagccacaacgatatgacctttggcgaaggctcctcatcccg

SEQ ID NO: 705569 - DNA, 75 bp, synthetic construct
  source 1..75: mol_type = other DNA
tcggagggacggctgaatccaccaccatcaataaaaatggccggcaggttatctggtcttcggggatggcacggg

SEQ ID NO: 705570 - DNA, 75 bp, synthetic construct
  source 1..75: mol_type = other DNA
aaaacggtaaggctgacggtgttgttctggagtccggtggtcgcctggatgtactggagggccattcagcctgga

SEQ ID NO: 705571 - DNA, 75 bp, synthetic construct
  source 1..75: mol_type = other DNA
tgtgaagttcgggcatggcagtgcacaacatgtgcgtgccggtttccgtctgggcagccacaacgatatgagctt

SEQ ID NO: 705572 - DNA, 75 bp, synthetic construct
  source 1..75: mol_type = other DNA
ggtaccgccacacatgtcaccctgaaacagggtggagcactggttaccagtactgcggcaacggttcttggcagc

SEQ ID NO: 705573 - DNA, 75 bp, synthetic construct
  source 1..75: mol_type = other DNA
gttcagggcggttatgcccacagcgtcagcggcagcagcgctgaaggttataacggtcaggccacgctgaatgtg

SEQ ID NO: 705574 - DNA, 75 bp, synthetic construct
  source 1..75: mol_type = other DNA
ggacctgcaggccggactggaagcccgtgtccgggaaaatatcaccctgggcgttcaggccggttatgcccacag

SEQ ID NO: 705575 - DNA, 75 bp, synthetic construct
  source 1..75: mol_type = other DNA
tggtgaaaacaacagcgtccgtctcagcattcagggcggtcatctcggtcacgataacaatggcggtattgcccg

SEQ ID NO: 705576 - DNA, 75 bp, synthetic construct
  source 1..75: mol_type = other DNA
ctgcgcgacagtacaaaacaccgtgtgagtgaactgccggtgaactggtgggtacagccttctgttatccgcacc

SEQ ID NO: 705577 - DNA, 75 bp, synthetic construct
  source 1..75: mol_type = other DNA
aggccggactggaagcccgtgtccggggaaatatcaccctgagcgttcaggccggttatgcccacagcgtcagcg

SEQ ID NO: 705578 - DNA, 75 bp, synthetic construct
  source 1..75: mol_type = other DNA
gctgaaggaacagcaataccactgtggtttatgccggcggcgaccagactgtacatggctacgcgctggatacca

SEQ ID NO: 705579 - DNA, 75 bp, synthetic construct
  source 1..75: mol_type = other DNA
aatgtcaccctgaagcagggcggcgcactggttaccagtacggctgcaaccgttaccggcataaaccgcctggga

SEQ ID NO: 705580 - DNA, 75 bp, synthetic construct
  source 1..75: mol_type = other DNA
ctggcccgcgcacggggtaaacgtggcggtgtggcggttgcactgtctcttgccgcagtcacgtcactcccggtg

SEQ ID NO: 705581 - DNA, 75 bp, synthetic construct
  source 1..75: mol_type = other DNA
taccctggcagtgtctgccggtggtaaggcaacagatgtcaccatgacatccggtggtgccctgattgcagacag

SEQ ID NO: 705582 - DNA, 75 bp, synthetic construct
  source 1..75: mol_type = other DNA
ctggctgctgacacggttgtacaggcgggagaaaccgtgaacggcggaacactggaaaatcatgacaaccagatt

SEQ ID NO: 705583 - DNA, 75 bp, synthetic construct
  source 1..75: mol_type = other DNA
tgggtacagccgcagccggcagtaacatgacgttctcaccgtcacagaatggcacgtcactggacctgcaggccg

SEQ ID NO: 705584 - DNA, 75 bp, synthetic construct
  source 1..75: mol_type = other DNA
gaccccacgaatgtcaccctgacatccggtgccacctggaatatccccgataacgccacggttcagtcggtggtg

SEQ ID NO: 705585 - DNA, 75 bp, synthetic construct
  source 1..75: mol_type = other DNA
ggatactggctggctcccgcagccatcagaccagtgtaagcggtgaaaataacagcgtccgtctcagcattcagg

SEQ ID NO: 705586 - DNA, 75 bp, synthetic construct
  source 1..75: mol_type = other DNA
caccctgggcgttcaggccggttatgcccacagcgtcagcggcagcagcgctgaaggctataacggtcaggctac

SEQ ID NO: 705587 - DNA, 75 bp, synthetic construct
  source 1..75: mol_type = other DNA
gcagccatcagaccggtgtaaacggtgaaaataacagcgtccgtctcagcattcagggcggtcatctcggtcacg

SEQ ID NO: 705588 - DNA, 75 bp, synthetic construct
  source 1..75: mol_type = other DNA
caactggaaaaaccatcctgaacctggtgaacgccggcaacagtgcgtcggggctggcgaccagcggtaagggta

SEQ ID NO: 705589 - DNA, 75 bp, synthetic construct
  source 1..75: mol_type = other DNA
tcttcggggatagcccgggacactctcatttacacaggaggtgaccagacggtacacggagaggcacataacaca

SEQ ID NO: 705590 - DNA, 75 bp, synthetic construct
  source 1..75: mol_type = other DNA
tcagcattcagggcggtcatctcggtcacgataacaacggcggtattgcccgtggagccacgccggaaagcagcg

SEQ ID NO: 705591 - DNA, 75 bp, synthetic construct
  source 1..75: mol_type = other DNA
ccggggcctttaactacaccctcaaccgggacagtgatgagagctggtatctgcgcagtgaagaacgttatcgtg

SEQ ID NO: 705592 - DNA, 75 bp, synthetic construct
  source 1..75: mol_type = other DNA
tctggagtccggcggtcgcctggatgtactggaaggccattcagcgcagaaaacacgggtggatgacggcggaac

SEQ ID NO: 705593 - DNA, 75 bp, synthetic construct
  source 1..75: mol_type = other DNA
ctggctgctgacacggttgtacagacgggagaaaccgtgagcggcggaacactggaaaatcatgacaaccagatt

SEQ ID NO: 705594 - DNA, 75 bp, synthetic construct
  source 1..75: mol_type = other DNA
cgtgctgaagtccccctgtatgcctccatgctgacacaggcaatggactatgaccggattctggcaggctcccgc

SEQ ID NO: 705595 - DNA, 75 bp, synthetic construct
  source 1..75: mol_type = other DNA
gaaagttatcgaaggggcttacgaagtggtgggggtttttgaccggattgaggaaaagcgtgatgccatgcagtc

SEQ ID NO: 705596 - DNA, 75 bp, synthetic construct
  source 1..75: mol_type = other DNA
aggcacgctgacgctgaacgacagtaccgtcaccacggatgtcattgctcagcgcggtacagccctgaagctgac

SEQ ID NO: 705597 - DNA, 75 bp, synthetic construct
  source 1..75: mol_type = other DNA
tctggagtccggcggtcgcctggatgtactggagggccattcagcctggaaaactctggtggatgacggcggtac

SEQ ID NO: 705598 - DNA, 75 bp, synthetic construct
  source 1..75: mol_type = other DNA
ataaacgtaccgttgcaggtttccatctcgttggcccgtgggaacagacggtaaagaaaggttttgagcagttga

SEQ ID NO: 705599 - DNA, 75 bp, synthetic construct
  source 1..75: mol_type = other DNA
cgcgctgagccgtgctgttgcaaaaagtaactccccggtaacgttccataaactgaccaccagtaacctcaccgg

SEQ ID NO: 705600 - DNA, 75 bp, synthetic construct
  source 1..75: mol_type = other DNA
ggcacatcactggacctgcaggccggactggaagcccgtgtccgggaaaatatcaccctgggcgttcaggccggt

SEQ ID NO: 705601 - DNA, 75 bp, synthetic construct
  source 1..75: mol_type = other DNA
ggtgaagcgtctgatgtcacccagaacacgggaggtgcactggttaccagcactgctgcaactgtcaccggtaca

SEQ ID NO: 705602 - DNA, 75 bp, synthetic construct
  source 1..75: mol_type = other DNA
catgtgcgtgccggtttccgtctgggcagccacaacgatatgatctttggtgaaggcacctcatcccgtgacacc

SEQ ID NO: 705603 - DNA, 75 bp, synthetic construct
  source 1..75: mol_type = other DNA
cattgtggcacagggaacccgccacagtatgaaagcgtcatcgggcaataacgacttccacgcacggggccgggg

SEQ ID NO: 705604 - DNA, 75 bp, synthetic construct
  source 1..75: mol_type = other DNA
ggtttccgtctgggcagccacaacgatatgagctttggtgaaggcacctcatcccgtgacaccctgcgcgacagt

SEQ ID NO: 705605 - DNA, 75 bp, synthetic construct
  source 1..75: mol_type = other DNA
accggtctgcccttcagtatcactgacaacctgatgctggagccacggctgcagtacacctggcaggggctttcg

SEQ ID NO: 705606 - DNA, 75 bp, synthetic construct
  source 1..75: mol_type = other DNA
cgtctgggcagccacaacgatatgacctttggcgaaggcacctcatcccgtgacaccctgcgcgacagtgcaaaa

SEQ ID NO: 705607 - DNA, 75 bp, synthetic construct
  source 1..75: mol_type = other DNA
gctgggctcactggaaaccggtctgcccttcagtattactgacaacctgatgctggagccacggctgcagtacac

SEQ ID NO: 705608 - DNA, 75 bp, synthetic construct
  source 1..75: mol_type = other DNA
gaatatgctgcaggccggggcctttaactactccctcaaccgggacagtgatgagagctggtatctgcgcagtga

SEQ ID NO: 705609 - DNA, 75 bp, synthetic construct
  source 1..75: mol_type = other DNA
gggcttaaccggggcgcaattactgttgccttcaacggaatcactcacctggccgcggttatcggccttctggca

SEQ ID NO: 705610 - DNA, 75 bp, synthetic construct
  source 1..75: mol_type = other DNA
tgctgtgctgcccggcattcgcaatttgctggcagatctccgtgcacagcagattccggttgggctggcttctgt

SEQ ID NO: 705611 - DNA, 75 bp, synthetic construct
  source 1..75: mol_type = other DNA
ctcccggggtgacatgagcatgggtacagccgccgccggcagtaacatgacgttctcaccgtcccggaatggcac

SEQ ID NO: 705612 - DNA, 75 bp, synthetic construct
  source 1..75: mol_type = other DNA
caggggctttcgctggatgacggtaaggacaacgccggttatgtgaagttcgggcatggcagtgcacagcatgtg

SEQ ID NO: 705613 - DNA, 75 bp, synthetic construct
  source 1..75: mol_type = other DNA
ggggcgcaattactgttgccctcaacggactccctgacctggtcgcggttatcggccttctggcaaaacgtatag

SEQ ID NO: 705614 - DNA, 75 bp, synthetic construct
  source 1..75: mol_type = other DNA
cgctgttctacccggcattcgctctttgctggcagatctccgcgcacaacagatcccggtagggctggcttctgt

SEQ ID NO: 705615 - DNA, 75 bp, synthetic construct
  source 1..75: mol_type = other DNA
caattgatggcgcgtggtggtcgttatgaaaaagccggacacgcaattaccggattaagaatcattggtgaagta

SEQ ID NO: 705616 - DNA, 75 bp, synthetic construct
  source 1..75: mol_type = other DNA
tacagggtccaattctgccgataatatagcgggcgtttattacagacccgttcaaaagtatataaatggcacctg

SEQ ID NO: 705617 - DNA, 75 bp, synthetic construct
  source 1..75: mol_type = other DNA
gttaacgcaggggagattcgctttgataatcagacaacacaggatgccgtgctgagccgtgctgttgcaaaaggc

SEQ ID NO: 705618 - DNA, 75 bp, synthetic construct
  source 1..75: mol_type = other DNA
tcaccctgggcgttcaggctggttatgtccacagcgtcagcggcagcagcgctgaaggatataacggtcaggcca

SEQ ID NO: 705619 - DNA, 75 bp, synthetic construct
  source 1..75: mol_type = other DNA
tcaccctgggcgttcaggcaggttatggccacagcgtcagcggcagcagcgctgaaggatataacggtcaggcca

SEQ ID NO: 705620 - DNA, 75 bp, synthetic construct
  source 1..75: mol_type = other DNA
cgcccgtcgtggatatgccttaacgcgggcacatgagcagcaggctcatgatggttgtgatgaactcatggccga

SEQ ID NO: 705621 - DNA, 75 bp, synthetic construct
  source 1..75: mol_type = other DNA
ccgccaacaatactactgtcaccggtggtggtcttcagagagtgaatgccggaggaagcgtttcagacacggtta

SEQ ID NO: 705622 - DNA, 75 bp, synthetic construct
  source 1..75: mol_type = other DNA
gaagttcgggcatggcagtacacaacatgtgcgtgccggcttccgtctgggcagccacaacgatatgacctttgg

SEQ ID NO: 705623 - DNA, 75 bp, synthetic construct
  source 1..75: mol_type = other DNA
ccgtatccatgggaaatggcggtgtactgctggccgattccggggccgctgtcagtggtacccggagcgacggaa

SEQ ID NO: 705624 - DNA, 75 bp, synthetic construct
  source 1..75: mol_type = other DNA
ctgaccaccagtaacctcaccggtcaggggggcaccatcaatatgcgtgttcgccttgatggcagcaatgcctct

SEQ ID NO: 705625 - DNA, 75 bp, synthetic construct
  source 1..75: mol_type = other DNA
tcaccctgggcgttcaggctggttatggccacagcgtcagcggcagcagcgctgaaggttataacggtcaggcca

SEQ ID NO: 705626 - DNA, 75 bp, synthetic construct
  source 1..75: mol_type = other DNA
aatggcggtgtactgctggccgattccggtgccgctgtcagtggtacccggagcgacggaaaggcattcagtatc

SEQ ID NO: 705627 - DNA, 75 bp, synthetic construct
  source 1..75: mol_type = other DNA
ctggctgggttcactggaaaccggtctgcccttcagtatcactgacaatctgatgctggagccgcaactgcagta

SEQ ID NO: 705628 - DNA, 75 bp, synthetic construct
  source 1..75: mol_type = other DNA
ctgcccttcagtatcactgacaacctgatgctggagccacaactgcagtacacctggcagggactctccctggat

SEQ ID NO: 705629 - DNA, 75 bp, synthetic construct
  source 1..75: mol_type = other DNA
acgcaatttagaagcataccacagcgataaagacgaaacattgaagatctggaggacgaacgccagatatgtaaa

SEQ ID NO: 705630 - DNA, 75 bp, synthetic construct
  source 1..75: mol_type = other DNA
gacttgtgaggctttctgagcgttatgagtgggtcgcaataggatgttgcggaccgcacagacatatacgatcta

SEQ ID NO: 705631 - DNA, 75 bp, synthetic construct
  source 1..75: mol_type = other DNA
ggtagttgactcaccttttattagatacatggctacaaaaccgggtattgtagttttacgagacaaaacagatca

SEQ ID NO: 705632 - DNA, 75 bp, synthetic construct
  source 1..75: mol_type = other DNA
tcaccctgggcgttcaggcgggttatgtccacagcgtcagcggcagcagcgctgaaggttataacggtcaggcca

SEQ ID NO: 705633 - DNA, 75 bp, synthetic construct
  source 1..75: mol_type = other DNA
tcaccctgggcgttcaggcgggttatgaccacagcgtcagcggcagcagcgctgaaggatataacggtcaggcca

SEQ ID NO: 705634 - DNA, 75 bp, synthetic construct
  source 1..75: mol_type = other DNA
tcaccctgggcgttcaggccggttatggccacagcgtcagcggcagcagcgctgaaggctataacggtcaggcca

SEQ ID NO: 705635 - DNA, 75 bp, synthetic construct
  source 1..75: mol_type = other DNA
atgtgcacaaatacggacttgcgctgaacacggtaattaacgaggggggctggcaggttgttaaggcaggtggta

SEQ ID NO: 705636 - DNA, 75 bp, synthetic construct
  source 1..75: mol_type = other DNA
tcaccctgggcgttcaggcgggttatggccacagcgtcagcggcagcagcgctgaagggtataacggtcaggcca

SEQ ID NO: 705637 - DNA, 75 bp, synthetic construct
  source 1..75: mol_type = other DNA
tcaccctgggcgttcaggcgggttatgcccacagcgtcagcggcagcagcgctgaaggctataacggtcaggcca

SEQ ID NO: 705638 - DNA, 75 bp, synthetic construct
  source 1..75: mol_type = other DNA
ccgtatccatgggaaatggcggagtactgctggccgattccggtgccgctgtcagtggtacccggagcgacggaa

SEQ ID NO: 705639 - DNA, 75 bp, synthetic construct
  source 1..75: mol_type = other DNA
atgctggagccgcaactgcagtacacctggcagggactctccctggatgacggccaggataacgccggttatgtg

SEQ ID NO: 705640 - DNA, 75 bp, synthetic construct
  source 1..75: mol_type = other DNA
tggctgggctcactggaaaccggtctgcccttcagtatcactgacaacctgatgctggagccacggctgcagtac

SEQ ID NO: 705641 - DNA, 75 bp, synthetic construct
  source 1..75: mol_type = other DNA
acggacaataacgacttccgcgcccggggttggggctggctgggttcactggaaaccggtctgcccttcagtatc

SEQ ID NO: 705642 - DNA, 75 bp, synthetic construct
  source 1..75: mol_type = other DNA
tcaccctgggcgttcaggccggttatgcccacagtgtcagcggcaacagcgctgaaggttataacggtcaggcca

SEQ ID NO: 705643 - DNA, 75 bp, synthetic construct
  source 1..75: mol_type = other DNA
ggttatgcccacagcgtcagcggcagcagcgctgaagggtataacggtcaggccacactgaatgtgaccttctga

SEQ ID NO: 705644 - DNA, 75 bp, synthetic construct
  source 1..75: mol_type = other DNA
atcaccctgggcgttcaggccggttatgcccacagcgtcagcggcagcagcgctgaaggctataacggtcaggcc

SEQ ID NO: 705645 - DNA, 75 bp, synthetic construct
  source 1..75: mol_type = other DNA
atgaaaaaaagcctgcttggtttaaccttcgcgtccctgatgttctctgccggttcagcggttgccgccgattac

SEQ ID NO: 705646 - DNA, 75 bp, synthetic construct
  source 1..75: mol_type = other DNA
tatccggtcaggccagcggcctgctactggaaaatggcggcagctttacggttaatgccgggggacaggccggta

SEQ ID NO: 705647 - DNA, 75 bp, synthetic construct
  source 1..75: mol_type = other DNA
agtctgagtggcagaacacagctcagtaaaggcgccagcatggtactgaatggcgatgtggtcagtaccggcgat

SEQ ID NO: 705648 - DNA, 75 bp, synthetic construct
  source 1..75: mol_type = other DNA
cagcgtccgtctcagcattcagggcggccatctcggtcacgataacaatggcggtattgcccgtggggccacgcc

SEQ ID NO: 705649 - DNA, 75 bp, synthetic construct
  source 1..75: mol_type = other DNA
cacagtgtgcgtgaactgccggtgaactggtgggtacagccttccgttatccgcaccttcagctcccggggtgat

SEQ ID NO: 705650 - DNA, 75 bp, synthetic construct
  source 1..75: mol_type = other DNA
aaactgacaaccagtaacctcaccggtcagggtggcactatcaatatgcgtgttcgccttgatggcagcaatgcc

SEQ ID NO: 705651 - DNA, 75 bp, synthetic construct
  source 1..75: mol_type = other DNA
atgcaggcggcagtgcatccggaacggtgattaaccagtctggctaccagaccattaaacatggcgggcaggcaa

SEQ ID NO: 705652 - DNA, 75 bp, synthetic construct
  source 1..75: mol_type = other DNA
ggcagtacacaacatgtgcgtgccggcttccgtctgggcagccacaacgatatgacctttggcgaaggcacctca

SEQ ID NO: 705653 - DNA, 75 bp, synthetic construct
  source 1..75: mol_type = other DNA
tggaaaccggtctgcccttcagtatcactgacaacctgatgctggagccacaactgcagtacacctggcaggggc

SEQ ID NO: 705654 - DNA, 75 bp, synthetic construct
  source 1..75: mol_type = other DNA
agactggcggggattcacccgttcggtgctgtccatgatgacagaaatcctgcttaaacaggccatggtgggcat

SEQ ID NO: 705655 - DNA, 75 bp, synthetic construct
  source 1..75: mol_type = other DNA
atcagaccggtgtaaacggtgaaaataacagcgtccgtctcagcattcagggcggccatctcggtcacgataaca

SEQ ID NO: 705656 - DNA, 75 bp, synthetic construct
  source 1..75: mol_type = other DNA
gccggaaagcagcggcagctatggcttcgtccgcctggagggtgacctgctgagaacagaggttgccggtatgtc

SEQ ID NO: 705657 - DNA, 75 bp, synthetic construct
  source 1..75: mol_type = other DNA
cccctgtatgcctccatgctgacacaggcaatggactatgaccggattctggcaggctcccgcagccatcagagc

SEQ ID NO: 705658 - DNA, 75 bp, synthetic construct
  source 1..75: mol_type = other DNA
gcggtcatctcggtcacgataacaacggcggtattgcccgtggagccacgccggaaagcagcggcagctatggct

SEQ ID NO: 705659 - DNA, 75 bp, synthetic construct
  source 1..75: mol_type = other DNA
tgttacgcaaacgtccgatgaaactcagtaccacggtgatcttaatggtcagcgcagtgctgttctcggtgctgc

SEQ ID NO: 705660 - DNA, 75 bp, synthetic construct
  source 1..75: mol_type = other DNA
gtggaatcggaacccgggattttcacacaattttttgtccagataccctgggatggggagaggtcgaacagatga

SEQ ID NO: 705661 - DNA, 75 bp, synthetic construct
  source 1..75: mol_type = other DNA
acatgtgcgtgccggcttccgtctgggcagtcacaacgatatgacctttggcgaaggcacctcatcccgtgacac

SEQ ID NO: 705662 - DNA, 75 bp, synthetic construct
  source 1..75: mol_type = other DNA
ctctgtttctggccggcgggagcggcatggcgaatggccataccgagaaccgtcagtttattcacgaccagctgc

SEQ ID NO: 705663 - DNA, 75 bp, synthetic construct
  source 1..75: mol_type = other DNA
atggcacatccaccacggctgaatgacgacaaaccggttatctggacggtatctgtaacgcgcctgttcgagctg

SEQ ID NO: 705664 - DNA, 75 bp, synthetic construct
  source 1..75: mol_type = other DNA
aggaacttggtcgcaatgccatagaaactgaggtagcggaacgtttagggatcgacatcgccggctatcgccaaa

SEQ ID NO: 705665 - DNA, 75 bp, synthetic construct
  source 1..75: mol_type = other DNA
caaaacgggatatctggacggaaaaattactgatgacggcgaatttattcctgccccgcgcaatgaggcgacaaa

SEQ ID NO: 705666 - DNA, 75 bp, synthetic construct
  source 1..75: mol_type = other DNA
aatgccaggaataatggattctatgttgccggtgtctataaagaaaaggcgtccggtgcaagagctgaccgcccg

SEQ ID NO: 705667 - DNA, 75 bp, synthetic construct
  source 1..75: mol_type = other DNA
cttacgctgcatcaggccctgaagcgggtggcggaagagggggactgtgctgacacggccaggagcctgcttggc

SEQ ID NO: 705668 - DNA, 75 bp, synthetic construct
  source 1..75: mol_type = other DNA
gcctgctggtttatcgtccgccgatcgacacccgttcggtgaaagaagtgataggccagaaatccaacggcaacc

SEQ ID NO: 705669 - DNA, 75 bp, synthetic construct
  source 1..75: mol_type = other DNA
tctttcgtcagcgcggcgttacctttacccgctgggcagaagataacggttacacccgcaatgaggtgtatcgcg

SEQ ID NO: 705670 - DNA, 75 bp, synthetic construct
  source 1..75: mol_type = other DNA
acgctgaaggacggactggcccgctggacgtcgtccgaaaaatgtccccacggcacctggacgctgcgctgggaa

SEQ ID NO: 705671 - DNA, 75 bp, synthetic construct
  source 1..75: mol_type = other DNA
agattggcgcagtgctggaagtcggtgaatctcgggtcagtcagttacatagccaggctattaaacggttacgca

SEQ ID NO: 705672 - DNA, 75 bp, synthetic construct
  source 1..75: mol_type = other DNA
gcagcgttatgtcccgctggtgcgtcacgaagcattgcgcctacaggttcgactgcccgcgagcgtggaacttga

SEQ ID NO: 705673 - DNA, 75 bp, synthetic construct
  source 1..75: mol_type = other DNA
gtcagacctgctaacagatcatttgcatatgtacatgttgatggtctaacgggtagcacaggctttgccgttatt

SEQ ID NO: 705674 - DNA, 75 bp, synthetic construct
  source 1..75: mol_type = other DNA
atggcggtagtgaagagaaacctgtcggcactgtctggtttgcttttgccactgcccgcggcgaaggcattaccc

SEQ ID NO: 705675 - DNA, 75 bp, synthetic construct
  source 1..75: mol_type = other DNA
aagggctgagtcagtaccgctcatacgacagccgtggacagttaattgccgtgaaagacacgcagggccatgaaa

SEQ ID NO: 705676 - DNA, 75 bp, synthetic construct
  source 1..75: mol_type = other DNA
gtgttgatggagatgggcgagaaagacggggtaattaccccggaacgtctcgaaaaactggtgaaagaagtttta

SEQ ID NO: 705677 - DNA, 75 bp, synthetic construct
  source 1..75: mol_type = other DNA
ggaaaaactggtaaaagaagttttacgtcaccgtaatttcgcatcgctgagtttaccgggtctttccgaagagcg

SEQ ID NO: 705678 - DNA, 75 bp, synthetic construct
  source 1..75: mol_type = other DNA
acgggacacagtacgatgcgtggggaaaggccatccgtaccacgcagggcggtctgacgcgcagtatggaatacg

SEQ ID NO: 705679 - DNA, 75 bp, synthetic construct
  source 1..75: mol_type = other DNA
aatagataaccacggaaaggaaataacaaacagaaaaggattacctaatgtctgcagagttcatggtaatatgta

SEQ ID NO: 705680 - DNA, 75 bp, synthetic construct
  source 1..75: mol_type = other DNA
aagtgtcttttcagggagatgaaagtacacaaaaaactttaaaagaagcatataaagctgtagcagaaacaaagt

SEQ ID NO: 705681 - DNA, 75 bp, synthetic construct
  source 1..75: mol_type = other DNA
atgagcaacggcattgtgatcattggttcgggcttcgccgcccgccaactggtgaaaaatattcgcaaacaggac

SEQ ID NO: 705682 - DNA, 75 bp, synthetic construct
  source 1..75: mol_type = other DNA
ccgccgacagcatggatgagtacaacaaacctgacctcagccatgttatcagtcaggggcaacgtgccgatgacc

SEQ ID NO: 705683 - DNA, 75 bp, synthetic construct
  source 1..75: mol_type = other DNA
acgtgaagagacgctggcgcagcatggcgcggtgagtgaacccgtcgtggtggaaatggcgataggtgcactgaa

SEQ ID NO: 705684 - DNA, 75 bp, synthetic construct
  source 1..75: mol_type = other DNA
ttgatctggaaaaggagcaagaatactgggaaggtgtaactggctggcagttgaaaattgaagaagaaaacacac

SEQ ID NO: 705685 - DNA, 75 bp, synthetic construct
  source 1..75: mol_type = other DNA
actggtgctggatggtaaaaccctcggcgacatctacctgggcaaaatcaaaaagtgggatgatgaagccatcgc

SEQ ID NO: 705686 - DNA, 75 bp, synthetic construct
  source 1..75: mol_type = other DNA
gtctgaaatcaggcgagctggtgctggatggtaaaacccttggtgacatctacctcggcaaaatcaagaagtggg

SEQ ID NO: 705687 - DNA, 75 bp, synthetic construct
  source 1..75: mol_type = other DNA
cgacgtcacggcaccgcagggttcacagaaagctgctgatacaccgcgtaatccgttcaggggcagcaccgcaac

SEQ ID NO: 705688 - DNA, 75 bp, synthetic construct
  source 1..75: mol_type = other DNA
cttgaggatggtgcgtttattccaacgggaatcccctataactcatccgttaacattgctcaatattctgatggc

SEQ ID NO: 705689 - DNA, 75 bp, synthetic construct
  source 1..75: mol_type = other DNA
gcacacgaacaaagttgctgatcaatggagagcaactggatgccgatccggacaatttttctgtcgttcgctgga

SEQ ID NO: 705690 - DNA, 75 bp, synthetic construct
  source 1..75: mol_type = other DNA
ccaccgattatattgatcagggcgcatgggcctggtatccaaattatgcttactttagcgatggccgttttgtca

SEQ ID NO: 705691 - DNA, 75 bp, synthetic construct
  source 1..75: mol_type = other DNA
cgcctggcacgccgcgtattaagcgataacgaatgggcaatctggaaaacgcaccaccagccggtgcgttttctg

SEQ ID NO: 705692 - DNA, 75 bp, synthetic construct
  source 1..75: mol_type = other DNA
atatcgtagagatcgctcgcatagaagcagtgatcgcccgatccggtgagcgcctggcacgccgcgtattaagcg

SEQ ID NO: 705693 - DNA, 75 bp, synthetic construct
  source 1..75: mol_type = other DNA
gcgcccttatgaagaaacaaatctttctcttcctggcgtaaattacaaaaggttgcgtcggttacccaatttatt

SEQ ID NO: 705694 - DNA, 75 bp, synthetic construct
  source 1..75: mol_type = other DNA
acagaaagccgaagcggtgaagtcgggacggtcagctgcggtgtttgagataggtcggctgttagtggaaggagc

SEQ ID NO: 705695 - DNA, 75 bp, synthetic construct
  source 1..75: mol_type = other DNA
taccgcaatgtgtttatccaggatgacccgggaatgcattttcgtcgggttatccgcaacgcggaaggtcagcga

SEQ ID NO: 705696 - DNA, 75 bp, synthetic construct
  source 1..75: mol_type = other DNA
ttcgatgggcggcatgaaacagaccatcagccgtgaagagctgatagcgctcggccagcgtttcggcgttacacc

SEQ ID NO: 705697 - DNA, 75 bp, synthetic construct
  source 1..75: mol_type = other DNA
gaaaaggcgtggtatacctgcgccctaatgaagagacaaatctttcgttaccggaagtaaattaccagcgactgc

SEQ ID NO: 705698 - DNA, 75 bp, synthetic construct
  source 1..75: mol_type = other DNA
tattatataacctcattgaatcaacaatgagagaagctatctgccttattcatgagactatttatgatagaaacg

SEQ ID NO: 705699 - DNA, 75 bp, synthetic construct
  source 1..75: mol_type = other DNA
gtgatgttctggaaccgaaacaagaaagataaagcaactatagccaatgaaaaaaaacgcttcaatcatctgctt

SEQ ID NO: 705700 - DNA, 75 bp, synthetic construct
  source 1..75: mol_type = other DNA
aagctcggcgttgtaaatatgcatgtaacgctggcagatgaacgtcattatgcttgcgccacggtaattatcgaa

SEQ ID NO: 705701 - DNA, 75 bp, synthetic construct
  source 1..75: mol_type = other DNA
ccaagggtgaaacctcgggaaatgtcctcaacgtggtgagcatcacaccggactgcgacaacgatacgctgctgg

SEQ ID NO: 705702 - DNA, 75 bp, synthetic construct
  source 1..75: mol_type = other DNA
aaaaaacggacggcatgatgccggccatcgtgcagcacgccgtatccggcgaagtgctgatgctgggctacatga

SEQ ID NO: 705703 - DNA, 75 bp, synthetic construct
  source 1..75: mol_type = other DNA
acgggatatctggacggaaaaattaccgatgacggcgaatttattcctgccccacgcaatgaggcaacaaaatga

SEQ ID NO: 705704 - DNA, 75 bp, synthetic construct
  source 1..75: mol_type = other DNA
gtggaaaaaccgctgtatgcccggaccagcacagcacaatgtctgctgcgggtgacagatcgtccacaggaataa

SEQ ID NO: 705705 - DNA, 75 bp, synthetic construct
  source 1..75: mol_type = other DNA
tgttcgtcgacggacaaattcgcgaaagtgctgccattatcgcccatacgcaaaaacgtctgcttccgccaccgg

SEQ ID NO: 705706 - DNA, 75 bp, synthetic construct
  source 1..75: mol_type = other DNA
tgctggtgaacccgattgggccgacctgccacaaaggcaccaccagctgcttcggcgacgccggccaccagtggc

SEQ ID NO: 705707 - DNA, 75 bp, synthetic construct
  source 1..75: mol_type = other DNA
ggcaaatgaccctgattatgcgctcaagctcgatgcgtatggcaagctcggcgcgctggtgcagaaaagcaatga

SEQ ID NO: 705708 - DNA, 75 bp, synthetic construct
  source 1..75: mol_type = other DNA
ggtgttgtaaatatgcatgtaacgctggcagatgaacgccactatgcttgtgccacggtaattattgaaagttaa

SEQ ID NO: 705709 - DNA, 75 bp, synthetic construct
  source 1..75: mol_type = other DNA
atattgtggagatcgctcgcatagaagcggtgatcgcccgatccggtgatcgcctggcacgccgcgtattaagcg

SEQ ID NO: 705710 - DNA, 75 bp, synthetic construct
  source 1..75: mol_type = other DNA
cgctacgtttacagctttgatggcgcgcagctctggcgataccgcaccgctgatccgaaacaagttcgcttaatc

SEQ ID NO: 705711 - DNA, 75 bp, synthetic construct
  source 1..75: mol_type = other DNA
gaccaactactacaccagtctggatagtctggaccagatcgactggcccattttgcaggcacgggactttcgccg

SEQ ID NO: 705712 - DNA, 75 bp, synthetic construct
  source 1..75: mol_type = other DNA
gctggtggtaacgctgacgtagcgaagcaaatgaccaaccagcagatagcccgcacttggagtatcagcgaggtc

SEQ ID NO: 705713 - DNA, 75 bp, synthetic construct
  source 1..75: mol_type = other DNA
atggaagggattgaaagcggctggtttatgccgtgtattgaaaaacaaatcatcctatggcgctggcttgttgtc

SEQ ID NO: 705714 - DNA, 75 bp, synthetic construct
  source 1..75: mol_type = other DNA
gacctattctggcgatgaatggcaggcattccttcagcttaatcaggccaaccgcgcgccatttagcgctttttt

SEQ ID NO: 705715 - DNA, 75 bp, synthetic construct
  source 1..75: mol_type = other DNA
aagcattggctatttgagcttctgtggcaatatggataccagcatcactatccgcacgctgactgccattaacgg

SEQ ID NO: 705716 - DNA, 75 bp, synthetic construct
  source 1..75: mol_type = other DNA
atgtttgttcttatcgctggcgttaacgtccataatgaatattatgttaatcgcatcgctgggatcgctggttac

SEQ ID NO: 705717 - DNA, 75 bp, synthetic construct
  source 1..75: mol_type = other DNA
gcagacgtgaacgacgctgatatatttttaatgctgaaagcgtttgtagaaatgggatttgaaatcagtttacat

SEQ ID NO: 705718 - DNA, 75 bp, synthetic construct
  source 1..75: mol_type = other DNA
attgagcgaccaggagcgaaaaaaagcagacgtgaacgacgctgatatatttttaatgttaaaagcgtttgtaga

SEQ ID NO: 705719 - DNA, 75 bp, synthetic construct
  source 1..75: mol_type = other DNA
cgacaccgggaaataataaaaatgcttgaatatgcagcaaaatcgtttgacttaattattcctgcacattggcga

SEQ ID NO: 705720 - DNA, 75 bp, synthetic construct
  source 1..75: mol_type = other DNA
gtccgtgagtggtttgattttgacattaagcgattctatcgagtagatgacggtcctatctatcggttgcagtgg

SEQ ID NO: 705721 - DNA, 75 bp, synthetic construct
  source 1..75: mol_type = other DNA
tgctgcgcaaggttgatataagtcggggtacatactattcacggttgaagaagtacgggattaaggcagagttct

SEQ ID NO: 705722 - DNA, 75 bp, synthetic construct
  source 1..75: mol_type = other DNA
cccgcccgattaaaggcacgctaccacgcctgcccgatcctcaggaagatagcaaacaagcagaaaaactggcga

SEQ ID NO: 705723 - DNA, 75 bp, synthetic construct
  source 1..75: mol_type = other DNA
aattcagacccgcccgattaaaggcacgctgccacgcctgtccgaccctctggaggatcgcaaacaagcagagaa

SEQ ID NO: 705724 - DNA, 75 bp, synthetic construct
  source 1..75: mol_type = other DNA
ggaaaaccagcaaattacaccgcagggtgatttcacgctaacctctgcctggcaatctaatatgagccgcgaaca

SEQ ID NO: 705725 - DNA, 75 bp, synthetic construct
  source 1..75: mol_type = other DNA
ggctcgatggttttccggatccggacattgcacgcgatctctatttccatgcttttccgctggttgatattacgc

SEQ ID NO: 705726 - DNA, 75 bp, synthetic construct
  source 1..75: mol_type = other DNA
ctcaccagtggctgttcctgtatcaactggaacaactgctcgccgagcgcaaatctgccgatccggaaacctcct

SEQ ID NO: 705727 - DNA, 75 bp, synthetic construct
  source 1..75: mol_type = other DNA
ctgatgtatcacctgctggtgctgctgcaagaccaggacctcgacctgacgacggtgattgagaatttacgtaag

SEQ ID NO: 705728 - DNA, 75 bp, synthetic construct
  source 1..75: mol_type = other DNA
ttgacatgcccgataacgctggacacacctgagaatggagtgttcatgagaaactcacgaggtgctgagatatgc

SEQ ID NO: 705729 - DNA, 75 bp, synthetic construct
  source 1..75: mol_type = other DNA
ggcgaagaaggcgtggaaaccgcactagcagcaacggtacatgaccgctttgagctgaccaacgaggcatctgac

SEQ ID NO: 705730 - DNA, 75 bp, synthetic construct
  source 1..75: mol_type = other DNA
ttgatgtatcacctgctggtgctgttgcaggatcaggatctggatttaacgacggtgattgagaacctgcgtaaa

SEQ ID NO: 705731 - DNA, 75 bp, synthetic construct
  source 1..75: mol_type = other DNA
aaaaaaccgacggactgatgcccgccatcgtacaacacgcggtctccggcgaagtcttaatgctgggctatatga

SEQ ID NO: 705732 - DNA, 75 bp, synthetic construct
  source 1..75: mol_type = other DNA
gatgaaattgctataggcaagtacccgatcatttcactggcagacgccaggcagatcaaaaacagcttactggct

SEQ ID NO: 705733 - DNA, 75 bp, synthetic construct
  source 1..75: mol_type = other DNA
ggcgatatctatctgggtaaaatcaaaaagtgggatgatgaagctatcgtcaaattgaacccgggtctgaaactg

SEQ ID NO: 705734 - DNA, 75 bp, synthetic construct
  source 1..75: mol_type = other DNA
acctgccgggtcttaaatctggcgaactggtgctggatggtaaaaccctcggtgacatctacctgggcaaaatta

SEQ ID NO: 705735 - DNA, 75 bp, synthetic construct
  source 1..75: mol_type = other DNA
ggatgtgaatacggtggtggcaggccgggcaatgccggtgctggagtcggacgtttacgaaaccaaatcgacgtc

SEQ ID NO: 705736 - DNA, 75 bp, synthetic construct
  source 1..75: mol_type = other DNA
atgtggaagagtgataacgaactttttgctttgatgaaaacccggctatttaccgccgtggttggcgatattctc

SEQ ID NO: 705737 - DNA, 75 bp, synthetic construct
  source 1..75: mol_type = other DNA
agtggtggaaagtgtccgcagtagcaaaacaggtcaaccagcacccgcgacgggtaataaactggcgatccggtt

SEQ ID NO: 705738 - DNA, 75 bp, synthetic construct
  source 1..75: mol_type = other DNA
tacgggattaaggcagagttctttatgagtattgacgatggagaactttttccgataaaatgtaagtcctctaaa

SEQ ID NO: 705739 - DNA, 75 bp, synthetic construct
  source 1..75: mol_type = other DNA
gttccgtaagcacctggagctgtacaaagatatcgacaaagcgaagctgcgcgaaaactttgccgtcttcctgaa

SEQ ID NO: 705740 - DNA, 75 bp, synthetic construct
  source 1..75: mol_type = other DNA
actggacccgtactgacctcgaatacgtgctgccagacggctccaaagcgctgcgcttcgaccagatcgaattcg

SEQ ID NO: 705741 - DNA, 75 bp, synthetic construct
  source 1..75: mol_type = other DNA
tgaagacaaagcgcgtctgacccgtaacatcatcgctggtctgccaggtgcggaagaagggtacaccctcgacca

SEQ ID NO: 705742 - DNA, 75 bp, synthetic construct
  source 1..75: mol_type = other DNA
atgaccacccaactcatcaccgtgttcaacggaaccatttcgaacgaaaccatccttctatgcaacgctcgcgat

SEQ ID NO: 705743 - DNA, 75 bp, synthetic construct
  source 1..75: mol_type = other DNA
taaaagcaagttgcttaaaaagcttgctcaagactcgtcagttgagagggtaacaattggtcagagagtggtaaa

SEQ ID NO: 705744 - DNA, 75 bp, synthetic construct
  source 1..75: mol_type = other DNA
aatatgttatcaagtcagaagacgactttgtatcttttgtaacagaaatgctcggaaggaaggacatcgactcaa

SEQ ID NO: 705745 - DNA, 75 bp, synthetic construct
  source 1..75: mol_type = other DNA
tccggcgggacggaaccgtccgcttttcctgataccctgccggactacacggaatatggccgggacaacggtatc

SEQ ID NO: 705746 - DNA, 75 bp, synthetic construct
  source 1..75: mol_type = other DNA
gctggcggcgaattcagcggcgaaatcaccggcgtgacggatggcgcaggccgtcacttccggctggtactgacc

SEQ ID NO: 705747 - DNA, 75 bp, synthetic construct
  source 1..75: mol_type = other DNA
ctcatcccggaaggggttatccgcacggatgatgagcgcacccaccggtaccattacgacagtcagcaccggctg

SEQ ID NO: 705748 - DNA, 75 bp, synthetic construct
  source 1..75: mol_type = other DNA
ataccgtaaacagcatggcgaacggtttcaccatgtgcaccggttcctacggcgtgcgtgctgacaacgatctgg

SEQ ID NO: 705749 - DNA, 75 bp, synthetic construct
  source 1..75: mol_type = other DNA
attggtcgtctgaaaggcctggccgaagttcgcggtgtcgaactggcgatccagcgcgctttctttagccgttaa

SEQ ID NO: 705750 - DNA, 75 bp, synthetic construct
  source 1..75: mol_type = other DNA
actggacccgtactgacctcgaatacgtactgccggacggctccaaagccctgcgtttcgaccagatcgaatttg

SEQ ID NO: 705751 - DNA, 75 bp, synthetic construct
  source 1..75: mol_type = other DNA
acccaccacctgcgatggtggcggcctccatcctgcagcgccgtggcgatacagcagcccttaccctgctacagg

SEQ ID NO: 705752 - DNA, 75 bp, synthetic construct
  source 1..75: mol_type = other DNA
gcaaacggcacaaactggtgataaccaaccctggcaggttaatgatgtttctacagcagagctgaatgcgaagac

SEQ ID NO: 705753 - DNA, 75 bp, synthetic construct
  source 1..75: mol_type = other DNA
gcagggcttcgtacctgtattgaagcgttgtgcgatgatgatattgcctggcaaacggcacaaattggtgataac

SEQ ID NO: 705754 - DNA, 75 bp, synthetic construct
  source 1..75: mol_type = other DNA
ctggttgccatttattaccaatttccgcgtccaggatcaggcgttctatcacgatcgccactcgtttgaggctgt

SEQ ID NO: 705755 - DNA, 75 bp, synthetic construct
  source 1..75: mol_type = other DNA
aagtacgggattaaggcagagttctttatgtcggttgacgatggagaactttttccgataaaatgtaagtcctct

SEQ ID NO: 705756 - DNA, 75 bp, synthetic construct
  source 1..75: mol_type = other DNA
gtccgagattggtttgattttgatatcaagcgttattatcgcattgatgacggtcctatctatcggttgcagtgg

SEQ ID NO: 705757 - DNA, 75 bp, synthetic construct
  source 1..75: mol_type = other DNA
attccagtgaaatcagccggaaaaaatcaggcactgcgttttgtatttaaaggtgaaacgcagccggcgatgaaa

SEQ ID NO: 705758 - DNA, 75 bp, synthetic construct
  source 1..75: mol_type = other DNA
gccagacagtaatgcctccagccaacaaatgcgcctcgaaagtgataaacatctggtgcagattgtcacgatcca

SEQ ID NO: 705759 - DNA, 75 bp, synthetic construct
  source 1..75: mol_type = other DNA
atctggcgcaaacgcggcgttatgccgatgctgcgggcgctgatgtcggcgcgcaacattgcagaaaacctgctg

SEQ ID NO: 705760 - DNA, 75 bp, synthetic construct
  source 1..75: mol_type = other DNA
gattgtcagccgggatctatttacctgcaataaaactttaccaccacgcgaggtagagccgaattttggtgcaat

SEQ ID NO: 705761 - DNA, 75 bp, synthetic construct
  source 1..75: mol_type = other DNA
atttccgtgtacaggatcaggcgttctatcacgatcgccactcgtttgaagcagttctggatcttaacgctgcgc

SEQ ID NO: 705762 - DNA, 75 bp, synthetic construct
  source 1..75: mol_type = other DNA
gataaaaaaggtgacaccgacgtccatcaaagtgcgctcggacgcttgctgcaaaaaggggaaccaaaggatgcg

SEQ ID NO: 705763 - DNA, 75 bp, synthetic construct
  source 1..75: mol_type = other DNA
gttacaacgattgcccggcgataactggcgcgtcaccagctactccggtttgcagcagcgtggtcacggtatcgc

SEQ ID NO: 705764 - DNA, 75 bp, synthetic construct
  source 1..75: mol_type = other DNA
tttatctatcagattgccgaccgctacgtgacggaagatgtcattccttgcttgggcgataacggtatcgatttg

SEQ ID NO: 705765 - DNA, 75 bp, synthetic construct
  source 1..75: mol_type = other DNA
ggcctggttgagtttctccagctaactggcaaacaggatgtcatcgactggctgagtacaaataccacttgcccg

SEQ ID NO: 705766 - DNA, 75 bp, synthetic construct
  source 1..75: mol_type = other DNA
gttatgtgctggaaacggttagcccggaaggggagagcgtatatgaagaaatcacctcaattcagaaattgttgc

SEQ ID NO: 705767 - DNA, 75 bp, synthetic construct
  source 1..75: mol_type = other DNA
gctctgcaggccagccatatgtcagtagacgacctggatcgtcgtttccgccggcgcagaacagtatggcgattc

SEQ ID NO: 705768 - DNA, 75 bp, synthetic construct
  source 1..75: mol_type = other DNA
atattggtttaggttctttccaccgcgcacatcaggcgtggtatctgcatcgcctgctggcggggggagatgcgc

SEQ ID NO: 705769 - DNA, 75 bp, synthetic construct
  source 1..75: mol_type = other DNA
caggcgttgatggcgcaaaaaggccgctatgttctggaaacggttagcccggaaggggagaacgaatatgaagag

SEQ ID NO: 705770 - DNA, 75 bp, synthetic construct
  source 1..75: mol_type = other DNA
agcacaaaattattggtttgtgccaggagggcgaatttataaggatgagtcattcgaggttgcatttaaacggat

SEQ ID NO: 705771 - DNA, 75 bp, synthetic construct
  source 1..75: mol_type = other DNA
atggccgtttgcgcaaacagttacgcgctcagcgagtctgaagccgaagatatggccgatttaactgcagttttt

SEQ ID NO: 705772 - DNA, 75 bp, synthetic construct
  source 1..75: mol_type = other DNA
tcgtatctgacagccgatggcgatgcctgggtgacggtatttgaggcatatgctgagaactgggcgagggtgtaa

SEQ ID NO: 705773 - DNA, 75 bp, synthetic construct
  source 1..75: mol_type = other DNA
agatattctggcacttgcaaggcaagtttctgcattaagttcatatacttacagtacaaaaatgtttatgaaaaa

SEQ ID NO: 705774 - DNA, 75 bp, synthetic construct
  source 1..75: mol_type = other DNA
gaacctaaattcagcgatataattcagatagctaaaattactggcgcagatttgaacaccttagcttatggctat

SEQ ID NO: 705775 - DNA, 75 bp, synthetic construct
  source 1..75: mol_type = other DNA
tgctgaacaacgcacagcgcggcggttatgcggttccggcattcaatattcacaatctcgaaacgatgcaagtgg

SEQ ID NO: 705776 - DNA, 75 bp, synthetic construct
  source 1..75: mol_type = other DNA
agagaacttgaaataatacggcataatattaataagtttaattgtgagattagcgaattaaaaattagaaatgag

SEQ ID NO: 705777 - DNA, 75 bp, synthetic construct
  source 1..75: mol_type = other DNA
cttatccgcaagatttacggtattctgcaaatctatcgttctgtaggtgtcacgcgggatgatattgaaaataaa

SEQ ID NO: 705778 - DNA, 75 bp, synthetic construct
  source 1..75: mol_type = other DNA
atgataaaagatgaactttatgagttggtcttaactgatgatccgaaaggaaaattatatgtgagggattcagag

SEQ ID NO: 705779 - DNA, 75 bp, synthetic construct
  source 1..75: mol_type = other DNA
caacgctgaacggaataactggacttctcctgagctggacgatgccgtccataaggcctgggctgatgtagagat

SEQ ID NO: 705780 - DNA, 75 bp, synthetic construct
  source 1..75: mol_type = other DNA
cggcattattcagggcactttgcaggcaccgcaatccagctcctttgccaatatggcccagcggcaacgccaggt

SEQ ID NO: 705781 - DNA, 75 bp, synthetic construct
  source 1..75: mol_type = other DNA
cgaactggatgtgattgcgattatcggcattattttgctgatcggtatcgtgaagaagaacgccatcatgatgat

SEQ ID NO: 705782 - DNA, 75 bp, synthetic construct
  source 1..75: mol_type = other DNA
gcaggtgtcggcgcattgctggcgttgatgattgccggtagtgaactggatgtgatcgccattatcggcattatt

SEQ ID NO: 705783 - DNA, 75 bp, synthetic construct
  source 1..75: mol_type = other DNA
aaggtgcaatgattgaagccgacgacctttctaatctgatcatcgtcatcaacgacaccacagaaatcatgcaag

SEQ ID NO: 705784 - DNA, 75 bp, synthetic construct
  source 1..75: mol_type = other DNA
caggacaccacagaaatcatgcaagaagcggtagcagacttgcaaccactcatagcagaacttatagacagggcg

SEQ ID NO: 705785 - DNA, 75 bp, synthetic construct
  source 1..75: mol_type = other DNA
atatctggagctttagtaacgatttttataaattatttggggaagccgcaaacagctctaaagatcaggagtatt

SEQ ID NO: 705786 - DNA, 75 bp, synthetic construct
  source 1..75: mol_type = other DNA
aaaccatcattgtaaaacaagctctgccctggcttcgtgccgggggcgaaggatggcctttatctctgagccgtg

SEQ ID NO: 705787 - DNA, 75 bp, synthetic construct
  source 1..75: mol_type = other DNA
ctggcaagagtatgtctggcaaccgtggcagccgcggcgtgctgtcatgggcggcaaacttccagatgagataag

SEQ ID NO: 705788 - DNA, 75 bp, synthetic construct
  source 1..75: mol_type = other DNA
ttcagatgtacgatcttattatttctttacaggaagcagttaataaggctctgacctttcccaccgagctaacaa

SEQ ID NO: 705789 - DNA, 75 bp, synthetic construct
  source 1..75: mol_type = other DNA
gatgaaaccagacgttgagcagcagcactacgtgatggctgtgctgatccgtggcggtgtctttggtgagaaatc

SEQ ID NO: 705790 - DNA, 75 bp, synthetic construct
  source 1..75: mol_type = other DNA
cagcattggaactgtcaaaagaccgacgcattgaggatcttgaaaggcaagttcgatttcttgaaacgcggcttg

SEQ ID NO: 705791 - DNA, 75 bp, synthetic construct
  source 1..75: mol_type = other DNA
acggatcaccgatttgaccgacgcccagcgcagcgatctggcgctggcgttgaaaaagctgaccagtcgttatga

SEQ ID NO: 705792 - DNA, 75 bp, synthetic construct
  source 1..75: mol_type = other DNA
gtagccgtaccgttgttgaaaccgaacactggttagccgtagtgccttactgggctgcctggccgttcgaaacgc

SEQ ID NO: 705793 - DNA, 75 bp, synthetic construct
  source 1..75: mol_type = other DNA
atcgacatcaccagcagcattgacgaaccggtcgcccctgccgaaggtattgcccgcgccgttcaggcgggtatt

SEQ ID NO: 705794 - DNA, 75 bp, synthetic construct
  source 1..75: mol_type = other DNA
ggcaatgacgcggatttgctggttatgacaccggaactgcgcattgagcaggtgtacgctcacggcaaactgatg

SEQ ID NO: 705795 - DNA, 75 bp, synthetic construct
  source 1..75: mol_type = other DNA
tttgctggttaatctctttccgatagcattggatgcagaaataactacatccaatgtaaataagcatcaattgca

SEQ ID NO: 705796 - DNA, 75 bp, synthetic construct
  source 1..75: mol_type = other DNA
tccagtcggcgttgggcagcactgtctggctgattgtcgcggcggtggtggcgatgtatatcgtgctcggcattc

SEQ ID NO: 705797 - DNA, 75 bp, synthetic construct
  source 1..75: mol_type = other DNA
cagcgaaaccgtgcgcaccgccattaccggcgctaacgttaactcggcaaaaggtagcctcgacggcccttcccg

SEQ ID NO: 705798 - DNA, 75 bp, synthetic construct
  source 1..75: mol_type = other DNA
cccgccggtttacagcaaagtgaacccggcagatccgccgatcatgacgctcgccgtcacctcaaccgccatgcc

SEQ ID NO: 705799 - DNA, 75 bp, synthetic construct
  source 1..75: mol_type = other DNA
gcgttgacggaaatcgtcaaaacctggcaggaacaaaccgcagagctgggaaaaacgtacccgtgggtgcaggtg

SEQ ID NO: 705800 - DNA, 75 bp, synthetic construct
  source 1..75: mol_type = other DNA
tcacgatccgctgatgcgttgccagagcgcgcgtggcaccagccgggtgatctgcttttcaccggatcacagtaa

SEQ ID NO: 705801 - DNA, 75 bp, synthetic construct
  source 1..75: mol_type = other DNA
gaaaaaggtttaattcccaaacctaaaggcgttagtgctgatccagaattgcgtattaaggtcgtgaaagctgtg

SEQ ID NO: 705802 - DNA, 75 bp, synthetic construct
  source 1..75: mol_type = other DNA
ggtcaaagacttcggtttcagtatcagcgatgccgtgcgtccactcaccagcagcgtcgccggtttcctcaacct

SEQ ID NO: 705803 - DNA, 75 bp, synthetic construct
  source 1..75: mol_type = other DNA
ttatgtaaaaccacggcgaccatcagttatcgcataaaacttctggaagaaaataccggggtggcgctgtttttc

SEQ ID NO: 705804 - DNA, 75 bp, synthetic construct
  source 1..75: mol_type = other DNA
tggaaacgaaaatcgccgcccatctggcgggcgttggcattggttttttgccaaaatcgctttgccagtcaatga

SEQ ID NO: 705805 - DNA, 75 bp, synthetic construct
  source 1..75: mol_type = other DNA
ctgaaaggtatcgaaggtaatacacgggacatcgtgagggaaacgaaaaagcgcacgggacctggtgatattatt

SEQ ID NO: 705806 - DNA, 75 bp, synthetic construct
  source 1..75: mol_type = other DNA
ggttcgcgcctgtgcccttcctctcgataaagacgaaacacaggttctgcttaatgtgctgaatggctccgttgt

SEQ ID NO: 705807 - DNA, 75 bp, synthetic construct
  source 1..75: mol_type = other DNA
agctatccgctcgctgactgcgaagattgatcgccttaatacggtttattccctccacaaatcccgacttagcga

SEQ ID NO: 705808 - DNA, 75 bp, synthetic construct
  source 1..75: mol_type = other DNA
cttccggcactgtgggggatggtctccggtgcggtttctgtgctgggcggggtgctttccggtcttctcagtcct

SEQ ID NO: 705809 - DNA, 75 bp, synthetic construct
  source 1..75: mol_type = other DNA
tctgcgtgggcttgtccggatggccacagcgtggggtgagcgtctgcaggcgtgggtgaatgcgcatccggaact

SEQ ID NO: 705810 - DNA, 75 bp, synthetic construct
  source 1..75: mol_type = other DNA
gtagtgattgcataaaacacttcaaagaaatcatttctgtatgtgataagtataaaatagacagaaaactctata

SEQ ID NO: 705811 - DNA, 75 bp, synthetic construct
  source 1..75: mol_type = other DNA
acgctaattgtcttaccaatccgctctggaaacaaggaaaatcctggaaaactttgactaaaatcctattgctaa

SEQ ID NO: 705812 - DNA, 75 bp, synthetic construct
  source 1..75: mol_type = other DNA
cccgtcgcagcaacgcgtgacacgctggataagtgtacagttgccggagcacgttttggcagttctctggtcagt

SEQ ID NO: 705813 - DNA, 75 bp, synthetic construct
  source 1..75: mol_type = other DNA
ctgcgtggcgctggtacagcaatgatgcttgccggtcttggcgggatgtatgcgggcagccgcatggttgctccg

SEQ ID NO: 705814 - DNA, 75 bp, synthetic construct
  source 1..75: mol_type = other DNA
ttttcatctgcccgcaaacatctcaccgaagtaacagacaaaattaagcgcgcccagcgggaactgaacgggctt

SEQ ID NO: 705815 - DNA, 75 bp, synthetic construct
  source 1..75: mol_type = other DNA
atgattacaggtatccagattactaaagccgctaacgacgatctgctgaactctttctggttgctggacagcgaa

SEQ ID NO: 705816 - DNA, 75 bp, synthetic construct
  source 1..75: mol_type = other DNA
agtggttgcagtaagcaaactgggtgacattgaataccgtgaagttccagtagaagttaaaccagaagttcgcgt

SEQ ID NO: 705817 - DNA, 75 bp, synthetic construct
  source 1..75: mol_type = other DNA
agctttaccagaagaaatttacgttcgtacccgtgaaaatggcgggactgtgctgtattcggccccagagttctc

SEQ ID NO: 705818 - DNA, 75 bp, synthetic construct
  source 1..75: mol_type = other DNA
gcattggtattcacgtttaatgctcttgtggcaataatgcagtttattgcggatgaggatacactccaggggctg

SEQ ID NO: 705819 - DNA, 75 bp, synthetic construct
  source 1..75: mol_type = other DNA
gtcggcgtgcgtatggctgttcacccggacgatccgccgcgcccgatcctcggcctgccgcgcattgtttccacc

SEQ ID NO: 705820 - DNA, 75 bp, synthetic construct
  source 1..75: mol_type = other DNA
atatccgcagctgaccattcgtgtatccggttatgctgttcgcttcaactctctgactccagaacaacagcgcga

SEQ ID NO: 705821 - DNA, 75 bp, synthetic construct
  source 1..75: mol_type = other DNA
gttatttccatgggcgtatacatcggtcagagcacccgtatttacgaccgtgaaaccggcgaaatccactacggt

SEQ ID NO: 705822 - DNA, 75 bp, synthetic construct
  source 1..75: mol_type = other DNA
caccgtgctgatgccgtcttacgtcaacatcggcgcatatgttgatgaaggcaccatggttgatacctgggcgac

SEQ ID NO: 705823 - DNA, 75 bp, synthetic construct
  source 1..75: mol_type = other DNA
gaaggcttccgcgttgtgccaccagcggcggtacgtcagggtgcgttcattgcccgtaacaccgtgctgatgccg

SEQ ID NO: 705824 - DNA, 75 bp, synthetic construct
  source 1..75: mol_type = other DNA
gtatagataatgaatggttctatattgaaatggagtattttcccagccaaaccctggcgcaaaagctcgatgaca

SEQ ID NO: 705825 - DNA, 75 bp, synthetic construct
  source 1..75: mol_type = other DNA
tggaaaaattgtcgcagtaaaaatccctaaggatattactcgggaagaccgtcagcttgccgaaggtaaagagct

SEQ ID NO: 705826 - DNA, 75 bp, synthetic construct
  source 1..75: mol_type = other DNA
gtcagagcacccgtatttacgaccgtgaaaccggcgaaatccactacggtcgcgttccggcagggtctgtggttg

SEQ ID NO: 705827 - DNA, 75 bp, synthetic construct
  source 1..75: mol_type = other DNA
agcaagttaaagacgaaacagcaagagcgcattaccgcttagacgttcgtaacagtccttataaaccaaggttat

SEQ ID NO: 705828 - DNA, 75 bp, synthetic construct
  source 1..75: mol_type = other DNA
ttgaaaaaactccccccccgtaacacaattccgtccgatattcctgaggaaaaagtgccgttatatctacaacgt

SEQ ID NO: 705829 - DNA, 75 bp, synthetic construct
  source 1..75: mol_type = other DNA
atgatgtatctggctgctgccagggaagaggctgaaaagtttttaaaccggacgctttacgatgaaactgtttct

SEQ ID NO: 705830 - DNA, 75 bp, synthetic construct
  source 1..75: mol_type = other DNA
aatgattgcagaagcgttaaaagctgatggcgtagaagaaatttattttcttggcgataaaaaagcggaatccat

SEQ ID NO: 705831 - DNA, 75 bp, synthetic construct
  source 1..75: mol_type = other DNA
ccatgccaccaacctgatcgccctcacctatgtactggaaaacgacaccgcggtcttcactcgccaactgtggga

SEQ ID NO: 705832 - DNA, 75 bp, synthetic construct
  source 1..75: mol_type = other DNA
ttcgatgggcggtatgaaacagactatcagccgtgaagagttgatagccctcggcaagcgtttcggcgtcacccc

SEQ ID NO: 705833 - DNA, 75 bp, synthetic construct
  source 1..75: mol_type = other DNA
caaacgctggtggcggcaaaaaaaaccggttgtctacgtaggcggtggggcaatcacggcgggctgccatctgca

SEQ ID NO: 705834 - DNA, 75 bp, synthetic construct
  source 1..75: mol_type = other DNA
tcccgccagtagcgaatgatgatgtttatatgggtgtactggcacaggcagagaacttcaaaaaacatcatatga

SEQ ID NO: 705835 - DNA, 75 bp, synthetic construct
  source 1..75: mol_type = other DNA
aacgccgttgcaagtgctgcggcgttttttttgagcctaaatatcacaatcaaacgtggtgcagcgatgattgtc

SEQ ID NO: 705836 - DNA, 75 bp, synthetic construct
  source 1..75: mol_type = other DNA
cgtagttattggatcaaacaagttcaaaatgtatttaacgcctatattcgcgaacgtgacgcgcgcttgccgtgt

SEQ ID NO: 705837 - DNA, 75 bp, synthetic construct
  source 1..75: mol_type = other DNA
aattagaacaagcgatcattgaactgttacaggatcagggatatcaacacctgatcggcgataatgtcccacgtt

SEQ ID NO: 705838 - DNA, 75 bp, synthetic construct
  source 1..75: mol_type = other DNA
caggagcaaaaagagttaccgccttctgaaatggtgaagatggtcatgacgcgcggtaaagatgacgacgaggcg

SEQ ID NO: 705839 - DNA, 75 bp, synthetic construct
  source 1..75: mol_type = other DNA
atgagtctctctttcagtgaagcaaaattagaacaagcgatcattgaactgttacaggatcaggggtatcaacat

SEQ ID NO: 705840 - DNA, 75 bp, synthetic construct
  source 1..75: mol_type = other DNA
cagaaatatgcatacgaaacgaaggatggcaaatggctgataataagtcatcaaatagttgataaattaccagaa

SEQ ID NO: 705841 - DNA, 75 bp, synthetic construct
  source 1..75: mol_type = other DNA
gccgggcgtggagcagtacagtattgatgagatgtttctcgacgtgcggggtattgacagctgcatcgatttcga

SEQ ID NO: 705842 - DNA, 75 bp, synthetic construct
  source 1..75: mol_type = other DNA
gggccgagggattgcatctgaatggcaaatgaaacgggagatgctttcaccagcctatacaactcgctggtctga

SEQ ID NO: 705843 - DNA, 75 bp, synthetic construct
  source 1..75: mol_type = other DNA
gcctggtttggtgacagtgccaatgaaaatatcatgcagttcagcgatatttacctgacaacgcgaggtttttaa

SEQ ID NO: 705844 - DNA, 75 bp, synthetic construct
  source 1..75: mol_type = other DNA
gaatgttcagcgccagcccggtgctaacattatctccaccgccgacagcatccggcagatgctgccacagctcac

SEQ ID NO: 705845 - DNA, 75 bp, synthetic construct
  source 1..75: mol_type = other DNA
aaaaacgctggctaaaagtgcacagtgggctacaaagcaatggccacagttttccggtgtggtcgcgctgacggc

SEQ ID NO: 705846 - DNA, 75 bp, synthetic construct
  source 1..75: mol_type = other DNA
tgcgttttcaagtaattatgaactttacgcctcgatatcggcgcgcgtgatgaactgcctggaggaactggcccc

SEQ ID NO: 705847 - DNA, 75 bp, synthetic construct
  source 1..75: mol_type = other DNA
aaaacaccgggcgtgtctcgcgtgctttgcattgagtgtgaagtgccaattccgccagcacgccgccgcgccatt

SEQ ID NO: 705848 - DNA, 75 bp, synthetic construct
  source 1..75: mol_type = other DNA
cagagacatcattattccggtgacggatgaatcatgccggaacgcagccgcagaggtgcaaactttgaagccctg

SEQ ID NO: 705849 - DNA, 75 bp, synthetic construct
  source 1..75: mol_type = other DNA
ccgggtgtgcagctttgcattacctgtcaggaaatcgcagagctgaaaagcaaacattacaacgggggtgctgta

SEQ ID NO: 705850 - DNA, 75 bp, synthetic construct
  source 1..75: mol_type = other DNA
atacagtggatttgttgtgtcagcgtcactacggcatcacccagggcgtgaccgagatcgtactggctgcgaatc

SEQ ID NO: 705851 - DNA, 75 bp, synthetic construct
  source 1..75: mol_type = other DNA
catgacctctgccgttaccgccccccttgagcgccagttcgggcagatgtccggcctgaaacagatgtcgtcgca

SEQ ID NO: 705852 - DNA, 75 bp, synthetic construct
  source 1..75: mol_type = other DNA
ggtgtgcagctttgcattacctgccaggaaatcgcagagctgaaaggcaaacattacaacggaggtgctgtatga

SEQ ID NO: 705853 - DNA, 75 bp, synthetic construct
  source 1..75: mol_type = other DNA
aatgagccctactacggtaatctggccagtgaaaaactgctcatccccacgcaggatacacgggacatcattgcc

SEQ ID NO: 705854 - DNA, 75 bp, synthetic construct
  source 1..75: mol_type = other DNA
gtgaggtaatatcagaacttgaattctatatgaatataagtgcctattctgaatactttggaaacgagtataaaa

SEQ ID NO: 705855 - DNA, 75 bp, synthetic construct
  source 1..75: mol_type = other DNA
tgccagcaaagcctgggggccgttcgattttacactcggcctgggctggggatatctgggcaccagcggtaacgt

SEQ ID NO: 705856 - DNA, 75 bp, synthetic construct
  source 1..75: mol_type = other DNA
atgacgatggcctaaaaatggtgggagaggttgaaggttgcatcggagctcttttcaccaagcttgatgagtgtc

SEQ ID NO: 705857 - DNA, 75 bp, synthetic construct
  source 1..75: mol_type = other DNA
tcagctcgcggtcggagagatgaatctcttaggggttggtatatacccggccacagccatccttctgttggcaat

SEQ ID NO: 705858 - DNA, 75 bp, synthetic construct
  source 1..75: mol_type = other DNA
attttatcgctaaatacatccattcaacaaacgtttatagctatttaagtccaagtgaaccgccccgggtttcct

SEQ ID NO: 705859 - DNA, 75 bp, synthetic construct
  source 1..75: mol_type = other DNA
tggtctgggtgggtatacgtccatcttctttgataacggtttttatactgaaccgccccgggtttcctggagagt

SEQ ID NO: 705860 - DNA, 75 bp, synthetic construct
  source 1..75: mol_type = other DNA
tacaccgtttattgtcaccggctcgggcaaattcttccgtaacgtccagcttgatcctgcggctaacttaggcat

SEQ ID NO: 705861 - DNA, 75 bp, synthetic construct
  source 1..75: mol_type = other DNA
tccggacttaatgaaggaaaactaacccaggatgctatcgggaaatattcagaaaatatgaagttcagtaaaaac

SEQ ID NO: 705862 - DNA, 75 bp, synthetic construct
  source 1..75: mol_type = other DNA
ccatcggcgtgggcatggggccaactaaaacgctggccaagtctgcgcagtgggcttcaaaagaatggccacagt

SEQ ID NO: 705863 - DNA, 75 bp, synthetic construct
  source 1..75: mol_type = other DNA
taatccgaaagcatctggatggtgaatttgaacagcgcctgttagacgctgcgatcaataaccttttggatgaaa

SEQ ID NO: 705864 - DNA, 75 bp, synthetic construct
  source 1..75: mol_type = other DNA
ggtttaatcgacaccgcagaaaaatcagcacaaatattagtgaaggtttattcgatgggcggcatgaaacagacc

SEQ ID NO: 705865 - DNA, 75 bp, synthetic construct
  source 1..75: mol_type = other DNA
cggtcttcactcgccagctttgggaaggcagcaccgagtgtctggtagtgttcccggatggcgttggaattctgc

SEQ ID NO: 705866 - DNA, 75 bp, synthetic construct
  source 1..75: mol_type = other DNA
atgcaagtcgacctgctgagttccgcgcaatctgcgcacgcgttacatctttttcaccaacattcccctcttgtg

SEQ ID NO: 705867 - DNA, 75 bp, synthetic construct
  source 1..75: mol_type = other DNA
ccatttgctgaaatcattgtgacgaaaaaccgttttggctcgcttggtacggtttaccagcggttctgcaacgga

SEQ ID NO: 705868 - DNA, 75 bp, synthetic construct
  source 1..75: mol_type = other DNA
tttgaatgatggtttcgactttgggagcgtcttctcgctgttcagcttgtcgtctgccagttcctctctggacaa

SEQ ID NO: 705869 - DNA, 75 bp, synthetic construct
  source 1..75: mol_type = other DNA
gctttactttgcccctgccgacgtgaagcgcgtggagttcacgccagtaccagcagagcagaccgaacaaacaac

SEQ ID NO: 705870 - DNA, 75 bp, synthetic construct
  source 1..75: mol_type = other DNA
acaaaaagcataaaacctataggtgcagaagcaataaggcaaattggaggatggggaggagccgtagctggtgct

SEQ ID NO: 705871 - DNA, 75 bp, synthetic construct
  source 1..75: mol_type = other DNA
aaaaccgttttggctcgcttggtacggtttaccagcggttctgcaacggacactttgttgcatgtgaccaggatg

SEQ ID NO: 705872 - DNA, 75 bp, synthetic construct
  source 1..75: mol_type = other DNA
atatgacgagaacagtagcgccgcgccatttgctgaaatcatcgtgacgaaaaaccgttttggctcgcttggtac

SEQ ID NO: 705873 - DNA, 75 bp, synthetic construct
  source 1..75: mol_type = other DNA
aaattatttcttgcagtaattataaaagccgaaaacagaactcaaaaacaatctggctaaataaaagtaataaaa

SEQ ID NO: 705874 - DNA, 75 bp, synthetic construct
  source 1..75: mol_type = other DNA
caatcaggcgcaggtgagcggcgagattaaacatgaaatcgagctggccttggcctccgccaaccactttctgcg

SEQ ID NO: 705875 - DNA, 75 bp, synthetic construct
  source 1..75: mol_type = other DNA
gcgctgccgacgcttattcgccatacgcccgggcaaaaggaaccggtactgcatttttcacatgtcgcgccaatc

SEQ ID NO: 705876 - DNA, 75 bp, synthetic construct
  source 1..75: mol_type = other DNA
tgacgccagctcagttatccatgctactggaggggatcgcgtggcaacatcccaaacggacagaacggcctggca

SEQ ID NO: 705877 - DNA, 75 bp, synthetic construct
  source 1..75: mol_type = other DNA
gttatccatgctactggctgtctcttatacacaaatccccacccggggatttgtgatgtctgtcagtctgcttta

SEQ ID NO: 705878 - DNA, 75 bp, synthetic construct
  source 1..75: mol_type = other DNA
ccgatcgtgacgggttatgcctgttcgccaaacgcctggaacggggccgcttcatctggccggtgacccgggaag

SEQ ID NO: 705879 - DNA, 75 bp, synthetic construct
  source 1..75: mol_type = other DNA
gacctggaagaaccacaggaagaagttatatcccgtgggccttgtggtgtcgtattttgtttgattgagcctgac

SEQ ID NO: 705880 - DNA, 75 bp, synthetic construct
  source 1..75: mol_type = other DNA
ggttggtacgctgaataaggcggctatgcctgatttcagtgccgttaatattgcggacggtgcatcaacgttaat

SEQ ID NO: 705881 - DNA, 75 bp, synthetic construct
  source 1..75: mol_type = other DNA
taaatccggacaccgtttcatggggatatcgtgggggtacgctggatgttaatggtaacagtctgacgtttcatc

SEQ ID NO: 705882 - DNA, 75 bp, synthetic construct
  source 1..75: mol_type = other DNA
aagtaaacttgttacggaggtcgctccagccacggtcaccaccgcatcatataaagaaatcgctgattcatcacg

SEQ ID NO: 705883 - DNA, 75 bp, synthetic construct
  source 1..75: mol_type = other DNA
tccaaatcactcttgatcaggctgcttccggtgatgcccctattcagtggaaagcctctctgccggttactgttt

SEQ ID NO: 705884 - DNA, 75 bp, synthetic construct
  source 1..75: mol_type = other DNA
aattatatgcaggtgctgaatttacttctgattccaaaacaacaggcaaaaatgtgaaagcgattgtttatgcga

SEQ ID NO: 705885 - DNA, 75 bp, synthetic construct
  source 1..75: mol_type = other DNA
ccacgtctttgggagcatctgcactggtgtctgttaaaggttcatggagtggatataaccattcttattctgata

SEQ ID NO: 705886 - DNA, 75 bp, synthetic construct
  source 1..75: mol_type = other DNA
ctgcagggtatctgttccacggacagctgaaagacaatctgaatgtggataatcgcctgccggaaggcgttaccg

SEQ ID NO: 705887 - DNA, 75 bp, synthetic construct
  source 1..75: mol_type = other DNA
gagcggggggcaggggaaataactgggctgttattccactggattttatcgggcaaaaatttaatgaggacaatg

SEQ ID NO: 705888 - DNA, 75 bp, synthetic construct
  source 1..75: mol_type = other DNA
gatttcagctctgtggattcggatattggcgtggcgacactgattaatcctcagtatatcgccagcgtgaaacat

SEQ ID NO: 705889 - DNA, 75 bp, synthetic construct
  source 1..75: mol_type = other DNA
tactgaagttgcaccggctaacgtaacgagcgcatcgcagacagagatactggaaccatcacactttatggcatt

SEQ ID NO: 705890 - DNA, 75 bp, synthetic construct
  source 1..75: mol_type = other DNA
tattgccagtggccgaccgactgtggtactaactgatgaccgacaggtaaacccggataccatttcttggggata

SEQ ID NO: 705891 - DNA, 75 bp, synthetic construct
  source 1..75: mol_type = other DNA
gtgaatggcagtacgctgtttaagggcgcggataacacatctcttctgaagaaagcgcgtgccatgtttgccgcc

SEQ ID NO: 705892 - DNA, 75 bp, synthetic construct
  source 1..75: mol_type = other DNA
gcaatggatgagcagagcagccgttttggcattgtgcgtgagacgttctcgcgctggctgaatcagcctgactgg

SEQ ID NO: 705893 - DNA, 75 bp, synthetic construct
  source 1..75: mol_type = other DNA
tgcactggatgacgccaatcaccaggcaaaatacgtttcagcaatctggcaaaaattgatcccgaatccggttga

SEQ ID NO: 705894 - DNA, 75 bp, synthetic construct
  source 1..75: mol_type = other DNA
atcccattctgtgtgatggcgattgccaatggcgcgatctacccgattgttgtcgcccaggcgctgcgtcccttc

SEQ ID NO: 705895 - DNA, 75 bp, synthetic construct
  source 1..75: mol_type = other DNA
tcggtagcagacggtctgaaaacctggacagtgttaacgaccattctcggttttaccggattcttaattacctgg

SEQ ID NO: 705896 - DNA, 75 bp, synthetic construct
  source 1..75: mol_type = other DNA
gcgacccgaatgatccgaaatgggtgaaggggattgaaacccgcgattctgtgaaccagaaccagcaagaaacgg

SEQ ID NO: 705897 - DNA, 75 bp, synthetic construct
  source 1..75: mol_type = other DNA
acaaaacgagccagaaacgaaacaacctgaaccagtagtgcaacaggaaccggaaaagatctgcaccgcctgcgg

SEQ ID NO: 705898 - DNA, 75 bp, synthetic construct
  source 1..75: mol_type = other DNA
cggtcatcgtgaaatcacatccaccagcaggttgtggcaccatctgatgattgaccttgaaacaatgggcaaaaa

SEQ ID NO: 705899 - DNA, 75 bp, synthetic construct
  source 1..75: mol_type = other DNA
atcgccgggatgggcggtgtgcttggttccgtcactattattattggtctgggcgctatgctggggcgtatgatc

SEQ ID NO: 705900 - DNA, 75 bp, synthetic construct
  source 1..75: mol_type = other DNA
cactgatgccgccttcgcatcccctgcttggtacgctacagctgatcggctcaccaatggtagctctaatgattg

SEQ ID NO: 705901 - DNA, 75 bp, synthetic construct
  source 1..75: mol_type = other DNA
gtgttcggcaaagtgctggtggaatctggcgtcggtaaggctcttgccaacatgctacaaatgattgacctgcct

SEQ ID NO: 705902 - DNA, 75 bp, synthetic construct
  source 1..75: mol_type = other DNA
gtggcgtgcttggctccgtcaccattatcatcggccttggtgctatgctgggacgcatgatcgagcactctggcg

SEQ ID NO: 705903 - DNA, 75 bp, synthetic construct
  source 1..75: mol_type = other DNA
agcgataaaataaatccaccgggcgtcgcgctggtcacctcgctaattgttattcctatcgcgattatcatggcg

SEQ ID NO: 705904 - DNA, 75 bp, synthetic construct
  source 1..75: mol_type = other DNA
caacacaccagcgacattatgggctcagcccttcccactgcggcggtagtgattttggttactggtgctggaggg

SEQ ID NO: 705905 - DNA, 75 bp, synthetic construct
  source 1..75: mol_type = other DNA
ccagtaacgcacgttgcacgggaagaacttcaggcattacatatagcacgggcggaagaactgccggctgttact

SEQ ID NO: 705906 - DNA, 75 bp, synthetic construct
  source 1..75: mol_type = other DNA
tgaaggatgacccgttctccggacacctgttcatcttccgcggacgccggggtgaccagataaaagtgctgtggg

SEQ ID NO: 705907 - DNA, 75 bp, synthetic construct
  source 1..75: mol_type = other DNA
ggaccttattgcgatgaataaagctgcgcagaaggtctacacctcaatggaaatccagccgaattttgccaatac

SEQ ID NO: 705908 - DNA, 75 bp, synthetic construct
  source 1..75: mol_type = other DNA
ttcgtctggccggtcacccgcgatggaaaggttcaccttactccggctcagttatccatgcttcttgaaggtatc

SEQ ID NO: 705909 - DNA, 75 bp, synthetic construct
  source 1..75: mol_type = other DNA
aattacaacagcgcttgcgtgatttcgatattaaacatctgaccgatctgctggaaatagataaagatatgcgcg

SEQ ID NO: 705910 - DNA, 75 bp, synthetic construct
  source 1..75: mol_type = other DNA
cgacatgcgaaatggttttaacggcctggcatcaaaagttcagaacgtcctgaaggatgacccgttctccgggca

SEQ ID NO: 705911 - DNA, 75 bp, synthetic construct
  source 1..75: mol_type = other DNA
caccaaacgcctggaacggggccgcttcgtctggccggtcacccgcgatggaaaggtgcaccttactccggctca

SEQ ID NO: 705912 - DNA, 75 bp, synthetic construct
  source 1..75: mol_type = other DNA
tggtagctggaacggtggcattagctctgggattgtctacaactggcgtgatggcggcgggttttaaacctgcgc

SEQ ID NO: 705913 - DNA, 75 bp, synthetic construct
  source 1..75: mol_type = other DNA
acatgttaggccaggtactggaagatcataaattgccgcgcggattcgccgatgcgacccatgaatctatcgaga

SEQ ID NO: 705914 - DNA, 75 bp, synthetic construct
  source 1..75: mol_type = other DNA
tggcatcacaatggtattcaccgcgccatctccctctgtgcagaacaaaccagccagcaccgaaaataccaatgt

SEQ ID NO: 705915 - DNA, 75 bp, synthetic construct
  source 1..75: mol_type = other DNA
atgtggtcccccctgctggatggcaggccgtcggtggcgcttccgtgggtggttttcagcctgatttcatcggtg

SEQ ID NO: 705916 - DNA, 75 bp, synthetic construct
  source 1..75: mol_type = other DNA
gccataatgctgctggccccgggatccgtcagtgaaatgcaggactatattccggaaaaccgctgttaccgtgca

SEQ ID NO: 705917 - DNA, 75 bp, synthetic construct
  source 1..75: mol_type = other DNA
cgtggttatctgatgggtatccgcgaaacgccacgcggcacctttaccgctgtacaaggtcagcactggtacgag

SEQ ID NO: 705918 - DNA, 75 bp, synthetic construct
  source 1..75: mol_type = other DNA
gataagttgcctgaagataaagagattattatcgggtgtcagagtggtctgcgggggcatgtggcataccgtatg

SEQ ID NO: 705919 - DNA, 75 bp, synthetic construct
  source 1..75: mol_type = other DNA
ttactacccgggggcaacaatgatcagtctgaaactgctgttcagccccgataccggtaaaattctcggggccca

SEQ ID NO: 705920 - DNA, 75 bp, synthetic construct
  source 1..75: mol_type = other DNA
atcccgctttaacatagacgtccgtatatgtcatgaagtgacgtcattagacccgattaataaaacggtgacagt

SEQ ID NO: 705921 - DNA, 75 bp, synthetic construct
  source 1..75: mol_type = other DNA
ctcacttttcgggtcagctattttgcgaaagaacgtactaagttatacagtcgggatgaacgctcatttggttgc

SEQ ID NO: 705922 - DNA, 75 bp, synthetic construct
  source 1..75: mol_type = other DNA
aggcctggatgagcgccttacagttgagctcataccctgaataccgaacactggtgcatatccccgataatccac

SEQ ID NO: 705923 - DNA, 75 bp, synthetic construct
  source 1..75: mol_type = other DNA
ctcactttccgtctgagctactttgcgaaggaacggaccaagtcatacagccgagatgaacgctcgtttggctgc

SEQ ID NO: 705924 - DNA, 75 bp, synthetic construct
  source 1..75: mol_type = other DNA
gccaatcaggtttgatccggaggcgctgcagatatggggtgtggttacgttcactgttatgagtcaccgcccgtg

SEQ ID NO: 705925 - DNA, 75 bp, synthetic construct
  source 1..75: mol_type = other DNA
ctaattgctggtcatctgaactaccaacaatcgattctttatatcgaccaacttcgcactgttacaggcgtttct

SEQ ID NO: 705926 - DNA, 75 bp, synthetic construct
  source 1..75: mol_type = other DNA
gaagataaacagcgcattagcgaaattctgcaagaaacatgggaaagcgcagatgactggttcgttagcgaataa

SEQ ID NO: 705927 - DNA, 75 bp, synthetic construct
  source 1..75: mol_type = other DNA
gcgacccgcagcctctcaaacctgcgattcatccctttagcgctaactggaacgggctgacaaaccctcgctgga

SEQ ID NO: 705928 - DNA, 75 bp, synthetic construct
  source 1..75: mol_type = other DNA
gacccgcgaactgaccacgctgcgtacacagctgcaggcacaggacggcgacccgcatcagcgtttctccgcaac

SEQ ID NO: 705929 - DNA, 75 bp, synthetic construct
  source 1..75: mol_type = other DNA
tcgaagcgcactctaccgattatcaaacgccgcaatcgctgcgccagctggtgattgaccactttgccattctga

SEQ ID NO: 705930 - DNA, 75 bp, synthetic construct
  source 1..75: mol_type = other DNA
atgtttgacaatatctgtctcgatagacggcatgcaccattcaacaccacttacctacagcgtattctacgcgtt

SEQ ID NO: 705931 - DNA, 75 bp, synthetic construct
  source 1..75: mol_type = other DNA
atgatcccgttaccttccgggaccaaaatttggctggttgccggtatcactgatatgagaaatggcttcaacggc

SEQ ID NO: 705932 - DNA, 75 bp, synthetic construct
  source 1..75: mol_type = other DNA
actgatgcccctgatcaccatgcacgataagaacacctttaaagtgcgtgatgacttcactctggaatggagtgg

SEQ ID NO: 705933 - DNA, 75 bp, synthetic construct
  source 1..75: mol_type = other DNA
cggactggaggaagatattcgccatcagttactggatgagcagaaaatgacatcggatggcatcactgccgattc

SEQ ID NO: 705934 - DNA, 75 bp, synthetic construct
  source 1..75: mol_type = other DNA
gaaatttagcacccgaatgcaaaaaatcgatcctgcattgagtgttacatctggtcaacttatgagccatgtgtt

SEQ ID NO: 705935 - DNA, 75 bp, synthetic construct
  source 1..75: mol_type = other DNA
agtaatgtaggagtagttatattttctactcaggattcggcgaatacattcaatgttcttaatgcttcaggcgga

SEQ ID NO: 705936 - DNA, 75 bp, synthetic construct
  source 1..75: mol_type = other DNA
cgatgtgctaaatcagttacatattgattttagagcccttagcggtgtcggtgatgctgccaacttactgattta

SEQ ID NO: 705937 - DNA, 75 bp, synthetic construct
  source 1..75: mol_type = other DNA
gtgtagggacagggccatttaatctcagcattgctgcgttgtcacatcagatcgaagaactggactgtctcttct

SEQ ID NO: 705938 - DNA, 75 bp, synthetic construct
  source 1..75: mol_type = other DNA
gcgtgggcgattttaccggaaacatttcagccgaaaattatcaccccggtggaaaagagttcactattacagtac

SEQ ID NO: 705939 - DNA, 75 bp, synthetic construct
  source 1..75: mol_type = other DNA
tcttaatgcttcaggcggatctcgttccgtttatccagtaatgtcggatgacatgaatggttcatcctggaaatt

SEQ ID NO: 705940 - DNA, 75 bp, synthetic construct
  source 1..75: mol_type = other DNA
tatctggtgaagcacaaaaagttctatcgcttccttacaagcagactacgtacagtatcccgtgaagagttttct

SEQ ID NO: 705941 - DNA, 75 bp, synthetic construct
  source 1..75: mol_type = other DNA
ttgatgaacatcctcatttttcctggcatccgggtatgctggtaccggattgtcatatgcagaccgtctttctga

SEQ ID NO: 705942 - DNA, 75 bp, synthetic construct
  source 1..75: mol_type = other DNA
aaaaattccgcgtggccgtttccggtacgacctcagacgggcgcgaaatctgtggcgatatgctgaaagctgccg

SEQ ID NO: 705943 - DNA, 75 bp, synthetic construct
  source 1..75: mol_type = other DNA
atgcgaattgaagtcaccatagcgaaaacttctccattgccagctggggctattgacgccctggctggcgaactt

SEQ ID NO: 705944 - DNA, 75 bp, synthetic construct
  source 1..75: mol_type = other DNA
aatgctgccgctgtgcgcaataatgaggctctgggattgattagcgcattatcttctgatttcgttacgaaatgg

SEQ ID NO: 705945 - DNA, 75 bp, synthetic construct
  source 1..75: mol_type = other DNA
aaaattcactgttgccagctggaaaactgcaatggtgaatgaaggattcaccgacacagcagtcgatttttggag

SEQ ID NO: 705946 - DNA, 75 bp, synthetic construct
  source 1..75: mol_type = other DNA
gcgcttggttatagcgacgctgttaatgtattaaatcaaatatcaagtgagtttttggaaaaatataatcaacag

SEQ ID NO: 705947 - DNA, 75 bp, synthetic construct
  source 1..75: mol_type = other DNA
gtgtcgcggaattaacgcggcaggggcaggagatcatcgccgggaacttccgtgcccttgaggtctggacagcgg

SEQ ID NO: 705948 - DNA, 75 bp, synthetic construct
  source 1..75: mol_type = other DNA
agtgtcgaaagcaaccgccagtctggttctcaatggtcgtggcaaagagttacgtgttgcgcaggaaacgcgtga

SEQ ID NO: 705949 - DNA, 75 bp, synthetic construct
  source 1..75: mol_type = other DNA
cgctgctagctcccttctatgctggtgctgaacgctcttattacgctatcgatggatcagctaaagggcatcgtg

SEQ ID NO: 705950 - DNA, 75 bp, synthetic construct
  source 1..75: mol_type = other DNA
acactgattttggtcttggtcgcaatgccacgctgaacaccacgcttgaagccacagattcgatggtcacactgg

SEQ ID NO: 705951 - DNA, 75 bp, synthetic construct
  source 1..75: mol_type = other DNA
ggtaacagtctgacgtttcatcagttgaaggcggcagattatggtgccgtgctggcgaataacgctgataaacgg

SEQ ID NO: 705952 - DNA, 75 bp, synthetic construct
  source 1..75: mol_type = other DNA
gagcggggggcaggggaaataactgggctgttattccactggattttatcgggcagaaatttaatgaagacaatg

SEQ ID NO: 705953 - DNA, 75 bp, synthetic construct
  source 1..75: mol_type = other DNA
gtatcaggcatagaaaaagacaaaaccatcaaaatcacccttgatgatgctgcttgcggcgatgctccaattcag

SEQ ID NO: 705954 - DNA, 75 bp, synthetic construct
  source 1..75: mol_type = other DNA
caacagtgatgcagacggcggtgcatgggccatgacagggtacagtcatggtggatatgacgacttcagcctcaa

SEQ ID NO: 705955 - DNA, 75 bp, synthetic construct
  source 1..75: mol_type = other DNA
tgacagatacaacctctccggttgcaccggatacaggtaatacaggaagcactgaggctgatggtattgtgtctg

SEQ ID NO: 705956 - DNA, 75 bp, synthetic construct
  source 1..75: mol_type = other DNA
cgaggttaaccgcagaactgaaatatttattgcaagatgtcgaatccttcgaacccaacagtaaatacacaatac

SEQ ID NO: 705957 - DNA, 75 bp, synthetic construct
  source 1..75: mol_type = other DNA
cggcagcactgaatcagtggatggacaggctgaatcattttaaggagatgaccgaaaccatcattgccacaccgg

SEQ ID NO: 705958 - DNA, 75 bp, synthetic construct
  source 1..75: mol_type = other DNA
gtgacgatctttaagtttgcgatgagcccatttgcggaatggcagcaactggcctgggccggggtattgatcatc

SEQ ID NO: 705959 - DNA, 75 bp, synthetic construct
  source 1..75: mol_type = other DNA
ggccacggtattcggtacgccgctgggcatcatggcggggatttatctggcggaatatggccgtaaatcctggct

SEQ ID NO: 705960 - DNA, 75 bp, synthetic construct
  source 1..75: mol_type = other DNA
tgatgcctctgaatccggcttttccgccaatcaggtttgatccggaggcgctgcagatatggggtgtggttacgt

SEQ ID NO: 705961 - DNA, 75 bp, synthetic construct
  source 1..75: mol_type = other DNA
gccgcaacgtacttcttgcgtgtgtccggagattctatgcgtgatgcccgcattcatgatggcgatgtgctggtc

SEQ ID NO: 705962 - DNA, 75 bp, synthetic construct
  source 1..75: mol_type = other DNA
ggccttcagtggaaggcgccgcacttcctttttttgccgaacccgttgcggccggctttcccagtccggccgcag

SEQ ID NO: 705963 - DNA, 75 bp, synthetic construct
  source 1..75: mol_type = other DNA
tggcaccacatctggaaattctcggttatgtcataaccggtattgtcgcgtttctgatgtgtattcaggccaaac

SEQ ID NO: 705964 - DNA, 75 bp, synthetic construct
  source 1..75: mol_type = other DNA
cttcctgggctgtacggcctactttgcctgcccgcaaggtgggctgaaagggctggcgatctccgctgcaactct

SEQ ID NO: 705965 - DNA, 75 bp, synthetic construct
  source 1..75: mol_type = other DNA
atacagaaaggggaatccgctttctgatgcagagaaacaaagattatcagtggcccgtgcgtattaccgtgaagg

SEQ ID NO: 705966 - DNA, 75 bp, synthetic construct
  source 1..75: mol_type = other DNA
ggatcatgaccggtatcctgttggcgattgcccgtattgctggtgaaaccgcgccgctgttgtttaccgcgctct

SEQ ID NO: 705967 - DNA, 75 bp, synthetic construct
  source 1..75: mol_type = other DNA
gaaaaaggatacgttcgtatatctgtaaataaaaaagtttgtcgagctcatagaatcgcatggatatccttttat

SEQ ID NO: 705968 - DNA, 75 bp, synthetic construct
  source 1..75: mol_type = other DNA
gtcattatttacggtagtgcactgacgccacatctggaaattctcggttatgtcataaccggtattgtcgcgttt

SEQ ID NO: 705969 - DNA, 75 bp, synthetic construct
  source 1..75: mol_type = other DNA
gatgagattggcgaaatgccgctgccgttgcagacccggctgctgcgggtgctggaagaaaaagaggtcacccgc

SEQ ID NO: 705970 - DNA, 75 bp, synthetic construct
  source 1..75: mol_type = other DNA
cgcccacggtggtacgctgtttctggatgagattggcgaaatgccgctacctttgcagactcgcctgttacgggt

SEQ ID NO: 705971 - DNA, 75 bp, synthetic construct
  source 1..75: mol_type = other DNA
cgcaggctctaacggcgcgtacctgaaaagccgcctgtcggtgccggtgattctgattaaacccagcggctttga

SEQ ID NO: 705972 - DNA, 75 bp, synthetic construct
  source 1..75: mol_type = other DNA
aaaagtcgcctgtcagtgccagttattttgattaaaccgagcggctacgatgtgttacaggcactggcaaaagcc

SEQ ID NO: 705973 - DNA, 75 bp, synthetic construct
  source 1..75: mol_type = other DNA
cgggtggcggatattctgccgctggcggaaagctttttaaaagtgtctctggcggcgctctccgccccgttttct

SEQ ID NO: 705974 - DNA, 75 bp, synthetic construct
  source 1..75: mol_type = other DNA
acgcgtcggcgaaaattaccgcctcccccttgctgacaccccaacaggcactggagaaatttaatggtgataaaa

SEQ ID NO: 705975 - DNA, 75 bp, synthetic construct
  source 1..75: mol_type = other DNA
actgctaaattgtggggcaattctagccgtccggttgtttatgaagttggtgtagatggtggggcttttatattc

SEQ ID NO: 705976 - DNA, 75 bp, synthetic construct
  source 1..75: mol_type = other DNA
tctggcggtctgttcaatgccaattggtcaatctttgccaagccattcggtgatcgtgccgcgtaaaggcgtgat

SEQ ID NO: 705977 - DNA, 75 bp, synthetic construct
  source 1..75: mol_type = other DNA
ccagttttctatggcgcatcaggacgttcgctattacttaaacggtatgctgtttgaaaccgaaggtgaagaact

SEQ ID NO: 705978 - DNA, 75 bp, synthetic construct
  source 1..75: mol_type = other DNA
caactgctactgccggagctggcgcgcgagtcggcgaaaactcccgctccacgcttactgacaccacaacaggca

SEQ ID NO: 705979 - DNA, 75 bp, synthetic construct
  source 1..75: mol_type = other DNA
acaggaagcactggaagcaatcccagaagttgtaggttccgcaatgaaatatcaggacggtgcaagcggatcgga

SEQ ID NO: 705980 - DNA, 75 bp, synthetic construct
  source 1..75: mol_type = other DNA
gtcagacgacagaataacagcactggaagaagaaaacgcagaattaagacaaagattatctgcaattgatgcggc

SEQ ID NO: 705981 - DNA, 75 bp, synthetic construct
  source 1..75: mol_type = other DNA
atctattccgccgccaccgtgcgccaggcgttcagcgatgcgctggatatgacgcgcatgtctctacggcataac

SEQ ID NO: 705982 - DNA, 75 bp, synthetic construct
  source 1..75: mol_type = other DNA
gctaacgctgaccaaatccaccctttatctgcctgataccgcaaaagaagagttagagaagaagaaaaatatggg

SEQ ID NO: 705983 - DNA, 75 bp, synthetic construct
  source 1..75: mol_type = other DNA
aaacgcggaatcacgctgaaaattgccgatggtcagcaaaagcaagaaaaccagattaaagctgtgcgttctttt

SEQ ID NO: 705984 - DNA, 75 bp, synthetic construct
  source 1..75: mol_type = other DNA
aaagatgccgaaatcccggtcttcttgctcgatcgttccatcgatgtgaaagacaaatctctctatatgaccacc

SEQ ID NO: 705985 - DNA, 75 bp, synthetic construct
  source 1..75: mol_type = other DNA
aagtgaggccgaaaaacgcggaattacgctgaaaattgccgatggtcagcaaaagcaggaaaaccagattaaagc

SEQ ID NO: 705986 - DNA, 75 bp, synthetic construct
  source 1..75: mol_type = other DNA
ccggacatctacaaagcgatgattgatggcgaagcgaacgccagcgttgaactgacgccgaatatggcaggtccc

SEQ ID NO: 705987 - DNA, 75 bp, synthetic construct
  source 1..75: mol_type = other DNA
cgtcgccattgaccgtaagaaaggctttgccgaagccattaagaatgcgccaaatatcaaaattatccgctcgca

SEQ ID NO: 705988 - DNA, 75 bp, synthetic construct
  source 1..75: mol_type = other DNA
taagaaaggctttgccgaagccattaagaatgcgccaaatatcaaaatcatccgctcgcagtcaggtgacttcac

SEQ ID NO: 705989 - DNA, 75 bp, synthetic construct
  source 1..75: mol_type = other DNA
gtgactggctggtaaaagaagtgaatggcaaaccatgcaacgtggtggagctgcagggcaccgttggggccagcg

SEQ ID NO: 705990 - DNA, 75 bp, synthetic construct
  source 1..75: mol_type = other DNA
tgtgttacaggcactggcaaaagcgagaaaacttacgtcgtctatcggtgtcgtcacttatcaggaaactattcc

SEQ ID NO: 705991 - DNA, 75 bp, synthetic construct
  source 1..75: mol_type = other DNA
ctgcggtctcagcagccatgtcgtctatggcattggccgctcccttaaccgtaggattttcgcaggtcggatcgg

SEQ ID NO: 705992 - DNA, 75 bp, synthetic construct
  source 1..75: mol_type = other DNA
atgtggaaacgcttacttgtagtctctgcagtctcggcagccatgtcgtctatggcgttggccgctccattaaca

SEQ ID NO: 705993 - DNA, 75 bp, synthetic construct
  source 1..75: mol_type = other DNA
ccggatatctacaaagcgatgattgatggcgaagcgaacgccagtgttgaactgacgccgaatatggcaggtccc

SEQ ID NO: 705994 - DNA, 75 bp, synthetic construct
  source 1..75: mol_type = other DNA
aacccggacaaacatctggaagcaggctgcgatctcctcaagcaggcgtttgctcgtgcggcaattctctctaac

SEQ ID NO: 705995 - DNA, 75 bp, synthetic construct
  source 1..75: mol_type = other DNA
gttctcagtacaattgtttgagaaaattggccgacggatgtgcctcactcgcgaaggcaaaaagttgctgccgca

SEQ ID NO: 705996 - DNA, 75 bp, synthetic construct
  source 1..75: mol_type = other DNA
cttacccgcgaaggaaaaaagctgctgccgcacatctatgaacttacccgagtgatggatacgcttcgtgaggct

SEQ ID NO: 705997 - DNA, 75 bp, synthetic construct
  source 1..75: mol_type = other DNA
ggcttcaccgcaaattaaagatgtcgattttactgagccgggaagacataacgcctgtagttttattatcaatga

SEQ ID NO: 705998 - DNA, 75 bp, synthetic construct
  source 1..75: mol_type = other DNA
tgacaattaaccaggcgtttttccaggtggtgtcgatggcgacaaccgccgggtttacaactgacagcattgccc

SEQ ID NO: 705999 - DNA, 75 bp, synthetic construct
  source 1..75: mol_type = other DNA
gtcgtatttatgacggacgattgtggctggatttacgctgccttgaagatgagcaacggtttttggagatgttgt

SEQ ID NO: 706000 - DNA, 75 bp, synthetic construct
  source 1..75: mol_type = other DNA
agtcgcagaccattacggcaatgtgcgcacaccatgctggaaaagcggttagcccggcgatgcacacttttattc

SEQ ID NO: 706001 - DNA, 75 bp, synthetic construct
  source 1..75: mol_type = other DNA
aaatatagatataataatgaaaatgaacttgaggaaattttaaataatcatgttgggagatttgaagtaaaaaaa

SEQ ID NO: 706002 - DNA, 75 bp, synthetic construct
  source 1..75: mol_type = other DNA
gcagcgtctgttggataaggaagtcgagaagatcatcgttacgcgtcccgtattgcaagcagaagaagatctggg

SEQ ID NO: 706003 - DNA, 75 bp, synthetic construct
  source 1..75: mol_type = other DNA
cgcaatctgcgcacgctttacacctgtttcaacaacattccccccttgtacactgcatgaccaatgatgtggtgc

SEQ ID NO: 706004 - DNA, 75 bp, synthetic construct
  source 1..75: mol_type = other DNA
ctgaactgttacgtgatccgtgatgcgctactgaatgatgaggccgatgtcggcgtcttttatcgcgtagggaat

SEQ ID NO: 706005 - DNA, 75 bp, synthetic construct
  source 1..75: mol_type = other DNA
aaaagtgcgtttatcgttgcagtcgctgaactgttacgtgatccgtgatgcgctactgaatgatgaggccgatgt

SEQ ID NO: 706006 - DNA, 75 bp, synthetic construct
  source 1..75: mol_type = other DNA
tcgaggtactggaacagatgcaactggctccggccagtgaggaaggcgcgacaaaattaagcgataaaataaatc

SEQ ID NO: 706007 - DNA, 75 bp, synthetic construct
  source 1..75: mol_type = other DNA
atggctacatcgacagtaattcctgatgacatcaaaacgctaaaatcggatgttagtaaattaaaaaccgatcaa

SEQ ID NO: 706008 - DNA, 75 bp, synthetic construct
  source 1..75: mol_type = other DNA
tcgacgttattatggggaaattccagtcgtccagttgtttatgaaattagggatgatggcgggctttttttgttt

SEQ ID NO: 706009 - DNA, 75 bp, synthetic construct
  source 1..75: mol_type = other DNA
tgccattaccgtggtactgattttgcctattttctggcttaaacccacgacgaaggcccgtaacaatagtcagga

SEQ ID NO: 706010 - DNA, 75 bp, synthetic construct
  source 1..75: mol_type = other DNA
gccgttatcctcggcggtatgactggcgtgttcacgctgactatcctgggcggtggtctggtttctccggcatct

SEQ ID NO: 706011 - DNA, 75 bp, synthetic construct
  source 1..75: mol_type = other DNA
ggattaccgtcgcgttctgccaaagaacccggacaaacatctggaagcaggctgcgatctgctcaagcaggcgtt

SEQ ID NO: 706012 - DNA, 75 bp, synthetic construct
  source 1..75: mol_type = other DNA
tgctcgcgcggcaattctctctaacgagaaattccgcggcgtgcgcctgtatgtcagcgaaaaccagctgaaaat

SEQ ID NO: 706013 - DNA, 75 bp, synthetic construct
  source 1..75: mol_type = other DNA
atgatatcaaaacgctaaaatccgacgttagcaaattaaaaaacgatcaagggagctacgcaacaaaatcatatg

SEQ ID NO: 706014 - DNA, 75 bp, synthetic construct
  source 1..75: mol_type = other DNA
ctcgctgagatggaaaccgccttttccgcacttaagcaggaggtgactgacagggcggatgaaaccagtcaggca

SEQ ID NO: 706015 - DNA, 75 bp, synthetic construct
  source 1..75: mol_type = other DNA
atgccaaagattgttattttgcctcatcaggatctctgccctgatggcgctgttctggaagcgaatagcggtgaa

SEQ ID NO: 706016 - DNA, 75 bp, synthetic construct
  source 1..75: mol_type = other DNA
ccgcacttaagcaggaggtgactgacagggctgatgaaaccagccaggcattcacccgcctgaaaaacagtctcg

SEQ ID NO: 706017 - DNA, 75 bp, synthetic construct
  source 1..75: mol_type = other DNA
ggccagctattttcgcgtgattggcgcaggtcaggtttacggtctttctgcccgtggcctggcaattgataccgc

SEQ ID NO: 706018 - DNA, 75 bp, synthetic construct
  source 1..75: mol_type = other DNA
gaaatgcgtgctgcgctggtgaatgccgatcagacgttgagtgaaacctggagctaccagttacctgccaatgaa

SEQ ID NO: 706019 - DNA, 75 bp, synthetic construct
  source 1..75: mol_type = other DNA
caagctcgagttctaccatcagggtatgtacttcgacacaccggtcaaaataaatgaagtcactgcaacggcagt

SEQ ID NO: 706020 - DNA, 75 bp, synthetic construct
  source 1..75: mol_type = other DNA
gaatttgttgaagggattagcgatccgaatgatccgaaatgggtgaaggggattgaaacccgcgattctgtgaac

SEQ ID NO: 706021 - DNA, 75 bp, synthetic construct
  source 1..75: mol_type = other DNA
cccaaatgtgcaacgaaaagagccaaaagcgaaacaatccgaaccagtagcacaacaggaaccggaaaaagtctg

SEQ ID NO: 706022 - DNA, 75 bp, synthetic construct
  source 1..75: mol_type = other DNA
cgttgttgatgaccttccaccggaaggcgtgtttgataccgaattctgtaaccggtatgaaaaaggcggcgaaga

SEQ ID NO: 706023 - DNA, 75 bp, synthetic construct
  source 1..75: mol_type = other DNA
gccctggaagcagcaacatgtatttgtgacctgttaaaagcagaccacaaatacaaccttgatgtatacagctat

SEQ ID NO: 706024 - DNA, 75 bp, synthetic construct
  source 1..75: mol_type = other DNA
cttgatgatgcacgtcaccaggcaaaacaagtttcagcaatctggcaaaaactgatcccgaatcaggctgatttt

SEQ ID NO: 706025 - DNA, 75 bp, synthetic construct
  source 1..75: mol_type = other DNA
cagccaaaatgcgttacaagacgagccagaaacgaaacaatccgaaccagtagcgcaacaggaagaggaaaaagt

SEQ ID NO: 706026 - DNA, 75 bp, synthetic construct
  source 1..75: mol_type = other DNA
gatgttatcaactgtggtgctggccgctctgggttacatgatgcaacgttgtaaagaacgagactgccagaatca

SEQ ID NO: 706027 - DNA, 75 bp, synthetic construct
  source 1..75: mol_type = other DNA
aaatgattttggctatgccggatttggtggtgcatgtcctccgaaaggggataaaccgcatcattaccagtttaa

SEQ ID NO: 706028 - DNA, 75 bp, synthetic construct
  source 1..75: mol_type = other DNA
acggcaagccaggtttaccctggctggtttttctgcacggtttttccggagattgccgcgaatggcaggaagtgg

SEQ ID NO: 706029 - DNA, 75 bp, synthetic construct
  source 1..75: mol_type = other DNA
atgagcactgataaagaaacttttgcgctatattgcgaagctaaaaatgacaaagtcagaaaacgccttgggatt

SEQ ID NO: 706030 - DNA, 75 bp, synthetic construct
  source 1..75: mol_type = other DNA
gttacaattgcgggaatttatcgacgaaaactccggtgaattttttgttcatgtctggggaaatggagccaactt

SEQ ID NO: 706031 - DNA, 75 bp, synthetic construct
  source 1..75: mol_type = other DNA
cagaaagtcaaccgtatttttgcgaccatcatgccgctggtgggtctgtctccggcacttgctcccctgttagga

SEQ ID NO: 706032 - DNA, 75 bp, synthetic construct
  source 1..75: mol_type = other DNA
gtgacctgttaaaagcagaccacaaatacaaccttgatgtatacagctatatttacgctgaacactatccgctct

SEQ ID NO: 706033 - DNA, 75 bp, synthetic construct
  source 1..75: mol_type = other DNA
ggcctatatggcaacctatatcgtctatttttctctttgttgtggcgtgtttttactctggcgtaggcgggcatg

SEQ ID NO: 706034 - DNA, 75 bp, synthetic construct
  source 1..75: mol_type = other DNA
cagttaccgtttgggcggttatgaaggggcgttgctgggtctggcgctgattcccgcgctggtggtaattcctgc

SEQ ID NO: 706035 - DNA, 75 bp, synthetic construct
  source 1..75: mol_type = other DNA
ttaccgtctggctgctgcgtgattttgctatctggctgctgttgtcgaataaatttaccgctatgcgcgatctct

SEQ ID NO: 706036 - DNA, 75 bp, synthetic construct
  source 1..75: mol_type = other DNA
aactattcgcaggtgattaaacacaccccacgcctgacggcgatggcgaatatcgcactgtttccactgtttaac

SEQ ID NO: 706037 - DNA, 75 bp, synthetic construct
  source 1..75: mol_type = other DNA
gtatctggctagttgccggtatcaccgacatgcgaaatggctttaacggcctggcctcaaaagttcagaacgtcc

SEQ ID NO: 706038 - DNA, 75 bp, synthetic construct
  source 1..75: mol_type = other DNA
gacgctgcgatactttgttgcataaatcaaaaacagtacccggaaacaacccgagaggccggtcagtgtgcctga

SEQ ID NO: 706039 - DNA, 75 bp, synthetic construct
  source 1..75: mol_type = other DNA
caaaagtaattgatgaaatgcaacgcgaagcgacgcgccttgtgcggcgaatgataaccacaaaggttacgttcg

SEQ ID NO: 706040 - DNA, 75 bp, synthetic construct
  source 1..75: mol_type = other DNA
aaaattcaccaggcattacttaaaaatctggaaacggaagtatttgatggcaacaccaacggctccttcgtggtg

SEQ ID NO: 706041 - DNA, 75 bp, synthetic construct
  source 1..75: mol_type = other DNA
tcatcagaaatttatcaaatcatgtccgtaattcttttaccggactgtattcatattcgttcacaaacaatcatt

SEQ ID NO: 706042 - DNA, 75 bp, synthetic construct
  source 1..75: mol_type = other DNA
ctgcgccgcgtggtcggcacttcatcagcgatggtgcttggcttctctacgctgatggcgctggtttttgtgctg

SEQ ID NO: 706043 - DNA, 75 bp, synthetic construct
  source 1..75: mol_type = other DNA
gacgctgcgatactttgttgcataaatcaaaaacagtccccggaaacaacacggggggccggtcagtgtgcctga

SEQ ID NO: 706044 - DNA, 75 bp, synthetic construct
  source 1..75: mol_type = other DNA
tgtcagtgccagccttagtctgttccttgccggttttgccgcagcccagcttctgtgggggccgctctccgaccg

SEQ ID NO: 706045 - DNA, 75 bp, synthetic construct
  source 1..75: mol_type = other DNA
aacatccttaacttctggctggtggggtactcgcttggcggacgggtggcgatgatggcggcttgccaggggctg

SEQ ID NO: 706046 - DNA, 75 bp, synthetic construct
  source 1..75: mol_type = other DNA
gtggtaattatcaatagcacgatactgagcggcgcaggcgctatcccttccctgacgtcgctcttacccgacatc

SEQ ID NO: 706047 - DNA, 75 bp, synthetic construct
  source 1..75: mol_type = other DNA
ccggaaggcatcgcgggtgaggggagtgcttcagatagcggtgaacccacacctgacagcgacatgatgatgtaa

SEQ ID NO: 706048 - DNA, 75 bp, synthetic construct
  source 1..75: mol_type = other DNA
agcgcactgaaacagaaacttcgccataacctggaagcgcgtcttgatgcagaggttgatgccattctggatgag

SEQ ID NO: 706049 - DNA, 75 bp, synthetic construct
  source 1..75: mol_type = other DNA
atgtcagaagtaaaacccctggtcactgctgaagcagtgaaggaagtcctgcgctctgaagaagtcctgagcgca

SEQ ID NO: 706050 - DNA, 75 bp, synthetic construct
  source 1..75: mol_type = other DNA
cttactggagtgttttaccgcgaccgtggcaaatccggtcagcgataacgcggcgctgactgggttaagtaagct

SEQ ID NO: 706051 - DNA, 75 bp, synthetic construct
  source 1..75: mol_type = other DNA
acatcatgatgtgcgccagcaaatggcgaccctcggcaacgcgtcttttgatgtggtggtgggcgtcggcggcgg

SEQ ID NO: 706052 - DNA, 75 bp, synthetic construct
  source 1..75: mol_type = other DNA
ctgctgaggcagtgaaggaagtcctgcgctctgaagaagtccggagcgcactgaaacagaaactccgccagaacc

SEQ ID NO: 706053 - DNA, 75 bp, synthetic construct
  source 1..75: mol_type = other DNA
atctgaaggctattgagagtaagcagctgatattcgccacgggcgaagccggggcggaaaaacctggatcagcgc

SEQ ID NO: 706054 - DNA, 75 bp, synthetic construct
  source 1..75: mol_type = other DNA
taggcgggcagccaactactgaatttttgaaaatagggcgtgcaagtaagcagccagatgcaacaccagaagttc

SEQ ID NO: 706055 - DNA, 75 bp, synthetic construct
  source 1..75: mol_type = other DNA
ctggtggcgggcaaacgccagttattccgcgagatgctggcactgggctgtcagtttatttcccccagccagcat

SEQ ID NO: 706056 - DNA, 75 bp, synthetic construct
  source 1..75: mol_type = other DNA
agcaactggtgcgcgagatgatggcgctgggtgacaaaatcgaactgcatactttcggtaagttctcgccgttca

SEQ ID NO: 706057 - DNA, 75 bp, synthetic construct
  source 1..75: mol_type = other DNA
gctgtttcagatggtgtcgtgtctcagcctgatggtggcagtgagcctcagcctgacggcgaaatgatgatgtaa

SEQ ID NO: 706058 - DNA, 75 bp, synthetic construct
  source 1..75: mol_type = other DNA
ccggaaggtatcgcgggtgaggggagtgcttcagatagcggtgaccccacaccggacagcgacatgatgatgtaa

SEQ ID NO: 706059 - DNA, 75 bp, synthetic construct
  source 1..75: mol_type = other DNA
ctagcaggttattgagcgctacaaaaacgatgtcacttggtgcaaataaaaattcaatcagaataatttatggca

SEQ ID NO: 706060 - DNA, 75 bp, synthetic construct
  source 1..75: mol_type = other DNA
aatgtaagcgcccttatattgtcccgtataccaatgatactcattgtcctcgatgcagattgtcgtccacgtcat

SEQ ID NO: 706061 - DNA, 75 bp, synthetic construct
  source 1..75: mol_type = other DNA
ctaacatgttattgagcgctacaaaaacgatgtctcttggtgccaataaaaactccataaggatactctatggaa

SEQ ID NO: 706062 - DNA, 75 bp, synthetic construct
  source 1..75: mol_type = other DNA
gttgtatgttgatctcccaggtcacggtggttcggcagcaattagcgtcgatggatttgatgatgtcaccggctt

SEQ ID NO: 706063 - DNA, 75 bp, synthetic construct
  source 1..75: mol_type = other DNA
gcgttttattatttatgtggtgaacgtgacagcaaattccgcgccctggcggcggaactggctgccgactgccat

SEQ ID NO: 706064 - DNA, 75 bp, synthetic construct
  source 1..75: mol_type = other DNA
cttgccgccatgctggaagcaacctcattgtccgtccagcctgatttacgtgctaaccttagcgcccgcacattt

SEQ ID NO: 706065 - DNA, 75 bp, synthetic construct
  source 1..75: mol_type = other DNA
taagatatagcgcaaaacatatgcttaaaaaacatagatatctaaaaggatttagcaactatctttttattttat

SEQ ID NO: 706066 - DNA, 75 bp, synthetic construct
  source 1..75: mol_type = other DNA
atgtcagaaattacatccctggtcactgctgaggcagtgaaggacgtcctgcgctctgaagaagtcctgagcgca

SEQ ID NO: 706067 - DNA, 75 bp, synthetic construct
  source 1..75: mol_type = other DNA
gggtgggtacagggcagtgcgcgatttctggcgcaggcagattgataaaagggccgctgagagaatcagcgccag

SEQ ID NO: 706068 - DNA, 75 bp, synthetic construct
  source 1..75: mol_type = other DNA
tgtcgtttattgtcggtgtgctgggagcgcgtgtgctgtcagcctggattgcatcaaaaacagggtatgacggta

SEQ ID NO: 706069 - DNA, 75 bp, synthetic construct
  source 1..75: mol_type = other DNA
tgccagtgtgtttggtcttctcaccaataccgatttcggggtcgtggtgggcgcgtttgccggggcgctttttgt

SEQ ID NO: 706070 - DNA, 75 bp, synthetic construct
  source 1..75: mol_type = other DNA
atgctgatattaaatataacactcagtttagtttaaattatcaactaaaagaaagttttaaaaacccagtaacta

SEQ ID NO: 706071 - DNA, 75 bp, synthetic construct
  source 1..75: mol_type = other DNA
aaactttcagccagacacaataaagattgtttacgatgcaaataatattattgtcgccatcaccaaagatgcatc

SEQ ID NO: 706072 - DNA, 75 bp, synthetic construct
  source 1..75: mol_type = other DNA
gtgatcaaacgaatttatacggcagaggaattgcaactgcaggcagaaaaccggaaagccagacttcttgcagat

SEQ ID NO: 706073 - DNA, 75 bp, synthetic construct
  source 1..75: mol_type = other DNA
gaagcatgggaacgctacagcgttctggtcagtcgtgtggagcctgcaaatcctaaatggccggaaatgccgcaa

SEQ ID NO: 706074 - DNA, 75 bp, synthetic construct
  source 1..75: mol_type = other DNA
ctgctgaagcgacacaacctgcgtggcagtatgagtgcgaaaggctactgttatgacaatgcctgtgtggaaagc

SEQ ID NO: 706075 - DNA, 75 bp, synthetic construct
  source 1..75: mol_type = other DNA
aactatgaactgattgtgaaagggatccgcaattttgagaataaagttacggtaactttagcgttacgggacaaa

SEQ ID NO: 706076 - DNA, 75 bp, synthetic construct
  source 1..75: mol_type = other DNA
gaagcctgggaacgttacagtgttcttgtcagtcgcgtggacacagcaaaccccgaatggccagacaaaccagaa

SEQ ID NO: 706077 - DNA, 75 bp, synthetic construct
  source 1..75: mol_type = other DNA
taaatggatgtttaaggatggtgctgtgattaagcggatttatacggcagatgaacaggagcaactggcggaatt

SEQ ID NO: 706078 - DNA, 75 bp, synthetic construct
  source 1..75: mol_type = other DNA
attgtttacgatgagaataatataattgtcggcatcaccagagatgcttcaacgctcaaccctgaaggttttagc

SEQ ID NO: 706079 - DNA, 75 bp, synthetic construct
  source 1..75: mol_type = other DNA
atgaacgctgagcgtaaatttctttttgcctgtattatttttgcgctggtcatttacgctatccatactttcggt

SEQ ID NO: 706080 - DNA, 75 bp, synthetic construct
  source 1..75: mol_type = other DNA
atgcagcatttgataaatataacggtgggtaatccaaaaacagttgaacaatatcaattgacaaaggactttgat

SEQ ID NO: 706081 - DNA, 75 bp, synthetic construct
  source 1..75: mol_type = other DNA
atgcagcatttaaaaaatattacggtgggtaatccaaaaacggttgaacaatatcaattgacaaagggctttgat

SEQ ID NO: 706082 - DNA, 75 bp, synthetic construct
  source 1..75: mol_type = other DNA
cgggtaacgttaaaacactggaacagtatgagttaacaaagaagcatggagtcatctggctttacactgaagacg

SEQ ID NO: 706083 - DNA, 75 bp, synthetic construct
  source 1..75: mol_type = other DNA
cgtgtggctgataacaacgttcagcaggaacagccagcgccggaagaaactactacggcaacagtgacaaaaatt

SEQ ID NO: 706084 - DNA, 75 bp, synthetic construct
  source 1..75: mol_type = other DNA
attatatcgaatgtgattacattcgatggcggcggcacagttggtgtggcggtctcactctggaacaatttgaaa

SEQ ID NO: 706085 - DNA, 75 bp, synthetic construct
  source 1..75: mol_type = other DNA
gaaataatgcgggcaacggtgtttaattatatcgtaagcgtaaagccaatgccgtctgtaacacctgctccttgc

SEQ ID NO: 706086 - DNA, 75 bp, synthetic construct
  source 1..75: mol_type = other DNA
tttctggctggtgaaggtgaatccggggtaaccgaagagcagccagtacaatctgaagcaccggatgtgctaacc

SEQ ID NO: 706087 - DNA, 75 bp, synthetic construct
  source 1..75: mol_type = other DNA
attatatcgaatgtgattacattcgctggcggcggcacagttggtgtggcggtctcattcgggaacaatttgaaa

SEQ ID NO: 706088 - DNA, 75 bp, synthetic construct
  source 1..75: mol_type = other DNA
attatatcgaatgtgattacattcgctggcggcggcacagttggtgtggcggtctcaatctggaacaatttgaaa

SEQ ID NO: 706089 - DNA, 75 bp, synthetic construct
  source 1..75: mol_type = other DNA
attatatcgaatgtgattacattcgttggcggcggcacagttggtgtggcggtctcactcgggaacaatttgaaa

SEQ ID NO: 706090 - DNA, 75 bp, synthetic construct
  source 1..75: mol_type = other DNA
caggtgctggttcattcggatcagggcagtcagtacacaagccatgaatggcagtcgttcctgaaatcacacggc

SEQ ID NO: 706091 - DNA, 75 bp, synthetic construct
  source 1..75: mol_type = other DNA
aagcaatgggaaaagccacatccttagaacttgctgcgcgacttggtatcagtcgtgaagaagtgctgaacgaac

SEQ ID NO: 706092 - DNA, 75 bp, synthetic construct
  source 1..75: mol_type = other DNA
gagtgtgattacaatcgctggcgtcgtcacagtgcctgtggcggtctcagcccggaacaatttgaaaaccataat

SEQ ID NO: 706093 - DNA, 75 bp, synthetic construct
  source 1..75: mol_type = other DNA
attatatcgaatgtgattacggtaatgactccaacttattgatagtgttttatgttcagataatgcccgatgact

SEQ ID NO: 706094 - DNA, 75 bp, synthetic construct
  source 1..75: mol_type = other DNA
cctccaaaaggccgcgacatacttcgcgaagcgcctgaaatgaagtatgtctttattgaaaaacatcaggctgag

SEQ ID NO: 706095 - DNA, 75 bp, synthetic construct
  source 1..75: mol_type = other DNA
gcagtggtcattgacctgtggtcacgtgccgttattggctggtcaatgtcgccacgcatgacggcgcaactggcc

SEQ ID NO: 706096 - DNA, 75 bp, synthetic construct
  source 1..75: mol_type = other DNA
ggcctggcgctgtttattctcgtccagctcgcaaaactctacgcccgacacaaacatgtggatctgtctgcttag

SEQ ID NO: 706097 - DNA, 75 bp, synthetic construct
  source 1..75: mol_type = other DNA
tcgccaacatccagtctcgtcttggtaacagcttccgtatcaccggcatcaacaacccgaacgaagcccgtcagc

SEQ ID NO: 706098 - DNA, 75 bp, synthetic construct
  source 1..75: mol_type = other DNA
ccggttgtgctgtacaaacgcgtaattctgaccggtgaccatatcaccgactccacttccagccaggacgaatac

SEQ ID NO: 706099 - DNA, 75 bp, synthetic construct
  source 1..75: mol_type = other DNA
accgttcagcaggcgattgacgaaggttatcgtggcgcgttcagttctatcttcgatgcgaatatcaccacgctg

SEQ ID NO: 706100 - DNA, 75 bp, synthetic construct
  source 1..75: mol_type = other DNA
gaaaaaactggtatgaggaagtgaaaaactttcaaccagacacaataaagattgtttacgatgaaaataatatta

SEQ ID NO: 706101 - DNA, 75 bp, synthetic construct
  source 1..75: mol_type = other DNA
acgaacagcaacaacaggccgaatcacaaaaggtcgcgttgctttctgaagctgaaagcgttattcagccactgg

SEQ ID NO: 706102 - DNA, 75 bp, synthetic construct
  source 1..75: mol_type = other DNA
ccgcacttaaactcaccggcttccgtgatgcgcttaaaaagcaacttgctcagccaggcacataccaggagctgg

SEQ ID NO: 706103 - DNA, 75 bp, synthetic construct
  source 1..75: mol_type = other DNA
cagccgggcacataccaggagctgggcttcgaagaacgcctgtcattactgacagcagaagaactaacctgccgt

SEQ ID NO: 706104 - DNA, 75 bp, synthetic construct
  source 1..75: mol_type = other DNA
gcttcgaagaacgcctgtcattactgacagcagaagaactaacctgccgtgaaaacaggaaggcagagcgtctga

SEQ ID NO: 706105 - DNA, 75 bp, synthetic construct
  source 1..75: mol_type = other DNA
cgggatctaatcagagcccgtgcagcagctaaacgagacagcagagttgcccgacagcgaattctgagcatgcta

SEQ ID NO: 706106 - DNA, 75 bp, synthetic construct
  source 1..75: mol_type = other DNA
cgtgtaaaccagcttggtgtggcggagcctgtagtacaacgtcagggcgcagaccgcattgtcgttgagctgcca

SEQ ID NO: 706107 - DNA, 75 bp, synthetic construct
  source 1..75: mol_type = other DNA
cttcgatgcgaacatcaccactttgatcaaagtcatcatcctgtacgcagtgggaaccggggcaattaaagggtt

SEQ ID NO: 706108 - DNA, 75 bp, synthetic construct
  source 1..75: mol_type = other DNA
ggtatccaggacaccgcacgagcgaaagagattctgggtgcaacggcaacgttggaattccgtctggtaaatacc

SEQ ID NO: 706109 - DNA, 75 bp, synthetic construct
  source 1..75: mol_type = other DNA
tgcgccgcgctgcgggagctgaacaagcacagggatattgtacgacagattactgattcttcccgccatgttgca

SEQ ID NO: 706110 - DNA, 75 bp, synthetic construct
  source 1..75: mol_type = other DNA
gttgttgaagtggcggatattactgctaaccgacgggcggacatttcagggggctggatgtttaaggacggcaaa

SEQ ID NO: 706111 - DNA, 75 bp, synthetic construct
  source 1..75: mol_type = other DNA
gaaactgtggcggacattgtgcagccgctgccatcgttcactgaaacgcgagcagatgacctggttttaccatcg

SEQ ID NO: 706112 - DNA, 75 bp, synthetic construct
  source 1..75: mol_type = other DNA
attgcatacgataaaaataatgtaattgtcaccataagcaaagatgtttcaactattaacccggaaggtttaagt

SEQ ID NO: 706113 - DNA, 75 bp, synthetic construct
  source 1..75: mol_type = other DNA
aacgcttaatcctgaaggttttagcgttgttgaggttcctgatattacctccaaccgacgtgctgacgactcagg

SEQ ID NO: 706114 - DNA, 75 bp, synthetic construct
  source 1..75: mol_type = other DNA
gaactggatgtttaaggacggcacagtgattaaacgaatttatacggcggaggaattgcagcagcaggcagaaaa

SEQ ID NO: 706115 - DNA, 75 bp, synthetic construct
  source 1..75: mol_type = other DNA
gcggaaagcgttattcagccactggaacgcgctgtcaggctgaatatggcgacggatgaggaacgcgcacgactg

SEQ ID NO: 706116 - DNA, 75 bp, synthetic construct
  source 1..75: mol_type = other DNA
atgatgcatttaaaaaacattaaagcagggaacccaaaaacacctgaacaataccagttaaccaaaaaagctgga

SEQ ID NO: 706117 - DNA, 75 bp, synthetic construct
  source 1..75: mol_type = other DNA
atgcagcatttaaaaaacatcaattcaggaaacccaaaaactaaagagcaatatcagctaacaaagaattttgat

SEQ ID NO: 706118 - DNA, 75 bp, synthetic construct
  source 1..75: mol_type = other DNA
atgcagcatttaaaaaatattaagtctggtaatcctaaaacgaaagaacaatatcagctaacaaagaattttgat

SEQ ID NO: 706119 - DNA, 75 bp, synthetic construct
  source 1..75: mol_type = other DNA
gaagcatgggaacgctacagcgttctggtcagtcgtgtggttcctgcaaatcctgaatggccggaaatgccgcaa

SEQ ID NO: 706120 - DNA, 75 bp, synthetic construct
  source 1..75: mol_type = other DNA
attgtttacgatgaaaataatattattgttgctattaccagagatgcttcaacgcttaatcctgaaggttttagc

SEQ ID NO: 706121 - DNA, 75 bp, synthetic construct
  source 1..75: mol_type = other DNA
ataccagctaactaaaaaagcgggcgtggtatggttcttttgcgaagatggcaaaaactggtatgaggaacaaaa

SEQ ID NO: 706122 - DNA, 75 bp, synthetic construct
  source 1..75: mol_type = other DNA
ttcctggtgaaagaagggctgattaaccctgaacgttttgtgccaatgtttggcatgtacggactggcggaagcg

SEQ ID NO: 706123 - DNA, 75 bp, synthetic construct
  source 1..75: mol_type = other DNA
caaaagggggctacgggattgtgagctgttacaactcactgccgctggcgggtggtggcagcacgctggtacgcc

SEQ ID NO: 706124 - DNA, 75 bp, synthetic construct
  source 1..75: mol_type = other DNA
tggctggcaaaaacgcgccatgttacacgcacagtcggggatcagttctgatatcggcaccacgccgggcgcgcg

SEQ ID NO: 706125 - DNA, 75 bp, synthetic construct
  source 1..75: mol_type = other DNA
gcattaggtttcaaaagtaaatccggtggtatctatagtattgccctgggggctgcggctaacgcatctgcaacc

SEQ ID NO: 706126 - DNA, 75 bp, synthetic construct
  source 1..75: mol_type = other DNA
gagcgtgtctgcgccgcgctgcgggagctgaacaagcaccgggatattgttcgacatattacggattcttcccgc

SEQ ID NO: 706127 - DNA, 75 bp, synthetic construct
  source 1..75: mol_type = other DNA
gtgaaaaatggcgcgatcaagtctgacagttacgatgccattaatggttcacagctttatgccattagcgactcg

SEQ ID NO: 706128 - DNA, 75 bp, synthetic construct
  source 1..75: mol_type = other DNA
gcagaactgttcgatatcatcgacccgattgccattgctgaagtgcgcgaagctctcacccgtactctggcggct

SEQ ID NO: 706129 - DNA, 75 bp, synthetic construct
  source 1..75: mol_type = other DNA
cgaaggcaaagtgattccgttgcagaagggtggccatccggtcaatccggtattgaatgtcacccaggcggaaca

SEQ ID NO: 706130 - DNA, 75 bp, synthetic construct
  source 1..75: mol_type = other DNA
gcgcggaagtgattcgtatgatccacaccctgctgggcgaagaaaacttccagaaagggatgcagctctatttcg

SEQ ID NO: 706131 - DNA, 75 bp, synthetic construct
  source 1..75: mol_type = other DNA
ctaccttgggcaattggatgcgttgttgcaaccatatgtgaaaattctaacacaggacgagattgatattcgaat

SEQ ID NO: 706132 - DNA, 75 bp, synthetic construct
  source 1..75: mol_type = other DNA
cgccttaacctgaaagccattgccgagcgcagcgaatcgctggatgacttctttacgcgcactctaccgcactac

SEQ ID NO: 706133 - DNA, 75 bp, synthetic construct
  source 1..75: mol_type = other DNA
cacaactggaccggtaaccgtgtgacctgccgcgactggttccagctcagcctgaaagaaggcttgaccgttttc

SEQ ID NO: 706134 - DNA, 75 bp, synthetic construct
  source 1..75: mol_type = other DNA
tgctcatggtactagtagcccaactgccagcgtaatcaccgatgttgcggatggcacgatttcagcctccagtaa

SEQ ID NO: 706135 - DNA, 75 bp, synthetic construct
  source 1..75: mol_type = other DNA
gtagtactgtattagtgagtttattgtttgggcttgcgttggttttggtgaatagttggttcaatcagccaaccg

SEQ ID NO: 706136 - DNA, 75 bp, synthetic construct
  source 1..75: mol_type = other DNA
ttgacaacagtacagttcttatatctattaatgacagaaagggatctacaacctacagattggtgtagctttatg

SEQ ID NO: 706137 - DNA, 75 bp, synthetic construct
  source 1..75: mol_type = other DNA
agacagatggaggagtcgcaattgcaataggaatcgacgcgacagccagtggaataggaagtaccgcattcggct

SEQ ID NO: 706138 - DNA, 75 bp, synthetic construct
  source 1..75: mol_type = other DNA
ccgtttggcgtagcgcatggttggagcaaggagtcttaccgacagtcagtagaagcactgttggcgatgggatat

SEQ ID NO: 706139 - DNA, 75 bp, synthetic construct
  source 1..75: mol_type = other DNA
gcactcaggagagaaagaggcagagaaaatccgagccgattacgaacgtactttgggcgatcggccctggcggaa

SEQ ID NO: 706140 - DNA, 75 bp, synthetic construct
  source 1..75: mol_type = other DNA
gaacaggccggattaccgcccgtcgcgttaaatgaagcctatggcgacatcagtgccaaaataacaaaaatggcg

SEQ ID NO: 706141 - DNA, 75 bp, synthetic construct
  source 1..75: mol_type = other DNA
tcgcagcatcaaatacaatgagtccaggggcgcaaacaggtacaggaagtgttgcgattggggcaaaagcgaact

SEQ ID NO: 706142 - DNA, 75 bp, synthetic construct
  source 1..75: mol_type = other DNA
gtagcaagtgctgcgaatgcccttgcattagggcgattggccaaagcatcaggaactaactccattgccacaggt

SEQ ID NO: 706143 - DNA, 75 bp, synthetic construct
  source 1..75: mol_type = other DNA
tcactgccatcgttcactgaaacgcgagcgaatggcctgattttaccatcgctgcatatggcaaaccgcgaactg

SEQ ID NO: 706144 - DNA, 75 bp, synthetic construct
  source 1..75: mol_type = other DNA
ggcgcctccgtgagtactgcagggattgttaacgcccctaactacaaactgcaaagcggtacttttaataatgtt

SEQ ID NO: 706145 - DNA, 75 bp, synthetic construct
  source 1..75: mol_type = other DNA
gactgaaaaatggtatttatggcaatgttggcgatgctttagcagatctaaacaataacacgatacaatgggact

SEQ ID NO: 706146 - DNA, 75 bp, synthetic construct
  source 1..75: mol_type = other DNA
acattgtgcagtcgctgccatcgtttactgcaacgcgatctgatgatttgattttgtcatcgctgcatatggcaa

SEQ ID NO: 706147 - DNA, 75 bp, synthetic construct
  source 1..75: mol_type = other DNA
gcggtgctgctcgatgagaagattgacccggcactggcggcagaaattctgactctgccatccgtcaatgaaatg

SEQ ID NO: 706148 - DNA, 75 bp, synthetic construct
  source 1..75: mol_type = other DNA
cgctgcacacggcactaacgccaccaacaaaatcaccaatgtcaccgctggcgaactctctgataccagcaccga

SEQ ID NO: 706149 - DNA, 75 bp, synthetic construct
  source 1..75: mol_type = other DNA
cggtagcagacaggctgggaggcggagcagatgtagccagtaacggaacaataaaggggatgtcttataaactga

SEQ ID NO: 706150 - DNA, 75 bp, synthetic construct
  source 1..75: mol_type = other DNA
acaacaaaacagacaataatcagggcagcagtaatcagagtcagagcagtaatcagagtcagagcaggaggaaaa

SEQ ID NO: 706151 - DNA, 75 bp, synthetic construct
  source 1..75: mol_type = other DNA
gcggttaacggctctcagctcaaaaccactaacgatgccgtggcagccaacaccaccaatatcgccacgaacacc

SEQ ID NO: 706152 - DNA, 75 bp, synthetic construct
  source 1..75: mol_type = other DNA
taaacggctctcaattgtacgacctgcagcaggatgctctgttgtggaacggcactgcattcagcgccgcacacg

SEQ ID NO: 706153 - DNA, 75 bp, synthetic construct
  source 1..75: mol_type = other DNA
acgaaaaatgatggtaaaacctttcctcagccagccggtgttgcgttaccagtacaggaagcggcaacacaggaa

SEQ ID NO: 706154 - DNA, 75 bp, synthetic construct
  source 1..75: mol_type = other DNA
accactgcgaccgctgccggtgctgcgactcttaacgttcaactacagaccagccaggacaactccacctggacc

SEQ ID NO: 706155 - DNA, 75 bp, synthetic construct
  source 1..75: mol_type = other DNA
atggctacaatcctcacccctgactgcgatttactcgatctattgtccgtccccttcaatgccgccacggatttc

SEQ ID NO: 706156 - DNA, 75 bp, synthetic construct
  source 1..75: mol_type = other DNA
gcgatttactcgatttgttgtccgttccctttaacgccaccacggatttcaccgtccttgccgactattgcgccc

SEQ ID NO: 706157 - DNA, 75 bp, synthetic construct
  source 1..75: mol_type = other DNA
gcagcaccttttcccgggcagggataatccgaaaggcccaatgacatcacattccctgcgccagctacttaaaag

SEQ ID NO: 706158 - DNA, 75 bp, synthetic construct
  source 1..75: mol_type = other DNA
aaaaggcatggcgctatcggtttaaactcaacggcaaatccagcatgttcgcgttgggtgagtacccaacggtca

SEQ ID NO: 706159 - DNA, 75 bp, synthetic construct
  source 1..75: mol_type = other DNA
ccctatcttgctcaggcatggatagaaaatgaaaatcaggaaaaattattacagggccggttattgccacccctc

SEQ ID NO: 706160 - DNA, 75 bp, synthetic construct
  source 1..75: mol_type = other DNA
aagtggcttcaacgctggcaatggcaatcaataaaggtcgtctgattcgcgttaatcagaacggtaaatttcgtt

SEQ ID NO: 706161 - DNA, 75 bp, synthetic construct
  source 1..75: mol_type = other DNA
gcgcggaagtgattcgcatgatccacactctgctgggcgaagaaaacttccagaaagggatgcagctctatttcg

SEQ ID NO: 706162 - DNA, 75 bp, synthetic construct
  source 1..75: mol_type = other DNA
caccctgcttggcgaagaaaatttccagaaagggatgcaactctatttcgagcgtcatgatggtagcgcagcgac

SEQ ID NO: 706163 - DNA, 75 bp, synthetic construct
  source 1..75: mol_type = other DNA
tgatgagccgtggaccgcctggaaagaagaagagggcgcactggtcatcagtaatttgccggagcgttttacgct

SEQ ID NO: 706164 - DNA, 75 bp, synthetic construct
  source 1..75: mol_type = other DNA
acgcgttattggccatgaatatttccacaactggaccggtaaccgtgtgacttgccgcgactggttccagcttag

SEQ ID NO: 706165 - DNA, 75 bp, synthetic construct
  source 1..75: mol_type = other DNA
tctgaatatctttaactccaaatatgtgctggcccgtaccgacaccgccaccgataaagattacctcgatattga

SEQ ID NO: 706166 - DNA, 75 bp, synthetic construct
  source 1..75: mol_type = other DNA
atcctgcaagccaccagcccggcggcgaatgtgctggagacggtgcgtggtctgttgcagcatcgctcatttacc

SEQ ID NO: 706167 - DNA, 75 bp, synthetic construct
  source 1..75: mol_type = other DNA
agtcgtgaagagatactgaacgagctgtgggaactgaaaagaaatggcgtcgttgataaaactggtcacacctgg

SEQ ID NO: 706168 - DNA, 75 bp, synthetic construct
  source 1..75: mol_type = other DNA
cgacgaactgaatcgttttccgttgatgtcagagggcacggcaaaggcctgtacagatgagtttatccgggatgt

SEQ ID NO: 706169 - DNA, 75 bp, synthetic construct
  source 1..75: mol_type = other DNA
acggtctcggtgacgactccctgctgtggaacaaaacagctggcgcattcagcgccgctcacggcactgacgcca

SEQ ID NO: 706170 - DNA, 75 bp, synthetic construct
  source 1..75: mol_type = other DNA
gaagaagagggcgcactggtcatcagtaatttgccggagcgttttacgcttaagatcattaatgaaataagcccg

SEQ ID NO: 706171 - DNA, 75 bp, synthetic construct
  source 1..75: mol_type = other DNA
tgacagctggcagcactgacgccgttaacggctcccagctcaaaaccaccaacgataacgtgtcgaccaacacca

SEQ ID NO: 706172 - DNA, 75 bp, synthetic construct
  source 1..75: mol_type = other DNA
gcagcagcgaccgacaattctgtcgctatcggcgcaggatcgaccacagatgcaagcaatacggtttcagttggc

SEQ ID NO: 706173 - DNA, 75 bp, synthetic construct
  source 1..75: mol_type = other DNA
gagggggcaagagataaagatataagcctttcaggaactgcttcaatgcttcttgaactggggcttcgcgtatat

SEQ ID NO: 706174 - DNA, 75 bp, synthetic construct
  source 1..75: mol_type = other DNA
gaggctcagatggaacgtaaagactctgcgttcaatcaggcagagtttaataaggtaattcttgaatgtgttgta

SEQ ID NO: 706175 - DNA, 75 bp, synthetic construct
  source 1..75: mol_type = other DNA
tcttgaactggggcttcgtgtatatgaggctcagatggagcgtaaagagtctgcgtttaatcagacagagtttaa

SEQ ID NO: 706176 - DNA, 75 bp, synthetic construct
  source 1..75: mol_type = other DNA
accgagctgggctggccgatatttttccggggctggaccggcgtctggcgggcatgctgcttactgctggaggga

SEQ ID NO: 706177 - DNA, 75 bp, synthetic construct
  source 1..75: mol_type = other DNA
ggcggttttgatccgcgcgcgtgggatgtggcaagcctgatggattttgctgtgccggtggtggcgtgtctgctg

SEQ ID NO: 706178 - DNA, 75 bp, synthetic construct
  source 1..75: mol_type = other DNA
ctctttgtgctgtggctgcgcagctactgattggtctttttaccgggaactgggcttacggggcgatagccggtt

SEQ ID NO: 706179 - DNA, 75 bp, synthetic construct
  source 1..75: mol_type = other DNA
gaagctcagatggagcgtaaagagtctgcatttaatcagaccgagtttaataaattaatccttgagtgtgtggta

SEQ ID NO: 706180 - DNA, 75 bp, synthetic construct
  source 1..75: mol_type = other DNA
accgggccggactggccgatatttttccggggctggaccggcgtctggcgggcatgttgctcactgcgggaggga

SEQ ID NO: 706181 - DNA, 75 bp, synthetic construct
  source 1..75: mol_type = other DNA
gatttcgtaataaacaggcaagaaatagcctataaaaagcttcttgaggtaagagagaagttacgagatacaggc

SEQ ID NO: 706182 - DNA, 75 bp, synthetic construct
  source 1..75: mol_type = other DNA
gtgacgaaattgtctatcaaataaatgaaattgtggaaagaagacgtgcagaaggagctaaaagtacagatgtaa

SEQ ID NO: 706183 - DNA, 75 bp, synthetic construct
  source 1..75: mol_type = other DNA
gtttttcagcaacagcttcaatgcttcttgagttagggcttcgtgtatatgaagctcagatggagcgtaaagaat

SEQ ID NO: 706184 - DNA, 75 bp, synthetic construct
  source 1..75: mol_type = other DNA
tcttgaactgggtcttcgtgtatatgaggctcagatggagcgcaaagagtctgcatttaatcaggccgagtttaa

SEQ ID NO: 706185 - DNA, 75 bp, synthetic construct
  source 1..75: mol_type = other DNA
tgatccgcgcgtgtgggatatggcaagtctgatggattttgctgtgccggtgatagcgtgtctgctggtctggct

SEQ ID NO: 706186 - DNA, 75 bp, synthetic construct
  source 1..75: mol_type = other DNA
tggcggccattgacgcactcaaacgcaatgacattgccgtactgctggacgtggtcgtcaaccacaaaatggggg

SEQ ID NO: 706187 - DNA, 75 bp, synthetic construct
  source 1..75: mol_type = other DNA
aaatatggcgataaagcacaactgctggccgccattgacgccctgaaacgtaatgacattgcggtgctgttggac

SEQ ID NO: 706188 - DNA, 75 bp, synthetic construct
  source 1..75: mol_type = other DNA
gcccgcctataaaggcgcatcgggcgggtattcggtcggctacgactcctatgatttatttgatttaggcgagtt

SEQ ID NO: 706189 - DNA, 75 bp, synthetic construct
  source 1..75: mol_type = other DNA
ggttgaaccttggtttaaaccgctggcttatgcccttattttgctgcgggaaaatggcgtcccttccgtgttcta

SEQ ID NO: 706190 - DNA, 75 bp, synthetic construct
  source 1..75: mol_type = other DNA
cgcatggggcgcgactacgacatgacgcagattttcaccggtacgctggtggaagccgatcctttccatgctgtt

SEQ ID NO: 706191 - DNA, 75 bp, synthetic construct
  source 1..75: mol_type = other DNA
gttttcactggtattacccggaaggcggcaaactctggcctgaactggccgagcgcgccgacggtttaaacgata

SEQ ID NO: 706192 - DNA, 75 bp, synthetic construct
  source 1..75: mol_type = other DNA
ttggcgcgctcggcagcacgccattctggcgaacctgttttagcaacttcacccgcgagcagaaacagcgcgcgt

SEQ ID NO: 706193 - DNA, 75 bp, synthetic construct
  source 1..75: mol_type = other DNA
gaaatgttcgggcatggcaagcggattaacatgccgtggtggggcggttttgatccacgtgcatgggatgtggca

SEQ ID NO: 706194 - DNA, 75 bp, synthetic construct
  source 1..75: mol_type = other DNA
gcggaattttgcggtggaaaacgggaaagaatgccgtggtatggcggattattacctaaagcatggaatatggct

SEQ ID NO: 706195 - DNA, 75 bp, synthetic construct
  source 1..75: mol_type = other DNA
cgcatggggcgcgactacgacatgacgcagattttcacgggtacattagtggaagccgatcctttccacgccgta

SEQ ID NO: 706196 - DNA, 75 bp, synthetic construct
  source 1..75: mol_type = other DNA
caagagctatcacggtgaatggaaacgcaagccagggaacgatcgaggcgctaatcaatatgatctacacctggc

SEQ ID NO: 706197 - DNA, 75 bp, synthetic construct
  source 1..75: mol_type = other DNA
ggtggaaagcgtccgggaaagcctgccggtggctgaacagcaacgcattctggaacaaaaactggtgatgctgtc

SEQ ID NO: 706198 - DNA, 75 bp, synthetic construct
  source 1..75: mol_type = other DNA
tgccggagatgaaaaaagtacaatataaacaacgatatcaacaagaattgatattgcgtggcaattatgcgtctg

SEQ ID NO: 706199 - DNA, 75 bp, synthetic construct
  source 1..75: mol_type = other DNA
gaagttgatatagcccttggtaaaataaataacattatagacagcagaaacatatcagccccccatgaactggca

SEQ ID NO: 706200 - DNA, 75 bp, synthetic construct
  source 1..75: mol_type = other DNA
gatttaactgtcactgcaggcgctaaccggataactgcagatggtcgcgtcagtgccctgaagggcgaaggtgat

SEQ ID NO: 706201 - DNA, 75 bp, synthetic construct
  source 1..75: mol_type = other DNA
tcattgcggcgatgacatgatgctcaatacgcccctaattccgttggcagagctggaatcaaatgcgacggtttt

SEQ ID NO: 706202 - DNA, 75 bp, synthetic construct
  source 1..75: mol_type = other DNA
ctcgttctgctgctgtatgtcatcaatatgggtgtcgcagaagtattacaggcaaccggaaacatgctgctgccg

SEQ ID NO: 706203 - DNA, 75 bp, synthetic construct
  source 1..75: mol_type = other DNA
catcaggaaaatcaggactgtgcatcgctgaccccggaaacttttttaccgcgtatccatgtcattaaaggtgtg

SEQ ID NO: 706204 - DNA, 75 bp, synthetic construct
  source 1..75: mol_type = other DNA
cctggcaactttatataaaatgctgataaacgaaagagaagtttcagaatatgaatgccagttattatatttaat

SEQ ID NO: 706205 - DNA, 75 bp, synthetic construct
  source 1..75: mol_type = other DNA
ctacattgagccgattgatggttaccgtattcagtttgactggtatccgacttcggattcaactgatccggtcga

SEQ ID NO: 706206 - DNA, 75 bp, synthetic construct
  source 1..75: mol_type = other DNA
cttatgctactgctgattctgttataacggcactgttgcaaatagtcggtggtgataaacttatcatcccctttt

SEQ ID NO: 706207 - DNA, 75 bp, synthetic construct
  source 1..75: mol_type = other DNA
cattcttggtaagaccagtattcagagcgttcttgattaccttggtttaggggaaggctcggtgctgcccgttgg

SEQ ID NO: 706208 - DNA, 75 bp, synthetic construct
  source 1..75: mol_type = other DNA
ttatgagttattcttttctttagcaaaccataacgatgataacaaaaaacttaaaggttttttgaatggtcatga

SEQ ID NO: 706209 - DNA, 75 bp, synthetic construct
  source 1..75: mol_type = other DNA
ttgcttgagtattcggtttgtagtgataatgttgaaaaaatagcacacaaaatagatgaattattaatgagagaa

SEQ ID NO: 706210 - DNA, 75 bp, synthetic construct
  source 1..75: mol_type = other DNA
ttggagccttgctggcggagtgcccaccaattggtttggcccattactcgttggggtgtgatgaccactcaaacg

SEQ ID NO: 706211 - DNA, 75 bp, synthetic construct
  source 1..75: mol_type = other DNA
gataagatatttggtcatgttgatacggtgtcccccaaagataagaaattaataaaaatccttaaggatgaaatt

SEQ ID NO: 706212 - DNA, 75 bp, synthetic construct
  source 1..75: mol_type = other DNA
ctttttaagcaaatcaaagcaatatgaacatatatctttaagtgctcttagtgaaggattaacgggcaacagatc

SEQ ID NO: 706213 - DNA, 75 bp, synthetic construct
  source 1..75: mol_type = other DNA
ttttctgatagggttaaagtaaaagaaataaatgttgagtttaatgataatagtttaattaaaaacataattcat

SEQ ID NO: 706214 - DNA, 75 bp, synthetic construct
  source 1..75: mol_type = other DNA
gggttaatgtttttattggtaataaattagataatcactttgtcacagggcgctcaggcgcaactatatacccag

SEQ ID NO: 706215 - DNA, 75 bp, synthetic construct
  source 1..75: mol_type = other DNA
ctttacctgcgaccacatcggccaggaactggaagtcggttattattcattatatagggttgttaatatctaaac

SEQ ID NO: 706216 - DNA, 75 bp, synthetic construct
  source 1..75: mol_type = other DNA
taactcggtgtgtgttaatgatgttacgcctgacgatgcaagtacctgggttgctaaactagagaagatagaaga

SEQ ID NO: 706217 - DNA, 75 bp, synthetic construct
  source 1..75: mol_type = other DNA
atacattttccgctgaacaagaaaacaaattagctaaacaatttcaagatatgtgcagatttgtaaaacagaatt

SEQ ID NO: 706218 - DNA, 75 bp, synthetic construct
  source 1..75: mol_type = other DNA
attaattatgatttcttagagaaagagcaccaccgaagggcattaaatgatgagattctttctgttataagtaaa

SEQ ID NO: 706219 - DNA, 75 bp, synthetic construct
  source 1..75: mol_type = other DNA
aggatgatatatatcatgctgcaaggacatatctgcgaaattacgttaagttatgtttatccggatacacgccag

SEQ ID NO: 706220 - DNA, 75 bp, synthetic construct
  source 1..75: mol_type = other DNA
ataaatctgaagctgaattaaacatgaacctaattcaaaaaaatataaataccattataggttctaattatgggg

SEQ ID NO: 706221 - DNA, 75 bp, synthetic construct
  source 1..75: mol_type = other DNA
agtatcagaaaaattacgcaatataaatatccataaatatagaattaattcggttaatcctaatagtgaaggtga

SEQ ID NO: 706222 - DNA, 75 bp, synthetic construct
  source 1..75: mol_type = other DNA
gctttcacccaatgaaggccgttgtatcggtttaagtgagttatatatccttgctgatactaaagaaaaatataa

SEQ ID NO: 706223 - DNA, 75 bp, synthetic construct
  source 1..75: mol_type = other DNA
tataagatatttggtcatgttgatactttgccccccaaagataaggaattaataaaaatccttaaggatgaaatt

SEQ ID NO: 706224 - DNA, 75 bp, synthetic construct
  source 1..75: mol_type = other DNA
atgacggtcagatattatatcagttctgctgatttaaccgcagggaagttcgccacagcaatccgaaaccactgg

SEQ ID NO: 706225 - DNA, 75 bp, synthetic construct
  source 1..75: mol_type = other DNA
ttggcgctcgcaagtgcgacgatacaggcagccgatgtcaccatcacggtgaacggtaaggtcgtcgccaaaccg

SEQ ID NO: 706226 - DNA, 75 bp, synthetic construct
  source 1..75: mol_type = other DNA
aagaaattatgcgtggcagtctcctttcggtccataatagcagaacaaaagaaagagccagaaatgacggtcaga

SEQ ID NO: 706227 - DNA, 75 bp, synthetic construct
  source 1..75: mol_type = other DNA
aatcagcaaggggcggctggcacgcgttaatcagaacggtaaatttcgttactgcatgccgggcgataatttacc

SEQ ID NO: 706228 - DNA, 75 bp, synthetic construct
  source 1..75: mol_type = other DNA
atctgaagcaccggatgtgctaaccggggtgggcgaacaaaaagttaccgctgacatgatgattgagtttatcgg

SEQ ID NO: 706229 - DNA, 75 bp, synthetic construct
  source 1..75: mol_type = other DNA
gcattcgcaaggttgcttccacgctggcggtagtaacctcaacagggcggctggcacgcgttaatcagaacggta

SEQ ID NO: 706230 - DNA, 75 bp, synthetic construct
  source 1..75: mol_type = other DNA
tgctgatgcccgcagaaacgcacgatcgcggctttgcgatgacaagcagcattaccactatgatggccagctgcc

SEQ ID NO: 706231 - DNA, 75 bp, synthetic construct
  source 1..75: mol_type = other DNA
gcttacagggcgcagcacgcgagtcggcgctgaaagtgctggaactgacggcgggtaaactggcggccttttatg

SEQ ID NO: 706232 - DNA, 75 bp, synthetic construct
  source 1..75: mol_type = other DNA
gcagcggaattattttcagggatacggcacattgctattaatattttgacgaatgataaggtattcaaggcaggg

SEQ ID NO: 706233 - DNA, 75 bp, synthetic construct
  source 1..75: mol_type = other DNA
gcagcagaattattttcagggatacggcacatcgctattaatattttgactaatgataaggtattcaaggcaggg

SEQ ID NO: 706234 - DNA, 75 bp, synthetic construct
  source 1..75: mol_type = other DNA
ctgttgatttaaccgcagagaagttcgccacagcaatccgaaaccactggcacgtggagaataagctgcactggc

SEQ ID NO: 706235 - DNA, 75 bp, synthetic construct
  source 1..75: mol_type = other DNA
cactaatccaatggattacctgaatccagctcatcctctgctgctgatctccttcggtcgttccggcaacagccc

SEQ ID NO: 706236 - DNA, 75 bp, synthetic construct
  source 1..75: mol_type = other DNA
gtttgggctatatcatcaactcacagtgatgaatataaaatgtctggttattgcccccttcccgtatacccaaat

SEQ ID NO: 706237 - DNA, 75 bp, synthetic construct
  source 1..75: mol_type = other DNA
acgagacagcagagttgcccgacagcgaattctgagcatgctattgcgaacagacaaacgttatgcaggaaagca

SEQ ID NO: 706238 - DNA, 75 bp, synthetic construct
  source 1..75: mol_type = other DNA
aatgtgaaccgccccgggtttcctggagagtgttttatctgtgaactcaggctgccagatcatcgtttccgatgg

SEQ ID NO: 706239 - DNA, 75 bp, synthetic construct
  source 1..75: mol_type = other DNA
cccaaacagctcatggcttttctgggactggtgccaggtgaatattccagtggaaacagtattcgtcccagagga

SEQ ID NO: 706240 - DNA, 75 bp, synthetic construct
  source 1..75: mol_type = other DNA
tagctaatcaatcatttagtcagccatctcaacagattgcttttcaacactattgtcaaagtctggagcagattg

SEQ ID NO: 706241 - DNA, 75 bp, synthetic construct
  source 1..75: mol_type = other DNA
gggcagttcagagttgcccgacagcgaattctgagcatgctattgcgaacagacaaacattatgcaggaaagcac

SEQ ID NO: 706242 - DNA, 75 bp, synthetic construct
  source 1..75: mol_type = other DNA
acgcgtcaacccagttggagagtaatgcccggctcagttcgacaccctgtcgggcaaagatttcactctgacgat

SEQ ID NO: 706243 - DNA, 75 bp, synthetic construct
  source 1..75: mol_type = other DNA
ccaggctgtacgtcgattatttcagaaattgcagggactttacggaaacattctttcctgctataaggctggccc

SEQ ID NO: 706244 - DNA, 75 bp, synthetic construct
  source 1..75: mol_type = other DNA
tggcaccactcaagttatcaatagcaaaaccccgttgaaaagctacccgctggatatccataacgttcaggatca

SEQ ID NO: 706245 - DNA, 75 bp, synthetic construct
  source 1..75: mol_type = other DNA
ggggaccactcaagttatcaacagcaaaaccccgctgaaaagttacccgctggacatccacaacgttcaggatca

SEQ ID NO: 706246 - DNA, 75 bp, synthetic construct
  source 1..75: mol_type = other DNA
gaagctatgcgggatctaatcagagcccgtgcagcagctaaacgagacagcagagttgcccgacagcgaattctg

SEQ ID NO: 706247 - DNA, 75 bp, synthetic construct
  source 1..75: mol_type = other DNA
ccccttcccgcataccaaaatcaccgacagacagaatcaaaaatgatcatcgggacgcaatttctctcgccaggt

SEQ ID NO: 706248 - DNA, 75 bp, synthetic construct
  source 1..75: mol_type = other DNA
gtgaaattgagatggtttgcctttttgattgtgttattagcaggttgttcatcaaagcatgactacacgaccccg

SEQ ID NO: 706249 - DNA, 75 bp, synthetic construct
  source 1..75: mol_type = other DNA
acaccagtaaagcaaaagccgcattacctgataatgactctcttatgatgtttctcactattccagtttttcttt

SEQ ID NO: 706250 - DNA, 75 bp, synthetic construct
  source 1..75: mol_type = other DNA
acatttaccacggattgtggccggacgtcgcctgggcgtaccaaaatcaacagtttgtggtatgttcgtgcgttt

SEQ ID NO: 706251 - DNA, 75 bp, synthetic construct
  source 1..75: mol_type = other DNA
tgaccctgggcctgagtcagttggaacgcctgcgcccgttactggatgctcagtcagacgagcgtcctgcagtgc

SEQ ID NO: 706252 - DNA, 75 bp, synthetic construct
  source 1..75: mol_type = other DNA
tacaggatgcagagcctgtgctgcctcagggagacaatgtgacctttatcgggcgccctgtcggtgcggatacgg

SEQ ID NO: 706253 - DNA, 75 bp, synthetic construct
  source 1..75: mol_type = other DNA
aatacctggaacgtgacgcggctctggagcggcgttttcagatggtcagagtggacgagccggatgatgagacgg

SEQ ID NO: 706254 - DNA, 75 bp, synthetic construct
  source 1..75: mol_type = other DNA
ccaacctgctgaagcctgcgctggcgcggggcgaactgcgcaccattgctgccaccacctggtctgagtacaaac

SEQ ID NO: 706255 - DNA, 75 bp, synthetic construct
  source 1..75: mol_type = other DNA
gcaggacagcgtgttttatcccgaagccagcccggagcggctggcggaactgaccgatttgcgtgatgagctgca

SEQ ID NO: 706256 - DNA, 75 bp, synthetic construct
  source 1..75: mol_type = other DNA
ctatagcattggaattagctgagatatatgttaagaatcgttatggacaggatgccgcagaagaagaaaaaccat

SEQ ID NO: 706257 - DNA, 75 bp, synthetic construct
  source 1..75: mol_type = other DNA
acagatggccgcagaaatgctgctcagtcacggcttctcactcatgaatccccctgaatcttttcccgtaccgcc

SEQ ID NO: 706258 - DNA, 75 bp, synthetic construct
  source 1..75: mol_type = other DNA
ttaccgaagatacagaaagcccgcgccgcacggggcagggtcatggctgtcatattcatgtggaccagatatccc

SEQ ID NO: 706259 - DNA, 75 bp, synthetic construct
  source 1..75: mol_type = other DNA
gcaactgctgccggtactgagccggcagttgctgagccatatggccgcgaagcagaaaccacaggcgctggctct

SEQ ID NO: 706260 - DNA, 75 bp, synthetic construct
  source 1..75: mol_type = other DNA
acgacattcagcagaatcagcccctgctcagtgtggatgttgacgtacgcaccgtggccggtgtggtcgcggact

SEQ ID NO: 706261 - DNA, 75 bp, synthetic construct
  source 1..75: mol_type = other DNA
ctatggcgaacggattgcagaagaagaaaaaccatatttaattacggaactaccagatagttgggttgttgaggg

SEQ ID NO: 706262 - DNA, 75 bp, synthetic construct
  source 1..75: mol_type = other DNA
ctgcatctggaaaaggatatcggcagacgggtggtcggacaggacgtggcactgggatccattgcgcagcgtctg

SEQ ID NO: 706263 - DNA, 75 bp, synthetic construct
  source 1..75: mol_type = other DNA
atgtcggagcaggaacttgatgcctgcctttacggacaattttccacggtaccagtcgtacgtcctgaaaacacc

SEQ ID NO: 706264 - DNA, 75 bp, synthetic construct
  source 1..75: mol_type = other DNA
ttcaactggcgccatcaataccggaaaggtggcctgctgccttccggaaaaaatatgccggcactgcttcccgtg

SEQ ID NO: 706265 - DNA, 75 bp, synthetic construct
  source 1..75: mol_type = other DNA
tgtgttattcagtcggcagtgctacgcgccaggggagcagttcgccgacccggtttatcggccagtcggctatga

SEQ ID NO: 706266 - DNA, 75 bp, synthetic construct
  source 1..75: mol_type = other DNA
cctgaaagcaccgttatatccgaagcccccgtggtaaaaaacgtccccggcggcccaacttcccttatgagttta

SEQ ID NO: 706267 - DNA, 75 bp, synthetic construct
  source 1..75: mol_type = other DNA
gataaatacaccgcccgacagtctgtgctgtgagctggttctgccggccggaactctcaggctgaaaggtgaact

SEQ ID NO: 706268 - DNA, 75 bp, synthetic construct
  source 1..75: mol_type = other DNA
aaccccgccggaaccgattttcaccggagtttaaatggagacttgttcagcagactcttttacccggtgcctgtg

SEQ ID NO: 706269 - DNA, 75 bp, synthetic construct
  source 1..75: mol_type = other DNA
gacgtggcatgatgaggatggtattgtgatagcgtttgatggaatcaatagcgattatccgcaggaaagcatata

SEQ ID NO: 706270 - DNA, 75 bp, synthetic construct
  source 1..75: mol_type = other DNA
ttgcctgcaggtatgtcggagcaggagcttgatgcccgtctttacgagagaacttgtaagcgtaaactgaccgcc

SEQ ID NO: 706271 - DNA, 75 bp, synthetic construct
  source 1..75: mol_type = other DNA
tgcctccacagtatctgtcgtacttactgagaacaccgttatgtccgaagtcacggtgaaaaaaaaacgtctcca

SEQ ID NO: 706272 - DNA, 75 bp, synthetic construct
  source 1..75: mol_type = other DNA
gtgaaaatggaatcaacgataacctgctcttcaactggcgccatcaataccggaaaggtggcctgctgccttccg

SEQ ID NO: 706273 - DNA, 75 bp, synthetic construct
  source 1..75: mol_type = other DNA
aacctcctatcgtcagtctgtagaggccctgctggccatgggatacagaaatatcaccatgggggggatggtgcc

SEQ ID NO: 706274 - DNA, 75 bp, synthetic construct
  source 1..75: mol_type = other DNA
ttaaggatctcgagacgatcgaatacattggcgataatcagtttgtcattagcgatgagcgcgattacgccattt

SEQ ID NO: 706275 - DNA, 75 bp, synthetic construct
  source 1..75: mol_type = other DNA
tttcacgaaggctttatgttacaaagtttcttgagtcaaagataatgcttttctttggaactattagttatacac

SEQ ID NO: 706276 - DNA, 75 bp, synthetic construct
  source 1..75: mol_type = other DNA
cggacgctctatccgccgacggatgaatcatcctgataggttgaaatatcccatgaagcgcgtcggcaagcgcgg

SEQ ID NO: 706277 - DNA, 75 bp, synthetic construct
  source 1..75: mol_type = other DNA
tattgataaaattgatatttcagcgccaccttccacggtaaatattgatggcatcgccacttccgtcaatcaggc

SEQ ID NO: 706278 - DNA, 75 bp, synthetic construct
  source 1..75: mol_type = other DNA
atgacaaaaaggttttcgttaagtaaacgtatcagcattattattctttttgccattgtggcagtgtgtgctttc

SEQ ID NO: 706279 - DNA, 75 bp, synthetic construct
  source 1..75: mol_type = other DNA
gttaagtagcaatgaattacacatcagcaaagacgaggcactacaacggcaatttactttagatgatgtgtccgg

SEQ ID NO: 706280 - DNA, 75 bp, synthetic construct
  source 1..75: mol_type = other DNA
atcgatccggcgtttcgtcaggcgctggaaaagaaagggatcgatgtgatcataaccggagagagcaatgagtga

SEQ ID NO: 706281 - DNA, 75 bp, synthetic construct
  source 1..75: mol_type = other DNA
attggcattcagatcgacggcgacaaggcggtcgtgaacaacgacggtgacaatgccatcagcaacggcggcacc

SEQ ID NO: 706282 - DNA, 75 bp, synthetic construct
  source 1..75: mol_type = other DNA
tataaccgagcatcgggtagcattatcactgatcagttatcgctaacgggtagtaactcgtttttcaatgagggc

SEQ ID NO: 706283 - DNA, 75 bp, synthetic construct
  source 1..75: mol_type = other DNA
ccacaacgacattccaacggcgagcaaacatcccgcgctattgccatgctttccgttctcaccggcaacgtcggc

SEQ ID NO: 706284 - DNA, 75 bp, synthetic construct
  source 1..75: mol_type = other DNA
ggcgtaaatgtggtttcaattttgccgattagagagctttcccccaatgaaaatgtgtatgatttgttaaataaa

SEQ ID NO: 706285 - DNA, 75 bp, synthetic construct
  source 1..75: mol_type = other DNA
aaaatacaacctaagctcttaaaaataaaatcaattcttaaacttttggaagtagaatcgttaagcctaaaacaa

SEQ ID NO: 706286 - DNA, 75 bp, synthetic construct
  source 1..75: mol_type = other DNA
gtgccggtaacggaaaatgatggtaaggcctttcctcagccagcaggtgttgcgttaccagtacaggaagcggca

SEQ ID NO: 706287 - DNA, 75 bp, synthetic construct
  source 1..75: mol_type = other DNA
ttcatctctgcgtggaagaaccggcgatcaccgccggttttctgcgttttttagcgggagaagcccgcaaggccg

SEQ ID NO: 706288 - DNA, 75 bp, synthetic construct
  source 1..75: mol_type = other DNA
agccaacagcagtaaatcgctggcgatcatggacgttaaccaaaacgcggtggtcagtgcgatggaaaaacatca

SEQ ID NO: 706289 - DNA, 75 bp, synthetic construct
  source 1..75: mol_type = other DNA
ggtgcctggcataccgaaggttcgatggtgaaagtcacggcggatgacgttgagctaatccatttcccgttttaa

SEQ ID NO: 706290 - DNA, 75 bp, synthetic construct
  source 1..75: mol_type = other DNA
atgtcattcggtcagccttgtgatgagtttcccctgagttcgctgcctccactcattcgtgatgccgttattgaa

SEQ ID NO: 706291 - DNA, 75 bp, synthetic construct
  source 1..75: mol_type = other DNA
tctcgccaggatcacactttctggttttttaaagagaaaaacccgattgaggtctacaaagttaacgggctgtta

SEQ ID NO: 706292 - DNA, 75 bp, synthetic construct
  source 1..75: mol_type = other DNA
tccgcaaaagcgcggatgagtcagaaacgctcagacaactggaagcgcttcagaaaaacagaggggaaaaacctg

SEQ ID NO: 706293 - DNA, 75 bp, synthetic construct
  source 1..75: mol_type = other DNA
gatattagccgagcaaatgcgttaacgtcagcatatgcaccaacagcagcaatgcagaattacaatcagtacgcg

SEQ ID NO: 706294 - DNA, 75 bp, synthetic construct
  source 1..75: mol_type = other DNA
ggtattacaggttcttcaggttcttttgctcttggtgcagatattcgtagccgggcatctggtgttgaggagagg

SEQ ID NO: 706295 - DNA, 75 bp, synthetic construct
  source 1..75: mol_type = other DNA
agcagagccgaaagccgcgctggtaaaggaaagtgatggtaaggcctttcctcagccagcaggtgctgcgttacc

SEQ ID NO: 706296 - DNA, 75 bp, synthetic construct
  source 1..75: mol_type = other DNA
attctcggattattgcatctgaagagttataagcagttggaagattacattctcaaaacagccaataactatcag

SEQ ID NO: 706297 - DNA, 75 bp, synthetic construct
  source 1..75: mol_type = other DNA
cagtgccgatgagcccaccggtggaagacatatgaagttggtgatcgctggcgcgctgggcttgccttatgccga

SEQ ID NO: 706298 - DNA, 75 bp, synthetic construct
  source 1..75: mol_type = other DNA
aatgaatcagcttagtaaaagcattgaccctaagcgagttgcattaataaatcgctctcttggtgatgggactat

SEQ ID NO: 706299 - DNA, 75 bp, synthetic construct
  source 1..75: mol_type = other DNA
gatccttgatggcggcaccggaacccgcattacgggtgatgatgcgacggccaacaacagtggcaataccaccgt

SEQ ID NO: 706300 - DNA, 75 bp, synthetic construct
  source 1..75: mol_type = other DNA
aaaggaacggcgaccaatgcgggcgagataaatgtcgacggctttgtaccaacagtagatgaaaacggtaatatt

SEQ ID NO: 706301 - DNA, 75 bp, synthetic construct
  source 1..75: mol_type = other DNA
atcaccaaaaccgtcggcgcaacggtggatgaccccgcgaacagcaacgtatttaacctcagcgatgcggtgctc

SEQ ID NO: 706302 - DNA, 75 bp, synthetic construct
  source 1..75: mol_type = other DNA
aaacgcaccgcaactgctgagcaactataccatcggtaccaacagcgacgggagttcgggtacgctcagcgcgaa

SEQ ID NO: 706303 - DNA, 75 bp, synthetic construct
  source 1..75: mol_type = other DNA
cgtatatctgatggggggcgggatgttggcaggttcaacggataccggcgacggtgatgctaaagcggtgaatac

SEQ ID NO: 706304 - DNA, 75 bp, synthetic construct
  source 1..75: mol_type = other DNA
caaagcgatattgatggcgacaactcggtatcggtaaaagttgcaggaaacgcaaccagaatcagaatggaaggc

SEQ ID NO: 706305 - DNA, 75 bp, synthetic construct
  source 1..75: mol_type = other DNA
gaaaagattctgtggttgtggcgataaccggaaacgatattaccgttaacaataacggccatatggttgtcgatg

SEQ ID NO: 706306 - DNA, 75 bp, synthetic construct
  source 1..75: mol_type = other DNA
gtatcagaaaacgttccggcatgaaaaaatggagcgacgggtacagataagtgccctgatttctccggaagccag

SEQ ID NO: 706307 - DNA, 75 bp, synthetic construct
  source 1..75: mol_type = other DNA
agcctggtaaaaagagacgcggaaaatgcacaacaggcaccacacgtcatgcatggattaggattgttcataaat

SEQ ID NO: 706308 - DNA, 75 bp, synthetic construct
  source 1..75: mol_type = other DNA
ttacggcgacgtcaataaaaccgctgatgctaatgtgaaacagcagtatctggaattccgtagtgaaggggcaaa

SEQ ID NO: 706309 - DNA, 75 bp, synthetic construct
  source 1..75: mol_type = other DNA
tctgcaactttacctgttgttgccagcactcaagaagtcattggcacaaccgttccagcaatcagcgccgtctta

SEQ ID NO: 706310 - DNA, 75 bp, synthetic construct
  source 1..75: mol_type = other DNA
cctcttgttgggggtgatggtcgtcgcctttctgctggtgcctgatcaggcacacgcaggcaatggtggtggagc

SEQ ID NO: 706311 - DNA, 75 bp, synthetic construct
  source 1..75: mol_type = other DNA
atgtctgtgcattcaccagatgaatctgctcatgtttttagtcggatggaatatgaatatcaccgacataacgat

SEQ ID NO: 706312 - DNA, 75 bp, synthetic construct
  source 1..75: mol_type = other DNA
ccctgacggctggagatggccggaccactgttgtacaaggctgggatgtcgacacggctgccaatactgtagaaa

SEQ ID NO: 706313 - DNA, 75 bp, synthetic construct
  source 1..75: mol_type = other DNA
agcagccaggaaagtgcgttgcaggtagatgcattccactggaaagaagacggcatcagtgataaaggtgtgatg

SEQ ID NO: 706314 - DNA, 75 bp, synthetic construct
  source 1..75: mol_type = other DNA
catcacaggtactgactcggttggtgtgtccatcaatggcgacagtgcgacgttgaccaatacgggcgatattga

SEQ ID NO: 706315 - DNA, 75 bp, synthetic construct
  source 1..75: mol_type = other DNA
taagtcatgagtcagcggtaaaagtaactgccaaagcagcagttagaaaaggggctattagtaaacttttcatag

SEQ ID NO: 706316 - DNA, 75 bp, synthetic construct
  source 1..75: mol_type = other DNA
gttgcagacccgagggtattcaataatagcgtgtcgagtatgatgggaatggaggcctacggtaaaggcactgtt

SEQ ID NO: 706317 - DNA, 75 bp, synthetic construct
  source 1..75: mol_type = other DNA
gtgagcggcggtggtcacggtattgatatcaccggcgacagcgcaacggtggataacaaaggcggtatgaccgtt

SEQ ID NO: 706318 - DNA, 75 bp, synthetic construct
  source 1..75: mol_type = other DNA
tgcgggcgactttaacctgagcatgaacagcggcagcgaaacggcggtggacagcatcgttgggctgaaactgga

SEQ ID NO: 706319 - DNA, 75 bp, synthetic construct
  source 1..75: mol_type = other DNA
tggcgatacaccagttccaccagacgatggtggcgatacaccagttccaccagacgacggtggtgatacacctgt

SEQ ID NO: 706320 - DNA, 75 bp, synthetic construct
  source 1..75: mol_type = other DNA
caatgccggggtgattaatatcaggccagatgctgaatcacacagtttctttgctggaatgctggcaagaggcga

SEQ ID NO: 706321 - DNA, 75 bp, synthetic construct
  source 1..75: mol_type = other DNA
ttcaacacgggttatgccttgctggccagtaattacggttcggtaattaatgaagcgggagcgaccattaatttg

SEQ ID NO: 706322 - DNA, 75 bp, synthetic construct
  source 1..75: mol_type = other DNA
aaaatagttaccgaaggtgacaaatccagcgtggtaaataacccaaccggcagaaaacgccccgctgaaaagtaa

SEQ ID NO: 706323 - DNA, 75 bp, synthetic construct
  source 1..75: mol_type = other DNA
ggcacttgatgcgggttataccaacaacgagctgtacaccagtctgaacgtgggcaccaccgccgaactgaacag

SEQ ID NO: 706324 - DNA, 75 bp, synthetic construct
  source 1..75: mol_type = other DNA
tggttgatttaggacgaggttataatttttctaacgctggcgttattaatgttcagggcgataatgcggtgggca

SEQ ID NO: 706325 - DNA, 75 bp, synthetic construct
  source 1..75: mol_type = other DNA
acggaaaatgatggtaaagcctttcctcagtcagcaggtgttgcgttaccagtacaggaagctgcaacacaggaa

SEQ ID NO: 706326 - DNA, 75 bp, synthetic construct
  source 1..75: mol_type = other DNA
tgagaatcgccagattgtcgcggataacgcaaaaacacgcgtacccatgacgattggcgcactctggacggctta

SEQ ID NO: 706327 - DNA, 75 bp, synthetic construct
  source 1..75: mol_type = other DNA
ctgtcggcacggcgacggttgtcggagtggcaacggctgttggtgcagcgacgttggcagtagttgcagcaaatg

SEQ ID NO: 706328 - DNA, 75 bp, synthetic construct
  source 1..75: mol_type = other DNA
cgttgatggtcagggctcgaccggcacggaaatcgcgggtaacaacgcggtggtgaatcaggacggtacgctgga

SEQ ID NO: 706329 - DNA, 75 bp, synthetic construct
  source 1..75: mol_type = other DNA
tgatgatgcgacggccaacaacagcggcaataccaccgtagacggtcagggttcgaccggaactgaaatcgcggg

SEQ ID NO: 706330 - DNA, 75 bp, synthetic construct
  source 1..75: mol_type = other DNA
acggaaactgatggtaaagcctttcctcagcctgcatgtgttgttttaccagtacaggaggctgcaatacaggaa

SEQ ID NO: 706331 - DNA, 75 bp, synthetic construct
  source 1..75: mol_type = other DNA
ccgcgccatcctgcttgctatcgaggaaggtgccgacatccagttcgtgcaggtcgtagagcacaagggcgatga

SEQ ID NO: 706332 - DNA, 75 bp, synthetic construct
  source 1..75: mol_type = other DNA
cgcgatgtgtgacctgaaaatattcacctggctgggttgggccattccgtgtggagaaccaacaaatattcgccc

SEQ ID NO: 706333 - DNA, 75 bp, synthetic construct
  source 1..75: mol_type = other DNA
tgccccggtttattaatgaccagatcgcactgactgataatggtgaacaatatgaaattgcctgcagcatggtgg

SEQ ID NO: 706334 - DNA, 75 bp, synthetic construct
  source 1..75: mol_type = other DNA
agcaaccacgaccggcgcaaccacaactgcagcgaccaccaccggcacagttacaactgctgcaaccactggcgg

SEQ ID NO: 706335 - DNA, 75 bp, synthetic construct
  source 1..75: mol_type = other DNA
atggatgaggctgaaataatactcaaagaaaaaaaacgtcatattctttttatggggcgcttagttaaagaaaaa

SEQ ID NO: 706336 - DNA, 75 bp, synthetic construct
  source 1..75: mol_type = other DNA
gcagaacggcgatcctagcaagccagttattgctgctgggcaaacatattttgcaatacagaccagacggcaaga

SEQ ID NO: 706337 - DNA, 75 bp, synthetic construct
  source 1..75: mol_type = other DNA
agccaggaaagtgcgttgcaggtagatgcattccactggaaagaagacggtatcagcgataaaggcgtgatgctg

SEQ ID NO: 706338 - DNA, 75 bp, synthetic construct
  source 1..75: mol_type = other DNA
gaaacccgcgacgaaccgttcgtcagcatggaaggcaaacgcgtggtggtacttggcggtggcgataccgcgatg

SEQ ID NO: 706339 - DNA, 75 bp, synthetic construct
  source 1..75: mol_type = other DNA
caaattcaacgtccagccgctgggtattgaagtgaatggcaacggtaaagtcagcggcgtgaaaatggtgcgcac

SEQ ID NO: 706340 - DNA, 75 bp, synthetic construct
  source 1..75: mol_type = other DNA
tgggtattgaattcaaactcaataccgaagtgggccgcgacgtacagctggacgatctgctgagtgattacgatg

SEQ ID NO: 706341 - DNA, 75 bp, synthetic construct
  source 1..75: mol_type = other DNA
cgccaacaccaaacagttaatgggctttggtgaaacccgcgacgaaccgttcgtcagcatggaaggcaaacgcgt

SEQ ID NO: 706342 - DNA, 75 bp, synthetic construct
  source 1..75: mol_type = other DNA
gaccgtctgtgcgaaggttcctgcaccctgaacgatgagttcggtgcggtgaccatcggcaacattgagcgttat

SEQ ID NO: 706343 - DNA, 75 bp, synthetic construct
  source 1..75: mol_type = other DNA
ttctcagggccgtatcatcgccccggaaggtaacgaaaacgccttccagaccagtaacccgaaaatctttgccgg

SEQ ID NO: 706344 - DNA, 75 bp, synthetic construct
  source 1..75: mol_type = other DNA
ggccagtgtcgtgaacacaggcactatcactacgaaagtggcggaacaagagagcgtaatcaaccttggagcgtc

SEQ ID NO: 706345 - DNA, 75 bp, synthetic construct
  source 1..75: mol_type = other DNA
tcggtgcggatgccacgatcaacatgcaggttgatacttacgagcgttatgctatgtcagccgatcacctcattg

SEQ ID NO: 706346 - DNA, 75 bp, synthetic construct
  source 1..75: mol_type = other DNA
gtaatactttccgtctgaatggcggtattcaactggttggtgaggcgaacaagctaactgacggttccactattg

SEQ ID NO: 706347 - DNA, 75 bp, synthetic construct
  source 1..75: mol_type = other DNA
gcatggaaggcaaacgcgtggtagtacttggcggtggcgataccgcgatggactgcgtgcgcacgtctgtacgcc

SEQ ID NO: 706348 - DNA, 75 bp, synthetic construct
  source 1..75: mol_type = other DNA
aacgaagacgccgatggcgtgtacgcagcgctgccgttccttatcgccaacaccaaacagttaatgggctttggt

SEQ ID NO: 706349 - DNA, 75 bp, synthetic construct
  source 1..75: mol_type = other DNA
tcaacattgacgatggtcagagtggcggtggtttcaacagcctggcgacgatgggtgtgaaatacagtagccagg

SEQ ID NO: 706350 - DNA, 75 bp, synthetic construct
  source 1..75: mol_type = other DNA
gaaaagctcctcacttacggctgacaccaccatgacctggtatggacacaccactgcctggtcgctgtgggggaa

SEQ ID NO: 706351 - DNA, 75 bp, synthetic construct
  source 1..75: mol_type = other DNA
tccgaatatacaaattcattcacgaatgttacctttattgatagtaaatttgacagaacttcaatagcattccgt

SEQ ID NO: 706352 - DNA, 75 bp, synthetic construct
  source 1..75: mol_type = other DNA
tttattaacaaaatgtgggatggctccgtattgtctgtggacagaaagaatgaacccgaacagatgattgaaaat

SEQ ID NO: 706353 - DNA, 75 bp, synthetic construct
  source 1..75: mol_type = other DNA
ggagaacgaaaaaccgcagtggacaaattattaatggagcccctgtaccagcaggagatgcagttatattccaga

SEQ ID NO: 706354 - DNA, 75 bp, synthetic construct
  source 1..75: mol_type = other DNA
ctggctaccggttgaagaggatgggcgattacatgatccagtgcttcgtgagaattttgttgaaagagtttttgc

SEQ ID NO: 706355 - DNA, 75 bp, synthetic construct
  source 1..75: mol_type = other DNA
gcttcagttgttggcgcatagccaggcaggctataaagatatgggaccatttgtggctgcaatacacgagtgggc

SEQ ID NO: 706356 - DNA, 75 bp, synthetic construct
  source 1..75: mol_type = other DNA
tgactctgctgaagcattatctgggtgagtatcctaatgattacttgcttacacagaattacttcgatccctatc

SEQ ID NO: 706357 - DNA, 75 bp, synthetic construct
  source 1..75: mol_type = other DNA
agtgccgcggagaatgcccgccccgtgtcaggaaaaattatattctccagtgtggccgggccggttcgagaaaca

SEQ ID NO: 706358 - DNA, 75 bp, synthetic construct
  source 1..75: mol_type = other DNA
agggacagtggttttcttgcccgttgtcttatcagtaaacctgcaaccacgcaggggaaacgctttattaacgga

SEQ ID NO: 706359 - DNA, 75 bp, synthetic construct
  source 1..75: mol_type = other DNA
ttttttcctgacgcttgccgagtccggagaacgaaaaaccgcagtggacaaattattaatgaagcccctgtacca

SEQ ID NO: 706360 - DNA, 75 bp, synthetic construct
  source 1..75: mol_type = other DNA
ttccgaaataaacaatatcacgctggataaactgaatgcgtgctacagtcagaaactgataagatggcatgagca

SEQ ID NO: 706361 - DNA, 75 bp, synthetic construct
  source 1..75: mol_type = other DNA
aaacagaaaacattgcaagaattgcagcgttatttcagtatttcagctatggtgaagggaaaatctctgccgata

SEQ ID NO: 706362 - DNA, 75 bp, synthetic construct
  source 1..75: mol_type = other DNA
ttgggcttgtggcagcgtctgccctgggcgctgtttcacttgtctgccagaatctgattgatgtctgcagactga

SEQ ID NO: 706363 - DNA, 75 bp, synthetic construct
  source 1..75: mol_type = other DNA
tcagcggatgtttaaccggctcagccgtgcgattcgacggcgggcataagcgtatgggctttgtgatggatgagc

SEQ ID NO: 706364 - DNA, 75 bp, synthetic construct
  source 1..75: mol_type = other DNA
gaagaaagatcttgatgcaatttctggcgcatcaattgacgatcttggcttcatgacaggtattacaggttcttc

SEQ ID NO: 706365 - DNA, 75 bp, synthetic construct
  source 1..75: mol_type = other DNA
gctactgctcggagaggtcaggatttagcgatgcagagagcatcaatgaaaggggctgttggtaataatgagcgc

SEQ ID NO: 706366 - DNA, 75 bp, synthetic construct
  source 1..75: mol_type = other DNA
gtattgcgggtgtttttcagcaggaaaagcaggctcagcggcagaaagaatttcagcaggcatacgctaatgctt

SEQ ID NO: 706367 - DNA, 75 bp, synthetic construct
  source 1..75: mol_type = other DNA
taattctttaagaatattgccggaaacagaagttggagagcttcatttatggctattgggctttatcgcggctgt

SEQ ID NO: 706368 - DNA, 75 bp, synthetic construct
  source 1..75: mol_type = other DNA
acgaccattccttcagtctgctgtttaattctttaagaatattgccgcaaacagaagttggagagcttcatttat

SEQ ID NO: 706369 - DNA, 75 bp, synthetic construct
  source 1..75: mol_type = other DNA
cgtcaactcaaacgctccgaacgtaaatgacatcggcaatacgcttcagcttatcaggcagaacaatgatattga

SEQ ID NO: 706370 - DNA, 75 bp, synthetic construct
  source 1..75: mol_type = other DNA
cgattgactacttcaatgttcaggacaagatggttggtcgggatattgagcgtggcgagttggcagagacgattc

SEQ ID NO: 706371 - DNA, 75 bp, synthetic construct
  source 1..75: mol_type = other DNA
aacgaggggaatatggttcgcgttcctgctggctctattgccgctccggctacatcggcagcaagcgcgcagaat

SEQ ID NO: 706372 - DNA, 75 bp, synthetic construct
  source 1..75: mol_type = other DNA
cggctgcacgatccgctgctgcgggagaattttgtcgagcgcgtcttcgccctgcatgaactcaacgccctgcgc

SEQ ID NO: 706373 - DNA, 75 bp, synthetic construct
  source 1..75: mol_type = other DNA
acaaagtagatgttggtaaaaccagtcagcttcaaacccagcaggcacaacaaccatcggctaatgccggattct

SEQ ID NO: 706374 - DNA, 75 bp, synthetic construct
  source 1..75: mol_type = other DNA
catcttctcctgaaacaatgggagcatggcttcagaacaacgctgcagacctgcaacgtgtcggtctaagccctc

SEQ ID NO: 706375 - DNA, 75 bp, synthetic construct
  source 1..75: mol_type = other DNA
gtgctgatgttcgcagcagattaacaggaaaagagcagcgccagttatataactcagcacaacggattcagggca

SEQ ID NO: 706376 - DNA, 75 bp, synthetic construct
  source 1..75: mol_type = other DNA
cagagcacgcagacaggctcaacgtgaacaggcaatgcaagagcagcgactggcgcgaaaaattgcgctaaagct

SEQ ID NO: 706377 - DNA, 75 bp, synthetic construct
  source 1..75: mol_type = other DNA
gcagtctgcccagcaaacgctgaacgaccagcaagagagcgatatcgacagcgataaagtggcgcaaatgcaggc

SEQ ID NO: 706378 - DNA, 75 bp, synthetic construct
  source 1..75: mol_type = other DNA
caccgaaacacaagccgatgacctgattttgccatcgctgcatctggcaaaccgcgaactgcgccgggcgaaaaa

SEQ ID NO: 706379 - DNA, 75 bp, synthetic construct
  source 1..75: mol_type = other DNA
ttgaaaaaccggcgcgtggtattcaacataaaaggtaatcattaccgtttaattgttgcaattgcgtatcagcga

SEQ ID NO: 706380 - DNA, 75 bp, synthetic construct
  source 1..75: mol_type = other DNA
cgcgatgatcttgaaattgagtggtcgttccctaaaccgacacacagttatgatgcactcgtttatgatcagtgg

SEQ ID NO: 706381 - DNA, 75 bp, synthetic construct
  source 1..75: mol_type = other DNA
cgtgatgatcttgaaattgagtggtcattccctaaaccgacacacagttatgatgcacttatttatgatcagtgg

SEQ ID NO: 706382 - DNA, 75 bp, synthetic construct
  source 1..75: mol_type = other DNA
ggacgccttatttacacaattggctcggagctacagcgatacaccattatcgccgggttacaggataaatacctg

SEQ ID NO: 706383 - DNA, 75 bp, synthetic construct
  source 1..75: mol_type = other DNA
ggattaataacgctactggcgctgtttcgatggggcgtggccttaatgtttcaggggagacgctttcagaccgtt

SEQ ID NO: 706384 - DNA, 75 bp, synthetic construct
  source 1..75: mol_type = other DNA
taactatggggcatggtctggatgttacaggagatatatttacaaaccgttttttaattaatagcagtacaggca

SEQ ID NO: 706385 - DNA, 75 bp, synthetic construct
  source 1..75: mol_type = other DNA
ctattgcatgcatttgtaaaaaagacacagaaaacaccagtaaaggctatagaaatcgccagaactcgcctgaag

SEQ ID NO: 706386 - DNA, 75 bp, synthetic construct
  source 1..75: mol_type = other DNA
ttggcggagggctttttgaactgagagtcggggataaaaatatcgcaaggacactgtacgcttatgcaacgggta

SEQ ID NO: 706387 - DNA, 75 bp, synthetic construct
  source 1..75: mol_type = other DNA
aatctatgtgggggtgaaagatgtaggaatgtcagtagctcgcgttaaccagcgtgtaagccttggtggtcataa

SEQ ID NO: 706388 - DNA, 75 bp, synthetic construct
  source 1..75: mol_type = other DNA
cgccacagcggcggtgtatcagaaagttgtgacactggaagataaactggtggagaaacctgtcacggggaagag

SEQ ID NO: 706389 - DNA, 75 bp, synthetic construct
  source 1..75: mol_type = other DNA
atggacccgtatgtggtggaagaagatccaggcgttaaatcagtacgcaatatctacgactactataagcaacac

SEQ ID NO: 706390 - DNA, 75 bp, synthetic construct
  source 1..75: mol_type = other DNA
aagtcgggcttatttatctcccggaaaaaaaagacaaccgggagaagctgtattacatctccgtttcatttattc

SEQ ID NO: 706391 - DNA, 75 bp, synthetic construct
  source 1..75: mol_type = other DNA
ttttgctgactgctttatttttactttctttatttatatcagcacagggacagactcaggaacctgaaagaggtg

SEQ ID NO: 706392 - DNA, 75 bp, synthetic construct
  source 1..75: mol_type = other DNA
ggcggtttacaatggcggaaccgcaattaatgatcagactggcgttattaatattaatgccgaaattggtcaggc

SEQ ID NO: 706393 - DNA, 75 bp, synthetic construct
  source 1..75: mol_type = other DNA
agtacaggaagctgcaacacaggaagatattaaaacagaaactgtggcggacattgtgcagtcgctgccatcgtt

SEQ ID NO: 706394 - DNA, 75 bp, synthetic construct
  source 1..75: mol_type = other DNA
ggatcccccgcgagggaatggagacgacacgaaagccatctgttattacagtaaagttcggtgacggatatgaac

SEQ ID NO: 706395 - DNA, 75 bp, synthetic construct
  source 1..75: mol_type = other DNA
agcgaggatctcggtgcaggtacgcatgttgaagtcattgcgatagaagggataaccctacatatccgagccgtc

SEQ ID NO: 706396 - DNA, 75 bp, synthetic construct
  source 1..75: mol_type = other DNA
taatatgcgcacttcgtgattttctggtttccggatatacgcgaagggaagtctgtgacaagtacaatgtttcgc

SEQ ID NO: 706397 - DNA, 75 bp, synthetic construct
  source 1..75: mol_type = other DNA
cgatccggtcaaggctatccactacccacaaacctcgctgccgcagcaaatcatcgccgccctgcgcgacctgct

SEQ ID NO: 706398 - DNA, 75 bp, synthetic construct
  source 1..75: mol_type = other DNA
aggacagtcgtgttttttatttcacggtttataacgacacagacaacgaatatatcatcacagcacgggttatca

SEQ ID NO: 706399 - DNA, 75 bp, synthetic construct
  source 1..75: mol_type = other DNA
agatggccgattttaattcttcatctcaatcctcttcacaacaagatcaaaaaagtgatgaagagacaaaaaaaa

SEQ ID NO: 706400 - DNA, 75 bp, synthetic construct
  source 1..75: mol_type = other DNA
aaccacatttttggatatcgtgaatatattgagatcgctatttccaaaagagatggtctattttaattcttcaac

SEQ ID NO: 706401 - DNA, 75 bp, synthetic construct
  source 1..75: mol_type = other DNA
ctccagaaacgggcggattctggatccgggaaattggtgtgtttgatgagcacggcgatttaatcgcagtaggca

SEQ ID NO: 706402 - DNA, 75 bp, synthetic construct
  source 1..75: mol_type = other DNA
ctgacggtaaaaggcaccgtgcaactcagcagcgctactaacagcacgtcagaaacgcaggctgccacaccaaaa

SEQ ID NO: 706403 - DNA, 75 bp, synthetic construct
  source 1..75: mol_type = other DNA
tgatatcagtcgtgaagaagtgctgaacgaactatgggaactgaaaaaggctggttttgttgataaaagcgcgta

SEQ ID NO: 706404 - DNA, 75 bp, synthetic construct
  source 1..75: mol_type = other DNA
gtcgcgaaaatttcggagagcgatttaacagcgacgattgagcaacgtggaccacaaacggcggatgaactggct

SEQ ID NO: 706405 - DNA, 75 bp, synthetic construct
  source 1..75: mol_type = other DNA
taaggccattcaacatcaacttaagaacaggagttgtgtctgttggtaatggtgccaggattgatggcgggctgg

SEQ ID NO: 706406 - DNA, 75 bp, synthetic construct
  source 1..75: mol_type = other DNA
ctttaaacagtcctgcgctgaccggaacgccaacaacgccaactgcgccaaaagggactaataatactcagatcg

SEQ ID NO: 706407 - DNA, 75 bp, synthetic construct
  source 1..75: mol_type = other DNA
ctgacgaaggatagttatcctgtcactatcggcgcaggtggggccggcggcgttagtgcgacgaacggcctcaag

SEQ ID NO: 706408 - DNA, 75 bp, synthetic construct
  source 1..75: mol_type = other DNA
ttttcatcgggtgcatccggcacgttaatgctgggtgatatgtactgtggaacagtggcatacggaaaaaataac

SEQ ID NO: 706409 - DNA, 75 bp, synthetic construct
  source 1..75: mol_type = other DNA
cctgacggagatatcccatttactgaaggagagataatttttgcaacggagttatataaccaacccacaacctcc

SEQ ID NO: 706410 - DNA, 75 bp, synthetic construct
  source 1..75: mol_type = other DNA
tgtctcacagagttttatgacccaaccaggagggaacactcccttcacaaagggtgaactgactttcacagcgga

SEQ ID NO: 706411 - DNA, 75 bp, synthetic construct
  source 1..75: mol_type = other DNA
agggatagttcagctcagtagcgccactaacagcacatctgaaacgctggctgcgacgccaaaagcggttaaggc

SEQ ID NO: 706412 - DNA, 75 bp, synthetic construct
  source 1..75: mol_type = other DNA
atcgcaagcacggctttcgttatggctgcgattgccgcacttgtagattcgtcccctgatgcactgaacacgctg

SEQ ID NO: 706413 - DNA, 75 bp, synthetic construct
  source 1..75: mol_type = other DNA
tgacaaaagtcggacgggatattctggctaaagcgaccgttactgccgttatcgaatacctcggtttgcaggaaa

SEQ ID NO: 706414 - DNA, 75 bp, synthetic construct
  source 1..75: mol_type = other DNA
tgagggagaaaatggtgatatagggccactacgcccctttacgcttaatcttagaactggtcggataagcatggg

SEQ ID NO: 706415 - DNA, 75 bp, synthetic construct
  source 1..75: mol_type = other DNA
cgggagctgaacaagcaccgggatattgttcgacagattactgattcttcccgctgtgttgcatcggaaaagtga

SEQ ID NO: 706416 - DNA, 75 bp, synthetic construct
  source 1..75: mol_type = other DNA
tgcgccgcgctgcgggagctgaacaagcaccgggatattcttcgtgatattaccgcgaccggagagctgcagcgg

SEQ ID NO: 706417 - DNA, 75 bp, synthetic construct
  source 1..75: mol_type = other DNA
gccactttgacggcgctggcggggcttgctactgcggcagacaggtttccgtattttacggggaatgatgttgcc

SEQ ID NO: 706418 - DNA, 75 bp, synthetic construct
  source 1..75: mol_type = other DNA
gttgatggcgatgatgaagctatcttcaggccgatacaaaaatacatcaatggcatatggtataacgtcgcacag

SEQ ID NO: 706419 - DNA, 75 bp, synthetic construct
  source 1..75: mol_type = other DNA
aatgatgccgatggtgacactgattcatacatgtggtttgaaacaggggataacggcaatgaatatttcaaatgg

SEQ ID NO: 706420 - DNA, 75 bp, synthetic construct
  source 1..75: mol_type = other DNA
acgaagaatattacctttaatttatggggtgcttccacccgtccagtggttgcagaattaggcgatgaggccgga

SEQ ID NO: 706421 - DNA, 75 bp, synthetic construct
  source 1..75: mol_type = other DNA
tgcagagttaggcgatgaggccggatggcatttctatagccagcgaaatacagataactcggtaatatttgctgt

SEQ ID NO: 706422 - DNA, 75 bp, synthetic construct
  source 1..75: mol_type = other DNA
tgactgggcgaagattggatttaaaaatgatgccgatggtgacactgattcatacatgtggtttgaaacggggga

SEQ ID NO: 706423 - DNA, 75 bp, synthetic construct
  source 1..75: mol_type = other DNA
ctgaacacgctaaacgagctggcggcggcgctgggcaacgacccgaattttgcgaccaccatgactaacgcgctt

SEQ ID NO: 706424 - DNA, 75 bp, synthetic construct
  source 1..75: mol_type = other DNA
cgcactgaatacgctgaacgagctggcggcggcgctgggcaatgacccgaattttgctaccaccatgactaatgc

SEQ ID NO: 706425 - DNA, 75 bp, synthetic construct
  source 1..75: mol_type = other DNA
tggcctgtacgatgatgcgggaacgttaattgccgtggcgaacatggccgaaagttataagccagcccttgccga

SEQ ID NO: 706426 - DNA, 75 bp, synthetic construct
  source 1..75: mol_type = other DNA
gaaacgctggccgcaacaccaaaggctgttaaggcagcgtatgatcttgcggccggaaaggctccgtccaatcac

SEQ ID NO: 706427 - DNA, 75 bp, synthetic construct
  source 1..75: mol_type = other DNA
ttctcgacagcggaagtacgacaatgcttatcgccgaaggattaatgaccgccaaaaatatcacggtgattacca

SEQ ID NO: 706428 - DNA, 75 bp, synthetic construct
  source 1..75: mol_type = other DNA
tattatggttgtcggacaaacctgtgcggggaaagcaactctgactgcagagttaatttctgctgttgtggggaa

SEQ ID NO: 706429 - DNA, 75 bp, synthetic construct
  source 1..75: mol_type = other DNA
agtcgtgaagaggctgtcaacgagctgtgggaactcaaaagaaatggcgtcgttgataaaactggtcacacctgg

SEQ ID NO: 706430 - DNA, 75 bp, synthetic construct
  source 1..75: mol_type = other DNA
catctctgaagttgacgagaagtcctggcgcgtgcgcgttcgcagcggcgaactggaaacaggctggctgcgctg

SEQ ID NO: 706431 - DNA, 75 bp, synthetic construct
  source 1..75: mol_type = other DNA
agcgaggatctcagtgcaggtacgcatgttgaggtgattgcgatagaagggataacgctgattatccgtgcggtc

SEQ ID NO: 706432 - DNA, 75 bp, synthetic construct
  source 1..75: mol_type = other DNA
ctgttcagctgattatcaggccctgctgaaacggcacaatctacgcgggagcatgagtgcaaaaggctgctgcta

SEQ ID NO: 706433 - DNA, 75 bp, synthetic construct
  source 1..75: mol_type = other DNA
catttgttggtgaaataaatgcgctgaccgatggttcagccattgctaacaaacggactttcttcggtaatacgc

SEQ ID NO: 706434 - DNA, 75 bp, synthetic construct
  source 1..75: mol_type = other DNA
cagcgggagccaggctaccacggtattccgtgaggcgcgcgtgttgagtaaccgcttcagcatgttggcggacgc

SEQ ID NO: 706435 - DNA, 75 bp, synthetic construct
  source 1..75: mol_type = other DNA
gcaagctcgggagcaatggtcatattgttaacaacggcactgtttatattgacgacaacgtgaatggttccggat

SEQ ID NO: 706436 - DNA, 75 bp, synthetic construct
  source 1..75: mol_type = other DNA
cgtgtggctgataacaacgttcagcaggaacagccagagcaggcagaactgccggaagaaaccaccacggcaaca

SEQ ID NO: 706437 - DNA, 75 bp, synthetic construct
  source 1..75: mol_type = other DNA
gtactgccaatcgaaaaaattgacattattattaccgatgatgccgtgtcagaggtggataaactggcattgcag

SEQ ID NO: 706438 - DNA, 75 bp, synthetic construct
  source 1..75: mol_type = other DNA
tccccgcaagcacagcagcatttacaacaattgctgcgtaccggactgccgacacgtaaacatgaaaactggaaa

SEQ ID NO: 706439 - DNA, 75 bp, synthetic construct
  source 1..75: mol_type = other DNA
gtgaacaacgacggtgacaatgccatcagcaacggcggcactggcaccagcatcaccggcaacgaagccacagcc

SEQ ID NO: 706440 - DNA, 75 bp, synthetic construct
  source 1..75: mol_type = other DNA
ttatacaccgccattgaaaacaatgtgccggtgaatttaagccaactggtaaagggacaaagcccggcagcatga

SEQ ID NO: 706441 - DNA, 75 bp, synthetic construct
  source 1..75: mol_type = other DNA
accatcgagtactacgtcgaaacgaaagacggcgaagataagcagcggattgcactggctcagttgagcagtgac

SEQ ID NO: 706442 - DNA, 75 bp, synthetic construct
  source 1..75: mol_type = other DNA
aattaaaacggcaagtacgggttctaacagcaacggaaaatggatctggaataccgacacgggtgtaattagcgg

SEQ ID NO: 706443 - DNA, 75 bp, synthetic construct
  source 1..75: mol_type = other DNA
gatcccaacccacttcatcgccagatggccgcagcgatcaaagcggtatccgattccggcgttccctgttatttc

SEQ ID NO: 706444 - DNA, 75 bp, synthetic construct
  source 1..75: mol_type = other DNA
tgaatggaatgaagatggaaggatctggattctggatttctgttgtaaaccaggctttggtcgaaaagttattga

SEQ ID NO: 706445 - DNA, 75 bp, synthetic construct
  source 1..75: mol_type = other DNA
gacaaagaactctgtttcgtcctttttgaacattttcgcatttacgtcaccctggcggatggctttaacagccac

SEQ ID NO: 706446 - DNA, 75 bp, synthetic construct
  source 1..75: mol_type = other DNA
ttgcggatgcggattcgattggcattcagatagacggcgacaaggcggtcgtgaacaacgacggtgacaatgcca

SEQ ID NO: 706447 - DNA, 75 bp, synthetic construct
  source 1..75: mol_type = other DNA
acaattaataacgcacaaagcggtgtaattaacgtttatgcagataattcctgggccttcggtggaaagaccaaa

SEQ ID NO: 706448 - DNA, 75 bp, synthetic construct
  source 1..75: mol_type = other DNA
tcagcaacagcagcagcgccgtttcgggtggagaaaatgccattgttaacgtaacccgcaccggcgattcactcg

SEQ ID NO: 706449 - DNA, 75 bp, synthetic construct
  source 1..75: mol_type = other DNA
tatgcagggaaagaaggctggagtgcgaacgccacgctggaaggtgggccgaatctgagctatgtgaaaagtcaa

SEQ ID NO: 706450 - DNA, 75 bp, synthetic construct
  source 1..75: mol_type = other DNA
aactctaccggtattaacaacggaaatattacgctttctcaatatgactattcttctccggagacatcgttctca

SEQ ID NO: 706451 - DNA, 75 bp, synthetic construct
  source 1..75: mol_type = other DNA
tcagatcgatggcgacaaggcggtcgtgaacaacgacggtgacaacgccatcagcaacggtagcaccggcacgca

SEQ ID NO: 706452 - DNA, 75 bp, synthetic construct
  source 1..75: mol_type = other DNA
gttagccagcgtcgtgtctgatggaacaacgggcagaataattaccgttaatgatgcaattatcactgaccaggg

SEQ ID NO: 706453 - DNA, 75 bp, synthetic construct
  source 1..75: mol_type = other DNA
atcgccggtaataactcgcagataagtaataaaggcaagattgttgttacggattccggttctgtgggagttctg

SEQ ID NO: 706454 - DNA, 75 bp, synthetic construct
  source 1..75: mol_type = other DNA
gttaatggcgatcgtaccacgctggacaccgttggtgatgttgaaatcgcgaatggaggcacggggagtgtgatt

SEQ ID NO: 706455 - DNA, 75 bp, synthetic construct
  source 1..75: mol_type = other DNA
tacagcgatggaacaggaataattattaactatggcaggttctgtacttttggtatttgtcagagtgcggatgaa

SEQ ID NO: 706456 - DNA, 75 bp, synthetic construct
  source 1..75: mol_type = other DNA
gttcgctgaatctggatgcgtacaactggaaagaggacggcatcagcgacaaaggcgtgatgctgaacttcaaga

SEQ ID NO: 706457 - DNA, 75 bp, synthetic construct
  source 1..75: mol_type = other DNA
gaaaacaaaggtgtgattaacacgctggatagccaggatttaatgatggctaacaatggtgcacatatcactaat

SEQ ID NO: 706458 - DNA, 75 bp, synthetic construct
  source 1..75: mol_type = other DNA
taaaaccatcgacctgagcgaaagccagacgatgagtctggagtacggtatcgctcgtctcgatggtgatggtgc

SEQ ID NO: 706459 - DNA, 75 bp, synthetic construct
  source 1..75: mol_type = other DNA
taacgtggtggagggcagcaacctgaccgatgcggatgccatcacctcaacgtccgtggtatggactgctaaagg

SEQ ID NO: 706460 - DNA, 75 bp, synthetic construct
  source 1..75: mol_type = other DNA
gcgacggcacagaagcgcactatgtggacttcaccgcgccggatgagccgacgattacgccttatagcggcggta

SEQ ID NO: 706461 - DNA, 75 bp, synthetic construct
  source 1..75: mol_type = other DNA
cgatcctgtcgtttataaaaataatgtcacctgggatcaggatgcgaagaccgtagaaattcataataccacctt

SEQ ID NO: 706462 - DNA, 75 bp, synthetic construct
  source 1..75: mol_type = other DNA
cagcactttaacgtcgatgacgatcagaagggcggcggcatcaatagcctggcaagcgtcggcgtgaagtacagc

SEQ ID NO: 706463 - DNA, 75 bp, synthetic construct
  source 1..75: mol_type = other DNA
gtctggatgtggttggcaataataacactatgacgctggccacctatgagctgaacgtcaccggacaggatgcga

SEQ ID NO: 706464 - DNA, 75 bp, synthetic construct
  source 1..75: mol_type = other DNA
ataccgatgtggcgactgatgcttcggtgaatgacatcgcgaaagcactggatgcgagttacaccaacaacgaac

SEQ ID NO: 706465 - DNA, 75 bp, synthetic construct
  source 1..75: mol_type = other DNA
attaatctcaacggagcggaaattgatagcgccgactctcattatggtgctcctgcagagaatctggaactgtta

SEQ ID NO: 706466 - DNA, 75 bp, synthetic construct
  source 1..75: mol_type = other DNA
ttcactttcaggcaagatgtccgtcaacgacgccacgaccgggctggaggtaagcggcagcggcaacagcattac
